United States Patent Application Publication US 2005/0228172 A9 - sequence listing, part 166

SEQ ID NO: 739345 - DNA, 528 bp, Homo sapiens
aatatactgtttcccatcaggcttttgtccactaattttagtatccatttataattcctatctaaaacaattactactgtggttactattgcagatggtggttttctatttccatcattcttctgtattcattaactagaattctactgtgagaaagagccttcccttcttcatttatttggatcttcaattatttgtttatatcagtatagactcatgggtatttgctttattctatgggttataatccattactatcattatttattttgttgcacaaattgctccagattttgycattggaagcctcccctgttggctcctgtgtccttctgacatattcccaagtattttgagcatttccttacattctgtcaccacaaaaagtccttatcttgtacttcgcttgtcccagctctgttaccaccattttgtccaggagctctgctttctttttttgaaagaaggagtttagaaatcaagatcttggtgtcagatatgctgattactattgggatgtcattgctt

SEQ ID NO: 739346 - DNA, 648 bp, Homo sapiens
agactctgttgttcaggcccccaacctacaatttgccttatttctcaggtcttcaattatgttctcctctgcctctgactcattcaaaagcattactgctattagaaacaaacacacttagaaagagccatcttatgtttcccctcctgctcttgcacccaacccatctcccatcttcactgcttgcaactctgagctcaatgactgaggccttcttctgtgtctggaccactggacttggtcattaatcctggtgtccttaatgtttagacagtggtttccccaaaggactctaacctagactattctgaattgctatgtctttgctgctgtgagaaagcagctctaacccatttttcatacaaccccatcccactgaccctcaacattgggtctttttgaatgaaggttgttatgtccttggctccttcatcctgtctattttttctgagttctcrcaagtgagtcataatgctcaactcctaggagtcaaggtctatgatctgcagacctaatgaaatgacaacaaatgtattgttgtttggaagcaggtttatttattatatacttgcaattgaatataagatacagacatatatatgtgttatgtatttctagaaatgcacataacatatatttgcctattgt

SEQ ID NO: 739347 - DNA, 640 bp, Homo sapiens
cttgtttgggatccagccatttcaattacaggtttcacttacttcccggaagctcgcagacttctcaccaaacagcttattgacactttccagtaaataattccctgtggatgcattgattgcagagctgagagagcggaaggatgaatggattttatctgcagcttgtgccttgaaaagaaagaaggaattctttatatataacacagaactactaaacaagatagttcttaagccatggtaatagtttttgaatacaatcatgaaatgctatattaatacatactttatttttggtacattagaggaatctttgagaaaatcatttcgataaggatgtggtacattaaaactaataaggtgaattttaatttctttccarttttgctctgtctatggattggatttaaccaggtgaccaacagcctagaagaaaggccccttctcagtttcctaaacttcaaagtctctaaggaatttttgttgtatttataagatggataagttctggggatctaatgtacagtataatgactatagttaataagattgtgttcattaatagttatagttaataaaactgtttacttgaaatttgtgaagaatatattttttaagtgtcctcactatacatacacac

SEQ ID NO: 739348 - DNA, 640 bp, Homo sapiens
cttgtttgggatccagccatttcaattacaggtttcacttacttcccggaagctcgcagacttctcaccaaacagcttattgacactttccagtaaataattccctgtggatgcattgattgcagagctgagagagcggaaggatgaatggattttatctgcagcttgtgccttgaaaagaaagaaggaattctttatatataacacagaactactaaacaagatagttcttaagccatggtaatagtttttgaatacaatcatgaaatgctatattaatacatactttatttttggtacattagaggaatctttgagaaaatcatttcgataaggatgtggtacattaaaactaataaggtgaattttaatttctttccaattttgctstgtctatggattggatttaaccaggtgaccaacagcctagaagaaaggccccttctcagtttcctaaacttcaaagtctctaaggaatttttgttgtatttataagatggataagttctggggatctaatgtacagtataatgactatagttaataagattgtgttcattaatagttatagttaataaaactgtttacttgaaatttgtgaagaatatattttttaagtgtcctcactatacatacacac

SEQ ID NO: 739349 - DNA, 640 bp, Homo sapiens
cttgtttgggatccagccatttcaattacaggtttcacttacttcccggaagctcgcagacttctcaccaaacagcttattgacactttccagtaaataattccctgtggatgcattgattgcagagctgagagagcggaaggatgaatggattttatctgcagcttgtgccttgaaaagaaagaaggaattctttatatataacacagaactactaaacaagatagttcttaagccatggtaatagtttttgaatacaatcatgaaatgctatattaatacatactttatttttggtacattagaggaatctttgagaaaatcatttcgataaggatgtggtacattaaaactaataaggtgaattttaatttctttccaattttgctctgtctatggattggatttaaccaggtgaccaacagcctagaagaaaggccccttctcagtttcctaaacttcaaagtctctaaggaatttttgttrtatttataagatggataagttctggggatctaatgtacagtataatgactatagttaataagattgtgttcattaatagttatagttaataaaactgtttacttgaaatttgtgaagaatatattttttaagtgtcctcactatacatacacac

SEQ ID NO: 739350 - DNA, 539 bp, Homo sapiens
ttcataaaaactccaattagattatggaaatatatgtgaaaagcaaatcaaaatgttttcttagaaaataatgccagagaatattctcatgaatttaggataagggcagtttatttataattgaaatgcacagagcaatcatcatgagcacattaaaattaagaaatcatgcttatcaaataaatagcatcaagaacktgaaaaggcaagccatacaaagataaaagatgtttgctaaatatatgtccagcaaaagattagtgggtgccagaggtcagaaaaccttttctgtaaaaggccagatagtaaataattcagactttgcaagccatacagcttctgtctcaactactaaactctgcccttgtagcatggaagtaagtgtggctgagttttaataacactgcattcaccaaaatatggcaaatcagatttggcccatagtccagagtttacccattattggtgtatagaatatataaaaggttgcttcaaaacaattaaaaaacaattaaaagactggcaacccaaaataaaga

SEQ ID NO: 739351 - DNA, 539 bp, Homo sapiens
ttcataaaaactccaattagattatggaaatatatgtgaaaagcaaatcaaaatgttttcttagaaaataatgccagagaatattctcatgaatttaggataagggcagtttatttataattgaaatgcacagagcaatcatcatgagcacattaaaattaagaaatcatgcttatcaaataaatagcatcaagaacgtgaaaaggcaagccatacaaagataaaagatgtttgctaaatatatgwccagcaaaagattagtgggtgccagaggtcagaaaaccttttctgtaaaaggccagatagtaaataattcagactttgcaagccatacagcttctgtctcaactactaaactctgcccttgtagcatggaagtaagtgtggctgagttttaataacactgcattcaccaaaatatggcaaatcagatttggcccatagtccagagtttacccattattggtgtatagaatatataaaaggttgcttcaaaacaattaaaaaacaattaaaagactggcaacccaaaataaaga

SEQ ID NO: 739352 - DNA, 539 bp, Homo sapiens
ttcataaaaactccaattagattatggaaatatatgtgaaaagcaaatcaaaatgttttcttagaaaataatgccagagaatattctcatgaatttaggataagggcagtttatttataattgaaatgcacagagcaatcatcatgagcacattaaaattaagaaatcatgcttatcaaataaatagcatcaagaacgtgaaaaggcaagccatacaaagataaaagatgtttgctaaatatatgtccagcaaaagattagtgggtgccagaggtcagaaaaccttttctgtaaaaggccagatagtaaataattcagactttgcaagccatacagcttctgtctcaactactaaactctgcccttgtagcatggaagtaagtgtggctgagttttaataayactgcattcaccaaaatatggcaaatcagatttggcccatagtccagagtttacccattattggtgtatagaatatataaaaggttgcttcaaaacaattaaaaaacaattaaaagactggcaacccaaaataaaga

SEQ ID NO: 739353 - DNA, 635 bp, Homo sapiens
cttaggggactttaggggcaggtgctggggtggatccataggcaacgaaacagaaactttgaacttgactgattgcaataggcacagagtgcatcaggccagcagcaagagaactctgtccccactcctggattagggtaaggcctcaccagagataggattacaaaagttctaaactgtgagtacgtattaagtactaaggaagaagacaaagagaaagagaagatggtaagggttaaaagcaacaaaaggagaagtcacaaggggggaaggctactccacttatcctaatgttctaagttttatattagatacttggctataaacagaagaaaataaaccttttaatgacaaaaaaattcccaactttggaaagtgctgctaaacactgtgctctagctcatagattgcatatgatttgcaagaacattggcttcagagtgagagataatttaaatgatttatttgacatgtaagtaactagrctaatgaaatcaaataaggataaggaatatactggatttccttcaggtcaggacttgtgatggcctatttttttttttcctgacatttgcttctagatactgaatctaacccttcaaagcttttgctaagatgaagcccgagtcaaagga

SEQ ID NO: 739354 - DNA, 494 bp, Homo sapiens
tataattgagtcaaagaggtctgggaaccaagaaggttgacgtttggtaaatacgcacctcaagatgaaagagaacctgcacacttctctttcctcttgaggtgcatatttaccaaagcgtgcaataagctttgcacagcagttagtctacttgcagaggggatagagaaggccaactcttcattgaacagaggatggtaaagagaggttctactgtaattaccaatatttgstgagcttctactacatatcagacagtgtgctaagtgtctgatagaacaacatcatgatacctgtattcttattaccaatttagagatttaaaaagctgaaaaatgaaatgagttactagaggccttacagacacaatgaagctgggatgcaaaggtgtgcctggctccatggagtcatgctgccttaatccagggcttcaggcaatatatttaaccatttatcttttttatatcatggtgtaatggtgtaatagcaccagg

SEQ ID NO: 739355 - DNA, 500 bp, Homo sapiens
agacactgaaagtgatgcccataatgtatcaaagggtttaaactgacttctgctagtatgagtctgtggctctgagcaatttgcatagcattgtccttcaggaacaagttccagagccaggagtagaggtgaccactttttaatagttcatccaacaatatttactgagcctgtggtgcagcagtgagtgcctcttaagatggaacatgacttcctcactttagtgcagtccccaatccagcccagcatacttattctccacttgcctgtctactataagcattttcaatgacttctgacctaagttgtattttcttcaatgyttttaaagaggtatgcttttccccaaatccttgaataatacacataaatgatgcttcatggttttatgtattcctggtattctatatacacccactgggagttcacatatctcagtttgaaggcgcagctaaaggcaattttctgtctgcacaattgactctgataagagatacatg

SEQ ID NO: 739356 - DNA, 598 bp, Homo sapiens
cccgggttcacgccattctctcgcctcagcctccagagtagctgggactacaggcacccgccaccacgcccggctaatagtttgtatttttagtagagacagagtttcaccgtgttagccaggattgtctcaatcttctgaccccgtaatccacccaccttggcctcccaaagtgctgggattacaggcgtgagccactgcgcctggctactagtatcttaataataatagttataaccaatgtctctacaggaaccatggtttttaaagcagctttaccttccagatcccattttctataagattatttgggttgaaaatgacagagagtcaattcataaccaattcattaagcaaacatggaatgccttgggtggtgtgtctgttcaggtcctccaggaagcagaagccaaaatacaattagacagtcaagagacttattggaggagttgyctgtgaagaataaaggaagcaggaggaggctgggagagcattttgactatgacccaggtctgacacctgggaaaggagacagggacaaaaggaggattggaaagaagaagcctcagactatagcgcagattaaaaaaaaaaaaaa

SEQ ID NO: 739357 - DNA, 624 bp, Homo sapiens
gctgatgactagatgttcagataaatcttattggtacctcatgctttaaaaatctggataagccttcaagaacatatttttgtatgggatggctaaactggtgtgaaaaggaaggaaattcttctgattccaagaacaagaaggaagtataaatctagtgggataagtgctaattcctaataacctatcattcctaatggcctatagcctgaagtttaaagggtcacacatacagggtcaggagacaaatcttgggtagagtctgagcaagaaagagggttggattcgagccccctgaatagagccatggtcttgaaagggcaactctttcaatgagtacaaaatttgtcccacagaaagaggcaataaggataaattatcttagccttggatgtgaacasaacaattaaaaagaagtctgcttcagataactcctcatcaaaagtctatactcacacagatttaaggctaggattcacagtacttatgtgactttaaaaaatctaaattgaaattttagttacaagttgtcccaggtcactagtgccccaagacagaagcaaacatatgtccttcttttaaagaggaaggaactctaaactcagaccacaaagaactcccaga

SEQ ID NO: 739358 - DNA, 633 bp, Homo sapiens
cctggtcacaggatcagcccctggattctgcaatactcatttgttcttataataaatcccccccacacacacaccctttttaaaattaagctaatacaagtgggtttctgttacttgtaactgaaagaacattggctaccacagcataggaaggtccacaggccaaggtaggcaaggtttgtatggtcaagttgtctacctgggcatcagggtgggactgcaactgtccatatctggtctggacctccctcctccacaaagcccraaggggttagctgttgttgccttcttacacaagtcagtcatatacatatttctcatagcaaagtttcacataataagaagtaaatacagaagtgccttagttggaagtccaagtgtaactaaagaataataaagtaaaaagtcccttatcatccttacccaatcatcaatcctacctccaagataacctttgctaatgccatactttatccaatcttagatgccatcacttgtaagacacattccagttttggaaacgttaaaaggtaacatgaggtacagtagtatgttgagtatcctttcaaatatttgtcttggcatttcacatgtccatagttttgggtaaagctattcgtttttgtcattcat

SEQ ID NO: 739359 - DNA, 622 bp, Homo sapiens
cttcaccaggcccccaaattcctcctttgcgacccgtgctcatgcctccacttctgatctgcccgtgctgttattaacattttacctccacctgctcttggccttgctctctcccaagtcacctgctgggcctatgttccctgggaactcttttcagtccttaacctcctcgccctcttgggagcgcgtggccctcttgtccrccctctctggaatttttttccttggcttccaagacggtgggcaaccattcattcatggatctgttaatatccttggagggtccatgctctctgtgttcaaggaacctacagtccaggacagaggcagatgttaatcaataagcatacaagtcactgatttacacctggagtgagtactatgaaggaagcatgtgggagttttgagaacataaaacaggacccctgcgcccaggcgggggtcaggaaggcctccctccaggagcctgtgctttgagctgaggtctgcaggaggacctagagccagctatttgggaagagtgatctagatgttgtaacagcataggcggaggccaagcatggcccatggggagggtagtgaaaggaagccacagtgactgtgatacatagtgagggaggca

SEQ ID NO: 739360 - DNA, 622 bp, Homo sapiens
cttcaccaggcccccaaattcctcctttgcgacccgtgctcatgcctccacttctgatctgcccgtgctgttattaacattttacctccacctgctcttggccttgctctctcccaagtcacctgctgggcctatgttccctgggaactcttttcagtccttaacctcctcgccctcttgggagcgcgtggccctcttgtccaccctctctggaatttttttccttggcttccaagacggtgggcaaccattcattcatggatctgttaatatccttggagggtccatgctctctgtgttcaaggaacctacagtccaggacagaggcagatgttaatcaataagcatacaagtcactgatttacacctggagtgagtactatgaaggaagcatgtgggagttttgagaacataaaacaggacccctgcgcccaggcsggggtcaggaaggcctccctccaggagcctgtgctttgagctgaggtctgcaggaggacctagagccagctatttgggaagagtgatctagatgttgtaacagcataggcggaggccaagcatggcccatggggagggtagtgaaaggaagccacagtgactgtgatacatagtgagggaggca

SEQ ID NO: 739361 - DNA, 614 bp, Homo sapiens
tttgcactggtcctctccctctgtggacccccaactagtcccctaatctaggcctcatcctctcatgcccagatattgcaatgactcttaactagttgcagggtttttttccccatatttttttctttctatgctctaaaatctatcactatattaagaagtttctctttaagctatccattctgtgtgtattccctgccaaaacttctggaaacacagctaatttcacatccctctcaattaatactaacagttgtgtttattgagcacttacagtgtacacttcacacaaataatctcctttggtcctttcaacartcctgtgaggtaggttctattatccccatgttataggcaaaaaattaaaaaataaaaaacataatgaaggcacagaaagatttagtgacatgatccaggttccatgtcttgtaagtgacagagctttgagtcctggccacgtggctccagagttgaggttctagccgtttaaacatggtgtatcttcagaacctttggtggttcccacatttgtttcctgccagcagctgttctcctttgccttgttttcaaatggaactcccgaaacaaccaggctctgaactgataaggctgtc

SEQ ID NO: 739362 - DNA, 613 bp, Homo sapiens
aattttttctcccctaatggattgggcctgcctgggcctcttcccgcagagactccagcctgatctgtcaggttcacattcagcaagcagtagtgaactgttttggctcctcaggccactcactagctgtcttgacacatcttatctcattgcaccatcacaggaatgagccagagccattgtattgaaacagaacccagctcagagaggggttgtggcctgttcaaggtcacacagaaaggacctttggttttaggtctcaatccgcctgtctccaaggcctgtgctgtaacatttgtgttccatcttgaactctgggagacttctgggccttcaacaagaccatttaaayccctcaatcatgttggaaagaacagtaaggagactgtgggatggggtgagtaagggagcaaagacacagctggcctcacacttggactcggggtcagaaggcatcgatgtgtgcattgatacaactctggtggccagggtgttgctgagcatgtcagtgtgggctctgggcgcaggcagggcccttggccccttactgcatggtcacatctgattgtatcacctccatgcttacagagccttagagaccttctgtgatttc

SEQ ID NO: 739363 - DNA, 565 bp, Homo sapiens
caacagatgcaggaaaagcatttgacaaaatccagcatcactttaaaactaaaaccctcagcaatagaagggacatatcttaatgttaaaaagccatctatgaagatcccatagccagcattatactgaatgggaaagagttgaaagcattttacctgagaactggaacaagacaaggatgcccactttcaccacttctattcaacctagtactggaagtcctagccagagcaatcagacaagagaaataaataaaggacatccaaatctgyaaagaggaagtcaaactgttcctgttcaccaatgatataatcgtatacttagaaaaccctaaatactcatccaaaaagctcctagatctgataaatgaatttagtaaagtttcaggatacaaaatcaatgtacacaaatcagtagcactgctatacaccaacaggaagcaagctgagaatcaaatcaagaactcaatgcctttaccatagctgcaaataaaataaaataaaataaaataaaataaaataaaataaaataaaataataaaatacttagaactatatctaactaa

SEQ ID NO: 739364 - DNA, 507 bp, Homo sapiens
ttgattcatggccttcatctttctttttcccaagaagtccacaaaacttcatcattttcatccaaatattgttctcaggatttatgtccctgtgtttaaggcttttcttcttcgtggtgtctgaataggttttgtaggttatgttctttgactttggaaactcttttttgtgcaagtttcttgtgctcttcatttccattcgctcaaaagaactytccaaggaaatagcagtgaaaaacaaacacaaaacagcacttgtgtgctacaaaaacccaaaagtgcaacaaatttcatattgttctaactctaaagagctcatcttgatctactgtgtctccagttaaatgaatgaatatttggattcaaaacagataaatatatatgatctgctttcagttttcctgccctacacatgacttttaaaactgttgacaatgatgctttattcagtgcaacaagcaggagagtttggctctgaacagggagaactttgtaaaaattagtgct

SEQ ID NO: 739365 - DNA, 507 bp, Homo sapiens
ttgattcatggccttcatctttctttttcccaagaagtccacaaaacttcatcattttcatccaaatattgttctcaggatttatgtccctgtgtttaaggcttttcttcttcgtggtgtctgaataggttttgtaggttatgttctttgactttggaaactcttttttgtgcaagtttcttgtgctcttcatttccattcgctcaaaagaactctccaaggaaatagcagtgaaaaacaaacacaaaacagcacttgtgtgctacaaaaacccaaaagtgcaacaaatttcatattgttytaactctaaagagctcatcttgatctactgtgtctccagttaaatgaatgaatatttggattcaaaacagataaatatatatgatctgctttcagttttcctgccctacacatgacttttaaaactgttgacaatgatgctttattcagtgcaacaagcaggagagtttggctctgaacagggagaactttgtaaaaattagtgct

SEQ ID NO: 739366 - DNA, 608 bp, Homo sapiens
agcaaaaaggatcttttggagaactagaagttgcaggctttctaaccacaaaccacactcttcctatgcccagcattatttccagtgttagccatttcatttgaaagggcttccctagactaaataacatttactgaaattccgatgattcctatkgtgacaaggagcctctagtgttctcaaaaattcttggtagcctaaaacctaattttaataagtataaataaaattttagagatcacacacacatgcacacacacacaatgtctcgaccattatgaaaacagaactccagaacttctcattaataaaaacaaacctcattatttcaagtagagagtagctaactatcatgtttttaaaaattgctgtttctctgaaatatgtccagaggatttcatatccaccctcaggcaaatcatcctagtagcttttctgtaaagataattatcctttttccataccaggtatgtccgtgtgcttggagaaattgtaattccagttttaaaggactgccatgtgctaatctgaggattaaagtcattcctttccaatgtgtaaaaatgaggaggataaattgatgaaaatgcacactgcaaattcccagt

SEQ ID NO: 739367 - DNA, 597 bp, Homo sapiens
ctagaagtctgaaatttccagggctgttcttcccctggggttctaggagacaatcttttccttgcctcttcagctcctggtggctgtcccagcattcctgggcttgtggccacatcactccaatctctgagtctctttcacatcatgttctctgctttgtatctatatattctgctcttctgtatgccccaaatgtccctctgtctttctctgataaggacwcttgccatgagatctagagttcaccaagataattcaggtttatcaattcatttcatgatctttaacttaatcacatgtgaaaagactcttttttatttttatgtatttagggggtacaagtgtagatttctctctctctctctcttttattttattttttttttgagacggagtttttgctgttgttgtccaggttggagtgcaatggcatgatcttggctcactgtaacctctgtctcccaggttcaagcgattcttttgcctcagcctcctgagtagctgggattacaggcacccgccaccacacccggctaattttttgtatttttagtagagatgggttttcatcatgttggccatgctggtcttgaactc

SEQ ID NO: 739368 - DNA, 568 bp, Homo sapiens
aagatattatgctttatttttatttctaaaaatttgataagtcttttgaaacatgtacctaaaattggctatcttcttgcccacctaacatccattcagttgcctgtggatgctgaactcaagaaatactagtctaaagttcctataaaagactcaagaaacgtggccacatctttgttccagaattctaagatgtaggcaaactgtttgtcttccagcaacttgccatccttcttctgtatataattgttttttgtattttctttcctttctttctttcttctatttcctttggctgtggttgtttaccatggtttgactttgtaatggaatgtctccttttgccctattccattacagctctctgattcagacggggtcaatcccatcaggagcctcagctctccatccatgaagccacragaaccgaaacttcaggaacgcatgatctgctatgatgccgtacgactgcttggaatacacctctccccgcccagtgctgatttttcactgtaggatgctgtgggtgtctttcatgagcaaaggtgataaggagggatagtgtgtt

SEQ ID NO: 739369 - DNA, 629 bp, Homo sapiens
agcatcagagggagcctgcaaggctggaggagggcaaaggaactcgctccttcctccctgcttcctattcctagcagcttatcccagcaacagtttctcacggcagctggccccaacagcagttaattgtagttttcaattttccccccattctcccagagccagcctcattgcactccctcagagagatcagcagcaccagccycctcctcagaggttcaggtcctagctccgcagggccccttctccaagctcataggttctgataaccccaaggaagtggttaacccgaagtataaccttgaacagtggttctcaaattgaacccatctggaggcttgtaaaaacacagatgtgggtcccaccttcagagtttctagtcagaatttgcatatctaatgagatcccaggtgatgctaatgcagctggtctgggaccacactttgagatccactggtgcagacctggaggggggagctgcttcctgcagttactcccaggtcgtccatgacctgtttaacccattcccagtgctaaatttcctctgttaaaataactggtatggtttttgttttcctgactggactctgcctgtttcagaggccaaggcagattcacctcctacagag

SEQ ID NO: 739370 - DNA, 582 bp, Homo sapiens
aacactggttatgctcacaagggtgctttcttgctcatggccatcctgtcaggcagcctctcatgtgttttccattcagagatgttgggtcacaccaccagtaagttggcagagctgggatttgaacccagagtgtctgtgtccaatggcatgctctttccagcctctccaaaccccctcctggtgtggcagtttaagtgccctgcatttttccaacaaagctgcttcctgagctccctgtgtgtggtcaagctgtctgtgaaggctccattccarccgcccacctcgctctgaacctgtctcatgttttgagggtaatctgcaggtaaattctctggagagcgggtgacagagaaggactgagccgcagctgcctccctgggcaggactgagaactgacagtgtctcaaagattccctccctccccacaaacaccacagcagcgattccacaggcaaaattatagccagatcaaggacagcaactggggattaaaaactttaaacccattaggtttgctttcagcatttgatcccaaagccaaagcttccccagggacccacgttttggttacatgagtca

SEQ ID NO: 739371 - DNA, 640 bp, Homo sapiens
aaaactaaattaaaacaaaatgccgccatcaccagtgctaacaaaaaatccttcaagattgaaaatttgaacctgctgaacaaattcggaagctgctttttgtaaaatcaaatttcttttttagtaaaataaattatagcttattttcacgtcagcattatttgagcttagagaaattgtggccaaagtttaaccaagcagggtagcttgacatgggatatatatacctgaaaaaacaggataaatataaatattctaaatttgccaggtatagtggctcatgcctgtaatcccagcactttgggaggctgaggcgggtggatcacctgaggtcaggagttcgagaacagcctggccaatatggtgaaaccccacctctactgaaaatacaaaaattagccaagggtggtggygcgtgcctgtaatcccagctactcgagaggctgagacaggataatcgcttgaacccgggaggtagaggttgcagtgagccgaggttgcgccattgcacttcagccagagcttgctgttagaaggcccttttctaaaatctactaatttcatattataatttgaattttcacttaaattagtgtgtgccagtggatctgtcctcccttgctgtcattgtatctcatca

SEQ ID NO: 739372 - DNA, 601 bp, Homo sapiens
ttgtcagtaaattgtccttacttggtccaacttggagctctctttctttgttttgctcttgcatcatcatctgaagaccctaccttggctttatcctgccagggaccggtcattccagcaagattctctcaactctgctccacagcacttttttggctcttgattacaggatttaccttgtagtattgaagttggtttattttgcccmtcttctctcactgtgtagggtgcttctcggggctagggactggacttcgatgagttttgcattgtcagcacccggcctgttcggcctgtggtgggcactcactaagtgtctctggtaccggggccggtgatgggcactcagttagcgtctctggcctgagtgttgcttggctgctttcctggtttgacactgcactttagactattgcagctaaaattaacacacatcatctgttgatgtgatgcttgcctccttttaagcttttctcaagctttcaaaatttcttcctgaagtttttccttcacagatgaaattgctcctgaattagaggtgatttactccaggcttccttgtgcttaaatgtggcaactttcaaggctgccttcatttttg

SEQ ID NO: 739373 - DNA, 627 bp, Homo sapiens
tatgttcttcaaatcatcttgaacactaatggtattccgcacacttggggaaatatgctaactgacaaatgagacagcttagaggaatgactggccagtgaacactgaaataacgctttaatatcaatcgcttcaaactttttttttttttttttttgagacagggcctcactctgttgcctaggctggagtgcagtggcacaatcccaattcactgcagcctcaacctcctagggatgaggtaatcctcccacctcagcctcctgactaactgggtctacaggcgcacgccaccatgcctggctaatttttgtattttttgtagaaatggggtttcaccacattgctcaggctggtcttgaactcctgggcttgggcgatcctccagcctcggcttcccagtgttgggattacaggygtgtgccaccgtgtctggcatgcctcaaacttttgaaagacaatttgagattgaattttcaagcatgtacctgaagtaaagataacatgtaatgatttaaaaagactctttaattattaaaaaaaaaaaaaagacactcaaagtttaagggacattttgtcatgaaacacaaagagcctggaatattcctatctgaacacagagccatt

SEQ ID NO: 739374 - DNA, 439 bp, Homo sapiens
acagctcccagcaagatcgacacagaagacaggtgatttctgcatttccaactgaggtacctggttcatctcattgggactggttggacagtgggtgcagcccatggagggcgagccgaagcagggcagggtgtcgcctcacccaggaagtgcaaggggtcaggggatttccctttcctagccaarggaagctatgagtgactatacctggaggagcaatacactccagcccaaatgctgcacttttcccactgtcttcgcaacaagcggaccaggagatcccctcctgtgcctggctcggtgggtcccacgcccacggagccttgcttgctgctagcgcagcgtctgagattgacttgggacaccggagcttggtggggggaggggtgaccgccattgctgaggcttgagtaggcggttccatgctcacagtgtaaac

SEQ ID NO: 739375 - DNA, 459 bp, Homo sapiens
ttccttctcacgagcacacaaaacacaggtgcttcctttctagttttaataacatagacctttacctggtaaagaaaactgtggctctccttctgcctttgcacgaccttaagtatgttatgtaacttatggaaaccttaattctctcaacctttaaatgactagactagaagactgctaagttatcttctgaaaataatcttcataaaatatttttgaaaattctatgttgtaattgtatgcagttttcctaaacaccagctatctttaaaatatgattgtaataataatattatgtatatattagrcagttagtatcagccagacaatatgcttagtattttatattgattaccatcacaaatttctatgaagtaactattgtgataatctttattctagagataaaaataaagatcaaaagaaatcaaaatatgctcaagttcgctctgctaataa

SEQ ID NO: 739376 - DNA, 558 bp, Homo sapiens
aggcacatctcagttggtggcaggtaagagaagagggcttgtgcaggaaaactccccttttaaaaccatcagatctcagccaagtgcggtggctcatgcctgtaatcccagcactttgggacactgaggcaggtggatcatgaggtcaggagattgagaccatcctggctaaaatggtgaaacactgtctctactaaaaatacaaaaaattagctgggcgtggtggtgggtgcctgtagtcccagctactcaggaggctgaggcaggagaatggcatgaacgcaggagatggagcttgcagtgagctgagatcatgccactgcattccagcctgggttacagaacaagactccatctcaaaaaaawtaattaaatagatacaataaatatataaataaaaccatcagatctcatgagacttattcactatcacaagaacagcatgagaaagacctgctcccatgattcaattacctcccactgggtccctcctacatcgtatgggaatttaagatgagattttggtggggacacagccaaactgtatcatagaccttt

SEQ ID NO: 739377 - DNA, 590 bp, Homo sapiens
ggaatgcttcaaatgcctatttaggagcctcaagcctggtcaccactgaccttgttacagtaggtaacaagctagtcaggtatgagcacggcaggagagggctccctcctgctcccatcaggaacgttaaatgatcatcaagtgatggtcaggcaggtattacactatttctataaaataataattggtcgcagccactgccagggaaaggcagtctcccaataaatacaaaaaacctgaaactggttactgattagtagtttcccaataagatctcaagatatgggcgagtgggctcaagcatgcgcattaagaggcaaaatggcggagtttaactgttacatgatctagagacaaytgacctgacctggaaggcaagaatgcctcaagggagcacgcatacaactccagtaaacacactgtgcttgctcccttcccaagtgctagcaggccactgtgcatgtggacagcccaccgcaagagaagaatgaggggagaaagggacacaagacccttgtagtatgccaacatacttagtatgccttaagtcaaaggtcaacccagtcacttgatctctcaagctgcccact

SEQ ID NO: 739378 - DNA, 585 bp, Homo sapiens
ctgaccatttaactgtataatgtgaactatttgattattacaaccctataagactaattaatatgtgtagggaaggctcatttaaaataaagttaggcaatatgcttagattgcctctcttttaaacataggctctattagaaagacaactttattttttaaatataaatgtgatgttgtcatatgcctacctttatgacttatcaaagattcaagtgttccaattgttttattcttgtaagagtttaattaaaatgctaaatgcaagagcaaattctgtagtgtcawaattcttaattattctatatcattaattggggaaaaaatacaaatgggaaatttcagggtttttttattacactgatgatatatatagaaaatgtacctctgaatatagtaattgtcattgaaaagtatcattagttaaatttaatagcatttattaagcttcctagattaaaaccttggaagttaataaacaattcttctacaatatctacttctaaatcacaggttttcatgaatatatcatcaaaaaatctgacaatttttcattcattggtaatttttctcataaatggagca

SEQ ID NO: 739379 - DNA, 638 bp, Homo sapiens
gatctgttaccgtagagattagcccaaaagacttctgagcttcaaagttggagccctgtcaacgtaattaatctgattttccagtacagcatgagtgaaggctggcaatttgaatggaagaaagaacctctttgaccctggaggaagaagaacatccacaaactagaaggagggaggaagacatasattgattatgtgttgatacgtgagtgctaaatgccagagacttagaaacataagcagacgctatggaggggacacaattactaatgaaattggctcatggtggatgggttaaatccatctaaattacctcactgatcatttccaattgctgctgacaaataatcacaaattccatggcttaaaataaaagctaatgatgttacagttctggagttcccaggtatgaaatcgatgtctactgggcacaaaacagtctgcaggcctgtttcttctggaggttccagcagagaatctgttcccctgcattggtcatcttctaacgctgcctgcactccttcccctctggctccttcctccatctttaaagacagcagtatagcatcttccgctctctctctgattgtgatactaacttttctgtctccttactgaacattcgaaagctcttactc

SEQ ID NO: 739380 - DNA, 607 bp, Homo sapiens
cctcttcacacatagagtcacttaatagtgtgtcaagggcttcatacataatacctcatttaatctccacagcaaccttgtggtgtgtgtattattacccctatttataaggaaactccttgtctttcccaaggttcatgagccagaatgtggtagagctataatggaaatcaaggttttaggacttctagtttggcactttttcagctagtaggagaaaaacacatctacttcatgccatgctgtggagcaagagcgggagaaggtcttcttttggttggtgggaacccatcttcctttttccttagactgcattgcctcatttgtttaaaaaggttctatgaatcaataaacctttccaaaggcaaggactatgagaaaatatcatgtggtttaggcacaaagatggatactatttacctcaagaaatttgtttaakatcccatctgaatctagcaatcctaatatttcagcccaggaatcttcttggccaagagctgtcattcttgagagctatgactatattttaattactatatggatttatatatggagcatagtgcgtccattctacttctcctccattgttacagtctgttctaattag

SEQ ID NO: 739381 - DNA, 626 bp, Homo sapiens
atagaaaaatttgctttaaacccacattttaaaatgactgcattaaattccactgttttgatctattagaatttattcagccatttcctgttagtgttgatttaggttatttccagttttccactatcataactaatgcttaaataaacatattgcaaataaaccatcgtctgcatcctggattatttctttaagccagactcctagatgaaatttattgagttagaaaacatgctttaaaaaacacttgatacatattgccacttactatgcgaacaggatgtgaaagttttcacttgtaccagtcattttaatccctgattagaatttagtcattcaaaaaaraatgccaaattgataggttaaaaaattacgtttcattatagtttttaatttgtatactttttgtttactcataaggcagaacacgattttaaatataaacacacatacataaacatacatatgtacacattttgattactcatgaggcaaaacatgttcatatatatttgtgtgtgtgtattttttcccatttgttttggcatttcccttaaacaggatgttaaaagataaagaaatagatttagtctatttttctgctagagagaggggcctcacacttc

SEQ ID NO: 739382 - DNA, 551 bp, Homo sapiens
actctgtctgttttgggaagaagtaagaaggatataatggtgagctgaatcctgaagaacatacagaagttttccaggcagaaaagagtgttccaagtagaacatgagtcacatgcgatgacatggagctgtgtgagtgcacagagcagtctgggaactaggatcattcaacatggccatagtaaagggcgaaggaagcttttgtggttaatgtgggcagagatgagcctgggtcacatcaggtttaggagtttgagccgtttatctgacaggtcactggattccactgatgaattttaagaaggatggtgatatgatcagatttgcattttggaaagcccctaggtggagagtagaatgaagccatgagagattgaaggcagrggggtcaggtgagaaggccgctgcaataattcagagaggagggcctcaagttatggcagtagtagtgcagatagagaaaaggggaaccaaaatggaactcttacgtggatcctattattttacctatgtgccaggtaccaggctttaacttcataaaatccttaaaa

SEQ ID NO: 739383 - DNA, 637 bp, Homo sapiens
ggttgggggtgattaggtcatgggggcagttttccccatgctgttctcatgacagtgagttctcacaagatctgatggtatttaaagtgtttgacggttcctccttcacaggtgctctctcatgtgctgccatgtaagaagtgcctgcttccccttctgccatgattataagtttcctggggccttcccagccatgcagaactgttagtcaattaaacttctttactttataaattatctctggcagttctttatagcagtgtaaaaatggactaatacactccctaggaatgggagcaagacaaggatgtctactctcatttctcctattcaacatattactggaagtcctagtcagagcaattaggtgtgaagaagatataaaagtaatacaaataggaaaagaagaagtagaattatctctgctagctgatgacatgatcctatacctagaaagcytaatgactgctccaaaggactcctagacctgataaatgacttcagtacagtttcaggatacaaaaataatgcacaaaaaaatcagttgcattcctatacaccagcaacactcaagctgagaaccaaatcaaacactcaatcccacttacatttgccacaaaaaatactatatctaaaa

SEQ ID NO: 739384 - DNA, 637 bp, Homo sapiens
ggttgggggtgattaggtcatgggggcagttttccccatgctgttctcatgacagtgagttctcacaagatctgatggtatttaaagtgtttgacggttcctccttcacaggtgctctctcatgtgctgccatgtaagaagtgcctgcttccccttctgccatgattataagtttcctggggccttcccagccatgcagaactgttagtcaattaaacttctttactttataaattatctctggcagttctttatagcagtgtaaaaatggactaatacactccctaggaatgggagcaagacaaggatgtctactctcatttctcctattcaacatattactggaagtcctagtcagagcaattaggtgtgaagaagatataaaagtaatacaaataggaaaagaagaagtagaattatctctgctagctgatgacatgatcctatacctagaaagcctaatgactgctccaaaggactcctagacytgataaatgacttcagtacagtttcaggatacaaaaataatgcacaaaaaaatcagttgcattcctatacaccagcaacactcaagctgagaaccaaatcaaacactcaatcccacttacatttgccacaaaaaatactatatctaaaa

SEQ ID NO: 739385 - DNA, 665 bp, Homo sapiens
taatacagcagttttttcactacagaatagtttgttacacacttattacttgacctttgttagtggggaggtctgaaagactgcgccagttcccacctgtgacccttgctggttttccctctgtctttacattggccatccctatctctttacagagccaacacacagtggggtttcctcttgctgtttcctttctcagttggcagcagagacggtggcctctgtccatgttttctgatgctctcatctcatctatgacctataaatttcagatccacacatttattcatcatgaacagtcrtctgattctcattcctgctttcccccggacaaatgatggatagaaactatactcagtccccaccacatctggctggctcttagattctgaaccaattcttggccaacctgaaggtcttttataaatctcagcctgacagccacacatttaggcctatccacaagggaaaatatcattttcagagagcaaggcaggcagaacatgaggtgtaatgttgacacaaatgggagttagggtatttaatgtttaagactcacgttttagtatggatgctgtatagatctgtaatttggacttgtttatagctatagaaatgccaggcagctgtagacttaaccttttgctatttcttggacatttcat

SEQ ID NO: 739386 - DNA, 580 bp, Homo sapiens
ggctgttaaaataattccagagacctgcagcctaaactagggggtgggagctttccttcatccccccaatgtttttgcagccacatgtgcctactccaggcagatgccgttgggaggtgcagttggtactcaacctgcactccctaggcctcagttgtctgccgcagttcttggatgctctgatgacttccagtaggctgtgatgctttccagtatctctcagcctgagggtgtccatgggccatggtagtgtgcttgatacctctcagagcaggtagaaagcaccggaggagtgacacttcatgagtgttcctcaacccgtgaggacaaataccccagcttccttgatccttggagggacaattctgaagcatattctacattatctactagaagtatcstgaaggattaaaccccaacagtccatggagagtgaccagctcattaagatatcctggattgccatcttcccttctctgtctgacttccccacttcttcacaatgcttcctgggatcactcccaaaaaaactctttgaacccaaatccttgtctcagagtctgtttttaaaggaacccga

SEQ ID NO: 739387 - DNA, 533 bp, Homo sapiens
agctgactgattcagattcgagttttcttggttctgccatcccatcttgttctaaccccaggccatttgcacatgccatttcctctgcctagaatactcctctcttccccacttcacatggctaaatttattcatcctccaggtgtcctatcacctcttctagaaagccttctctcatcctccagaccaggatagcacaatacactgcrcttcattcattcactgaatcttgaattcactcactcattcaaaaatgagtgtcatttgtttgccacagccctgttcctcagtacagtagttgcttattttattggccgtctctctgactgggtttggagcttgctgagggcagggccatgactggttcaatgttgcaccccagcattcaccaatgcctggcacagagtaggcactcagtaaattttgcctaatgaacaagtttgctctccggtcctttgaaagcctctgtgggcctgcctgacttcatttattgtagagacaactgggtgatcaggcccaggtgggatccagct

SEQ ID NO: 739388 - DNA, 554 bp, Homo sapiens
aatttaaaaaaaaaatgtttttgtagagatgaggtctcgtcttgctatgtcacccaggctggtctcaaactgctggtctcaaacccctggtctcaagccatcctcctgccttggcctcccaaagtgctgagattacaggcatgaaccmctgtacccagctaaatatttttttgatcccacgtctgtctcctctcccttggtgacttcaattacacatacattattaatagactgcttgaatttgtcccacatctcattgatgctctgttcatttaaaaaatatgttttctttgtgtgttacactttggatagtttctattactaagtctttgaatttactcattttttctttggaatatctaatctgctgttaatacacttctgtgtagttttcatctcacacattgtagtcttcatctctagaagttcaattgggtattttttatgttttctatagttctacagaacatttttttaaacctatggaatacggttagaataactgttttaatgtccttgtcagttacttctaacatctgtgtctgttctaggct

SEQ ID NO: 739389 - DNA, 635 bp, Homo sapiens
ggtgggcttttagtgtactcatcacccaaatagtgaacattgtactgaacaggtaattttcaatccttatccctgtcctccaatcccaccttttatagtctcaaatgtatattactctattctgtatgttcatgtgtacccattaccatctccaacttataagtaagaacacacggtatttgactttgttatttcacttatgataatggcctccagtttcatcatgttgctacaaaatacattattttatgttttatggcagagtagtattccatggtgtgtgtgttgggggtatgtgtgtatatatgagaaaatgtgatatatccaatcatctgtccaatggacatttaggttgattctrtatctttgctattgtgaatagtggtgtgataaacatgtaagtgcagatatcttttcgatataatgatttttttcccctttgggtatatacccagtagtgggattgctgggtcaaattatagttcaattttaagtttttggagaaatcttcatagtgtttttcatgaagttgtactaatttacattactacccacagtatataatccttcccttttctcttcaacctcaccaactcttattttctgacttttaagataatagttcttctgactta

SEQ ID NO: 739390 - DNA, 516 bp, Homo sapiens
caactaggttggtttcaggttatttttcactggagccagggagtacaaatcagatcttaaacctgcaagtcctaaaacagggtctgccttgggaaatctagggcatcaagttcttagatgataggacaatataagccaggcagtagtttcttagctaagcaccctctgagccagtaagcagttggctccatttaaataagttaaaaatagactaaccagcagttaaaattttcagcacagcaaaaagcagtgaggacaaggtttattctttgatctctaaaggtttgcttygttgagtctgataatggtgcatgacgtgaagaatgttagctatactctggtctcacattaccttggttttacttagtcatcagtgtaatttatctaagggcaacttgctgctaaaaaaagagctcagcttgaagccttctagcttacacagcaggagtttctagaaattttaccgctggtaaggaaactcttatttatggaatcagggatccttgttaacatttt

SEQ ID NO: 739391 - DNA, 622 bp, Homo sapiens
acactatcacagactgcctgggtttcactcctagctctgccatctataaaccgtgtgacttttgccaagtttttttgccttctaacctcaatatttcttttcttttcttttcttttttttttttttagacaggaactcactttgtcacccaggctggggtgcagtggtgcaaccacagctcactgtagcctcagcctccagggctgaggtgatccttcccctcagcctcccaggtagctgggactgcagatgggggggccccacgccgggctaatttgttgtattttttgtagagatggggtttcaccatgttgctcaggctggtttcagactcctgggctcaagtgatctgcccaccttggccccctcaaagtgccaggattacaggtgtgagccactgcacctggcctcaatatttcttttgtaaaatgacaatgaaaaaatatttgcctcagcagattgttttgatgattacatttraattagttaatatctgttattagttacttttaactaatttaactaataattttaactaattatcttctaatattagttaatagacctggaatataataattgctatgtaactattaagtaaaaaaaatgtaactattatggt

SEQ ID NO: 739392 - DNA, 523 bp, Homo sapiens
gacttgagaggtcaggttaagtaagaaataaaatgatttagcagtattcaccatgtatcaataaatctgatccttatgtcctttggccttagatttctgaggagtatggatgactctgggcccacatctgacatacatctagctaaaatgttgaagttatacaaatgagctgttgctataactaagataggaatgggagagcaacggctttaagggtattcttacataagcaaacaagtcattattttatactactttgtgtaattcattgactaaagtgttgaagaaaatatgaagatgtaattcacgactttartaagccactttcatttagaaaaaaatgacatatttacatggaaagaaaactggtaattaggtattaaccaataagggctaaaaaagatgatgtagccaataacagctagatgatggttagagaattgtactctgccttagctgcacattaaaataacctgaaaagcactcaaaattaatgatgctcagatcccacctccggagattc

SEQ ID NO: 739393 - DNA, 569 bp, Homo sapiens
agtaatgaattgtaaacagcaacacacactcagcacagaatatgtcccctctatacacctagaatccaccaatccttgcccctaagggtctcccgtccccagcttcacaccctaaatgtattgtgtgttaggagttgatcactaatgctacagagggtgcttctgtggtcaaaatctggacgctgcagcttgtttttccagtcatttatttcacccatgctttcgtaaaggcttattgaggctcgagtagaaacacaagaaagtgtacaaattagataaatacagtgctcagggtacataagactaattgctttttaattttctctatttgcatgaagcctgrtgagactgtcttcacagctcttgaccctaaggagccaacatatgacaagagcatttaagatggggaatcaagtttccaggcaaaatgtagccagtgccagaaaaacagaaaaatgagaattggaaattcaatgcttcctgggttgaaaatgctcatttattgtggagccctgctggtctcattaatccctcccagcctttgaggatccgtacacgccttgcctcct

SEQ ID NO: 739394 - DNA, 546 bp, Homo sapiens
gaattaaaaaagaaatatcaaaaatgtcattatttgcatgctatcattgctctcataagaaatccaagaaaggccaggcacagtgactcgttcctgtaatcccagcactttaggaggccgaggcaggtggatcacttgagctcaagagttggagaccagtctgggcaacayggcaaaaccccaactctacaaaaaatacaaaaaaaatttagctgggtacagtggcacgtgcctgtggtcccagctactcaagaggctgaggtaggagggtcgcttgggcccaggagatcgaggctgcaatgatccaagatcacatcattgcactctagcctgggtgacagagtgagactgtctcaaaaaaaaaaaaaaaaaaaaaaaatccaaaagaatttacaattaaaataaagaggattcagcagggttgctggatataagatcaacttgtaaaaactgacagtgttctcttacataccgtaataaccaacttagaaaatgtaattttttaaaaaaaaccaattacaatagcaataaacactacagggtaac

SEQ ID NO: 739395 - DNA, 638 bp, Homo sapiens
ttatgtcctgaatggtattgcctagattttcttctagggtttttatagttttgagttttacatttaagtctttaattcatcttgagttaatttttgtataaggtgtaaggtcagagtccggtttcgattttctgcatatggctagccagttttcccagcaccatttattaaatagggaatcctttctctgttgcttgtttttgtcaggcttgtcaaagatcagatggttgtggatgatgtgcagtcttatttctgagatctctattctgttccactggtatacatgtctgttttcataacagtaccatgccttgcagtatagtttsaagtcgggtagcgtgatgcctccagctttgttctttttgcttaggatgtttttggctataggggctcttttttggtttcatatgaattttaaagtagtttttcctaattctgtgaggaatgtcaatggtagtttaatgggaatatcattgagtctgtaaatgactgtgggcagtatggccattaagttgaaagcattttgtctttgaacatgacttagaaaacaggtgttagaccagtacaggtaaggattttggtaagatggcagagtaagaagtaccaggaatctgttgccccacctagacaacaaatct

SEQ ID NO: 739396 - DNA, 634 bp, Homo sapiens
gccttgatttgttgtcatgatttcaattccaaactctcaggagaagaaatctgactggcctggcttgagtcagtttgtatcctgggttcatggtaagcacatatgccagagtccatatgtttctggagatatggaatgcaatgtggaggtatggtctttgagaaagagggttcttgcaagctgattcattcaccccaaaaatgcaagtattatgatatataatggtgaagacttttattattttttttttcagtggggctgggttgtattgctccattaagatattaggggccgggcgtggtggatcacgcctgtaatcccagcactttgggaggccgagacaggcggatcacaacattaggagatcgagaccatcctggctaacatggtgaaaccccgtctctactaaaaatacaaaaaattagccgggcatggtggagggcacctgtagtcccagctactctggaggctgaggcaggagaatggcgtgaaccygggagatggagcttgcagtgagctgagacggcgccactgcactccagcctgggcgacagagcgagactccgtctcaaaaaaaaaaaaaaaagatagcatggttgcagtgttttgtcaaccaagtattgtctctcatcca

SEQ ID NO: 739397 - DNA, 618 bp, Homo sapiens
atcactaataaattttccctcactttcaaaaccactcagcctttaaaggtttgctttgaggaattagagcaaggactaaaaactagtcagttaatctggattccatttctttcttttttacctttttttttttttttttttttttttttkcccactgttctttacagggagaaacatttcaaagactaatgaagcttgctaggggtagtgattgaggaggatacatgtattccagtaattctcttctaatttaaaatcaaactatgaggaagaaattaaggaagtaattatgaaaacttctgtacttaaacttctttaatagctaccaggtaactccatggtaaggcctacctgagccaaatttcaaagcagaccaagttagtccataagggctataaagtgttttcccttctgggtatattgtattgtacaaggacaaagacatctttaaaagaatgttcagccttcactagtaaatggaaaacacattttaaggcagattttaagggtctttctggggctctaaaaatccagaacatatttgtggtctcctcctctgaccactacaaggccaactttatttaatactctgtattattttagcatagatttcccatt

SEQ ID NO: 739398 - DNA, 618 bp, Homo sapiens
atcactaataaattttccctcactttcaaaaccactcagcctttaaaggtttgctttgaggaattagagcaaggactaaaaactagtcagttaatctggattccatttctttcttttttacctttttttttttttttttttttttttttgsccactgttctttacagggagaaacatttcaaagactaatgaagcttgctaggggtagtgattgaggaggatacatgtattccagtaattctcttctaatttaaaatcaaactatgaggaagaaattaaggaagtaattatgaaaacttctgtacttaaacttctttaatagctaccaggtaactccatggtaaggcctacctgagccaaatttcaaagcagaccaagttagtccataagggctataaagtgttttcccttctgggtatattgtattgtacaaggacaaagacatctttaaaagaatgttcagccttcactagtaaatggaaaacacattttaaggcagattttaagggtctttctggggctctaaaaatccagaacatatttgtggtctcctcctctgaccactacaaggccaactttatttaatactctgtattattttagcatagatttcccatt

SEQ ID NO: 739399 - DNA, 512 bp, Homo sapiens
atctatatacgaatccttatctctattagagtcctttaaccaaccaacatatgaggtaaatacattcagtatatggtatgatatcatatcatatcttttttttttctttttctgagacagggttttgctctgttgcccaggttggagtgcagtggtgcgatcttggctcaccatttcataatatatcttaataagaccactttacatctgcttaatgctgcttgttcataaagtggtttcagctttgttatcacgtttgctcttccctcaccccagtattgtagcagcataggtctgttgtcctcaatttacagatgagaaattgagacactgagaagttatayatcttcatttgttcaacagctaggcacttttctaggtgccagatttacagtgatgaacaagacagagttcctgctcctaggatgcttactcagtagtgtgtttgtaaatttttaaaaactagctcctcaaatgtgggtcaccatgaatgtatgaattagtatattttt

SEQ ID NO: 739400 - DNA, 560 bp, Homo sapiens
tattaatttattaatcatatgagtgacttctttgctaaatcaatgaataattttcccatactggaagaatatttctcaatcttttgtgctattcacaagtaatagctatagagaatgaattattaacattttcttcatcactttcttgagtctagacaatcaacaaaacaataaatcaagccctgatttgtagtgtttgttgatttcagtggtgtaagtacttctatcacaggtaatttcaagctatcaacatgaaaycactgaactcagagttggcgaaaaaatgcagtggtacaccattacataagatttccatcatttagatataatagatacaaatatctcaagagaatagataaccataaaatgattagctttgtgtatttattttgtttttaatataacttggcctggtgcagtggctcacacctataatcccagcactttaggaggccaaggcagctcatttgagtccaagagtttgagaccagcctgagcaacatggctaaacccagtctctacaaaaaaatacaaaaattagccaggtgtgatggtgtgca

SEQ ID NO: 739401 - DNA, 564 bp, Homo sapiens
gacagggtttcgccatgttggccaggctggtcttgaactcctgacctcatgtgatccacccgcctcggcctcccaaagtgctgagattacaggcctgagcccctgtgcccagtgaaacttaatttcttaactcatgagtgctaaatagtatggatataaaaatagttgctcttttgggcattttttgaagattgctttttttctcagaagcttcattgaaatgtaactgccatgattctgtctgtacggtgggggcgaaattttaycttcctctctcttggcatagctgctaaataagttaaataattaaaaatggaagcataagcaaaagggaaaatgttgaaaagccagattgctacagctgcctccttcacgttactaaaagtttgttatcttagaatattatcgacatctgctgggttatttatttatttattttggagacagactctcattttattgcccaggctggagtgcggtggtgagatcacaactccctgcagcctcaacctcccaggctcaagcggccctcccacctcagccttccaagtagctgggactaca

SEQ ID NO: 739402 - DNA, 664 bp, Homo sapiens
caattgtgatcctttgtcctcaggatccttttaacacagccttcctagtagccacccactggagctggcacttccatttaaatcttgtggacatcttgaactagatggtggggacagaaamgggtttcagcttggtggcaactgctgattggtggtggctccttggagtattgtgacctaatgcaggcctgtatatgtgttaatctcaagtactctcagctcacattcctccctcgccactgtggcacattagctctaagccgcagttcctggtggtcgccagggacctgggggtgggggtaactgaaccagagtgcagaagcgaggccagttgcccatgggattgctgacttctctccacacaggtgtctgagagggctgaggtgggcaaggcgctgagagtccatgtcaccctcaccaacaccttaatggtggctctgagcagctgcacgatggtgctggaaggaagcggcctcatcaatgggcagatagcaaaggagtaagtgacgcttctgcccacctcccccttgctggtctcaggaaaggggtgccccatggcgtcacaggaccctcctcagtctcctgtgcagtgcctctctgcccccactttctcaccctcctcaggaaaggctgagctcagtggtggtggtgagtgggagcctct

SEQ ID NO: 739403 - DNA, 631 bp, Homo sapiens
gttcttcatagtggttacactaatttacattcccaccatcagtgtacaagggtttcctttcctccacattgccaccagcatttgacttttagaaaaggcattttaactagggtgagatcatatctcactgtagttttgatttggatttctctgatgatcaattatgttcatcaccttttcataggcttgttgccatttgtatttcttcttttgggagctatctattgaaatcttttgcccatttttaaattggattattagatttttccctatagggttgtttgagctccttatatgttctcgttatgaatcmcttgtcagatgggtttgcaaatattttctctcattctgtgagctgtctcttcactttgttgattgtttcctttgctgtgcagaaatctttttaacttgatgtgataccatttgtccatttttgctttggttacctgtgcttgtggggtatcattcaggaaatctttgcccagtccaatgtcctggagagtttctccaatgttttcttttagtaatttcatactttggagtcatagatttaagtcttcaatccattttgatttgatttttgtgtaaggcaagagagagaggtctagtttcatccttctggatatggata

SEQ ID NO: 739404 - DNA, 590 bp, Homo sapiens
ccatatttcttagaggttttgttggttccttttactcttttttctctaaacttgtcttctcactttatttcattaatttgttcttcaaccactgatacccttttgattgaatcagctattgaagcttgtgcatgcatcatgaagttcttgtgccatggttttcakctctgtcaggtcacgtaaggtcttctctacactgtttattctagttagccattcgtctaaccttttttcaaggtttttagctagcttgcttgtgatgggctcaaacatgctcctttagctcggagaagctcattactgattctttttactgatcttctgaagcctacttctgtcaactggtgaaagtcattctccacccagctttgttttgttgctgttgaggatctgcaatcctttagaggagaagaggcactctggtttttagaattttcagcttttctgctttggtttctccccatctttgtggttttatctacctttggtctttgatgttggtgacctacagatagggttttggcatagatgtcctctttgttgatgttgatgctattcctttttgtttgttagttttccttttaacaatc

SEQ ID NO: 739405 - DNA, 598 bp, Homo sapiens
cagttcaatgcatttctgtagctcctctattcccactggatccttcaactattctaagaatatgctccccccaaaattaaaatgtctctcattctgttatcttttcaatcgaccatctgatttttcttcttccctttaccatcaaagttctggtggtagaaggtggtagaggcattgaatattatatataatattgtcataatayatataacatatattaatatataacaatacaacataatgtatattaatatggaatatatcatgtaatatattaacatgtaatataatatataacaaataattataatcatatatattatatattcaatgtttctattgcctggtcccatttcccttattccatggaatctaacttttatctgctacaaaaactgttctctcaatactcacaataattaaaatacatactctctcaatacctttcattaactaaatataaagccttgttcttgtcctgcattcctctccatgagctcttcttttaaacagttattgcaatttcattatctttttaattaacatgttcattataaaacaacagaaaattcaactaagcagaaaagataaaagtcac

SEQ ID NO: 739406 - DNA, 573 bp, Homo sapiens
acttggatgatactgaagggggttcaggagattttggtttcactggaaaaaatcaaaatttatgccaagaatagtaaatgaaaaaattatacctttttcttaaaagtaaagagtttttgcttaaaaagaaaaacaaaaaaacttaattcctttttcctttaaagcagaatttgtcaaaattataattagttaaataatgctaaataagaattaaatttgtggggtagaagggtctctaatgaacactcgacttgaagttttagaataaaatgtagctgggtcagaatatcaagcccgttgtttactacctgtaaaactttggttgaattacttaacctgcatgagcttgagcttcctcagcttcagaataaaartaaacactaaggataacactaaacattttattataccagaaagcaaggaaggaatcaaagattgcttggtttatgtaaaaagaacccaggagctaaatccaaaggctcccaactatcaaaaacagaacatattgagcagcagtaagaatacttattgaaacacatatatttaactctatgaatccataatgatagtttt

SEQ ID NO: 739407 - DNA, 619 bp, Homo sapiens
tagtatttctggttctagatccttgaggaattgccacactgtctcccacaatggttaaactaatttactttcccaccaacagcgtaaaagcattcctacttttccacagcctcaccaccatctgttgtttcttgactttttaataatcaccattctgactggcataagatggtatctcattgtagttttgattttcatttctctaatgatcagtgatgttgagcttttttcatatgtttgttggctgcataaatgtcttcttttgagaagtgtctgttcataccctttgcccactttttgatgggattgtttgtttttcttgtaaatttgtttaagttccttgtagattctggatattagacctttgtcagatgggtagattacaacatttttctcccattctgtaggtcgcctgttcactctgatgatagtttattttgctgtgcagaagctctttagtttaaatagatcccatttgtcyggcttttgtttcaattgcttttggcattttcgtcatgaaatctttgtccatgccaaggtcctgaatgatattgtctaggttttcttctatggcttttatggtttgaagttttacatttaagtgtctaatccatcttga

SEQ ID NO: 739408 - DNA, 533 bp, Homo sapiens
ggggtgaggggtgagggtgattcatacctgtgagagggaggctgagattccccgagggcaggacggtggaccacagtgaccctgtgggaagaggtctggggacggatggcccatggcggcagggtgcgcagagctcctgggtgctgggccatcaggccacactgcacaggtgaaaccggctctcaacaggacatgccctcggggaagaactgaacagaaagacagatttgttgttaattttggaaggtaggggattttatcagccagtgttccattgaggataatgggttttaagcccctgctcctgtttgttgaccacgttattttgaagtctcccaagtytactagaaatattctctttttggttactggggagatagacaaaggaatttaggaaatccttaactggcacttagtactataaagaagttctttatgaaaggtctgaaatgggcatgttcagtcaaaaaatattttgtctttgcagagcttggaattctggcctggcataggttgtcagaaataagtagttt

SEQ ID NO: 739409 - DNA, 622 bp, Homo sapiens
gctggcgcctacccctcccacccaaggaatctctgcttcccgggctgtgccctcctgtgtgatctgaagtagggaagtggtatactaacttttggaaacattcagctgccaagtttcctctgctgcaggctttaaatagatccaactgagaaaggaaggtagagcttgaaccaactgccaccctctatatagagacggttgtcgcctggtctagtgtaacaaatagagttctttgttagaagaggaaagaaacttaacccctcatttcccatttctgatgatttagggacagacctgatggtttaccaaagatacacctgaagctttactatttcttgtcactctatattttttaataaaacttatttttatctttggagatgacaggcatctttgttttagggataactaatkatgcctgtagagaacatgagcatgttcacaacccccaattaatctttaacccagaatccatattgtgttttttaggctgacagttagacccagtttaattgtggatggatggtaggattccagacacttcagatgaaaatccatccagccatgcctgtggatgccccttggaaggaggttggagcttgggccactgagaaggtggata

SEQ ID NO: 739410 - DNA, 552 bp, Homo sapiens
aagggtggggggaaactgactcccatcccttcacatccaatactcaactattcattcatgggtttctgtgcctctacccacacctgtgccaggaatgctcgctgagtgctccctgtcattacaacttgctgataatgctgcaccctcattcaacatccagcctggctcctattatgcagtcagagaaatgatccctgaggaggagtctgtcatgtacatctgtgctgctgcaacacgtcactcacagtgggctgtttatgggggtcatgaagggtacagatgctggactgctgggctcccactctgattcaccacctgctagctcgygtagccataggcaagcaatttcatcctccaggacttctgcttcctccatgattaattgaggataatggtggtctactttacaacccatgtaacatactgatagtagctagtttgtagcacctaataaattttaacgaagattatcggtgtttcttgtatgcattcatttgacatttgtagtttgcctactatgtgcagaagccattgagatccttcaacctcagg

SEQ ID NO: 739411 - DNA, 551 bp, Homo sapiens
gaggacaaccagaggtcactttcaacgccatcttggttttggtgagttttggccagcttctttaccgcaacccattttatcagcaaggtcttgtgacctgtatcttctgctgaccttctatctcatctygtgactaagaatgcctaacctcctgggaatgcagcccagtaggtctcggccttattttacccagcccctgttcaagatggagtccctctggttcaaatgcctctgacggtgggggtagagggcaggtatgcaaacttccacattcaccttgcatttagatgtcgcagacctatggcacactgccagaggtgactcccagaagtggtttacaggagccagaagcaaatctccaagtcagagtgagcctgggggaagacctgaggctcttgacatgtaatcactgtagcccagcacatctgcaccactgacaggtcccctttacatagagatctctacaggttgtattattcccattctacagaggaggaaaatgaaccactgagagacacagcagctaaactcaggtcacacaactagttgac

SEQ ID NO: 739412 - DNA, 551 bp, Homo sapiens
gaggacaaccagaggtcactttcaacgccatcttggttttggtgagttttggccagcttctttaccgcaacccattttatcagcaaggtcttgtgacctgtatcttctgctgaccttctatctcatctcgtgactaagaatgcctaacctcctgggaatgcagcccagtaggtctcggccttattttacccagcccctgttcaagatggagtccctctggttcaaatgcctctgacrgtgggggtagagggcaggtatgcaaacttccacattcaccttgcatttagatgtcgcagacctatggcacactgccagaggtgactcccagaagtggtttacaggagccagaagcaaatctccaagtcagagtgagcctgggggaagacctgaggctcttgacatgtaatcactgtagcccagcacatctgcaccactgacaggtcccctttacatagagatctctacaggttgtattattcccattctacagaggaggaaaatgaaccactgagagacacagcagctaaactcaggtcacacaactagttgac

SEQ ID NO: 739413 - DNA, 596 bp, Homo sapiens
agggccctttggaggtctgtggggatgagatctgccgtctccacctggccctccctttccctgggacacaggtttgacttgggcagatatctttctaagtgcacattttctattgaaccacaactcagggacagggaaagttccaggagtctgcatctcaggagtcctccacgttgttccccattggtctctcaaagtccccttggaaatttgctcaaaatgaataatacaaagtaaaaccatcctggcgttgtcaacaggttagacttcataccttcctgttctttcaaaaaggagccgctaacaagcaccagaatctacctggcccttggacttctgaaagggaataggaagcctgtcctccttcctgcctgtgggaaacagtctcttaaaacaaacaaacaaaacgaagacaatagcctgtgacaagtagaagaayatgcaaagtgggaatcccaagcagaatgtaaccaactccgctgggagtgtccaaggaaggctttacacacaaggggtgtgactcgatttatgcttctaagcataaatgaaagtttggtgagcggaaaagaggaatatgcattccaggcaccaggaac

SEQ ID NO: 739414 - DNA, 600 bp, Homo sapiens
tctgaaaaaaatggaggtgtcgaactaacaaatctctggggagctgttctggctctaacctagtaattctgatactacagaatccaggatcccagtgtgtggtgggatcggggacctgttcagatggacatccaccctgaggccatctgagaccctttctggctgcccctgccctgctcatcaatgtctctcagaagatcttctctagcctcttggggctactccctgaacagctcaggaacctcgacagcctctgagaccagccaagttaagggtcttargacagggctgaaacaccacctctgtctcaagcttggtgctgtctaccaagagcctgactgggggacatcaaggcaaccttccctgacttcatcaaacagttccaaaagcctgcaaacaggtgctggctttttaagagaagtaatttctgtggctctccactctagccacattagtcattcaagtgctgagggacaatataaattcctgtcatcctactttatgtgaccactaagatttattccaagcgacaggtcattaacgtctcttctctttatttttttttctcagattcactgaaaattcatatttctgctttat

SEQ ID NO: 739415 - DNA, 708 bp, Homo sapiens
ttaaaaatacagatttttacacatgggcataaagatggcaacagtagaactacaggaggaagcgggacaagggttgaaaaaccaactattgggtactgtgctcagtacctgggtgacaggatcaatcataccccaatcctcagcattatgcattatacctaggtagcaaacatgcatatgcaccccttgaatctaaaacagaagttgaaattattttaaggaagagccgaatggaaatccctgaactgaaaaatacaaaatatactttttaaaaagaaaaatgcctcatatagtagttaaaaaaaacccagattttgaatttatttatgctttatactcttttattctattcattatttttcatttttatctttatcaattcattcctcaaacttttatactattttgttttccctttttttagtttcttaagaaaaatactcattttaagtcttcattttttttttttttaaataaggcattttccagatgtgagggtsacctggctgtgacatctgttgccccattgatggccacggttgtttggctgatctggctgcctaggcaggtgtccccttcctccctcactgttccatgtgcctccctccagaagctacatccttggttgaagaggatgaccatccccaatagaggaggactggtcttcaatcaagggcatatgagtagctgcactcccctgatagaacc

SEQ ID NO: 739416 - DNA, 622 bp, Homo sapiens
ctttttctatctgatccataaatgttgcaatttatctgcactcagctcttcttcctgccttctcttcctcagatttagggcctaaatgatttcattacagaaaaatgaagtcatttttttctaacacatttcagtgtggactgggattcatcgctaaaggacaggcaaacataaatctttcatctcaaaccatgataagtgcttggaaggaaaaatttaaacagaaagactgggggagagcctaactcrgcctaattcacactggggtaggagtagggcggcctccctaagggcaacattggagctgagacctgacggaggaggggaagttgcacaggtgcagggtcagaggagaagcaaaagcgaaagcaaatgaaacaaaacaataagtggtaaaggctcacacagatgacacacatatccctaccttcaacccagacctcttctctatgctgttgattacttatctaccaacccttcctaccttccgaacatttccattccggcatcactcaggcatctcaaaaagtctggatttcctcacaggcacttgttttctccccagacttcctctgctgtgtaaatggcttcattttcccaccagttgttcaaatagaaacct

SEQ ID NO: 739417 - DNA, 622 bp, Homo sapiens
tgtggtcatacttgggtaccacagcgtgcacaggcagaggcagccccccaatcttgcagactggcatagtgtccagtgtgggtgcagttggataccccagagccaagctaacagggcatggatctgaggccatcagtgtggttgaggttttccccctgtgacatctttggtctaataataatccccaaggaaagggtatcagtgtttcctagaaacacatgacgaagtctgtaatctgtcccaccttcaaccacaagcaaacttctgcatactcaggattacacgcatcctcacaactgagatgacattccaaaccacaagcacaactctttgtttttgtggtcaccacgtacaacaagatagcagttgatttccttcactctcttggttatggttgaggagatcagcgggagagtgggagggaggagctcccttctgagggctggtcccacagggcccggagctggagygggagcagaagctggactgggagagagcacaaggcaagctggggagaaatgctgaaccaccctgccaccttagctttagaatgtgtcaaaggcatcttttcctcacgccactcctggccacatccctactcatcactcatctataaggttgt

SEQ ID NO: 739418 - DNA, 612 bp, Homo sapiens
tatcactgatattgtttagaattgctggcagtggtgataataaaaagcacgctggctttcagtgggttttattattgtttttaagtcccttccaggccatggaccccttgattgcctgccctggggggtggacccatcttcttgccctgcccttgggaccacactgcagtggaattagcttaaatcattagcttaaatgcctcctttgtcataaaaacattggtgattcctgcagttttgtgcactatttgtgctagctcttgtgtagcctaacatttccgcctgaatgtttgccattttgttctattctgtaacattgtttttgacctctaatttcattttgcaatgatctcagcactgggtttatctttacraatgaaatggtgagaaacgctttgctgaatcttcacaactggttcaatcacatgggacagtggaatcagagacatgaggttgcgggaaccattatggggttagaatggataagggaaagagaaagaaaaaatagcagaagccatgacttgctcttgtaggtttgctttgtatgacactctttttcttctgtcactgcatcagacagatatgtttagatacaccatgtattaataaatg

SEQ ID NO: 739419 - DNA, 610 bp, Homo sapiens
aaatgcagtcatgtgtagcaactgggagaaagcaagaggaagcagggcctcctcctgtccacatgctgatggcaccacagctgtaccctgtgtgagatatgactgctggctggacctctccatttctccagcaccgcactgcatagaaggtccctttccccaggtctgcccctctgcctaggagttctttgggcacccaaagcggaaacctgggggttgttcttgatgcttccgtctccctcattcagggcaggtcccctagattgccagctcctcagtcagccagggcttctcrgggcaagcaccagccaccctttgtaggcccaggaatctgaacttgtccgtatcccaaaatggccagacctcagagtctgactgcaggccaaacagcgtgaatgagaataggacttgactgactgatgccaagggcactggggtgcacattttttcttgctggggcttgtgctcccctactacctctaaggggggcagataattctgcaaaggatatctgggggctctaaagtcagcaccgagtagaggaaggtggtcagtaattaacaaagaggaaatgcatggctcatccagaggtctggccttctatttatac

SEQ ID NO: 739420 - DNA, 531 bp, Homo sapiens
gttacaactgcaaaaatgtggaaccaacccaaatacccatcagtcaacgaatagacaaggaaactatggcatatatatatggtggaatactactcagccataaaaaggaatgaattaatggcatttgcagcagtctggatgggattggacactattctaagtgaagtaactcaggaatggaaaaccaaacatcatatgttctcactcataagtgggarctaaactatgaggatgcaaagccataagaatgatattggggactcagtgggaaagggtgggaagggagtgagggataaaagactacaaattgggttcactgtatactgcttgggtgatgggtgcatcaaagtctcacaaatcaccgctaaagaacttactagtgtaaccaaataccacctgtccccctaaaacctatggaaataataaataaataaataaaaacttaagtaaaaacaaataaaatgtggccatttagtccatttataattaatggaattattgattgatatatatgggtctaagattatttta

SEQ ID NO: 739421 - DNA, 531 bp, Homo sapiens
gttacaactgcaaaaatgtggaaccaacccaaatacccatcagtcaacgaatagacaaggaaactatggcatatatatatggtggaatactactcagccataaaaaggaatgaattaatggcatttgcagcagtctggatgggattggacactattctaagtgaagtaactcaggaatggaaaaccaaacatcatatgttctcactcataagtgggaactaaactatgaggatgcaaagccataagaatgatattggggactcagtgggaaagggtgggaagggagtgagggatraaagactacaaattgggttcactgtatactgcttgggtgatgggtgcatcaaagtctcacaaatcaccgctaaagaacttactagtgtaaccaaataccacctgtccccctaaaacctatggaaataataaataaataaataaaaacttaagtaaaaacaaataaaatgtggccatttagtccatttataattaatggaattattgattgatatatatgggtctaagattatttta

SEQ ID NO: 739422 - DNA, 551 bp, Homo sapiens
aggagtgaatatgagccaatgcccagaggtaggacagcatgaagggtctaacgagagtgagtggacaggccttgctggactataagtgaaaagtagtatcagaaatgatatcagaaaagtagattggggcccaattgagaagtcccttgaatgccatagtaaataaagctttaattatttatcttacagacaatgtggagcccttggttttaaagaagagcatcaaaattaaatttcttctttcaaaattttattctccccagattaacgaatattattcaagttatascttcagtttcaccaaaggtcatgtctcaatccttctcctctacaggaaagcaattctaaaaaaaaaaaaaaaagggaaaagaaaaacctcagataaaactggttttggtaggactactctcaggcaggacagcataagatacaagaatcaaatgactggcaatagaagacttattaagattaaaactgtactggtcatcagataagtgactagatctgatttgttcaaattagagtttgtaatttattttgaatacaaagca

SEQ ID NO: 739423 - DNA, 468 bp, Homo sapiens
aattccgtgtaacctctacccacccattcctttccagggcactgaagccaaaggcagaagttgatgaggatggagttgtgatgtgctcaggccctgaggagggagaggaggtgggccaggtgaaagggctggggcaagaatggtctggaggtgatggaagggatsaaagggcaaatcaaccttcactgatccttgctgttacccaaaggctgaagaaacaggcccaccctccacgtgccagctctggtctctgagtggtggctgtggggcgctccctcaggcagccatgctaactcctccccaggaatctgagatggaagcccctgacctggacacccgtggacctggtatgtgagtcaacccagaccaagaaaaaaaaaaaaagtcctttgaccctattagaatcagagagtcctttaatatcagaactagaggaaataattttagactgagtgccttagaacaatg

SEQ ID NO: 739424 - DNA, 621 bp, Homo sapiens
atagaaaagggctgtacacttgactttgcaaatttccatgtatattcatgactggttttattcacaggattggatctcagttaaagacattctcacaaatatctgcataaacatgagggtcttgtacatttgacatgcatttggcaagacctgacaaaaatcacaaaatctgttgtttcarctaactgctaataaatctaaaatggtttctttttttcaaacaaagtcataaaccttgttttaggacataggttgctttgaatccttgattcaaacctgaattatggctgggcactgtggctgatgcctgtaatcccagcactttgggaggccaaggtgggcagatcacttgatgtcaggagtttgagaccagcctagccaacatggtgaaaccccatctctactgaaaacacaaaacgtaatcaggcatgatggtgcgcacctgtagtcccagctactcgaggggctgaggcaggagaattacttgaacccaggaggcggagattgcagtgagctgagattacaccactgcactccagcctgcatggaagagtaagactccatctcaaaagaaaaagaaaaaaaaaatctgaattataacttctacaaatggatgtcagt

SEQ ID NO: 739425 - DNA, 597 bp, Homo sapiens
ggctgaagataggaccccaatcccttctagcttatagggtttctgctaagaaatctgctgttaatccgatagtttcccccacccctctttataggttacctggtgcttttgtctcacagctcttaaaattcttttcttcactgggcgcggtggctcacccctgtaatcccagcactttgggaggccgaggtgggcaratcacctgaggtcgggagttcaagaccagcctgaccaacatggagaaaccccatctttactaaaaatacaaaaaaattagccaggcttagtggcacatgcctgtaatcccagctacccaagaggctgaggcaggagaatcacttgaacccacgaggcagaagttgcagtgagccgagatcacgccattgtactccagcctgggcaacaagagcgaaactccatctcaaaaaaaaaaaaagattcttttcttcattgtcttaacttaagacaacgggatgacaatgtgcctaggcaatgatctttttatgattaatttcccaggtattctttgtgcttttcttgtatttggatgtctaggtctctagcaaggccagggaagttttccttgattattccccc

SEQ ID NO: 739426 - DNA, 597 bp, Homo sapiens
ggctgaagataggaccccaatcccttctagcttatagggtttctgctaagaaatctgctgttaatccgatagtttcccccacccctctttataggttacctggtgcttttgtctcacagctcttaaaattcttttcttcactgggcgcggtggctcacccctgtaatcccagcactttgggaggccgaggtgggcaaatcacctgaggtcgggagttcaagaccagcctgaccaacatggagaaaccccatctytactaaaaatacaaaaaaattagccaggcttagtggcacatgcctgtaatcccagctacccaagaggctgaggcaggagaatcacttgaacccacgaggcagaagttgcagtgagccgagatcacgccattgtactccagcctgggcaacaagagcgaaactccatctcaaaaaaaaaaaaagattcttttcttcattgtcttaacttaagacaacgggatgacaatgtgcctaggcaatgatctttttatgattaatttcccaggtattctttgtgcttttcttgtatttggatgtctaggtctctagcaaggccagggaagttttccttgattattccccc

SEQ ID NO: 739427 - DNA, 574 bp, Homo sapiens
aggggacctctgggaacagggttttgattagaagtcaatggtcatggggcttggagagaccggtgagtaattttctatttcagcgtggataaatacaggaagcaccaagacagttgagctttgaaacggcagacaaagggcaagatttttttaagtactggctgaagtgactctcctctaagcctgctaattaggggatttaatctcccagcaggtgaaaaggacaaagggctttttccatagtgttttgccaaattytaaggttaagcacagtccaaaagctattagccttctgccaatatgagaatgaatcacaagtaatgtgagggaattaaaatcaaggttagattaagtcaaaaaataattaaaaaccatttaagggaatcaggaagttatgtgatgtgtacctaagtatttctttttcattaaatcttatttcaaattgtatatattatcattaatatgcacatgttggggtggtttatgtttaatctgtagaggttgttattttagtaaggttgtatataaaatactatggaaagaagcatatgagaaatagaatttgatgcttagc

SEQ ID NO: 739428 - DNA, 563 bp, Homo sapiens
cagcccctcccactcctttatggatcccaccccattggcaaaggaattagctcatttccaaataaaaattaggtaattagtttgacatatcaacaaatgcataaactgtgtaaagtttctcctattaaatctttcaaaatctgcacataataccacaaaatttacatcttatactttgtgaatgaccatgttagtgtcattaatactcagatatttgtacctgaatgaggttcaagatgggactaggaaatcttagaaaacattagcaaaatacacccactcaaaagacctaggtttattctttcatttactatgacttggaccaactatgtatactctctaaatttcagtttactcatttataacacaagaatgttaatcccaccttacagaattattgtgttaaatgagataatgtatgtaagaaaactsccacataaaaatattaagaaaaatgttattgtgaataataatatttatgatattcatcaatttattaaaaaatatttgctgaggactaaatatacatcaggaactgctccaccctgttggtagtgagaggc

SEQ ID NO: 739429 - DNA, 639 bp, Homo sapiens
tttatgtttacacctaatcctgtacatgaatatatatagcaattttatttgtaatagccaaaaactagaaaaaaactagatgttattcagtggtaaatggttaaacagtggtacatccttaaccatggactactactcactaataaaaagaaatgaactgttggcatatatgacaacctggatctccagagtattatgatttacaaagccaatcccaaaaggtttcattccatttatatatcatataatatcccatttatatactgtgttatttcattaatataatattcttgaaatgacaaaactgtcaaaatggagaatagatgaatggttgtcaggggttgggaagggagggaggaggagttggatgtggttatgaaagagcaacatgagagtggtgttagaaatgttctatatcctgactatatcagtgtcaatatcctgtttgtgatattgtaagataattttgcaaaatattactrttgggaaaaattaggggaaaggtacagtggatctgtgtattaaaagtttaaagaaaaataaatgaagtggaaggtaccttttggtgaaataagtgacaatgaggtagaaatgcgttttgtaaaacttatgaataccaaaataaatttaggatataat

SEQ ID NO: 739430 - DNA, 590 bp, Homo sapiens
atagccaatagtttttacacaattggtttttcaagcaatgaatttccatttaaataaaatatggatttacaatacatagaaaatttacaaggagttataaaacagtgggaaagtatgtctagcctaaacttttgtgcatttagtctaggaaaatttcacatccctctttccacacctataaarccaaacagaaccaggactgacttgaggaaagcaattatttatctctgctgtgtctaactaagcaagctgccaaatgtgatcatttgcctgattggaaaatcacataaattaagactttgccatcaactttctttcaagtaaggaaagaaaagcatttcaatatagtaatgcaaaacaagtggaaattgttattgaacatttacttggacgggcactgtggaaaattattccttgtccaaccacctcctcagctgtaactggtagcacaattcttgacccattttacagattaggaaacatgagtttccagagtttattggcactcacgtggctgttacatcgttttgatgttcaaacgacctactttattcaaagtcaggtagtacagtctgctggtgggaaataca

SEQ ID NO: 739431 - DNA, 611 bp, Homo sapiens
ctactttatctgaaaagtaaggaagtctcacgtttacctttgtcttaaggctgttttaaaccttaagccaaataataagtctgcatgtgccaatcataatgcctggcacataaaagacatttatacattaaaacctaattcatacctacagttttgctttgtttgttttttgagacatgatctggctctgttggccaggctggagtacagtggtgtgatctctgctcmctacaacctcttcctcccaggctcaagccatcctcccacctcagcctcccaagtagctgggactacaggcatgcaccaccacacctggctaatttaaaataaaaaatcatagagatgtggtttcaccatgttgcccaggctagtctcgaactcctgagctcaagtgatctgcccacctcagcctcccaaagtgctgggattacaggcgtgagccactacgcccagcccatacatacagtttatacatttattgggatacatttctgattctctcccatcctccatgctccaatcttcatcttcctcacccaactgacagtggcccaagataacattttcccatatatcttagtttcatatttgaaaggttgatgggtctctcc

SEQ ID NO: 739432 - DNA, 611 bp, Homo sapiens
ctactttatctgaaaagtaaggaagtctcacgtttacctttgtcttaaggctgttttaaaccttaagccaaataataagtctgcatgtgccaatcataatgcctggcacataaaagacatttatacattaaaacctaattcatacctacagttttgctttgtttgttttttgagacatgatctggctctgttggccaggctggagtacagtggtgtgatctctgctcactacaacctcttcctcccaggctcaagccatcctcccacctcagcctcccaagtagctgggactacaggcatgcaccaccacacctggctaatttaaaataaaaaatcrtagagatgtggtttcaccatgttgcccaggctagtctcgaactcctgagctcaagtgatctgcccacctcagcctcccaaagtgctgggattacaggcgtgagccactacgcccagcccatacatacagtttatacatttattgggatacatttctgattctctcccatcctccatgctccaatcttcatcttcctcacccaactgacagtggcccaagataacattttcccatatatcttagtttcatatttgaaaggttgatgggtctctcc

SEQ ID NO: 739433 - DNA, 538 bp, Homo sapiens
aaattacagaagataattactgaagaagccaggatttgaacctaaggctatcggatccaatacccatgttctttccaccacaccaagctgcctctctcaactttgctattattgactcttaagatgccagatatgtaggatcagggggctagtggaattctaatttttggaggctgtgctaaatgctcccaaacactttactaaatatcatgtgcaataatccacttaatcctttaaaatataattcaaaatacacaactataaaatatcagaagttagagcaagaattaaaaacaagttargtagcatattacagcttttagaaatgctaaaagtgaaaatcaaatctttatctcactaattatctggaaagcatacattctaaaaaggaggaagtactgaactaaaaaacagaaggatcaactcgcaaattaaaatttcattccacctttaattacaggcaccctgggtgtcagacttatataaaacttcttagacttctccctcagcttgacattaagaattgcacatagaggct

SEQ ID NO: 739434 - DNA, 645 bp, Homo sapiens
tatcaactcatcaattcctgttatgagcaagggtttcttctaattttcaataacatcataaatgatcacgttgaagacatatatactggtgtagacattcatcagtcacgttttggacaaagatatttgtaagcagatctttttattacaaacaagtacagatgctctctggcttgcaatggggttatgtcctgataaacccatcctaagtcaaaaatatcataaatgtaaaatgcaattaataccctgataaacccattgtaaagtcaaacaatcataaatcaaagcatcataaattggggaccatctgtgtagytttcattacatgagatttcccatttatcctcttttctctctaattgtcttcccaaccctccaccaccataaagaaatagagcaatccagtgacagagtaaaagaactcttctgccattcatatcacaaaagattgatgttaagaaaataattcctaaaagccaacgaaaacaaatgacatcacaagtccttttgtgaagtaattaagatataaataaaataaataacaataaatgaaaattagttgagaagcacagtccctgcagatactacttctcagatgaggctttctgaaagcatcacagattcagtctagaatttataattcta

SEQ ID NO: 739435 - DNA, 611 bp, Homo sapiens
gaatctcgcccccatcccccacagcagccacagcaagacctgaccaaggagagtctgagctcagacaggcctagccctggccccacctgatggtccttccctatccaccttggtatcagaggacaaagaacatataatcttaggaattctagggccctgcccactgctggtgcctgtccacactattacagctgatgctttctggaaagtaccacctcctggcaggaggccaacagyacaaaacagggaattaaaccaccaaagttaaggatcccatggagtcattgcatcctctgccacttccactggaacaggtgctggtatccatggctgagagacccataaatcattcacatcacaggactctgttcagacaacccccagtaccagcccagagccaggtagacttgctgggtggctagacccagaagagagacaacaatcactgcagttcggctcacaggagccacatccataggaaaagggggagagtattacatcaaaggaacaccccatgggacaaaattctgaacaacacccttcagccctagaccttccatctgacagagcctacccaaatgagaaggaatcagaaaaccaaccctgctaat

SEQ ID NO: 739436 - DNA, 611 bp, Homo sapiens
  misc_feature 360: n = A,T,C or G
gtagaaggagggcaagggataaaagactacaaatctggtgcagtgtatactgctcaggtcatgggtgcaccaaaatctcacaaatcaccattaaagaacttgctcatgtaaccagataccacctgtaccccaataacttatggaaaaataaaatattttttaaattaaattaaaaaataaaaaacaaaataaataataaaatccaaaaaagagtacattgtgactgggatggaragtatgtgtgttgcagtgggatattgaaagaagagagagaaagctgttgaaaaaatacaaaccaaatctggagaattagcacacatattagcactagaaacaatgatgatttcatcaggagttttnccctgagttagaattcaacacctaatcaaagccattctggtcagaactaaagagggcaaacatctttttctcaaattataaattgtcctgactgtgtagcaagcacaactgggatgccaatgcaagggtttcctgctctgtcatgtctaatatcaataatcagttgttctcagtctcacctttttttcattctccaaaaagagggtcaatcttatcacataccacctccatcaaacccttgccattttgtt

SEQ ID NO: 739437 - DNA, 614 bp, Homo sapiens
agaatattgagaaaatttttttctatttcagaatatgaacaatccccttttcccatctagtggctcagggatccaaatcctcaattttgtgggaaagtggggaggaaaagcaaggcacggtagtgtggacatatgtgagagtgggtatatgagagggagaatgaaagagtggttgagaaaagttttacactctgatcccacattcctttcgcagaaaaaaaaatgttgctggtgccaactctcagaaggcaattctaatgctcccatcaaatgtcaccccagaatctaagggccacccaccagcagccrttcctgcaggagtagcagcagggaagagggccagggatgcccgttgctcacctctctctctgtactcctcaggctccatcatctcccttgggctctggctccttctcacagatggacacgcaggaggtggaaggcgtgaaaggcgtggagcagcccggcttccctcttgccagtcctgcgcactccctggcagccagtgtgggccctttatttaaagggttctttctttgaccttagctccgcccttcaaagtcccttcctccaggtttaattaattccaccctttctttccccagtccttgtag

SEQ ID NO: 739438 - DNA, 587 bp, Homo sapiens
tgatgaaaccctgcacctaggcaaggggccagactgggatttaaggatggctacatggctaagccattgtttcaacactttcaccagaagttctgaatgacagatggtttcagctcctgataggtgttggcttggagtcagggaagagcttcactgcttttacatcctggtctccttctcttgagcctctatctttycccctgacccaccgtttatgatcccataaataactacaaatgaatcagtgaaataaagctcctgtgaaggcagaaagtcaggatgttcatcagagggaggggaatgggaagccccatttccttgtaaacacaacatcctgagataaaacatctggacagtgtttaagaaggagacgaggtgtcccagattatcctgtggtttcggcaacatttcaaggctgaggtaggtgaggtgctgagtgtaaccattaagcaagtttccaaggttcaaaatagcagctatttccactcaacaataagccagagattcattcagtccccctgaaaatgacatgttcctgtggtttccagaaggggtaaagaaaatgcctcccaggccaggcatggtgg

SEQ ID NO: 739439 - DNA, 536 bp, Homo sapiens
tttccaagtccttcttacttacatactgtatttattatgcactgtatttatcatcctgatagtttaatctctcatctccttctgctaggttgtaaattccacaatggattatttggtttgctgatgtatctgcttagaaccatcaaatgctgaatggatgaatgaatgaatatcttcgattgaaagctccatcttccattactcaaatttcccattcttaatgtatctcagaagctaatattgagaaactgagggattagttctgtgcatcttaattcaggtactgattgaaaaagaaaaaccaaaatctccayagggcatgatgactctggagaaggaagggataccttgtgagctattcatctaaggaagagaggaattacaaactaaaatattagttgaccactaatattttaacattttaatgtattttcttgctgtccagaagttttaaatacctgtataaagttatcgttttttttctctattcattttgtttgtatttctgcattctttaaggactttcctaccaccaa

SEQ ID NO: 739440 - DNA, 580 bp, Homo sapiens
gcacttaacaccattttgggcaaatagtaagtgcctgataaatgtgagctacaattattctagttgtctcatatccccaagcatagcactatcaattttaacccatctctcctgaggctccattctttccctcttgcctgcttattttcctcagcatagaagcaggttcaactctctccctctgcccagtgtccctggctgactactccccagcctcaccttttcctgtcatgcctccagggaggactagacagtttgtctcaccttcccaacgcaattggcttaacgcccaggaagcttctctgtaagtccactctcttaatggtgcttttcagccttgacacctcgtgccctttctgctgaccttgctgggtgccccctttctttgactatttgacctcccttactctgcttttmctctgatcgccccctaaatgctgctgctgctgctgggttccctcctcaccctctcatctactcactgacctctccccactgccatgagctcatctatgccctgactctttgttggcccccctgtgctgggatttccacgtctgagctccagcccagaacttta

SEQ ID NO: 739441 - DNA, 617 bp, Homo sapiens
aaggttgcaggacacaatatcaatatacaaaaaccaattgtatttttatacatttgcaaggagtaacctgaaaataaaattaagaaaataattccatttataacagcatcaaaaagaatgacttagtaaatttaacaaaagtgcaaagcctatatcacaaaacatcactgaaagaaattaaagaagacctaaataaatgaaaagacattccaggttcatggattggaaggcaatatcattaagataacaagtttttctgcagattcaacacaatccctaacaaaatcccaacagccattttgtagaaattgataagtggatcctaaaattcatatggaaatacaagggatccatactagccaaacagtattgaaaagtaaatacaaaattagaggagtggcacttcttgatcaaggcaatgtggtagtggcataaggatagacatatagatcagtggaatagaactgagagtctagcaawaaactcccatttacagtcaattgatctttgacaaaggtgccaagacaattcaatgggggaaagaatgctcttttcaaaaagtggtgctgggacaagtggatatccacatgcaaaagaatgaagttagatgcataact

SEQ ID NO: 739442 - DNA, 554 bp, Homo sapiens
ttaccttaccccggaagcgcaaggcattggggaactccctccactagcaaagggaagccctgagggactgtgccatgagggatggtgctgtctgacccaggtactatgcttatccaacggtcttcacaacccacagatcaggagattccctcrggtgcctacaccaccagggccctgggtataaagcacaaaactgggtggccatctgagcagacaccaagctagctacaggagttttttcataccccagtggtgcctggaacaccagcaagacagaaccattcactcccctggaaagggagctgaagcctgggagctgagtcaccttgctcagcagatcccacacatacagagcccaacaagctaagatccaccggcttgaaattctcgctgccagcacagcactctgaagtcaacctgggactctccagcttggtgagggaaggggcatccaccattactgaggcttgagtaggcaattttctcctcagagtgtaaacaaagccagtgggaagtttgaactgggtgtggaacccaccacaacgcagcaaagc

SEQ ID NO: 739443 - DNA, 535 bp, Homo sapiens
attgttttataaagttgtcttttaccaacgcacagccaatatcacattgaatcagcaaaagctggaagcattccccttgaaaaccagcacaagacaaggatgccctctctcaccactactattaacacactattggaagttctagccagggcaatcaggcaagagaaagaaataaatggyattcaaataggaagagaggaagtcaaattgtctttgtctgcagatgatgcatgatcctacatctagaaaccccattgtctcacccaaaagcttcttaagctgataagcaactactgctaggtctcaggatacaaaatcaatgtgcaaaagtcacaagaagtcctatgcaacaacaggcaaacatagagccaaatcatgattgaactcccattcaccattgctacaaagagaatcaaatacctaagaatacagctaacaaggaaagtgaaagacctcttcaaggagaactacaaaccactgctcaaggaaagcagagaggacacaaacaaatggaaaaacattccatgctcatgga

SEQ ID NO: 739444 - DNA, 535 bp, Homo sapiens
attgttttataaagttgtcttttaccaacgcacagccaatatcacattgaatcagcaaaagctggaagcattccccttgaaaaccagcacaagacaaggatgccctctctcaccactactattaacacactattggaagttctagccagggcaatcaggcaagagaaagaaataaatggtattcaaataggaagagaggaagtcaaattgtctttgtctgcagatgaygcatgatcctacatctagaaaccccattgtctcacccaaaagcttcttaagctgataagcaactactgctaggtctcaggatacaaaatcaatgtgcaaaagtcacaagaagtcctatgcaacaacaggcaaacatagagccaaatcatgattgaactcccattcaccattgctacaaagagaatcaaatacctaagaatacagctaacaaggaaagtgaaagacctcttcaaggagaactacaaaccactgctcaaggaaagcagagaggacacaaacaaatggaaaaacattccatgctcatgga

SEQ ID NO: 739445 - DNA, 611 bp, Homo sapiens
tctgtcacccaggctggagtgcagtggcacaaactcggctcactgcaaggctccacctcctgggttcacaccattctcccgcctcagcctcccaagtagctgggaatactgggactacaggcgcctgccaccacgcccagctaatttttttgtatttttagtagagacggggtttcaccgtgttagccaggatggtctcgatctcctgacctcgtgatccgcccacctcagtctcccacagtgctgggattacaggyatgagccaccgcgcctggcctcctttctctttcttttgcctattaaacctccactcctaaactcactcctcatgtgtgtccgtgtccttaatgttcttggtgcaagatgacgacgatgcttcaatggggacagaacccttaaagtccagtatccacctgccacctgctaaagggaacttggaaggtacttattctccttgaagcttcaatttctttattggacataggatgttaataatacctgcctagggaccaagcacagtggctcatgcctatagtcccaaaaactcagaggccaagttggaagaatcacttgaggccaggcattcaagaccagtccagcctgggcaacag

SEQ ID NO: 739446 - DNA, 600 bp, Homo sapiens
gagtgcgtgtagtcccaggtccttaggaggctgaggcaggaggatcacatgagcccaggaggtggaggttacactgagctatgattacaccactgccctcaagcctaggtgacagaagaaaactaggaaaaaaaaaaaaggaaaaaaaaaacttcatgtactttgttaaataatatagatatatagattattatctacctttcatttagggtttagatttaaatcctgccactcactgcctgtctttgrggaaatgttttaatgtctctgagaccctgtttcttacctgtaaaacagatatcataatattatatgttgtgatgatcaaaccataaaatgaatgtagtttcccaggagtaagaagaataataaggacagagtagtgtcaagagaatcttgacggtatctcgcacattgataattccttaacaactggtagctagtattagcatcaataatttgtgttataatagaaaagctgtcctttctctttttccttcagctctcaatgtaattaaaaaatgtatttttagttacaataaaaagaaaggggaaactagaatataatttgttattttttaaaaaataaggaaatatggc

SEQ ID NO: 739447 - DNA, 646 bp, Homo sapiens
ggcttcagcttcttgtctgtatgcattgcagccccgaaagtgtcttttgtttcctctcaccctagtacacacagactttcctttaattagtgtggttttttttctgcaaatgactcctcatgatttttttattcaaagtacatgaaaacacctcaaccagcaggaacaaatgaaaagttttatatacaatgtgaatgaaactgtggacattttctggcttagaattgaacttccagaaaacaatcrtaaagaaggcaatgttttgcaattcaagtactaattagcacagcattatatcttttctgagtcttaaaggaatgtagaatcatagtccttttgtattagaatgtatttttgaaagtgttagccaggccagtggtataaattggctatatgttttttctagtatagttattctggagcatttttctaatttatatgtccagatagtgaccaaacctaatactgctaaagatcgtaagagcaaagaaaaagttataattaatcaagctttgttaaaggtaaagtgcaaattctccatttctactcacatatgcctctttttctgagtatgaatgtatgctgttttgaacactcaatcaatgcaacttttattttaggtctaacaatagctctatatgctact

SEQ ID NO: 739448 - DNA, 609 bp, Homo sapiens
cagggacagctaagcagcagcttcatgagcaggagggaaagggcgtgttctaggggagcagcagcttccatgtcagactcaggaatgcagcagacccaacatccagcttggagatttcttctctttttcttttttttcaatggaactgtattttcgcaaaatgttacagatcacttatagcaaacagaatggtgatggtcaaggaaactgactctgggctcctttttgaccgcagcagctatgtggaagcagctgcagctgtgataagggccgcccagcatggatatttctgtgtcttcgttcactgggaagtggagggacagagcttccgacccacatcccaccttcttcacgaatcatctttgccaccaaatcgttggctcataggtgtctgttcttgtctttcctgcccatgcctrgcttttaggttcctttgctccagctctttctgtcagggctgacctggagggcagtgctcctgtgagttctccacattatatcatggccggtaatctaatccaattcaagctgacattctccaccctatgttctaccaatggaacctggtcagacatctgggctcattcaggaagtgctgctagggcatgg

SEQ ID NO: 739449 - DNA, 609 bp, Homo sapiens
cagggacagctaagcagcagcttcatgagcaggagggaaagggcgtgttctaggggagcagcagcttccatgtcagactcaggaatgcagcagacccaacatccagcttggagatttcttctctttttcttttttttcaatggaactgtattttcgcaaaatgttacagatcacttatagcaaacagaatggtgatggtcaaggaaactgactctgggctcctttttgaccgcagcagctatgtggaagcagctgcagctgtgataagggccgcccagcatggatatttctgtgtcttcgttcactgggaagtggagggacagagcttccgacccacatcccaccttcttcacgaatcatctttgccaccaaatcgttggctcataggtgtctgttcttgtctttcctgcccatgcctggcttttaggttcctttgctccrgctctttctgtcagggctgacctggagggcagtgctcctgtgagttctccacattatatcatggccggtaatctaatccaattcaagctgacattctccaccctatgttctaccaatggaacctggtcagacatctgggctcattcaggaagtgctgctagggcatgg

SEQ ID NO: 739450 - DNA, 618 bp, Homo sapiens
aatttaattccctatcagtccaaagctcaacattgtttaaaggaagaaaatgatgtccagacacggagtcatgatgttcagaatacaatttaaaagaatgctagccgtagcaagaagcaggaaaatgtgacaaaaaaatttgttaatgaaaacacacctagaaagaaaaaataaaatagagttagcagacaaggacactgaaatatctattatcattaggtaaaagtatttaaaggaaaagatgaacatattgagaagagaaatggaagttataaaaaaggcctaaataaactttctaatagatgaaaagtacaacattgaagatgaaaattcacagaatggacttgaaagcagcttaggtactgcagaacataggctcactatacataataatgtagaaatagaaaatattcacaataaagcacggtgaaraaaaggatggataaaaatgaacgaagctgtagtgaccaatgtaacaccaccaactgacctaaatacgtatacttggaatatcagaaggagaagagagaggaaagttattatttcagttttcaacattcatgcttctattggttttagatttaacaaaaagacagaaaatctgtaaaaatatagaac

SEQ ID NO: 739451 - DNA, 546 bp, Homo sapiens
atgtcactccttattgatcaggaaagaaagtctatctcaagtaggggtacgggtcagcaaacacaacttctgagctcamagacatcatttaaaataaaaatagagattattttgttactgactaggataactacatatgtttattttttctgtcaaacacatagcaatcaggaaatattgaaattattttcattaaacctcacataatttttgcaatacagtattgaacgtgcttatattaattagctgagtacaagtccatttcttacaaaatatattaggccaaagcctataacccctatctccattttataattatctatgcttagatagtgagcaaggactgaattcattgtcttatgttttttttaggtgcattcttttgcattagttagctatttgttctgctggataatttctattaattaaagttggtaatcccagaaaatgaagcccagtacattcatctcgagtcattatcgccttctctaagttttggataataagctcatctgcctctttgaaatgtctcatgactcagctgtt

SEQ ID NO: 739452 - DNA, 655 bp, Homo sapiens
atgaattattatagtcacaagcaacagaaataacctctctgttaaatatggaactgcttttgatccttttatggccattatatttgtattattaccacttaagtttttatttatttatttattttttttttgagacagagtctcactctgtcgcccaggctggtgtgcagtggtgcaatctcggctcactggaaactctgcctcctgggttcaygccattctcctgcctcagcctcccaagtagctgggactacaggtgcccgccaccacgcccagctgattttttttgtatttttagtagagacggggtttcaccatgttagccaggctggtctcaaactcctgacctcgtgatccgcctgcctcaggctcccaaagtgctatattaaactaaatatttaaagttttatgtcattgtggccattcctattttttcaaacaaaatgagttcatttacattaattacatatgccaatcaagtataattatgtaatattttcaagagtcaacaaataaaaatttaatcttgtctgaatcagatatcactagatattttgaagatgtagatttttagtaagaaatagtttagcaaaatgcggagaatgttgaatcagcatcatcttttagtttgctaataataaagtaattatcttat

SEQ ID NO: 739453 - DNA, 659 bp, Homo sapiens
aaaaaattgcgggagagcagttcttcccggagagcggtacctgctgcctggctttcattcctccaaatgctacaatgggggcctcagatgaaaaggcagctggtccagtgaggcaggtggagagggggtgtcgttcagttcctgctgccaggttggagcctgggccctcagactccagctggatattagtggagactcaacactcttgcagttctctgcacttggtccactccgaaagagggaaagtcatcattctctcctttatacttcacaagggctttgttggcttgttttctgtagagctyggtatccttgagggaatctaagaggacgggactatccttggtattggccaatgctgaagagactagagaaagaaaatggcagtgtcgcagttaaggtttgaaaatggcaatgggggctcagtggaaggaaggacaataactttcattttacagatagacaaatggaaggttgggggatgtaagtgacttcttcaagatgaatcagccaaccagcaacagaactgaactgctgatccttccttcctttcctatgatgcccgagtctcagttgttacccctactcgtgatgcctccaccactgccactcatcaagtgctaatattttaaagaagtcctcctgtgtttgtcaaaagg

SEQ ID NO: 739454 - DNA, 638 bp, Homo sapiens
acacattcttttcctcagcacatggatcattctcaaggatagaccatatgttcggttataaaacaagtctttaaaaaatttaaaatagtatcaagcatcttctccgaccacaatggaataaaatcaataataagaggaattttagaaactgtacaaacacatggaaattaaacaatgctctmctgaaaaattggtgggccaataaagaaactaagaaagaaatttaaacatttcttgaaacaaataataatggaagtacaacattccaaaatctatggaatacagcaaaagcagtactaagaggaaagtttatagctataactgcccacatcagaaaagaagaaaaacttcaaataaacaagctagtgatgcgtcttaaataactggaaaaacaagagcaaaccaaacccaaaattagtcgaagaaaagaaataataaagatcagagcataaataaataaaattggaatgaagaaaacagtacaaaagatcaatgaagcaaagatgggcacagtggctcatgcctgtaatcccagcattttgggaggctgaagcgggtggattacctcagaaatttgagaccagcctggtcaacatggaaaaaccccttctctattaaaaacgcaaaaattaaccggg

SEQ ID NO: 739455 - DNA, 666 bp, Homo sapiens
tagatctgtattctgcaggcattttctcagctggactcaacagccaggatctacattctagaagagatgctacaggtcagctaatatcttgtttgtatttcaaactaggaagcaaactcaaagttcaatatttgggttcttaaattgtatgttacttgtgcaatatggcagaaacaccaattttctattattattttttaacttattttgggttcaggtgtacatgtgcaggtttgttatataggtaaattgcatgtcatggaggtttggtgtacagattatatcatcgcccaggtaataagcacagtacctggtaggtagttttttgattctctctctcctccccaatccatcctcaaataggccctggtgtctgttgtttccttctttgtgttcatgtgtactcaatgtttagctcccacttrtaagtgggaacatatgatatttggttttctgttcctgcatgagtttgcttaggattatggcttccagctccatccatgtggctgaaaaggtcatgatcttgttcttttttatggctacacggtattccatggtgtatatgtaccacattttctttttccaatctactgttgatgggcatttaggttgattccatgactctgccaggaaacgccaattttctgaagctgccatcgtgttgtg

SEQ ID NO: 739456 - DNA, 618 bp, Homo sapiens
taaaaacactgagatgaggtaattaatttagggccaagactggctatctggagaggtgacaaaagttaatcaagtggaagagggagaggactgcatattgagggagaagcaagaatgaaaacaagatgtcaaaaaagagtatgtgtgtgtgtgtgtgtgtgtgtgcatatcaaaagtaactgtaagcaatttgatgttgtaggaatttaaagcttaagtggcaatagaaagataaggcagagaattagmcaagacataattaataaaggatctatttttccaaattaaagagctttggctttgctatggagggagtggggaagcatcgaagggttttttaattattatcattattttattttagagatggagtcttactatgtttcccaggctgggctcaaagtcctggtcttaagtgattctcccacctcagcctcccaagtagataaaattataggcacaaaaccactgtgtgtagcttccaaatgattttaatcaagacagtggcatgggcagatagatgttctagatacgtcagcctggctgttgtgtcgaagatgggtttgaaggcaagatccagactaaagatatgatggtatcatgaatataatgatggta

SEQ ID NO: 739457 - DNA, 573 bp, Homo sapiens
aggattggttaatttaactgcccaaatatcttaaactgtataggtgatgttcgtgtatactttgtaaatggtgatccaataatttatcaaagagcaattgatcccatgttataatgctcaactaaaatagaaatatcaatgtcaattttactgcctagagagaaaatttcttgtaccctraatcataaaatatttgacgtcctcacaaaaatatcagagggcatattagttatggtaactcagacatccaaatatctctgtggatttaatacaataggagtttatctctcctttacacaaatgccagatgttgatatcttccagatgctgtctcagatcattccaggactaggcactgctcaaatgtggctctgctattttcaacaattctaggcagcaacaggatgggaaaaagtggatgtggaaaagaaaacttgtttcttaataatgtcagtccagaaacaacaagagcaacaacatcacattagctcacaatgtttgggaaataatcacaaggccatactctaatgtaccctaattacagcaccagcctgtgtagctgcttcttagaaa

SEQ ID NO: 739458 - DNA, 608 bp, Homo sapiens
tttagcatagctgtttctgggagatgaatttttaaaattattttatcatatttttctttgttcctgatgtctgtactttttatctacatgtgtatttatttatatactgcagtaagtcctcactaaatgtcacaaataggtacttgaaaattgtaactttaagaaaaatgacatatagcaggtactcacataacattgttttactcaatgtcattttgttatcacgctgattagaaagaaaagattggttttgttatatgccatttcatttaaagtttcagtatctgataacctatcaatggtattaagtgaggacttaytgtatacctgtatgtgttatagtaatacaaaattctataattttatatataggattcaggcagataattcagaattttttcattaaaacactaatagaccaaatttctacctatcttttaattttatatttatttggaaaaatacatgtttgttatcagcactgcctagtttaccacactgcccaataattccgagacatttttccagtattttatttgccttgaatatggtagatgtcagaggaacttaaactaattacttctgagctcagttaagcaccaaaatac

SEQ ID NO: 739459 - DNA, 569 bp, Homo sapiens
tttaaaatttactttatacaaagtaactacttcataacaaaatattgattgttaatcagggagtagtttttaatcattatctattttgagacacgtgtatttaagtcacatatagtcatttttctacatgtttttcagttacttttttatatcagtttgggattttttaagttgatgtataatatataataataattttttcatttaagataaaaaatgccccaggttagcaattttgcaccgaattattgatttattgtaataaatttacataaaatttaaatgtactttctacaagtcagcaacagcttcttttacaatgtgatattcagtctgatagccataaaastctacggcatctggaagtaaagttaacataaaacatgcaagatctttatagagaaaattatgtaaaacattttaatgataaaaatgagaagctgaacaagttagatacatgttcataaataggaaaactaatacaataaaatgtattttcccaaatatacctttaaactcagtgtatctcaatccgtcttcaaaataatttttttttctgagacatgaca

SEQ ID NO: 739460 - DNA, 640 bp, Homo sapiens
tctttgttattaataatttttacagtaaggagacttttctgtttttactgaatattgaaaaccaagattaggctgccaaaacacaactgtctaaaattttcaaaagcttacataaacacttctctaaaaagttgttaaaaatttgttatatattttcaaaaggtttttaaatgtggaagtgattatgatgctttttaagctcctgaaaaatgtctttgagccttcaaaacaaagtttttcttctctagaagcaaagaattactagttttctttctaaattttattttttaatagataaaggctaaacatggtactataaactatcagcctacttacatattcttatcttatatgcaaagtttaaaatcttattaagatctgataccaagaactgaaacaaacctacatrgtaaataccaaaatcaataataaatttatgctccttaaacatctctctgacttctactctttataaaagataaataacttggtagtggaaaatattttatgggctatcattcagtagagattattctcacttctctttgtcagttcttttgaataacaactttaaggagaaattcaggagcaaatacacctatatatctatttatatattatacatgtatgatatattaat

SEQ ID NO: 739461 - DNA, 578 bp, Homo sapiens
atgtcatcagtaaataatttttgagcagttactcattggcctaggcacattagaaattataagttaataatgatatgttttccttaacagaagtcagctgcattagaaatagcagactcaattatttaaaagccattatgcagttcctttgcaaatatttatgattaatctactcttgcagtattttgctttaaaatcagaatacacagaaatataccaactttctagactttaacatagtctctcaaaaaacttgattttcaaatccatacattgaatagtaagttattaatttattggttttgtatataaaccagtctaccatagttcctgtcattggctgctgtttaargcaatatctggaggtttttttaaacatataatttatgtagtctgatttttttgtacagtaatatgctatttcagcaagtttagttacaaatcttagaaaatattaaaagcaaataaagcaaggtaattatgttatcaataatgataaaaaactgtgatgtccagaaagatcacatttattttcttgtaacacccttgcaaacatagcatattgttactttatactc

SEQ ID NO: 739462 - DNA, 492 bp, Homo sapiens
ttacccagagagagtgaggaaaaacagggtagggcactggctcactggggagtgtcacagagtcaggggagcccccaccttcaaccaaggaaggcaacgagtgattgtgcaacccttcccgggaaagcacgattttcctatggatctttgcaacccacatatcagaagatccccttgtgagcccatgccatcatggccttgggtccaaagcacagaaatgtgtaagtcttggtagaaacactcactagctcactcaggcatacaggaagacccaggagttttgcatacwccagccccaggaagtccagcaaggcaggatatctatctatgcattcccctaggaagagggctgaatcaagaaagccaagtgatattattctgaggccccactcccatggcacctcacaaggtaagacccactggcttggaattgcagctggccagtggcagcaggctacagagagcctgaaatggacagagttcccagggaga

SEQ ID NO: 739463 - DNA, 558 bp, Homo sapiens
atatatgcgtgttttgtatatatagctataatgactatggctatgtaatactatagcaatagaacatgtagctacatgctactaccatcctcgatggtgtttctaagagacctctgtggaaggatgaaaggtaatcacaggccaggcgcgatggctcacgcctgtaatcccagcacattgggagggcgaggcgggcagatcacaaggtcaggagacagagaccatcctgcctaacacggtgaaaccttgtctctactaaaaatacaaaaaattagcccgggcttggtggtgggcgcctgtagtcccagttactcctgaaggtgaggcaggcaaatggcgtgaacccgggaggcggagcttgcagtgcgccgagatcatgccactgcactccagcctgggcgacagagcgagactccatctcaamaaaaaaaaaaaaaaaaaaaaaagataatcacaggctaattaagatgcaaagactaaagattattcaaatgataaatttaaattttcttcttaaacatgactattcatacatatttacaaaaaatgctttttgaa

SEQ ID NO: 739464 - DNA, 461 bp, Homo sapiens
gacatactaggattttcatgacatagacactgcctctctgtcttctccacccaccatttccttaaacatcatttgcagttgtgtttcaatatcacaacatatctgaaaattgccaattataccaggttctctccttgattctgaatctgttccttccatctgactataatgtctcccccatctaaccctgtcaatgtcaccttcttcatcaaagtttttctcacaaataaaatcaatatctcmtttataagccattttgccttttacataatttttagcaatatttttacttgatatagatttgtttgtttctatatcaatttatactaactgatattaagtaaaagattaggtcttattcatctttatattgccattgtttaattcaatgccaatcacatggtttgtattcaaaagttattcatcatatgaataaaaaaatatgaatgaggccaggtgca

SEQ ID NO: 739465 - DNA, 590 bp, Homo sapiens
actccatcaaaaaaaaaaaaaaaaaaaaaaaaaggctaatacaaagggtctttttggtaaaatttcccatttgtctaatttttcatcttttcccatcccaactgacttgacttgcagtatagtaataattgagaacactatataccctatggtctccttattcatcaaagggcctacccattttctcacaagtgggcactcaatgtatatctgtggaatgcatgtatgaccaaagaggaagagtccacagaatgaaacgggagctcacatttgagtgtggtacaagtcacccggagcaatgaaagaccaccacagactggggtgtcagagtcagctacctttaaaaggcaaatacaggataaaagtttagaatgattcctggctccaaaacactgccttcagtctaatctaagattttaataaaaacatatttacgcctatgaaataataaaacrtataacttttaggcaaatataagactaacaaaaacatacctacatatgtaaaattctagacttcaccttaggtaaagtcctaaaataacttcttcaaatttcctttgcctaatgaggatatggcccaggactagt

SEQ ID NO: 739466 - DNA, 650 bp, Homo sapiens
tcggtcccatgatgaagtctagaagttataccggctttttaattaaacattttggttttcttcctcacaaaattaatactttatacattcaatttaactgctaaagaaaatatacactgatccatactgccagataaaagtagtccacatggacaaatgacagagcgtaaggccaacagtcactcagaaagatcaataggcgtatattgtcacaggtttgcagacatgctccaggccttgatgaaccaaaccagctgaattattatctgactcactgtccccatgcctcccgagcctatctatacatataaggtcacattaatattaattccaaatgacagtagctcctagcacctccagtgtaacaccaggaccttagccactcttcccaaatctcccttggtcatttctgggagtctccagagtgatgtctcaggcatgtcctgtaacaaatccacccatgtttgcctgctcctgctgtcactgctggctatccactgggacttcatacyagactgcgggcccagatggagaacaggcacatgctatctccttccactgttcttggcccttctatcctcctatttcctcaacaaaagaagcaacagaaactaacaaaaactctctcctccttaagttgaaaaaaaaag

SEQ ID NO: 739467 - DNA, 628 bp, Homo sapiens
gacagccaatacctaaacaatccttaaacttaacttctgcacactgaaatttgaatttcatacaattttacatgttatgaagtatcttttaattttttttccatttaaaagtataaaatcattttcccctttctttcctcaccagtcataccaaaacaggtggcagactgcacttggctctcaggctggagtttgctgacccctctagcagaatgccttccttcaaagctttcatctcctgctatgaagtctctcagtgtcacacctaagtttccttcagttaratgctaaccttcttggaatatattcttttgatggtacagagatgccctgggttgtaaagcaaaaaatcacacctctgacttagcttgtgtttttgtcacacgtttctgatccaaaacataaaatgataaaattcagaggttggaagaacaacttcatttctattttagaaaacacaatcatttgaacatgtttactgaaagcactgatatgttttataaattcagtttttcctttcttttcttgtaaaactttctcattgcttttacacctttactaagaaaaaattgccttgatattgaagagggagacttcccttactgttatcctgtaaaagccgtatttc

SEQ ID NO: 739468 - DNA, 658 bp, Homo sapiens
taaaatgtcaaaaaattaaatatttcaaaaatattggattatgcatagcttataaattatgattatgaagaacttttggcaacaggggagatctttaagttgatagaaaaaggaaagaaatgtattaaaaccctgacaaagattgctttagggtagcggaaaaaagggtgattttmttttcttttctaatttttctctatgttccgtgaaggtgattatattattattattcaaaattatttaaaacaattgctaagtacttaatgatgcttgaatccagcaggagagaacagagatcattttgagctataggctgaaaggaaatgacacataaatatggagaaagtcttgatggggtgggtctttcctttatcatatctatgcagatagaagaagtggcttccaggtggacacagccacctcacaaataggctctattcccattcctatttttcctaaaaagagcctttgcctgaattctccacctaacttcttcaaaatcctcaactattcatccaatctggagttaataagaaacatttgtgtataagtaggagcaaataatattttacttttttatttataagatagcaaatgcacatcaggaattgcaaagctgtttttgagaaaacgaggatccagtttacctgaagagttg

SEQ ID NO: 739469 - DNA, 625 bp, Homo sapiens
tgtttattgaggtgattaaatgatgcaaatccggtaaagcattgagcacagtgcccgcacatagtgagagctcaacaaatagttttgttttagaattacagcactttgtatttattcaaagcattttcagatacatcatcttattgatctgagccttaattctgtaaagatcatgaggcaggtattatacacctcttgtacctctacacgcacacacacmccccccaccccttccggttctggacagacacagaaagttcaagagtcgttcaagttagtgatagagctggtattacaagagtcaataacactggtctttctccctcctatctcactgagtagggaggacatccatatgtgttcccaggttcaggcagagtggcatcatgtcaacaactactgttctatttctgtggtacagtgttcatggaatagaaaaaaaaaatgctattttcttaatggcttgaaaaaactttatagacaacttaaaagacgtcaagggctctttgagtggcagagaaaaggtgacgtttagatgaggtgaaggattggtacttagccctgcttggggaacaagctcaccagaagtaagggattttaatcaaaactgcctgggaagaggaga

SEQ ID NO: 739470 - DNA, 642 bp, Homo sapiens
gatttatttgcattgatatatatagctctcagtcatttacctaactgctaactaatatttcattatatgaataagctgtaatttatatatacattctccaactgatgcacattaaagttgtttctaacttttgactctcacacataattctgctaagaatatcattgtataatctctttgtttatatgtttgaaagctgctataaggggctgaattgcgtattctccaaaatcctgtcagcttcaaaattctatgcttccatatcgtatctattcctcggctcacatgaatccaaattagggtttcttaaaacagtagaagtgttcaatgataattctaataaaacatacacagaactatttttttggatacactgattgctattcagaattatagcggaaagatataaatataagacacagaatctgctctcagtgtttcttactttattggtatgccaacagagtatttcacagttcattgaaaatcgattaaaataaytactaggtcattagtgtggactttgagtatgagtgtaaagacctcactcactaaataattcatggcagtcagcaagttaagtcctgttagcaagtattgattcagtaatgtaatactacctagtccaaactacgtaatttt

SEQ ID NO: 739471 - DNA, 520 bp, Homo sapiens
ctaaacgaccatctgaagcatctgcttacaagcgtaagtactgcaaagattagataatgattgactgtatgtatcatgcaccatccatatctcttcatgatttaacaatttcaaatcttcaactcaaaaccttaaaaatctccctctacacactgctttgaatgtgtcccrgagattctggtatgttgtgtctttgttctcgttggtttcaaagaacatctttatttctgccttcatttcattatgtacccagtagtcattcaggaacaggttgttcagtttccatgtagctgagcggttttgagtgagtttcttaatcctgagttctagtttgattgcactgtggtctgagagacaagtttgttatgatttctgttcttttacatttgctgaggagagctttacttccaactatgtggtcaattttgggataggtgtggtgtggtgctgaaaaaaatgtatattctgttgatttggggtggagagttctgtagatgtctattaggtctgcttggtgcag

SEQ ID NO: 739472 - DNA, 624 bp, Homo sapiens
gtgtaataactatcaattcagctatcataacagctaaactgagtattagcagctagctaccatgaactgggcgaaatatagagatcatatgcctaagtttaccacttctacaacatgcagcataagcctaccactctgaaaacaagcaccaattacataatcaacatttagagtgcccactgagtcaggctatggaggaaaccctggggatacaaaagttgtacatgtactgtgttgattcccaaattccttagagagtattcatggaggataaaacatacatgagatttgaattgctctttgccmaaacttagcatcactcatatattatctatcatatctccacagcattagaattcctagatagccaagtatggcatcacaacaggccaagcttctatctgatttctaagagaaaagtcattgttttagtgtatgtggacaagaaatggctctttgactgaactcactaatggtcttcagtcacaaaaaataaacagtggaaaattttctctgaagagaactccaggtagtagcctgttatcaaagaaaccagtgttagcttacttagaattatttgacttgatgtgtgggcagaaccacagttaaaaattgttaaggcct

SEQ ID NO: 739473 - DNA, 624 bp, Homo sapiens
gtgtaataactatcaattcagctatcataacagctaaactgagtattagcagctagctaccatgaactgggcgaaatatagagatcatatgcctaagtttaccacttctacaacatgcagcataagcctaccactctgaaaacaagcaccaattacataatcaacatttagagtgcccactgagtcaggctatggaggaaaccctggggatacaaaagttgtacatgtactgtgttgattcccaaattccttagagagtattcatggaggataaaacatacatgagatttgaattgctctttgccaaaacttagcatcactcatatattatctatcatatctccayagcattagaattcctagatagccaagtatggcatcacaacaggccaagcttctatctgatttctaagagaaaagtcattgttttagtgtatgtggacaagaaatggctctttgactgaactcactaatggtcttcagtcacaaaaaataaacagtggaaaattttctctgaagagaactccaggtagtagcctgttatcaaagaaaccagtgttagcttacttagaattatttgacttgatgtgtgggcagaaccacagttaaaaattgttaaggcct

SEQ ID NO: 739474 - DNA, 595 bp, Homo sapiens
ataataaaaggatcaatacatgaagaagacataacaatccttaatgtgtatgagcctaacagtgtcaaaatacaggaggcaaaaactgatagaactgcaaggagaaatagatgaatccacaattgtagttggagacttcaatacccctgtattagaaatgaacagatccagcgggcagaaaatcagcaaggacatagttaaactcaacagcaccatcaatcaactgtatataattaayatctctagaagttcctccaacaacaacatattacacattcttttcaagctcacatgcaacatttaccaagatagacatattctgagccataaaatacaccttaacaaacttaaaagaatagaaatcatacagtgtctgctctcaggcaatagtggaattaaactaaaaattctcaacagaaacatacttgaaaatccccaaacagttgaagattaaacaacacaattctaaataatgcatgggccaaagaaggaatctcaagagaaaaatataaatttttaaagtaaattacaatgaaaatataacttacaaaaaatttgtgggaatgagtgaaagcagtgcttagagggaaattta

SEQ ID NO: 739475 - DNA, 595 bp, Homo sapiens
ataataaaaggatcaatacatgaagaagacataacaatccttaatgtgtatgagcctaacagtgtcaaaatacaggaggcaaaaactgatagaactgcaaggagaaatagatgaatccacaattgtagttggagacttcaatacccctgtattagaaatgaacagatccagcgggcagaaaatcagcaaggacatagttaaactcaacagcaccatcaatcaactgtatataattaacatctctagaagttcctccaacaacaacatattacacattcttttcaagctcacatgcaacatttaccaagatagacatattctgagccataaaatacaccttaacaaacttaaaagaatagaaatcatacagtgtctgctctcaggcaatagtggaattaaactaaaaattcwcaacagaaacatacttgaaaatccccaaacagttgaagattaaacaacacaattctaaataatgcatgggccaaagaaggaatctcaagagaaaaatataaatttttaaagtaaattacaatgaaaatataacttacaaaaaatttgtgggaatgagtgaaagcagtgcttagagggaaattta

SEQ ID NO: 739476 - DNA, 620 bp, Homo sapiens
gtaatagaaagatgaggacggaaaaatgaaagcagaaagcatcacgcacacacaccagcatgggccctgaccgtccacagggccagaggctgctacccagcccataagccaaatcccctgtggggctgtgtctgcacagtggaccctatgccttcccaccctggagaggccagcctcctagcatctaccaggaaaggccaccatggaagtggcattgggagctccagaatgagtaaggctgaggccccatggccacgggctattctgggtgttgtgtggctctgggaagccccctttaacagtgacatttactgagcaccaggaatgtgctcagcacttggcttggctaatctggggctatcrgggatgacacaatcatcatcttaagaaatttacaaccttcttacccgggaagacaaactaccagatgacaccaatggaggaaaaggaagggctcggctatggtttgggtcctgctgaacagcatcaccatctccagacacccagggccaccacgtacacttcggcaggctgcgtggtgtgccgcctgcgcaggggtctacagtggccctgtgtcacctctaatcaaaatctttttgactcagctttctccttcactc

SEQ ID NO: 739477 - DNA, 634 bp, Homo sapiens
cttatgttgaatgtctgctgtgcaccccactctgctgtgccccctggtcaatttcttaagcacctactatgtgtcaggtgccaggtgccttaggtttcacagcaacagtgagacctcatggctgccttcatgaagcatatactaggggagatagaggagccaaaacacaaaacaaatgcaattgaaacaaagacrtgtcccacagcaaggggtgggcagtcagggagggctctctgaggaggtggcatttaggctggacgtaaagaatggagggtttgcctggcagagagttgggggaagagctcttcagcaggaggagctgcattggcaaaggcagagagtaggtgagacctggcagattcggggaaggcagaggctagggagcagccaggaagtggtgggtgatgagatcaggaggcccccccgccacctgctgtgagctgtaggccctggggaagtgcatagatttttctctgagagtaccaggaagccactgaaggattgtctttttcaatcttctgttgattacctagaattattaggaatgtccgggtcttcctgtactgggcaagaacagccctgggcctgccactcagttctctgggcgtgtttggttgctggtttttctctttcc

SEQ ID NO: 739478 - DNA, 638 bp, Homo sapiens
atttcaattgagattgcattaagtctgcagactgctttggtagtgtggacacgttaacaatattgagtcttccaatccatgaacatggaatatctttccatttttgtgtcctcttcaatttctttcatcagtgttttatagttttcattttatagatcttttacttctttggttaattctgagtatttttaattgtggctattgtaaatggaattactttttaatttctttttcagattgttcactgttggcatatagaaatgctactgactttttgtatgttgattttgtatcctgaaactgtagtgaatttgttcatcagttctaattttttttgtgtgtggagtcttgaggtttttccagatataagatcatatcacatgctaacaaggataatttgacttcttcctttccaatatgkatgccccttatttctgtttgattcctctagctaggacctccagcactatgttgagtaacagcggtgaaagtgggaatccttgttgtgttccaggtcttagaggaaaggctttcagtttttccccattcagtatgatactaaatgtttgtctgtcatatatgggttttattatattgaggtttgttccttctatacccagatttttgagggtttttat

SEQ ID NO: 739479 - DNA, 644 bp, Homo sapiens
ttctgtttgattcctctagctaggacctccagcactatgttgagtaacagcggtgaaagtgggaatccttgttgtgttccaggtcttagaggaaaggctttcagtttttccccattcagtatgatactaaatgtttgtctgtcatatatgggttttattatattgaggtttgttccttctatacccagatttttgagggtttttatcatgaagggatgttgaattttattcaatgctttttaagcatcaattgaaatgataatatggtttttgtccttcatcctgttgatatatcaaattgattgatttgcatatgccgaaccattcttgcatcccagagataaatcccatttgttcatgatgaatgatctttttaacgtattgttgaatttagtttgctagtattttgttgagaatttttgttatcaatattcatcagagatattggcctataattttttctcatgtgtctgtctggttttggtatcgcraaagcactggccttgtagaattactctggaagtattctatcctcttctattttaaaaaatagtatgagtaggattggtattagttcttctttaaatgttttgtagatttcagcagttaagtcattggatcctggggttttctttactgggaga

SEQ ID NO: 739480 - DNA, 628 bp, Homo sapiens
tctaatttgtcctcctcctggtacatccgatgtggattagaccagtatacaaacagacaaagagcccttaaggaagtctaaaaacccctgttggcaaacactgagtttgaggtttattagaagaaaacaaggaaagggacagccaagaagactcatcctggagactccctcatccttgaggggccataagagtgtgcacaggcactatcttgtacccactctggaaaatcaaagcacagtgtggtaatggcttaaaaaaatcacctcaagccattcacagatccctcaacaaaaaaaactttgagccctaaagtttccaggagcttaaaaacaacctgtgaccagacactggcagaaaaataagctccttagacctggggcagctcatgggaagacaagcttaaaatgaaatctcactcatccctggtcatcagaacaactgtgcacagacctaaggctgtgctctgcygtgtgtcactggagacgtagcctcagaacgtgtctctggatgatcactgaggtaggagaagacaaaaactgtaaatttcccaagcagagaaagcagcctccaagctgcacttattaccaacagcaatgggtgaaaatgtaatggattaaggggagttaa

SEQ ID NO: 739481 - DNA, 628 bp, Homo sapiens
tctaatttgtcctcctcctggtacatccgatgtggattagaccagtatacaaacagacaaagagcccttaaggaagtctaaaaacccctgttggcaaacactgagtttgaggtttattagaagaaaacaaggaaagggacagccaagaagactcatcctggagactccctcatccttgaggggccataagagtgtgcacaggcactatcttgtacccactctggaaaatcaaagcacagtgtggtaatggcttaaaaaaatcacctcaagccattcacagatccctcaacaaaaaaaactttgagccctaaagtttccaggagcttaaaaacaacctgtgaccagacactggcagaaaaataagctccttagacctggggcagctcatgggaagacaagcttaaaatgaaatctcactcatccctggtcatcagaacaactgtgcacagacctaaggctgtgctctgccgygtgtcactggagacgtagcctcagaacgtgtctctggatgatcactgaggtaggagaagacaaaaactgtaaatttcccaagcagagaaagcagcctccaagctgcacttattaccaacagcaatgggtgaaaatgtaatggattaaggggagttaa

SEQ ID NO: 739482 - DNA, 616 bp, Homo sapiens
cagtaaacacagtgattgaacaacaaaacctaaaaaccccagaaggaaggtgtatgtccttatccaaattgctacaatatattatgtaaaatttccagtttttaaccaaaaagtatgagacatgcaaagaactaggaaagtgtaggccattcataggaaataaaatagccactagaaattacagtaaagttctgaatactttccccctaatgtaggaaacacaattaccaatatcttaccggggcaagatattgaatttaatacagaaagacytgaaaacaactaaagaaaattatatttataaagtcacatatagatatgagaacaataattcaacaaataatgtcaataaagatataaaaattctaaaaataaccaaacataaattctgggatcgaaaaatacaataactaagatataaattttactagaagggctcaacagtagatttaagttgacaaaaaagtcactactgaccttatggaaatataaagaattataagggagtaatatgaatgactgtatgctgcaaagtagataacagagataaaatgaaaaaatcctagaaagatcaaattactgaaactgacttaagaagaaatgtaaaatataaata

SEQ ID NO: 739483 - DNA, 623 bp, Homo sapiens
gtatgctgcaaagtagataacagagataaaatgaaaaaatcctagaaagatcaaattactgaaactgacttaagaagaaatgtaaaatataaatagaccaatgaacaagcaaagaaatagaatacttttaaaacttctcattaaaaaaagctcagatgcagatgactttggtggtgaatgctacaaagcatttaaagaacaccaaccctttactaacttttccagaaaataaargaaaggaaacactttcctacttgttctttgagatcagtattatcataatagcaaaaccaaaaatatatatattttaaaaactataaacccacatcttttaggactatagatgcaaaaaatcctcaacaaaatactagcaaaccaaatctggtaacatataaaaagagatatacaacatgacaaagtaggatttaccaaggaacagaagattggtttcacatccaaaatcaatgtactatacgcctcataaaggacaaaaaaacatgattatttaaatagatgaacaaaaataattagactacatccaacactctttcatgattaaaacctaccctatgaactaggactagaggggaatctaaacccaacgaacagtatcagtgaaaagc

SEQ ID NO: 739484 - DNA, 623 bp, Homo sapiens
gtatgctgcaaagtagataacagagataaaatgaaaaaatcctagaaagatcaaattactgaaactgacttaagaagaaatgtaaaatataaatagaccaatgaacaagcaaagaaatagaatacttttaaaacttctcattaaaaaaagctcagatgcagatgactttggtggtgaatgctacaaagcatttaaagaacaccaaccctttactaacttttccagaaaataaaggaaaggaaacactttcctacttgttctttgagatcagtattatcataatagcaaaaccaaaaatatatatattttaaaaactataaacccacatcttttaggactatagatgcaaaaaatcctcaacaaaatactagcaaaccaaatctggtaacatataaaaagagatatacaacatgacaaagtaggatttaccaaggaacagaagattggtttcacatccaaaatcaatgtastatacgcctcataaaggacaaaaaaacatgattatttaaatagatgaacaaaaataattagactacatccaacactctttcatgattaaaacctaccctatgaactaggactagaggggaatctaaacccaacgaacagtatcagtgaaaagc

SEQ ID NO: 739485 - DNA, 522 bp, Homo sapiens
tttcgttgattcatgaatccatgtttattgtttggtttttcaaaaatctgtttctctgttttctcggcaatcttagtaaggcctttatatgtttacatggttaagaatctgtattgtagatcggtacttaaggtttgaagtcaaygtatgattatgtgtatgctaattctaaatgcatatttgatgctcctaaagataaacattaaaaattgttcctgagtacacctaagactttagtgataatgtttaagtagaaatgtaactcccaaaaagtttatatcaagtaatgtggatgaaagaaaggaacatgagaaaagaatcaaattttacgtgaaacagaagtggtactgtatacacaacctaacagcttctacagtttctttttttaactatcatcttagcttcaagggtacatgtgcaggtttgttatatggctaaagtgcatgtcacaagggtttggtgtaccgattatttcctcacccaggtaatgagcatagtgcccaaaaggtagttttttgatcc

SEQ ID NO: 739486 - DNA, 555 bp, Homo sapiens
cttctttttatggctgcatagtattccatggtgtatatgtaccccactttctttatccggtccactgttcatgggcatttagattgatactctgtctttactattgtgaataatgctgtgatgtgtcagggatagcacctgggattgcatctcagtgtggccaacaacacccwgcagcttcgccctgactgacagctgctggctccacagcagggacttggcttgtcattgtctttcttgagaccactttctgtgtcctgtaaggcatctcaagagaaaacagtacccttatggacactgtaggccaccagcaactgcctcttggtactatggttttagtgaccctactgtaaaaccatgagtaggttttccttatatttagtatttatgccatattttaacctaataattgattcatgaatgcttaagacattcacatattcacttagtatctccccagactagtggtaccatgtaagccttgaccttaatttatttgtgcataccatctgtttgttcctgagttgtttctatacccaagagttcatctttggt

SEQ ID NO: 739487 - DNA, 620 bp, Homo sapiens
ctcaggtgtaccaattaggggtgacatctgagtctctatgggtgacattgtttgcactctaaactgatgacatcagacatctcattttcagcttcattcctgtggtaggcagaataatctcccccttccccagaaaatgtccacatcctaatccctggaatctgtgaatatgtcaccttacatgacaaagggactttgcagatgtgactaagtttgaagctcctaaaccaataagactatcttggcagacccttaaaagtagagaccctttccaactgcggagagagaaagacaggatgacagaaggaggtgcagagagaggcaacaagaggaaggctctgccagccacacggaggaaggggccatgggccaaggacactggaaaagggatagaaacagattytcccccggggccttcagaactgaaagtagttctgccaacagcttgattttagctctgtgggacccacattggaacttctgacatcccagaactgtaagataataaatttgtattgtttaagctgttaagtttgtgttaaattgtcacagcaacactagaaaacaaatacaattacaaaaaaaaaaatacaattaccaatcagtgccttgccttgctc

SEQ ID NO: 739488 - DNA, 610 bp, Homo sapiens
actttataatatacctatgtagttaccagtgccctttatttcttcatgtggatttgagttcatgtgtatggtcctttcattttagcctgaaatattctctttagcatttcttgcagggcaggtctgctagtgaaaaaaattctcaatttttgtatatctgagaatatcttactttctctttcattttcgaggcataaaagcatagtattcctgcatactacaaatttctgcatacatagaattcttggctgacagtctgtcttttagcactttgaatatgtcatcctcctgccttctggcttccatggtttctgctgataattcatgttaatcttattgaggatctcagtctctctctctctctctctctctctcwctcgctctgagttgaaagagtcttgctctatcacctaggctggagtgcagtggtacaatcacagctcagtgaagcctcgactttccaagctcaagcaatcctccccaccacagcctcccaagttgctgggactacaggtgcacacgactttgcctattttttgtatttcttatagagacaggatttcatcatgttgccaggctggtctcaaactcctgggctcaagggatccac

SEQ ID NO: 739489 - DNA, 562 bp, Homo sapiens
tagtgcttagcatgtggtaaatgatgatcagtaaatgatgagaaatggagactggaatctattctattctcatgcagtgtctttgttgagagaccaaattgtagataaagagtaatgaatttttaagtgtgtattaggttggcaatttgtccactcccagcttattcaataaaatcattcaaaactatgtacctttttttttttttttaaatagaaacttaaggaaactgggcacagtctccttcatatcaaatctcatgttcacagtgcttgttttacaagccatagttgtagagctaattggacaattaacttggggggagcatacttcctaaccttagaattaacaacagtggmaaacacattagaaaactccaagggtgagtacagttgcaaaataggcccttgatggttatttcagaaactctgcactgagcacacatagtgacttggaagcacttgtatagctttctgttgcttgaatagtccactcagatttcagaccctgctaggaatcatcaaccagctctgggtaaaggactgaatcagaatggctggtcat

SEQ ID NO: 739490 - DNA, 639 bp, Homo sapiens
ctaagaaattatagatgacagaccagtgaattgatagtgcctctttctcacacactttagatgtgtgtgagatatttgagatgtatctttcataatttatgtgaagaatttactgtaaaaggtcatattctgaaatgaactgatttttccccyaacttggcatcaagtaatagattagtaagttctcttcttaaaaatcacagtacagtctcttgagctagcttttctttcaaaaacagtagcttttcaaagaccaatgacatctcgtctgtttgctctcagtgctgcattctgagatgaagaatattcatttgataaagtttggctctgtgtccccacccaaatcgaatcccaaattgtaatccccacatttcagggggggggacccggtgggaggtgattggatcatgggggcggtttcccccatgctattcttgtgatagtgagttttcatgagatctgatggtttaaaagtttggcacctcccccctgccccttctgccaccatgtaaggtatgccttgcttctctttcgccttctgccacaattgtaagtttcctgaggcctccccagccatgcagaactgtgcaccaattaaacctctttctttataaattaccccatctcaggtcattcttt

SEQ ID NO: 739491 - DNA, 602 bp, Homo sapiens
ttttcattttttaaaagttcttgtggcaacagagactacaaatgctaaagcttctgcatgctgagttttgctcatatggttcagtttcccatgacatttgtaaattctcaaaacacagaagaaaagaaaagagtcaggtggtgtcctcaaacacttatagagcaccctatgtctctccaggcagcgccacagatacatagacagtagaggttcaatacatgcttttcctgtcactgaattcttcaggtagttccttataacctgctcttattaaggaggtctaaggaagccttgagatctctccagaaatagaaaagcatccaaaagctttgacaccagcctccaatatttctgatggctttaaaggacgtctttaggacaggcagggggmcttgataaggctttctagttataagtcatgcagacttccttgcagaagcctcagatggggggaataagttaaatacagctgcttcagcctggggtgctcgatattgtctttaatgattaaaaatgctgactccagtgggagcagagcacatgctgcagagattattatggtttgaagcattttctatgtgagtggcaaggggcagggtggg

SEQ ID NO: 739492 - DNA, 618 bp, Homo sapiens
attgaggtgttttatctaggtagataaaaatctgaaatgtgtattagaatactccgaaaatgtattagcaaaaattgaaaaatggagaaaattgttagatgagggtagcttataacagattaccaaaggcagaagtatttgtattttaaaagtaaaacaatgaacaaaaaaaaaaatcaatgaattatagaaataggtgaaaaaagcagaaacaagagaaggtctgggtaaagatcacttaaatgaattttttattatgatactttaagttctgggatacatgtgcagaacrtgcagatttgttacataggtatacatgtgccatgatggtttgctgcacccatcaacccgtcatctacattaggtatttctcccaatgctatccatccccttgccccccacccgcaacaggcccccttgtgtaatattcccctccctgtgcccatatgttctcattgtttaactcccacttatgagggaggacatgcagtgtttggctttctgttcctgagttactttgctgagaatgactgtttccagcttcattcatgtccctccaaaggatatgaactcattcttttttatggctgcatagttattgcatggtatatatgtgcc

SEQ ID NO: 739493 - DNA, 618 bp, Homo sapiens
attgaggtgttttatctaggtagataaaaatctgaaatgtgtattagaatactccgaaaatgtattagcaaaaattgaaaaatggagaaaattgttagatgagggtagcttataacagattaccaaaggcagaagtatttgtattttaaaagtaaaacaatgaacaaaaaaaaaaatcaatgaattatagaaataggtgaaaaaagcagaaacaagagaaggtctgggtaaagatcacttaaatgaattttttattatgatactttaagttctgggatacatgtgcagaacgtgcagatttgttacataggtatacatgtgccatgrtggtttgctgcacccatcaacccgtcatctacattaggtatttctcccaatgctatccatccccttgccccccacccgcaacaggcccccttgtgtaatattcccctccctgtgcccatatgttctcattgtttaactcccacttatgagggaggacatgcagtgtttggctttctgttcctgagttactttgctgagaatgactgtttccagcttcattcatgtccctccaaaggatatgaactcattcttttttatggctgcatagttattgcatggtatatatgtgcc

SEQ ID NO: 739494 - DNA, 618 bp, Homo sapiens
attgaggtgttttatctaggtagataaaaatctgaaatgtgtattagaatactccgaaaatgtattagcaaaaattgaaaaatggagaaaattgttagatgagggtagcttataacagattaccaaaggcagaagtatttgtattttaaaagtaaaacaatgaacaaaaaaaaaaatcaatgaattatagaaataggtgaaaaaagcagaaacaagagaaggtctgggtaaagatcacttaaatgaattttttattatgatactttaagttctgggatacatgtgcagaacgtgcagatttgttacataggtatacatgtgccatgatggtttgctgcacccatcaacccgtcatctacattaggtatttctcccaatgctatccatccccttgmcccccacccgcaacaggcccccttgtgtaatattcccctccctgtgcccatatgttctcattgtttaactcccacttatgagggaggacatgcagtgtttggctttctgttcctgagttactttgctgagaatgactgtttccagcttcattcatgtccctccaaaggatatgaactcattcttttttatggctgcatagttattgcatggtatatatgtgcc

SEQ ID NO: 739495 - DNA, 650 bp, Homo sapiens
gactatatactatgagccaggcaatgggctaacaactttatcttgccacactaatctttacaaccacctgaagatctaggttctcttgtcactcctatcttgcagataaggagacacagaaaggttaaaggtcacgtcaggccattggtggaaccaagatatgccatggtccttggaagagttctttcagcctacacaacatatgtattagtccgttttcacgctgctgataaagacatacctgagactggggataaaaagaggtttaattggacttaaagttccacatggctggggaggtctcagaatcatggtgggaggcgaaaggcacttcttacatggcagcggcaagagaaaatgaggaagatgcaaaagtggaaacccctgataaaaccatcaggtcttgtgagacttattcactactatgacaacagtatgggggaaccgcccccatgattcaatgatctcccaccaggtccctcctacaacacatgggaattatgggcrtacaattcaagatgagatttgggtggggacacagagccaaaccatatcaccatatatatttccatttactaaaaaccacagaatttgacttcctgaatttgtgtttctaaactaaaaatttccttcaaaacttttctcatgca

SEQ ID NO: 739496 - DNA, 631 bp, Homo sapiens
aaaatgtagttgctaccctgaggcttgaccactggcctactggcctttacctgggaaattaaccaactcataaacaaacaaaaaaaagtaatcatataggaggcagggtggacatagatttacttgatatttctagttaagggacttgggcatagacatctataatctgagcctctgtttcctcatttataaaattgggttaataatgccatacagaagtgttattagcatgataaattaaggaaagctcctggcctatagtgaatgtwcaatagaggagcatttcataagtgaagccacagaaatgtgtttccaatttccatcgcaaaggaaatttttaattggttttatccctgaagccaaaatattttaagattgtacttataaagctgatcacatctattaaataatcattcattcgtccagttataaataatcaaagataaaatggttagaggttctgatcagcataaattagccagtgttaccactactaagtcaatgaagcctaaagcaaatcaaataaacattgacatttcatttttgccagcatgtattttgtgtgtaaatattttgttaggcttttggaaatattaaaaatgaagtaagaatccccatttctgctaccata

SEQ ID NO: 739497 - DNA, 631 bp, Homo sapiens
aaaatgtagttgctaccctgaggcttgaccactggcctactggcctttacctgggaaattaaccaactcataaacaaacaaaaaaaagtaatcatataggaggcagggtggacatagatttacttgatatttctagttaagggacttgggcatagacatctataatctgagcctctgtttcctcatttataaaattgggttaataatgccatacagaagtgttattagcatgataaattaaggaaagctcctggcctatagtgaatgttcaatagaggagcatttcataagtgaagccacagaaatgtgtttccaatttccatcgcaaaggaaatttttaattggttttatccctgaagccaaaatattttaagattgtacttataaagctgatcacatctattaaataatcattcattcgtccagttataaataatcaaagatwaaatggttagaggttctgatcagcataaattagccagtgttaccactactaagtcaatgaagcctaaagcaaatcaaataaacattgacatttcatttttgccagcatgtattttgtgtgtaaatattttgttaggcttttggaaatattaaaaatgaagtaagaatccccatttctgctaccata

SEQ ID NO: 739498 - DNA, 478 bp, Homo sapiens
ataattatttgtgtggccttcaggtcagactttttgcttttacagctctaaaatgttatttgtttaaatcccagccctaaaatatttaatataaactattaaaacaccatttgcatgaccaacttattcttcactgaatctcggctcataaaaaggttcattcatgttaaaaagctatttttaaatgcggctaactcattgcttagaatatgctaacaattaagcattatacttcactggaatttttatagtttaaaattatatttctcccatctcatttcctcccccaccaattctgccatcccaawtagcaacattattttaaactttgctgttttctatgacaataacctcattcactggtcattcagaaataatgtccttctgaagatgctggcaactgactttcacactcagttatatgtcaggttttggctacctaaagatgtatgagcacatcatgccaaggcccaagaga

SEQ ID NO: 739499 - DNA, 516 bp, Homo sapiens
gaagactacatttcccagtctgattgtatctatgtggggctatgctaccagttctggcaaatggactatgtaccagcagcacgatataccacttcatgcctagcacctacaatctgcaagacagcatctgcattctcctctctgtctactgtaggattatcagtgtccagcaaaaccaggacattcaccaacatattttgtcaagtaagcaagaaataaatttctattgtgttcatgtactgaaacttaagggtttctattaaagtgggatgattacttccgttgactaatacctagcmcaaactacactcaatcaagtatcaataataagcatattatttattatacgtttgaaagctggaagagaattattttgttcaaagaaatgtggatcaagtatcttgaaagcatttatcagtttaataacatttggcatactactttgtggagaaaaatcacatagggaacagagtactatacggtaaatgcaaagtccttctataatattttctgttg

SEQ ID NO: 739500 - DNA, 629 bp, Homo sapiens
catccatacattagaaaccataattttttttaagtagtggacttgaagtcaacacctgagtacttgtccaactttgtccttaattcattttctttctgtttcctcatttgcaaaatgacatgagactccaagatttctaaggtccgtctgagctctgatattgtattattaatcacaatctccaacttaattgacaaaacaactcaataattatttctatcataaaaataatctgattaaaggacgcaatttattacaaaatcagaaatagacacctcatccaaaggtcaattcctaatttcttgtataatccaaatcttccaaatgcaataatttaatccagaatatctagggagtgacatagcctctgtcccattaaaattggattaaaatccaaaataagaaaatcttgtaaatgtcttttctgtaktcctcagagaaagacagagtgagtgtactccttttgccagagtcagttttctctttagatcatattctttattccaaacacttactggtaactattacgtccactaagtcttctctccttaggttaaagatcacagttctatgacctctcctgacatcacatgattttttcaccactcacatacctgttcactgttaat

SEQ ID NO: 739501 - DNA, 629 bp, Homo sapiens
catccatacattagaaaccataattttttttaagtagtggacttgaagtcaacacctgagtacttgtccaactttgtccttaattcattttctttctgtttcctcatttgcaaaatgacatgagactccaagatttctaaggtccgtctgagctctgatattgtattattaatcacaatctccaacttaattgacaaaacaactcaataattatttctatcataaaaataatctgattaaaggacgcaatttattacaaaatcagaaatagacacctcatccaaaggtcaattcctaatttcttgtataatccaaatcttccaaatgcaataatttaatccagaatatctagggagtgacatagcctctgtcccattaaaattggattaaaatccaaaataagaaaatcttgtaaatgtcttttctgtagtcctyagagaaagacagagtgagtgtactccttttgccagagtcagttttctctttagatcatattctttattccaaacacttactggtaactattacgtccactaagtcttctctccttaggttaaagatcacagttctatgacctctcctgacatcacatgattttttcaccactcacatacctgttcactgttaat

SEQ ID NO: 739502 - DNA, 615 bp, Homo sapiens
cattcttctgcatatggatgtccagttttcccagtaaaatgtattgaagagactgtcctttcctcaacgtatatccttaaaatctttgccaaaaattagctcactgatacatggatttctcagttctttattctgttccattggtctctgtgtctatttttatgccagtaacatgctgatttggttactatagctctgtagtgtaatttaaagtcaggtaatatgattcttccagttttgttctttttgctttggatgtctttygctactctaggttttttgtagttccatataaattttaggatttttttttctatttctatgaataacgtcactggtgttttgataggaattgcattgaatctatagattgttagggtagtatagacattttaacaatattgattcttccaacccatgaacataaatatctttctatttttggtgtcattttcaatttcttgcatcaatgttttctggttttccttgtagaggtctttcatatctggttaaatttattcctaggtatcttatttttttgtagctactgtaaatgggattgctttcttgatttctttttcagattattcattgttgatatgtaaaaacgtgact

SEQ ID NO: 739503 - DNA, 607 bp, Homo sapiens
gaaaaaggaacacttatacactactggtgggagtgaaaattagttcaaccattgtggaaagcagtatggcaattcctcaaagagctaaaagtggaactaccatttgacccatcaatcccattactgggtatataaccagaggcatataaatcagtctgccatgaagacacgtgcatgtgaatgttcattgyggcactattcacaataacaaagacatggaatcaacctaaatgcccatcagtgacacacaggtaaaagaaaatgtggtacatatacaccatgaaatactatgcagccataaaaaaggacaagatcatgtttttgtgtgtgtgtgtgggaacatagatggaactagaggctattagccttagtaacctaatgcagaaacagaaaaccacatatcgcatgttctcagttatgagtaggagataaatcatgagaactcatgaatacaaagaaggtaacatcagacactggggtctacttgagggcggagagtaggaggatggagaggagcagaaaagataactgttagatactgtacttaatacctggatgatgaaataatctatacaacaaacccctgtgacatgaatttgcttatgta

SEQ ID NO: 739504 - DNA, 644 bp, Homo sapiens
gtttaaacttgtgttgttcaagggtcaactgtactttgtcatgctacccaaaagttactgtaccaagcttctatttttaaattgatctgaacaaaagctttcactactaggacaaaatttgacaacttctaagggtttatccacctccaagagagtatgattctctaatgctcctggctttgctaaacctcagaattgagatctttttctaaataagtctgacaaaaatgattgctcttggttattcaggggcaagaaactctgcctgagttatctttctaattgcctctgtttttcacttcaccaaccttaggatcatattattactcactggatctccttactaatgcacactgcaccagatattgatatttcacagggaatgaaagtaactttctaaagactgtaaaggatctarttacctgtattgactctgcccagaagcaaccacaaacaatgctgtaattaactgagtttagctataaatgggaaacatgagggtgatttttattatagacgaataaaggcaagctcactaagctgatgggtagcttatttaacattgtgaaatttgttcaatgcttctatactgtctttttaaaaaatccttttcccttctttgctgcttctctttttcccttctc

SEQ ID NO: 739505 - DNA, 674 bp, Homo sapiens
aatgggaagaaacttccaaactatgcatctgacaaagggctaatatctagaatttacgaggatctcaaacaaatcaacaagagataaacaaaaaactctattaaaaagtaagcaaaagatgtgaacattttttcaaaagaagacatataagctgccaaaaaacatattgacaaatccttagcatcactaatcatcagagaccacaatgagataccatcttatactagtcagaattgctatcattaaaaagtctaaaaacaaaagatgttggcaacgatgtggagaaaagggaacacttatacrctactggtgggaatgcaaattagtgaaacatttatggaaaacagaatggagatttttcaaataacagaaaatataactaccatttgatccggcaatttaacctctgggtatatacccaaagagaaataaatcattatataaaaaagatacctgcaccttgtttatcacagcactatttacagtagcaaagataaggaatcaacttaagtagctatcaacagaggactggataaagaaaatgtggtgtgtatatgtatatgtatatatatgaaatatagtgatatatacatgtgacataaatacatatgatatacacacaccatggaatactactcagccataaaaaagaatgaaatcatgtttttagcaac

SEQ ID NO: 739506 - DNA, 674 bp, Homo sapiens
aatgggaagaaacttccaaactatgcatctgacaaagggctaatatctagaatttacgaggatctcaaacaaatcaacaagagataaacaaaaaactctattaaaaagtaagcaaaagatgtgaacattttttcaaaagaagacatataagctgccaaaaaacatattgacaaatccttagcatcactaatcatcagagaccacaatgagataccatcttatactagtcagaattgctatcattaaaaagtctaaaaacaaaagatgttggcaacgatgtggagaaaagggaacacttatacactactggtgggaatgcaaattagtgaaacatttatggaaaacagaatggagatttttcaaataacagaaaatataactaccatttgatccggcaatttaacctctgggtatatacccaaagagaaataaatcattatataaaaaagatacctgcaccttgtttatcacagcactatttacagtagcaaagataaggaatcaacttaagtagctatcaacagaggactggakaaagaaaatgtggtgtgtatatgtatatgtatatatatgaaatatagtgatatatacatgtgacataaatacatatgatatacacacaccatggaatactactcagccataaaaaagaatgaaatcatgtttttagcaac

SEQ ID NO: 739507 - DNA, 613 bp, Homo sapiens
tattcttattacttttttaatataactttttttctgtagggcatacagagttaccacataacccagaaattccactcctaggtatataccccaagagaagtgaaaacatatgcctacgcagaaacttgtatgtaagtgttcmcagcagccttatcataatagccccaaagtggaaataacctaaatattcatcaactgatgaatagataaataaaatgtgtatatctatacagtgggatttcatttggccataagaatacaggaggtactgatatgagctacagagcgaaggaaacttgaaaatattttgctaagcgatagaagctcatcacaaaagaccacttactgaatgattccatttacatgaaatgtccagaatagacaaaatgacagggacagaaagtaggttattggttgcctaggacttgggggtacaggcgagaaatggagtgactactatactaataggtatggggtttcactgtaggctgatgctttatagtctgtgtctgacgatctggtatctggagtccctgtggatgtgtcttttgaatgttgttttgctagagggatattttctcctcctgcatctgtctgtatttgactgtgtgga

SEQ ID NO: 739508 - DNA, 613 bp, Homo sapiens
tattcttattacttttttaatataactttttttctgtagggcatacagagttaccacataacccagaaattccactcctaggtatataccccaagagaagtgaaaacatatgcctacgcagaaacttgtatgtaagtgttcacagcagccttatcataatagccccaaagtggaaataacctaaatattcatcaactgatgaatagataaataaaatgtgtatatctatacagtgggatttcatttggccataagaatacaggaggtactgatatgagctacagagcgaaggaaacttgaaaatattttgctaagcgatagaagytcatcacaaaagaccacttactgaatgattccatttacatgaaatgtccagaatagacaaaatgacagggacagaaagtaggttattggttgcctaggacttgggggtacaggcgagaaatggagtgactactatactaataggtatggggtttcactgtaggctgatgctttatagtctgtgtctgacgatctggtatctggagtccctgtggatgtgtcttttgaatgttgttttgctagagggatattttctcctcctgcatctgtctgtatttgactgtgtgga

SEQ ID NO: 739509 - DNA, 577 bp, Homo sapiens
gaggcggtgcactacatcggatctcgggtgcgtgcgccaccggcctcgtctggcggccgcgtgactcactcgatcctgcgggcggcgtggagcactcgctcgctccctgcccggagccgccaccttccctcgctttccctagccggaattgcacgagagtgtcccttctggtatccctgggaagctcagcttcaagagccttcgcaggctccaggagctgggcggcgtcccccagtcagggggaacttgcgttgcggctccagcccttggggtcyacttgctgtctgcgcgtccgcggcctgctggcccacggcgcagggggcgccgcccccctctaccggaccttggtgcgctgcaccaagcttcccgctcggagcaaggggttgggacgacggaggctcctcttagtaaaagggtggcgttattggggttcagtagcctgagtgggcgtcgagttggggagatttctggaaaatgcgtgtggggtagatggatggggagaagaggcaagcaaagtgggaatcggggacggggagcgagcgaccagattcactccaagtataacatgggatcccac

SEQ ID NO: 739510 - DNA, 577 bp, Homo sapiens
gaggcggtgcactacatcggatctcgggtgcgtgcgccaccggcctcgtctggcggccgcgtgactcactcgatcctgcgggcggcgtggagcactcgctcgctccctgcccggagccgccaccttccctcgctttccctagccggaattgcacgagagtgtcccttctggtatccctgggaagctcagcttcaagagccttcgcaggctccaggagctgggcggcgtcccccagtcagggggaacttgcgttgcggctccagcccttggggtctacttgctgtctgcgcgtcygcggcctgctggcccacggcgcagggggcgccgcccccctctaccggaccttggtgcgctgcaccaagcttcccgctcggagcaaggggttgggacgacggaggctcctcttagtaaaagggtggcgttattggggttcagtagcctgagtgggcgtcgagttggggagatttctggaaaatgcgtgtggggtagatggatggggagaagaggcaagcaaagtgggaatcggggacggggagcgagcgaccagattcactccaagtataacatgggatcccac

SEQ ID NO: 739511 - DNA, 575 bp, Homo sapiens
tttaaatccggatgcatagttttcctgccagaagttaatgcttacttctcatttgttttcttttcctgttgccttcagagctcacagagagaagatgctatttctgcaatctctaagacatgtggctttcccaggcagattgtttatttaatgaaaaagaagagaggtccactctatttgtttggagttatgtaaatattctttaaaaggaggatttcctcatttattccacttcagtcttcctgttcagagagagctttaaatgcaccttaaatcactatatgatgacagcttgagttacagttttataacagtaccaaatatattcaagaygttgtgaataagaaaggaaaaatggattaattcctaatttatctctctatatattacaatataagattattgcatatcttcacgtataaaaccagtttatcattataaacctagtaataaaaataacacatagtgctatgataataggtaagtttgaatagaaggtatcaaaaaggagacagataaggtattgttctatacatttagtactaatagttttgtttctttttttatttcacatt

SEQ ID NO: 739512 - DNA, 586 bp, Homo sapiens
tggccttccaagagtactcactggatggatgactcaccccagcttcagactcagccctcagtatcataagatgaacagtcttctctctcctgaacttgaggtttggtctctgaagccccctggggccagatgaactggaggcttatgggatggggtcggggggtggggagagtacatctcagtggttgaaaatgagtaatgtcagtttaaattacttttaccaatgctgctgtccgtcggaaacatcggcagttctcttgctggtccctctttcccctgagctggaaggtggaggcctctgcaragtctggtttctccatcagttcaacttctgtcttgaaactgcctctcaaaaattctcccagtagtaccatactcactcattatgcttttttgctatggatttattctgctcttataaacctcacttattgccatggaatttgggctggaaggaaaggcaaacatatgctcaagcttcaccttgaacttgagctccttgcggatttaaaaattttgtgccatcaccttttcagttgccactgcttccttccatcacatctttttttttttttttttttttttt

SEQ ID NO: 739513 - DNA, 637 bp, Homo sapiens
caaagaagaaggttatgccaggattaaaaattgggtgttgaactccgagagctctgtcccttccagcataacccactagtacagaacgctgactttcaaaagctggtgaggctcagccactccagggaatcagagctctaacatcagagtggctgagctgggagatacccaaaaaggaccatctcagtcaaatccttgttttatagatagtattattaataatgttttcaagtgcagattggagctggatatttttatatacattagcaggggtgcttccaggttataggtagatttaaaattgttctgattggcaactggctgaaagagttattatcaatagaaaggaatgtctgagctgccataagaggtttcagaaaccaaagttttatcatgcagatgaagcctccaggtagcaggcttcagagagaatagactgtaaatgcttcttatcagagttaagatctrtgttgatcttaacgctggtcagcttgtcttgaaatcaaaaagggaggaggtcataatgaggcttgtctaacaccttcttcctgtcatgacctgagccagtatctcaggttaatgttggaatgccctggccaagaggagggatccattcagaggatttggcggaggaact

SEQ ID NO: 739514 - DNA, 582 bp, Homo sapiens
ccagtggtctttacaagtggtgatgacaagctgtgctcagagcatctctttagtcctcgacttcctttaatggaagcatcgtgcctctttttcagaaggagaccaccacttattacatttcacaggtggctctttattcctagtctgaccctgtgcatgcctggtttttctcatctttgttccaagtttcacattagtgaagcagtatgcatacttggcttttgtagtcttcggatgtacacttgagtgactaatattggcttttaaatgaatttctattgcttgatattaatcccttctccctttttggcccactgtgtcgtggtgctgccaaacacaatctttgagaactctgtggacacaatgggagtgttgcaaggctgcttgaggagcaccttytactacacatcgcactaattggaaataaatctcgagtttcagcgtgagtcagccagcttcacaggactcagcgcaatttccattctactgctgtgcaaacaggggctgggcaaactgttacctttcggctagggcagaccagtttacaactgagaagcaggtgagggtctttgctgggtgtgc

SEQ ID NO: 739515 - DNA, 571 bp, Homo sapiens
gccacatcaacagatggttctctgaagctgcctggggaggaaagacctcttgataatgagctctctctccctctcgtgtagggaacttgcattcctcacagtgaaggatggaagccctttggccttgccctcccgcccagctgatgggatgmgaggcaggtaaatgggtgatatgggaagagggggctatactcccagcacagaaatagtctcgttgcccaatgtaggactacacattctaagcgccaatttctgaggctcaggtttccaaaaaccagctttggattcacaaagagaataactatcttgtcaaaggttgcttcccatccccagttggtggcagattcgaaggcaggccttctctgttcacaatggggtctcagcccttagatcacatgatttataaggcaggagggagtcccctggatgatggaaccccctcccttgtataaatcatttgatttaagggctgaaaccccttaaaaatcatttgatctaagtcatactgctttgggagttccattctcagataggttgttctggttgtttatattttccctttacagatagc

SEQ ID NO: 739516 - DNA, 615 bp, Homo sapiens
agctaaattattttatagttaatttgactactggatatatttgtacttatttctgcaattgtatatctgtttttcatttatcaggcttttatttgaaacaacttcttacttttatttattacatttgtatgaagttaaagttcttgaaaggtgtcttcctgagcttgttttcatttcatcctcgaagcgaccattctagtcccatttttgtcattatcctgagaacctaactcatgtgtgatcctgggcaagtttccccttccccgcctctctttcctcatccagttggcctcgctctatggccaggggttttaattccacatgccagtcatctttaataataacactaaccacagcagtaatgacacatccatttactgaaagactgctatattttagacagcattcctgaaaaataagaggctgtggataaacactaatttytaaaccaactgcaaaatatacccaaaagtcagatttttttttttttttttttttttttgagaaggagtttcgctctgtcgcccaggctgcagtgcagtggttcaatcgccgctcactgcaagctccgcctccagggttcattccattctcctgcctcagcctcccgagtag

SEQ ID NO: 739517 - DNA, 603 bp, Homo sapiens
attcttctgctgaactcagttatcatatatttcagtactaaaatttgtgcgtgtttcttcttcatttcttcgtatttttttctatttctttgtagagactttgtattttttatttgtttaaaacatgttcataattttctgtcaaagtgtttttataatggcttctataaaatccttgttagataatttcaacatctctgtcatctcagtgtcggtatattttaattgtcttttttcattcaagttgatattttcctggttcatgatatgatgagtgattttcatttgtatcctggctaatacacacacacacacacacacacmcccacacacacacatatatacatgcaaataatattgtattacttcatgctattactgtcatttcttttctatgtatgttataagccccccaacacactgttagtgtgttttgttgttcggttctcttttaaagataagaaaagtttctactttatttaactgtatttttatttgttctagcacacttttttctttgtatacatctaaattgccatctgctgtcatttttttttttttaaacagagtctccactgtcacacagactgaggtgcaacggca

SEQ ID NO: 739518 - DNA, 593 bp, Homo sapiens
tctctttcatttacattatagctgtggtcgttttatttattgattttagccgggggtggggaatttggtaacgtcactgagtgttgtcttttggttctgttctaacttgtaaatgttatctagttctattctgttttccactttatgtaatrtagatccaggatctcaattatctgagccattaatcaggttgcaaaacctttctctttcccacgtgaaagcaaaaaggaagagtgggacttgtctacagatcgccaccacacctgttagttggatttttaggattgtctgcttctcacatacagttccctccctcactctccctttctttccccttcctttccctcccttctcctcactctcccctgggagagaggggatataaggtattactgagaaagacttcacatgcagggcagtaaccaaagactaccaactttttatctcacactttgtcttgatcactctcttccatttcctagtggtgatttctccatcactagcaagctggggatctgtgatttctagtgctcgtccctgctggcctgtggccccactcctgaggtcctttccaatagatgagcagttgatgc

SEQ ID NO: 739519 - DNA, 620 bp, Homo sapiens
tctgtaatctacctgggctttacttccttggtcctctcccatttagtttcctctttacttagccttttcgtaacccttttgctcttttttttaactggtcctatgcagccactactccttttttcgttgcagtctccggctgggaccycatcataaacagaaagacctcccacaaacacttcagcacctgttcagccacctgggtacttcttacctctccatggcctttggcctcaattttgaggttctaatactttcctaaaccatggcaggatcccagatgctttgcttggactcacctggttattctggccaggctggcctcagcaccagatacattgctgtccagtcgcttctcttgaagagcagaaatctgcccagcaccagacactcactccctgttgtgtattcctgcagccctagaatgccttactttcagatgcactcctcttaaaacggttcaattgactacaatctcttaagcaccttataatttcatctaggaaattctcacctttatgtatttttttacgttcatgcctattatgaatggtaattttagctgcacataaatctctttatcttattcatattttcctttctgtgtgtttatcatcccc

SEQ ID NO: 739520 - DNA, 620 bp, Homo sapiens
tctgtaatctacctgggctttacttccttggtcctctcccatttagtttcctctttacttagccttttcgtaacccttttgctcttttttttaactggtcctatgcagccactactccttttttcgttgcagtctccggctgggacctcatcataaacagaaagacctcccacaaacacttcagcacctgttcagccacctgggtacttcttacctctccatggcctttggcctcaattttgaggttctaatactttcctaaaccatggcaggatcccagatgctttgcttggactcacctggttattctggccaggctggcctcagcaccagatacattgctgtccagtcgcttctcttgaagagcagaaatctgcccagcaccagacactcamtccctgttgtgtattcctgcagccctagaatgccttactttcagatgcactcctcttaaaacggttcaattgactacaatctcttaagcaccttataatttcatctaggaaattctcacctttatgtatttttttacgttcatgcctattatgaatggtaattttagctgcacataaatctctttatcttattcatattttcctttctgtgtgtttatcatcccc

SEQ ID NO: 739521 - DNA, 639 bp, Homo sapiens
aagaacaggcacagggaagtcacccagcattctcatcaccattgggtcatggggacactgctacaatttcctcttttatgaaggctatctttgttcatactctcagaaggaagaacaaagggagaaccttgtttgtcttgtgaaggaaatgcagaaagcctggtataggtgagaaaaagtgacttccctttacaaactaaagaaatacaggggtcgccccactagctgtggggtatgggtggaggtggggctgagtgtctgagagaaaatgctctatggtgtgggctggagtttgctatgagtgaattgttccagagccttccagcttcctgctagggcattgaaatcctttggctcactstgggatttggatgtgagacaatttgctctaaagggattttggcacagataagtcattattattaataaacacatggtgaatgccaaccatgtgcctaatgctgaaataaagctttctttttctttttcttttcaacgttaagtcaccaagtaaaggagaaggctactcagccccttgttatcccagaagaggcaattttatagtctccctgtccccgtgtccttgtctttgaatcctcaagtgcatttttgaaggatcttttctcttcctttaagaga

SEQ ID NO: 739522 - DNA, 587 bp, Homo sapiens
taccaatggcattcttcacataaataaaaaaattctaaaattcatatggaattacaaaatgtacacaaattgtgaaagtaatcctgagccaaaagaagaagttggaggtatcaccctagccgacttgaaaatatactacaactctattagtaagcaatatagcatagtactggcattaaaaacagatacataaacaaatggaacagcacagagacccagaaataaatttgcacatttatagccagttgatttcagcaaatgtgccaaggacatacaayggggaaaggacaggtttttcaataattgacattgggaaaccagatactcacatgctgaagagtgaaattagatgtttatcactcactatatgcaaaaccaacacaaaattgattaaagcctttaatttatgaccccaaatatgaatctactagaagaacacacaggaaaatcttcatgacattggtcttagcaatgattttctggttatggcctcaaaagtacaggcaacaaagacaaagatagacagctgggatttcatcaaactaaaaagcttatgcacagcgaaggaaacaatgaaagattgaagg

SEQ ID NO: 739523 - DNA, 651 bp, Homo sapiens
ttgtacagttgatagcaagtggtctctgaatttcttgtacctagtgtcaatgtctctagcaagattaggaaaattttctttattccctcaaatataaactttttaggatgtttactcttcctcctctcttaggaatgcctataattcataggtttggtggcttgacataatctcatatttcttgaagactgttcattttttcaaattccctttttcttcatttttcttctgactgggttagtttgaaagaccagtcttcctgccctaaaatttgttctttgtttggcctagtctttttttttttttgagacaaagtctcgctgtcctccaggttagagtgcagtggtgcgatctcggctcactgcaggctccggcccctggggttcacaccattctcctgcctcagcctcccgagtagctgggactacaggcgcccgccacctcacccggctaattttttgtatttttagtagagacggggtytcaccgtgttagccaggatggtctcgatctcctgacctcgtgatccgcccgccttggcctcccaaagtgctgggattacaggtgtgagccaccgccccaggcctggcctagtcttttgataaagctttcaattgtattctgaaattccttaagtgagtttttttcttt

SEQ ID NO: 739524 - DNA, 630 bp, Homo sapiens
tatgcaaaaaatgtcctcaaaatggcttaaagacctaaatgtaagacccaagactataaaacttctagaagaaaacatagaaaaaacactttagaacattggtctgggcaacaattttataggtaacatttcaaaaccacaggcgacaaatgcaaaagtaggcaaatgggattatatcaaactaaaaagcttctacacatcagaggaaatcrttaacagagagaagagacaacctgtggaatgagagtaaacatttgcagactattcacccaaaagggattaatatcctgattataaaaggaactccagcaagtcaagataaaaaaaaaaaaagattaaaaatgggcgaaggatctgaatagacatttttcaaaagaagacaaatacaaatacaaagacaaatagcaaacagataaatgaaaaaaaaatactcaacattaccaatcttcaaggacatagaaatcaaaaccaaaatgaagtatcatttcaacccagttagaatagctatcatcaagtagacaaaaaatgacaaatgctgatgaggatgtggaataaagtgaagcccttatgaaaactaatatagcagttcctcagaaaactaaaaatagaactatcatatgatctagtaat

SEQ ID NO: 739525 - DNA, 644 bp, Homo sapiens
gtctatatagagaaaagaaaacagcactctggattacacggatcccacaggagcttgtgaagaagggccagttccccatcccatccatcacctgggaacatgcagggcggtatcgctgttactatggtagcgacactgcaggccgctcagagagcagtgaccccctggagctggtggtgacaggtgagctgacactcaggggtcccagccccagactctgccctcaggaagggggacggctctcaggggcttctccctctcacagcccagccctggggatgacgcgggtggtctgagccacatttaacacggtgcctccttctctcctaggagcctacatcaaacccaccctctcagcccagcccagccccgtggtgaactcaggagggaatgtaatcctccagtgtgactcacaggtggcatttgatggcttcaktctgtgtaaggaaggagaagatgaacacccacaatgcctgaactcccagccccatgcccgtgggtcgtcccgcgccatcttctccgtgggccccgtgagcccgagtcgcaggtggtggtacaggtgctatgcttatgactcgaactctccctatgagtggtctctacccagtgatctcctggagctcctggtcctaggtgagaaattc

SEQ ID NO: 739526 - DNA, 647 bp, Homo sapiens
ggctgggatggagtgagcgggggtctgagaggggctcagccagtgggagactcaccctcagagggaaggaggagaacagggccctcccaggcctgcccaccctcagtggcatcgccagcatcatggacaggagaggcgggtggagggaggggcctggggaggccacaggtcccatgtagagaaatttggtttgaggtggagacttcaggaaagccccagstcctcagcctcctctcattcttttacccaggaccgtctgggggccccagctccccgacaacaggccccacctccacatctggtgagtccctgaggcttctgaactcaagggagtgcggcctcccccagggcagccctgggtctcccagagaatcccattcccctcaaagactcgagcttccctccagggagccgggcagagccagaggaggggccacagggtccccagggctctgaggctgggctggtgaggggtggggggtcaaggcagagagaaatgttggggcccagcctgggggaggagcagccgggctgatgtggggagcagggcagccccagccctcacctccccgtcctgacccagcaggccctgaggaccagcccctcacccccaccgggtcggatccccagagtggtgagtgacgggc

SEQ ID NO: 739527 - DNA, 647 bp, Homo sapiens
ggctgggatggagtgagcgggggtctgagaggggctcagccagtgggagactcaccctcagagggaaggaggagaacagggccctcccaggcctgcccaccctcagtggcatcgccagcatcatggacaggagaggcgggtggagggaggggcctggggaggccacaggtcccatgtagagaaatttggtttgaggtggagacttcaggaaagccccagctcctcagcctcctctcattcttttacccaggaccstctgggggccccagctccccgacaacaggccccacctccacatctggtgagtccctgaggcttctgaactcaagggagtgcggcctcccccagggcagccctgggtctcccagagaatcccattcccctcaaagactcgagcttccctccagggagccgggcagagccagaggaggggccacagggtccccagggctctgaggctgggctggtgaggggtggggggtcaaggcagagagaaatgttggggcccagcctgggggaggagcagccgggctgatgtggggagcagggcagccccagccctcacctccccgtcctgacccagcaggccctgaggaccagcccctcacccccaccgggtcggatccccagagtggtgagtgacgggc

SEQ ID NO: 739528 - DNA, 600 bp, Homo sapiens
gcctgtagttttatttttctgttggatccctgtctgattttgctatcagggtgatattggtttcatagaatgagctaggaaagaatcccatcgccttgattttttggaatactttcattatgattggcaccagctcttcgttgtgtatatggcaaatttcgactgtgaatccatctgttcttgggcttttttgccggaagatttttagtactgattctttttggttacttgttattggtctgtttagggtttctattttttgcctgtgcgatcttaggaagttgtatgtgtctaggaattcatccatttctctaggttttctagtttaygtgcataaaggtgttcatagtagtctctgatggtcatttgtatttctgtggcgttggttgtaatgtcaactttatcatttctgattgtgcttatttaaatcttctcctttttttggttagtgtagtcagccatctctcaattttatttatactttcaaaaaaccaacgttttctttcattgattctttgtaatgtttttgtctcaatctcattctttatctgtcctttcagagtttccattgttttcagcatccatcactagcaagccagt

SEQ ID NO: 739529 - DNA, 651 bp, Homo sapiens
taatacatcatcaaccagctatgaggattagaccaccagaggaatgagagccaaaaggaataataatttttccaactctatacccagtatttctttcaagatcctaggagcactgacccacctgcttccctctttgtaaagaaaaaataaataaatgtttttgaacagccacccagtgtcctgactctgtattggatttttttaggtgattcaaagaagtatatgatatggcccctgctttcaaggagcttaaaatgctctgaaggaacctaaataagcacaatgcaaagtagacaaaactgggtttaaatccaacctctgccacttactagctctgtggcctcctacatcrttaggctgtcatgaggtttaaaattgcactacatgtaagggacctggtgcagagtaggcatttgaaaaaaatctgaattccatcatcctcaaaccatatattagttaaataataaagcagaagatctattacaagatagcttataattcattaccaagtgaaacgccctgaaataaaggctcttggggtccagtgaaggccagggccattcagactgaggtaggtgtggcaaattcctggaaaaagaagaaaagtgactggcatttcaggatgggctcattttctcagatgaatcatga

SEQ ID NO: 739530 - DNA, 596 bp, Homo sapiens
gtgtaacagctataaaaatgaaaaagacagccttgcccttgaagtgctcatatcttggggtgagggacaagaaaggaggtcacaacagtgggacttggggttgtgagagaggcaagcacaggcttgagatgcacataggagggcaccgtgctgtgcctgcagtgttgggaaggcttcctggaggagatgacatgtatacaagcagagagacgaagtatgaattagagttacctggaaagtctgtaccaggaagaaaggtaagcacctccccccgcctgtggcagggagaaagagcatggaggagctcagggggccccagtgtggcctggcccagagcgcaaatgagaggaggtgaaactagatgagtaggcagggagccagattccatgaaaaagcatgaaaattatgctgtggrccatggggtacctctgaagggagtggcaagggtgatttttccttcatgaagagagcccagcagtagaggtgagggggccgctataactgctatggaaagagatggtgatgcttgggctgtaaagaggaacagaatttgagagctgagcacctgatggacaatgctgcatggcaggctgggc

SEQ ID NO: 739531 - DNA, 567 bp, Homo sapiens
aagtagtaattcttttagcaaaatcttggttgcatggagaaaatggcattttaactaggctttgaaacagataaaaaattttacaggctgacatggggaggggcattctttgttaaaggtcaaagtgttttagcccaagtwaggaaaaataacccattttctttttggtcttatctcctaggaattgactcaaaaggtgtaaatgtcttgagattttaaaaccaggggtagacccaggattccaaacctaattgtaactcaggagcttatcaaatccaaccaaacaatttagtactagacctctgattttctgtttcccagtcccctccctgctcttccaatgcactgtagaattcctccttgagtcattgtcaaggataaatagccctaacattcttcagccattacttctgaatcttaccttttaaggttctccaatatgatcgatctccttagtatgagcttaagtgttttagtggcccagactatttgatctataccttcctaaattagatactgatttttagggttttttgttgttttcctaacttggaaaaattgtgctgg

SEQ ID NO: 739532 - DNA, 601 bp, Homo sapiens
tattatgctatcaaatagcatggtggtgattgagcatgagctctgaagtcagtcaaattccagccttactcacttcagcttggtgacttttgggcaagtttctaagttttgaaaaaagtatgtatgtaggtgctatactagatagtttacatacattactaatctacataaaaattctctaaagtacttattttccctgttatgctaraacataaccagaattgttctccttttcaaattgaatactgaaaagaaatgtaaacatgaaataacttgcccaaggtcacatacctacttaatggtgaagcccaaatttgaattaaagtctgtaatcccaaagaccaagctattttacattatttcatgttggcaaataagtatgtgttaataattccttttatttctgtatttaaattttataatagcctatttcattaatagctaggtaaatcacttaagaatttatctgctacatgctgaggttttttggtagcttttttggttgttttaagtgtcgcttttgatttttgcatgtttaagatttgttttttaatgtaagcgcttcatttttgttcacttacactgattaatatttaccgtc

SEQ ID NO: 739533 - DNA, 560 bp, Homo sapiens
aatgaaacatgaatgattagaaagttctacaaataaaccagttagcttctccaaaaaatggttcttgggcagagctcatagtcattttcccttagtaaattattgatcagatgttctcaatgtttgccaaaatgtgaaacaaatattaagamctaatgatgggatgatatatgcaactatcttcaactaagggattcagttcaagatcttcacattattgcatttggaagttagacaaggagcatatttacttttattttacctgttgtggaatgttacattgacagatgtcttctgaatggcttacttttttttctccctaagtattcaaatcttctaattttatctgtttattactgaaatgtcaaaacatttgcttctagataccctgtgtgaacattcatctccaaagggtctcctagtaagtgagaagtcagtggtttgggatatacaggtctttttgattagagaactaagtatttccatgggctgttttctgaaaatggagttaggttcagtcttttattcccactttaatttaaaattagacagttatttga

SEQ ID NO: 739534 - DNA, 609 bp, Homo sapiens
aggtaacgaacaaccaaactctttcatttctactcaaatattattttccagcagtctcctggcacttccatagaggcaactccgtcttccggttgctcagactgtggagtcatgtttaaccctccttttctctcgcagcccccatccaatctgccagtaaaccttatagcttcccagtcaatatggaactaacatccaaccactcctgccctctgctgacagcctccaaggctcctcacccacctggagtgagagccaacgcctcatactggccttcatgtcaggtggctacacaccctggcctgcctcagaccctggcactcacgtctrtcctagtgcaattactaacagcacctcctttcactatctagggccccgactggataataaactgcatgctgtcccccacaacatgcacatgtccaatctgatcctcattcctctccacgctctctactgctgtctcctcccttgtaccacattgtaaacaccttcctccccaacaggctgggttccgtgcctctatatgggacacgctctccccagacagtctatgtctcattacttatttccttcagctgctcaaatgtcaccctatctgctcaataa

SEQ ID NO: 739535 - DNA, 669 bp, Homo sapiens
aaattttggtatccatctgggatcctgggaccaattccccatggataccaagagacaaatctactaacatattggcaccaaaattaacaatacaatatcatttaatatcatttgaaaaatacttaagtataagtttaacaaaggacttatgtgctgaaaactaaacaatgctgatgaaaaaagatccaaacaaatggagagacataccatgttcatgttatgaaagacttaggacttaacatagtgaagatgaaaattatccaaatgaaccaaattgatacacagattttatgcaatatctattataatcttagcaagattttttattaagactttattccaaaatttatatgaaaaggcaagtaaactaaaatagctaaaagaaccttgaaaaagtacaataaagttgcattaaccagcttccacaatctcaaaatttattatatagctacaataatcaagattgtgtaatattggtcaatagacaatggcagacacatagaccaattgaaaggaatagaaaatcraaaaatagaattacacaaatatgcccaacttatttttgaaaaagttgaaaaaaagattcaaaagaggaaagataacctttcaacagatagtgctaaaacaattggacatttataggcaaaaaataaaattcaacctaattct

SEQ ID NO: 739536 - DNA, 674 bp, Homo sapiens
aaagaaagaaagaaaagagaagaaaacacgaaaaagtaaaggtatgatgttgcccttaaacaagtagtttttaaagttttttaaagtaacatacacctttcaaaaaatgtaagcaaaacctcgatatataattcatagaaaagcagtgattctttcttttttagaaaagaaagtgagggctcagcatttcaaccactaaagcatcattctyttaaaactcctctattccagggtataaagtcagaacacctctgtgtttggaattacatgactaagaaacttttgtttttaatgtgatacttctggaagagttaatgcctttatctgttaaaatgtaaaactccaaaggaaaagagagagaacattgaccactgtgctgatggaattattaccagaatctttgttcttttgcacctaaaaactctgcaggatgaaaattatcattaaatagttacaaataagaaacaagtctgggagggattaagaaacatgcccaagataacatggatgataaagtgagagtgagacttggattctattctttgcagtttcaaagcttatctgcttgatattacaccacaagaaagctaactattgtattagcaagaacatggggaaaggagaccattagacttagcttgttattggggtgattgagcaaacatggagccaga

SEQ ID NO: 739537 - DNA, 631 bp, Homo sapiens
aaaaactaagaagttgcaaaaaaaccaaaagctgagagagtttgttatgactataccacctctaaaagaaatgatagagggagtcccagaggctgaaatgaaaggacactgaatagtagctcaaagccatataaagaaataaagttcctggtcaggcrcggtggctcatgcctgtaatcccagcactttgggaggccaagacgggcagatcacgcggtcaggagatcgagtccatcctggctaatatggtgaaaccccgtctctactaaaaatacaaaaaattagccaggcatggtggcgggcacctgtagtcccagctactcgagaggctgagggaggagaatagcgtgaacccaggaggccgagcttgcaatgagtcaagatcgttccactgcactccatcctgggtgacagagcgagactctgtctcaaaataaataaataaataaagatcttagagaaagtaagtgcaagagcaattacaaaagctagttatttaactccactttttgttttctacatgatttagaagactaatacatttaaaaagtaattattagcctaaaagatagtattatggtcaccttgatttgtaacttcacattgttttctaaataatttcagaaactga

SEQ ID NO: 739538 - DNA, 631 bp, Homo sapiens
aaaaactaagaagttgcaaaaaaaccaaaagctgagagagtttgttatgactataccacctctaaaagaaatgatagagggagtcccagaggctgaaatgaaaggacactgaatagtagctcaaagccatataaagaaataaagttcctggtcaggcacggtggctcatgcctgtaatcccagcactttgggaggccaagacgggcagatcacgcggtcaggagatcgagwccatcctggctaatatggtgaaaccccgtctctactaaaaatacaaaaaattagccaggcatggtggcgggcacctgtagtcccagctactcgagaggctgagggaggagaatagcgtgaacccaggaggccgagcttgcaatgagtcaagatcgttccactgcactccatcctgggtgacagagcgagactctgtctcaaaataaataaataaataaagatcttagagaaagtaagtgcaagagcaattacaaaagctagttatttaactccactttttgttttctacatgatttagaagactaatacatttaaaaagtaattattagcctaaaagatagtattatggtcaccttgatttgtaacttcacattgttttctaaataatttcagaaactga

SEQ ID NO: 739539 - DNA, 631 bp, Homo sapiens
aaaaactaagaagttgcaaaaaaaccaaaagctgagagagtttgttatgactataccacctctaaaagaaatgatagagggagtcccagaggctgaaatgaaaggacactgaatagtagctcaaagccatataaagaaataaagttcctggtcaggcacggtggctcatgcctgtaatcccagcactttgggaggccaagacgggcagatcacgcggtcaggagatcgagtccatcctggctaatatggtgaaaccccgtctctactaaaaatacaaaaaattagccaggcatggtggcgggcacctgtagtcccagctactcgagaggctgagggaggagaatagcgtgaacccaggaggccgagcttgcaatgagtcaagatcgtkccactgcactccatcctgggtgacagagcgagactctgtctcaaaataaataaataaataaagatcttagagaaagtaagtgcaagagcaattacaaaagctagttatttaactccactttttgttttctacatgatttagaagactaatacatttaaaaagtaattattagcctaaaagatagtattatggtcaccttgatttgtaacttcacattgttttctaaataatttcagaaactga

SEQ ID NO: 739540 - DNA, 666 bp, Homo sapiens
tgctgggccgttgagcaatattgtgcttgctgtgtgtgcaaagcagcaaggcaagaggaagcttggctgaaatcagcgcaaaatgcaaaaacacttccttagtgacctggcttaccctcatcaacatgtgaattcttattgttagcaaagggttccagggtgctctcaaacatcaaacactgcacagataccaaacccacactttgacaagtgttaaggagaaacaaaccaaaaccatttgctcataaaacacagatggattgaaaagactaagaggaaaataatctgggcaaaatacaattggagttagtaaacacagcacatgcaaaaactgtttgagacactgggaacaaaaagactagggtcagatcacccagccctgttgttaaacctcttatctcctccacgaacagccaatggcagtgcaaatcccacgtaaggcagggtgcattgcccattcaataaaggaaagcctakgatgtgggccactgtggggcaggaagacccttcagaagcacagtgcatgcacacaaggtactttcagtatgcaagggacagctgtttccagcccaccatgcctgccactcatttgtgtgcactgtattcctatcaacttatggcgtttataactagaccagaggagggtctaataaatttcagtctgaa

SEQ ID NO: 739541 - DNA, 537 bp, Homo sapiens
ggcttttcacaaagcctctcctatgatcaaccttggttttatagaagcaacatcgaattgtaaaatggtggagttaaagtaacaagcaactttaaaaggcaataaaataccaagattatacccttaatggaagtggcagacctaatgttgaggactactttaaagaagggttattttgttcttaacagataacatggagacagtgtaatactttcttaatgtgcaatgargacctaattttgaggactactttaaagaagggttatttcgttcttaacagataacatggagacagtgtaatactttcttaatgtgcaatgactcgaatttattgctggagaaaaagcaccatcttaaacattgatctgaagcatcttatctcacatgctggaggtcttggagttgtgtgacttctgctgttctatgtaattactgacgtggcttgaggggaaagtgggactgctctagtggggagaacagatgcagaacctgttctggagaacctcacatacattgaaggtgctgctttaagaaagt

SEQ ID NO: 739542 - DNA, 602 bp, Homo sapiens
cctctcgcccccctggctcttaggatccgcggtggtctcacagcctgtttaccatattgtgagtaatatcatctccccctctggagattatgaactggttcacagaggggtgtacaccgtcggtgtacagagaatgtacacccgtcagtattggagtaatatcatcctcttcctccctgaatattaagaacagtatcacaggtgtgtttctactccctgcggtatcgcgtgtcatatccccctctcccacgttgcaattagaaacaatatcagtgggagcgtgtccaccttctgtcgtagtgaacgtaatatcatcctcttccctccagaatcatgggaacaatatccctgggggggtgtccactttctgtcatatatgtagtcatatcaccccctccgccttggaatattattaaggaccatctcacacgcgggtgtacacttcctgcgatkttgggagtaacatcaacctctcggcctctgaatattaggaagaatatcacagggtgggtgttcacctcctgctctatgatggggagtcacatctgtctgttatggggagtaatatcatcctctccttttcaggatattaataacaattt

SEQ ID NO: 739543 - DNA, 585 bp, Homo sapiens
cctgcctggcaccacagggatccatcaggagggtggccagaggagcgggggaaaaataccacaggcagaaggaaatctccagctgaattttgtaacaacttgaaaggggcaagaagcctcctagccaaaattcaagggagagcgggaatccagtgtgcagactccacaggctggggaagaaccaaacctttttctttcgcagctgggagacaggtagcctggggcaagttctcaagcctggctcacccactgcctgcaaaccaacttggggctgttagcgggggcatggtgggagtgagacctgccctttggtttgcatgggagctggttaagccctgtgactgccagttttytcccacttctctgacaaccttcatgatgcagaagaggcagccacaatccttcttgacctgggaacctcatctccgtcccccacagcagccacagcaagacccatcgaaggagagcctgagctcggacatgcctagccctgcccccacctgatggtcctgccctactcaccctggtagctgaagacaaagggcatataatcttgggagttctagggccccacccaccattggt

SEQ ID NO: 739544 - DNA, 542 bp, Homo sapiens
agagtaattgttatgccacagtggtattttcaccaggtaaagaaagctttttatggttcactgactgaccacaatcaacctcttcacaatctagaacccgaagattggatcttctgagaacatcagagaaagactgcccttgccatccacactacaacaaaactttaggaccttgaacctggtttcataatatcacaactgagaagggtcgctccacactcttggaactgcactcctattggaacccttaaggtaaagctaaccagggaagtttctccycaaaagaaaacggcatccttgatgtgaacagcttttcccaagatcatgcatgaagacttctctactattatgagatgcttatctttcaatatttttctcttgcttatgcctctatgaacaatagaagtgaaaaaggcagtatgttttgtgcacttatggggtatacttttatttgtgaaggattttgcagccagccttatacctggataaccttataccttgatgaggccccaatgtaggtgaaaaaattaaatagtacatat

SEQ ID NO: 739545 - DNA, 542 bp, Homo sapiens
agagtaattgttatgccacagtggtattttcaccaggtaaagaaagctttttatggttcactgactgaccacaatcaacctcttcacaatctagaacccgaagattggatcttctgagaacatcagagaaagactgcccttgccatccacactacaacaaaactttaggaccttgaacctggtttcataatatcacaactgagaagggtcgctccacactcttggaactgcactcctattggaacccttaaggtaaagctaaccagggaagtttctccccaaaagaaaacggcatccttgatgtgaacagcttttcccaagatcatgcatgaagacttctctactattatgagaygcttatctttcaatatttttctcttgcttatgcctctatgaacaatagaagtgaaaaaggcagtatgttttgtgcacttatggggtatacttttatttgtgaaggattttgcagccagccttatacctggataaccttataccttgatgaggccccaatgtaggtgaaaaaattaaatagtacatat

SEQ ID NO: 739546 - DNA, 605 bp, Homo sapiens
aggaatcatttattactttgtaatggggaaacgtgagacatcacaacccagtcttgtgctacttatttgtatttcagctgaaacggctgacacattaaaaaacattttcaaatcatggatttttagagctagagctagaagaatccttaaaatgaagtctaatcttttcattttatgtgaaggaaataatacctggagtgttttgctccaggcaaaactagatcttggacacacatctccctacttctaagcatcttgcatcctctctgtacrtgttactattgggatagattcatgcctctactctggaatagattcatgtatctactctagaattttaaggaaaatataaaccataatactccttcgactatgcttaatattatgagaaaaagcttagctcagtaagcctcctcggtggagagttaatgttaaaaaaattaggctattagttactggcacaataataagaaacaatttttaacagattttgcagattgcgttttaattcagaatgatgggataacttcctttttgcttttctttgtattgaaagtcagtcagatccatacatattttttattgaagttttttttttaaaaaag

SEQ ID NO: 739547 - DNA, 654 bp, Homo sapiens
gggatgtgaacagacatttatcaaaagaagacatacaaatggctagcacacatatgaaaaaatgttgaaaatcacaaatcatcagagaaatgcaaattaaaaccacaatgaggtatcatcttataccagtcagaatggctattactaaaaagtcaaaagacaacagatgttgtcatggatagggagaacagggaatgctgatatactgttagtgggaatgtaaattagtacaaccccgagagaaaacagtatggagatttctcaaagaactaaaaatggaactaccatttgactcagcaatcccactattgggtatctacccaaaggaaaacaaattattatatcaaaaagatacctgcactcatatgtttatcacagcactattcacaatagcaaagatatgaaatcaacctaaatgtccatcaatggatgattgaataaggaaaatgtkgtatatgtacacaatggaatactattcagccattaaaaaaatgaaaccatgtctttttcagtaacatggatggaactggaggccaacactttaaatgaaacaactcataaacagaaagtcaaataccacatattctcacttttaagtgggagctaaataatgtgtacacatggacatagagtatagaatgacaagcactggat

SEQ ID NO: 739548 - DNA, 644 bp, Homo sapiens
ctaggtaaatacctaaaagaaaggaaattggtgtatcaaagaaatatctgcacacccatgtttgtttcagcactgttcacaatagccaagatttgaaagcaactcaaatgtccaccaacagacaaattaagaaaatgtggcacatatacacaatggaatactattcagccataaaaaaaattagatcttgtcacttgtaacaacatggatgggactggaggtcattatgttaaatgaaataagccagtcacagaaagacaaaatttgcatgttctcatttatttggggaactaaattttaaaaaattgaactcattgagatagtagaatgatggttaccagaggctggaagggtattggggatgtgtgtgtggagggggaatgtrtgtatggttaatgaatgtgaaattataattagaatgaacaagttattctatttcatagtagaacaggatgactacagttgacaatgatttattgtacatttcaaaataactaagtatatttggattgtttgtaatacaaagaaaggataaatacttgagatgatagatactccatttatcctgatgtgattattatgcattgtatgcctgtatcaaaatatctcatgtacctcatcaatatgtatacttactatgtacc

SEQ ID NO: 739549 - DNA, 631 bp, Homo sapiens
tctgaaatcagaatgtcagcatcatcagttcctaaccagggctctcccctttgttgtaaatggctgtcttcttgctgtgtgctcacatgaatttttgtgtgcctgggcagtgtggcgggggagagagagaaaaagagagggaacctgtgtgtgcacatgctctgatgtgtcttcttataagggtactaatctcagcatgagggtcccagctttatgacatcatctaatcctaattacttcccccaaaccatatatccaaataccttcatattggaggttagggcttcaacatatacgttttggagagaacactaacattttatccataacaccaagttgttattactggcaacataatcatggtaattatattagtcagggttatccagagaaacaaaatcaatatgatttgtctctctctctctctctmtatatatatattatatctatatataatatagatataatatatagaaataattctatatataatatatattatacataatatattaaattatatattgtatatataatttaaaaaatggctcatgtgatattatggaggttggcaaagctaaagatctacagagtgaatctgtaaactggataccagagagagtggatggtt

SEQ ID NO: 739550 - DNA, 560 bp, Homo sapiens
aacctaggcaatgccattcaggacatggcatgggcaaagatttcatgatgaagaagcaaaaagcaattgcaacaaaagcaaacattgacaaatggtatctaattaaaatgaagagcttttgcacagcaaaagaactatcaacagagtaaacatacaacctacagaatgtgagaaaatttttgcaaactatgcatctgacaaaagtcaaatattcagcatctatagggaacttatacaaatttacaagaaaaaaccccataaaaagtgggcaaaggacatgaaaagacacttttcaaagtaagaaataatgtgaccaccaatcatatgaaaaaaagctcatcactgatcattagagaaatacaaatcaaaaccacagtkagataccatctcacaccattcagaatgtctgttactaaaaagtcaaaacataacagattctggcaagattgtggagaaaaagaaatgcttacacactgttgtgggagtgtaaattagttcaaccattgtgaaagacagtgtggcgattcctcaaggcctaaagactgaaataccattcgacc

SEQ ID NO: 739551 - DNA, 642 bp, Homo sapiens
gatcattttggaacgttaagatttgactgccctgctggattttggacttgcatggggcctatagccccttagttttggccaatttctcccatttggaatggctgtatttaccaaatgcctattctcccattgtatctaggaagtaactaacttgtttttgatttcacaggctcataggcagaagagacttgccttgcttcagatgggactttggatttagacttttgggttaatgctgaaatgagttaaractttgcgggactgttgggaaggcataacttgttttgaaatgtgaggacatgagatttgggatggggccagggtggatttggctgtgtccccagcaaaatctcaacttgaattgtatctcccagaattcctacatgttgtgggagggacccagggggaggtaattgaatcatgggggccagtctttcccatgctattctcctgatagtgaataagtcttacaagatctgatgtgtttatcaggggtttctgcttttgcgtctcctcattttctcttgctacaactatgtaagaagtgcctttcacttcccgccatgattctgatgactccccacccatgtgaaactgttaagtccaattatacctctttttgttgtcagttttgggtatgtc

SEQ ID NO: 739552 - DNA, 528 bp, Homo sapiens
cttccctccaaacattggctatctcttccggtcttttctcctccctaaatctgatatgcttgccatttatgttctcattctaaccattgataactttgcaacacaagaacagggcaagggcagagaccttttcaaggacaccatttggaacctctttccagtctgatatcaatactttgagctatttagttccaccaaatataaacccattaaaayggacattgtttggttcacatcttttgatggaattcacatatatatgacaagggacacatcaaattcctttataattgcaatggtcacttgaaatggatttttctctagtttttgtctatggtttacgtattatttattacatattccagaagttagcttttatctatgggtaccctcgttgaacactcaatgaatggtagcagttgttattattgttaatattgttggaagacaattatccatggatttctcatgtttatgcatggatgtttgtatagcaattaccttgaaagataaagacaatgtctactt

SEQ ID NO: 739553 - DNA, 528 bp, Homo sapiens
cttccctccaaacattggctatctcttccggtcttttctcctccctaaatctgatatgcttgccatttatgttctcattctaaccattgataactttgcaacacaagaacagggcaagggcagagaccttttcaaggacaccatttggaacctctttccagtctgatatcaatactttgagctatttagttccaccaaatataaacccattaaaatggacattgtttggttcacatcttttgatggaattcacatatatatgacaagggacacatcaaattcctttataattkcaatggtcacttgaaatggatttttctctagtttttgtctatggtttacgtattatttattacatattccagaagttagcttttatctatgggtaccctcgttgaacactcaatgaatggtagcagttgttattattgttaatattgttggaagacaattatccatggatttctcatgtttatgcatggatgtttgtatagcaattaccttgaaagataaagacaatgtctactt

SEQ ID NO: 739554 - DNA, 594 bp, Homo sapiens
gaacaaatatagttattgacacggtgctctcttacattctaatgtatacttcttgggaggaataattttcttcattaatttctgtattcctaatacctagcatgttgcctgccacaattaaaaaaaaatgctggtgaggctttgatgtgaatcattattaatcaatcttgtatagctttctaggctagaacaggaacaaatgttaaaacatttgtcacaaaattctagctgggtgtggtggtgygcacctgtttcccagctactggggaggctgaggtgggaggactgcctgagcccaggaggtggaggttgcaatgaactatgatgacaccatgcactccagcctgggcaacagagcaagaccctgtctcaaaaaaaaaaaagagagagagagagagaaagcaaaacaaagtcatgaaattccattatgttttgttggaaagatttttctcttctcaagaaataaaatcaatcatgaaaaatcactttaaatcacttagataagatttaggacttaaaactctgcaacaacaaaaaaccgtgtgtgtgtgtgtgtgtgtgtgtgtgtgtgtgtgtgtgtgtgcgcgcgctgaa

SEQ ID NO: 739555 - DNA, 639 bp, Homo sapiens
tgcatatttttgaatatcaagtcatataaatattctcctctaagaaatgttatttggtatagctgctagaagaaaagatacaaacgccagtgttgatttcaatctaaaatgtaccatgtattaactctgtgacctcgagcaagttatttatcttctccgaactgtttctacatttatacaaatggaataataaaagctcctgcacctatgatctaccctaggctataatcatattattttaatcactatagctaaaaaaactgtaaaaccataagtatttttatatctgaaagagcaactatccttaacttgtcctgtgcttaacatctataaatggaaacatgcacatattaaaacctaaaatgaatgctgatatttgtatgcttggatttctaaattgtaaaaccacamatggaatatgttagttattgtctattagtttattaatagctattgtaactataagaatgccactttcttttttacccctagatctttttttattattttgaggataataaggtgattcattaaaagcagagaaataataaaaacaatccagactaaaaagtaaaccattctagaacttcttgggggagtaattttgccagagtatcttataaaatgtcaatagataat

SEQ ID NO: 739556 - DNA, 495 bp, Homo sapiens
acacatgtatttttcaatatgttccatactttttattggcagtgctaataatgaccttttatctgtgtattactgtctagttgatcattctgtgtcagagatcaccttgtagaggtaagctttccactatagaagagtcaccaaagtaaaggaaagcacactcttaytcaattgatttaacttaatgaatatcatctcttcagtgcagaggcaatagaaaggcagggccaaaagcacttatcccaggaggttatatataggatgattggagacattcctaaagacaatgaggcactagcattgtgtaagagggaggctatttcactctgagggctcatgctggaattaactggtgtcattttgaaggagggttttgctaattggcatctcccagttgtatataatgccaacacctttttctattaattatttcccataagtatagctcagtaaagcaaaactccctccaaatgtataaaggtttaaaagaaactg

SEQ ID NO: 739557 - DNA, 614 bp, Homo sapiens
aacactgtatatttaggcaacactacatatactgaaaatatttttctctcatcagtaatatattaaccttagcttactttttataaacttttgaacctttgagttttgactcttgtaataacactgtagcttgaaacacaaacacattgtgcaactgtacaaaaatttttattcggtaaactttttcttgtttttaatttttaaaaatttttctttaactttttaagcttttttgtgttaataactaaggcaaagacaagcacatcagcttaggcctacacaaggtcaagattatcaatatcactgtcttccacctccacatcttgtcccaccagaagctcttcaggggcaataacacacatggacctgtcatctcttatgataacaatgtcttcttctggaatccctcctgaaagacctgcctgaggctgtttcacagtcatttttttataagtataagsagtacaatttaaagtaatgagaagatatatagtaaatacataaaccagtaacagtttattattattatcaagcattatgtacagtacataattgcgtgtgctatacttttatacaactgaatgctcaggtttatttacaccagcatcaccgca

SEQ ID NO: 739558 - DNA, 572 bp, Homo sapiens
tgtttgaatataatgaaactttcgaaaaaatgtattgaaattgatatcacatttagatacggttattaaaataaattgtaaaaaatacttttaaacaaatttggaattcattacaattatttgttattagattaatgaatcatagatacaagttttsttattatgtactgatgatataaagtggtttgataaaatactatctctgtgtatgtatagcaaatctaaaaagataatttgtatttttaataaataagacaaaggttcaccttctaccttgaaaaaaagatgtttaaaacatgttaaagagagcactgaaggtttttgagctattttgaaaatttatctctgcatattttcttcatttctagtttcatgttaactttcaaattacaattaatataaaataaatatattatggaaaaaaattcaaactttatgtagacagtgacctacatttttaatcataaaatggaacttaaaatttaaattttacactattgaaagaaaaattaattatagatttctatttcttctttataagatacttgaagaaacaagtcatgaaaatgtta

SEQ ID NO: 739559 - DNA, 572 bp, Homo sapiens
tgtttgaatataatgaaactttcgaaaaaatgtattgaaattgatatcacatttagatacggttattaaaataaattgtaaaaaatacttttaaacaaatttggaattcattacaattatttgttattagattaatgaatcatagatacaagttttgttattatgtactgatgatataaagtggtttgataaaatactatctctgtgtatrtatagcaaatctaaaaagataatttgtatttttaataaataagacaaaggttcaccttctaccttgaaaaaaagatgtttaaaacatgttaaagagagcactgaaggtttttgagctattttgaaaatttatctctgcatattttcttcatttctagtttcatgttaactttcaaattacaattaatataaaataaatatattatggaaaaaaattcaaactttatgtagacagtgacctacatttttaatcataaaatggaacttaaaatttaaattttacactattgaaagaaaaattaattatagatttctatttcttctttataagatacttgaagaaacaagtcatgaaaatgtta

SEQ ID NO: 739560 - DNA, 586 bp, Homo sapiens
ggctttacaaaagaaaaaatttggagttttcagagaatccagaaagcttttctgaggagtttgttaagttgatcatgttctttggtttaacttgtcatgacttacaaatattatgtttgatatgctgtgaaaaaaaaagcaagagaaaaactgtgtgattaagccagtcagttatgacgaggttagagaaataactcagggcaaagatgaaaatcccctttctttcagggtcatttggttgaggcattaaggaaatacactaacacaraccctgactctgcagaagggcaagctcacctgggtatacattattcaatctgtccctgacattagaaggaagctcccaaaagcaaccatgagacttcatacacctatgagacaacttttaaatgtagtagttaaagttcacaacagtagggacaaggcaaaagagaaaaaaacaaaaagaccaaaagaaatagccaaaaagtataattgataacagttgttttatgcaccttccccactgaaggttacccatcttaagaaaatgtcatgaaagtggtgtctgggatgcccagacaagagccaccaactcactgacccc

SEQ ID NO: 739561 - DNA, 619 bp, Homo sapiens
aggatgccacgtccttggaaggcaaactggtaaaggagatatacttccagaagagattcagaatctttcctttaaaatggaaaatattatttcagagcatggatcagagagatttcaagaggaaagttgccagcgggaaaaaaatgtggaattgaggacataccaaataacatgaaaacaatgtttgtgggaggaaataggagactagcaacttcctgtgtggcacaggtgtactggaatgtggagtgggcttactatggtcttcaaggttctagtaaaagcagactgggtcctggtggatatcagaactgtaattgattatggtctgtgtcctaaataggtgtggtttcatctttgttttcaactgaaagttggtaactcttcagtgaaccaaatactggagtctccatgtgaatgcatctttatgaatttcaagattttagaactttagggacataatcaggtgttatgcttgttatrgaaaaacacaattttgaaaatggaattttatgtggatattaatttgcttggaaactaatatctactcattcattaacttttattcattctacgaatatatattgaccccctgttgtgcacttgacacttttctaggtgc

SEQ ID NO: 739562 - DNA, 575 bp, Homo sapiens
tttttcagcttcagaattctgctcgattctttttaattatttgaatcactttgttaaattgatctgatagaattctaaattccttctctgtgttatcttgaatttctttgagtttcctcaaaacagttattttgaaatttctrtctgaaaggccacatatctctgtttttccaggatttctccttgttgtctttcttagttcattttattgaggtcatgctttcctgaatggtcctgatacttgtagatgtttgtctttgtcttggcattgaagagttaggtgtttattgtagtcttcatagtctgggcttatttgtacccttacttcttgggaatgctttccagatgtttaaaaggactggtgtgttgtgatctaagctgcatctgcatctgcctgagggggcacataagcccagtaatgctgtttttgtttttttttttccagactagtagagatactaacttgatggtcttggacacaatttggaagaattttctggattaccaagaagaaaagctcgttctctttccttattttctcccaaacagtctctccttctctctgttctgagcca

SEQ ID NO: 739563 - DNA, 575 bp, Homo sapiens
tttttcagcttcagaattctgctcgattctttttaattatttgaatcactttgttaaattgatctgatagaattctaaattccttctctgtgttatcttgaatttctttgagtttcctcaaaacagttattttgaaatttctatctgaaaggccacatatctctgtttttccaggatttctccttgttgtctttcttagttcattttattgaggtcatgctttcctgaatggtcctgatacttgtagatgtttgtctttgtcttggcattgaagagttaggtgtttattgtagtcttcatagtctgggcttatttgtacccttacttcttgggaatgctttccagatgtttaaaaggactggtgtrttgtgatctaagctgcatctgcatctgcctgagggggcacataagcccagtaatgctgtttttgtttttttttttccagactagtagagatactaacttgatggtcttggacacaatttggaagaattttctggattaccaagaagaaaagctcgttctctttccttattttctcccaaacagtctctccttctctctgttctgagcca

SEQ ID NO: 739564 - DNA, 610 bp, Homo sapiens
caaacatcacagaatgtacttacacaaatctagatgttatcacctattgcatacctaggcttatggtatagtctatttcttttaggctacaaaactttacagccatgttactgtactcaataccttgagcaattgtaacaaatactaattatttgtgtatctaatatatctaaacatagagaagatacaatsaaaacatggcacaaaacattaaagtggtatgtatagtacataccataagtggaattgctctgggtatgtgaataagtggttagtgaatgggaagacctggaatattactgtacactctagtagactttataaacactgcacaattaagactacactaaatttattacaaatattttactgaacactactataggctttataaacactgtatatttaggcaacactacatatactgaaaatatttttctctcatcagtaatatattaaccttagcttactttttataaacttttgaacctttgagttttgactcttgtaataacactgtagcttgaaacacaaacacattgtgcaactgtacaaaaatttttattcggtaaactttttcttgtttttaatttttaaaaatttttcttta

SEQ ID NO: 739565 - DNA, 610 bp, Homo sapiens
caaacatcacagaatgtacttacacaaatctagatgttatcacctattgcatacctaggcttatggtatagtctatttcttttaggctacaaaactttacagccatgttactgtactcaataccttgagcaattgtaacaaatactaattatttgtgtatctaatatatctaaacatagagaagatacaatgaaaacatggcacaaaacattaaagtggtatgtatagtacataccataagtggaattgctctgggtatgtgaataagtggttagtgaatgggaaracctggaatattactgtacactctagtagactttataaacactgcacaattaagactacactaaatttattacaaatattttactgaacactactataggctttataaacactgtatatttaggcaacactacatatactgaaaatatttttctctcatcagtaatatattaaccttagcttactttttataaacttttgaacctttgagttttgactcttgtaataacactgtagcttgaaacacaaacacattgtgcaactgtacaaaaatttttattcggtaaactttttcttgtttttaatttttaaaaatttttcttta

SEQ ID NO: 739566 - DNA, 610 bp, Homo sapiens
caaacatcacagaatgtacttacacaaatctagatgttatcacctattgcatacctaggcttatggtatagtctatttcttttaggctacaaaactttacagccatgttactgtactcaataccttgagcaattgtaacaaatactaattatttgtgtatctaatatatctaaacatagagaagatacaatgaaaacatggcacaaaacattaaagtggtatgtatagtacataccataagtggaattgctctgggtatgtgaataagtggttagtgaatgggaagacctggaatattactgtacactctwgtagactttataaacactgcacaattaagactacactaaatttattacaaatattttactgaacactactataggctttataaacactgtatatttaggcaacactacatatactgaaaatatttttctctcatcagtaatatattaaccttagcttactttttataaacttttgaacctttgagttttgactcttgtaataacactgtagcttgaaacacaaacacattgtgcaactgtacaaaaatttttattcggtaaactttttcttgtttttaatttttaaaaatttttcttta

SEQ ID NO: 739567 - DNA, 614 bp, Homo sapiens
aacactgtatatttaggcaacactacatatactgaaaatatttttctctcatcagtaatatattaaccttagcttactttttataaacttttgaacctttgagttttgactcttgtaataacactgtagcttgaaacacaaacacattgtgcaactgtacaaaaatttttattcggtaaactttttcttgtttttaatttttaaaaatttttctttaactttttaagcttttttktgttaataactaaggcaaagacaagcacatcagcttaggcctacacaaggtcaagattatcaatatcactgtcttccacctccacatcttgtcccaccagaagctcttcaggggcaataacacacatggacctgtcatctcttatgataacaatgtcttcttctggaatccctcctgaaagacctgcctgaggctgtttcacagtcatttttttataagtataagcagtacaatttaaagtaatgagaagatatatagtaaatacataaaccagtaacagtttattattattatcaagcattatgtacagtacataattgcgtgtgctatacttttatacaactgaatgctcaggtttatttacaccagcatcaccgca

SEQ ID NO: 739568 - DNA, 614 bp, Homo sapiens
aacactgtatatttaggcaacactacatatactgaaaatatttttctctcatcagtaatatattaaccttagcttactttttataaacttttgaacctttgagttttgactcttgtaataacactgtagcttgaaacacaaacacattgtgcaactgtacaaaaatttttattcggtaaactttttcttgtttttaatttttaaaaatttttctttaactttttaagcttttttgtgttaataactaaggcaaagacaagcacatcagcttaggcctacacaaggtcaagattatcaatatcactgtctyccacctccacatcttgtcccaccagaagctcttcaggggcaataacacacatggacctgtcatctcttatgataacaatgtcttcttctggaatccctcctgaaagacctgcctgaggctgtttcacagtcatttttttataagtataagcagtacaatttaaagtaatgagaagatatatagtaaatacataaaccagtaacagtttattattattatcaagcattatgtacagtacataattgcgtgtgctatacttttatacaactgaatgctcaggtttatttacaccagcatcaccgca

SEQ ID NO: 739569 - DNA, 594 bp, Homo sapiens
atgaggtataatatttaatcatcaaatttctgagaaaaataattatcattgtttaccatctaggtcccatagaacatttttgtttaatgtaatgctctcattttaagtcatttataagtaatttacaaatacaaggaaaagacagtaaaataaactagtaaatattaataaattttaaacatagtaaaagtctttcaygcagtaaatttttgtgcacaaacaccatggatgataaaatagtattgtcacacactcttttaacaaaatgggattatccaggttcttattccaaactattgtgtgaagtcctttgactaactgggtgagaatactgtatttacactttgtctttggaaataacttgtcattggttcttaaatttgagaatgttcatttcagtcatcataatctgaagacatatagtcaatttaattaatatgataaattttattatatctttaaagtctagaatgctgctatcttgttctttgcatttatcttctaattaagttaatcttataactttctttgccatcatgaaaaacaaaaacctctaattttcaactgtgttaacttaaaagcagaccacaaaga

SEQ ID NO: 739570 - DNA, 596 bp, Homo sapiens
agggtgagtaccaggccaggaaggattcaccacaaactgacttcggagaccttgggccttaagaggacattggtggtagtctggtactaatccctgtggccagagtgggtgttggctatgaagtgaggttcctctgtctgtagaaaggggagagaagaatgggaagaactgcatgttgcagtttgagtgccagctcagtcccaacacaatagaaaaccagggagactcttaagtttttctatcctaggccctgagtcctgatggtatttcagggcccacccatgtcctgcgggacctcattgccccgaagggaaaaayatcagcctggctggctttggtacttgctgattgtagagccccgggaccttgagtgaacacaggcagtaccagggagtggttacagcaggccttgggtgagacacagagctatgttggcttcatctctgacccagtgcagtcatagtggtgatggctacagaggtgtttatgtcactccacctacaactttaagtgactcagaacaaagagagagagagagagaaggcgggggggggggagctctttatgtttgagagaagaaacaagggactgtgcct

SEQ ID NO: 739571 - DNA, 617 bp, Homo sapiens
gcttttattcccttatttggccccgcccatgtcctgctgattggtccattttacagagcaatgattggtccatttcacagagtgctgattggtccctttttacagagtgctgactgacgcatttacaaacctttagctagacacagagcactgattagtgcgtttttacagagtgctgattggtgcgtttacaaacctttagctagacacagagcattcattggtgcattttcacagagtgctgattggtgcatttacaaacctttagctggacacagagkgctgactgatctgtttagaatcctttagctagacagaaaagttctccaagtcccaacccgacccagaagcccagcagcttcacctctcactaagagtgccagaagcagaaggtggtcatccccactcacgcagtcaggcaagagtgtgattcctcccttcctcccactttctcttctatttaggccctcagtgtattggatgatgcccagccacactggtgaggaccaactacattgtttagttcctcatctcaaatgctaatctcctccagaaacaccctcacagacccagaaataatgtttaaccaggtatttgggcatctagtcagttgaaac

SEQ ID NO: 739572 - DNA, 661 bp, Homo sapiens
gaaccacaaatgttctttcaaatttaaggccactaattgtaatttgaaaaagagatgttactatttttacttattaatttaattcattgtataatctataatacgctcacaacaatgaatcatgttaaataatcacttaagcacttgcaaaattttcctaatgcatgcattatcttggaagttacattttaccttttctgaattaaagatatttctggttagaatagagactatgaacgactgtaggtgtcctatggcatcaaaaaaactcaygatgtttattaaatagttaatagtttaaaaatgaatagctacttaaggaaataatgctgattttaagtttttcctcaagaacaggcagcaacattatgtaaaacagtttttttcaacatcttgacaattaatgcttctaaaagaatattcaagaatacaaatgagcagttcttaaaaaggaaggtctttataaactcttcattttagaaactatcttgacttcttcacaggtgttgatattgagtgtgtattactagtagtcaagaaccatcattttgagttatctacgatatcctgaagcatacaaaataaataatcatcctgaataaagagagtataactgtaaacttaaattctagttcctcagaatatttcttcttattaaaat

SEQ ID NO: 739573 - DNA, 511 bp, Homo sapiens
atgataattttgccagaattctctataaactttctcctaaatgcgaaggaagcactatgtcacagtaagactgcggatatctctgttcatcttgtagctacaagtaggagcatgactgcaagaatcaagtgaactgtcacctacttttgaatgcagatggaattgcacatacatagtatgcatatgtagccttctttcttagcaaggaacggagccgatctagctcactagccaagttagaattttttgtagtgagatatatttcastccaagataaaaataataactgtcttcttattagcgatgattcagatcataatcaatatgaagctcacaagttgttgcagaataataaaagtcatttgattagatgcagtcacttatcactccatgtgcatcaattttagctcctttcctggtagtggttttctatacgacacagaataatgccaggaaaacgtgaagcccctaaggggacaggaagccaaaggcaattgttttctatttcaca

SEQ ID NO: 739574 - DNA, 511 bp, Homo sapiens
atgataattttgccagaattctctataaactttctcctaaatgcgaaggaagcactatgtcacagtaagactgcggatatctctgttcatcttgtagctacaagtaggagcatgactgcaagaatcaagtgaactgtcacctacttttgaatgcagatggaattgcacatacatagtatgcatatgtagccttctttcttagcaaggaacggagccgatctagctcactagccaagttagaattttttgtagtgagatatatttcagtccaarataaaaataataactgtcttcttattagcgatgattcagatcataatcaatatgaagctcacaagttgttgcagaataataaaagtcatttgattagatgcagtcacttatcactccatgtgcatcaattttagctcctttcctggtagtggttttctatacgacacagaataatgccaggaaaacgtgaagcccctaaggggacaggaagccaaaggcaattgttttctatttcaca

SEQ ID NO: 739575 - DNA, 604 bp, Homo sapiens
ggggagggagagcataaggaagaatagctaatggatgctgggcttaatacatggataatgggatgacctgtgcagcaaaccaccatggcacacatttgcgtatgtaacaaacctacacattctgcacatgtacccctgaacttaaaataaaaggtgaagaataaaagaaaagaaggaaaattgcaggactggatggctttactgctggattctactgaatcattaaaaagtacttaatacaaattcttctcaaattattcaaaaaatttgaagtagagggagctcttcctaacttatctaygaggctagcaaaccttgataccaaaacaagacaaggaactaacataaaaatgaaactacaggccaatatccctgatgaacatagatgcaaatatccctaacaaaatactagtaaactgaataaaacaatagatcaaaaataacacatcatgaccaagtgagatttaactcaagaaagcaagaatgctttaacatgggcaaattaataaacatgatacatcacttcaagagaattaaggacaaaatgtaatatgataatcttagtagatgcagaaaaaagcatttgataaaattcaacatccct

SEQ ID NO: 739576 - DNA, 626 bp, Homo sapiens
aggcacataaacttagaacacatgtggtctttctcaaaatgcagtctttttatttcttctgtttttactaattttattccttttcagttgctttcggtgaattttaggggagtcaccacagaccatattgatttttaaaatatgttttgtgactgattataacatattatgctcttttaaacstattgccttaccactgttttttatttcttttattttttttaacatgttgaccacctatttgaaattgtctataaaatgatttaccctatttatcaggaatagtgttaattagaataatgtctatggagattgtatttgtgcatgtgtgtatatatactatatatagtatagcattacatacaatattattatagtgaaatatatataatatattctatagtggacacttaaaatttgtcctgacaagaggaaccgcacctatatatctgtgaaccgttttagctttgtaaatataagcctgggttctactcattaatctttggcaaatcctgaacctggaaaattaaccaattaaacaacaattatatgtacttagatgtttgcagtcctagttgttaaatttatatgtttaataatgtaatatgctatcactattgagggtg

SEQ ID NO: 739577 - DNA, 556 bp, Homo sapiens
aaactaattggtcataaatatcacctgaaagtttagaaaatgtagcatcatggacctcttttcataggttctaaatcttaatatctgtgggatggtgcaggaatctagctttgctaagtgccctcagatgactcttgctgttctaggctaaaatacatgtggtttggcttcartggacatgttcctgaagaatgtttggatgtcacacattcatatttagtatgagagatgaggtcctcctctcatcattttcttaggttctcttctctccactccttaccctcccatcacttacaataaatcttttagaaaattagctatacatttgtttcattataaaaaagaaagaagataaattaaaaaaacttgaaaaaactgtagttatagttaaaggacataattttaaaatttaatagaatctaacatctacagaatgggtggaaatgtaagactattttgtaagcacaataaatctagttctaggttaagcttcatgagaaaatttagttaacttggccaatttccttttcaaagatgctttaatgtcttagtttat

SEQ ID NO: 739578 - DNA, 666 bp, Homo sapiens
ttatctatgatcttcctgaaaatagaagcagaaatacatatacatatttcgaagccttgtgctgtacaacaaaataatgtatatcatgttttaaatatatatatatatttacattaaaaattcctttttgtttttattctgttgatgtaatttacattgaacaattttgaatgttaaatcaacattgcacatctggtattaattaatcctcctttgttgtggtatataactacacgttgttggattccatttacaaatattttgttgaggatatttcattggtggtaawaaaagatattggtctctagtcatcctttgttgtaatgtattttgccagttttaatactaagataactctggtgttattaaaggatttagcaaatgttctttctgcttctcttttattagtagtagtactttttttgaaactgacaaatgaaaattgtatttattgatggtatagaacatgttatttcaaaatatgtatctctgcctctgctttctggaagaaattgtgaataattggtataatttcttaaaggtttggcagactaaactagtgcagccattgagctgtatgttttgtttttggatgttattaattattagtacaaatgctctaatataaattggctactcatattatctattatccttgtgtgaatt

SEQ ID NO: 739579 - DNA, 587 bp, Homo sapiens
gttttgcagagtacaacacattttaggatggaatggggtgctaaatgaaattacttagtgcaactagtatgtgaatataaacaatataaccactggaatataaatgagatcaattgaactccaaggttgtgacaagatgttccagcttcctctttccctcttaggaaacggatacatgacctaaaagggaagcaccactttgaatcccagactgccttaattattttctctatctacaggcttcatcatctgaaaaactttaaatgagtattaatgaatacatgaatgaatgattatttaattacacttgaatacatacatgaaagggttataaattatttgaagttcgtaatttgaaataattaaggtccaagaattttttcatctaagcttgttawactggttaaatcattgctcttctatttattttcaaaactcatattttctcccacaattttacatattcctttccaggaggagtttgtcttcaattgcaaaaaaaaaaaaaaaaaaaaaaaaaaagaagaagaaaccaggtaagattaatatattcatgaattaactgatgcaatgactcattcaacaaa

SEQ ID NO: 739580 - DNA, 646 bp, Homo sapiens
tgtctgttattccctctgtttttaccctgctattttgttacccttgtcaattcctgactttgaatctctatgagctataaacacataggcccctagttccactgacagaatacagaagaactgagattgtgcagatcagccattatttatatagaaagggagacacagatcttcytaagcgtagaaacaggatgctcctagaacccttttcatttagcccagatgaggaaagcattctgttttattttgaacatcagttcatactctgctaaaagctctcctcttctgggactctcttcaattccatccatataagtttctatcatatttctgattttctctcaaagagcttttatcagagggtaatagctggaagggtcttgctccttataattcattgatgtctctctagatcacaaataatgaatactttttagaagggtgtaagagaaagagagggagagataaagggatgaaggagggaaacaaggaagaaagcaaagaagggaggaagggagggaaggaaggaagaagtacttacctggtacaaatttgtcagaataaaattttaggaaaaaaactaaagccattcataccatattggccttttttaaaacaaaagcaagggttatgtggaaaattagga

SEQ ID NO: 739581 - DNA, 532 bp, Homo sapiens
atacttatctactctgaaaaaaaaataactaaaaactaactcaacattttatccaaaatagattattctctaagtagcctctgtaattttactcataatgttaacttctgtaatgcccagtacttacctttgggcaaactgtaatttcatagacctttttggccctattgcccttaatgtagctctttctgactgygttaatttatagctatctatcctatctgaaatactgtggtactctacatttttctcatagagttctcaagaattatttttatgggaatcatttattatccatcatatttccactacttgattgtaagaattttgagagcatggtttatgtcttatttatttttataacttctacagaattgggaacatcatgaattactatttgttaagtagcacttgtacacataagtgttctctaaatattagttgaggaaataaatttataaataaatgaatagttatgttctgtatgcacatggtgggttatctaattctaatttatatgcatattgtattt

SEQ ID NO: 739582 - DNA, 532 bp, Homo sapiens
atacttatctactctgaaaaaaaaataactaaaaactaactcaacattttatccaaaatagattattctctaagtagcctctgtaattttactcataatgttaacttctgtaatgcccagtacttacctttgggcaaactgtaatttcatagacctttttggccctattgcccttaatgtagctctttctgactgcgttaatttatagctatctatcctrtctgaaatactgtggtactctacatttttctcatagagttctcaagaattatttttatgggaatcatttattatccatcatatttccactacttgattgtaagaattttgagagcatggtttatgtcttatttatttttataacttctacagaattgggaacatcatgaattactatttgttaagtagcacttgtacacataagtgttctctaaatattagttgaggaaataaatttataaataaatgaatagttatgttctgtatgcacatggtgggttatctaattctaatttatatgcatattgtattt

SEQ ID NO: 739583 - DNA, 585 bp, Homo sapiens
tggtgcaagatggtatctcattgtggttttgatttacatttctctgatgattagagatattgagcagttttttcatgtttggccacttgtttttcttcttttaagaagtgtctgtttgtgccctttccccactttttaatggagttatttgatttttcttgttgagtttcttgtagattctggatatcagtcctctgtcggatgcacagtttgcaaatattttctctcattctgtaggttatctgtttactcctttgattatttcttctgctgtgcagaaactctttagtttaattaagtcccatttgtctatttttggttttgttgcatttgcttttgaggtcttagtcataaattcttggaacttctggagaacttctaagtttttgattgatgcctttgattttttttataattatacaattagtaaaaggtgatcttytagcaagatagctggagaccttatttgaggctctcctttatcttcttataaagtatatttcaagtttaagtaagataaacaaagttcaatctctgttcacttattgtcttctaattaagtcaattaattaaaaccaaactatt

SEQ ID NO: 739584 - DNA, 626 bp, Homo sapiens
agacggagtcttgctgtgtcacacagtctggagtgtagtggcacaatctttgctcactgcaacctccacctcccggttcaagcaattctcctgcctcagcctcccaagtagctgggattacaggcacataacaccacacctggctgatttttgtatttttagtagagatggggtttcaccatgtaggccaggctggtctccaactcctgagacctcaagtgatccacccacctcagcctcccaaagtgctgggattacaggcgtgagccactgtgcccagcctttttatctattttattcttattttttattattattttttgagatggagtcttgctctgtcacccaggctggagtgcagtggcgcgatctmagctcacaacaacctctgcctcctgggttcaagcgattctcctgtctcagcctcctgagtagctgggactacaggtgccttccaccatacctggctaatttttgtacttttagtagaaatggggttttgccatgttggccaggctggtctcgaactcctgacctcaagtgatcagcccaccttggcctctaaagtgctgggattacaagcatgagccaccatacctggccacaaaagtttttaacattgatga

SEQ ID NO: 739585 - DNA, 597 bp, Homo sapiens
ctgcaaatttggttttactatgttacatttaaaatgcacatgtatatcttggtatggtttgtttgaaggacataaaaagtgttttaagaaatttcaggccgggtgtggtggttcacgcctgtaatctcagcactttgggaggccaaggcggacggatcacgaggtcaggagatcaataccatcctagctaacacggtgaaaccccgcctctactaaaaatacaaaaaaaaaaawaaaaattagccaggcatggtggcgggtgcctgtagtcccagttactcgggaggctgaggcgggagaatggcgtgaacccgggaggtggagcttgcagtcagcaagatcctgccactgcactccagcctgggcaacagagcgaggctgtctcaaaaaaaacaaaaaaacaaaacaaaacaaaaaacaagaaatttctagaaaatgaggtaagtattaataatgatatatctgtgaatgcaatatgtacacatacacaaacatattcatctagagtataccaaaatgtatctatttttatattatatgtgcctatatgtattataagcatgtatacactatatatacatatgtatgtatatgtgt

SEQ ID NO: 739586 - DNA, 633 bp, Homo sapiens
actaaagagcttctgcatagaaaaagaaaccgtcaacagagtaaactgacaaccttacagaatagtagaatatatttgcaatctatgcatcttacaaaggtctaatatacagactcttcaaggaatatccagactctrcaaggaacttaacaagagaaaaccaagtaacactattaaaaagtgggcaaaagacataaacagatacttctcaaaagaagacataagacataacattatgaaatgttcaacatcactaatcactggagaaatgcaaatcaaaagcataatgaaatatcatctcacaccagtcagaatagctattattaaaaagtcgaaaaacaacatatgctggcaaggctgcagagaaaagggaatgctgatacactgctggtgggaatgtaaattagttcagccactgtggaaagctatttggaaatttctcaaataaattaaaacagggctaccattagacttagcaaccccattactggatatttagccaaagaaatatagttcattacaccaaaaagacatatgcactcatatgttcatcaccatgctattctcaatagtgaaggcatggaatcaaattaggtgtccatcaatggtggattaaataaagaaaaatgtgta

SEQ ID NO: 739587 - DNA, 633 bp, Homo sapiens
actaaagagcttctgcatagaaaaagaaaccgtcaacagagtaaactgacaaccttacagaatagtagaatatatttgcaatctatgcatcttacaaaggtctaatatacagactcttcaaggaatatccagactctgcaaggaacttaacaagagaaaaccaagtaacactattaaaaagtgggcaaaagacataaacagatacttctcaaaagaagacataagacataacattatgaaatgttcaacatcactaatcactggagaaatgcaaatcaaaagcataatgaaatatcatctcacaccagtcagaatagctaktattaaaaagtcgaaaaacaacatatgctggcaaggctgcagagaaaagggaatgctgatacactgctggtgggaatgtaaattagttcagccactgtggaaagctatttggaaatttctcaaataaattaaaacagggctaccattagacttagcaaccccattactggatatttagccaaagaaatatagttcattacaccaaaaagacatatgcactcatatgttcatcaccatgctattctcaatagtgaaggcatggaatcaaattaggtgtccatcaatggtggattaaataaagaaaaatgtgta

SEQ ID NO: 739588 - DNA, 625 bp, Homo sapiens
tccatttatgacacctcatgttaacataattgatatttgatcttataatcacaaatgccattagtcaactataatagtcacattcatcactaatataatattaacttcctatgaagacaatatataaaatgacctgaatcgaattctatttgatattattatcaacggcctgatagactaagaagatagttaatagctgcactattaaatattaagcattcccttcaataaaatttactatttcaatagcagctattagactatcacattatgatattgtttaattttttaaatttttttctgataaactaattcttgttakagttatgttcttaatatcctggaattaagattgttttcaaaatgtattagccagtttaacatgtgaaaacattagcaaaacatataacattagaccagattattttattggtttcagcatttatgtttggatctgtcaagatccagtcaggagacagaaaccacagaccagagattttctactgaatatttactgtaaagttaaactagctcttgaactaaaaggcttttgtagttatatactgctttgtatccaactatgttttcatttagttgcttaagacaatcatgacatattatttct

SEQ ID NO: 739589 - DNA, 546 bp, Homo sapiens
ttgaactgttttcaatgacaatttaaagttccaaacatttgcaatgctatttttgtctgcttggtttaagtggttctgactgtggctctcactacttagtcccaattggtcctatttgtccttaggggtcagactgggttatgccacagggtatctctcaatgggcaagggaatctcagagctataaggatgaagaggcttccaaggctgaacatgtgctggctgtatctgcttcggctgtgttggacagagactgcttgctgagatgggtacttttttggcagcccccctcaccactactgcctggagtctatcgatttcaaaattttatttaattgcctagtatttcagttaatcatataaagtaacaattttcatgacatattakcgattatctatgggaacgttttattttgtctagatttttaattggggtctttaattcaaaagtttcgacactgctatatcaattaatttgcctacaatttaaaatatttaaactgctctcaagaaaaaactctcaaatcctagagctaattaatggtc

SEQ ID NO: 739590 - DNA, 546 bp, Homo sapiens
ttgaactgttttcaatgacaatttaaagttccaaacatttgcaatgctatttttgtctgcttggtttaagtggttctgactgtggctctcactacttagtcccaattggtcctatttgtccttaggggtcagactgggttatgccacagggtatctctcaatgggcaagggaatctcagagctataaggatgaagaggcttccaaggctgaacatgtgctggctgtatctgcttcggctgtgttggacagagactgcttgctgagatgggtacttttttggcagcccccctcaccactactgcctggagtctatcgatttcaaaattttatttaattgcctagtatttcagttaatcatataaagtaacaattttcatgacatattagckattatctatgggaacgttttattttgtctagatttttaattggggtctttaattcaaaagtttcgacactgctatatcaattaatttgcctacaatttaaaatatttaaactgctctcaagaaaaaactctcaaatcctagagctaattaatggtc

SEQ ID NO: 739591 - DNA, 673 bp, Homo sapiens
cttttttagcttgcatatatgagggagagtaggtgatatttgtctttctgtgcctggcatagttcacttaacataatgacctccagttccatccatgttgctgcaaattacatgatttattttctcttttgtttctttgtttgtttttctgttttgttttgttttgaggcacggtcttgttctgttgcctaggctggagtgcactggtgcaatcatgattcactaacttcaacctcctatgctccagctgtcctccgcctcagcttcccaagttgctggaacacaggtgcatgccattgtgactgcctattttttttttttttttttttttttaragataggatcttgctatgttgctcaaactggtcttgaactcctgctctctaaagatcctcttggcttggcttcccaaattgcagtgactacatgtgtgagcccccatgcctggccaatttcattcctttttatggccaaatatattattttattgtaatagatgtaatttggaaagacattttgccttttctataaataagaatgtcttcaattaattagccctttacaggtttttagcatttttcttcatttagaaagtgcttacattggtatccacactattaatgggaacaaaattggtaagatttatctggcaggcaatttgtcaattacatta

SEQ ID NO: 739592 - DNA, 665 bp, Homo sapiens
cctccatttttaaaatggattttcccttttaaatgattataagattcctttttaaaaacatttttcttatttcataaataatacacaatcactgttgacatttttaaaagtatggataaattaaaagaaaaaataacaataattcacaatcttaccacctaatgattgacactgttagcatttttatgtattccttttggtgagactgcttgggattttagcatcactgaatatatatctcccagtgagagttgcctcttcaaagcctttccaagccttgcacatgtaccaacaatgctgcccataaattaggaagttggggaactgctcttcggtaactcactccctgtagactgtgactctgtctttggaatgtccttggtaataataagtcatctgagggtcgtagtgattattggaagagtcatttgaagacaaatttacatgattggaagaatgatcaagctgagtacctccatttgtttttctttattttaaagtcattcctataaagtttaaagactttttcatgtttctctggtgttttcaaaatttttgatgtgtacgtttacagaaggagaggaataaatttcaytattttggagcaacatttctcaaagtgcgttctatagcacagcagatactggaaatgccctccagaaaga

SEQ ID NO: 739593 - DNA, 612 bp, Homo sapiens
acttttattttatcttctttattattaaagagatagcatattgtatgcacactctatattttgctttaactcttaaaaatatatttaaatttatcaatttacaattttatgtttagtattctcttattttttgtttaagaattctttacctgcccaaagatcacaaaaattttccactatattgtcctctaaaatttttaaaaatcttgcctcttacrgttcagcttttaatctctctagagacaattttgtgtgtgatatgaggggggtacccattccatttttaaaatgagtttccatttatctcatacactttgtcaaacagtctattctttgcccagtgatatttggtgtcggttcagctctacatcaagtttccacacattcatggatctgcttctggactttctattctgttttatttgttactccgtctattcctgagaaaatcttctgtctaaaactttcagacatatttttatgttattaactttcattttaggtgcggggtacgcgtgcaggtttgttatataaattgtgtgccatggaggttggtgtacagattagttcatcacccaggtcctcccacactccaccctccaccccacaata

SEQ ID NO: 739594 - DNA, 612 bp, Homo sapiens
acttttattttatcttctttattattaaagagatagcatattgtatgcacactctatattttgctttaactcttaaaaatatatttaaatttatcaatttacaattttatgtttagtattctcttattttttgtttaagaattctttacctgcccaaagatcacaaaaattttccactatattgtcctctaaaatttttaaaaatcttgcctcttacggttcagcttttaatctctctagagacaattttgtgtrtgatatgaggggggtacccattccatttttaaaatgagtttccatttatctcatacactttgtcaaacagtctattctttgcccagtgatatttggtgtcggttcagctctacatcaagtttccacacattcatggatctgcttctggactttctattctgttttatttgttactccgtctattcctgagaaaatcttctgtctaaaactttcagacatatttttatgttattaactttcattttaggtgcggggtacgcgtgcaggtttgttatataaattgtgtgccatggaggttggtgtacagattagttcatcacccaggtcctcccacactccaccctccaccccacaata

SEQ ID NO: 739595 - DNA, 654 bp, Homo sapiens
gtttgggactgtaattgaaaggccagtgattcctctggatgatggtacactgacctccataacaatgaacaaggggcaattgaacaggtaatagttgtctctacccatgtccaaggggaaaaggtagaaaacagcataatgtcatagttgtcatgaagttyaaaaaatcaacctcttgctcactgagtgacaaggagcagcttacagtgatctcactgaatattaggttcttcatccataaaataggttcttcatccataaaatgccagatatactgctgatatttgagatgatcaatattaactgcctgccacctgtaaagccaaggacagccccactggttcagataccatgatcagcaagcacttcaagcctcactgaaaaagccaaaaccattttctcatttatggacttgatttatagccatggaaaataaacaataaatgagagcaaagcattctgtgactttccttcaaaaccatttaattttttaaacagtcaagaaaaagtaaaggaaaaagaagagtgaccaaaacaatactcaaaattactatgttgtatgtaaatttataacaaaaatataaagttaaaacaaaaaatattttaaattaagattagcttaaaatatagtgttcagctttcactctccttcaa

SEQ ID NO: 739596 - DNA, 501 bp, Homo sapiens
ttcctctggatgatggtacactgacctccataacaatgaacaaggggcaattgaacaggtaatagttgtctctacccatgtccaaggggaaaaggtagaaaacagcataatgtcatagttgtcatgaagtttaaaaaatcaacctcttgctcactgagtgacaaggagcagcttacagtgatctcactgaatattaggttcttcatccataaaataggttcttcatccataaaatgccagatatactgctgatatttgagatgatcaatattaactgcctgccacctgtaaagccaaggacagccccactggttcagayaccatgatcagcaagcacttcaagcctcactgaaaaagccaaaaccattttctcatttatggacttgatttatagccatggaaaataaacaataaatgagagcaaagcattctgtgactttccttcaaaaccatttaattttttaaacagtcaagaaaaagtaaaggaaaaagaagagtgac

SEQ ID NO: 739597 - DNA, 610 bp, Homo sapiens
ttttcccccaaataattatcctaaatctaaaccatttcagctaaaatggttttactctccccactatgtgagttacttattacttgttcttttactttttaaagaaagacactaaggtatttataacaaaacctggacattacaaatttaaaataacaagctcagactttatacatttartatgttcttgatcagtcacagagccaaaagagaaacaaacagaattaagcttacaagaaaataaaatagtaaaatattaatatataaaatagaaaaggaggttatataacagaatttattataccaaaattaaatgtaattctaacaaggctagagaggcaaaaaaaaaaaatcaaatgtaagtcatataagactttaaaaatcaggatattaaaccaacattgatatcacattgtttaaattaggtccttccttttagccataatgaatgtgtatatttcatggatcaaaaacacaaagtaattcttattatacaaatgctgttctagtaaacacacaagcattttttttctgatgtttgcaccttctttatactttcttccaaaaccactgctcctgacttacatcacaggaagaacaacaaaaaaga

SEQ ID NO: 739598 - DNA, 603 bp, Homo sapiens
aagtggcagttagggaaggatcctctctccattatatgaaaagtaggtgtctagtggggaggagcttccttctgaaatgctcagaaatgtaccgatgtccttagatgctgcagatggagcccagatcccagtgagcgactgctgggctgttcacagagagccagaggcccctttggaaagggtggatctccataacccatgggaggggagggacctccaacaatcttgttagtgcatcaagtaataaatttttgacagatgctttcctgccttctagtccaaacttcaaaatccttcctgcactggtctcattggggttggtggttagttctcactttccccatttctgagaccagcaagagggctctgtttgcgccaagtctycctgtaaacactgtggttatgcccacactaggcaatgccttcttggggagataacattgcatttattccaggactcctacagggaacaggaggggaagaaaattgcctctctgtgaaagcacattacaatgtggcctagcccaagctagactcactagaaatgttaactctgccctgcactttccattccccatcccctttcctctgccttttccaagc

SEQ ID NO: 739599 - DNA, 606 bp, Homo sapiens
ataaaaatccttaaaaagtgggtatacaagaaacatgccccaacataataaaggccaaatatgacagacccacagctagcatcctactgaatggggaaaacctgaaagcttttcctctaagatatggaagacaacaaggatgcccactttcaccactgttattcgacataatactggaagtcctagctagagcaatcagaaaaaaaatgaagaaataaagggcatctaaattggaaaagaagaagtcaaaaatcaaattatccctatttgtagatgatatgatcttatatttggaaaaaaaatctaaagactccatcaaaaaacagtactataatggataaattctgtaaagttgcagaatgtaaaatcaacgtacaaaaattcatagaatttttatgtgctgacaataaacartctgaaagaaatcaagaacataatcccatttacaatagctccaaataaattaaatacctgggaattaaccaaataagtaaaagatctttaaaataaaaactactgaacatttatggaagagattgaagaggagacaagaaatggaaacttgttatatgtgcatggattggaagaatcaatattgttaaaata

SEQ ID NO: 739600 - DNA, 452 bp, Homo sapiens
aattgttctaaataattatgtacacgttcctctgaatattttataggtgaaatatctacctggagcaaaggagcatataaatctttcaacggccgcatctttttctttgaatcttcatgcccatacactttctgccgtcactgcrttgaatctggaggggatttcaatattgagatcaaacgaaacaatgatagtgagattgaaaaaataacagttctaattgacaataacgacgtctctatttttggtgacaccattttagttaatggagaaaggtaaataacgtagtgttttgggtaaatgatataaaattatttgaagtaacctgagcaaaaaaggaaaaaaaaaagaaaaagataaaaagggagatgatactttcttcctattttgatgctcttatcgatatttataattgatcattggccaagagtttgataaatgtgtaagacttt

SEQ ID NO: 739601 - DNA, 616 bp, Homo sapiens
ggcagcacattccctttgggaagacaaaaagtaaaaataaaattaaaaaatgatgactgtgaaaattcatcaatggtaaactacacggatatagtttatgcaagatacttggaccatctataaagctcttggccagtcctgaggctgtactatgggctgaactaggtttctattctcagagcactctgattgtagtaggaattgtacatatttaaaattcaaactttcatttggaatgaattacctagtaatagcataccataaatagaattaaatgacattctaataaacattttaatgaaattcattttttacagaatgaagattggtctattagtgttgagctccgtccgtgcccaagtggtcagacaggaacrtgcttaaatagcgttacacttctcttgaattctgtaagtaataagcttcctaagccttattcagagtcaaatcatatcacttattttataaattcaggatttctgaggttgaagaagagaagttttactatgtataatcaaagcttaagtaaaattgcatagaaaattgatgaagtctctggaagtgccggctagttgcaaaggtcttgaagtatatcaaaattactctacgtatacaa

SEQ ID NO: 739602 - DNA, 627 bp, Homo sapiens
agtgactgtcttagattgccctgagaatgaaataacacatgtaaagtacgcaaagtacatatgacaaattttagcatatttatctatatattccaatttattttgctttgtcaaattcactttaaaaagaggtttgtatttaattttctttgggagatctataatgtttaaggaatacttaaacagaagcaaacattatttatgctatcatgtagttgagtgaaataccaggttataaagtccttaggcccaaggacttgtcttacccatttctgtatttctattttgtatgtacagtatttattgaatcaatgaatgcatggttgattgaacatattggtatttaatgacagtgtgcaatgggcctataaataataaaaactgttgtttaagacttctcccatgttgtgtactttatagcaattccagatygctcttacagtttaggtggtaaagagaattgtttgctgttttagtgttttttaagtgctaagaccttttttgacaattcatctccaactgcacttcatattttctttgtagcactctgtaccactcaacatattatatgtttatttattacttctcttctctcatttgaatatcagccctatgaatgtataaact

SEQ ID NO: 739603 - DNA, 627 bp, Homo sapiens
agtgactgtcttagattgccctgagaatgaaataacacatgtaaagtacgcaaagtacatatgacaaattttagcatatttatctatatattccaatttattttgctttgtcaaattcactttaaaaagaggtttgtatttaattttctttgggagatctataatgtttaaggaatacttaaacagaagcaaacattatttatgctatcatgtagttgagtgaaataccaggttataaagtccttaggcccaaggacttgtcttacccatttctgtatttctattttgtatgtacagtatttattgaatcaatgaatgcatggttgattgaacatattggtatttaatgacagtgtgcaatgggcctataaataataaaaactgttgtttaagacttctcccatgttgtgtactttatagcaattccagatcgctcttacagtttaggtggtaaagagaattgtttgctgttttagkgttttttaagtgctaagaccttttttgacaattcatctccaactgcacttcatattttctttgtagcactctgtaccactcaacatattatatgtttatttattacttctcttctctcatttgaatatcagccctatgaatgtataaact

SEQ ID NO: 739604 - DNA, 519 bp, Homo sapiens
acctcctttgggtcccctcccattgtatgggagctctgttttcactctattaaatcttgcaactgcacactcttctggtccgtgtttgttccggctcgagctgagctttcatttgctaccaagcactgctgaatgctgctgtcacagacccactgttgaatcctacccctccggatctggcagggtgtctgctgtgcttctgatccagtgaggcacccattgctcctcccaatcaggctagaggttcaccattgttcctgtgcagctaagtgcccgggttcatcataattgagctgaacactagtcacygggttccacggttctcttccatgacccaaggcttctaatagagctataacactcactgcatggcccaaggttccattccttggaatccatgaggccaagaaccccaggtcagagaacaaaaggcttgctgccatcttgggagcagccgccaccatcttgagagcagctcaccaccatcttgggagctctaagaacaaagacctgctggta

SEQ ID NO: 739605 - DNA, 578 bp, Homo sapiens
aaaaaaatttgtacaaagtatatctttttttaaaaatgataaccgaggagccagacagatcacagcatcgcaggtcttgtaaagacattagcttttattctgagagacatgagaaaccacacatgtaatctacagaatgacatacagtaacatatgttgactgtttctttcccaaagtagttataatgcatacacttttcatcttctgaagtgtatgagcatgttttaaaaacatcttttakgcccaaaaatccatgtgcaggaagtcaagatacaaatgagaatattgaaacatggttaccatgacttcaccttttctcaatgagcacctaaacatgctacatgaattcaatgatttccatcatactctactgaaaatcactgattgaattcacggaaccaagaaatgtaaattgttcagcatatcaaaaaaaaaaaaaaaagtatttgagtatgtcaccatgtaacacttttgactttaatttcaaggcttttaatgaatatttctatgagaattcagcattgtcacactgagtcataaaacccctgctatggctacactgaggtgtgcttccttt

SEQ ID NO: 739606 - DNA, 558 bp, Homo sapiens
ttgtttcctgccttagacacaaggacagaagagaaaaaatactagatatcagcagagagagccaggtgggacaggaccactcaaagctgcagtgggagccatggggacactatgcaagggcacaaggtttgcaggtataaactcttaatctacttcttccatgtgaaacacatcctcaggaacacatcacatcaggaacagcagcactgagttcctctgttgccacttcatcttcatcaatagctaacctagcttgatcatgtggtagatgcagctggataggtytgaggatcctcaagggagaagccagaagagagcagtgtggtttcaaacagcagcaccaccgggtcactgacagcctcgttgttcttgtctgcctcagccttctgctgtagtgtctccacaatggggtggttggggttgatctccaggtgctttttagccatcatataacccatcatagagttgtcccaaaatgcctgcgctttcatgatccacttcatattggctatctagctgtaggtgctggtcacaatgcggcagggtgaagacacaagc

SEQ ID NO: 739607 - DNA, 616 bp, Homo sapiens
ctttaaatgttaaaactgtgtcttttcatttaaattgcatttcttttacgctcatttggtcttttttttttaatcactctaaccatctcagtttcttaattaacgtgcttagtccatttatatttttttaattaaaaaaaattgagacagggtctcgctgtgttggccaggttggtcttgaactcttggcctcaagcaatcttcacacctcagcagtccatttatatttaatgcagtcatcaatatggtyagatttaaacttaccaccttgctatttattttctatttatcccatcagttttttgttcctttttctcttcttcctaacttctcttaactgtttttaaatacatttgatttattttattaacatgttaaattatttcctcttcttttttcaatggttgctccaagggcagaggaaattcctgcaaactttttctgaaaaggcctaatagtaaacatttagacttttgaacaacatgtagttgttctctatcacaactcttcaattctgccactataatgtaaaagcagccatagacaacctatcaatgaataggtgtggctgtgttctaataaaactttacttacaaaagcaaacatctggcccaca

SEQ ID NO: 739608 - DNA, 458 bp, Homo sapiens
gccaaggagtgaatgggaataattgccctaactggaaggggaaaggactcttttttaaaaaaatattttctgcttgtggtccctggtccctacatgtgatccagtgcagagcaaactcacacgtttcaggtgacttaaaccatttttttatgctaaattctttccttcccctattcaactggctaagggcaaaagaagcctacccagcctccagttcctatcattaaagttcatggaatgggaaacatgggaaagcgtggccttaacaaattataaggatgctaaaagtyggagattacacccaggtaccgagagaaagctcatagtaggctctggagggaaagcatgcaaagtggcacctgtgcccacctaaggtcagagacttgtaatactctaagattggaccccacaggaggacggatgctccaggggatcctacagacctcaacctccctgaa

SEQ ID NO: 739609 - DNA, 530 bp, Homo sapiens
tttctatgtttagatatacaagtacttagcattgggttataattgcttatagtattcagtactgtaccatgttgtacaggtctgtagcctaggagcaataagctatcccatatagctaggtgtgtagtaggctgtaccatttaggttcgtgtaactacactgtgtgatattcacacaataatgaaatcacctaatgatgcatttctcagaacttatcctcgttaagggatgtgtgcctgtgtgtgtgtgtgtgtgtgtgtgtgtgtgtgtgtgtgtgtatctcctaytgattgtttctctggagaacactgattaatacaacagaacaagccctgattcgtagtgctgctaatttctgtggtgtaaatgctccccctgtgggtgatttcaggctgccaatgtcactgaacatggaagtggaaggaggtgtgcatgatggtccttgtaagctggtacaagccatattccagcacaccactgaccccctcccacaaacacctttctcacccctcccccagagggatcagacc

SEQ ID NO: 739610 - DNA, 447 bp, Homo sapiens
tggccgagcagcgggagggtggggtgtggcaggggatatggaagaacgaagccaggtgaatcaggtggggtgggatcagccgagtcttgatggaggagtctggtctctgctgatgaatacctgcaaatcaagcagccagtaagcattcttcaaagtgcagttgacatgggaggaaatctttggaaaatgccacttggaagatgtaatgttaggatgggactcrcctttgccttctcatatctgaattaccagttgctcaggtaggaaaccttcagggggttatgaaatattacagtagacccttaaaaaatgagtcctagattgaggtaggggactgtggttctgttgtttataagccatgtgctattgacaagtcatgtgaccttcctgttgcatattttgttccccaaatgacgtcagcatttatagcccatgtccccataggta

SEQ ID NO: 739611 - DNA, 643 bp, Homo sapiens
tcccaagtactgggactacaggtgtgcactactacacccagctaatttttaaatttcttgtagagacatgcttttgctattctgcccaggctgatcttgagcacctgggctcaagcaatccacccacctcagcctcccagagtgctgggactacaggcatgagccaccacgcccagcccaattctakgagttttgacaaatgcatgtagttgtcatacatataacctcaggcaagatatagaatattcccatcccccttgtgctatctgtagtcagtctactcctcccactgccaaccctggcaattctaccatccctggagttttgccttttccagaatgtcatataagtggaatcatctgtatgtagaattttgtatctttttctttcatgttacacggtggtcttgagattcagccatgctgttgttgtgtgtatcacagtttgttccttttcaatgctgagttggattgcgttgtatggttgtgacacagtttgtttatccattcctaagttgagggacatttggattgtttacagtttggggaatttttaataaagctgctataaacagttaaatacaggtcttcatgtagacgtatgtttttatttctctctggtaaatatctaggagtaggatttc

SEQ ID NO: 739612 - DNA, 643 bp, Homo sapiens
tcccaagtactgggactacaggtgtgcactactacacccagctaatttttaaatttcttgtagagacatgcttttgctattctgcccaggctgatcttgagcacctgggctcaagcaatccacccacctcagcctcccagagtgctgggactacaggcatgagccaccacgcccagcccaattctatgagttttgacaaatgcatgtagttgtcatacatatmacctcaggcaagatatagaatattcccatcccccttgtgctatctgtagtcagtctactcctcccactgccaaccctggcaattctaccatccctggagttttgccttttccagaatgtcatataagtggaatcatctgtatgtagaattttgtatctttttctttcatgttacacggtggtcttgagattcagccatgctgttgttgtgtgtatcacagtttgttccttttcaatgctgagttggattgcgttgtatggttgtgacacagtttgtttatccattcctaagttgagggacatttggattgtttacagtttggggaatttttaataaagctgctataaacagttaaatacaggtcttcatgtagacgtatgtttttatttctctctggtaaatatctaggagtaggatttc

SEQ ID NO: 739613 - DNA, 547 bp, Homo sapiens
cacctcagctaagtcagtcttctccaggtgcctcaaggatcctatcagccccttgcccagccagcatctcttgccttctcttaaagacaagttcttggctgggcacaatggctcatgcctgtaatcccagcactctgggaggctgaggcaggaggatcacttgaggtcaggagtttgagaccagcctggccaacatggtgaaaccctgtctctactaaaaatacaaaaattagccgggcttggtggcacatgtctgtaatcctagttactagggaggctgaggcagaagaattgcttgaacctgggaggcagaggttgcagtgagacaagatcacaccacactgcaaccagcctgggcaacagagygagactccatctaaaacaaataaataaataaaaaagacaagttccttggctgaggagtggccatactggctgctcccacttccttgctcctatacccacagtagccttgcttcagctcctgtgactctctgctaatcactggcttctaggccaccaatggctttagaattgctagatccag

SEQ ID NO: 739614 - DNA, 527 bp, Homo sapiens
ctttcattaaaggctgcttatagggtgggtgctttgcatacttcatctcatttaatattcagataatcctgcaaggtaagaatcatgaatctttttgagtgttaattaatgtcctatatctcgtttcagtggaggagtaagtttctatctcacttcccaggggagtgacttatcatatggagaggttttaaagaaggtgagcgtggggccctctytttttgtagaaaagcctgtccttggcatgtagagcttttcaactttagtacccagatcctcccatcacccagcactgtttctctctattctgttccaattcatacatgacacagctgctgggaaaccttcaatggccccattgcctacagaataaagctccaactccttatcctggcattgaagaccctccaggtgtggcctaccctacctttccagtctttattctagttcactccaccacatgccccatgaactcagggccagctatgggggacagcagtactacctgggctaaataatttaaagatttt

SEQ ID NO: 739615 - DNA, 527 bp, Homo sapiens
ctttcattaaaggctgcttatagggtgggtgctttgcatacttcatctcatttaatattcagataatcctgcaaggtaagaatcatgaatctttttgagtgttaattaatgtcctatatctcgtttcagtggaggagtaagtttctatctcacttcccaggggagtgacttatcatatggagaggttttaaagaaggtgagcgtggggccctctctttttgtagaaaagcctgtccttggcatgtagagcttttcaactttagtacccagatcctcccatcacccagcactgtttctctctattctgttccaattcrtacatgacacagctgctgggaaaccttcaatggccccattgcctacagaataaagctccaactccttatcctggcattgaagaccctccaggtgtggcctaccctacctttccagtctttattctagttcactccaccacatgccccatgaactcagggccagctatgggggacagcagtactacctgggctaaataatttaaagatttt

SEQ ID NO: 739616 - DNA, 538 bp, Homo sapiens
gctgcttggccaggcagctgtgcaatgtggacagctgtctgcctgaagaccagcctgcttcaacagcacaggttctgctaacatacatgctaacagggctgttttctctttaaaacaatgggtttgatgggttgggagggagtgaaaactataaaaataaatctctgccaggaagctctcaagtctcttaacgaggtcatccatatagcaagtactctaaggtataaataatgaaagctcagtatttcctacttattcctgaaattgtccatcatttttaaagtttaccaagagtaaacttcccaaatgtaacagcttagtactttacccttcaaattcagrtttataaaattttagaagagaaatataagaatgagaatttttctttcaaagaaaatcaaaccacctcacattcaacccttctcttccttaagattctcctccaaaatacttaattttctacttcattctcagaattttctatatgttagcatagtattttttggttattattttttaagctgctcatcttccccaa

SEQ ID NO: 739617 - DNA, 589 bp, Homo sapiens
atgggatcagtgacaataaatgtaagccaagggagagacactggtgcaacagtggtagagacatgggagtctaggctgcttgctaatgtaacatactgtgccctttgcctatgtttgtgttctacatgtatagaacccagctcatgatcattgttcttggcttcatggctacttgacatccctttgtcyggtgctatatctctataaaagcccagcagcacatcagcagctgtttgttgaaaggtgtttacttctctgctacagatagcatggccagactcttgggtctgcattgtgattttcccattaggacttatcataaactccacacagaatcttttcctatatatctaatacaacagcatctgctgggtggtatggcaaagtggtaaaactgccacctggacctgcttcagagcccttttctgctctgggtcccacttgaaattggaagccttttatgtcatccagtgtataggtaacagcaagtatttcctgctatggcatatgctgcctctagaacccatagaaacctatcattcttttatgctaccttctttatggtgagaggtacaaaatgcaataattt

SEQ ID NO: 739618 - DNA, 572 bp, Homo sapiens
aaacacaaaaggtaaggttaaaatctgttcattagacttatttcctaaccttttaatcactcatcactttggaacattcttgcaactgaactgaataagctgggaaggttttttgggtaattctactaacgctttttttttttttttttttttttttttttgagacagggtctcactctgtcacccaggctggagtgcagtgctgtgatcctagctcactgcagctttgatcttytgggcccaagcaatcctcccacctcagcctcctgagtagctgggactcaaagtgtgccaccacacctgattttctttttggtagagatggggactcactatgttgcccaggctggtctcaaacttttggcctcaagggatcctcccaccttggcctccgaaagagttgggattataggcatgagccaacatgcatggtcaaatgctttttaaactagtaattcacctgtgtatggttatgtcaaagaaaaatacaaggttgcatacgcttagagaaagtaaggaagtaacccattacatgtatgtttgtaaattttacttaggccatcattttttat

SEQ ID NO: 739619 - DNA, 572 bp, Homo sapiens
aaacacaaaaggtaaggttaaaatctgttcattagacttatttcctaaccttttaatcactcatcactttggaacattcttgcaactgaactgaataagctgggaaggttttttgggtaattctactaacgctttttttttttttttttttttttttttttgagacagggtctcactctgtcacccaggctggagtgcagtgctgtgatcctagctcactgcagctttgatcttctgggcccaagcaatcctcccacctcagcctcctgagtagctgggactcaaagtgtgccaccacacctgattttytttttggtagagatggggactcactatgttgcccaggctggtctcaaacttttggcctcaagggatcctcccaccttggcctccgaaagagttgggattataggcatgagccaacatgcatggtcaaatgctttttaaactagtaattcacctgtgtatggttatgtcaaagaaaaatacaaggttgcatacgcttagagaaagtaaggaagtaacccattacatgtatgtttgtaaattttacttaggccatcattttttat

SEQ ID NO: 739620 - DNA, 628 bp, Homo sapiens
ctggcaatcagaccctccactcccacctggaagtcacccatgggccctgctgtactgacagccatgtccttgctgcatgtaggcactacacgaatgcacattctgtcccacccctcaccactcagtcaggctttagggctggcttcagtccaagagaagaggcccgcagactcccctgctactccttccacctcacagaggaagtctctcttgacctggaaaggtagaaggccacaattaggatgaagaggttcagggtgaattcacagaggatgggggtagatccaagaatgggctttttcttacaggatcctcagtgaagtgcattcggaatgaggatggaacttggttaacaccaaatgaatttgaagtcgaaggaaaaggaaggaacgcaaagaactggaaacggaatatacgttgtgaaggaaygaccctaggagagctgctgaaggtattataatgacgggacagataggtgacaggtttaaatccttgaaggagaagtggagctttaagagcagaaatgtgaagagctcccgttaggattcaacagcatgatttataaggagttaaatgttcatagaaaaaaaactgtgggtgacaaagttaggagcacatattgttcctg

SEQ ID NO: 739621 - DNA, 644 bp, Homo sapiens
catggtaataccctctaactctcctaatgccacatgtcagctcataatagccaggggcatgcttgacccagcctctcagtcccaccttccagggccaggttgggagaataagatgaaggtttacccgactgagaatgagccagtgcgggccttgccctcagccccatcatccagtgtcactgctgctcggcagcacgtccgtctgtctccactgcagtctcacttatgtatgtgtacaacaaagagaccgatgctggtactcccaaaatgtgttttgtggttgccctgcagcgtgctgcctccatgacccacacatgatgggcagctggtgtaaagagccacagacttggcctgtgagagcctccgtctccagaagggcttgratgcagccagcagttgccactctatcagcatatagtgtgaggctgaggagaacagcttttggggttttggtttttttttgtatcagaagcccatggccatcatgggtggtccagagatgccaggaggcatgagaggaggttgccaaagcttccacagtgaatgagactcaggagggcactaatgtctgctgtattgcaatttgacagattctagaaccttttgttagaaggggccccattcaaagtgggcttattttgcaa

SEQ ID NO: 739622 - DNA, 597 bp, Homo sapiens
accccatgtggggatcttggacactctgggaggtgtcccaccctcatggctgagcccatccttcctgagggaagacagtggcagccacaggaatggtggccatttccaggggctttgccctctgctcaccttgtgtccaacctctcaggatgctgtggagttgcaccttctgcaggatraagaggtcttcaggaagccaacagtgccatcatgtatctaagaccctggagaggcagatgcagcctcaggaccagctggtgagttggatgcaaaccccaaacctatacttttcccttctcacacgagaagcacaaacaggcacagggtcagggcaatgtaccaaagggagccttcaatgtctccctttaaaggatgacgatttaatgcccaaactcagagtctaaacaaaatcccacacaccctgtgcgccttgggaagcatggctggaatgctgactgggcttggctgccccatccgtgtgcatgtctagacactcgcctggcttcactgtttctaagctgcatttcactttcaagccctcttcacattttacagaaatgtgagttcctcctcttgaaggcctactgtcatccacaa

SEQ ID NO: 739623 - DNA, 527 bp, Homo sapiens
gacactcctctccccacagaagtctcactctctgcagcattggaacaaagtccaggacctccttatctaaatcaggttcagatcagataaagcttcttcgggctgggcacagtggctcacacctgaaatcccagcactttaggaggccgaggcaggtggatcgcttgagtccaggagttgaagaccagcctgggtaacatggcaaaacctcatctctacaaaaaaaaaaaaaaaaaaatctttttaattagctgggcaaggtggcacacacctgtagtcccagctactcaggaggctgaggtggaargatgagcctgggaggcagaggtcgcagtgagccaagaatgcaccactgcactccagcctggacaacagagaccctgcctcaaaaaaaaaaaaaaaaaaaggaaagaaaacaaaagaaataggctcctcaggtatggtttattgggtgcagctccttgggtgcacctcctcttgaactagaggcctgtgagctgaaaaattgtttcttccctgctgccaac

SEQ ID NO: 739624 - DNA, 525 bp, Homo sapiens
ttgagcctgtggcggggtggcggaggttgcagtgagccgagattgcaccactgcactcctgcctgggcgacaggagactctgtccaccctctccctaccccacaaaaaaaaaaaaaaaaaaaaaagtgtagcatgctgttcaaccaccagagggcactgtgggcccctccagagacggaaaggaattgagctattaaagctcctgcaaggrcaaggaactagcagaaagaagtagtgaaggctttgaaggggaggaagatgctctcagtggctcctatttcatgcagatggaggaaaaccaaccaagagcatgcgccaggtcctctccagatgagactggcaaagacgaagcagcaggcagtcacgtttaggcacatgcttgcgaggatttccttactgtgacaaaaggtcccttctgttgtttgtcacaagtgcaaaacctcacagctagcataatgaaacaactgagatgcactcagtaacgtgggctggaaaaggatccccagtttttcgtttcatagattg

SEQ ID NO: 739625 - DNA, 596 bp, Homo sapiens
taaaacccaaagaaacagaaaaggagaaagtagaagacacatagaaaggtgataacctcaaggagaaaagttagagaaaattgtacaaatggtagcaaatacaataacaacagcaatatgggaaggaagcacagaagaaattatgcagagaaagaaacagatcaaaataattaaagaacccatraagagtgaaaactgttgtccaaggaaaggggcaggtcgagggcctatggagctgaagtcagtcactagatagaagcagctcccagcaaagggcacctctatcaatagtgagttttccaatccaggcccccctaggtagacagtggcacagaagcatactcagagagtaagagtactctttccccagtctcatctgctcaggtagtggaatgattctcatgtacatgtctgcgatgcagacctgctttccaagctcttccatccatgtgcctgaagatatttatcccaggaccctgccccttgcaatgtctttcaggaactacacacatccaaaagggaaaccaacacctcctccgaacctagaaactcccctttctccagggtttactctgtcagtaaagggatgaatatcc

SEQ ID NO: 739626 - DNA, 596 bp, Homo sapiens
taaaacccaaagaaacagaaaaggagaaagtagaagacacatagaaaggtgataacctcaaggagaaaagttagagaaaattgtacaaatggtagcaaatacaataacaacagcaatatgggaaggaagcacagaagaaattatgcagagaaagaaacagatcaaaataattaaagaacccatgaagagtgaaaactgttgtccaaggaaaggrgcaggtcgagggcctatggagctgaagtcagtcactagatagaagcagctcccagcaaagggcacctctatcaatagtgagttttccaatccaggcccccctaggtagacagtggcacagaagcatactcagagagtaagagtactctttccccagtctcatctgctcaggtagtggaatgattctcatgtacatgtctgcgatgcagacctgctttccaagctcttccatccatgtgcctgaagatatttatcccaggaccctgccccttgcaatgtctttcaggaactacacacatccaaaagggaaaccaacacctcctccgaacctagaaactcccctttctccagggtttactctgtcagtaaagggatgaatatcc

SEQ ID NO: 739627 - DNA, 596 bp, Homo sapiens
taaaacccaaagaaacagaaaaggagaaagtagaagacacatagaaaggtgataacctcaaggagaaaagttagagaaaattgtacaaatggtagcaaatacaataacaacagcaatatgggaaggaagcacagaagaaattatgcagagaaagaaacagatcaaaataattaaagaacccatgaagagtgaaaactgttgtccaaggaaaggggcaggtcgagggcctatggagctgaagtcagtcactagatagaagcagctcccagcaaagggcacctctatcaatagtgagttttccaatccaggcccccctaggtagasagtggcacagaagcatactcagagagtaagagtactctttccccagtctcatctgctcaggtagtggaatgattctcatgtacatgtctgcgatgcagacctgctttccaagctcttccatccatgtgcctgaagatatttatcccaggaccctgccccttgcaatgtctttcaggaactacacacatccaaaagggaaaccaacacctcctccgaacctagaaactcccctttctccagggtttactctgtcagtaaagggatgaatatcc

SEQ ID NO: 739628 - DNA, 630 bp, Homo sapiens
aaggtattatgagtctggggggaagaaagatacacacaagaaaagagagaattatagagaaatggcaagataactcctgaaagggtaggggctgggaacatgagaagggagctcactaaactattcacaagtctatttggtccaggggcagcctcacctgggcatggcatccaagagaagctccaagtggtggataaggtgactcaaaggaaagacgactcaacctggaactcagaggtcatgatgagggtccaaaaggcaagaactaaatgtgcccgaaagtccagatygaaaggtaaggctaatgatggaatctgctatttgaatagctcaatgtaggagggcctcttggagcagtacagggtcagatagatatgtaaagtcaatagtagaaggagggagacgtacagaaaagagggacatgaagacagagcacggatctgttgatgtgacagtggttgttggaagaagtgttctcagggtgcagttcaccttggctttgccatgtggatttacatgactactccccagtgtctgctgttttcatttctgttattagagtcaccactactctcttgagtttgggagactcctttctggttctggccaacccagtcttggaagtggcac

SEQ ID NO: 739629 - DNA, 630 bp, Homo sapiens
aaggtattatgagtctggggggaagaaagatacacacaagaaaagagagaattatagagaaatggcaagataactcctgaaagggtaggggctgggaacatgagaagggagctcactaaactattcacaagtctatttggtccaggggcagcctcacctgggcatggcatccaagagaagctccaagtggtggataaggtgactcaaaggaaagacgactcaacctggaactcagaggtcatgatgagggtccaaaaggcaagaactaaatgtgcccgaaagtccagattgaaaggtaaggctaatgatggaatctgctatttgaatagctcaatgtaggagggcctcttggagcagtacagggtcagatagatatgtaaagtcaatagtagaaggagggagacgtacagaaaagagggacatgaagacagagcayggatctgttgatgtgacagtggttgttggaagaagtgttctcagggtgcagttcaccttggctttgccatgtggatttacatgactactccccagtgtctgctgttttcatttctgttattagagtcaccactactctcttgagtttgggagactcctttctggttctggccaacccagtcttggaagtggcac

SEQ ID NO: 739630 - DNA, 551 bp, Homo sapiens
ttgaaaggtaataaattattccaaagatctaatgactgcttgccacctgcctcagtcacctattcctaagcaggccagcatttgagaccaatctcaatgcagtgtgtaaagaaaaaggtgacagcttcatgtgagatgagcctttatttgttatggcttcaagttctctgtctttctttgtgcagcaaaaactagcagagctttatatgtctttgctgttaacaggtgctagcaagcacaggctagctcctgctttcttcaaacaatccttatatacagaaatatataaggcatttagccttctccactatttctccaagtaaaataaccacagatagagcagttaaagaatatccayacatagacgtcaaagcaataagatgtatttttcatacagcaaagacattccccttcatcatggacatcagatttcaatatcaccactttccgctctcagcttcattccttgagcaggggctgctgggagcagaaaccatgtgactatagtcatgatacccagcacagtttattcctgcaatttccattcattg

SEQ ID NO: 739631 - DNA, 601 bp, Homo sapiens
atcacaaaaactacgatgaaaattcatgcattcaaaacagaccagttactgtccaccatggaccaggcaccatcctagctttggaggagacaaacatgagggaagtaaaatctcagtgctcatagtttactgaggaacagacaaataagaaaacagttacactacaacatrtaaagagttatgattgagttgtataatagcacagagtttagaatccaggaaagggttttctgagaactgttggggtctacaaacggggtaaagatttcttatacgagctactctttccattgccaaagccaaattagctggcggaaaggtgagttggacaagtgaggtgtttctgttgcatgtggaatctcaacagaacagtagtggccagcaatttctgtacatatttactcttggaaagtgcttctccatgttatcttatcaagaagctcacctaatcaaaggtaaacacatttatcgcctcattaaggcttgttttatggccacttcgatgtcatgtttgaggtagaagtacctgtcacagtctttgtctggaatgtatgtaaaagggatttcatggacactgcagaggttttaatctttcaatatc

SEQ ID NO: 739632 - DNA, 522 bp, Homo sapiens
tgattgcccttcctccttgctttgtcgccacaaaaggggtgagggggtgccggagtttgacccacacctctggttagtattaatcacacagacatcaggtaatcacctaagtgcactcagacatactaatagaatgatttacagaccaggccctttgtgtgtgtctaaatctcattttaatttatttaaagtgacagtgaagctagactccaagctaatgagtctgcataaaaatgatgtctktttccacctttgtgtttgctaaaactttctgactctgaaatcctgtcagtgaaaaattatttgagatgaaacactgcaaaagaaggtaaggggaaaggagacaaagaatatgatttgatcatcagagacctgccctgggtccaagtgggcctcatggtagccacaagtgtccagatcagacaaatggggacttttgcatatatgttttagtgcttcatccagacttgagtgcttcacagagtctgtgaggcaactcacatcctttggtagctaacaaat

SEQ ID NO: 739633 - DNA, 593 bp, Homo sapiens
atggttcccagtaatctgttgtaacaagccctataggttattctcttgccactgtactaatcagactcatcttttgatgttagaaggaagcctcttctctgagcatatggccacctacaaagtgaacagaattagtatcctattgctaaggaagaatggtgaggacagttgttgggtaggcaacttgtgtatgtcatttataagttcagtggagaaaatattttgttagttataagagatagaggaaaacccacatttaatttgttaattataagagatagaggaaaactcacatttatttttaagtgatagacactttatatrccatattttagttatttttaacaaagtgaggtagattgtgttgcttctatttagaaataagaaagctgaactaaagttcttataacttagccaaagttaaccttagagtatggatttgaatgtatggatatggatacaaatttccctgtatgtactttccactacacacttaagtaacatttaacagtattatctcatggttaagtaggctttttttttttctcgtatcatactcagatatttaatattattagtcctatctgtatata

SEQ ID NO: 739634 - DNA, 632 bp, Homo sapiens
ttagttgagtggatataaactataacaaaaggcagtataacttaacctttcagtgtctcaatttctttatttttaaaatcaggactatatgttaatacagaaatgcagtctagtataaaatacatctatatgtgagtatgtgtatatacatttgtatgtatgtgtatatatatatacatgtacatgtatatacacaatgtgagagattgattttaaaaatagcagattgtcacaagtttgaggctagaggaagaggaacttggttagttgtgttactactatattagyataaagaaattaggcacggaagtatatgtaatcctattatacttagcaggaacttctaaccccaggaagaaagctagaagggggcttattacattatatatgctaatatttattgagcacttatattttagcatacatatatgttcacatttattgaatgctttctaagtgacagatttagttcaaaactattcatagaaacttattttactttaacaactctataaggtatgtacttttattatctccattttctatataaggaagctaaaatagagagagattaaagaacttgaccaaactttacacaacttatcgacctacgtatgtttttgatgaaagaa

SEQ ID NO: 739635 - DNA, 597 bp, Homo sapiens
ttagctggggtgcaaggagcaggggggccctaaacagctctgcatggggcgtgactttcagggcagggctgggagaggacaggactgtggccgcagtaggatgggggctccagtgcagccactggggttctgtgccccccagagctgcctagccctatggacccccagccccagrcacacactgggctgggcgctgtgagccgtcaccccgaggtctccggcactgaacctccgtcacttccacagttgtcctgtgcttctcccgctttgaatattcccccacaccccaccccacttagctccagtatcagctttgaaagcacttcctgttgcctggccagggtggtggctcccagccccagggtccctagactggccctcaacaacccatgctctaagatcctggaatgcgtctggctttcctgccaggctgtgcagtcctagagggaagcggccgtgtctgcgtgctgctggctcccgtgtgtggaagggtgactttctcccaggcctccctgaccctcctgctctgtgctcttgagccctctgcccttggccctcacagtacttatcaccaggtgtcactgtacatttatttgc

SEQ ID NO: 739636 - DNA, 642 bp, Homo sapiens
aatgatccctacatactcagtctgcctctggatagggggaccacaggaccagttgagtcatgagtccacaacgggccagtgagttgtcagaatgcaaaaatctgaaatacacctcaaaaggcgactatttgcctgtacaatactgatgttatctatagaagccattgagaaaatcacaagtcctgtgacatctgaccacatgactccagagcaaaaaggaattataaaaattatgcatacattttagcagaactcaggcccttcccacaatcctcatctcgtggcctttcattagtcttacaaaagttgttttgtgcccctaagcaaggaagcgtttagttttagggagggactattataattcttgctttcaagttaaactataaactaaattcctcccatgattaacttggcctatacmcaggaataagcagagacaatcagcctatgagggtagaagcaagatggagtcagccatgctagacttctctcactgccataatctctgcaaaggcagttcaacaccataatataaaaaatgctaagtattcaccaacatgagatacatggtgtcatatatcaaataataagtacacattcagctagagcagtgcttctcagcttaaatatacatatggatca

SEQ ID NO: 739637 - DNA, 543 bp, Homo sapiens
tttttaatttgtctcttcaaatctatcatgttaactatccaggtctttaagcctattctagttatttgagattgcagctctatttcttcatgaaatataaagaaaagtagctaccatttctagctctggagaaactgtgttatttaggatctaccggctattacaaatagttttatgttggatcccaagatttcagcaacctgctgctactgctaagtatgtgytcaacgacaaaaacctgtaggccaatagatagggtgttgaaatgataatgtgttaagaaacgcagaattttctcagccgaaaggaaagcaagacaagggaagtgatgagaaaaagaatgcaatcagtcaattgattggacagcaatatacctcactaagttaccacctggaagcagccttaggttagcatcaaagtaagagcaggaaaggatatgaaaagttattcgcaggctgactcttgaaagtatatagtatctaagagtattttttcctggctggtgaacaaaaatgtttaatataaccatatacgagacaatag

SEQ ID NO: 739638 - DNA, 610 bp, Homo sapiens
atttttccaatacaaataaattttaaccaacattacaacaacaaaaaattttgatgtgcattgaaatagctagtcaaattggcctcacagtagcaataaaataatctgagataatagttttgtttgattttttatttcatgcataatttatttacgagtaagcaacatatattttacattgttcctcatgtcattgtatgttttaatactgtgaagtttactctgaactctttggatcccaatcttaartctaatcaaatcaaaataaatatatagaacagctcaatatatgacacatagtaggcacttaataaatagtacctattttattaacatgattatttcctttttaatattattatgtgaatatattctagatagaaacttttagaatcttattaccaattatatgtgttaagtcaagtttagcctaaagatgcctccttccatattttaagttcaacctaaaagtttctctgtacattgtgaactataacctacacagaggtgtaaacagactgtagtctactcttgtgccaatcaatcactgagctttggttcatcaaaggtggtcaatgttcaaatcatgttcaaataaggcaaatgccga

SEQ ID NO: 739639 - DNA, 580 bp, Homo sapiens
cacagtgattttcacatggtatttgttttgtatcatggcaaatcctgacaacatggtttcaaatcaacaggagcatggtgcagtctaaagtaaaatatgtgtactattttgcaaaagaaattcatcacatggagcttctcaaatttaaaattaaaaatatcccatggtggccatgtgagtttactgtgcttctctcaggcacctgagcacccattgtgtcagccatgggcataatagctgtaagtatcaaccacagagacagacagtgtgagctccagccccacctccgccacatcataggtatgtgacttgggaataaatcactyctcctgtgtttgcagtgtgtactgtgtgtgtggtgtgtgtgtgcaggtgtgtgtgcacatgtcctcacttaaaatttttctggatgatagtatttatttcataggttttaaaaatgcaaattaagtaaactacatatatatacatatatatgatgtatatgtgtgtgtgtgtgtgtgtgtaaattattttcaacaatcccaggcacagagtatacattatataaataagtgttagctatttatgtatgtgttag

SEQ ID NO: 739640 - DNA, 551 bp, Homo sapiens
ctcaaacaaaacaattttcagccaagaattttgtattcggtgaaactaagcctcatatatgaatgaaaaatacagtctttttcaggaaaacaaatgctaagagaatttgccactaccaaaccaccactacaagaactgctaaaaagagctctaaatcttgaaacaaatcctggaaacacatcaaaacagaacctctttaaaccataaattacacaggacttataaaagaaaaataaagataaaargccaaacaaacaaaaatccaaagtacacaggcaacaaatagcacaatgaatgcaaggatacctcacattttgatactaacattgaatgtaaattgcctcaatgctgcacttagaagatacagaaccacagaatggataagaactcatcaaccgactatctgctgccttcaggagactcacctaacacataaggactccaagtaaaggggtagaagaagatattttacgcaactggacaccaaaagcaagcagaggtagctattcttgtatcagacaaaacaaactttaaagcagcagtagttaaat

SEQ ID NO: 739641 - DNA, 582 bp, Homo sapiens
gtatttttttttggccccaaaatattgctctttcatctgcactctaaccactctcagttggtacttgttttatgttgtctacttaatgtcataagttgtaatatttttacctaactggcttctgcctgtctctcttactaaaagataagctccaggaagtggctgctctttgaagtttctactcttgttggttttgactttcctcatcacaggatacagttggaatctcacctaggatgtattccagatgatatttcctggaaatattccctgataactgagcttcttactytattcctggcaagtagagctccaggacacagtgtcaccagggagcctggatcatcgcagaggaggggcatgccaagttcccacaatgtagagcaggaaggcaaggaagacctgaagaaaagtgcctaggggtgcatttggactagctctaaattaacaaaccttgtgatgcttccattacgaagagctggtgtaagagaattggaaagacatgtagtatagaagaatggaaataacatatagaggtcggaaatatgagactggagtcagagcctggaggtgctagaattt

SEQ ID NO: 739642 - DNA, 590 bp, Homo sapiens
ggagggggaataattagagttaatgagacagaaaactctgggttactgttcattcatttgttgaacatttaataagacttacctgtcaccattctatatactggaatattaaaattaatctaatgttgtcctttttctcaagatttctttttttatggrgacagcaaacatgtaagtagatgagtcatattgcaatgatctaaatatatataacagagtctaagtgaaagactataagggctaaattatttaatatttcagcagggaaaaaaagttgggagctgaatatttcaggtagcaatttacctggagaatcaggggacaatagaggcatcactcttttagctacactgtccatgtggttcccacaaaattaaatatgatgattaatcaacgtatccccaccccactgtgtttaaagcatgcctttggagaatatttctacaaatatgggaggggctttattagaattacggaaacctgtttaattattgaccactactttgagaatcaggaccaatttaaataaggaagaatgggtcaaacactaaacttgattttataaagccctggaataaaattcttggtct

SEQ ID NO: 739643 - DNA, 588 bp, Homo sapiens
gatcacttgagcccaggagtttgagaccagcctggccaacatggcaaaaccctgtatctactaaaaatacaaaaaaaattagcagggcatagtggcacacacctattatcccagctactcagatggctgaggcaagagaattgctttaacctgggagccgtaagttgcagtgaggcaagattgtgccactacactccagcctgggtgacagaacaagactctgtcaaaaaaaaaaaaaaaaaaaaaaagacttcttaagaagctwaacttaggaagctcactgcccttttagaaagttattttataaagaaaaacacagtagataaaattattcaaaaatactaagataaatattttcacttgattctaattgccaccacctactagtagagatgcctcacctaagattatgccttacctaagatatatgcctcacctaagattatgaccaaggaagaatcacagaattaatgaaggtagtggcgttgcggggtggggggtaacctaatgctccaaatgaagccaaatgaagcttcttgcttcttttcaactctatcttcttgtgttttttttcttctttcagtcaaa

SEQ ID NO: 739644 - DNA, 567 bp, Homo sapiens
acctaggccaccattcaatagaaacaatatttcagcagggctatgtgtgggtattcaacttatgcttcagaaatttagaaggaaaaaaaaacacttttacaggggcatattggcagaggctgatgtaacagatgacacattcttggaaatcaaataaaagcaatagggaaatacccattgttgcctggtgaaggcctaatcacatggacacagctggaaccaatgtagatcattcattaataaaattgtattgtagtagccactttttgatgcatttcaattgctgctttagccaaatccctgaatttctttgttcaatgttagtaagattgttttaatgggaaatatgagaagatttaggacagggaaaaaaaacctgttytcatgctaaaaatgaagctaactcaaaaagctaaatgtcactttaccttgcaatctacttacactatcagcagcttaaaatatgcagtgtaaacctaaaaaagaggaactcatatggtactatagataaaaagtgagcagtgtgagatgccatagaaaacatatgaaatacttgtaaaagtattc

SEQ ID NO: 739645 - DNA, 607 bp, Homo sapiens
acagggaggccctaaggcgggactggggtctcctgtctgacatggttcgcctgggaggagctgccagtgtgcttagtgatgggaaaatcccctgtgctctgagaccggaagcctcatcttgcccctccctactgccttggctgtgtccccaaagccctcttcttacggaaggaactatgtttcacaaattcctatttggaatctcttacctccaatatggytgcagatggagagagagcctgctaggaggtaactagggttaaagaggtgatcagggcaggatcctgacaccacgggattactgtccttataaagagagacactatagagctttctccctcccctaccctccctgcgtgccctgagggatggtcatgtggggacatggccaaaaggtaacatctgcaaattaaaaagagagtcctcaccagcaagaaaacctttctggaccttgagctttgcctttctaggctcctaaactgttagaaataacatttctgtggtttaagccatccagtcacatccattttggtgtcacaatccctgcaaacactccaccctacctaccctctctgagtaggatcagtatcaggaagccctcgtggac

SEQ ID NO: 739646 - DNA, 585 bp, Homo sapiens
aactcaaaaaagttctttgtaaccaaacagcctccaggaagaaacacttatttacggacaaatctgtgatgccctggtccgacctgggacactggggacattgctcctatgctgagttactgagaagagccagccctgcagctgtgcccagcctgccctatcccctgctgatttgcatgttcgcagagcacagccccctgccctgaagacttattaataggctggtcgcaccctgtgcaggagtcagtcccaaccaggacacagcatggacatgagggtccctgctcagctcctggggctcctgctgctctggctctcaggtaaggaaggataacactakgaattttctcagccagtgggctcagtacagcctggctcttgatggaagccttcctataatatgactaatagtatgaatatttgtgtttatgtttctaatcgcaggtgccagatgtgacatccagatgacccagtctccatcctccctgtctgcatctgtaggagacagagtcaccatcacttgccaggcgagtcaggacattagcaactatttaaattggtatcagcagaaaccagggaaagccc

SEQ ID NO: 739647 - DNA, 617 bp, Homo sapiens
agagtcaccatcacatgccaggaaagtcaggtagggcattagccatgttttagcctgatacaaagagaagccagggaaagcttctgagctcctgatctacgatgcatccaatttgcaaacctgggtcccattgcagttatgtggcattggatccaggacagatttgattctcaccattagcatcctccagtctgaagttgctgcaacttcttattattggtcaacagtataaaagtgaccctctcacagtgttacaaacccaataagctccccaaggaagcagatatgtgagggtgggctgccccagctgcttctcctgtttcctccatctgctgagagtgtttctcagactcagccacactctgaaggtcactgagcagttttcatagaagsggtaagggaagtgtctctacacccttagtttcttttatcctcctcagccccagcagcagacatggcaatgcctctcctaatttcatagaagagtcattacctatgaggactctgggttacagcactggtccaggttcatacaacaaaagagaagctattgtaggtaacccaaatagaaagtttttcctaatatgggaaatccatgtctaaattacaacttttca

SEQ ID NO: 739648 - DNA, 568 bp, Homo sapiens
accatagccagagtatgaccaggcagtcacaaagagttctccaggaattttctgataattttccttgtgtcagggcagtttctggcctggctttctaatgaggaaggggtaaaagttgacactgtgatgtcctgacttctastgcaccaactcttacccagtcctgtcaataactcagtaggctacacaagtcaaattctcgataggtatattaaccctggtctaaagtttttatttcttttatggatttgcctattccattaaacattttaatatcttgaatacggttgtgcaaatcatgcctctcagtctctctgcaaatattaatattggggcaaatttaataacagttttctcatgatgtcatattttcttaccagttctgaataggctgaactgtatgtaatgacaaatattataagctagtttgagctcaagacaaattacttttactgaaatttaataccttagcatcaacctggaaacaaaagatgttgctcaagtttaaaagtctattcatgagtatcataaacttgcacatatttgctacagtattccacaggatcaa

SEQ ID NO: 739649 - DNA, 568 bp, Homo sapiens
accatagccagagtatgaccaggcagtcacaaagagttctccaggaattttctgataattttccttgtgtcagggcagtttctggcctggctttctaatgaggaaggggtaaaagttgacactgtgatgtcctgacttctagtgcaccaactcttacccagtcctgtcaataactcagtaggctacacaagtcaaattctcgatargtatattaaccctggtctaaagtttttatttcttttatggatttgcctattccattaaacattttaatatcttgaatacggttgtgcaaatcatgcctctcagtctctctgcaaatattaatattggggcaaatttaataacagttttctcatgatgtcatattttcttaccagttctgaataggctgaactgtatgtaatgacaaatattataagctagtttgagctcaagacaaattacttttactgaaatttaataccttagcatcaacctggaaacaaaagatgttgctcaagtttaaaagtctattcatgagtatcataaacttgcacatatttgctacagtattccacaggatcaa

SEQ ID NO: 739650 - DNA, 568 bp, Homo sapiens
accatagccagagtatgaccaggcagtcacaaagagttctccaggaattttctgataattttccttgtgtcagggcagtttctggcctggctttctaatgaggaaggggtaaaagttgacactgtgatgtcctgacttctagtgcaccaactcttacccagtcctgtcaataactcagtaggctacacaagtcaaattctcgataggtatattaamcctggtctaaagtttttatttcttttatggatttgcctattccattaaacattttaatatcttgaatacggttgtgcaaatcatgcctctcagtctctctgcaaatattaatattggggcaaatttaataacagttttctcatgatgtcatattttcttaccagttctgaataggctgaactgtatgtaatgacaaatattataagctagtttgagctcaagacaaattacttttactgaaatttaataccttagcatcaacctggaaacaaaagatgttgctcaagtttaaaagtctattcatgagtatcataaacttgcacatatttgctacagtattccacaggatcaa

SEQ ID NO: 739651 - DNA, 549 bp, Homo sapiens
tccagtgcagatattgtgatgacccagactccactctctctgtccgtcacccctggacagccggcctccatctcctgcaagtctagtcagagcctcctgcatagtgatggaaagacctatttgtattggtacctgcagaagccaggccagcctccacagctcctgatctatgaagtttccarccggttctctggagtgccagataggttcagtggcagcgggtcagggacagatttcacactgaaaatcagccgggtggaggctgaggatgttggggtttattactgcatgcaaagtatacagcttcctcccacagtggtacagaccaatacagaaacctccctgctggggtgtcccagctgctcacttgcactgcttgtctggggagtagctcagcagggactctgagtctgcagaagaggaggctgttggagaactcagtggcagggcttgctgttgaggactctggcccatgagagtctcagcagcacctcagtcccacatggtcaaagctttatcagttgccaggctcatcctcaccctgcctgt

SEQ ID NO: 739652 - DNA, 549 bp, Homo sapiens
tccagtgcagatattgtgatgacccagactccactctctctgtccgtcacccctggacagccggcctccatctcctgcaagtctagtcagagcctcctgcatagtgatggaaagacctatttgtattggtacctgcagaagccaggccagcctccacagctcctgatctatgaagtttccaaccggttctctggagtgccagataggttcagtggcagcgggtcagggacagatttcacactgaaaatcagccgggtggaggctgaggatgttggggtttattactgcatgcaargtatacagcttcctcccacagtggtacagaccaatacagaaacctccctgctggggtgtcccagctgctcacttgcactgcttgtctggggagtagctcagcagggactctgagtctgcagaagaggaggctgttggagaactcagtggcagggcttgctgttgaggactctggcccatgagagtctcagcagcacctcagtcccacatggtcaaagctttatcagttgccaggctcatcctcaccctgcctgt

SEQ ID NO: 739653 - DNA, 549 bp, Homo sapiens
tccagtgcagatattgtgatgacccagactccactctctctgtccgtcacccctggacagccggcctccatctcctgcaagtctagtcagagcctcctgcatagtgatggaaagacctatttgtattggtacctgcagaagccaggccagcctccacagctcctgatctatgaagtttccaaccggttctctggagtgccagataggttcagtggcagcgggtcagggacagatttcacactgaaaatcagccgggtggaggctgaggatgttggggtttattactgcatgcaaagtatacascttcctcccacagtggtacagaccaatacagaaacctccctgctggggtgtcccagctgctcacttgcactgcttgtctggggagtagctcagcagggactctgagtctgcagaagaggaggctgttggagaactcagtggcagggcttgctgttgaggactctggcccatgagagtctcagcagcacctcagtcccacatggtcaaagctttatcagttgccaggctcatcctcaccctgcctgt

SEQ ID NO: 739654 - DNA, 597 bp, Homo sapiens
ctattacttctcgttgctgcctgatgatccagtcaagatgtcaactacatttaacctatgttcctggtaatagatacccaggttgtctctaactcctcatctttagaaataatgatacaaaagccttgtggatatctccttagttgtcttctaagaggtgtgtgtgttttggattgyggggattatttggaaaattacatggagcaaaactgatggttcataagaaaatatttagttgacttgagcagtgccagaattttctttggaaggcttacattgacagatgttaaagctggaaacttttaaatcaaattatacctcttttactctcagaaagagacagctttaataacaaaattgcacaaagatcaaaagattagcatcctgctttagaaatctttaatctccttcttcaagtgaatgaagctttcctgcagagcaaaacaaattatctcacatttaacaatggaagaatatgtgacatatttaaaggccccttcagctgcaagagcctcggcagggcagaacaacagcagaaaggaggatgcagtgggctctgagccacatcttgccagaggaaaggctcaatgaaagctc

SEQ ID NO: 739655 - DNA, 597 bp, Homo sapiens
ctattacttctcgttgctgcctgatgatccagtcaagatgtcaactacatttaacctatgttcctggtaatagatacccaggttgtctctaactcctcatctttagaaataatgatacaaaagccttgtggatatctccttagttgtcttctaagaggtgtgtgtgttttggattgtggggattatttggaaaattacatggagcaaaactgatggttcataagaaaatatttagttgacttgagcagtgccagaattttctttggaaggcttacattgacagatgttaaagctggaaacttttaaatcaaattatacctcttttactctcagaaagagacagstttaataacaaaattgcacaaagatcaaaagattagcatcctgctttagaaatctttaatctccttcttcaagtgaatgaagctttcctgcagagcaaaacaaattatctcacatttaacaatggaagaatatgtgacatatttaaaggccccttcagctgcaagagcctcggcagggcagaacaacagcagaaaggaggatgcagtgggctctgagccacatcttgccagaggaaaggctcaatgaaagctc

SEQ ID NO: 739656 - DNA, 609 bp, Homo sapiens
agatatatctctgtatacatcagcaatgacttggccagggatggagaccctgtgtcctggctgtgagacagtgaggctgacatctgggtcagggtgatgtccccactcactgcaaaagagtaaaagaagcaaatgacattgatggttcaaggcaaggrcatgtaccgagcagcagccaccctcaccagaagagagagttcactgactttgtctttccccaggtcctccccttcacctgcccttcagaaagccaggcttcgggggagctgcacctgagacactaggaacatgctggtagggagcacagcttggagcattacccaggggatatgatctttgtcttcctactttggacacatttgattataagagtctggattgatacagggtttcaagtttatcctaatcaaggctcctatagttcaatgaagaaacagagaatcttgttgaactaatcagatctggcatcactagccagccctttatgcgatgatctgtaagaaatattacacagtgacagaaaaggtggtagaatattctccccaaggcaagaataaggtgctatccatttaatccttgggtattaaagtgaccgatagctctggaaaa

SEQ ID NO: 739657 - DNA, 621 bp, Homo sapiens
tgctaattttccatgtctgacttctgattaacctgagttctgggacggtctctaagattttcagtttatctattttatcttatttaagagcaagtacttagcataaatcctgcccttaaacaaccttgatgtaatcattctttgattgtcgtacacatcctttctgaaccactggtctcctatggtatamaagccctatttgagaggggtcatggcaagtgattgaccatcttatctgcctactgtcagagacacagacacggcttctgtttttaagtctctattaaatgtttctttctgagaaactggatgtgtcggcctctttcttcagcctttcagcttcctcaggcattggggtcaagtttgcatagatctaccctgtcatgtgcactccaaggtcagagttaaccaggcccatgtgtgtttatgtctttccacaatgtcagacttttactgatgctatttccaacacagaagctgcaagctacatggagctcccaaggagccattcaattgtcagtgttgcgggcacacaggctaaaaccattgcacaagccggtcaatattgcaaaccatacataatagtattcttaatcaatacataaacattataagttaaag

SEQ ID NO: 739658 - DNA, 609 bp, Homo sapiens
agatatatctctgtatacatcagcaatgacttggccagggatggagaccctgtgtcctggctgtgagacagtgaggctgacatctgggtcagggtgatgtccccactcactgcaaaagagtaaaagaagcaaatgacattgatggttcaaggcaagggcatgtaccgagcagcagccacccycaccagaagagagagttcactgactttgtctttccccaggtcctccccttcacctgcccttcagaaagccaggcttcgggggagctgcacctgagacactaggaacatgctggtagggagcacagcttggagcattacccaggggatatgatctttgtcttcctactttggacacatttgattataagagtctggattgatacagggtttcaagtttatcctaatcaaggctcctatagttcaatgaagaaacagagaatcttgttgaactaatcagatctggcatcactagccagccctttatgcgatgatctgtaagaaatattacacagtgacagaaaaggtggtagaatattctccccaaggcaagaataaggtgctatccatttaatccttgggtattaaagtgaccgatagctctggaaaa

SEQ ID NO: 739659 - DNA, 608 bp, Homo sapiens
ataattatacatgtatacatttatatagagaaatagtatatataaacatataacatctaacacacggaacatttaatctgatgaatgctgttgaacactttatagatactgtcttatttaatcctcacaattactttatcagatcagcactactatactccccatctgtggttgattaaagagggccgcaaattctttgacacccctcccatgaaggggtgaagtcaaagacccctccctgaatctgagcaggctctgtgactgttttgaccatgagtttatgcggaaatgacgcagtgcccatttccggggccaagccttaagagcttccttttcctgcctcctgtgccctcacttttggagscccgggcctccattgtaagaaacccaactaccctgctgaagacaccacctccagaggctctgagcgcacgtttccagctgccccgtcgagatgccagaccatgagggaaatcatggacctccagaactaagcagctgcccactgaatgccactaggtgacccaatcagtgccacatggagcagaaccgccagcagagtcctgcacagatttctgacccacaaaatcactagttttcataaaatg

SEQ ID NO: 739660 - DNA, 608 bp, Homo sapiens
ataattatacatgtatacatttatatagagaaatagtatatataaacatataacatctaacacacggaacatttaatctgatgaatgctgttgaacactttatagatactgtcttatttaatcctcacaattactttatcagatcagcactactatactccccatctgtggttgattaaagagggccgcaaattctttgacacccctcccatgaaggggtgaagtcaaagacccctccctgaatctgagcaggctctgtgactgttttgaccatgagtttatgcggaaatgacgcagtgcccatttccggggccaagccttaagagcttccttttcctgcctcctgtgccctcacttttggagccccgggcctccattgtaagaaacccaactaccctgctgaagacaccacctccagaggctctgagcgcasgtttccagctgccccgtcgagatgccagaccatgagggaaatcatggacctccagaactaagcagctgcccactgaatgccactaggtgacccaatcagtgccacatggagcagaaccgccagcagagtcctgcacagatttctgacccacaaaatcactagttttcataaaatg

SEQ ID NO: 739661 - DNA, 608 bp, Homo sapiens
ataattatacatgtatacatttatatagagaaatagtatatataaacatataacatctaacacacggaacatttaatctgatgaatgctgttgaacactttatagatactgtcttatttaatcctcacaattactttatcagatcagcactactatactccccatctgtggttgattaaagagggccgcaaattctttgacacccctcccatgaaggggtgaagtcaaagacccctccctgaatctgagcaggctctgtgactgttttgaccatgagtttatgcggaaatgacgcagtgcccatttccggggccaagccttaagagcttccttttcctgcctcctgtgccctcacttttggagccccgggcctccattgtaagaaacccaactaccctgctgaagacaccacctccagaggctctgagcgcacstttccagctgccccgtcgagatgccagaccatgagggaaatcatggacctccagaactaagcagctgcccactgaatgccactaggtgacccaatcagtgccacatggagcagaaccgccagcagagtcctgcacagatttctgacccacaaaatcactagttttcataaaatg

SEQ ID NO: 739662 - DNA, 557 bp, Homo sapiens
ggcagtgtctttgctcacaagacatgcagaaacatgagagacccatagaaaattgtcacccaccaatgtaacaagacaatgtatacaaaagcttctcaagtcatccttttgggaaagaaaatgccatgcaaaaaaacaaaaacaaaaaaaamcaaaaatctcttaagattgtgcaacctgtatatcaaggcttcattttgcccaccataacttgccattgcctgaagccaggctgatcactgtgggagccagcactaacaatttactgaatgtcagcttccccaagccagaaaatgccccttctgatctgccagatggtttggggcctgatgcttggcatcctcacagctgccgcagtcgtgttccttggagtgggtgagtgataccttggataatgaaaaatgattggtaatttcttttacctgaagcctattctctatcaacatgctgtgaagaatcagaagtctgcctatttccaacccactctacaattgagccattgtagtggaaaaagcatcacagttctgactgggagtctccctaggaaaccctggctt

SEQ ID NO: 739663 - DNA, 633 bp, Homo sapiens
tggctgagtcttggaaagggctgttctcaccatatacaatccaagcggtgggcttgcaaaagtttcatttcagagctcagatcaccaggattagaaaggaaggcccaggctgtgtcgtgcaatggatagcacactgggcttctaaaggaaggcccagatgaggccaaacttagcaagaaagttgaaacctagagaaggataaaaaagcatgaaaatgtgggttctcctcatagagcctagactgagacaattaatccacaccctcaaactgaaagtgatcaggcaaagccaagctgacctcagatagagcatacctcaaaaaacaagtaattctccatcctcatttttcttcagtagttcacaagtgtccctatgactgaggactagtccctttccaatgagcagggaataacattttctaattcgctatatttcttwtctccagagaaaatttaatcacaataagcaatgtgtctccaggttatataatactatgacatatgagatttccatccaataaactgtcataagcaacatgatcctacatctagaaaaccccgtagtctcagtcgcaaactccttaagctgataaacaacttcagcaaagtctcaggatacaaaatcattgtgcaa

SEQ ID NO: 739664 - DNA, 519 bp, Homo sapiens
aagagacctgtccctgaggttgtgcctgtttccccagccatgtgcagttacttgggtcgacatgtagagtaggggagacgttgcggttttgttaggcgacggcagagtgagtgagtgactgcctgtggactttaaatggaaaataaatgggaagatatatcacactactggaagttgtttgtctacattatgccagagagcacacccccttgaaatctctgaaatttgtccaaagtgaatgggacagaaatataattctcatgtcatccaaaaacaatcccctgtgccactggatatcatactcctgccatggcatgtgccccaaccttcgatcccatctgtacmcagatggtatgagcccagagagggtgtgattgtgggatagtccttattccccagtggctgaagggatgtcttaccaccatcctcatgcttcccctagcatccagtcattgtcttttcccagcgcagtgaagactttggttcctcaagtagcaggagctctttggtggtgcctgc

SEQ ID NO: 739665 - DNA, 660 bp, Homo sapiens
tttcattttattaatgatttcttttgaaattcagaacctttactttttgattaagttgttttatcatttttttttcttttatggttggtgctttttgtcctgtcaaaatctttgcctttgaagggccataaaaatattgtcctatgtttcatgtagaaggtttatggttctagaaagtggtttgtttgtttgtttttccagtgatttcttcttatctcrgtggcagtagagtctttcacgttcttctacatcctatccagcagcgggatgatatatccaagaaaatctgtttaaagtacaaccttccaaaataactgtctgacttaaaatttttttttaatttaaatcaacttttgatcctttgtttatagtctcaccggccataagatagtggatctgtcatgctgaatcatgagaattttttgtacatttaattggatttccaacaggaaattgtaactttattttaatagtgaaagccatttgaaaaactagaaaagcaatgaaataaagcagttaagactcaggtgctgaagttgtgttgtcttctgtgcaaatcctagttctgctcctcactagctatttaaacaaactgagctttaccacatcactttcctcatctctaaaatagtacataaatgatagcaacttctgagcttt

SEQ ID NO: 739666 - DNA, 568 bp, Homo sapiens
cttaataaaacaaaaatttattatctcgtagttctggaggctagaagtctgaaatcgagcagttgtcagggccatgttctctctaaaatctgtagaggagaatccttccttgcctcttcctcttctagcttctggtatttgccatcaatccttagcgttcctggatttgaagatgcatcactccaacttctctctccgttgtcacatggctatcttgtctctgtgtgaatctttacatggtgctttccttttcttgtaagaccaccggtcagattaggatccaccctaataacctcatcttaattcgattacatctactaagacccaattcccatgtgagatcacatcacagctaccagggctgaggacttcaacattcctcttggaggacactgttcaatacaggacagactatgtcrgcgtaaggagcctgaaggaatgccagcagatgaacaggatgcaaacagagagaactggttgcagaagacaaaggaagagatttgtagcataagcgtggggccaatatttgtgaattgatcaaactactacattaagtaaaagaaagact

SEQ ID NO: 739667 - DNA, 615 bp, Homo sapiens
tcaggaagacttctgaatatcaaatcaaaaagagaaaaatgaagaaggaggaagggagagaacactgagaaaagaacctcagagattgttaatacttaaagaatgatgagagacaggagacttagaggccatggttatcacataagagaaccagcatagaacaatattatggaagccaaagggaaggcaagaattctgagggacagcaaatccatgtggtacatagagttcacataagattgagacttaaagtgtcccttggatttaggaattgggaggccaatggtgacctaagcaccacagaatcgtggggcaaaacctgattaaagagggttgggaatggagacacaattttaagaaacttgcctctgaaagaaaaggagagatctcagacagcaactagaaagagctgttctttcaaaatgcagaggattcaggtgtagtaagaattcaggcttagggtcaaacaaacttcaatwtgaacctcagttctaccacttaaaaagccatgtgaacttgggaaaggtagctattccttctgtgtctgtttccaattcagttaaatagagatagtaatacttgccttgctgggttgttgtgagggtgaaattagat

SEQ ID NO: 739668 - DNA, 477 bp, Homo sapiens
tgcccctttcctccactagccctttcatgttaccctgtgaaattcctatattgatctcattccatgtttccctttgctcctccccatgactgaaacctgacccccttcagtcaaaccacttccttgggtgagcacatcatgcttcccacagctccttctccaatgactgtgcttctcccaccattggacagcctccccttctcacckttaccaccactggtcatcaattctcattgctcccacatgcttacttccaatgctctattcttaccttcctctatgacgttaccactggtagtaatgtatctccccaactcaaacttctgctaccatcatcagtatccaggaaaatgacctttataacatactgaccaacctactcaacttcctcagttccagggacatttatgaccactgcacttttgctcaaccttagccatggctgcatgtctaaggccagcatggagcatgccagga

SEQ ID NO: 739669 - DNA, 503 bp, Homo sapiens
cgatcacgaaaaggacatttgtttataacacgagagctgaagaaaaagggagagaacgttgcttgactcaattgggaatgtatatattggacaattcaaatgttccactgcacacatgtccacaaatgaccacaaaaaagcaagaaagtattgagtttggagttacaaataacttttagctagtgggcaaatttgccaatacaaaatctgcgaataataaggatggactgtataytgatttttttactactaaatcaaacttgcatacttggggtaaactctacctggtcatgatgtatcatcattatatttatactgctggattcaacttgctaatattttgtcaagaagttttgggccaggtgcagtggctcacaccagtaatcccagcactttgggaggctgaggcaggcagactgcttaagctcatgagttcgagaccagccagagcaacatggcaaaacctggtctctacaaaaaatacaaaaattaaccaggtgtgg

SEQ ID NO: 739670 - DNA, 671 bp, Homo sapiens
gaatgatccatgtgctgaggaaagaatgtgtattctacagctgttggttgaaatgttctgcaaatatctattaggtccatttgatttatagtatagattgagtctgatttttttgttgttgattttatgtataaatgaactgttcagtactgaaagtggggtggtgaagtctccagctgttattgtattggggtccatctctatttagatctaataatatttgctttatatatttgtgtgctccagtgttgggtgcatatatatttacagttgttatatctttttttttyctttttttttttttttttattgatcattcttgggtgtttctcgcagagggggatttggcagggtcataggacaatagtggagggaaggtcagcagataaacaagtgaacaaaggtctctggttttcctaggcagaggaccctgcggccttccgcagtgtttgtgtccctgggtacttgagattagggagtggtgatgactctttaactagcatgctgccttcaagcatctgtttaacaaagcacatcttgcaccgcccttaatccatttaaccctgagtggacacagcacatgtttcagagagcacagggttgggggtaaggtcatagatcaacaggatcccaaggcagaagaatttttcttagtacagaacaaaatgaaa

SEQ ID NO: 739671 - DNA, 578 bp, Homo sapiens
cagtctgggcaacacagcaagagactccgtctcaaaaaaaaaagaaagaaagaaagaaagaaattgaagttatgtcaccctgtaagcactgctttatctacattcctcaagttttgatctgttgtattttcattatcattcccttcaaagtattttctaatttcctttttgatttcttctttgtcctattttttatttaggggggtgttaagtttcaaaatatttggtattttcctatcttactgtcattgaattttaattctgttgtggtaagagaacaaactgcataatttcattccttttaagtttgttrttttgttttattgtctatcacatggtctctctttgagaatacactatgtgaacataaaaaaatatgtatttggcagttatttaggtatagtattccaaatgtatccattagatcaaatcggttcaaatcttctatgtctttatagattttttttttagttgttctatcaattactgagaagggggtgttaaaatcttctaccatgatctcaatttttgcttcatgtatgtttaagttgctgttactcaggcatttgtgattacat

SEQ ID NO: 739672 - DNA, 578 bp, Homo sapiens
cagtctgggcaacacagcaagagactccgtctcaaaaaaaaaagaaagaaagaaagaaagaaattgaagttatgtcaccctgtaagcactgctttatctacattcctcaagttttgatctgttgtattttcattatcattcccttcaaagtattttctaatttcctttttgatttcttctttgtcctattttttatttaggggggtgttaagtttcaaaatatttggtattttcctatcttactgtcattgaattttaattctgttgtggtaagagaacaaactgcataatttcattccttttaagtttgttgttttgttttattgtctatcacatggtctctctttgagaatacactatgtgaacataaaaaaatatgtatttggcagttatttaggtatagtattccaaatgtatccattagatcaaatyggttcaaatcttctatgtctttatagattttttttttagttgttctatcaattactgagaagggggtgttaaaatcttctaccatgatctcaatttttgcttcatgtatgtttaagttgctgttactcaggcatttgtgattacat

SEQ ID NO: 739673 - DNA, 584 bp, Homo sapiens
tcaaatcggttcaaatcttctatgtctttatagattttttttttagttgttctatcaattactgagaagggggtgttaaaatcttctaccatgatctcaatttttgcttcatgtatgtttaagttgctgttactcaggcatttgtgattacrttttctcagattgtgccttttatcgttatgaaatatcactctttacctctgataataccctcagtcttaaaagcgatttcatctgatgttaatatagctgtttcttctttttatgctgtttacctggtatagttttgtctattcatttactttcaatatatttgtatttttaggcctaagataaatctcttgtaggaagtatagtttgttctttcttttgtatctgctctaacaacctagctttaaattttagtatttagacgtttaatatttaatgtgattattgttatcactgaatttcatttaataattttattacttggctctattatctctatgtgttgttgcagtagttcctgttgctctttctttcctcttttttttcttgagatcgagtcttgctctgtcgcccaggctggagtgcagtggtgt

SEQ ID NO: 739674 - DNA, 584 bp, Homo sapiens
tcaaatcggttcaaatcttctatgtctttatagattttttttttagttgttctatcaattactgagaagggggtgttaaaatcttctaccatgatctcaatttttgcttcatgtatgtttaagttgctgttactcaggcatttgtgattacattttctcagattgtgccttttatcgttatgaaatatcactctttacctctgataataccctcagtcttaaaagcgatttcatctgatgttaatatagctgtttcttctttttatgctgtttacctggtatagttttgtctattcatttactttcaatatayttgtatttttaggcctaagataaatctcttgtaggaagtatagtttgttctttcttttgtatctgctctaacaacctagctttaaattttagtatttagacgtttaatatttaatgtgattattgttatcactgaatttcatttaataattttattacttggctctattatctctatgtgttgttgcagtagttcctgttgctctttctttcctcttttttttcttgagatcgagtcttgctctgtcgcccaggctggagtgcagtggtgt

SEQ ID NO: 739675 - DNA, 636 bp, Homo sapiens
tggcgggtgcctgtagtcccagctcctcgggaggctgaggcaggagaatggcgtcaacccgggtggcggagcttgcagtgagccgagattgcgccactacgctccagcctgggtgacagagcgagactccatctcaaaaaaaaaaaaaaaaaggcaccatagtaattgaaaatattaacactagaggaaactgaaactgagaagggtgtattatacagtaacttgctgtactatttttttctttttcaactgtgaaaatagagtatttggtttttgtctccaattcctggcacaaactttataaaactctggaagcttcttgagtaacaatgaggtggaggagaatgttttgctattcatagcaagctcctttcaaccatacctgaatttrtgctactaaggtgaacagcctcaagatagaggctggttgccagggcaaccaaccatgtgatcagatggttccaacattcaatcctttccccagacctctgagggagggaagaaagggtggagactgtagtcaatcaccaatggacaatgatttaatcaatcatgtctctgtaatggaatcttcatgaaaaccttaatctaacaggttcagagaggttccaggttgaatgcattaacatgccagga

SEQ ID NO: 739676 - DNA, 622 bp, Homo sapiens
acatgtctgaattcctaaacaacctaaaaacttgtatctttgctctgtaaagtcagaagagaatcattggcacatttctcttttcccgtatgaataatggagagaaacaaattcctgttacactggttgatttcttattttaataaagatttaacaaaggaaattgcctttgtgtgtgtgtgaaaatttagtatctaatatccttatctttgggaattcatgtaattctttttctcaagttatttaacagtgttcttcttttttctacatagactgtccttcrtctacttggattcagttccaagacagttgttacatttttctccaagaagccatcaaagtagaaagcatagaggatgtcagaaatcagtgtactgaccatggtaaaaggcttattcttttctgtttgttttttcacaaattagtgaacagtgttcattaatttctttaaaaattgattttgtcacatctgacttttaactgggtcctgagatttaatgtacaacttttatttgacaacacacaagctacaggcagtggaattgggtatatatttaatcctggagttggaagacagttgttggacaatattgtccaaagcagggtctatttaacatgcata

SEQ ID NO: 739677 - DNA, 602 bp, Homo sapiens
tcaccaactcagttcatacccttgacctcatcacaatttgctgcactacccctaaatagccattttaagcgtcccctcctgtgtaccaattcttattttagcctacttacgtcaatgtcaataaaatccaaagatactctacctctttctcactatacacttcctgaggtccttactttcctcctggttttaatttctatggttgccacaattatgtccttataratacccttaactcccttcatcatatttgcctggcaaaagacccaccagcattgaactctagtccatagctatatcccaagcatctgaaaactgctttaaaaaaattgtacacgtacctcactttaaaatcacttttatagacactaatacaatctggaaatcctactacacatccacatccttaaaatgttattttcctcacacctcaaaacctcctaacctgtctccttatcagctaaagaccttacctctaagaaaacagatgcaattaacacagggagtcataaatcttcccatcaaagcaacaaactgatcaacacccatatcaacactagccttctgaagaggaaatatcctttctcgtattataggacaac

SEQ ID NO: 739678 - DNA, 608 bp, Homo sapiens
taagtaattagactaggatgactaaattaagagtcaggctgggactaagatctctgtttttttgtcttttcactcttaacagtgatttataagcaaccttcaactctataaagatttctttgtataaaaagattctatgccctgcatttaaactgttattttattttattttattttattttgagacagagtcttgctctgtcgcctggttggagtgcagtggtgcaatctcagctcactgcaacctccacctcccaggttcaagcaattctcctgcctcagcctcctgagtagctgcgactacaggtgcatgccaccacacccagctaaattttgtatttttaatagagacagggtttcagcatgttagccaggatggtctcaatctcctgaccttgtgatctgcccaccttggcctcccaaagtgctgggattacagcgtgaaccactgcgcccrgcctaaactggtatctctgttaaatactaatatctaaagaactggctgggcatggtggctcatgcctgtaatttcagcacttttggaggctgaagcatgaggatcgcttgaagccaggagtttgagaccagcatgggaagcaaagcgagac

SEQ ID NO: 739679 - DNA, 732 bp, Homo sapiens
attatatacagctgtgcttttcacatcaagttggcttagttcttggaggaaagtcttagtgactaaaattgtacacagatcacaggacaagagaactagtctaacaaattcaataagaaatcaggacaactgtagactatataaaaactgtcttagaaaattatttacaactttatcatagtgtaaatactctaaatgtaaaataaatctatggattttatacaaaaataaagtacaaatgtaagttaaatgcygaataaaacattttcaccttttccagtggatgctattactaagactataatctaggtgtcaaaacttaaagtgataaccacaaagcaatgttttcttaatcactcataattttacatttgttagtagtcatcacaaggtttagagttccactgaaaaagtctcatttttacaaatgcaactcatacactttccttcatggaccctttctctgtttaacacatgttaaaaaagtaaaacaaaattcttagtcaaaagttgacatgctatgtgaagcatataaattgtaaaattatcagtcttaaatacctagttgattctctttacaaaagaaacagtcatgtaatacatcagaaaatgcaaagcacactgctacaaggtacctactcaatctaaaaataatgttcccacacttgggaaaatgttaagcactaaatctttaaaagtcattgttttataaacaattataaacagaaaaaa

SEQ ID NO: 739680 - DNA, 732 bp, Homo sapiens
attatatacagctgtgcttttcacatcaagttggcttagttcttggaggaaagtcttagtgactaaaattgtacacagatcacaggacaagagaactagtctaacaaattcaataagaaatcaggacaactgtagactatataaaaactgtcttagaaaattatttacaactttatcatagtgtaaatactctaaatgtaaaataaatctatggattttatacaaaaataaagtacaaatgtaagttaaatgccgaataaaacattttcaccttttcyagtggatgctattactaagactataatctaggtgtcaaaacttaaagtgataaccacaaagcaatgttttcttaatcactcataattttacatttgttagtagtcatcacaaggtttagagttccactgaaaaagtctcatttttacaaatgcaactcatacactttccttcatggaccctttctctgtttaacacatgttaaaaaagtaaaacaaaattcttagtcaaaagttgacatgctatgtgaagcatataaattgtaaaattatcagtcttaaatacctagttgattctctttacaaaagaaacagtcatgtaatacatcagaaaatgcaaagcacactgctacaaggtacctactcaatctaaaaataatgttcccacacttgggaaaatgttaagcactaaatctttaaaagtcattgttttataaacaattataaacagaaaaaa

SEQ ID NO: 739681 - DNA, 631 bp, Homo sapiens
ttctgtcatatttgtactcttatttctaccaattccaagttcacctaaaccctgtatctactatttcgtattaaaaaatccttccacaaattttctttgaatcaattatctgcaattttataggttggcgcaaaagtaatggcaaaagctgcaattactttcrcaccaacctaacactaagacagtttttaaagattactattaagacataattttaaccagtggtaaaaatattcttagagagaagggaataacaagaagataactttctgaataacgaagttataagctgcaaatccatgcggtgacaggcactagaactctaagagaaggcaggcatgggttccttgtggggacacagacattcctgtggagaagaaaatgtcctgatgttgatccaaggatcccagaaataagcctctagaaagattccactttatttaacaggattttctgtgtcattagtggtttccgtcattgctaagttaactcatggattcattcaaaatttataaccatccagaacagccagcgacctagcttatttatccagaagaggcatctgaattagccactacttaacattctttagcaaggacgacttgttatttaggatgagttagaactctct

SEQ ID NO: 739682 - DNA, 596 bp, Homo sapiens
aggagatgtttggcctttccatgggatatagtcaaatgtactaccatcagaccattcaaaacttgattcacttccctgttgtaagaacaatagagataacctgaatccagatgtttgacttcaaaaagaatacaaagaacaacatacatactttaagaaatattataatggaatattaattatttgcttacagtattgtaggtctgaacctactattattgtaggtctgatttacttctgatgcattgatttgggacatttgctctgatacagtttatggagaactttaaacttacagacagagttactacacctggtcttcagatttttttgaaggatgagtttatgtgacactygaaattaaacaacatgcaaatggcttccatttgtcataattacaaatttacaatcccaaccttcatattgttctgaatattgttttctgtgttttatagttttgtgttttgtgtctctggctacatttttcacactacagaggacaccaagcagtagggagctagaaaagagaaacacttcccaagaaactcaaaatgggaagactatttttgaattttccttgaatttataatcttaac

SEQ ID NO: 739683 - DNA, 456 bp, Homo sapiens
gcttcaccttttattaatttaatctttggtcttggaacctaataattttagaatcaaaaatcttaatttgatgatacccatacttctaatagtaacatggtcttatctattacactgtactttttttgataatgaatraacagttaaccattaattaaactgaattggaaaagactgcaaaaactgggaaccaaggaatttatataacctatgaaagataggccaggtacaggcgtggtggctcacacctgtaatcccaacactctgtctgggaggccaaggtgggctgatcacttgaggtcaggagttcgagaccagcctggccaacatggtgaaacccagtctctactaaaaataaaaaaaaaaaacaaagagccaggcgtggtggcacacacctgttaattccagctacacaggaggctgaggcacaaggatagcttgaacctgggaggcaga

SEQ ID NO: 739684 - DNA, 614 bp, Homo sapiens
gctgaagtggaacaatgaagaaacatttagaaaagcaaggcatctggcaataggtaaagcacacccacattgaggcacaatattttttaaaagcagagaaagaatgtattgcacatttgcatatgcaaaaaatatttctgaacacccaagaaactcctaacagtagctgtcatctaggaaaggagacctgagtgaatggattaagagggaaactaacttattatgattaaaagttcacagtcaggtgtggtggctcatacctgtaatctcagcactttgggagggcaaggcagaaggatcacttgaagccaggagttcaagaccaaccagcctgggaaacatagcaagaccttgtctttacaaaaaatttaacaatgtagccaggcatggtggcaggcacctgtagtcccagctaccgagctgaggctgaagcaggagaggatcacytgagcccaggagttcgaggatgcagtgagctatgatcatgccactgcactccagccacagcacctcccaaaactacatatcaaaaaattgtaggctgtgcgcagtagctcacacctataatcccagcactctgggaagctcgagcccagttcaatgttacggtgagc

SEQ ID NO: 739685 - DNA, 546 bp, Homo sapiens
gatccccgagatgcagctgatgtggtctgagaactagatggaagaacaccatgtggccgctgtgtaagagtggaactgtcgaatggtgataaaagaagtagaaatcgtagcccacctccctcttggggtcctcgtccttgagatgattatcataggaggagtcttccacctcgtcgcagatttccaagaagaagcctctctcgcagcyggagcaggtccctttctagagatagaagagagagatctctgtctcgggagagaaatcacaagccgtccagatccttctctaggtctcgtagccgatctaggtcaaaaaaaaaaaaaaaaaaacaaagaagaccagttggcaagagaagtggtgtacaagaaattacttcatttgacaggagtatgtacagaaaattcaagttttgtttgagacttcataagcttggtgcatttttaagatgttttagctgttcatatgtgtttgtctcttgaaacagtgacacaaaggtataattctctatggtttgaaatggatcatgtgaggcatgtaataccaag

SEQ ID NO: 739686 - DNA, 548 bp, Homo sapiens
agaccagcatggtgtctattttcttaaaaaaaaaaaaaaaaaagacaaaaaatttatttcccaatctgagcaaattaacagattttttgactgaaaaatctgatgaagcgtaattgtcaacttctcaaatgtgcctacattacctccactggtgctgcatcctttgctggtatgttggtcactgaatcaaagatgagctgggttttatcattactctcttgaaactttacacagctaaataataaaataaaaaagaaacttgatacatgcaataacctgtatgggtattaaaagtattatgctgaacagaaaaagacaatctcaaaagtttacatactgtatgagaccatttataaaaccttcacaaatgccaaattatcaagatggagaattagtggttaccagsatcagtgggtaatggtgtatgtgactataaggagttaacgtaagacagataaagatgttttgtatcttgattgtggtggtatttacacacatctacatatgtgaaaaaactgcatagaaccatacatacacataaatgagta

SEQ ID NO: 739687 - DNA, 603 bp, Homo sapiens
tgtctgagagatgacttctgagcattacagatttcatctaacaagaagaataaacattgaacaatgaagcctaagggttaaaaatgttgtgaaagggagtgtatggggcatgtatgagtgcctaaaaaggggaacaaatctaatctgtgcatttgggcaagtacatcctcagttgtttaatacgtgaaatgatgaagtgccattcatctaataagtaaacattaaatctctgctcagattgtttccaaataccattttccattaaagaatatcaggactccctatagggaatggctgattccagtctgtggcaaggaatgttaagaggagcctgraatatatttgcataatagatagcaaagaaactaccaatgatcactgagatcacgtaaaaaggcaactgagccagagagtgggccatttgccctatgagagtctctctcatcctcctacccctgcccttttccctaagcaaccagggaagtgcaactgtatctacccatgggccacactcacagggcagccaggggaaatctttcctcccccacctagcagcaccaggtgtagaacacacacttgagacgcacaggtggcacttacagt

SEQ ID NO: 739688 - DNA, 597 bp, Homo sapiens
aataatcattacacttcctctcattgcagaaaccatgaaagaatatgccttttgtaatcaattttttatcatgcaaaaaagtattttgttatgacatttgtaagtggagactatatttcaaaacaagtttatacagacttcaaaaggtctcaagtcaaagagaaagtgaaatatatttaaatatgattagttacatcwaatgcagctggcatactcatattcacagtttataaagtaaaaaaactaaactcttcatgtcggctctgaaatagatgcattttcattcatacattcgctagttaggtctgttcttctaaggaggaaagacgagacatatgagatattttttaaagaacaaactcaacatatcagcagcaaatttcagttaaactaaattggaaaccaatgttctgtgtaaccaaagtgcaaagtcagttccccagctcagaaagaaaattaagagtataaactgaaggcttaagagaacttcagagagcatactatgtgattaatacataaatattaaaaattatccaatttttgatttaagaacaacacagtttggatctagtcattaaaacatatgcagaggtgtca

SEQ ID NO: 739689 - DNA, 597 bp, Homo sapiens
aataatcattacacttcctctcattgcagaaaccatgaaagaatatgccttttgtaatcaattttttatcatgcaaaaaagtattttgttatgacatttgtaagtggagactatatttcaaaacaagtttatacagacttcaaaaggtctcaagtcaaagagaaagtgaaatatatttaaatatgattagttacatctwatgcagctggcatactcatattcacagtttataaagtaaaaaaactaaactcttcatgtcggctctgaaatagatgcattttcattcatacattcgctagttaggtctgttcttctaaggaggaaagacgagacatatgagatattttttaaagaacaaactcaacatatcagcagcaaatttcagttaaactaaattggaaaccaatgttctgtgtaaccaaagtgcaaagtcagttccccagctcagaaagaaaattaagagtataaactgaaggcttaagagaacttcagagagcatactatgtgattaatacataaatattaaaaattatccaatttttgatttaagaacaacacagtttggatctagtcattaaaacatatgcagaggtgtca

SEQ ID NO: 739690 - DNA, 383 bp, Homo sapiens
ttacatgaagaagcaaagggaatgaagtaaacttaagtgcataaaaatgacttctcagaaaagtacagatccagatcctatggatacccaaattaattcctaatttattgcttaaaatagctactaggcatgctgactcctgtttcaccctgtcagagggactttgaataaaatrgtactagattattaattatggggactagtcatgtacttcatgctctctcaaagcaatgtctagatctgtccttgctttggctgctcttcagccagctctggggtctggcctcatcctgcactccaccctcccaaccttttagtgagaggtacttttaccatctgcaaaggtaaaagagatacctttactatcacatggcatcacattt

SEQ ID NO: 739691 - DNA, 638 bp, Homo sapiens
caaatcacatcttaaattgtaatccccataatccccatgtgtcaaggaagagatcaggtggagataattgaatcatgggggcagtttctcccatgttgttcttgggatggtgagttctcacaagagatctgatggttttataaggggttgttccccctgccttggcacttctccttcctgccgccttgtggagaaggtgccttgttcccctcttcaccttctgccacgattgtaagtttcctgaggcctccccagccatgctgaactgtgagtcaattaaatctctttcctttataaattacccagtctcaggcagttctttatagcagtataaaaacagacacatatagcatccaaagagaaaaagaagaagtcaaagtatctctcttcactgactatatgatcctayatataggaaaatctgaagactgtcaaaaggctgctagaactgatagataaaacaactttagtaaggttttagaatacaaaatcaatatgtaaaaatcagtagcattcctatacaccaataatgtgcaagctgagagtcaaatcaggaacacaatctcatttacaatagccacaaagaaaatgaaatacttaggaaaatacagctaaccaaggagatgagatatctctat

SEQ ID NO: 739692 - DNA, 638 bp, Homo sapiens
caaatcacatcttaaattgtaatccccataatccccatgtgtcaaggaagagatcaggtggagataattgaatcatgggggcagtttctcccatgttgttcttgggatggtgagttctcacaagagatctgatggttttataaggggttgttccccctgccttggcacttctccttcctgccgccttgtggagaaggtgccttgttcccctcttcaccttctgccacgattgtaagtttcctgaggcctccccagccatgctgaactgtgagtcaattaaatctctttcctttataaattacccagtctcaggcagttctttatagcagtataaaaacagacacatatagcatccaaagagaaaaagaagaagtcaaagtatctctcttcactgactatatgatcctacrtataggaaaatctgaagactgtcaaaaggctgctagaactgatagataaaacaactttagtaaggttttagaatacaaaatcaatatgtaaaaatcagtagcattcctatacaccaataatgtgcaagctgagagtcaaatcaggaacacaatctcatttacaatagccacaaagaaaatgaaatacttaggaaaatacagctaaccaaggagatgagatatctctat

SEQ ID NO: 739693 - DNA, 529 bp, Homo sapiens
tcattctctataatgtttcagtttaccttctgtgtcccagggatacaaagatgggtgagatctagaccttgcccttaaagagcttatagcattcctatgggttttttaaaaattattttctttctacaaaaagagagacaggccaatagacttagaggcaatacyagttttacagcaaaccagacctaggttagaatcctacttctgccaaacaacaacaaccataataatgctatttttaccaaatgctgattctgagatcagaactgtgctgaatgctttatatatattttctcgtggaacattcatgaaaaccttttgatatatattaccatccttttcaaatgagcaactgaggtgctgggagtttaagtaaaataacagagcaaatactcttccacacccatactggaaaataagtctgattttaaaagtcgcatcttgtgtataaccagattctgcgacttcgtggaggaaagcgcttgggcagtgccttgaaatttatttatttatctataatacataaatt

SEQ ID NO: 739694 - DNA, 529 bp, Homo sapiens
tcattctctataatgtttcagtttaccttctgtgtcccagggatacaaagatgggtgagatctagaccttgcccttaaagagcttatagcattcctatgggttttttaaaaattattttctttctacaaaaagagagacaggccaatagacttagaggcaatactagttttacagcaaaccagacctaggttagaatcctacttctgccaaacaacaacaaccataataatgctatttttaccaaatgctgattctgagatcagaactgtgctgaatgctttatatatatyttctcgtggaacattcatgaaaaccttttgatatatattaccatccttttcaaatgagcaactgaggtgctgggagtttaagtaaaataacagagcaaatactcttccacacccatactggaaaataagtctgattttaaaagtcgcatcttgtgtataaccagattctgcgacttcgtggaggaaagcgcttgggcagtgccttgaaatttatttatttatctataatacataaatt

SEQ ID NO: 739695 - DNA, 657 bp, Homo sapiens
tctagttgaatattttctctaactgttagctggatgtattcctgactacaatggtagctgacactgtcaggcactctatcttctgcaatgatgacatatccaaattttgtttgggggtcaattattcttgacatgattgtggtttaccttgactgaccccaatcaatcttctttgtcctatttctcgtatcatagcagacatctcaagtgcctaaataataaatacaatasacatagtaatactcatatcagacaaaagaagattaataggtaaaaaaataaactgaggggataactaacacttgagaatccagctaatatgatgtcgaaatatataaaacaaaaaatctcgtaaaacaagatgatagtaaaaaaatgtaataatcagaatcaaagacttcaaggtatctctctcaacttttaatctgtcaagtaaacaaaatttgtagtggaattagaagaattaacatggtagtataattaacagtatatatttacctctgtacaaggagagaatataaattttttgagttcatttatggttcaattttcaaaaaggcataaattctttacccaaaatctagcataaattcctcatagtataaattatacaatccataatttatgaccaagattcaatgataaaaggaagtgata

SEQ ID NO: 739696 - DNA, 502 bp, Homo sapiens
tgttgagaaaagactcaattgcctcactcagccaggagcctgccctacccctggtgtgactgggtccccatcactgtgaaatgaagttttgtggggtttttttttttttttttgctttatctggcaagctttccaaaaccctaaaagaagttggcattaacatttaatgctttttcactttatttatatgtgaagtgggctagcctaaattaaattattttgagtcggactttcccctytaatggaaatcagggtgactatcttctaatttcttccatcccatggtatatgttaaatgctgtggtgtctgaatttatttcctagcaacagtcaacaaaaatggctatttctgggaagcactcctcttttcacataaagaaacccaagtgaatgaacatgagaaatatgggaaccattgcctgccttccagtcgaagcttgggtccacctaacagttcccaaacagggttttgagagtcaatcctattagtatatgaggattg

SEQ ID NO: 739697 - DNA, 502 bp, Homo sapiens
tgttgagaaaagactcaattgcctcactcagccaggagcctgccctacccctggtgtgactgggtccccatcactgtgaaatgaagttttgtggggtttttttttttttttttgctttatctggcaagctttccaaaaccctaaaagaagttggcattaacatttaatgctttttcactttatttatatgtgaagtgggctagcctaaattaaattattttgagtcggactttcccctctaatggaaatcagggtgactatcttctaatttyttccatcccatggtatatgttaaatgctgtggtgtctgaatttatttcctagcaacagtcaacaaaaatggctatttctgggaagcactcctcttttcacataaagaaacccaagtgaatgaacatgagaaatatgggaaccattgcctgccttccagtcgaagcttgggtccacctaacagttcccaaacagggttttgagagtcaatcctattagtatatgaggattg

SEQ ID NO: 739698 - DNA, 651 bp, Homo sapiens
ggggagacgggggaagtaaataataattaccctcctgaatcagttatagtacaggaagagcagtaagaccagaacacatagctgttggtgaagggctggtgcattccttcattcaatgaacaaatagttattgagaacctgatatgtgatatgggaatatagtgggaacaaagcaatctttctggctatctagaccttctgttctagaaaagaaacaacaaaataaattatacaatagcatatcttatatctctatattatttaatattatatgtctctgtattagcgatctagctagaatcgcttcaggcagtgataaatgtttgaaggaaaaaaaatgcakagttgggcctagagagtgcggacagcacggtctggcagggtctccctgaggaggcgacatgagatcagaaactcagtaggaggtgcatgggtaagagtggtcacatctgcagaaatgtttcaggaagaaggagaactagcaagcgccgagctagtaacacagacaccatggacatgctttacacataccacatctatgaagtgaggactctgtccccacttcaggtggggaggccaagagctagaaatagggagtgactgatcgaaggccttgcagcttggagaaggcagagtcgtgatccagcccag

SEQ ID NO: 739699 - DNA, 552 bp, Homo sapiens
gtcttcctgaccggcttctttggaagacacatcttgggggacagcttgggaatgggccagttacttctgcaggccaaagccatgcagctgctgtactacctgaagacccagcaccggaggacaacgtgcagagcaagcagtggctcacccatttcctccaccaatttaacaatattaacaacagtctggtcatgaagaaaattgagrtacctggcggttcaggtttacaaggaggccaagagaaggtgggagggatgaggaagacttgttcccagaaccgtaacaaaagcaccgcatgactacttcaaggggtccttgcctcaaagccgggtttgctttactgtatttgtcacttaatccaactcttttaaattaacaccgacggatgccaggaatcgtgaattcttggtaacattcaggtcggtaacacaaatcctgtgtccaccagatggggctgttcagcacagacactgatcttcgtgtttaattttggggtttggtttcttatcatattacagtgctttgacattctacttttagttgaagtcttca

SEQ ID NO: 739700 - DNA, 573 bp, Homo sapiens
gaggcaggagaatcaactgaacccaggaggctgaggttgcaatgagccgaggtcgcgccattgcactccagcctgggcaaaaagagcgaaactcagtctcaaaaaaaaaaaaaaaagtaaagagaaaaaagaaaagaaatggagtatgttaaaaccttattcaacaaatgttacagctaaaaagcttccaacaacaaatattccaaacctagaytgtttcacggacaaactctatcaagatatttaaaaaaggaataatgtcatattctacacaaactcttacaaaataaagaggagggtgcccttcccaactcatttatgaagccagctttaccctgagaccaaaatcagacagagatattgcaaaagaagaaaactacagtacaatatccctcttgactacagatacaaaaatcctcatgtcaaaatacaagcaacttaaatccagcaatctataaaaggataatatatcatgacgtggattttatcccagaaatgcaagactggttcaatagtcaataattattccatgtgtaatactacatacatggtgttatggtttgaatatgttac

SEQ ID NO: 739701 - DNA, 605 bp, Homo sapiens
gataacttacattacaataacaagctattgattggctatacattcttctttgtatcacaaattcgaagaacatgaaaatggatgaagcaggtagtaagggacaaagtgacttgaaacaattgccccccaagcatggcgactgatatagtttggttctgtgtccccacacaaatctcatctcgaattgtaatccccataatccccaagtgtggaggggaggaaccacacacagggtgggaggtgaytggatcatggggatggtttcccccatgctgttctcctggtggttttatagggcagttttccctgctcttgctcgctccctctcacctgccactgtgtaagacatgcctcttccccttccaccatgattgtaaatttcctgaggtctccccagacatgcggaactatgagtcaattaaacctcttttctttatgaattaccgagtcttgggtatgtctttattgcagtatgagaactaactaatacaggggtgtagggacatgactgaagtcccaaactcatatctctctgtgcctgataaattccgcatacctcacatagttcaaactgctctgggctcttttttcttttcttaaggcca

SEQ ID NO: 739702 - DNA, 645 bp, Homo sapiens
gcaagttgttagacattctctcttctttttttttttttttgagatggagtttcgctcttgttgtccaagctagagtgcaatggcacgatctcagctcactgcaacctccacctcccaggttcaggcaattctcctgcctcagcctccagagtagctgggattacaggcacccgccaccatgcctggctaattttgtgtgtgtgtgtgtgtgtgtgtgtgtgygtatttttagtagaaacggggtttcaccatgttagccaggctggtctcaaactcctgacctcaggtaatccacctgcctcggcctcccaaagtgctgggattacaggcatgagccaccgcgcccagctgacattctcccttctacaggtgcagtctatagctccttcctctgaaatattggtgagtccctgactgcttcggctgatagagtcagaatagacaccgtctctacatttaacaaataaactaaaaattatccaggcatggtggcatgtgcctgtagttccaactatttgggaggctgaggcaggaggatctcttgagtccaggaggtcaaggctgcagtgagctataattacaccactgcactccagcctagaggcaacttctgagtctagatcataaaaggtgattcaccttctg

SEQ ID NO: 739703 - DNA, 630 bp, Homo sapiens
taagatcccatctctacaaaaaatacaaaaattagccaggcgtggtggtgtgcacctgtagtcccagctacttgggaggctcaggcagaaagatcgtttgcgcccaggaggttgaggcttcagtgaactgtgattgcgccacagcactccagcctgggtgacagagcgagaccctgtttcagtaaataaataaaataaaagtaaaatatctgtaagcacaggtatgatgtccccagcctgtatttatatgcctaaaacacactagaaaacgactctatgttcaatygcaatgtagagaatgaagatgaattttatcacacaagacttgactttctttctggtgcctgtgcctccatttatgccccgtgtcaggctgtatcttgttgctcacgctgactttagtagcgtagcaagttatgatttattctggcaatttgcaaatactgatgcaacatttggccaggatctgtggacatctcagggtgaacccagttcagctgattatggggtcatatgaagatgagaattttgcaataatgtacttctcatttctagtgaattgctgtgtgaaagataccgtaggctggaaaaggggagaacagaaaggacaaggcaaggctgctgtttctc

SEQ ID NO: 739704 - DNA, 577 bp, Homo sapiens
actgagacaggaggagggagggataagattctcatttcccagaggagataggagctgggaactcagattcctgggttaccaatgagatggggctggccacaaagggttttgaaaagaactcgctgttgggcgcagcggctcatgcctgtgggagccgaggcccagcactttgggaggccgaggcgggtggatcacctgaggacaggagttcaagaccagcctgaccaacatggcgaaacccctctctactaaaaatacaaagattagcctggtgtggtggcgggcacttgtagtcccagctactacggaggctgaggcaggagaatcacttgaacctgggaggcagaggttgcagtgagcygagatcacaccactacactccagcctgggcgacagagtgagagtctgcctcagacaaaaaaaaaaaaaggaaaaagaaactagtccctcaacctcctacagggcctctgtgtcacacagacatcactccgtctggtgagtagccaccccatccactctccttttgttgctgacaccccttttccaattactcagattttattttggtgcccaatcc

SEQ ID NO: 739705 - DNA, 645 bp, Homo sapiens
tcccataaaatgaaatggaaaataattatctacaaagaattgaaagactttaattgtgtccctgattcttcctttacataaaaaatttggcacacaccctaaataaggagttggggaggaagtaactttctgttccaagcagtgagacatatgtggggtcttcccctgaaggtgcagtacttcagatctctgagtaattgaaggactggcaggcagcatgggtttccattaggttcatgtgtcacaaacttctaatgccacttaaaatcccatcctttccttcttccactttcttagaatcttcccagtggtgctgaccatgacataagccagccttacatcaagctcagcaatgtgagraagctatgcactgactcaagaacagtgactttgcattatttatgttactaaatgtaaaggcgaccaaaaaaggaaggtcactaaactttttttatttgaatattgaaagtatcaagcatagtgattaagtgttttaataataacaatcactaattctaatatggaactcatgaggaaggcattattctaagtactttatgtatgttaactcagtaattctcttaataaccatagaaggcaggtacactcttcttaccccattttagagatgagcaaactgagaca

SEQ ID NO: 739706 - DNA, 545 bp, Homo sapiens
acaagcgctcagtaattgtttttgtttgttttcagttggggtcttgttctgttacccaggctggagtgtagtggtacgattagtgcttactgcagcctcaacctgtcaggctcaagtgatcctcccacctcagcctcctgagtagctaggactgcaggcgtgcaccaccatgcccagccaatttttaaattttgttktagagacagggttttgttatgttgcccagtctaatcttgaactcctgggctcaaacagtcctcctgcctccgtcttccaaattattgggattacaggcatgagttactgccactgtgcctgaccctcagtaactgtttatgacatttactgaactagtctgtgcatagaattacaaagtcatataaggaaaaaatgaaaaaatttttggaagatatgacttcactttctgagcatcttataatgcacaaatagacaataagaaaacttactacaagcacataagcaagtatttcctatggtagtacaaatatctttatacaatactaaatttttttcaaaaacacaaa

SEQ ID NO: 739707 - DNA, 598 bp, Homo sapiens
ttaatttttttttacttttaaagcaaaagacagacaccctgtaaaacagtctcagtagtcatctcttgtactttattatacatttatcttaatgaagaaattttccataagtggatgtgttcagataaaataaatatggcctatacattcagaagtgatacgataactgtcgttttaaaatacaaacataaaataagcatgcacaaaaacataagtgaattatgtggactccacagaggattgcacagaagagacagaaagaaagcttatttgggtgtcctctcagctaatacattaacaatttgccttcaaaattttattctctcaggcctcacttaagtttggcctcaaaaaggaggtttatgtacagagaggtttgtatggtacatattaaggtctttgtattttttaactaaactcattctactagataaattcattgttacrggtagttaggcatgagctgggcaggaaaaggctctcctcacacccattaggaatgtcaggtgatggttcagcgattatctctaaaaataacttggcagtgctagggagaggccatttcctgatggtccacacctgttaacatcaaaatgtt

SEQ ID NO: 739708 - DNA, 640 bp, Homo sapiens
ggtttccccccagtaactcaggaatcaattcagaatgattctttccactcctgatcacccatgatccctttgatcagtgctgtatttatacttggatgacttcctaagtggtacttggatgttacttttgcagagtcctgacacggtcttcatccaccttgagttttcagaagtatttgaggtgaccgcttcttcctccttttgtttctagacctctgtgacacatacttgcctagtttttctcacacctcactggactttttaaattctttactgatttcttgttctctaacaaatctctaaatgttgaagcactccagggtgctgwcttttgttcttttcattctctgtccacctgtctccctagatgatcttatatggttccatgatttcatgaaccatggctttatcataactgccaaatgctacctccagcctgaacctcttctctgaattctgaactcatatttccaaccattcactcaacagctccatgtggatgttgtcgtggatttgtaatgtgtcagcttggctagactaaactacgtgtttcagcactccctttcttacacgcatgcttcttggcataaaatagggttacatcctgataaacccattgcaagtatcataaatcaaaaat

SEQ ID NO: 739709 - DNA, 543 bp, Homo sapiens
gtgtttgtgtgtggtggaagtttttctgaaagttccaaaggtcaccagatgtgaagggaagtctgcagttacaatttcacgtctgtgcttatgtgctctgtgataaatcacatttatttctctgaacatttcagccacttgttatcatttttcaataatttttactctgttctaggaagctttctctgggataatttgtctcctaaatctcctgtcttttatttgcccccagtgagagaagcaggaagtacaaggcaggtcttggaaaagaagttggctattcyccatgaaactctgagcaactcttaactcctgccctacaagatattttttttttgacctaatgcgagaatggccaaaaattcaatgaatcaaaggataggaatatgagttcaaaacgtgggaaccttcctgaagaaaatagtttatacttggggaagaattaaatatgtccaaaaaaccccaaaatataataaaagagaaacacacagggcttatttaaaattcatatttgtgattttctgatgattcacgggatttaat

SEQ ID NO: 739710 - DNA, 614 bp, Homo sapiens
ggataaggaaagaatttctaattgcaaattttctaaagcaactgctctaagaaaagggaggtcaggggacctattgtcataaataaacctatttaaactctagtcaaactgtgggtatcagtagggttatattggacactgaaaatagaaagaggtagaacttcctaattatttcaaggccaatatgacattgatactaaaacatayaagaacagcactaaaaaggaattttataggccaatatcactaatgaatattaatgcaaaattactcaataaaatataagctactgaatctagaaattaatttgaaaatcaacatgtgtcatctctatgttggatttatcttgggaatacagagttggctttagttataaaactctgttaatgcaattcatcacataaacagattaaaggagaaaatccacattatcatctcaatagttgctttaaaagcattaaatagaattcaacaccaatacatataaataaacaaaaagaaaaaaacttaggaaattacggaaatagaggaatttttttctcataaagagtatccataaatccacagtaaagtcataataatgtcaaacattagacacacttcttttagtattg

SEQ ID NO: 739711 - DNA, 655 bp, Homo sapiens
gttttttgcttttggtggggcaaggcccattgattggagtgctcacatggacaaggggtaatgaatagcaagtttagcacagagataatgtacaatatcatctttctatttctggtgacagagttcagagaacaggaagtcaatttggcagcttcagcacagccttgcccacaataagcctcatgcagtaggacagttcctggataaaagcaggctaattctagggtccgaaaaagaaatctcaagaatcacctgataagaaagctgctctgacaaactactgaaataaattatgccctttgatgtatcatgccagctacactcagaagcagagatattttagttatgaaggaacagagtttgttgataaagattgtttaggttctcagagacatagcttgggtcctatggcacccaagaactgtgttrtctagattgtatgctacaccatgttgtggcagatatgtttagttttgagaggcatgttgctcatagatttcctactatcatgttctcattcttcaatcctgatgctgagattagcccagtttagttgatcagtttttcctttcctctatccccacttctttctttctctcttacttttccaataacctatactctctgtaataccttcttacagaaatactgcaca

SEQ ID NO: 739712 - DNA, 575 bp, Homo sapiens
agcacctagaggagagccaggtatatagtagattctcattacacatctcaagaatgaatgagtaaatgaattagtaaagtcacctctttacatcgctaaaactctttatgagcatctcaaaaaataattgattctttattccttgaagggccatagttcctagagggtttggaagcacccaattcccaagttccagatagcaagaatggtaaaatcttttcaaagatatgtcactattactgttaggttctggttacaattctacraactccctgtgggcagagttaatctgaagtgcctttgaaaaaaaaaatgccaattacctcttggtttctactctccccagtaccacgacatccccccatgattaattctcacttcattttccacaccatcaacttcagagccagcactgtcttcaaacaaattactaaaagcaacatgataacctggcagaattgtcttcacttcagtcatctttctctctttgaagttcaatcccctctgctcttatcagattattttagtagattgtatgtgatgttttattggttttgtggctctatttcagtatg

SEQ ID NO: 739713 - DNA, 526 bp, Homo sapiens
caaaaattcagaaaagagatccctcagcatgggctgggttaatgaaaaatcttcatgaagcctgcgttaggagttagcattaggacgcgtagaaacgttggaacagagccgtttaaggaaacaatactttgaaagattgaggtaatggtgtttaatagatggcttagaagcaactgagctggaagactaggcaacctgcaaaaacaaaacaaaamaaaaaaaaacaacattcccgtgatggtgcaaagatggagttctgagaccttaattagagtagcagccttgagaaggcagaagaaaggcccaaaccaagttcccatcatatttattagaggcagtagtaaccaaatactagttttatttcccactggcctctttgttgttagccaaactcacaaagcagatctcatttcagggtctcatgacatatagtttccttggactgaaaaacattttgactagatattcctttgcctttctccctcattatattcataacttgacactttatctaagaggccttctc

SEQ ID NO: 739714 - DNA, 656 bp, Homo sapiens
aggtgctttgagcaagaatcagcaatggaagacaattaactcattcttgccaccgggtcatgtttacccttccattgtcaaggaaaatgacctgtttgcttaacctgaggtccctgggttaagcctgttagtaaaagatgcctacttgaagatcagaaatatgtgagaattgttagtcttgggtgtcttaaaagattcctgccttcaartctctataagttttcaatggcattgagaaatttaaacttaggaaagtgtaactatttattcaagctgacaaacatgtattctttataatagggctgcaaacaaacctttatttcatggttttatttcattggctttaagacagaattggttacatacttgtactcttaaaaccacagtcctattgttgttttcagccaacacagatgtcacctgtgcaaattgcccaactttttccttaccttttcattaacttgtttttttacctgctattaaggagaaggcaacagagccgagtggttgagaattcaagttctggagacagactgactgaaatcacagcccgacagggcggtgttaggcaagctctttaatctctctgtactgcggttgcttcatttgtaatgatagtaatattttatcttacagggtcttcagaagaacaaatg

SEQ ID NO: 739715 - DNA, 505 bp, Homo sapiens
aggtgtctaaaactagaaattcaagtcaaaaaccttgttgatgctgtgaatacagaggtaatcagaacgagggaactaaaagccaggctttgggctgagcactctacccatgtatttcttttaatctgtacaattaccctatcacttagatcatattattatgcactgtcctcttttagcctctgtattagtccattctcacactgctacaaaaaaaaatacctgagactgggtaatttatttcaaaaaaaaaaaaaagagagatgtaattggttcactgttctgcaggctgtacaggaagcatgatgctgacatcttttcagcttctgggttggcctcaggawagttacaatcatggcagaaggcaaagtgggagtgagccatctcacatggtggaagcaggagcaagagagagtgacagggggccaggcacagtggctcacacctgtaatcccaatactttggccggccaagggggacagatttcaagaccagcctggccaac

SEQ ID NO: 739716 - DNA, 633 bp, Homo sapiens
gatgtaccattagtatgtgtcgattaaaaataacaataaaatcaaaaagcaaaaataagtacatggtaagtgtggtgactactagttattattacttatttttattgtaatctataatgtatgtcaaatttccaagataccgttttgtccttaaatgaaaactactgctatagccttaatggaaaaacgtatctttggttatgtggtcattaattcattttttcagggaaaaaacccttaaaactattcatttacaagtgtacataaaacacacatgatgggacagtataaaatgcagatgaaagaagagaaataaggacagtggcataaagtgacaaccctatttaagttaacatgctgagttttttctttaragtacttagcatcattcagaattatacgtttatttgcatgatcacttattcaatgcttcattttactagtccaaaattatcaggggataggaagcattttatttttttattttttattttttttcagcttctaactgatttctttttttttttattatactttaagttttagggtacatgtgcacattgtgcaggttagttacttatgtatacctgtgccatgctggtgcgctgcacccactaactcgtcgtctagcat

SEQ ID NO: 739717 - DNA, 633 bp, Homo sapiens
gatgtaccattagtatgtgtcgattaaaaataacaataaaatcaaaaagcaaaaataagtacatggtaagtgtggtgactactagttattattacttatttttattgtaatctataatgtatgtcaaatttccaagataccgttttgtccttaaatgaaaactactgctatagccttaatggaaaaacgtatctttggttatgtggtcattaattcattttttcagggaaaaaacccttaaaactattcatttacaagtgtacataaaacacacatgatgggacagtataaaatgcagatgaaagaagagaaataaggacagtggcataaagtgacaaccctatttaagttaacatgctgagttttttctttagwgtacttagcatcattcagaattatacgtttatttgcatgatcacttattcaatgcttcattttactagtccaaaattatcaggggataggaagcattttatttttttattttttattttttttcagcttctaactgatttctttttttttttattatactttaagttttagggtacatgtgcacattgtgcaggttagttacttatgtatacctgtgccatgctggtgcgctgcacccactaactcgtcgtctagcat

SEQ ID NO: 739718 - DNA, 597 bp, Homo sapiens
atgctggttgctcatccacagctccaggctgcaggctccaggccttggtcaacatagaatcagagcaaaggcagaaagctggatgatcctgattgctggtggcattaagtataactggatacttccatcctcaactgtggaatagcaccatggactccctgggctggggtgcctttcacagagtccctacacagtctggctcttgggaatgtgtctttatgcttctaaggcagaagcgatactacggmgtcaggtctggccgtgggagcctttctgtctcgtagaggtgaccctgcacaccgcactcttaacaggctccatgaaaacaacaccttgaccatgtgcctgcagatctgcctgctactccccagcccctcccacttcattcccagccatattcttcctttgctctgctcaagaatgtaagctccttaaaggcagggacacgtgcatcttttcaccttcaagtccccagaacctaccactgtgtccggcccacagcaggggctcagtaattacatactgactgcacagagccctgaagtgtatccatatatcactcggtccagcagtcgggtgcctgagggaaactccctg

SEQ ID NO: 739719 - DNA, 497 bp, Homo sapiens
gaagatgccgaggcaaggctgccagcttgaacagtctagtttcctgaaccccagcttccagtggaatgtcctcaacaggagcaggcggtggaaacctcctgcggtaaatcagcagtttcctcaggaggatgctggatcggtcaggcgggtcctccctggtgcctcagataccttggggttggacaatacagtcttctgtaccaagcrtatcagcattcacctccttgcctcacatgccagtgggctcaatcacaaccctgcctgtgaatctgtaattgactcctcagcatttggagaaggcaaagctccaggtcccccttttcctcaaactcttggcatagccaacgtggccacccgcctctcttccatccagctgggccagtctgagaaggagagacctgaggaggccagggagctggactcatctgatagggatattaggtatgttggcaatgtttttggttcatttagagcagtagaatgtatataccataatt

SEQ ID NO: 739720 - DNA, 470 bp, Homo sapiens
accttaactcattggatggcttagaacaagcttccagggccttgatttctccatccataaaatgaggagactcctttctgtccttccttaaattccagttgttttagaaatgaaagacaagtaaagtgcccttatttttataagaaattttgtttaaccctcatcttcattgyccacagtgtttatactttagcaaaaataatatttttctagggagcaccataattttcttctatccagattatctcaattcagttcaatgtatattttttgagtcctttctgtatgccagatactattctaggtacaggagataaaacagtgcccatcatagagtttccattctggtcggggagatagtgaaattattaaaagaatagtatgtaggaaggtggtaaaagctatggagaaaaagaaaccagggaaaggagatgaggagtgctgagtcggatggtcagggtaggcctcac

SEQ ID NO: 739721 - DNA, 483 bp, Homo sapiens
tgaatgcataaaaggttcttggataaaagctgatggtcagggacatcttgaggctaacagaagagacaccatcaatcgtcttttatgagaaatctgcatttcttatgtagctcttggaattagaagtgaataatacctctgaaaatgaaaggctgtctcttccagctctgcttttttttttttttttttttttttttttgaggcgtggtctcactctgtcaccaggckggagtgcagcagtacacccttgaatcattgcaacctctgcctcctgggttcaaacggctctcctttccttagcccccaattagatgagactaaaagtgcacacaaacatgcccagctaatttctatatttttagtagagatggggtttcaccattttggccatgatctcttgacttcttgatccccaaacatgggccccccaaagtgctgggattacaggtgtgagtcaccatgcccagcatcagtgaggctttt

SEQ ID NO: 739722 - DNA, 634 bp, Homo sapiens
acacgctttttattttataatcgatgtctattaggacctcacttcctgtcaaggcgatgaagtcttacaaagatccatttgcactgaactctccacgtgcaggaagttactgccttgctctctggacctcctgtctcttttctctgaatcttcattccctcctgttcctctgtctctgaccctgtctccatgtctgtctcttccactgcctggctccttcctcttcttcacttgcttctgacagtcagggtttctgcctygccccgtctttctctctgtccctccacgtctttgtttttctcatctccgcttctctctccctccgtgtccaggtctcttcctgtccatccatctctcagcctcagcctagctcggtcctccactctgattctctcccatccatctccctgggcctgacagaggctctttgtcgagtctcttcctctgtctgcccccatccgttgttttctctgtatgtcgctggctgcgcatgtgccactgtttctatcattttctctccatctagccattgatctctgattcccctgctccgcttctctgtctctcatccctgtcaccacctccctctctgtcactttcttattctctccctgcctctttgcacgctctttgc

SEQ ID NO: 739723 - DNA, 589 bp, Homo sapiens
cctcttagcacaaaaatttagatccattcctttttcttcccatttcccttttccctctcccagccgcccccaaactcaggcacacaaaagcgaccctgatagatgtagagtgatattacgattgattggcctgccactgatggtgcgtatgtgttttgtcgttagtggggagggtgaaaggggggccgggtaatagaatgatttggcctacaagacagctcctccttgatgaacartcagacacaaatgtcaataacaattggattgtctgtaagctacagtcacttagggctcccggagcctgtccacagagcctggattgaaaccctcagccttgtgaactccaaatcaggtttggcattgggaatgaaatgccatcagcagtaatagtattatgaggctgttggtcgaagaagtgcaaagggctctgaataatgcttgggctcccatgtgtcacagggtagagaaaggctgcatggaagagaggagatgagagggaaaacaaggtaggggctggtgagctctgaggggcacctatagtgctacaggcatggagttggagcttgcttgctcttatgtttggagattg

SEQ ID NO: 739724 - DNA, 589 bp, Homo sapiens
cctcttagcacaaaaatttagatccattcctttttcttcccatttcccttttccctctcccagccgcccccaaactcaggcacacaaaagcgaccctgatagatgtagagtgatattacgattgattggcctgccactgatggtgcgtatgtgttttgtcgttagtggggagggtgaaaggggggccgggtaatagaatgatttggcctacaagacagctcctccttgatgaacaatcagacacaaatgtcaataacaattggattgtctgtaagctacagtcacttagggctcccggagcctgtccacagagcctggattgaaamcctcagccttgtgaactccaaatcaggtttggcattgggaatgaaatgccatcagcagtaatagtattatgaggctgttggtcgaagaagtgcaaagggctctgaataatgcttgggctcccatgtgtcacagggtagagaaaggctgcatggaagagaggagatgagagggaaaacaaggtaggggctggtgagctctgaggggcacctatagtgctacaggcatggagttggagcttgcttgctcttatgtttggagattg

SEQ ID NO: 739725 - DNA, 535 bp, Homo sapiens
attgccatatttaattaagatggagaaggcctctggtatcttagagttttcaaccatgaagcttattaacaaaagtgctgctgagcactttcttaaccagaaaaacgatggctgagatccacccatttttgttaagagatttaagatcctctaaatgaagtcttcaagsaaatctatgggatatcttcaaacacatcactcgctcctcaccctagcataagtcagtctcagatgagttataatcgatatttaaacaactacaaaggtgaaggctgaccctgagcgtccttcccatccttccccacagtccacttgagatgttatctgtgaggagtaaacaggcccgtccccaaagtcttggccaccctggtgtgatatcaaacagctgctcagcggccctggaagccggctcccatatttctcctgctacacttacagcgagttgagcttcctggcggggcttctctttgaagttcaagagggccctgtgtatggtatgtgtgggaaggaaaactaagattcatctctcatggag

SEQ ID NO: 739726 - DNA, 655 bp, Homo sapiens
tgtgtaattaatgagtatcttgtggggagatatttgaaactatgtgaacatcagaactaggacttttaacccagacattctgactacagaatccacaaacatctgctacacttaccatttccctatatagtgggtgtgtgttctggatttaccaggcactatgctagttgagttaaaagtgttattgcttttaactctcacggtaattttcagagatatgggtgtcccatctctcacactgagtttcccatctatgtcatagaaacagattcaggatatggaatgatagacaatggaggcttggaaggctgggggagcaggagggttgtggatgatgagaaattacttaatgagtataatatacgttatttgggtgatgaataccctggaagctctgacttcactactacacaatatagccatgtaacaaaattacactagaatccaataaatggatactgatagaaacttaaaaactccaagtatattcaggatccaaatragttaatcagctcttgctaaaagaatgagaaaggtgatctccagttccatcctctggtcgtagaacccaaactaggagctgaaatggctctcacagattcccaaggagcagatgtccctgtaagtattatacaaacaaaactcctgccagaga

SEQ ID NO: 739727 - DNA, 616 bp, Homo sapiens
ttaaaatggactaatacccatgtaaccagcacccatttcaaggcactcagcacaaccagcacctatgaggttccatttttcaacagagtatcagaacaaactctcctgtgatgtgggaactgtcactggggttgttgcccaaatatttccagctygctgcctcctgttcttaaggtaggattgcacttctctgctgcctaccaggtgcagccactgacatgctctggcctatataagcacaagtgatgagtatcacttctccatggtccctattatgctgtggtgattgtggaatctgtgatgcaatggagcttccatcagcttcagtcccaagtgactctgtggagcagagcagccctgcataccacaaagggcatgcagcatgaagacaaatacatcttttgtagttaagccaatgaaattaagggcttgttacttcagcataacacaacccaacccaacctgatgataatcaaggtgacagctcggtaaagatctgaagagataaaagagtgaatcttctggaaacctaggggaagaacgacccagagacagcaaacacaaaggtcctaaaacaggaatgtgtatggtgtatttgagaagcagcatttgctgt

SEQ ID NO: 739728 - DNA, 667 bp, Homo sapiens
tcacggagctttaaggcaactaaagctgtgagttaggtagagcaattgaacatctttagtgggcaaattagaaaggaaaaaaggtagaggaaagaagatggccatttttttttttaatccaaacatattttccatccttacagaggtaatccatgggcaaaggaagaattatccccttctaaaaccctcaaatgctggctcatagtatataactttgaatgtatacatgggtgtggggttaaaaaaaaaaacagacaaagcattgtatctttgggtggctaacacaacccagccccagtggcttgtgcttatgaggcatatttcttaggaggctggctgagcttcatccatgactatacaggaggccaggtgctaaaacctagataggtacagtattggatctaaaggcaagtggaggttgggcgcagtgactcaygtctgtaatcctagcactttgggaggccaaggtgggtggattgcctgaggtcaggggttcgagcccagcctggccaacatggtgaaaccccgtctctactaaaaatacaaaaattagccgggcattgtggtgcatgcctgtagtcacagccacttgggagactgaggcaggagaatcgctggaacccaggaggcagaggttgcagtgagccgagatcatgccactgcactc

SEQ ID NO: 739729 - DNA, 569 bp, Homo sapiens
acaacttaaacgtcactggttaaaacaattatagtattgccattctgacatactacaaacttaatgtaacctttaaaaagaatgagtcacctctctatgtattatataaaatgatctgcaagacgcatagagtaaaaaaagcaaggtgcaggacagcgtgtaragtatactaacattcgataaaatatcttgtgaaattttcccagatgcatgtattttccgttaaaatacattgtttaaaagtcacacagcaacaacaacagacattttaaacaatcattacccaaattgttctagattccttaaataatcctcttttgaatttgtattttatctgatttccatcgtctagcctctattactagctaataaaaacctacaattttcttggtattttccacctttataaatatgaagaattctttttaacagaaatcccttcctaatttctcagctggataggaagaagaggcatccctctggttggttttgtattcttccacacatctctcatctggagatgagaagcaagaaaggctgtcactagggtcaatgtactgaggtccgtt

SEQ ID NO: 739730 - DNA, 569 bp, Homo sapiens
acaacttaaacgtcactggttaaaacaattatagtattgccattctgacatactacaaacttaatgtaacctttaaaaagaatgagtcacctctctatgtattatataaaatgatctgcaagacgcatagagtaaaaaaagcaaggtgcaggacagcgtgtagagtatactaacattcgataaaatatcttgtgaaattttcccagatgcatgtattttccgttaaaatacattgtttaaaagtcacacagcaacaacaacagacattttaaacaatcattacccaaattgttctarattccttaaataatcctcttttgaatttgtattttatctgatttccatcgtctagcctctattactagctaataaaaacctacaattttcttggtattttccacctttataaatatgaagaattctttttaacagaaatcccttcctaatttctcagctggataggaagaagaggcatccctctggttggttttgtattcttccacacatctctcatctggagatgagaagcaagaaaggctgtcactagggtcaatgtactgaggtccgtt

SEQ ID NO: 739731 - DNA, 606 bp, Homo sapiens
agcccagccccagaagaaaaaggaatcaggaaagctgctgtaactgggaatgggaatgggatgcttcagtctgtgggggccactctccccagcatgggagcatctctaatatcagctccaggggaagacccttatgctgcctaacgctgtgagtagctacctaccctgaacacctatccagtcccagatgctgcactaaatactccaaaaacaccatctcatttaatacctcaatattcctaggaggtgagtgtctttcttatcccattttaccattgaggagccyccagggatggagcaacttgtgcaaggtcacacaactgctcccagaaaggccagctccatctctctagctcctaatgcctctcccttctgcaggggccccgcaggcaagctcgggagcacccagggaaccactgtcccagcgtcaatatccacactgcaacttacactccctctttggtgactttcaacaagagtttaagatggatatttacagaatcacattccatcttggcttctaacttatgtcatttggcctgatacaaggctcttcactctcttagctgtaattttctcaactttaaaaataaagctggatgtaag

SEQ ID NO: 739732 - DNA, 606 bp, Homo sapiens
agcccagccccagaagaaaaaggaatcaggaaagctgctgtaactgggaatgggaatgggatgcttcagtctgtgggggccactctccccagcatgggagcatctctaatatcagctccaggggaagacccttatgctgcctaacgctgtgagtagctacctaccctgaacacctatccagtcccagatgctgcactaaatactccaaaaacaccatctcatttaatacctcaatattcctaggaggtgagtgtctttcttatcccattttaccattgaggagcctccagggatggagcaacttgtgcaaggtcacacaactgctcccagaaaggccagctccatctctctagctcctaatgcctctcccttctgcaggggccccgcaggcaagctcgggagcacccagggaaccactgtcccagcgtcaatatccacactgcracttacactccctctttggtgactttcaacaagagtttaagatggatatttacagaatcacattccatcttggcttctaacttatgtcatttggcctgatacaaggctcttcactctcttagctgtaattttctcaactttaaaaataaagctggatgtaag

SEQ ID NO: 739733 - DNA, 608 bp, Homo sapiens
tggtgtctccttttctgtttcatggtctctgatatgctgtggatctaaatgttctcaccaggttgtaggctctctgggaggagagacctcagcctagaacctgtcttttttttttttttttttttgagacagagtctcactctgtcgcccaggctggagtgcagtggcgtgatcccagctcactgcaacctccgcctcctgggttcaagtgattctcctgtctcatcctccagagtagctgggattacaggcacccaccaccacacccagcctcccaaagtgctgagattacaggcatgaaccaccgtgcccaccacagggatctagcctagagctgaggatggacccaggtcacattaggtgcctgggaggtaatcggctggtagttacctgggaggcatgggcaccacctcagctccagcatgggtctcatgtggtctcaaggctcctctgccccrcagcgtccatgtatagatggccctgcaactcccaagtctctccaggccccagccagggaatggggtacaggtgccagggcctctctggggccatctgacctcagtccatgtagtcctttccttctctttccagaagtgaaaagcccacac

SEQ ID NO: 739734 - DNA, 627 bp, Homo sapiens
ttcagggttagtgcctgagagtgagggttaacactgatatggtttgactgtgtccccacccaaatcccatcttgaattgtagctcccacaattcccatgtgtcatgggagggacccagtgggaggtgtttgaatcatggggacagatctttcccatgctgctcttgtgttagtgaataagtctcatgatctgatggttttatcaggcagagtttccctgcagaagctttctcttgcctgccgccgtgtgagatgtgcttttgctctttcttcatcttccaccatgattgtgaggcctccccagccatatggaactgtgagtcaattaaacctctttcctttrtaaattacccagtcttgggtatgtctttatcagcagcatgagaacagactaatacagacacatttactttaattttacctcccaggtgcctcactctagtcctgaccctgttaccaccaaaatatccccactgaggaacttctagtgaatatatttcaagaagaagggaactaaccccaggaagaaggtatgaggtataaaaagaaatgagttaatgaaatacaaaatgtctagacaagtgtagatattttgaatgtacaaaaagtaagaaatgtttaatatttg

SEQ ID NO: 739735 - DNA, 627 bp, Homo sapiens
ttcagggttagtgcctgagagtgagggttaacactgatatggtttgactgtgtccccacccaaatcccatcttgaattgtagctcccacaattcccatgtgtcatgggagggacccagtgggaggtgtttgaatcatggggacagatctttcccatgctgctcttgtgttagtgaataagtctcatgatctgatggttttatcaggcagagtttccctgcagaagctttctcttgcctgccgccgtgtgagatgtgcttttgctctttcttcatcttccaccatgattgtgaggcctccccagccatatggaactgtgagtcaattaaacctctttcctttataaattacccagtcttgggtatgtctttatcagcagcatgagaacagactaatacagacacatttactttaattytacctcccaggtgcctcactctagtcctgaccctgttaccaccaaaatatccccactgaggaacttctagtgaatatatttcaagaagaagggaactaaccccaggaagaaggtatgaggtataaaaagaaatgagttaatgaaatacaaaatgtctagacaagtgtagatattttgaatgtacaaaaagtaagaaatgtttaatatttg

SEQ ID NO: 739736 - DNA, 584 bp, Homo sapiens
attgctgtaattttgaagtgatgagcagaaatgctatttttagaattctgcaactgtaatgtgatattaaaatatctatgattattattagtgacaaagtcataggcactgctaatactacttttgagtgtcacattcatgattgaaggaatgctacatttcaggttagtgaaaacaaagaaatgttttttcaccatccaaattaataaatcccaaaatgtctgtggatccccagataggaatccctggtctaatggatccacattttatctcagtaataccaaaaaaaawttttttttctaagacagggtctcaatttgtcacctaagtcagagtgcagtggtgcaaacatggctctttgcaacctctacctcccaggctcaaggtatcctcctgcctcagcctcttgagtagcagagactataggtgcatgccaccacgcctagctaatttttgtatttttttgtagagacggggtatcaccatgttgcccaggctggtctcgatctcctgggctcaagcaatctgcctgcctcagcctcccaaagtgttgggattatagacctgagccactgtgtccagcc

SEQ ID NO: 739737 - DNA, 602 bp, Homo sapiens
agtggaaatgggctgcctcttgtcttcggtttcagaaaccagtgcactaaacacgtgggatgaagcatcaatggaaagaaaatacaccttttcccataaccacacaagagaactcctctcccacctggcagtacacagggctccaccgagttactttcttgtttatcctgatccatttcagtgtgtctgataaaatgattatttcttaaatatatcactgtcctttggctggtttctatggaaaaaaaaagactcacrcagagcacactggaaggccacttttgaggatgactacgcaatcttagtctgaccacaggctgcttgaacactgtcttattctaaaccatgaacaagactttggcccaagagaacaagaatgtgaagttaaccacgatccatctccaagcaggcaactagcccaccctgggctctgtctcctgcgtgactgcccaggtggatagtactcctggatgtgcttacaaacgccttcaatcacactggcaaagactgagtccagatgaacaaatttaggtgggatgaactttcacagggtgggtcctgggctcttctcacagggaaccagaggacctgtcctgtttgaa

SEQ ID NO: 739738 - DNA, 633 bp, Homo sapiens
acaaaaatgaaacgatctattttatttttactagatgtaaaataagcatgcaggtaagcactgtactctaaaaacaaggaattaataactggagtggaacatcataagctagcaaaccacagtctctgcagtttcacaaaggaaatgacaaagaggcagatgcatcagagaggacagtgtttaatttcaagaaagtttcactagaatagagatgtcggttaaagattcagacagcagcaatgtttaggcaacagggctgcaatgatgtttatttctctgtgaggcagaaataacatcaagcccaagatggcaggagcatgctttgcaatgaaagcaaaccgaaagtccatyctatcgcaacatgcagcaagccaccgatccccaaggtaggcaacacactgcttctgtgcatctgacattcagaggtgccgctccccaggctcctccatacacatccctctatttacatctcgttaaaaatacaaagtgggatgaaagcaataaaaacacatacaggattttagcaaaatggaatttgaaatgagaataaattactttgaattttaccaaagtaatggcaacttgttccttaagagaaagggggatgggctaatttatacattggctcaatga

SEQ ID NO: 739739 - DNA, 543 bp, Homo sapiens
agtcagcaccctgtgtctagctcagggtttgtgaatgcaccaatcaacactctgtatctagctaatttggtggggacctggagaaccattgtgtctagctcagggattgtaaacgcaccaatcagctccctgtcaaaacagaccactgggttctaccaatcagcaggatgtgggtggggccagataagagaatacaagcaggctgcgcgagccagcagtggcaaccgtcgggtccccttccacactgtggaagctttgttctttckctctttgcaacaaatcttgctgctgctcactctttgggtccacagtgcctttatgagctgtaacactcactgcaaaggtctgcaccttcactcctgaagccagcgagaccacgaacccaccagaaggaagaaactccgaacacatccgaacatcagaatgaacaaactccggacacaccgcctttaagaactgtaacactcactgtgagggtccacggcttcattcttgaagtcagtgagaccaagaacccaccagttccggacacaattgcccctg

SEQ ID NO: 739740 - DNA, 489 bp, Homo sapiens
aaatagccaagaatgtcactcaagttgacaccaccaggaacaaaaatcagaggcattgctttctggccctagtagaaaacaattccaaacaaaggaaaaagacacactgcaatacagcagggatggatggatgggccacagcctggaggtgagagtgctggagacacctgccctgatgccacagcactgaccactctaagccaggcagagccacagacacgcttctgggggaatgccttccaagccatttctgcgggactccagcgtttataaggaaagcctcaccttttcaactgcaaagacctggagagacaggacacataatcaaaaggagcacataaaagggagagacacatgtgctaaccatartgtgttatttctacttagagaaaaagaaaaaagagtccacattctagagtaaatgcctcatgattctgtttcaagatgatagtaaaaagctgtttggatccgacacaagcacgttaaggt

SEQ ID NO: 739741 - DNA, 570 bp, Homo sapiens
agccttcatctcttgcctgggctcagcttcctcaccggcccagctgtaccagtctctcccatccaggccaccctttaccctgctaccaacccattatagtcctaaaaaagtcgtatttcatcccatcccattctcttgcttaaaaacttctgttggctcctgcggcttgcagataaagtccaaagtctgcagcatcatgttctaaccaccttaccagggcctgatatacgccactccctcctcaggaaacttatgctcctgttgctctgaaaccatcgctccgtggacttgcaggccctttcgtgacacaagcattctgttcyctatatctagagtggcttccctcagacagttttcattggcaaactcattcaaggcccaggtctaacatcatgtcccttggaaggccttcctggtcacttccagatagagtcagcactttattcaaatctcagtgacagcatatatcatgatgtattgtggtttatctttctttgggtcttatcttctcctagactatgaacactgtgaaggcaaattttcagatctttattgctatgaatttctgtc

SEQ ID NO: 739742 - DNA, 621 bp, Homo sapiens
tagccctgaaggcttgttagaaatgcaaattcttagttcttgccccagatcctctgaatcagaatttctgtgccagggcccaggaaacgagctttccagatgattctgatgagcactcaagtttgagaaccaattctctcttcagtttacagataaaaaacaggtgcaaagacttgcccaaagycacacagctggggagagccactgcagggctagaacttggctttgcttccacccacaccctctaagagccatctctttgttttcattacattgtaaaactattccaatgacagaaatctcaccttttgaagttcctcccttacccaggccctttactccaggcctaaaaataaacgacacgtgctctgaggttacaccgggcgaagcctccctcttactcccaggctcatgtgccgtatcacaggctccacggaggctgcatttaggagaatttggagtcagcgaggaccacacagtgtctgcagggacaggtccatgtttggcccaagaaccagggcataccaggagaaggctggttgctatcattcctgggggcaagctgctagtctctcagctggttcctgctgatggatctgaacactcagtttgggttgccac

SEQ ID NO: 739743 - DNA, 627 bp, Homo sapiens
atcaccattttacagataaacaaggctcgggggagggagggttaaacaactagtcccaatggtagccctgggttttcaaggtaggtctgtctaactccaaatcctttgctataagtcggtgattttcaaactttggtgtcaggactcctttatactcttaaaaattattggagattcctaaaagcttttggaatgcgggttatatctgttaatatttattatattgggaattaaaactgaggaaaacttaaaagtattatttcacataaaatagcaataatgagaacacatggacacagggaggggaacatcacacactggggcctgtcggtgggtgggggttaggggagggatarcattaagagaaacagctaatgtaggtgacaggttgatgggtgcagcaaaccaccatggcacatgtatacctatgtaacaaaactgcatgttgtgcacacgtaccccagaacttaaagtattataaaaaatagcaataatcaacccataacatattaacatatataacttttagagtaaaaattaagtatattttcccaaagaaaaaagtggcatttttaattttttttacatattgcaatattctttattgtctgccttaatagaaaacag

SEQ ID NO: 739744 - DNA, 597 bp, Homo sapiens
attcttttgcacaagtcatctttttttacatccatgtagcattctgttccatactttgtttaaccagctttttgtttttgtttttttgagatggagtctcactctgttgcccaggctgaagtgcagtggtgtgatctcagctcactgcaacctctgcctcctgggttcaagtgattctcctgccttagtctcccaagtagctgggactacagtcgtgtgccaccatgcctgactaatttattttgtattttagtagagacggggtttcaccatattaggcaggatggtctcgatctcctgacctcgtgatccacccacctyggcctctcaatgtgctgggattacaggtgtgagccaccgcgcctggccctaaccagttttatactctattctatgacttgggttaccactaaactttcactattaaaaccaatgatacaatacatattcttgtatataaccactccctacatatctgcacatatttgtagtctgaattcctaaaagtagaattgcatgatcaaatactgattgcctaattgctgtccctggaggctgagtggatgtgcatgacctccatccactggttgagaatgt

SEQ ID NO: 739745 - DNA, 613 bp, Homo sapiens
tgaactgcactgcacagtgcttggcaagggaacacaggggagctgctgccattatcattgtcaccattaccctcaccaccactatttggacccttggtgatggctccaacctcaggcctgccatttactgatgtagaagtgactggraagtgctggcttcctttcctctttcccaggatagaaagctgacctggggctcctccacctggcctggctccatcattcagacagtcttcttccagggcagcaaatgacctcagatgtttgccctgggccacccaaggggaattttgggctttctttgtgttccatccatttctcagtcttttcaattaagtgaaatcaagtaaaaacacaaatcaagtgatccctgaagggagatgagatctcaccagggagtactagagaactacaaccaaagtagcttggcatgttgcaggtggtaaatggaggttcagagtgtgaaagtgaatatataaccccaaattaatgattttatggtagaccaggaccccctgggccctgattctttgagcagagcttcatctttgcaaccatggctcccagccccactgtttcttcaggtggcagtgtcaaggggaaaggagccctg

SEQ ID NO: 739746 - DNA, 613 bp, Homo sapiens
tgaactgcactgcacagtgcttggcaagggaacacaggggagctgctgccattatcattgtcaccattaccctcaccaccactatttggacccttggtgatggctccaacctcaggcctgccatttactgatgtagaagtgactggaaagtgctggcttcctttcctcyttcccaggatagaaagctgacctggggctcctccacctggcctggctccatcattcagacagtcttcttccagggcagcaaatgacctcagatgtttgccctgggccacccaaggggaattttgggctttctttgtgttccatccatttctcagtcttttcaattaagtgaaatcaagtaaaaacacaaatcaagtgatccctgaagggagatgagatctcaccagggagtactagagaactacaaccaaagtagcttggcatgttgcaggtggtaaatggaggttcagagtgtgaaagtgaatatataaccccaaattaatgattttatggtagaccaggaccccctgggccctgattctttgagcagagcttcatctttgcaaccatggctcccagccccactgtttcttcaggtggcagtgtcaaggggaaaggagccctg

SEQ ID NO: 739747 - DNA, 613 bp, Homo sapiens
tgaactgcactgcacagtgcttggcaagggaacacaggggagctgctgccattatcattgtcaccattaccctcaccaccactatttggacccttggtgatggctccaacctcaggcctgccatttactgatgtagaagtgactggaaagtgctggcttcctttcctctttcccaggatagaaagctgacctggggctcctccacctggcctggctccatcattcagacagtcttcttccagggcagcaaatgacctcagatgtttgccctgggccacccaaggggaattttgggctttctttgtgttccatccatttctcagtcttttcaattaagtgaaatcaagtaaaaacacaaatcaagtgatccctgaagggagatgagatctcaccagggagtmctagagaactacaaccaaagtagcttggcatgttgcaggtggtaaatggaggttcagagtgtgaaagtgaatatataaccccaaattaatgattttatggtagaccaggaccccctgggccctgattctttgagcagagcttcatctttgcaaccatggctcccagccccactgtttcttcaggtggcagtgtcaaggggaaaggagccctg

SEQ ID NO: 739748 - DNA, 613 bp, Homo sapiens
tgaactgcactgcacagtgcttggcaagggaacacaggggagctgctgccattatcattgtcaccattaccctcaccaccactatttggacccttggtgatggctccaacctcaggcctgccatttactgatgtagaagtgactggaaagtgctggcttcctttcctctttcccaggatagaaagctgacctggggctcctccacctggcctggctccatcattcagacagtcttcttccagggcagcaaatgacctcagatgtttgccctgggccacccaaggggaattttgggctttctttgtgttccatccatttctcagtcttttcaattaagtgaaatcaagtaaaaacacaaatcaagtgatccctgaagggagatgagatctcaccagggagtactagagaactacaaccaaagtagcttrgcatgttgcaggtggtaaatggaggttcagagtgtgaaagtgaatatataaccccaaattaatgattttatggtagaccaggaccccctgggccctgattctttgagcagagcttcatctttgcaaccatggctcccagccccactgtttcttcaggtggcagtgtcaaggggaaaggagccctg

SEQ ID NO: 739749 - DNA, 548 bp, Homo sapiens
gttttggtaaccattactttcagttattttgtgatcccccccacaggggaagagtgggtccttttcttcaactgcagcatgaagcaggctgtacgcagccccatcacctacctcagctacagagcagatccgatggccttaggggaccaaaagctggggagcggctgggtgttgtacctttgctttctcctttctgctgcaggtgawccctgtaccacttaagcctgatgtccatggctgttctcagcaacttccaagcattactttcagttattttgtgacctttgatgaggcagctacttctttctcctcccagcctcagataagggatgacacaattcagagaatgagagagtcaaattcttgtggtttgggcttaaaaggagaactagatgaagagttaggttatggggtccccatgctctcaggactggggagatgccccagagaagcaagagaggttgggtttagctgggtcctccagaggggactgtgcatcctgcccaggacctggggaaatggtggtaaaaccagaaaccccaggcagg

SEQ ID NO: 739750 - DNA, 553 bp, Homo sapiens
gtcctgcaagatgggttactttaacatctcctcctaaaaacaaaaacaaaataccagttagatttgtgcaactctgacaagcttttaaaggtccactttcatgaattgttttaagtcctcactttattttcttcaataattaaagatcatatgcatatttattggtaaaatacagtttgggtagtcaataaactcaccctggagttcccaaatgacattaaattcaaatctattcaggaaagaatctgggaatacaaccttcccatattcagaggttcaactatgctagattaaggtctactagaagcatctctagtaacccaagtaaaatgctatcacaaacaccaatttytaataagtttattacaagaacataaattgatctgtgcatatgatctttaatttatatcccagatttaaaagttcttgttttggtttgtagatttcactattagctataaaaagaaaaagcaagcattaaatcttaaaagaatgaacacttaaaatgaggctccacaattgaaatacaacactaaacagaagaccaaaatga

SEQ ID NO: 739751 - DNA, 351 bp, Homo sapiens
ccacagtgtagttttaaaataataatgaaccttccagagatcagattgatttaactctgattctggagggagagtatgggaatatgggaagggaggctggatctgtccagcactgagaatggtcagcagctgaggaaactcctttaaaaagcccttctgaccctcttctcccaaccccagtcctagcagtccrggcatcacataggtacgattcctttgtgcatgtcctcagctcttagattagcttccctaaacttttggctgacgacaaaagttctgaagtgtagatctgtccttcttgatttactgatggaaaaattacctttaggttctgcttttgtatcctatctg

SEQ ID NO: 739752 - DNA, 643 bp, Homo sapiens
gtttgaggccaggcgcggtggctcacacctgtaatcccagaactttcagaggctgaggcaggcagatcacctgagttcaggagttcgagaccagcctggccaacattgtgaaatcctatctctactaaaaatacaaaaattagctgggtgtgttgrtgcgtgcctgtaggcctagctactcaggaggctgaggcaggagaatcacttgaacctaggaggcagagattgcaatgagctgagattgcaccactgtactccagcctgggcgatttccacttcttggctattatgaataatgctactatgaacattcatgtacaggtttttgtgtagactttcatttttcttgtagctctgtgaggagatggatgcagagcatccatgtataataatttggcctcgtccctggttcctggggagagactctaaatccttgtaatatctgaagtaataggagtatctttgtttttcatgagactctcagatcacacctgagtttacactaatgaggtgatggagcaagattctgtctcaaacataaacaaacaaacaaaaaggaaaaaaaaaacagtatgtttgagtcaacttcaaatctccatatgttctggattaaagtcaaggtggattatcctgagattgccac

SEQ ID NO: 739753 - DNA, 618 bp, Homo sapiens
tggtgctgggataactggccagccatatgcagaggattgaaactggaccccaacttttcaccatatacaaaaattaactcaagagagattaaagacttaaatgtcaaacccaaaacgataaaaatccaagaaggaaacrtaggaaatactattctggacattagcccttccaaagacttcatgacaaggactccaaaagcaattacaacaaaaacaaaaattgatgtgggacttaattaaactaaaaagcatcggtacatcaaaagaaactatcaacagagtaaacacacaacctgcagaatgagaaaaatatttgcaaacaaatcaacaaccaaaaaccaaacagccccattaaaaaagtgggcaaaggacatgaacagacacttctcaaaagaagacatacaggtgggcaacaaggacaggaataaatgctcaatatcactaatcattagggaaatgcaaatcacaaccacagtgagatactatctcacaccagtcagaatggctattattaaaaagtggaaaataatagattcttgtgaggttgtggaggaaagggaacatgtatacactgctggttagaacgtaaattagttcagccattgtggaaagcagtct

SEQ ID NO: 739754 - DNA, 618 bp, Homo sapiens
tggtgctgggataactggccagccatatgcagaggattgaaactggaccccaacttttcaccatatacaaaaattaactcaagagagattaaagacttaaatgtcaaacccaaaacgataaaaatccaagaaggaaacgtaggaaatactattctggacattagccctkccaaagacttcatgacaaggactccaaaagcaattacaacaaaaacaaaaattgatgtgggacttaattaaactaaaaagcatcggtacatcaaaagaaactatcaacagagtaaacacacaacctgcagaatgagaaaaatatttgcaaacaaatcaacaaccaaaaaccaaacagccccattaaaaaagtgggcaaaggacatgaacagacacttctcaaaagaagacatacaggtgggcaacaaggacaggaataaatgctcaatatcactaatcattagggaaatgcaaatcacaaccacagtgagatactatctcacaccagtcagaatggctattattaaaaagtggaaaataatagattcttgtgaggttgtggaggaaagggaacatgtatacactgctggttagaacgtaaattagttcagccattgtggaaagcagtct

SEQ ID NO: 739755 - DNA, 544 bp, Homo sapiens
aaggtgtgagtagataagaggcaaatggttgcattcttttgaatctttgatcagcctttcacatgtgagaggtgggcagaagaatagtcactttgtttttttttgagatggagtcttgctctgtcgcccaggctggagtgcagtggcgcgatctcggctcactgcaagctccgcctcccgggttcacgccattctcctgcctcagcctcccgagtagctgggactacaggcgcccaccaccgcgcccggctaattttgttttgtatttttagtagagacggggtttcaccgtgttagccaggatggtcttgatctcctgacctcgtgatctgcccgcctyggcctcccaaagtgctgggattacaggcgtgagccaccgcgcccggccagaatagtcacttttgcatttatctgactcagtgaacctgcatttttacataagataaaataaacacagggcaaaggaagcaatcagatatgcatttgtctcagttgagctgagggatgactttgagttctatcctttctcccgtatctatcaatt

SEQ ID NO: 739756 - DNA, 544 bp, Homo sapiens
aaggtgtgagtagataagaggcaaatggttgcattcttttgaatctttgatcagcctttcacatgtgagaggtgggcagaagaatagtcactttgtttttttttgagatggagtcttgctctgtcgcccaggctggagtgcagtggcgcgatctcggctcactgcaagctccgcctcccgggttcacgccattctcctgcctcagcctcccgagtagctgggactacaggcgcccaccaccgcgcccggctaattttgttttgtatttttagtagagacggggtttcaccgtgttagccaggatggtcttgatctcctgacctcgtgatctgcccgcctcggcctcccraagtgctgggattacaggcgtgagccaccgcgcccggccagaatagtcacttttgcatttatctgactcagtgaacctgcatttttacataagataaaataaacacagggcaaaggaagcaatcagatatgcatttgtctcagttgagctgagggatgactttgagttctatcctttctcccgtatctatcaatt

SEQ ID NO: 739757 - DNA, 544 bp, Homo sapiens
aaggtgtgagtagataagaggcaaatggttgcattcttttgaatctttgatcagcctttcacatgtgagaggtgggcagaagaatagtcactttgtttttttttgagatggagtcttgctctgtcgcccaggctggagtgcagtggcgcgatctcggctcactgcaagctccgcctcccgggttcacgccattctcctgcctcagcctcccgagtagctgggactacaggcgcccaccaccgcgcccggctaattttgttttgtatttttagtagagacggggtttcaccgtgttagccaggatggtcttgatctcctgacctcgtgatctgcccgcctcggcctcccaaagtgytgggattacaggcgtgagccaccgcgcccggccagaatagtcacttttgcatttatctgactcagtgaacctgcatttttacataagataaaataaacacagggcaaaggaagcaatcagatatgcatttgtctcagttgagctgagggatgactttgagttctatcctttctcccgtatctatcaatt

SEQ ID NO: 739758 - DNA, 603 bp, Homo sapiens
tttaatcaatgaattcctggttcctgagacattaaagttttaaaatatgtgcctcttaagatgatgaaatatagtaacttgatgtggttactatacacagtactagagggaagaattttccataacacaaatgtttagatttaaattcatgccttgaagccagataaatgaagtataagctataattacaaaacacctagttcttcagtgtttggatttatgaaaattgycatgattgttatctattgtgagttattaatccaagttacttttattacattttaacagttttagctataacataaattccatgggttttcgtttttgttttttgtactaccttaaaaaaacctatcattgttctgtggggttttttttgctcagttatgtgtttgtatcagctttatgcccagacccatactatatgtcttcacatataatatctcagtgttcacagtggtcttccttgggaggtgtttgactctcatttagatgcaaaactgagacccagaaatgtcatcttttttgacttttatgtcacagctggtaagtgaaagagtcagaattcaaattcatgtctcccaactctaaacccaaagctcc

SEQ ID NO: 739759 - DNA, 384 bp, Homo sapiens
accacatcacctgacttcaaattatactacacagctatagtaaccaaaacagcatagaactggcatagaaacagaaacatagaccaatgaaacagaatacaaaacccagaagcacatccatacaatcacagcaaactcattstagaccaagttgcaaagaacttgtattgggaaaaggaacatctcttaaatggtgctgggaaaactggatattcatatgcagaagtatgaaactagatccctatctcttaacatatacaaaaatcaaatcacatagattaaagacttaaatctaagacctcacactatgaaactattacaaagaaacactggggaccaaactccccaggacattggagtaagcaaagatttcttgagtaataa

SEQ ID NO: 739760 - DNA, 693 bp, Homo sapiens
ggagggtcttcaaaaactaaaaataagactactatatgacccattaatcccatttctggatatatacccaaagctactgaaatcagtatgtcaaagggatatctgcactctcatgttcattgcagcattattcacaacrgccaagatcggcaaacaacctaagtgtctatcagtgaatgaatggatacagaaaatgtagtatatatacacaatgcaatactattcagcctttaaaaagggagaaatcctgtcatttgcaaaaacatggatgaatctgaagacattatgttaagtaaaaaaggccaggcacagaaagacaaacactatatgatcccacttgtgtatgaactctaataaagtttaactcatagaaagatagagtagaataatggttaccagagggtggcggggagagggggtgaagagggagagaaaggggagttgttgatcaaacagtccaaagtttcagacagacaggaggaataggttttgagatgtattgcacatcaggatgaccaatgtcaataataatgtattatatatttcaaaataactgagagaataaatttcaaatgtctcaccataaaaaatgataagcaaggtgatagatgttaattaacttgatttgatcatgccacattgcatacatatattaaaacatcatattataccccataaatgtatacaactatg

SEQ ID NO: 739761 - DNA, 621 bp, Homo sapiens
gtattagtactgcaagtccgcagtgtgtctcccctctatgtttcagagccttttatctatcgagcacaatatgaaatccaaaaaaaggtccagaatttttacatctatgttgtaaatttaaactttaaacattacacccttaattatcaatgataattcatgttgaatttatttatggaaatcacaaattataatgatctcttacctcaataataatataaggaccactatatttttttwaaaaaactaagaaagataatagaactttttgaacattgaaagagatgaataactgcacactgtgccatatatggtccacttaatccaaaaatgttaagtgtgaatcaaattctattagagggcacttataaacagcaatgaagccccttggcagtgggtgggactgaaatttggagtcagaagacctgggaacaatgatcactcttttggctccagaatcccaagcaaattaaataacctgagactcaactgtctcctttgtaaaagataagcatggtaaaggaattatataatgcctgtaaaaggtgtctgacagaatgcctgagacaaagcaggttctcaattccttgcttaatagaaacaggtacatcactgttgctt

SEQ ID NO: 739762 - DNA, 614 bp, Homo sapiens
gcatggtggcgagtgcctgtaatcccagctactccggaggctgagacaggagaatcgcttgaacccaagaggtggaggttgcagtgagcccagaccgcgccactgcagtccagcctgggcgacagagccagactcctcaaaaaaaaaaaagtaaaaatctcaataagttttatatttactccattgaaaacatttttctatattgcgctaaataaactattatttaatttcaccagtttctttttacttttttaatgtgggtactacaaaatttaaattcacctgagyggctcacactgtatttgtattagacaacactaatctgcataattaataaaaaataaacaacaaatgctgagcacttgcagggtgccaggcactgtgctagatactttacataatactcaaatcaatgctgcaattaatggtaaagttttaccagacgcctacataacagattggctccatcaaaccaataaaagatgcagctgggattcaatgtcaggtatttttacgaaataattcaattaagggactgctaacagctaaggctggagcaaatcctatgatggcacgggaaagagaggtcactaataaagcgttcccgagagtag

SEQ ID NO: 739763 - DNA, 614 bp, Homo sapiens
gcatggtggcgagtgcctgtaatcccagctactccggaggctgagacaggagaatcgcttgaacccaagaggtggaggttgcagtgagcccagaccgcgccactgcagtccagcctgggcgacagagccagactcctcaaaaaaaaaaaagtaaaaatctcaataagttttatatttactccattgaaaacatttttctatattgcgctaaataaactattatttaatttcaccagtttctttttacttttttaatgtgggtactacaaaatttaaattcacctgagtrgctcacactgtatttgtattagacaacactaatctgcataattaataaaaaataaacaacaaatgctgagcacttgcagggtgccaggcactgtgctagatactttacataatactcaaatcaatgctgcaattaatggtaaagttttaccagacgcctacataacagattggctccatcaaaccaataaaagatgcagctgggattcaatgtcaggtatttttacgaaataattcaattaagggactgctaacagctaaggctggagcaaatcctatgatggcacgggaaagagaggtcactaataaagcgttcccgagagtag

SEQ ID NO: 739764 - DNA, 508 bp, Homo sapiens
acaacttactgccttgagagagtttccaagtcatggtgcaaggagagcgaacccaggcagagtccagtggattctttaattggggagacaaagctgagagtttggaaagatgcaggtaggtggagtttgcaggacaaactacgggaggtagagagctacgtagagagaaaacttccgagaactataaagggtctccatggaagattcagcagagtactaatcattacacacatgtgaaaaaaatgaggctggagaaaaaagcaactagcaagattggaggtaaaattgtctgttgctcacaggggaccaggaacagtgactcctcccaccagccagatttgaaatcctcataattcatggaacactggmtagagtaatcagaagggtattgcctcgggaatgaggaataattagccctagattatatgctgtgctagtcccacctaataaagcttaaaaccaagatccacaaatcccaaattgtttcaaagtaatttacatctgacga

SEQ ID NO: 739765 - DNA, 640 bp, Homo sapiens
cattgtgggtggcaggaggccaacctagaacttgtgacacacttggattgagtcccagccctgccattagccaggtaggtggctcggggtgaatccttttcctctctgagcctcagcttcctgacctggaacctgaaagagcgggcccagcacagcttcccagagggccctgggcagccaggaggctctctgtgacagctctttctccatggagcatcctgctcccatggcgacagctcctgcagtgtactgcgcctcctgacaggaaccacctcatgaagggccgagaccctggaactgacagtgagacagacatggcaaagcctggmgtgtacagacagagcagacagaagaaagaaatggagctggccgggcatggtggctcacgcctgtaatcccagcactttggaaggcctaggtgggtagaccacctaaggttaggagttcaagaccatcctgaccaacatgaagaaaccccatctctactaaaaatacaaaattagccaggcatggtggcgcatgcctgtaatcccagctacacaggaggctgaggcagaagactcgcttgaacccaggggcagaggttgtggtgagccaagatcgcaccattgcactccagcctgggcaagaagagtgaaac

SEQ ID NO: 739766 - DNA, 473 bp, Homo sapiens
ccgtgtgttccctgccagcctgccatcccacagaggcaaggaatgaatctggccacccagggaaacagaaggtgcagcttagccctctcagccctccctcgagcaccagcgtggaatgcccgggtgccgtgggtgtcgcaaccatggascagccaggggaaaagagccctggaccaggacccaggaggctggggttccagtgtggggagtccctgtgagatgatagggtagtcaccttcccaggttcctgggcaccttttggaactggatccagcaacagacaccccccatccatcacataacagtggtcttgtcttgaggagactctcggtcctttaaatgcaaagtagcaatggaggctcccaaccaagaggtcccacctgaaccccagccccctccccatggactagcagtggtgtggcagtgaggggggaaagcgggttgagggagtctcacctgaaaattcacaaaac

SEQ ID NO: 739767 - DNA, 651 bp, Homo sapiens
ggatggcaatgtttggatgagcattaaagacataaattcatgaattttatactttatacatttttaaaatcagactttaatttttacaattatttttctttctttaatttcattagaatcattaattatgctctcctgagcttttcatataatgtgtgktttattgatgatataaaagattaaaaagtacattgaattatacttcagtgtacaagaagtaaatatcttcatcaaaactctgtgttaaaaattgaaaaattaaatttttcatatgcattttcaaagttagttttctttgaaaatattcaaaattattaataataaaaagcgagatacaaataattaaagagctttaatatttaatctcaaaattctttaaatcaaaatgaaatgtctaaattcattttttgaaaatgtaataaaatctgtttttgttttgttttttgatatggggtctcactatgctgcccaggctggcctcaaactcctgggctcaagggatcatcctgcctcagccatctgagtagctggaattacaagcccgtgtcactgcacccagctcaaaaaaattaattaaatcttattaaatatattgcataaaaacaaaactactttgcagtcttagtgttcactgtccacttagttgccaaa

SEQ ID NO: 739768 - DNA, 578 bp, Homo sapiens
gactgaaatgcaccagatcccggcatccagacaacgagacaccagacccctcgttcatctttcttactgttccttaccttcctagtccaacttttccacattctttccctagtctataaacccccaattttagtcagttgaggcgatggatttgagacttctctctcattctcccagttgacatcatgagaataaaaagcctttttccctggaaatactcattgtttcagttactggctttctgtacagtgagcaacaggacccagaccaaacccctggtgtttcagtcacacaatcttgaaaatcaagttatcctttatttttgccaatttgaaagaaaatttgaaagaagatgttacaacatcttatagcaaacattttcaaacacacagagragttgaaagaattatacagtaaacaaatatatactcaccacctagattctatagttgttaacgttttgctgcattttaaaaatttcatagttacccacctatccatcctttttatttttggaatgcatttcaaagtaagacgcaaacattagtacacttcacttcaaagcacttcagcgtgtg

SEQ ID NO: 739769 - DNA, 539 bp, Homo sapiens
ctgtagtctgaatatttttatgaactaacttcaagttcattaatcttgtctttaactatgtcccatcagctattaaatctacctattcacatttcccttcagccatacttttcagttttagaatttccatttgatgctttaaaacaatttccagccctccagtgccattttccaccttgtcactgatatcataatttttttgaagtccttatttgataactcsaatatctaggtcatctgtgagtttgcttctattgtttattttttcttttggttcagtttcttgatatacctgataaacatttcagtgagttactgagcactgatgtaaaacattgcagtagctcagggtgatgttatttttctgcagagaggattcaccattttctctggtaagcaactattgtgaagcagatcacctccattcaataaggggctaagcccacttcaggtggggttcacttattgtaaacaaggctgtgtctatctttggtttgacaatattcctagggtgttgcactgtagggttccaagttgag

SEQ ID NO: 739770 - DNA, 539 bp, Homo sapiens
ctgtagtctgaatatttttatgaactaacttcaagttcattaatcttgtctttaactatgtcccatcagctattaaatctacctattcacatttcccttcagccatacttttcagttttagaatttccatttgatgctttaaaacaatttccagccctccagtgccattttccaccttgtcactgatatcataatttttttgaagtccttatttgataactccaatatctaggtcatctgtgagtttgcttctattgtttattttttcttttggttcagtttcttgatatacctgataaacatttcagtgagttactgagcactgatgtaaaacattgyagtagctcagggtgatgttatttttctgcagagaggattcaccattttctctggtaagcaactattgtgaagcagatcacctccattcaataaggggctaagcccacttcaggtggggttcacttattgtaaacaaggctgtgtctatctttggtttgacaatattcctagggtgttgcactgtagggttccaagttgag

SEQ ID NO: 739771 - DNA, 611 bp, Homo sapiens
cctgcttctggaatacttcctgaaggacctgcctgaagctattgtataattcactgttttctttttctttctttttttttttttttttttttctgagacactgtctcgctctgtcgcccaggttggagtgcagtggcgcgatcttggctcactgcaagctccacctcccaggttcaggacattctcctgcctcagcctcccragtagctgggactacaggcacctgccaccacgcccagctaattttttatatttttagtagagacgaggtttcactgtgttagccaggatggtctctatctgctgatctcgtgatctgccatccttggcgtcccaaagtgctgggatcacaggcatgagccaccgcgcctggccaactgtttttttaataaacagaaggagtatcctcttaaataacaataaataatataccaaatacataagccagtaaaatttttgtatatgtgctagacataattgtaagtgtgatgcttttatataactgactgtgctgtgggtttgtttacaacagcattgccacaaacacgtgagtaatacattgcactatgatgttaagagggctaccatgccactaagcactaagtgatagg

SEQ ID NO: 739772 - DNA, 615 bp, Homo sapiens
tggttgatggaaacatcattatgcattaccatgactgcaaatctaggtagtgtctgtcccaactactcaattctgcctgtcatagtgcaaaggcagccatagacagtgtgtaaatgaacaggcactgctgtgttcccatagaactgtacattcgctgaaatcccaatgtcacatgattttcatgtgtcatgattttaatcgttttgtttcctaccattaaaaaaagtagaaaccattcttatttatgtctgtacagaaacgagcagcgggccaaccttgaaaggaagtaaaaggaagatgttcctttttcaaatgcagtgagaatatcccagagaggaccatgacataggatgtttcgcaaaaggctgagcatcactggggtgttccccaccctgttccatcaagcattattttgggaaatgtggtgctaagagtttgamcttgcaggatctagtatggttcccagcacaaggtaagtccagatggaaagctggttgagggatatttatgtagtgctgactaggaacccgacactcttctaagtgctttatgtatattaattcctctaagtcctcatcattatcccatgaggtagttatttagtatccccatttt

SEQ ID NO: 739773 - DNA, 481 bp, Homo sapiens
ttctaaacaataatggtatcttcaatgatatgatgttccctctattggggttctcttccatagcactgacaatcttttccaaagagtaccatgtgtaatgagcctgaaaggtctttacgacccctgacctagaggctgaattagagatgcttctctgggrgcaagcatttatcacttcgacgccttcagtgctgaactcatgaggttctgggtggccaggggcattgtccaatatcaaaacaactttaggccaggagctgtggctcgtgcctgtaatcccagcactttgggaggctgaggtggacggatcacctgcgatcaggagtttgggaccagcttggccaacagggcgaaaccccgtctctactaaagatacaaagaaattagttgggcatggtggagtacgcctgtaatcccagctactagggaggctgaggcaggagaatcgctagaacccatgaagaggaggttgcagtgagtg

SEQ ID NO: 739774 - DNA, 539 bp, Homo sapiens
atagtttgggaactttcttaatgtagtttgggaacctactgcctcttttctggcagaagctgtttctcctgttatcttgactttttcaaagccaaacctttttctaaaattaccaaaccggccaggtgtggcggttccactctataatcccagcactttgggaggctgaggtgggtggatcacctgaggtcaggagtttgagascagcctggccaacgtggtgaaaccccatctctactaaagaaatacaaaaattagccgggcatggtggcacacacctgtaatcacaactacttgggaggctggggcaggagaattgcttgaacccaggaggcggaggttacagtgagccgagatagtgccactgtactccagtctggatgacagagcaagactccatttcaaaaaaaaaaacaaaaaacaaacaaacaaaaaaaaacaccatcctttgctggcattaaagtctccagctttagaatctaaaagctgtgatataatgacttcactttttcttgaatcatagtatgcctttttttata

SEQ ID NO: 739775 - DNA, 611 bp, Homo sapiens
ggctgtggccctgttgtgctcaggcaagttgatccttctctgagcccattttcctgtctgtaaaatggggcttacaatcatggccttgtgacatcagagaactactacgaggatcaaacaaatgaatgaaaccgatcacatgttgaggaatatacagcactgggcacatttgaggattctcattcatcagaaaatgtaagtatggagcatgctagagtctaagacttgcccatagtacaataatacacagcttataaatgaaagactccagaaggagcatagggattaagggaatctaattccaacccctgctgtccaaggaagtttaagggacttgcccttcgatcccacagcaagtcctaagccaagctgagcaggagaccagaagctgagaccactgcttccagaggttgcaacatcataactgcttttcctccccagtttactttaagaagaacttggcagctcctgagrcaaatatgctgctggaaatgaaaagaaagactttgaacttatgcagacatttggcccagttcataccaatttggcatcaacgcattctccttgtccctgaacatgattccgacgttggtagcatgctgccgagagga

SEQ ID NO: 739776 - DNA, 622 bp, Homo sapiens
caccactttatacttagaatgaagtactgattgaagacaaggctgtagggtactgtgataggcaggattatggcccccaaagatctcacaccttaaactctgggactgggaatacgatgcggtatcattcccataaatatgttaccttgcatggtgaaagagactctgcaggtgtaataaagtttgctaatcagccaaccataaaatagagagattatcctggattatctaggtgggcccagtataatcagatgagcccttaaagcagaagaacagggcaaaccagagacgttggatgcccaggaagggtttgatgtgtcattgctggcttgaagacagaggggccacgtgtcaaggaaggggaccccagtcctacgaccatgaggaactgaattctggcaacaactgaatgaatttgggagtggattcttcccccaargcctccaaaaagaaacacagccctgccgactccttggtttcaatgttgtgagagcctgagcagtggactcagtcacattgtaccataccccttacctacagaactatgagatgataagtgagtgttgttttaagccactgagcctatggtgatttgttatgcagacatagaaaacaaatacag

SEQ ID NO: 739777 - DNA, 595 bp, Homo sapiens
aaacaacattgcttttaagaaatctatttttctgcaaaataaaaaaaaatggttggtggtcttcattcattagttttaccatgtaccacatacccgtaggcagctggccttacagaaggatgcattaacatattgcagactcaagtgataccatcaatggagagacaacagcttttgaggttagggtgctgatttccagggtacaatgtacgccttgaaccaggagccagtacatggggcctagaaccaagggrtggatgtggaaatgttgcttgtcactgtcacacctaatgatccattcacaatgtttttgcttcctatccctacaactcagggctgtttgggtttaaaggtattagtcttgaaaaaagaatgcttccaacaacagacacaatggtttcaaaaacatggccatttcaaaaacatgatcattttagctccccatagtactgtggttgtaacaaaactactacatcatgcaggcagagaagggtgaagatggaacctaggagtctcctgggacttctcccagtactttgatgttcagtagtaaaaatgaatggaaactctagccagtggcactgaattttagtgt

SEQ ID NO: 739778 - DNA, 595 bp, Homo sapiens
aaacaacattgcttttaagaaatctatttttctgcaaaataaaaaaaaatggttggtggtcttcattcattagttttaccatgtaccacatacccgtaggcagctggccttacagaaggatgcattaacatattgcagactcaagtgataccatcaatggagagacaacagcttttgaggttagggtgctgatttccagggtacaatgtacgccttgaaccaggagccagtacatggggcctagaaccaaggggtggatgtggaaatgttgcttgtcactgtcacacctaatgatccattcrcaatgtttttgcttcctatccctacaactcagggctgtttgggtttaaaggtattagtcttgaaaaaagaatgcttccaacaacagacacaatggtttcaaaaacatggccatttcaaaaacatgatcattttagctccccatagtactgtggttgtaacaaaactactacatcatgcaggcagagaagggtgaagatggaacctaggagtctcctgggacttctcccagtactttgatgttcagtagtaaaaatgaatggaaactctagccagtggcactgaattttagtgt

SEQ ID NO: 739779 - DNA, 595 bp, Homo sapiens
aaacaacattgcttttaagaaatctatttttctgcaaaataaaaaaaaatggttggtggtcttcattcattagttttaccatgtaccacatacccgtaggcagctggccttacagaaggatgcattaacatattgcagactcaagtgataccatcaatggagagacaacagcttttgaggttagggtgctgatttccagggtacaatgtacgccttgaaccaggagccagtacatggggcctagaaccaaggggtggatgtggaaatgttgcttgtcactgtcacacctaatgatccattcacaatgtttttgcttcctatccctacaactcagggctgtttgggtttaaagrtattagtcttgaaaaaagaatgcttccaacaacagacacaatggtttcaaaaacatggccatttcaaaaacatgatcattttagctccccatagtactgtggttgtaacaaaactactacatcatgcaggcagagaagggtgaagatggaacctaggagtctcctgggacttctcccagtactttgatgttcagtagtaaaaatgaatggaaactctagccagtggcactgaattttagtgt

SEQ ID NO: 739780 - DNA, 714 bp, Homo sapiens
atttgaactctctgcctttaacctcccctttgttcatagggctcgtcctccagtcactactgtagaggcaggaggggagctcttatatccatagctgcttgattccccctgtattttgtctttctgttaatgcacataagcacatcatagactacataacagcagtgtgaggagttcaatacatgcatgtagacatacatctcaaccaaacttagtgtcagaaaaagcaacttcaaaattcmtaattcagtgaaaacaagaagaacatggttggtccaaatgccacgacaagctcaacaatcacaccaggaatagaacctcataaaactcttgtgctaagaagcagttttgtgataatcaaagcatctctcttttcactcaggtctaggtactgaggttaagttagttatacaaggtcacaccaataattaggagtatacctaggagccaaactcaagtcttgtttacatttgtacatttcacaaaactttataaattctccatcattaaatatgtcctggattatctaatctacacacacactgtccagtaagaagaaatttctgcagaaagtctcaacttccagtgagcccactaatctctaaaagacatgtcttacttgatttaatgttaatttctccccacaatgcattctcttcctcttccacgcagttctattttgatggatcctgataagccttgtacctaggaaat

SEQ ID NO: 739781 - DNA, 714 bp, Homo sapiens
atttgaactctctgcctttaacctcccctttgttcatagggctcgtcctccagtcactactgtagaggcaggaggggagctcttatatccatagctgcttgattccccctgtattttgtctttctgttaatgcacataagcacatcatagactacataacagcagtgtgaggagttcaatacatgcatgtagacatacatctcaaccaaacttagtgtcagaaaaagcaacttcaaaattcctaattcagtgaaaasaagaagaacatggttggtccaaatgccacgacaagctcaacaatcacaccaggaatagaacctcataaaactcttgtgctaagaagcagttttgtgataatcaaagcatctctcttttcactcaggtctaggtactgaggttaagttagttatacaaggtcacaccaataattaggagtatacctaggagccaaactcaagtcttgtttacatttgtacatttcacaaaactttataaattctccatcattaaatatgtcctggattatctaatctacacacacactgtccagtaagaagaaatttctgcagaaagtctcaacttccagtgagcccactaatctctaaaagacatgtcttacttgatttaatgttaatttctccccacaatgcattctcttcctcttccacgcagttctattttgatggatcctgataagccttgtacctaggaaat

SEQ ID NO: 739782 - DNA, 514 bp, Homo sapiens
atgtagctttcagattcaggtgagaggtacaaaaatgacacaggatgatgatcagaattgctcaaggtacctgattactttctcttcagggtttgcaaatgcttaggttcctctcactagagaaaagctgaaagcctggaagggaacagtcagcaggagaggaaagctgcctacactagcttttgagccacggtwctgtaaaccaaccctgcttactttaacacaaatagattagcagaaaacataagacatttcacaaccaggatatcaaaacagggttaaatagtaatttaataataaatgtagtgcaaagcatgaattatttcaagtgttgttattccgtaaagtcctcaattaaatacacacagaaaaaaagactgaagaagaaataaaaacactaacagtggcattgaaatcacaatatataatcagtttagaactctgttttcttcatttcttaattacactggaagaattttcccataacagtcaatattttgtcctgttattaagg

SEQ ID NO: 739783 - DNA, 632 bp, Homo sapiens
tggtggctttcgtgggtcccctgtccttctccctggtagaatgcctgatggtctgccgcctcgcctgggctcgcctacgggagaggttccagcatctcagaggactgggacagaggatgtgggccatgctctaccctccccggtctccagtcttcactctggtcccygccgcatccttacctctgtcccagcgtgaccccagccagcttgatcaggtcccgcatgcagggtgtcaggaagatgggctgctcatcactgtccccggcctcgtcataactctccacctgctccaccacaaactgcgcgtgtcgcaggagggagtcctctgtgaagcggttcaagttgaggccagaaggaggaaccgtggtcttgaaagagaacaggtttctctcatgcttaagccaaactggcctaaatccaactgaagaacagtgtctgctggttctgaaggcaagtttccagtgggaatcccggatgctgaggaccctcgatctcttacctcgatcttgttgatcaggtcctcataggtcgagtcggaattgctctgcaggaactccaccacaatcttgctgatgtagatcttctcctgcatcagcccaaatatgggcgcatactcgggactgggatccatc

SEQ ID NO: 739784 - DNA, 611 bp, Homo sapiens
ttgatgcttgttaaaaagcctttaaaaaaatacaaatagagcaaaggaagagcaagattgtgaaatataagcctacgctgtttatcccccaaaaggaataccaaattttaacaagtatctttacacacacacacacacacaccactgtcataagaaccaaaatttaagtgagcaatcatagtacatggttttaatatcatatcattaaaagaggcactgaggaggggagaagagacagtcttgaattactgrtgccacctctccttcatctaatagcagaggtcttgtggtgcagaaagagaaactgtgcactttagggaggaatattgcagtgactggggactttacattgaacttagtcctgccctgtcatagtggagaatgaagctgtgctgggcttagccatcccttgcacattgagggagcatttggaccagacctagccagaggggtgttctggtggtcagaacttgagtttctcagcaagccttgccatcacaaaccgaattgctcggggtttctaggtaaacatgaaaggcaatgtgagacacgaggaatgcaattgctaggcaactcctagtgctaggctgggcttagagtcagtgaattag

SEQ ID NO: 739785 - DNA, 637 bp, Homo sapiens
tagcaggggtaagatgtattctgggttctctagacgtaaacatttgaatgttaggtctccttgcttgcttttatttctttattttttttttacctccttacttatttagtcattcattcattttagaatttgacttccatatgtctaaacacaagcagcctcccttgactcctcttccctctcccaatccacaatcaatctatctttgaatcctatctgctccacctctaccataatcctgctgatcctggcctccaccatggctcttgrattattacagtaaccttctcattgatctccttggttttgtccttaatccccttcccctccacctctcatcgcccaccctggacacagtttctttcttcttctttttttttttttaaatattttcttttattgtggcaagaacacttaagagggtgagacccaccctcttaacagatttttaaatgtataatactgtattgttatctgtaggaataatgttgtacagcagctcttttagaaattattcaccgtgcataactgaaattttatacccattgattagcaactccccatgctctcccctagatcctggaatcactattctgttctttgcttttgtgagtttgactgttttagttacctcatg

SEQ ID NO: 739786 - DNA, 596 bp, Homo sapiens
ataaggaatttaatcaaattaacaggcaaaaaacaactctattaggaagtgggtaaaggacatgaacagacacttctcaaaagaacacaaacccatgaccaacaagcatatgaaaaaatgctcaacatcactaatcattagagaaatgaaaatcaaaactacaagagataccacctcacagccatcagaatgcttattattaaaaagtcaaaaaataacaaatgctgatgagactgtggagaaaaaggaacacttatacacagttggtgggaatgtaaattagtccagccattgtcaaaagcagtttggtgattactcaaataacttctaacagaactaccattcaacccatcaatctcattatcgggtatattcccaaaggaatataaatakttccaccataaagacacatgaacttgtatgtttgtcacagaactattgagaataacaaagatgtgtaatcaacctatatgtccattgacagtagacaggaaaaagaaaatattgtatctataccccatgaaatactacacagccaaaaaaaaaaaaaaaaaaaaaagaacaagatcatgtcttttgctgcgacatggatggag

SEQ ID NO: 739787 - DNA, 592 bp, Homo sapiens
tgcatgcagttctgctcccatttttcctacagtatttcaagtgaaccactcagtgacaatcccatcaacttatactgccttactcttttaatttaatatgaaatagaactgtcattaactgaaagggaaattgcttcagtgaatatatttgtgaagaaataaaatygcttcagtgaatatatttgtgaagaaataaaattcatgagatattataaatttgatttgccttcaaaattttaatttaacttttaaaattagttacaaaatatagttttaaaaataatctaattattcataaacttttaattgagagtttctttctgattagttgctgtctgcccctgtgcagctgacccattatatttacaaattggttgatctctgcatataggccataatagttttataaactgtaggttataaacgtctgctctaattaattttctttcatatcaactgaatttgatgttgttgaggcattagtgagttttttaaaaatagtttacatagagcttcattttgttgattagtcaaaagtattgttaaactggcttcatggtgtttgaaatcacctattttcaggtgataagac

SEQ ID NO: 739788 - DNA, 593 bp, Homo sapiens
ttaatagcggttgtgacatctaacaaaagcaaaactacaaaagctaaaacagcatgtgacaatttttgagagttaaattatccaaattctctcataaaaatagtcataaagatgtaatgacaatgagtgacccttgtttcaaagcactgtcaagttaactgtactttgaaatctagttcaatttatctgcaacatcaagccatcaatttcaaaggttttataattcataagacatttttaaaatagaaacattttgggttttttgcagcacaattactgctatcctaggaaggagaaagaaactttcttcattatgggccataacataacttttctttagcaaaatgatytgtaattaaaccaattacatttagcattcaaaaattcagaatgttgtttctatattttctaaattagcattggtctactttagtctctctagaaaaaattgagaaaaatgagttcctgaaaacttaaaatacctacctttaaactcatgtcgtttctgctgtgtttggaacataaatgtactatacatgcggctccttgaagagaaacagacagaaacaggagtcgttggaaaagagtcaact

SEQ ID NO: 739789 - DNA, 636 bp, Homo sapiens
tttgagaatgaggggacacaggtgcttctgtatgtggttggttggtatggaagttggcacaatctctttgaagagaaatttggcaatatctatcaaaataaacatgaatggactgtttgacccagcaattccacctctaagactctaccctaaagatattcttccatatgaatgaaagatgtatatttaaatatattcattctggcagtgactgtaatagtgaaatattagaaacaacctaaatctccaacactggggatgagttaaagaaattctggtgcacccatatgatgcaaaactctgcagctctggcaaagaatgagrtatgaaactagcaatgaactcattcccaagaaatgttgttaagcaaaaaaggcaatatgtagaatagagtggatagtgggctcccatttgcacagaagagagggatggacttgatggtaagtatagagtagttctgagaagaagcacaagggtctttttacagtactttgcctggggagaggcgtggggtctagggtggaaggaagacttagttttaattacattttgtaattaaaattagtaaaaattacattttgtgtaatttttttttactgtaatgatatcaggtagcacatatggagtgcgtatttt

SEQ ID NO: 739790 - DNA, 660 bp, Homo sapiens
ttcccaagaagattaagatgaaactaaggataaacttagcatccatatgcctctcttttgccctagattttatctgagcttcctagtagcccacgtaaaaggggatatatagtcagttatagttacagtgtccacaagataaatgagttgttcaaagaagcatatctgtggctattccagagactacagagagatttatttcctgaaacctaaaaggaaacattatgaagtggaaagtgatgtcaatacccccaccctagttttgttgcattgggactggcccttgaaaggccaaaggccacttcatcagcatttctttttccttcttgggggaaagaaggcattcccgaagaggaaagaatcaacatgctcagctaaagtctctctagaagggcaggctattaaaacatgtttctctacatctaaaatccacggagagattmtgagatgtgttgagtcaagacaacccaatatgtgggtatcacctccacaactcttatttagaggggagactggtaaacagatttttaaaggactttcacaaagtgaaaaacctcattttcaatgtttgtgagagccagggtgttcattaaaatcatgtataaacgacgggaattcttcctctgtctgtaggatcctcaagagagcttattattttga

SEQ ID NO: 739791 - DNA, 489 bp, Homo sapiens
tactcaagtcataaaaaagaatggattaatggcatttacaacaacctgcatggaactggagattattattctaagtaaagtaactcagaaatggaaaaccaaacattgtatgttctcacttataagtggaagctaacctgtggggatacaaagtcataagaatgatacaatggactttagggacttgagggaaagggtgggaggagggtgaggcataatatactacaaattgtgttgtgtatactgctcaggtgataggtgcagcaaaatctcacaaatcaccaccaaagaatttactcatgtagtcaaacaccatctgctttccaaaracctataaaaagtatatatatgtgtgtgtgtgtgtgtgtgtgtgtgtgtgtgtagtaaaacaaaaacaaaacactaaaaaagtcttatgtaatataccgagttcagaaaaaaaaagacctgattaaggaataaaggactatttaagccattaaaaaaaaa

SEQ ID NO: 739792 - DNA, 489 bp, Homo sapiens
tactcaagtcataaaaaagaatggattaatggcatttacaacaacctgcatggaactggagattattattctaagtaaagtaactcagaaatggaaaaccaaacattgtatgttctcacttataagtggaagctaacctgtggggatacaaagtcataagaatgatacaatggactttagggacttgagggaaagggtgggaggagggtgaggcataatatactacaaattgtgttgtgtatactgctcaggtgataggtgcagcaaaatctcacaaatcaccaccaaagaatttactcatgtagtcaaacaccatctgctttccaaaaacctataaaaagtatatatatgtgtgtgtgtgtgtgtgtgtgtgtgtgtgtrtagtaaaacaaaaacaaaacactaaaaaagtcttatgtaatataccgagttcagaaaaaaaaagacctgattaaggaataaaggactatttaagccattaaaaaaaaa

SEQ ID NO: 739793 - DNA, 655 bp, Homo sapiens
tgtatgtgtgttatatatacatatatagagaacactgatatatatatatataaaatcaatgaatgaaatacatcacgtgaccaatttgtctatccaattaacaaagatgcaggtaaataagtagtttcaaaaacaytgctggtggatagttcaatatctatctggaaagccttctgacaaaatcattaaaatatatattctattgaactagagttccacatcaacaaatttatagttttgcaaggaggataaaggagaggccaaatgtcatctccacttgctggattgggctcaccttccctccactcccactcaagaaagtgcactcaattaaatgaggaaagggaagaaaacatttaacaaatgacatgtaaaagtaacagcgctcccttggtataatccctgtaagcacaccaaatctagtttttatattttctaaacaatgcaatcaaatcaacagttccccacagaattaaagccctctcctcaaaatcagtaatgatcttttttacatattcctccacaagatacatattttcttttaaaaaattaaatacaatttaatatattgaattatatcttagatttagaatcagcgtttaatacaaaaaagtttttacaaaagtgaaaaatcacaattggaaaaagtacctta

SEQ ID NO: 739794 - DNA, 630 bp, Homo sapiens
tgtccactagtctcttaaacctgctaccatgttacccactcccactcccctaaacatggccttgcctcctactcaatggagaaactgggcaccatcagaaggagctgccacataccctcagactcaccaaacagtytgcttcttaccccagtgtaagcactgaacaggcaggtgggtgtatgggtctgagactgaggagagctggcctgtagacacaggtttggaaatcttcaacaaaaagacaataatgagatcacccaggggatgtgtgtgaggtaaaaagagcctagtttttgaactctagaggacatcgatgtgtgtgaacaagagatatctgtaagggagactggaaaagagcagccagagagatcacaaaacccaggagcatgtgggtcagagaaatcaatggaaggaagtggtcagctgacatgataatgactggcgtgtcctgtgaaccagaaacatggaggtctttaaccatctttgttagagcagttctgtgcagtattagatgaagatgccagacttctgttaacttgagtgtgactggaaaatcattctgtggaaagcacaaggactcctagaagcctctgaggaagcagagatagcaagtataagggactctgccaa

SEQ ID NO: 739795 - DNA, 667 bp, Homo sapiens
tccagggcaggagataggtctctcttcttgatgggaagaatgttaaagaatttacagacttgctttgaaacagagacttaatttctccatatcctctaaatgaggataataatacctcatgggccagttttttttggtgggggggatggaatgatacttggggctaatgcagatgaactcgtgtggtgaaaattaaggtgcagtccaaacataagagatggacaattagagctgtctgragtttcaaattcttaaaccggaacatgttataatctttcagaggccgagaaagttttcttgttggcattcttctcttcaataaataaatcacctgagttgcaaaaatacaattttccccataagatcaacaataaagccattttgaatgagagagaaatatagcctgtaagtaatttttgctttttcctaattttctcttgatcaaaataaggttgcccaccattgctatgcgtcttgttacactcactgccaaggctcaatgtcttgcaaatgttgctgtgtataaatgtttatagtggaaaggatttaagaacgaaaatgagttgtcattggcctatttatcattaagtacaattgacatctgtactctatttgtataagtaagataggttaaaatttgttctgtacccacttccattacaatgcc

SEQ ID NO: 739796 - DNA, 579 bp, Homo sapiens
ttctgggcaggtagcttcccttggtcttagttttcacatttgtaaaatggggaaataaacaaccatgacataggtttgttgtgaggattatgagagaccaggtatctagcaccattcacacagaaaaacgtatgacattgatttaaaaaattataatgaacaaatatgcttagttcacagggaagctgcattaattgtatagatgctcctcaacttacaatggggtatgttccaataaacccatcataagttgaaaakgcatttaatacacctaatctacccaacatcacggcttagcctagcctaccttaaacatgctaggaacacttatattagcttacagttggacaaaatcatcaaatacaaatgctattttacaacaaaacattgaatatctcatgtaatttattgaatgctgtactgacactgaaaaacagaatggttgtatgggtatttgaaatatgctttctactgaatgcatatggctttaacactgtcataaagtaaaaaaatcagtaggtcaaaacatcttaaattggacagtcgatattctagaatgaatcaatttaaagaaattct

SEQ ID NO: 739797 - DNA, 616 bp, Homo sapiens
cagttaatacttatagacataaattcaagtaccaaaaaattcttctaaataataagattctcaagtgtctaaaatttagcacatggttgactttccacataccatccacatgctcatttctagagtcagtgacttcaaggtatagccctattatccaaagtcaattaggtgaatgcgtgactttttaaagttgaaaaaggaatcaycatatgtaaatgtctatgactgatttgacatatctgatttatctctgagccatgaggtatataacattttcagaattttggacagtagtcatacaggcataagattttcctttagctaaaaattactgactcttagggtaaacagcaaatgaaatgttaatggatcaactaaatacttctctgaagtattttcaggtggtaatgcttccaaactgtattacccttggggagctaaaactacttcaaacatggcaaaaatatgattagagatcaaaacataaatacttcaaaccaaattaaatctttttggaagtttctaaatacctgagaatacaaaatgtgatacaattcaggtttcaaagtgattaattataaatatatgcaaatgtgtgtttatagttaaatatgca

SEQ ID NO: 739798 - DNA, 616 bp, Homo sapiens
cagttaatacttatagacataaattcaagtaccaaaaaattcttctaaataataagattctcaagtgtctaaaatttagcacatggttgactttccacataccatccacatgctcatttctagagtcagtgacttcaaggtatagccctattatccaaagtcaattaggtgaatgcgtgactttttaaagttgaaaaaggaatcaccatatgtaaatgtctatgactgatttgacatatctgatttatctctgagccatgaggtatataacattttcagaattttggacagtagtcatacaggcataagattttcctttagctaaaaattactgactcttagggtaaacagcaaatgaaatgttaatggatcaactaaatacttctctgaagtattttcagktggtaatgcttccaaactgtattacccttggggagctaaaactacttcaaacatggcaaaaatatgattagagatcaaaacataaatacttcaaaccaaattaaatctttttggaagtttctaaatacctgagaatacaaaatgtgatacaattcaggtttcaaagtgattaattataaatatatgcaaatgtgtgtttatagttaaatatgca

SEQ ID NO: 739799 - DNA, 711 bp, Homo sapiens
aagggatccatggtcataaggatggaaaaccccacactgcctacctgctcctagaaattcacaaggcacttccacacattaaagatttaattttatatttcccaaatcccatccccaagctacttttctgcagaatacacttgaggaataccaatttataaagttttatgtttcatttgatttcaaaaactggaatagaacacaaatatcaaagtatgacaattaggcttataactctaggtaagaaattacaatggtataatctggtagttctaacaattaaccttcatttgctcagatgagagtgaaatatgttccctattgtcccccaagtctgggtaggggacataagsctatctttaggtttatttcatcatgttctgcatttttactcttgaggtcttctcactcattttagctcatgctgctttctcattattctacccaaatatccttccttctttttctctatctaccttccttttatttctctatctataagtataccacagagaggtcagagaggaaacaaagaaccagatggtataggcatcaaaggccttgtatttactcttgtgatgtatcaatgaggaaaagaggaagagatgcaatggccagcagggataatccatgtagggagtatccagaaggagacaggtagggctgggaccccagcacaggtggcctgtttgccttggcaaaagaggagga

SEQ ID NO: 739800 - DNA, 657 bp, Homo sapiens
aggagggacctaactgtgagacacgtgagtcaaaggatgtgagctgtgcccggaagcactgcagcagtccacactcttgtcacagagtatgcaggaggtcgtttctccacccctcgtgcagactcatgtgcttttcaaattttctccttagataggtgaaaacccttttctcactgcctacttgtatgcagtagcattttagtgttttgttttgacaacatgcattttctcttccgtgaactgcttattcatattcttgtctatttttctatttgactgttccctacttaaaaattaaggttatcaaacctctgactgtcaaatgtgaaaataacatttaaaagctgtccaaaaaaacaacccctttaagccttgagagagatgtgactgtgatctgagtcacatatggttacaacttccattctcagattatagattaacttgctttcttatttttcytgttcagtacaatgactagagaattaaacaatgtcaggcacaaaaccttcctgcctttttttttttttttccagagactgggtctcactctggcacccaagctagggtagagtggcacaatcatggctcactgcagcctcgaactcatgggatccagcaatcctcctgcctcagcctccagagtagctgaaactacag

SEQ ID NO: 739801 - DNA, 613 bp, Homo sapiens
aacaaacaaacaaaaaaacacaaaacacaagaagtaattttcttaaccgtatcttcaagtgagttgttgaattttcaaatgagaaatgttgcaatagtaaacaggggtgagcttcaagaccgtcataatcacaactctcattgctatttctagcaaacatattccttgttatatgcggacaatcaagtgacaaagacagctaaaagctggaaaaaattatcattaaactcctgccatgtcagctcctctgccagtaytatctaatgcaattactatgtgaacatgtaagcaaattgttatttacataaactggccaggaaaaagcctatcatttgtagtcatcaaagttacattcacagcaataggaagaggagcaaataaagagaatgctaaaattaagaaaatatgacgtgaaaatcagaagttaatccaagaacagagtcccggggagtggtgggtggcaaggatgaaattcaagcaatacacaatccttgcaaaactaagcaagaaaaagcaaaaatatatgagacctgaaaaatgggttgtggcccgtggttataaaagaatgttatgctcaaactctataggaataaattttgaaatcaacgacatg

SEQ ID NO: 739802 - DNA, 639 bp, Homo sapiens
gttgaaatgaaggcaaaaaatgttaagggcagaaagagagaaaagtcaggttaaccacaaagggaaacccatcagactaacagtggaaaccctacaagcctctcttcttctctcacagaagagactggggaccaatattcaacattcttaaagaaaagaattttcaacccagaatttcatatccagccaaactaagcttcataagtgaaggagaaataaaatcctttatagaaaagcaaatgctgagagatttttgtcaccacaaggcctgccttacaagagctcctgaaggaagtaataaatctggaaaggaaaaaccagaaccaaccactgcaaaaacataccaaattctcaagaccattgacactatgaagaaactgcatcaactaatgggcaaaataaccagctaacatcatcatgacaggataaaattcacacataacaatattaaccttaaatgtaaacrggctaaatgccccaattagaagacacagactggcaaattggataaagagtcaagacccattggtgtgctgtattcaggagacccatctcacaggcaaagacacacataggctcgaaataaagggatggaggaatatttaccagacaaatgaaatgcaaaaaaaaaaaaaaaaa

SEQ ID NO: 739803 - DNA, 595 bp, Homo sapiens
taatgaaagcaaagtgaaagacattcaaatagcagagtcaatcctaaaacaaatagctattacagcggttttcagaattagttctttggtgactagttgatgactctgtgaaactcccatgtaagtgtgagaagcctaatctagtgtacaattacagaaaatgagaagaggctctgcacttaagactaaggtatacacactaataaactgatactgacagtgatgatcgtaacaactgcacatcactcatttaaatcrgaaacctatttccctgcagcaccagcactatattttcctaaacaacatccttagacagactagcccaggatgagagaggaagtttaagtgtctagctcattagagaatgcctatttggtattcaattatccacccttctatttattcaaaaataattactaagaacctttcatgtgctgcgtcctgtgctatgcactccatcaaattactcatccacgaatctctagaacccattctctcaacttggagaacacgaggagtccaggagaatgtctatcaatgaaggagctggaagcctttttcctgacctgtttaacaatataccctcatgtatttt

SEQ ID NO: 739804 - DNA, 622 bp, Homo sapiens
agtattgctaaagttctcataatttttaatgaggtaattatttggctaccctttaagcattctgttatcttcataagagagtaataaaccaattttttaaaaatccaatttcagagtggttggacaaatggatctcacttgagatgattaccagcaggggagatattatttcaatacaatcaaagactaccaatggaacacatggaaatataccctgcaattcttttaggtcctagtcctaagatgtcaagcaaaatgagccaaagtcttgaagaaaaagaaaagatggattgtgcatggagaacacatatttatttcctaccataaactaggaactgtccatatgtatattaatattgtcaataacattatgaaataggtggggatttttcctgctgcygttaaacagcagagagtctgtcacataactattaatgatccagccagagagcaaataaaaatctgcctattgctaaggctggtggccttctagtttatcataaatgcatcatggtcacaagaagtgttttaaagatggcaaatccctaatcatgacacagttattattctgctgtcactggaattataaacttagaaaagtagtaaccaggttgacacgcca

SEQ ID NO: 739805 - DNA, 631 bp, Homo sapiens
aacaaaatgggacctttttttttcatcatatgcaagtgatgaaaagtgtaagacttgatacttaattagatgtaactagtaagagcgaggggtagcctggttagctccccaatccctatcttaggtgttatatagatggaggtatcactaaatgagatggaaaatacaggaagaatactaagacttgtgatttaaaggaggagagaacagtgaataatgatgtgagcgtgggttacatgtgagacatccaagtgatatgcactgggtaattttatatattttttctaaaggtcaaaatagakataaggtcaagaaataaatatctggcataaaaataagcccaggattgttagctacaatttagaatataattaagatggtctaagaaaaaaagaaaactttttcttaaaaagctagtatttgaaagggagttctagaatgacaacactgcaatggagaatgggaaaaaatatacatatatatataaagcaaccaagagaaagggtttcagaaaactaaaaatacagagttcagccattgattttacatcatgaaagttattggctcatgttcctttaccaggatagagtgactgggcttgaaaacagttaacagttggttaaaaaattgg

SEQ ID NO: 739806 - DNA, 396 bp, Homo sapiens
attcattggatcctaaataatgaaatccgtgaaggaccttgtttcctaatcctgggtccccacgggttctggccccgctgactgtaaggaaacctcagtttcccagctatccctcccctctccccagactcagctgtgttactrccaggataacacagggctctgcaaactcagacacctgcgggtggtgggaggggggctggcgcacgcaggtggggctgtgggaattggagactggaggacagagactccaaggggcattcatttccctgtaggactgatctgttgccagatcttgtgactttgagaaaccagaaatctggatttatgtgaaaccttctgatttttaaatgttggcaattaattcacattttaatatatacaggggagttcaaa

SEQ ID NO: 739807 - DNA, 635 bp, Homo sapiens
ccactctggcatatatcagagctgagtctgaacccaggcagcgggatccagagtccactgtctcagtattgctccccttggagaaggctactgagaaaggctttcaacattatgtcattttgcatacttaagaaggaaaaccaaaaatagtatatgtaggtctacgcacagtactgggccaccacagaggggaagaaaaaaaaaacaaaaaaacaccctgttccctcgtctattttcacttttcatgccggctggttaattagctccacagcactcctgcagcactccttttgggaggtacccargcccagtgatcattaatcttctctcagtcacacctcatgctgtcaccatacaagcgaagtggatccaggataggtgtttagtcatcaagcaccctagtttcctctcctctccgtgggtactggacatttattaactcttgcagcatttgggcctgctgcttctgcagcacagtggcgctggctccggtcattctgcctggcccaatgaagggtgaagtcacgagctagctgtggtggaaggcaacctggcaggattcaccgtcaatctgcatggaatttgggattctacatttccttgccagcacagacttgtccaggtctaccagtcct

SEQ ID NO: 739808 - DNA, 634 bp, Homo sapiens
ttgcagccttcttattgcatggttgattctccagcagccacccccacacctgtcacattagcctacaaaagacacttaccacttcagagagtccaagagttttaggagtcctgtgccaggaaatgggggcggagaccaagaatagatttattattaaaagtcacaatatgacaggcagtttctttaaaacctaagcattcacttaccatacaactcagcaattttactgttgggcatttatcccagagaaataaaaatatattcaatacagaaatttctatagtttcattcacagtgccacaaattggaaggaaagtacttaaatgcycttcagcgggtgaacagtgaaacaaactatgcatccatgtcatggaatactacgtggcagtaaacaagagcaaactggacatgtggagcaacttggattgatctcagggcattgtgctgaatgaaaagccttaagatgtcacatgaacgattccatttggtaacattctttaaataacagaatcatataaatgaaaaacacatgagtggttgccagaggttaggagtgttggagtgtgcagaggtatgtgatggtcagagataacatgaaagagaagtctgtggtgatggaatagtcctgtaactt

SEQ ID NO: 739809 - DNA, 634 bp, Homo sapiens
ttgcagccttcttattgcatggttgattctccagcagccacccccacacctgtcacattagcctacaaaagacacttaccacttcagagagtccaagagttttaggagtcctgtgccaggaaatgggggcggagaccaagaatagatttattattaaaagtcacaatatgacaggcagtttctttaaaacctaagcattcacttaccatacaactcagcaattttactgttgggcatttatcccagagaaataaaaatatattcaatacagaaatttctatagtttcattcacagtgccacaaattggaaggaaagtacttaaatgcccttcagcgggtgaacagtgaaacaaactatgcatccatgtcatggaatactacgtggcagtaaacaagagcaaactggacatgtggagcaacttggattgrtctcagggcattgtgctgaatgaaaagccttaagatgtcacatgaacgattccatttggtaacattctttaaataacagaatcatataaatgaaaaacacatgagtggttgccagaggttaggagtgttggagtgtgcagaggtatgtgatggtcagagataacatgaaagagaagtctgtggtgatggaatagtcctgtaactt

SEQ ID NO: 739810 - DNA, 512 bp, Homo sapiens
tacttcatttcatacagccacagttattaatactttgctaagggctacccagctgctaaaaactgctgttatctcatactgagaatgctagttctatacctttgctctcaggctgtgaggaaggggtgctagtccaaaaggccatgggattagatttaaaaaggctaaaattaaatcctagaaaataaagaatatttcgttttttaacattttaggaaacaaaatgaatatgcttttaaaacataaaaagccagaatccctcaatttataccaccaatctgattgtcttacatattcatttatccctgtagtttcattctttgctcatttaatacatgagcaagactgacatacaacayataaaatgagaacatctcaatatcacgttgtttttttttttttggagacaaagtctcagtcactcagtcaggctggagtgcagtggcatgatttcagctcactgctacctccatctcctgtgctcaagtgatcctcctgcctcagcctcctaa

SEQ ID NO: 739811 - DNA, 634 bp, Homo sapiens
tgaactgtgatagcgccactgcattccatcctgggcaccagagtgagacccttgtctcaaaaaaaaaaaaaaaaaggaaaaggaatagcccccccaaatctatatatatttcactagcagaataacagaacataccaaaatttaacagtaataatgtaaagattttgagccgtctgtattttccaaatcttcaaaaatgtctattttgggaatttggatattaaaatcttacttttaaaacaaaatttaacaaaacatttttaatagtgagaaccttttagattttaaaagctcacatttgtgtaaacattacagtctgaattatgtggacaaatatcaaatgcgttgacatttttaactggaaatttgggctattttggttgtggataattttttatcctttttgtttttccatattttctaaattttgatataatgaacaagtattgcctttctaaaaaaggaaaaacagcattttgttttatttcaacmatattggatgtgaataaaagaaaagaaaaagatgattctgagcttaccagtgtgtgtgacccacattaacagaaatgacatgtaaagaaaatctagtttggagtggaaaatcctattttaggtagttgatttctttcacttg

SEQ ID NO: 739812 - DNA, 536 bp, Homo sapiens
aatggtgctctgaacatttatctacaaatttttgtgtgaatatatgtttttatttttcctgggtatatacatatacctaggagtagagttgtggggttatatggtaactctaggtttaaccatttgaggaactgccaaactgttttccaaagtgccttcaccattttgtattcccaatttctcccctttttttttcttttttttaagatggcatcttgctgtgttgccaggctggagtgcagtggtgtgatctcakctcactgcaacctctgcctcctgggttcaagtgattctcctgcatcaggctcccaagtagctgggactacaggcatgctccaccacacccggctaatttttgtacttttaatagaggcgaggttccaccatgttggccaggatggtcttgatctcctgacctcatgatcagcccacctcggcctcccaaagtgctagaattacaagtgtgagccaccatgctggccaatttctccacattcttaccaacacttgttattatcttttttaggatggccatt

SEQ ID NO: 739813 - DNA, 536 bp, Homo sapiens
aatggtgctctgaacatttatctacaaatttttgtgtgaatatatgtttttatttttcctgggtatatacatatacctaggagtagagttgtggggttatatggtaactctaggtttaaccatttgaggaactgccaaactgttttccaaagtgccttcaccattttgtattcccaatttctcccctttttttttcttttttttaagatggcatcttgctgtgttgccaggctggagtgcagtggtgtgatctcagctcactgcaacctctgcctcctgggttcaagtgattctcctgcrtcaggctcccaagtagctgggactacaggcatgctccaccacacccggctaatttttgtacttttaatagaggcgaggttccaccatgttggccaggatggtcttgatctcctgacctcatgatcagcccacctcggcctcccaaagtgctagaattacaagtgtgagccaccatgctggccaatttctccacattcttaccaacacttgttattatcttttttaggatggccatt

SEQ ID NO: 739814 - DNA, 528 bp, Homo sapiens
attagcgtgaaagaccatctgatccagcagacttatttgttaatgcaccgacagcagcaacagatgtgctgtttttcatctacaacccgatctgctggctgattcatctgcttccgttttcattttcctgtcattgatttattaatgatgtcttacttatctgtggttcytttatggggtgggcttcctctggcatggtctcaagagagatgtttttgcaccttccccaggcatcaaaaacccagcccccttctccggtgttctttatcaccactccagagattagagactttaatcatttagtaactgaaataacctccgtggcttgcagagtttatggccaatttgtcttcattgcaccgaattcaactgcttttctttgctaaggaatgggccttgcttattatgctccttctttgcaccagagggaatcagtgtgttgtctacagacccaatgcagatagtgggtggctatgagtggctcaggaccatgaaagtatggctcagagaacacatgtatgtatacca

SEQ ID NO: 739815 - DNA, 528 bp, Homo sapiens
attagcgtgaaagaccatctgatccagcagacttatttgttaatgcaccgacagcagcaacagatgtgctgtttttcatctacaacccgatctgctggctgattcatctgcttccgttttcattttcctgtcattgatttattaatgatgtcttacttatctgtggttcttttatggggtgggcttcctctggcatggtctcaagagagatgtttttgcaccttccccaggcatcaaaaacccagcccccttctccggtgttctttatcaccactccagagattagagactttaatcatttagtaactgaaataacctccgtggcttgcagagtttatggccaatttgwcttcattgcaccgaattcaactgcttttctttgctaaggaatgggccttgcttattatgctccttctttgcaccagagggaatcagtgtgttgtctacagacccaatgcagatagtgggtggctatgagtggctcaggaccatgaaagtatggctcagagaacacatgtatgtatacca

SEQ ID NO: 739816 - DNA, 632 bp, Homo sapiens
tttatggaaaaaacactttatgtaatcaagctggttataattaaattacttacaatagtctttctagagattgggcttttatattaaaaatacactgaagaatgggttagaacaacaaaattttcttaaggtattgatttactcttcataaaatgacaagagattttaatttttaacccaaaagtttaatttttattgtgtctcactgttttcagctttctccccccatcaagaaggcctgatataataactctcttcttcaacatttttgtcagctcctgtaacttttttccttcagattctaactgatgttgtggactgatgctaaaaatgttttattttaaaggtctaaaggaaatgtctttttccaatgtaacgtcctgtgcacgtggctttaaattcttatataaaatagaaaactgtcwcttaggacacaggacacactcttcctacgtctaagtaagtcaagccattttcataaattttaacttgcagcctatctaaatggactccccgtagggaaaagcaatcacatttcagaaggtcttttgtttgtttgtttgccttgtggtaactggcttaacaaatagattttatattttattgaaataatttctacatcattgttatta

SEQ ID NO: 739817 - DNA, 560 bp, Homo sapiens
ttgacatttgagtataatgaagagagttgttttaaagtctttgtctagtaagtttgatgtctgggtttccttagggatattttctgtcaatttattttgttcctttgaatgagccacactttcccattctttgtatgccttgtaacgttttttgaaaactggacattctaataactataattactaagtggttactctgcaaatcgaacactccctacaaacacagtaatgttttgtggttttaaattttctttacttattatattgttaaggattttttttttagtgaaattttccaaagtgatttacaaaactgtttgctttataaggtgtggtcaccraagtctttttgtttccttaacaaatgttaagctaatgttttgacagtgattttcttgtatgtcaggaaccaatcaaacaggcaaatacaagaaaaacaaaaagaaaaacaagtaatcattgtccagcaaaatatgtctctaggccatgcagactggctttgtgctgggttctttaaagccggcacaaagtgtgtgttcactcttgcactgagtgaagtt

SEQ ID NO: 739818 - DNA, 546 bp, Homo sapiens
gaaaaggagagggcacagaggctcacaaagaaaagatgatttgaagatgattgaagtaatgcagctgcaaactcagggacactaaggattgctgagagccaacagcagtagaaaaaagcaaggcaagatacatccttagagctttttgagggaccttggcactgctgataccttgatttcagggttttagtcttcagaactgtgagcaaatacatgtctgttatgttaaggcaccagatttatggtaatttgttacagcaatcctaggaaatagtgcagccattttgaaacaaagcttgtcagaaagaatttcataccaatacatgttttcctcttcctatccctcgtgcatcakacaacacagagtatggaataaatatttgataatgtgaattctagaactctcatattgtgaaaataatacaaagtttatcatgtcttcacgatgtgttatacaaaggattttgaaaatgaaagcaatcttttcatatcacattgccctaatgtataatacaccacagatccaagtatgtccactaaaacagg

SEQ ID NO: 739819 - DNA, 540 bp, Homo sapiens
agaaaatacctagtaagatgtcccacagtgtttaaactaatagtgcattcactgcatggagacaacttgtgccagaactaacatgataggatttacttaatggcacatttaattacctaatggagctattcctaaaatcttgtataataacaattctgagctgatgcaacatttatcctagcagaatatttagtgaaatttagccaagaaacacattaaaagacgtttgtcacagccaatctgaaaaacacacaaactgctgaaattttgataaactaatacaatgggaaagtatatgtttgaaataggacaacctttaastcatattgttaagtagaaaaaatagatacaaaactatgcatacagtataactaattttgtgtagatttaaataatatatatcactttatgagtaaatacatatgttaccagataaatataaattctagaattacaaatatgacttttaataacagttgcattttatggcagaaatagtacaaatttagaaaagagataagattttgctaataatttata

SEQ ID NO: 739820 - DNA, 669 bp, Homo sapiens
tatgggtataaaagtcagcttgctgaagagtctaatctactcctgacatgcatgaggcaaaagatgttacaatcagagcctcctcacaactaaaaaatataatgaattcacattctatatcatgatactttgcatcatcaatattgctaatttaaaagtttgtcaacactccataacatctcctatgaggcaagctaatgttaataaccttatttcaataactaaraaaaaatggcttagcagtcatgagagagttacacctggactcaattaaagagctcaaatatcatcctacttttcactcactttatggtatgaaaacacaacaaatttagtcttcttttttcaatttaaagaggtgttcttgttatgttttgttgtatgacctgtcagttttctgtaactttaaaagtccgttacttaaaatattaagctttgtatagaaatagagtcctgataattagaagatgccccagtatcagagtaggtgtgatcagagttgcgtgttggctctggaggcaaatctaagtctcagctttggctccactattcaaaataatatggctgctatcaagccaattcgtctttgtaaaatacacagtaggacctctctcactggttttatgagggaaaaaaagacaatggggacatttgaacatttacatccaa

SEQ ID NO: 739821 - DNA, 588 bp, Homo sapiens
taaactatagcagggaagggagacgtggagggaaaagaactcatttgtttgactggtcactgggcttggtccttgacttaatctactacatttaatcttcataatagccatacaaactggatattatcatctcattttacattttataaaacaggctcccaggagttacacaacgtggtttaagaccatgtattgggtatcaagtgaggcattctcatccagctttactgmatttctgaactggggctgtaagggctttcccggaaatcccaaagacctccacctaatgagttgctcattgcctcaaggggaagtctgtaagagaatcagaaaacagaaatctcaaactctttacttttgggtttgccgattggtcttggatgtgtgtttgaaacagagcagacatgtttaatggaaaacaagagctggaagcagtttgggtttctatgaaaaggagtggtggagagcactcagaccccgggagccctatcctgctttcctctggggtcctccaagatggaaagtggcccctgcgccctcatctcactgtccccacactgctgtggccaaggtggcagggtagtgaca

SEQ ID NO: 739822 - DNA, 607 bp, Homo sapiens
ggaattgtttgcattttgtattttggatccaagtcagaagttaagtacaggtacaagattaagagagtttaaccaccccagttttgaatgctgggggggcagggagacccagtttcgttaattaacagtagcttagccagattgttgaattttgtcgggtttcgttttctctctcaaatcatttagaagtttttggggtttttttaagcaacacttaattactcctgaaactttgtctgaaaacgcaccatttgtatagatcatgaaaagttttaaggaaactcagagaaaaagagaacaacgcagcttaaaacttttaaaatgtcctccctcacccgtggctcaracagccctgcatctgccgtggccggcacgtttctggttgaactgcctttatgttaaagttcagatactggtagtgtgcccatttcttaagctgtctatttttatttgttgagctggggtttggctggctccactccagatgtctctctcacaagatttggtgctgatgatctatttatagaactgtggttctgttgccatggtaacatgctggaggccagggcggctggggagctatttctggactggtgctgtaatgtaa

SEQ ID NO: 739823 - DNA, 647 bp, Homo sapiens
tccaaaaccgtaattactattgcaccaaccagaatatatagaatatataacataatatatatttgaaatatactatataaatattatatattatatatttcatatatattatatatttcatatataatatatatatttmatatataatataatacatattttatatatattatatattatactctatatataatatagatcatatatattccacatattatatatattatactccatatataatatatatatttcattcatcatatatatttcatatatagtatatttaggcagggtcttgctctgttgcccagggtagaatgcagtgacacaatcactgcagcctcaacctcccaggcacaggcgatcctctcacctcagcctcctgagtagctgggactacaggcacgtaccatcacacttggctaatttaaaattttttgtacagacaggatctcactatgttgcccagaccggtctcaaactccgggacccaagcaatcctcttgtcccagcatcccaaagtgctgagattataggcttgagccatcacacccaacagagggtactttttctggctgttctgcaccacagcctccttggatgggtaggagtgtgttcatttatcatctagcacacaggctgct

SEQ ID NO: 739824 - DNA, 559 bp, Homo sapiens
aaaggggatccaaattggaagggaagaagtcaagttagccttgttcacaaacaacatgatcttatacctaaaataacccaaagatttcaccaaaaaaccattagaactgataaacaaatttggtaaatttgcaggatacaaaatcaacatccaaaagtcagtagcacttatatatgtcaatagcgaamaatctgttaaaaaaaatcaagaaagcaatcgcatttataatagctacaaagaatattaaatacctaggaatcaatctaaccaaagaagtgaaaggtctatacaaggaaaactataaaactccaatgaaaaaaatagaaaaggacatacaaaaaagtgaaaagatattccatcctcatggattgaaagaattaatagtattgaaatgacaatactatccaaagcaatttacagattcaatgcaatcgctatcagaaataccaatgacattcacagaaatagaaaaaaaaatcctaaaatttatatagaaccacaaaagactctgtattgccaaagcaatcctaagcaaaaagaacaaagttggaggcatcac

SEQ ID NO: 739825 - DNA, 559 bp, Homo sapiens
aaaggggatccaaattggaagggaagaagtcaagttagccttgttcacaaacaacatgatcttatacctaaaataacccaaagatttcaccaaaaaaccattagaactgataaacaaatttggtaaatttgcaggatacaaaatcaacatccaaaagtcagtagcacttatatatgtcaatagcgaaaaatctgttaaaaaaaatcaagaaagcaatcgcatttataatagctacaaagaayattaaatacctaggaatcaatctaaccaaagaagtgaaaggtctatacaaggaaaactataaaactccaatgaaaaaaatagaaaaggacatacaaaaaagtgaaaagatattccatcctcatggattgaaagaattaatagtattgaaatgacaatactatccaaagcaatttacagattcaatgcaatcgctatcagaaataccaatgacattcacagaaatagaaaaaaaaatcctaaaatttatatagaaccacaaaagactctgtattgccaaagcaatcctaagcaaaaagaacaaagttggaggcatcac

SEQ ID NO: 739826 - DNA, 559 bp, Homo sapiens
aaaggggatccaaattggaagggaagaagtcaagttagccttgttcacaaacaacatgatcttatacctaaaataacccaaagatttcaccaaaaaaccattagaactgataaacaaatttggtaaatttgcaggatacaaaatcaacatccaaaagtcagtagcacttatatatgtcaatagcgaaaaatctgttaaaaaaaatcaagaaagcaatcgcatttataatagctacaaagaatattaaatacctaggaatcaatctaaccaaagaagtgaaaggtctatacaaggaaaactataaaacyccaatgaaaaaaatagaaaaggacatacaaaaaagtgaaaagatattccatcctcatggattgaaagaattaatagtattgaaatgacaatactatccaaagcaatttacagattcaatgcaatcgctatcagaaataccaatgacattcacagaaatagaaaaaaaaatcctaaaatttatatagaaccacaaaagactctgtattgccaaagcaatcctaagcaaaaagaacaaagttggaggcatcac

SEQ ID NO: 739827 - DNA, 559 bp, Homo sapiens
aaaggggatccaaattggaagggaagaagtcaagttagccttgttcacaaacaacatgatcttatacctaaaataacccaaagatttcaccaaaaaaccattagaactgataaacaaatttggtaaatttgcaggatacaaaatcaacatccaaaagtcagtagcacttatatatgtcaatagcgaaaaatctgttaaaaaaaatcaagaaagcaatcgcatttataatagctacaaagaatattaaatacctaggaatcaatctaaccaaagaagtgaaaggtctatacaaggaaaactataaaactccaatgaaaaaaatagaaaaggacatacaaaaaagtgaaaagatattccatcctcatggattgaaagaattaatagtattgaaatgacaatactatccaaagcaatttacagattcaatgcaatcrctatcagaaataccaatgacattcacagaaatagaaaaaaaaatcctaaaatttatatagaaccacaaaagactctgtattgccaaagcaatcctaagcaaaaagaacaaagttggaggcatcac

SEQ ID NO: 739828 - DNA, 592 bp, Homo sapiens
atttcacgtacctctgatctaagttatttgtcacatgtgcatctaattttcaacaagaaaagattattttgatatatcaaaatgatcattatatttttccttgtgtattcatattttgtgcctttacagccacttcagtaggaaatcaggaattayatatgctgttagatctgctatatttaattccaatattttaaaatatataaataacttaaaatcataaaactactaaaaaatgaagaaaatgttaaaatcttgcagttttatgcttttaatacattaaccgagattcacaaatataattgtatatattaactataaaaagtataatacaaatgaatgggaaaaatctcgagaaagaatcaaaaacaactattatatttttattcatttactacataatgattctacacatcctatgtgacagacttactgtacttggtgccctggagcatatgaagatggattagatgctgatcccttccttctaggtgcataaattccaataaagtaaataattcataagataaataagcataagcttgttagataaggagccatacatcagaaagtgatagataaaatgttacag

SEQ ID NO: 739829 - DNA, 620 bp, Homo sapiens
cagaagggtgtacaccccctgtgatatggccagtaatatcatcgtctctacctttaaatactaggaacaacatcacagagggtgtctacaccccctgcgatattgggcataatgttatcctctcttcccctggttattaggaacagtatccctggtggggggaggtggagtacattaagaacatcactgggtgggtgtacaccctctgcgatattgggtgtattatcctctgtttcccaggatattaagaacaatatcacaggaggggtgtacagcccctgcgtttttgggagtaatagcatcctctccccctctcgatacaaggaacaatatcccagggtgggtgtacatcccctgcgctactgggcgtaatgtcatcgtctcccarcgtggatattgggaataatgtcacaggggggtgttcaccgtcttcgatattaggagtaatatcatcctctcccctcaggattgtaggcaaaatatcgaaagggttttacaactagtgcgatattggcagtaatatcatcctcctccaacctagatattaggaactttatcacaggtggctgtacacttcttgccatattgggagtaatatcatcctctcccatcatggatat

SEQ ID NO: 739830 - DNA, 565 bp, Homo sapiens
gttgactaaaatggattctctaatggttttcttagaacaatttcatgggaattgtattccctgagttattacatgttcagaaataatcaatttgtctttcaaattcagtggtagcatccatacaaattttatgaggccgtttttatttcattagagacccagtggatattgatccctgttttataggctgccttcctgcctgtctgctttccttctttccttctctcattgaacaaatatttgtggcatttctaatatgcaactrgccctattcttgggactacagtcatagcaaaacacaataatgctataaaaattatgccgtcagcattagttttatctactttataggttaaaaaagtattagtaggatgtctataattgttgaagttattattatatgcattaacttggcaatgccatgcttcaaggttggtcgtgctatatcaactttccattaatactatgagtactttctattgtagtatccaagcttccattttcattgtctctttaaaattgtatttttttagtcttcaatttattttctttttttcttcatggc

SEQ ID NO: 739831 - DNA, 620 bp, Homo sapiens
cagagaaagttaacacagcagacccaaagctgctatcgtgaaagcttggtctatgactgacatttgggagcttgggttttagaatgcctcatgccatttccagaactaataagagtagttcattgtgcctaaactgcacagcaatgttgtttatgcttttgagagtctgaaattttggtatatgttaaacagagattaccaaagtgactagtccccaataaaattcttagggactgaacctctaatgatcttccctgggcaatatttcataggggttgccataattctttactgaaagagttcagtacatccttcgtggttgtgctggatgaggactcttggaagcttatgctgatttgctctggactttgctacatgtatttgtctgttgcgggaagtcagggactccgaacggagggactggctggagccgcggcagaggaacataaattgtgaagatttcattttaatatggacatatatcagytcccaaaattaatacttttgtaatttcttacgcctgtctttactgcaatctctgaacctaaattatgaagatttcattttcatatggacatttatcagttcccaaaattaaaacttttataatttattatgcc

SEQ ID NO: 739832 - DNA, 619 bp, Homo sapiens
ctgaatctaatggctacattaataaatatatttaattggctttttaatcttcttcttaaattaaaactgaagatactcccactgtgttaaatggaaaattagcaaacccacaatccctctatcagccctcatttcttctcaaatcctgaatctaaaaatgttatttagttagttcatactgaaaacatttgtatttttacttattatggtttatgttatttgaagtttcctctctaaacatatttcccatagttgtttaatcttatttattcatttcaacagctttgctgctggcaggtgcttctctaggatggtttcagggacaggtttagctcagctcccctttcttattaaattaagaaacacttaatacttaaagatggttaagtagcawagtgtcatttgggaatatgtctttgtcaattgctgattccaatgttcaaagaaatttctctctcctgagaaagcagcaactacgggaaggcagatgagtgtctgactgcttgatttgtggctctttttctttgaatcagcaccaacagttcattcatcattcatttggagacttttgtgagatattgacaaattgagaagagcagcatatgtgacagaacattat

SEQ ID NO: 739833 - DNA, 619 bp, Homo sapiens
ctgaatctaatggctacattaataaatatatttaattggctttttaatcttcttcttaaattaaaactgaagatactcccactgtgttaaatggaaaattagcaaacccacaatccctctatcagccctcatttcttctcaaatcctgaatctaaaaatgttatttagttagttcatactgaaaacatttgtatttttacttattatggtttatgttatttgaagtttcctctctaaacatatttcccatagttgtttaatcttatttattcatttcaacagctttgctgctggcaggtgcttctctaggatggtttcagggacaggtttagctcagctcccctttcttattaaattaagaaacacttaatacttaaagatggttaagtagcaaagtgtcatttgggaatatgtctttgtcaattgctgattccartgttcaaagaaatttctctctcctgagaaagcagcaactacgggaaggcagatgagtgtctgactgcttgatttgtggctctttttctttgaatcagcaccaacagttcattcatcattcatttggagacttttgtgagatattgacaaattgagaagagcagcatatgtgacagaacattat

SEQ ID NO: 739834 - DNA, 629 bp, Homo sapiens
atttcatcctctctttaagtcctaagagacttcaaccttcaaagtacattcaagtaatttgaggaattgttttttaaaacctcagaaaatttcttgactcatgccatagtaggaataatgataagctagaaacatgaatttttattgaacattaataataaagaatggtgacttggacagatctgagagagctttgaaggctgggcaaaactgccaagactatgcaaaagacaatataaaatcttatctccccaaatagaaagtaaatttattttggttttggatagtattttataacatttctatcctccgaagcacctaccacaatgctgggtgcataacagttgcccaataattttttgagktttggttgatttatatggatactagattaagagcttataagccttaactctactatgagcaaatcgctaaatctatattaccccgtttcctaatttattaaatgagatatctgtcctatgatgcttatagaaatgttatgaagatctaaaagctatttggaagttaaaaatgttcaaaagtgtaaggtgatgtcaagaaaattactacttaattccatttaaataaaaattttaaataaattgagttattaaagttgtaccttt

SEQ ID NO: 739835 - DNA, 629 bp, Homo sapiens
atgaatgagtgctttcttagactacagaacattctcccctcaattcccttttcttattaccagtagtattcttaagtcaatatcaggctactctatttcacttacttgccagtgttccaatcttctatccctactggtctgtcccatacttactatgctatgagctctgatttatcccctaaatctctcactaactcatccagttttctttttatccctttcctccaattcttgacagagttagagtgacttttttaatgagtractccaaactgtcttgcagtatacatcctctaactctttgctacatttaaataagaaaattattgcctttaacatcataaaggtagtatgtatagtataaggtaccaagtatttattatctcagtgaaccaaatttcgccactcactaagcataaggtcttgggtaaaatacttaacctttttgagatttgggggtgtttgtcttcataagataataataataaagtcaattttgaattatttagggaattaaatattatcatacctaaagagtacaattttttttacattttaaatcccagatataattatactaatcagttgaattttgtatttctttttttagccatccattttctatttta

SEQ ID NO: 739836 - DNA, 588 bp, Homo sapiens
actcctcctactcaaatgtaagctccaagattggaagagtttttcttggttttattatttcagtgcttagaacagtgctagacacataggaggcattcagtaaatatttgttgagtcaactgaattagggtttttccccagcattaattagcctgtaaaatctgagaaggcagaaactgttcagttttgctcactgctatctccagcttctaatggacatacagtaacccttcataaatatttgctgaacgagtgattcagtgaacaaatgaatagagaagaccaacatccgaaaagttattttattttcaagcctcatgtctttaactgttttayatcagcctttcttaagttgaccgtcattaatatttgctgaatgaatgagtcagtgataaacagagaagaccatcaccctaaaataacgacccctccacttttaagtcttacgtctttaatgggtttcatataatctttctgcgctctttttactgtccagtgtgggagctgacactagtttgccttaagtccttaaaaatcgcacccggaggcgcagtgtcataggtaacccaagctttcctagtaaacatg

SEQ ID NO: 739837 - DNA, 441 bp, Homo sapiens
atgacgggctgcaggtcccgagccctgccgcgcgggaggcggctgaggccccgtgagaattcgagcgccgcaggggcaggctggcagtgctgggggacccggtgcactctccgcagctgctggctcgggtgctaagcccctcactgcctcgggccagcggtgccgacccgccgctccaagtgcggggcgggcggagcccgcgcccacctggaactcgcgcgggcccgccagcgccaaccgcagccscggttcccgcccgcgcctctccctccacacctccccgcaagcagagggagccggctccggccttggccagcccagagacaggctcccacagtgcagcggcgggctgaagggctcctcaagcactgccagagtggacaccgaggccgaggagacgccaagagcgagtgagtgctgctagcaggttgtcacctctca

SEQ ID NO: 739838 - DNA, 644 bp, Homo sapiens
ttaaattgaaaggtgatttctaaagaaaaaattttaacacaaatggtttctgtgttgagtttagttaagcatcacttatttattaattcttgtgctttactgatacaggaactgtgccatgagttttaaaagtggttcaaatatggccttaatcaaagtacattaggctaattaacactatatcactaatgagttattcagtctgtgacacacccagaagatggagactgtgcgtataaaggcaaaggatagctcatttaacaaggatgaggggaaaaggaatygtctctgagaggacataaaatctaaccctctaggtctgacaagtgattcctggccaagatagtcaggatagtttgcagtgaccaaccttaatgaccaatcaaatagttattgctgtcttgactgggctttaacctcttctaagatttgagacaactggaactatgtcctgctcacttcactagccatgcatggttggcttacttgaacacataaagataaagacagtccacggttggacaaatgtcatttatgtgagtaagaaggagaggaaaactaggctgtaaagaaattgctagatggaggtgggggtggaagaagatagctgtaggtgcaggagacagcaggagtctcctgtttca

SEQ ID NO: 739839 - DNA, 655 bp, Homo sapiens
ggccaatggctttcacccaagtatgaccaccatttgcaactacatctaccacaagggtttgcttttctcctaaggtatctgtataaccaaagacatgaagaacactaacaacttcttccaggttttctgctgattccacaatggctctcaggtgtgttaggttagtgctctgtaaatgagactctttaatagctactttcccagcttctactttctgcaagaattttaattctgccttcaatttgctgcacagctttgcaccaccttctatgccaccttttcttgatctagaaagtgattctgctctcttgatcagttccttggctatggcgattcgttcacagagcatggaatgtgcagacatgctgtcagcattattcctttcctagggaaagaaacaaggcaaacttcagtagtctcctaaaattatgacaatcaattcttcactggtgattaaaaacttcaatctagcaacacagcttatggagggtgagtctatgaaccygggcttgtgtatgtctcattctggagtgactgcttcctctgatagctaaggaaaggatggcagctacacttttgaactcttctttaggtacgtctgacacactttagaccttcatttcttcagcttgaaagccatggggacacagcatgg

SEQ ID NO: 739840 - DNA, 670 bp, Homo sapiens
agcaaactgcttgtagaaggggatatttagccactgattcacaaagcagaaccccagaaagcttcaggtgccttgaaggtagaagggagggcagtaaattgttcaggcagaagactagtttaagatgctaaagacagggcatcagagggattccagacacaaagcctaacaaaggatgagaggtgccatgatgttttcctactgaatagtgcaatgctagcagcccccttctctgcccctcccataatgcaggcacccctctaccgctccctaccactatctccccataaccctatttttctctgaagaaatgagtagacaaaagaccctagagaaatggctcggcaataccaacattcagcatcccctagtgtgagcctcacgaacacagcatttcccaacgtttttgttatttgaaggaaatggaaaacagaacaaaatggtctcaaaaagtattctataactagcatcttcaaataaaagatatttcagctatgaaacaagaggatttctttttttaaggagacagcagagcacaggaaatggttcttctgtagtaaaaatsatatcccaaatttcaaaacatcaatgagttggaaaaatttagaaagtagaaatagatgaaaaatggagcaaaaacaaaaggatccagtatccaattaacaggagt

SEQ ID NO: 739841 - DNA, 552 bp, Homo sapiens
ccctcagtttatcctatcagtggcagcacaatgcagtatccagcctatatagtggtgacaagattcactgcctgatcacattccactgaccttgttgcgttgattcactgaagtgaaactttgcctctacctatcttgctccacaaaatcatgagcaataaagtaatactccttttacttgtttraatgacagacacagaaagctgtcaatctctttcaacttgctggtaccctgagtaacaagattattctctcttcctgtgaaatataaagggggtgattacacaagcattgggatcctggttggctgccacactcaacaacttgcagtggtgtttgagaattttgttcctttgtgaagaacaggaaaaaagataactctggatagtgatactttcttttgttgcctcatactttttaaaatatagtttattataacttaaattgcttttatcatttttaaactgcactggcgaaaactaaagcccttacgcccagttcctggatagtagaagaggaatatgtcagaagagaaagtccgctgaacagaga

SEQ ID NO: 739842 - DNA, 552 bp, Homo sapiens
ccctcagtttatcctatcagtggcagcacaatgcagtatccagcctatatagtggtgacaagattcactgcctgatcacattccactgaccttgttgcgttgattcactgaagtgaaactttgcctctacctatcttgctccacaaaatcatgagcaataaagtaatactccttttacttgtttaaatgacagacacagaaagctgtcaatctctttcaacttgctggtaccctgagtaacaagattattctctcttcctgtgaaatataaagggggtgattacacaagcaytgggatcctggttggctgccacactcaacaacttgcagtggtgtttgagaattttgttcctttgtgaagaacaggaaaaaagataactctggatagtgatactttcttttgttgcctcatactttttaaaatatagtttattataacttaaattgcttttatcatttttaaactgcactggcgaaaactaaagcccttacgcccagttcctggatagtagaagaggaatatgtcagaagagaaagtccgctgaacagaga

SEQ ID NO: 739843 - DNA, 523 bp, Homo sapiens
aggaagatgaaagaaagcatcaaaagaaaaccactctggcagggacttctcattccttttcattttattttctggcaaagactacagtgcatctattacttgtctgagaggttacaaaagaggaagaagcctggggttgtataataaygttggaagcctaggagaggccacaaagagtatcttgtagagtgggcggggttcagaaggttctaagccatgctgtgaatctggcacacaggcctttgtgctcaaaacacaacatctggggtgcattcccagctcttacaaggagcaatgaatgctgctaatgacattgcatttggggattttaatggggggatagaaatttaaccaaagttggagggaattagtctgcagtttagcaggcttcttgctaaatgtctacctccagaggttctactgctaaaagagaaagcattctagacacttagcctttctcacttcttttgttaaaatgatataaatgccaaaaacaaaaacaaaaacaaacaaataaaaaaaa

SEQ ID NO: 739844 - DNA, 623 bp, Homo sapiens
atctctacaatcatttttaaaaaagcaaatggacaacagatgctaacgcacttggaaaaaaaattctaccttcataaaataatggctgccagtgagtccttcttatgtggtactcttcagcttgccttccccttcacagtgatgctgtaagacaggtattattctcattttaaaggaataaatcgagtcacctccaagaccacataaactagaaagcagagtactgggattcagcttgaagatgctgctaaattattctcactgtccatgagcttgagtctyccctttgtgcctggagtattaaggggaagaggaccattatatttttctcacagacattctctcctactcccatcgttctatttcctgctaactcctgaccccattcatgtggcaaaagaagaggctagattgagctgagtgagagcaggtgttggaggaggcaaagaatggagagaatttcctcagtcatggaattctatgtgattgatttggggtggtcatggtgtttccttcacctgaccagcaatcttgaagcatcatcagtggtccgtaagatgtacatatggtcggggccttctctgaccttttatgtttccttctagcattatccaggtgaatgc

SEQ ID NO: 739845 - DNA, 623 bp, Homo sapiens
atctctacaatcatttttaaaaaagcaaatggacaacagatgctaacgcacttggaaaaaaaattctaccttcataaaataatggctgccagtgagtccttcttatgtggtactcttcagcttgccttccccttcacagtgatgctgtaagacaggtattattctcattttaaaggaataaatcgagtcacctccaagaccacataaactagaaagcagagtactgggattcagcttgaagatgctgctaaattattctcactgtccatgagcttgagtctcccctttgtgcctggagtattaaggggaagaggaccattatatttttctcacagacattctctcctactcccatcgttctatttcctgctaactcctgacccyattcatgtggcaaaagaagaggctagattgagctgagtgagagcaggtgttggaggaggcaaagaatggagagaatttcctcagtcatggaattctatgtgattgatttggggtggtcatggtgtttccttcacctgaccagcaatcttgaagcatcatcagtggtccgtaagatgtacatatggtcggggccttctctgaccttttatgtttccttctagcattatccaggtgaatgc

SEQ ID NO: 739846 - DNA, 606 bp, Homo sapiens
tatttcatagactgagatcacaagactcttgaacagaagaaatgccaagagagctagaatcttacagatggtggtattaataatggagcaaactagaaccaatgacaaagacatgaagtctgaaaatagcacagagaatataaatattgtgagatgaatgttcccccttcaattctccttatttgccaaatattttcatttccttttgtcattatagaaaataaaaccatgcatcacagtcaaaagtgctccactarcaacattgtatgattcactctttttgtcatacatgtctttagtaattgatggatattaaaatcacacagactatttaataagggcttattttacttgcatcgccactttgattcaaaaaaagatttaaggtagttaataaggttagaaggaaagagagttaacaaagacaagaactttaactagagtcaaaactaaagtcaatatttaagaaataaacaccacatagtctcccacgctttctctgggtgacatttacagcgggtgaccaaggagaggctgagtcatcttttccaccactgtctaccctgagggttcatgcacaattaggcagagttcaaactcagaatt

SEQ ID NO: 739847 - DNA, 662 bp, Homo sapiens
tttaaattcaacaattaaacctgtttggataacactctgaacccaataaaggtattggtctacgggtcccttctctctctctctctctctctctctctctctctctctgcctgtactccttggtgtgtggtgtgtgtgtgtgtgtgtgtgtgtgtgtgtgtgtgtgtgtgcgcgcgcgcgcgcccgcgctccctccaggatctgtaagtaccaaaaacgcttaaactttcacactgcggttgtgtcactgaagcagtgcctgaaatctaatccctgagtgtgacgccgccccaaagggccccaagcaggtagatcccatgctgatgctcttttatcctggcctctcagctgytgaggagagtaattgccgggctaaactgataaagtttcattccaaacaattagcctagtctgcaggattgcagtcgcggcttggacaccatcccggtgtctgtcccccgcagagggcttgctaccttgctgtatcagctggcccagcaggtctggggccgcgcgctgcttacaggcgctggatctcgctgctcgtcgctgcgcgctactaggtcctgctgtcgtccgagtcgcctccgggactctccggaattgtagcggctgtagccggctccttgcctgcggcgcggagggcaggtcccagtggtagg

SEQ ID NO: 739848 - DNA, 577 bp, Homo sapiens
cccaagagtttgaagctacagtgagctatgattgtgccactgcaccccagcctgcacaacagagtgagaccatgtctgaaaaaacaaaccccaaaattccagaaaacccaaaacatatatattgctagatttaatttgctagtattatgttgaagaattttacatttatatgcacaagagatattagtatgcagatttattttcttgtaygtacttgttcagtttcagtattaggataacacaagcctcatagaatgtattgagatgtgttccctcctcttccatttttggaagaatttgttgggaaatggtattaattcatctttaaatgttggtataattcaccagtaaagtcatctatgcctgggtttttctttgtagatagtgtttaaattactgtttcaatgtttttacttattatagatgtattcaggttttctgcttattcttgagtcagttttggtagccggtatcattctagaaacatgtccatttcatttaggtcatctaatttgttggtatacatctattcatagtatttccttatattcctttttatttctctaaggtgggtagt

SEQ ID NO: 739849 - DNA, 552 bp, Homo sapiens
tacacccatagatatggcatctacattttaaagtaggatccccaaataactgcttcaaattattgtgtcttatgccctctaggtccccccaaaatctaactggcattcctcttgatgcagctttaattcagtcccttgttggtagtgggtaggggagaaccatgtccactcttcctgcatgccatataagctgagagctttgaacccgtgcaagggtagggctcctggccacaatccctctctgtcccaggcctctgccctctctggggtctcctgttttccggygcccctgacattcctcattagcaggggtcagccctcaaggcctgccaagctgtattctccacccaacgcagttcccacccagggaggctggggttgctctgggtcgggggtgaactccatttccggacccctggcccgcccagttgcagctgcaaaaggcattaagcttttttttggagaaagaatgggcttgggttgatgatgatgacagctggggagtgttcctgagctcagcctggccctatcttgcttcccttccttggcccc

SEQ ID NO: 739850 - DNA, 628 bp, Homo sapiens
ggtgagtaataattcctggtaaagaaagtaggagtcaatgacaacacttatcagtttgttttaggtaggtctagagtctgtgagtaccccctgtgattttatgttcgattctgattagtccatcttccaggaccaaacaaaactgaayaggaactcaagtcactcaagtaacttaaataaggaggtgccttgaactcaactgtacttgctgacggaggggctgtagggtgaaaggagagaagcagggattttgttaggcagcctttctggcttccttttctctcctgaccagactttgcttcaagactctcttctgttttatagatgtaattccactcaacctcataactttataagttgtaggaaaaatgagcaggtgcaaattcttttaaattcaactttattggagcctgagacccaaggaagtctcttgggcatatattcagttactccagatgatgcaaatctagaaatgagaagtatgttttctttccttttttttcccctcttttggcttagcaaagccacagaaactctaggttattatgttttaaaatgtttttaacatattttcagcttacaaatgtttttatgtgatttcctccaagcagatccaattcctcatgca

SEQ ID NO: 739851 - DNA, 628 bp, Homo sapiens
ggtgagtaataattcctggtaaagaaagtaggagtcaatgacaacacttatcagtttgttttaggtaggtctagagtctgtgagtaccccctgtgattttatgttcgattctgattagtccatcttccaggaccaaacaaaactgaacaggaactcaagtcactcaagtaacttaaataaggaggtgccttgaactcaactgtacttgctgacggaggggctgtagggtgaaaggagagaagcagggattttgttaggcagcctttctggcttccttttctctcctgaccagactttgcttcaagactctcttctsttttatagatgtaattccactcaacctcataactttataagttgtaggaaaaatgagcaggtgcaaattcttttaaattcaactttattggagcctgagacccaaggaagtctcttgggcatatattcagttactccagatgatgcaaatctagaaatgagaagtatgttttctttccttttttttcccctcttttggcttagcaaagccacagaaactctaggttattatgttttaaaatgtttttaacatattttcagcttacaaatgtttttatgtgatttcctccaagcagatccaattcctcatgca

SEQ ID NO: 739852 - DNA, 628 bp, Homo sapiens
ggtgagtaataattcctggtaaagaaagtaggagtcaatgacaacacttatcagtttgttttaggtaggtctagagtctgtgagtaccccctgtgattttatgttcgattctgattagtccatcttccaggaccaaacaaaactgaacaggaactcaagtcactcaagtaacttaaataaggaggtgccttgaactcaactgtacttgctgacggaggggctgtagggtgaaaggagagaagcagggattttgttaggcagcctttctggcttccttttctctcctgaccagactttgcttcaagactctcttctgttttatagatgtaattccactcamcctcataactttataagttgtaggaaaaatgagcaggtgcaaattcttttaaattcaactttattggagcctgagacccaaggaagtctcttgggcatatattcagttactccagatgatgcaaatctagaaatgagaagtatgttttctttccttttttttcccctcttttggcttagcaaagccacagaaactctaggttattatgttttaaaatgtttttaacatattttcagcttacaaatgtttttatgtgatttcctccaagcagatccaattcctcatgca

SEQ ID NO: 739853 - DNA, 533 bp, Homo sapiens
tggatgcacaacaatttaacagatcttttaaattgtttaaaaatatttttcttctgaactaagtatttttgtgcatgtgttattgagagcattacaggaatctgtagggtaagtgcgtaggaatagaattgctgggttgaatgacacatgcatctgaaatattgatagatagtgcagaatttcctggaccyaacatacattcctatgggattgaccattaggaggccaaagaacggaagtggaggggtagggagtagaagaggagggtggggcagtgaggcctggaatagcagacatcaagattctggtggcacagttcctgctgaggacaaggtccagggtgtgcccgcaccaggaagtgggtggcatggggcacagtgcaggcgaaggtcagtgaagcagaggaagttaaagagctgtgagttggtgggtgactcaccccggtgatgtcagctagtttatgctggtgagctcttcatcagaactggagaaatgtggttagagaaaccttcagcttctctttaaatctagca

SEQ ID NO: 739854 - DNA, 658 bp, Homo sapiens
gggaaatgaagatatgaagaaaggcaatggagagttcaagttgcgggaacaatgaattttaagtcctgagaattttaagaagtattactggagttggaacatgtagggcgaataattgcccctcaaagatgtccatgcactagtcctcagaatctttaaatatgtttgctaggttatgcagcaaaggggaattaagattgcagatgaaattaagagaccttaagaaaggaagttyatcagagtggactcaacataatcacagggtccttaaaaatggaatggtagaagacagttggaggcagatgtgactacagaagaaggtcagagtgacacgatgaaggacccaacgttccattgctggctttgaagctggaggaaaggagctatgaatcgaggaacacaggtggcctttccaggctggaaaagacaaggaaaaggatgctacccagatcctacagaaaaaaacacggccctgccaacatcttggttttagctctgtgagtcccatgtcagacttctgatctacagactgtaagaaaaatttgtgtcgtttaagccattaagtttgtagtgatttgctatgacagcaagaaaacactgcaggttgaggatcccttttctgaaatgcttgagatcagaagtgttttggatttgggct

SEQ ID NO: 739855 - DNA, 575 bp, Homo sapiens
catatctgattggccattttggaaaggctaatcagaaactcagaaagaatgcaaccatttgtctctcacttacctatgacctggaagccctgcccctcttcaaattgtcctgcctttccaaaccaaaccagtgtttgtcttacatatgttgattgatgcctcatgtctccctaaaatgtgtaaaaccaagctgtgctctgaccatcttgggctcaygtcttcaggacttcctgaggctgtgtcgcaggcacacatcctcaaccttggcaaaataaactctctaaattaactgacctgtctcagatttgtggggttcacattttggtaacatgaagggattgtgagtggaggtacccctgacctttgacaaatctcctatcggtgcttggcaccagcatgagctgtctatatagctcaaaccaacaggacaatttgctgaggcctggaagcacctcctccagagaatccctgattgcccacaatttggtcaagacctaaagtttattttgctgtataatttccttttttttggagtttacttgcttccaacacaaggaaggcaagtttttcctgct

SEQ ID NO: 739856 - DNA, 500 bp, Homo sapiens
tttgcccccaaggcaggtcatataaactagagcacatctttcccaaggtgggttatactactctaaccttcccctgcctttctgtgtaggagctgaacacaaataaattctatgacctgctttgtctgatctgatagcgggtcataagaccctcattccacaggggacctgccctatacctgggaagamggaacgctgcacagaaaggctcagaaaaatctgaacagacaggctcttctgggttccccactcagtctattgtcatcagatcgttctcttttttgtccaatcacatgtttacacggctatccattcttcattgaaccgaagcataaaaatagttttcctgggtgttcgggtcctcatttctgaaggcgtccaagtcataagaaactctgattaaataaatctgttatgctttagttctgggatacatgtgcagaatgtgcaggtttgttacataggtatagatatatgtatgccatggtggtttgctgcac

SEQ ID NO: 739857 - DNA, 582 bp, Homo sapiens
taatgaagatcaaaacagaaattgataaaatagaagacagaaaaacagtagagaaaatcaacaaaaacaaagctggtcccttgacaagaaaaataaaatggagccaggcatggtggctcacgcctgtaatcccagcactttggaaggcgggacagttggatcacctgaggtcaggagtttgagacgagcctgaccaatatggtgaaaccccatctctactgaaaaatgcaaaaatcagctgggcttggtggtgcacayctgtaatcccagctactcaggaggctaaagcaggagaatcgcctgaacccgggaggcggaggttgccccattgagccgagatcgccccattgcacaccagcctgggcaacgagagtgaaactccatctcagaaaaaaaaaaaggaaaagaaaaagaaaatggataaaactcgagatagactgattaggaaaaaagagagatcaaaatttttcatattaggaatgacagaataatatctacagatattaaaaggataaaaagggagtatcattttaaaaactttatgcctataaattttacaatggaaatgaaattaataaattt

SEQ ID NO: 739858 - DNA, 525 bp, Homo sapiens
ttacagattaaatctcactactcattattggtctattcaagaggtctatttatttgtggtacaatcatctggaaagcttctatgttaccaggaatgtatccatttcctctaggttttctagttgttcataatagtcttcgaagaacttttgtatttctgtggtatcagttgtaatgtcttcttttacrtttctgattgtgtttatttggatctactccattttcttggttaatctggtaatgggtttattaattttgtttatgttatcgaagaaccaatttttcatttcaatcatcttttgtattttttttttttttggtctcaatttgatttagttcttctctgacctttggtatttcttttcttctgctaactcttgtgatgatttctttttcttgtttttctagttccttgaggtgtgatgttatttgtaatctttttacctttatgatgtagatatttaatgctataaacctcccttataatactgcttttgctgtatcccaaaagttttgatgtcatgtt

SEQ ID NO: 739859 - DNA, 525 bp, Homo sapiens
ttacagattaaatctcactactcattattggtctattcaagaggtctatttatttgtggtacaatcatctggaaagcttctatgttaccaggaatgtatccatttcctctaggttttctagttgttcataatagtcttcgaagaacttttgtatttctgtggtatcagttgtaatgtcttcttttacatttctgattgtgtttatttggatctactccattttcttggttaatctggtaatgggtttaytaattttgtttatgttatcgaagaaccaatttttcatttcaatcatcttttgtattttttttttttttggtctcaatttgatttagttcttctctgacctttggtatttcttttcttctgctaactcttgtgatgatttctttttcttgtttttctagttccttgaggtgtgatgttatttgtaatctttttacctttatgatgtagatatttaatgctataaacctcccttataatactgcttttgctgtatcccaaaagttttgatgtcatgtt

SEQ ID NO: 739860 - DNA, 656 bp, Homo sapiens
atttctaagtattttattgtatgcgtggctactgtaaattggataacttttaaattccctttcacatgttcactgttggcatatagaaatgctactgatttttgtgtgttgattttgtgttctgcaacattactgatttttaaaatcagctctaataatttttgtggagtctttaggtttttctaaatataagatcatataatcagcaagcaaggataacttgacttcttccttttcaatttggatgtcctttatgtctttctcttgtctgattcttctagctaggctttctggtactatgttgaataayggtagtgacagtgcacatacttgtgctgcttcagatcttagagaaaaggctttccatttcttttttcctattcagtatgatactagctgtgggtctgtcatacatggctttcattatgttgaagtatgttccttctacacccagttttttttaaggattttatcatgaatgaatattaaacattagctaatgctttttcaccatcaattaagatactcatgtggttttgttttcagttctgttcatgtgatgtatcacattgattgatttgcatatgttgaaccatccttgcatccaagggataaatcccacttggtcatgttgaatgatctttctaatgtattgt

SEQ ID NO: 739861 - DNA, 656 bp, Homo sapiens
atttctaagtattttattgtatgcgtggctactgtaaattggataacttttaaattccctttcacatgttcactgttggcatatagaaatgctactgatttttgtgtgttgattttgtgttctgcaacattactgatttttaaaatcagctctaataatttttgtggagtctttaggtttttctaaatataagatcatataatcagcaagcaaggataacttgacttcttccttttcaatttggatgtcctttatgtctttctcttgtctgattcttctagctaggctttctggtactatgttgaataacggtagtgacagtgcacatmcttgtgctgcttcagatcttagagaaaaggctttccatttcttttttcctattcagtatgatactagctgtgggtctgtcatacatggctttcattatgttgaagtatgttccttctacacccagttttttttaaggattttatcatgaatgaatattaaacattagctaatgctttttcaccatcaattaagatactcatgtggttttgttttcagttctgttcatgtgatgtatcacattgattgatttgcatatgttgaaccatccttgcatccaagggataaatcccacttggtcatgttgaatgatctttctaatgtattgt

SEQ ID NO: 739862 - DNA, 656 bp, Homo sapiens
atttctaagtattttattgtatgcgtggctactgtaaattggataacttttaaattccctttcacatgttcactgttggcatatagaaatgctactgatttttgtgtgttgattttgtgttctgcaacattactgatttttaaaatcagctctaataatttttgtggagtctttaggtttttctaaatataagatcatataatcagcaagcaaggataacttgacttcttccttttcaatttggatgtcctttatgtctttctcttgtctgattcttctagctaggctttctggtactatgttgaataacggtagtgacagtgcacatacttgtgctgcttcagatcttagagaaaaggctttccatttyttttttcctattcagtatgatactagctgtgggtctgtcatacatggctttcattatgttgaagtatgttccttctacacccagttttttttaaggattttatcatgaatgaatattaaacattagctaatgctttttcaccatcaattaagatactcatgtggttttgttttcagttctgttcatgtgatgtatcacattgattgatttgcatatgttgaaccatccttgcatccaagggataaatcccacttggtcatgttgaatgatctttctaatgtattgt

SEQ ID NO: 739863 - DNA, 655 bp, Homo sapiens
cctaatcacacagttctactacatttttcaggcttccttgcttaagtgagattttgtgtctgatttctgaacaatagaatttaggaggaagtgttgggcaatacttccaaggctatcccataaaaaaatttctactgggatttcccatgctgctgtcagcaatgacttcagtagttatatgttgaatatagaggagccacaaaatgaaaggagcctggattactgaatcaccacttggatgagagctcccagctaattggtaacctatgtttttcactttatataaatgttaaaccactcatatttgaggatttatttgttacaatagctactataactttatttaacagaaattcrttctttgaaacaaaaaatacctgccatagcagaaacctaaaatacatgtataagtttaatggtcatgcagtgagcagaaaggtaactgacttggaggctgaaaatatgaaggcccattatacgcagtggcaaaacatttattaacactcttgcctgctataaattggaaggaaaaccatatgcccactgaatatgcagctccaaagagtcagagtcagggtaatagtatatcctgttctgatgttctgcattgagaaagtattcaaagagattaattagaaaaatatttggctagttt

SEQ ID NO: 739864 - DNA, 655 bp, Homo sapiens
cctaatcacacagttctactacatttttcaggcttccttgcttaagtgagattttgtgtctgatttctgaacaatagaatttaggaggaagtgttgggcaatacttccaaggctatcccataaaaaaatttctactgggatttcccatgctgctgtcagcaatgacttcagtagttatatgttgaatatagaggagccacaaaatgaaaggagcctggattactgaatcaccacttggatgagagctcccagctaattggtaacctatgtttttcactttatataaatgttaaaccactcatatttgaggatttatttgttacaatagctactataactttatttaacagaaattcattctttgaaacaaaaaatacctgccatagcagaaacctaaaatacatgtataagtttaatggtcatgcagtgagcagaaaggtaactgacttggaggctgaaaatatgaaggcccattatasgcagtggcaaaacatttattaacactcttgcctgctataaattggaaggaaaaccatatgcccactgaatatgcagctccaaagagtcagagtcagggtaatagtatatcctgttctgatgttctgcattgagaaagtattcaaagagattaattagaaaaatatttggctagttt

SEQ ID NO: 739865 - DNA, 571 bp, Homo sapiens
aaatattaagcctgtgacataatcagtgtcctttcatttggagtgatatttcaatatatacttacttgtaatattccaacctattttccagtcagcctttttagttaaaagcgttatcaacttactcaactttccttaaaaataaagacaaaaaatcaaaatcttacattgccatattatcatgttacatctccccttcccttcacattcaaaacttttaaaaagtrtgatctagaattggttttcattttcttacaaactgtttctttgttcctcattatcgagttttcattcaaaatgaaagtgcctttcttgcaggtaattggttatctcctaactgtcaagaccaaatgcttcttctcaatcctcgctgggtatttgacactgttcatcaacaccattgtaaacactatctcatttttaaaaatcttttttcttcctcttcacaataacgttatgacgtacaggctgatgactaccacatctataattcttgccctgcttcctctttcaagctctagactcattttcaacatatggcatggcatgtgtctccttgtgaatatgccgc

SEQ ID NO: 739866 - DNA, 571 bp, Homo sapiens
aaatattaagcctgtgacataatcagtgtcctttcatttggagtgatatttcaatatatacttacttgtaatattccaacctattttccagtcagcctttttagttaaaagcgttatcaacttactcaactttccttaaaaataaagacaaaaaatcaaaatcttacattgccatattatcatgttacatctccccttcccttcacattcaaaacttttaaaaagtatgatctagaattggttttcattttcttacaaactgtttctttgttcctcattatcgagttttcattcaaaatgaaagtgcctttcttgcaggtaattggttatctcctaactgtcaagaccaaatgcttcttctcaatcctcgctgggtatttgacactgttcatcaacaccattgtaaacactatctcatttttaaaaatcttttttcttsctcttcacaataacgttatgacgtacaggctgatgactaccacatctataattcttgccctgcttcctctttcaagctctagactcattttcaacatatggcatggcatgtgtctccttgtgaatatgccgc

SEQ ID NO: 739867 - DNA, 571 bp, Homo sapiens
aaatattaagcctgtgacataatcagtgtcctttcatttggagtgatatttcaatatatacttacttgtaatattccaacctattttccagtcagcctttttagttaaaagcgttatcaacttactcaactttccttaaaaataaagacaaaaaatcaaaatcttacattgccatattatcatgttacatctccccttcccttcacattcaaaacttttaaaaagtatgatctagaattggttttcattttcttacaaactgtttctttgttcctcattatcgagttttcattcaaaatgaaagtgcctttcttgcaggtaattggttatctcctaactgtcaagaccaaatgcttcttctcaatcctcgctgggtatttgacactgttcatcaacaccattgtaaacactatctcatttttaaaaatcttttttcttcctcttcacaataacgttatgacgtacaggctgatgactaccwcatctataattcttgccctgcttcctctttcaagctctagactcattttcaacatatggcatggcatgtgtctccttgtgaatatgccgc

SEQ ID NO: 739868 - DNA, 596 bp, Homo sapiens
caaaacttttaaaaagtatgatctagaattggttttcattttcttacaaactgtttctttgttcctcattatcgagttttcattcaaaatgaaagtgcctttcttgcaggtaattggttatctcctaactgtcaagaccaaatgcttcttctcaatcctcgctgggtatttgacactgttcatcaacaccattgtaaacactatctcatttttaaaaatcttttttcttcctcttcacaataacgttatgacgtacaggctgatgactaccacatctataattcttgccctgcttcctctttcaagctctagactcattttcaacatatggcatggcatgtgtctccttgtgaatatsccgctaggatcccaaacctgacatttctaataccaaacttatctgagtcaccaaacctgttcttcctcttgtggtcctactccttgttatttcagttctcacctttaaaataacatgctttaaaaataacatattagaaatttcaaaatcattgtaactctttcctttcattccacattcatttaattgaaagaccttctaatcatgcttccaccatgttttcatatcttttctttcc

SEQ ID NO: 739869 - DNA, 596 bp, Homo sapiens
caaaacttttaaaaagtatgatctagaattggttttcattttcttacaaactgtttctttgttcctcattatcgagttttcattcaaaatgaaagtgcctttcttgcaggtaattggttatctcctaactgtcaagaccaaatgcttcttctcaatcctcgctgggtatttgacactgttcatcaacaccattgtaaacactatctcatttttaaaaatcttttttcttcctcttcacaataacgttatgacgtacaggctgatgactaccacatctataattcttgccctgcttcctctttcaagctctagactcattttcaacatatggcatggcatgtgtctccttgtgaatatgccrctaggatcccaaacctgacatttctaataccaaacttatctgagtcaccaaacctgttcttcctcttgtggtcctactccttgttatttcagttctcacctttaaaataacatgctttaaaaataacatattagaaatttcaaaatcattgtaactctttcctttcattccacattcatttaattgaaagaccttctaatcatgcttccaccatgttttcatatcttttctttcc

SEQ ID NO: 739870 - DNA, 479 bp, Homo sapiens
taacttcatatgaaactactgtatgaaattgttttccaaagtagttgtaccattttacaatactgccagctatatatgagagtttacttgttcaacatccttgcctacaatttaactttagctcatctagtggctatgtagtgctggctttactttgcatttctctgatagctaatgaagttgaacatcttttcatatgtattcttttgcgaagtatctgttcaagcctttttaaaatttgattaacagtatctgaattaatgattagagaagttattgaaaactgtgttttagagtccytaatagtcacactatgactttaatacataacatgcaaattccaatgaaatgagtccaaactataagtttatggaaatataaaagcatgcgagaatttccaaatctacacagtaaatgaagtgatctcagcagtgattctattttatcaacagtctcagagattgtgtccagtgcagtgt

SEQ ID NO: 739871 - DNA, 504 bp, Homo sapiens
actttcaatcagcaactatgcctatattatgtttttaagaatacattctgcaaataagcctaaccgttatctgcatctgtttcagctgaaacactatgcagatgcaattggtgagatctaaaactaggctcagatacttagaaaaatctcaagcattttggatagttttcaaaagatttgaaacatttattttgagacctcactatacttgattccaaagggaaagatacttatttctatttggyatctacaaatcagacagaatctttttattttgtagttttgctatttttagtactatactgcaagttactgattttaatttgttcagcttgtacttgaaattcataaactctgttctgtcagacaacatagaaaaaaatcttagtttagtgcaaaataaacttaggattaaaagtgagtttgtatatgcagaatatcatgttctttcttacatttctaaataaaacatttaaaacatgtatattccaaataatggaaaat

SEQ ID NO: 739872 - DNA, 504 bp, Homo sapiens
actttcaatcagcaactatgcctatattatgtttttaagaatacattctgcaaataagcctaaccgttatctgcatctgtttcagctgaaacactatgcagatgcaattggtgagatctaaaactaggctcagatacttagaaaaatctcaagcattttggatagttttcaaaagatttgaaacatttattttgagacctcactatacttgattccaaagggaaagatacttatttctatttggcatctacaaatcaracagaatctttttattttgtagttttgctatttttagtactatactgcaagttactgattttaatttgttcagcttgtacttgaaattcataaactctgttctgtcagacaacatagaaaaaaatcttagtttagtgcaaaataaacttaggattaaaagtgagtttgtatatgcagaatatcatgttctttcttacatttctaaataaaacatttaaaacatgtatattccaaataatggaaaat

SEQ ID NO: 739873 - DNA, 504 bp, Homo sapiens
actttcaatcagcaactatgcctatattatgtttttaagaatacattctgcaaataagcctaaccgttatctgcatctgtttcagctgaaacactatgcagatgcaattggtgagatctaaaactaggctcagatacttagaaaaatctcaagcattttggatagttttcaaaagatttgaaacatttattttgagacctcactatacttgattccaaagggaaagatacttatttctatttggcatctacaaatcagacagaatctttttattttgtagttttgctatttttartactatactgcaagttactgattttaatttgttcagcttgtacttgaaattcataaactctgttctgtcagacaacatagaaaaaaatcttagtttagtgcaaaataaacttaggattaaaagtgagtttgtatatgcagaatatcatgttctttcttacatttctaaataaaacatttaaaacatgtatattccaaataatggaaaat

SEQ ID NO: 739874 - DNA, 504 bp, Homo sapiens
actttcaatcagcaactatgcctatattatgtttttaagaatacattctgcaaataagcctaaccgttatctgcatctgtttcagctgaaacactatgcagatgcaattggtgagatctaaaactaggctcagatacttagaaaaatctcaagcattttggatagttttcaaaagatttgaaacatttattttgagacctcactatacttgattccaaagggaaagatacttatttctatttggcatctacaaatcagacagaatctttttattttgtagttttgctatttttagtactatactgcaagttactgatttyaatttgttcagcttgtacttgaaattcataaactctgttctgtcagacaacatagaaaaaaatcttagtttagtgcaaaataaacttaggattaaaagtgagtttgtatatgcagaatatcatgttctttcttacatttctaaataaaacatttaaaacatgtatattccaaataatggaaaat

SEQ ID NO: 739875 - DNA, 580 bp, Homo sapiens
acttgaaattcataaactctgttctgtcagacaacatagaaaaaaatcttagtttagtgcaaaataaacttaggattaaaagtgagtttgtatatgcagaatatcatgttctttcttacatttctaaataaaacatttaaaacatgtatattccaaataatggaaaattatattaattctagtcatacacccaaattataaagaattaagtgtaacatttcttgccatctttatagagtcagaaakaatatatcagcactaccataattcaagaaaacactgttttgcatttgattcaattaataaaagatgaatatataaaaattgacaacataatttaaccttttgaatctagcccattttatatgtgtttatttgaggaccctcaatatacaatggcatccttcattatacaacagcatccttcactacaaagttctatctactataacaagaaagtgtcctgttgaataaaacagctctttatccctttgcttaagaagatataaagttaaaaatacaatgtatttactactaaagcagggtcatccaatacactcagtattttacaatggaaaaa

SEQ ID NO: 739876 - DNA, 580 bp, Homo sapiens
acttgaaattcataaactctgttctgtcagacaacatagaaaaaaatcttagtttagtgcaaaataaacttaggattaaaagtgagtttgtatatgcagaatatcatgttctttcttacatttctaaataaaacatttaaaacatgtatattccaaataatggaaaattatattaattctagtcatacacccaaattataaagaattaagtgtaacatttcttgccatctttatagagtcagaaagaatatatcagcactaccataattcaagaaaacactgttttgcatttgattcaattaataaaagatgaatatataaaaattgacaacataatttaaccttttgaatctagcccattttatatgtgtttatttgaggaccctcaatatacaayggcatccttcattatacaacagcatccttcactacaaagttctatctactataacaagaaagtgtcctgttgaataaaacagctctttatccctttgcttaagaagatataaagttaaaaatacaatgtatttactactaaagcagggtcatccaatacactcagtattttacaatggaaaaa

SEQ ID NO: 739877 - DNA, 580 bp, Homo sapiens
acttgaaattcataaactctgttctgtcagacaacatagaaaaaaatcttagtttagtgcaaaataaacttaggattaaaagtgagtttgtatatgcagaatatcatgttctttcttacatttctaaataaaacatttaaaacatgtatattccaaataatggaaaattatattaattctagtcatacacccaaattataaagaattaagtgtaacatttcttgccatctttatagagtcagaaagaatatatcagcactaccataattcaagaaaacactgttttgcatttgattcaattaataaaagatgaatatataaaaattgacaacataatttaaccttttgaatctagcccattttatatgtgtttatttgaggaccctcaatatacaatggcatccttcattatacaacagcatccttcaytacaaagttctatctactataacaagaaagtgtcctgttgaataaaacagctctttatccctttgcttaagaagatataaagttaaaaatacaatgtatttactactaaagcagggtcatccaatacactcagtattttacaatggaaaaa

SEQ ID NO: 739878 - DNA, 601 bp, Homo sapiens
gtttttataaggggcttccccctttgctgggcactcattcttctccttcctgctgccatgtgaagaaggatgtgtttgcttctccctctgccatgattgtaagtttcctgaggcattcccagccctgcagaactgtgagtcaattaaacctctttcctttataagttacttagtctcaggtatgtctttgttagtaatgtaagaacagactaataaacttataaaacataactattgtgaataacaaagcttaattgtacttagaatttcttttcctgcttatttcagttaatatatgataagcaattgtcattgttgccatacatgaatactcctttgagtggacaagccatcgtctactttaytattcccttattgttgggcctccaggttatttccaacgtttcaattttatagacgaggctgcaaaaagaatcttcatggatatagtgtgtgagctccacaaagacacctattatctacaagtctgcagcctcagagcatatttcagtgcttgacatatagtttatctcaataaatgtttatcaagtgagtgaatgacataagtttggacaatgatgatcaggggcagtcagttcaa

SEQ ID NO: 739879 - DNA, 603 bp, Homo sapiens
tttggggagccggggccgacggatcgcctggggtgcgagggtgtcaagacgcagcctgggccaacatggtgaaactccgtctctactaaaaatacaaaaaatcagccgggcctggtggctcgcacctggggtcctggctacttggtggtggggggtggcggggagggtggagggaggtggggkgagggatcctgagacaggagaatctgttgaacctgggagactcctgggccaagatcgtgccactgtgctccagccttggcaacagagtaagactccgtctcaaaaaaaaaaaagaaataacaaaaaactaatgaaaagtttaacctataggggaaggagaaagcatggagaagacacagaaagcagacatctctgaatatataccatgtttagtatattctattttggaaccctgtaattattttacataaataaattaaactaaattaaacgtagcttaaaattttttaaagcaatctcaaaattggaataaaaatgaaacaagtggatctaattgctggtggcaaaaccccacagagaggaattctttccagggatttcaaaccacagtaatttgattgcatatccccagtgggagat

SEQ ID NO: 739880 - DNA, 603 bp, Homo sapiens
tttggggagccggggccgacggatcgcctggggtgcgagggtgtcaagacgcagcctgggccaacatggtgaaactccgtctctactaaaaatacaaaaaatcagccgggcctggtggctcgcacctggggtcctggctacttggtggtggggggtggcggggagggtggagggaggtgggggkagggatcctgagacaggagaatctgttgaacctgggagactcctgggccaagatcgtgccactgtgctccagccttggcaacagagtaagactccgtctcaaaaaaaaaaaagaaataacaaaaaactaatgaaaagtttaacctataggggaaggagaaagcatggagaagacacagaaagcagacatctctgaatatataccatgtttagtatattctattttggaaccctgtaattattttacataaataaattaaactaaattaaacgtagcttaaaattttttaaagcaatctcaaaattggaataaaaatgaaacaagtggatctaattgctggtggcaaaaccccacagagaggaattctttccagggatttcaaaccacagtaatttgattgcatatccccagtgggagat

SEQ ID NO: 739881 - DNA, 603 bp, Homo sapiens
tttggggagccggggccgacggatcgcctggggtgcgagggtgtcaagacgcagcctgggccaacatggtgaaactccgtctctactaaaaatacaaaaaatcagccgggcctggtggctcgcacctggggtcctggctacttggtggtggggggtggcggggagggtggagggaggtggggggagggatcctgagacaggagaatctgttgaacctgggagacwcctgggccaagatcgtgccactgtgctccagccttggcaacagagtaagactccgtctcaaaaaaaaaaaagaaataacaaaaaactaatgaaaagtttaacctataggggaaggagaaagcatggagaagacacagaaagcagacatctctgaatatataccatgtttagtatattctattttggaaccctgtaattattttacataaataaattaaactaaattaaacgtagcttaaaattttttaaagcaatctcaaaattggaataaaaatgaaacaagtggatctaattgctggtggcaaaaccccacagagaggaattctttccagggatttcaaaccacagtaatttgattgcatatccccagtgggagat

SEQ ID NO: 739882 - DNA, 603 bp, Homo sapiens
tttggggagccggggccgacggatcgcctggggtgcgagggtgtcaagacgcagcctgggccaacatggtgaaactccgtctctactaaaaatacaaaaaatcagccgggcctggtggctcgcacctggggtcctggctacttggtggtggggggtggcggggagggtggagggaggtggggggagggatcctgagacaggagaatctgttgaacctgggagactcctgggccaagatcgtgccactgtgctccagccttggcaacagagtaagactccgtctcaaaaaaaaaaaagaaataacraaaaactaatgaaaagtttaacctataggggaaggagaaagcatggagaagacacagaaagcagacatctctgaatatataccatgtttagtatattctattttggaaccctgtaattattttacataaataaattaaactaaattaaacgtagcttaaaattttttaaagcaatctcaaaattggaataaaaatgaaacaagtggatctaattgctggtggcaaaaccccacagagaggaattctttccagggatttcaaaccacagtaatttgattgcatatccccagtgggagat

SEQ ID NO: 739883 - DNA, 616 bp, Homo sapiens
aggaggccacagctcagatggtgaaagcactctcctctctaggtcacacggatgaaacatggagggaccagaatgtgaatcctgatctgtttccactctcattcactacaacaggcttgaggtaaccccctccactgtacttgcccaagaatctctgctttarcggaagacctgtttcggctgcttttctactcataaggagcttttagtcacgtaaatggctacatgctctttcacaggtgctgctgctgagccgggagaatagaagcgtccaagtcagtgccttcagagatccagctgacttcaagagggctgaggtccacccagggccaccagcatcaggaaggagacagctttgcagtgactccacccgctatgtgctgggaggcattggctgactccaaagcacacagcaatttcggcttggcccacggcagcaaacagctgtgccaatgcccatcctaacgagaataacgcaaggcttagcctgtaatccacccctctgcagaaaccaatcattcctcctcattaccgagcgaagaaatgcctctcaaggctccttttcctccttacaaacaaaataaaacaaatccttcctatggatttcatttgccat

SEQ ID NO: 739884 - DNA, 616 bp, Homo sapiens
aggaggccacagctcagatggtgaaagcactctcctctctaggtcacacggatgaaacatggagggaccagaatgtgaatcctgatctgtttccactctcattcactacaacaggcttgaggtaaccccctccactgtacttgcccaagaatctctgctttagcggaagacctgtttcggctgcttttctactcataaggarcttttagtcacgtaaatggctacatgctctttcacaggtgctgctgctgagccgggagaatagaagcgtccaagtcagtgccttcagagatccagctgacttcaagagggctgaggtccacccagggccaccagcatcaggaaggagacagctttgcagtgactccacccgctatgtgctgggaggcattggctgactccaaagcacacagcaatttcggcttggcccacggcagcaaacagctgtgccaatgcccatcctaacgagaataacgcaaggcttagcctgtaatccacccctctgcagaaaccaatcattcctcctcattaccgagcgaagaaatgcctctcaaggctccttttcctccttacaaacaaaataaaacaaatccttcctatggatttcatttgccat

SEQ ID NO: 739885 - DNA, 616 bp, Homo sapiens
aggaggccacagctcagatggtgaaagcactctcctctctaggtcacacggatgaaacatggagggaccagaatgtgaatcctgatctgtttccactctcattcactacaacaggcttgaggtaaccccctccactgtacttgcccaagaatctctgctttagcggaagacctgtttcggctgcttttctactcataaggagcttttagtcacgtaaatggctacatgctctttcacaggtgctgctgctgagccgggagaatagaagcgtccaagtcagtgccttcagagatccagctgacttcaagagggctgaggtccacccagggccaccagcatcaggaaggagacagctttgcagtgactccacccgctatgtgctgggaggcattggctgactccaaagcacacagcaatttcggcttggcccacggcarcaaacagctgtgccaatgcccatcctaacgagaataacgcaaggcttagcctgtaatccacccctctgcagaaaccaatcattcctcctcattaccgagcgaagaaatgcctctcaaggctccttttcctccttacaaacaaaataaaacaaatccttcctatggatttcatttgccat

SEQ ID NO: 739886 - DNA, 627 bp, Homo sapiens
gatttccacgaatttgaacttcaggtaaatagaatcacacttcatgtatttctctgtgatttcattcatttcttcaatgtaaagtttttgagacttatccaagaacagatgtaagtcattccattttacttttttttttttttttttttgagacagagtttcgctcatcacccaggctggagtgcaatggctcgatctcggctcactgccacctcagcccccaggattcaagctattctcctgcctcagcctcccaagtagctgggattacaggccatgcctggctaatttctgtgtttttagtagagacggggtttcactatgttggccaggctagtctcgaactcctgacctcaggtgatcctcccatcttggcctcccaaagtgctgggattataggcccacccccagcccatttttacttctacatgctgttctgttagaccagtataccatacatttwattatctatcgttagtggacttttggttgtttccagttttgctattacaaacagtgctggctggaacacccttagctatctcctcatgcacagttaagagtttttctagggtgttcactaaggagcaggtgtgttggaatccatgtcgatatttattagatgat

SEQ ID NO: 739887 - DNA, 627 bp, Homo sapiens
gatttccacgaatttgaacttcaggtaaatagaatcacacttcatgtatttctctgtgatttcattcatttcttcaatgtaaagtttttgagacttatccaagaacagatgtaagtcattccattttacttttttttttttttttttttgagacagagtttcgctcatcacccaggctggagtgcaatggctcgatctcggctcactgccacctcagcccccaggattcaagctattctcctgcctcagcctcccaagtagctgggattacaggccatgcctggctaatttctgtgtttttagtagagacggggtttcactatgttggccaggctagtctcgaactcctgacctcaggtgatcctcccatcttggcctcccaaagtgctgggattataggcccacccccagcccatttttacttctacatgctgttctgttagaccagtataccatacattttattatctatcrttagtggacttttggttgtttccagttttgctattacaaacagtgctggctggaacacccttagctatctcctcatgcacagttaagagtttttctagggtgttcactaaggagcaggtgtgttggaatccatgtcgatatttattagatgat

SEQ ID NO: 739888 - DNA, 633 bp, Homo sapiens
acacaaatttgttagctttcttcaaacattatgagatttttttttaaaagctcatcagctatcattagtgttagtgtattttatgtgtggcccaagacaattcctctcccaatgtgcccagggaagccacaagattgaacacccctataaatgggtacaaagtttcaayttgggatgtcgaaaacattctagaaatgggtaatggtgatggttgcgcaactttgtgggtatacttaatgccaatgaattgtacacttaaagatggttaaaatggtaaattttatgttacgcatattttaccacaaaaaaatttaaaaaattaaataaaagatacaattcagttcttcagtcacactagctacatttcaaatgttcaacagccacatctgactaatggccagcaaattgttcagagcagatagagaccttctccatcattgtggaaggttctagaggacaaagctgtcctgattcttctgggcccactgatgttttgttcctcaaagctccaatgagcagtgattactccctgctcggaattcttgtaattattcgttctgaggcctttcaaggtcttattgtattctgcattgtatttcaagctaatatgtggtcagctgatttcctgacaaa

SEQ ID NO: 739889 - DNA, 558 bp, Homo sapiens
acaccaggtgctacactaaatggattacatggattgtctgacagggctctgaggaaaccccagcttggaaatgttaaatgactcgtccagggtgacctagctagcaagtggcaaggcatacattcaaagtcactctgtttgatttctctctcttaaccactgttatttagagatgatgaaaaaaggtaaggtaagcaaaatgttcggcatagtgttagttcatttcggaagctcagaggattgcaataatcatcatygtcgtcatcatcatcgtcatggcaacagtaactaacccttacatagctcttattatgtgccaggcactgttttaagaacttcacatatatttatttgcaaaataacactatgaggtagtactcttattacggatttcatagatgaggaagctaagggacaaaaagatgaagtaattccaagttataaagctagtaaatggcagagctgggatttgtactgggaagtctggctccaaacttcgtaccattaaccagtatactctcctgctttccacatggtaaatggtaaattttaataatt

SEQ ID NO: 739890 - DNA, 618 bp, Homo sapiens
gcctgggccacttttttggctttgctcaggtctctgcagccctaatttatctgatgcaagttggggctagataagaggacacaaagtcgaagttctgagtatttgaattcagaactttcaaacatgactgaaataccttgtctttaaccccacaatttgtctttaacagaatatgtttaacaccaagaaagacaagcagcctcaacgagtgcctggcygagacactgacattcccattttcccctggtctggaaatacctggacccatgacccttggataaagccccgtggcaagagacaggcagggtgggaggataggcatttattgtaaagcgagcccaggggtcggtggaagtagggaatgggagggggtacccgcagaccagcaagaagcctctaccatcgaggaggccacaggagggtctgtgttagggagagtggggatgttcgtgggaaatctggaatttgatttccctaacattatccatggctgcagatccttggtgaggtgtctagttcccctgggatgcacttgtcccggatgaagcctgctggactagcgaactactgtgctggagtctggattgaggatgaagttggggaatgggcaccagtcaa

SEQ ID NO: 739891 - DNA, 514 bp, Homo sapiens
ggcctggagcagggtgccaggaaacgcaggatggatcagagagcttcagggtgtgcacaagatgaaactacaagccagggtcaagtcatgagtctgagactgaaaaacatcaaaagaagtcaaaagaaaggttttggaggaggccaagaacaaaccctgaggggtggagttgggatcaaaatgggatgctgaagaagagagggtgacaccaaactacaagttttaaacaggagagaaaccagaatgaactgtcgttaacagcagagagttcctggggggtgtggcttagagactgagagccagctgtgcaacctgcatgccccttttacaaaaggcacacacacaaggcaagggttagttaaatagaraagcaaggagagaaaaactggatgcatgggatgaatgtccagggaattaaagcattggaataatgactatgatgaggatttttggaagactggttttcagactgtttcatggagcagctttggtgctcccacatggatggggagtt

SEQ ID NO: 739892 - DNA, 656 bp, Homo sapiens
gctctgtctgtcctgcgtgctggggaggaggcaagggttaaagaagacggagcagtggggagatggctccccttgttgggaggctcctccagtgtggggcgatgttgactcatttctccatctagaaagggctgggctttctccctagaaatggggagggaccgcagagaaactgcagctgccttgatgtcccggcagtgccctccacccaaccctgtctcggccaycatgtctgggctttcctttcacagctagctagcagtgtgactttggttattccacatgcggccttcaggtgtgctgtcacctcagatgatcacaatgggggaccctccagatatgtacactgaagaccccttgtatagacccactcatgcagctggttatgcccggccacactccaactcacccaggacacacccatactccctcagacccattcacagcacaggcatcaacacagcaagcacccaagtgtgctctccgcacatacatttcctctccgtgtgtgtgtgcgtgtgtgcgtgcttcacattgtcggccagaatatgctctggaaacccaagcagaaaggagcatgtgaatgtggccatcagggataaattaatcccagacatataaagggttttttttttttttttttcattctcggccct

SEQ ID NO: 739893 - DNA, 656 bp, Homo sapiens
gctctgtctgtcctgcgtgctggggaggaggcaagggttaaagaagacggagcagtggggagatggctccccttgttgggaggctcctccagtgtggggcgatgttgactcatttctccatctagaaagggctgggctttctccctagaaatggggagggaccgcagagaaactgcagctgccttgatgtcccggcagtgccctccacccaaccctgtctcggccatcatgtctgggctttcctttcacagctagctagcagtgtgactttggttattccacatgcggccttcaggtgtgctgtcacctcagatgatcrcaatgggggaccctccagatatgtacactgaagaccccttgtatagacccactcatgcagctggttatgcccggccacactccaactcacccaggacacacccatactccctcagacccattcacagcacaggcatcaacacagcaagcacccaagtgtgctctccgcacatacatttcctctccgtgtgtgtgtgcgtgtgtgcgtgcttcacattgtcggccagaatatgctctggaaacccaagcagaaaggagcatgtgaatgtggccatcagggataaattaatcccagacatataaagggttttttttttttttttttcattctcggccct

SEQ ID NO: 739894 - DNA, 642 bp, Homo sapiens
tgcagggaccctggtatctggctctctcctaggaccctgctttccctctaggtctgtggatctgacctctgcatgacctcccctcccactcacctcaagactgaggcgcctctcagtcacccccttttctttgccttctcctcccctccctgtcacctccactccagaaagcagctttcattttccccacctgcctctctcctctcatcccccagcatctgttggggaaattgggccatttgaagaataaaggagaaggcaggagagaggaaactcccgtctcagggcccagcccacagctggggtgaaaacctgttcctcgttaacaccctgagtcagggaccagaaytgggggcgtcgtgctccccagcctccctcagggaccaggaggggaaaggcatgctgggagacgttagctgcagtgattgggagcagatgggaaggggtgttgaggggcaggaccactgggaggaagcctgtgggggtgggagggcgcatgtgtggaggagcctgggaagaccctcactggacctctggggtcctgagcccattatctggaaacaggtcttccacagggcatctttccatccagactgaagggaattccaggtttagggtatgcagaggtcttcgggagggtgg

SEQ ID NO: 739895 - DNA, 482 bp, Homo sapiens
ggttgccattatgcatacaaatacatgcatatttagttcaaaattaaatgcattcttagctaatatacatatgttatcttagttcaggctgttacaacaattaggctgggcaatttataaataatagaaattaatttctcacagttctggaggctgggaagtccaaagatcaaggcactggcagattccacccttccaggtggcaggccgggcatctcacctggactttcaggcccactcctttggcttccagatgcatcttcttgtctctggtgaccatgtcttcaagatgtcccatggagaggtycttctagcacccacctagtcatgtccccctgccatcccactttctacaaccttgctggctccccattaagcttagggtgagacatacctgacattcatgactcaactctgccatttctttccaccttcactgctggcctctcccaccatgggccaccttgtgctgccacagaatg

SEQ ID NO: 739896 - DNA, 583 bp, Homo sapiens
gtgccaggtacaaaggcaagaccactcactgtctcagcctgtttttgtttggaagctctatacttcaagcgaaaatatctgaaagacgcatatgaaagtgtccagagtggtcatcatgggtggtagaattccactgatgtgattttttttctttttacattttctagtgtttctaaaacaaacatgtacaaacatgtaatttattcagtaatttaaaatacataagcagaaaaggtttttttattattatttttttkggaaaagaagaggccaggcacagtagctcacacctgtaatcccagcactttgggaggccaaggcgggcagatcacttgaggtcaggagttcaagaccagcctggccaacacagtgaaacccccatctctactacaaatacaaaaattacccgagcgtggtggcatgcacctctaatcccagctactagggaggctgaggcacaagaatcacttgaacctgggaggcggaggttgtggtgagctgacattgggccaccgcactccagtctgggtgagagagggagacactgtctccaaaaaaaccaaaagctgaaagaaaatcacaa

SEQ ID NO: 739897 - DNA, 639 bp, Homo sapiens
atgattatatacctggaaaacccaagggaagcaattaaaaatatactatcataataggaaaatttagtaagtttcaaaattaagatatagaaatgagtagctttcctatatgggagtaaaaaccagttaaaagatataatgcaagggaagacctcatttataataacaacgaaagcacactgccaccaaagctcagactaagtgtaaagaaagtctgcatcacccacccacatgcaggaaataaatgtaaaagttccactgagggcacagaggacccttgaacaaatcgatcatcatggcgtgttcttggggaggcagtctagcatcataaagatgggagttctccctatgtttatttataaatttaacacaatcccactaaaagtaccaatagatttttaaaaagttgagtaaagctaattgrcacacaatcttcattattcacagattccaaatctgcaaatttgtctattagttcaaatttatgtgaaccctccaatcaatactcgtggcacttccctggtcatttgcagacatgcagtgtggcaaattatttgagtcacctatgcatgctcttagctgaggtcaaacaaggtgatgctttgccttcttgtttcagcgttcacactgtaaacaaga

SEQ ID NO: 739898 - DNA, 615 bp, Homo sapiens
ctacaagaagaagtacaaaacactgctgaaagaaatcagagatagcacaaataaatagaaaattattccatgctcatggattggaagaatcaatacagtttgaatgactatactgtttaaatcaatttatagattcaacaccatccttattaaaataaaagcgtcatttttcacagaattagaaaaatctattctaaaactcagttggaaccataaaagagcctgaatagccaaagcaattgtaaacaaaaagaacaaagctagaggcatcrcgttgcccaacttctaactatactataaggctacagtaatcaaaatggcatggtactggtacaaaaacagacacatagaccagtggaacagaacagagaactcagaaacaaacctgctcacttacaaccatctgatcttcaacaaaatcaacaaaaataagcaatgggaaatggactgtctattcaataaatgatgctggaataactggctagacatacgaagaaaaacgaaactggacccatacttctcatcctatacaaaaattaactcaagatggattaaagatttaaatgtaagacctaaaactataaaaatcctagaataaacctaggaaataccctt

SEQ ID NO: 739899 - DNA, 615 bp, Homo sapiens
ctacaagaagaagtacaaaacactgctgaaagaaatcagagatagcacaaataaatagaaaattattccatgctcatggattggaagaatcaatacagtttgaatgactatactgtttaaatcaatttatagattcaacaccatccttattaaaataaaagcgtcatttttcacagaattagaaaaatctattctaaaactcagttggaaccataaaagagcctgaatagccaaagcaattgtaaacaaaaagaacaaagctagaggcatcgcrttgcccaacttctaactatactataaggctacagtaatcaaaatggcatggtactggtacaaaaacagacacatagaccagtggaacagaacagagaactcagaaacaaacctgctcacttacaaccatctgatcttcaacaaaatcaacaaaaataagcaatgggaaatggactgtctattcaataaatgatgctggaataactggctagacatacgaagaaaaacgaaactggacccatacttctcatcctatacaaaaattaactcaagatggattaaagatttaaatgtaagacctaaaactataaaaatcctagaataaacctaggaaataccctt

SEQ ID NO: 739900 - DNA, 627 bp, Homo sapiens
ggagtcggggagggcgcggggagccggggccgctgcaccgcgcgcggctgcgaggtgggacggcgcggctagccccggagggacaggcagaggggatgcggcggatcccgggccgggaggggtatcggggtccggaacgcgccggggcacgggcgcgagcgggggccmggcgccgggctgatgctgcccgagcccggctcgcctggaggcggctctgcgttaggtgctgaaggggcgagtgaggcaggtcctggcagagggcaggtgaggcgggcaggccctggcagagggaagggtatttatttcagatcaccccaaatcactgtttcccgaggcgcctaatagcgaacctgtccaggaggtcaccctggacaggaaagaagtgtcccgagacgaggatgccggtgacgaatacttgcccttaaattcctgtgccaggccttgggattaggaagaccttccagctaccgtaggtagagacccgtagtcagcactggggccacgaaatagtatggaacaccgtcatgttattgaggtgctgacagtgtggctgtgaagatatgcacatgaaatacaaaggagcgtcgaattttatgtcgcatgccctatttactttcggtctctttt

SEQ ID NO: 739901 - DNA, 633 bp, Homo sapiens
aagttagccaaatatctgtgcccaaagtattaactaagctttggtatcacacttctggtgataacatgagttttagaggagtgtatgtttcaggagggtatggataagagagagagagaaccaacttctcaagggactaaagggctgaacattgtcctggaactcaggaaatcagctctgtacattatgaaacataagtcatgctccacttgttttgccacgttctaaaacgcataaacttttcatgcaggtagagaagccaaccaataaacaaagcaatttgaaaactaggtttaccttcaggagagaactattccactactaacttcacataggcagggtctattcctctccactcccccagccccatcactttggttttaagtctactttttgacmttacaaattccattgaacagagatgactgtccagaacttaagctgcccttgcagcacctgcagccaccctctgcatggagctgaagccgcatggcccatggatctccttcaagtgttagggacccagcatgcagactttaggaaaggcttatttttgctcaaggattgaacaacaagtcaaaacaactttctcaccatagtcatgagaatgccatatctcaaatttcactgaaa

SEQ ID NO: 739902 - DNA, 550 bp, Homo sapiens
gagcacttctataatgaaagcaaagctccaggtcatggatgtctggaaggagaagagtaccgaagaaatctcagggcatttggctggaagtagctcctcaaatctttcttctataaatcgggcaggaagatgagggagatggactgggtgaactggrgttctcttcaaatctaagtttcccagacacaaagattcacttgggcgtcctgccatggaccattaggaagagttatatgtctattaaacacttttgtttacaaaaggaaatgattggacaattacatttttaaaagatttacttcagaaacatttgaaataaaaaatataggctcttaaatgagcaagctttcgttattttaaaatgcacttatatgagatcctcatcctctaattatgcccaaaaacaaagtaaatgtcactgaaataaccctcaccctaagtaaaaacatttaagatggcatatctgaaagcattcatagtttctaaattaaatgttgatacatagcacttcctattcctgtaaagtctaaaaaaagagctaaatagtgct

SEQ ID NO: 739903 - DNA, 574 bp, Homo sapiens
aaatctcattttctgcatcccttaactgtttagtatgctctgaaattctttgctgcaagccaggacctttctttgctcacctgcctcaccctggttggagatgagttgaagctcctatttttctcatcctgttaaaaaaaagaraaaagaactctgcgggcgagtttaaagagactgggtctcactatgtggccaagagtggtctcaaaatcctggcctcaagcaatcctccccccttggcctcccaaattgctgggattacaggcatgagccaccatgcctggcccctgcttaattttgattcaatttccagcagttgctgtccattgtggggtgcagtccggaagggagccctcgcagatcagtgagagaattcacagaccttcagatcttaccgcagatctggtaagatctggagtgagacaaactgctggttctcacccggcccctgcactgtggatgaacagggccctcaggtgcccaggtaacctgttgcttccctcggctttcccccagcgcatgctgatgctgtgcaggtgtcatggttgttgtccacccacttgcattttgtggt

SEQ ID NO: 739904 - DNA, 646 bp, Homo sapiens
aagcatgaattactgcacaatccaccatgtccagacagaaatagttaaagtggactaatattaaatatagcatttatttttagggttgtaagagtgacgcagagaacccatacacaagagaaactaaaatggagtaaagcaaaccatcttacttcagcacctgttactgttccaacgactgcctgatcacacctctccagccccggatgatgttctgaggaatgtttttaattttaattgtgaacatttactgagcacttagaatgtgcctggcagtcttcaattatttatttatttatttagagayggagtctggctttgtcgcccaggctggagtgcagtggtgtgatcttggttcactgcagcctctgcttcccgggttcaagcaattctcatgtttcagcctcttgagtagagtagctgggattacaggtgcccacaactatgcctggctaatttttgtatttctagtagagacggggtttctccatgttggtcaggctggtctcgaactccagacctcaagtgatctgcctgcctctgcctcccaaagtgctgggattacagtttgtgagccaccgtgcctggactgtcttcaatttttagatacttacagaagagtttatgtttcaattttgggtttcca

SEQ ID NO: 739905 - DNA, 646 bp, Homo sapiens
aagcatgaattactgcacaatccaccatgtccagacagaaatagttaaagtggactaatattaaatatagcatttatttttagggttgtaagagtgacgcagagaacccatacacaagagaaactaaaatggagtaaagcaaaccatcttacttcagcacctgttactgttccaacgactgcctgatcacacctctccagccccggatgatgttctgaggaatgtttttaattttaattgtgaacatttactgagcacttagaatgtgcctggcagtcttcaattatttatttatttatttagagacggagtctggctttgtcgcccaggctggagtgcagtggtgtgatcttggttcactgcarcctctgcttcccgggttcaagcaattctcatgtttcagcctcttgagtagagtagctgggattacaggtgcccacaactatgcctggctaatttttgtatttctagtagagacggggtttctccatgttggtcaggctggtctcgaactccagacctcaagtgatctgcctgcctctgcctcccaaagtgctgggattacagtttgtgagccaccgtgcctggactgtcttcaatttttagatacttacagaagagtttatgtttcaattttgggtttcca

SEQ ID NO: 739906 - DNA, 564 bp, Homo sapiens
gggctcaagcaatcctcctacctcagcctcctgagtagctgaaattacacgcatgcaccaccacgcctgactaacattttactttttgtagagatggggtctcactatgttgcccaggctgatcttgaactcctgggctcaagtgatcctcctgctttggtctcccaaagtgttgggattacaggtgtgagccacgatgcccggccaggcctggtttcatgacagctgatgaagtggatggacagggccaactttcygcagggctgggttgcaccatgctccaagtgggagccaatgtctactgaatacctactaggtggtttatgtgccctgtctcattcattgtcactcctcttttacagctgtgggaactgtggcctacaagttcccaaggatcacagctagcagataagggcccagtccatgctttacctcaattcttctagtctggactgtaacagcaatgctccctgcatctgtgagctcacagctctgaagtgcacagaatttcctgtctgagcactgtgggtgtttcctgaaataatctgctgggtcagaggctga

SEQ ID NO: 739907 - DNA, 623 bp, Homo sapiens
cttattatataaaatgtggaaggtacaggaaagtgtcaagaggcagaacaaaatcactctgaattgcactagtgttatttccttccagtcttccccccaccactgtattttatacattttgagagctcccattctgttcagttttatatcctgttattttttcctatttaacatcattggccttttctgaaatcactatgaactatttgtaaacattacttctagtaactgcatacatttctcaatattcaaaacttttttttttataaaagggaactatttatgctgagatatgcagaatcaartattcctgaacaaaacaagaaactcggcctggatatgttggtcctaagatttatacttacaatttcttcaggatgacttttaacaagctccttacaagcactgccttttaggacatttggtcaatgtatggaaaacaatggatcacacaataaaatatccatttgataaggattgaaagttagcaaataacacagaaaggacatttaaatctctaaaatgttgcatcttagatttagctggcaaagtccatattaacaaatagtgtgaaaatttgtcttctaggtactaaaagagatcctaatttgttaaataaaaaa

SEQ ID NO: 739908 - DNA, 543 bp, Homo sapiens
gttatcataagcacaaaaggattctaggaagacataaaaattaccaagaatagcttgtggttcacagaatgaaacaatgaaataaaataaaaatgaaacacagagagcttgttggtgcccatctggaggccttgctcagtttatatccgttacctcctaggtggtcaccctgcccctcactggccacactggtatctagacattctgctagaggctccccatccctagctctgatggcttccggcatcttcgttggctccattcagaattatagagaattgtaggtcccatcgaggccacgctcttgcagtcctccyggcagcctcaccagacaccatcagaggctctctgagtgtgatgtccgtgtcttcctaaagatgcctgtagaccccttattcccatcctctcagctgtgttagttttcttgtggtgcggaaacaaattttaccccaaatttagttggttagatcaacacacatttattctcttgcagttctgcaggtcagaagcctaacatgggtctcactgggctaaaatctgggt

SEQ ID NO: 739909 - DNA, 652 bp, Homo sapiens
ttagttatcataagcacaaaaggattctaggaagacataaaaattaccaagaatagcttgtggttcacagaatgaaacaatgaaataaaataaaaatgaaacacagagagcttgttggtgcccatctggaggccttgctcagtttatatccgttacctcctaggtggtcaccctgcccctcactggccacactggtatctagacattctgctagaggctccccatccctagctctgatggcttccggcatcttcgttggctccattcagaattatagagaattgtaggtcccatcgaggccacgctcttgcagtcctcctggcagcctcaccagacaccrtcagaggctctctgagtgtgatgtccgtgtcttcctaaagatgcctgtagaccccttattcccatcctctcagctgtgttagttttcttgtggtgcggaaacaaattttaccccaaatttagttggttagatcaacacacatttattctcttgcagttctgcaggtcagaagcctaacatgggtctcactgggctaaaatctgggtccttctggaggctggaggaaagatttgtttcctggccttctccagcttccaaagactgctggattcctcagcccctggccctttcctccattttcaaggccagcaa

SEQ ID NO: 739910 - DNA, 652 bp, Homo sapiens
ttagttatcataagcacaaaaggattctaggaagacataaaaattaccaagaatagcttgtggttcacagaatgaaacaatgaaataaaataaaaatgaaacacagagagcttgttggtgcccatctggaggccttgctcagtttatatccgttacctcctaggtggtcaccctgcccctcactggccacactggtatctagacattctgctagaggctccccatccctagctctgatggcttccggcatcttcgttggctccattcagaattatagagaattgtaggtcccatcgaggccacgctcttgcagtcctcctggcagcctcaccagacaccatcagaggctctctgagtgtgatgtccgtgtcttcctaaagatrcctgtagaccccttattcccatcctctcagctgtgttagttttcttgtggtgcggaaacaaattttaccccaaatttagttggttagatcaacacacatttattctcttgcagttctgcaggtcagaagcctaacatgggtctcactgggctaaaatctgggtccttctggaggctggaggaaagatttgtttcctggccttctccagcttccaaagactgctggattcctcagcccctggccctttcctccattttcaaggccagcaa

SEQ ID NO: 739911 - DNA, 686 bp, Homo sapiens
ccaggatgggatccactgctttaggctacttagctcctgccaagaaaattaacattgttaaaggcaggacagcgaggtctgtgatgagtctcagtacgcactgatcggcactggtgaatgcttccgggagctcctggatgtcaggtgcagccagcaggggcatgcatgtggctctgccttggccttgccctgggacgctgtcacgtggacgtgctacgtgcgtggatgtgctgggrctcttgcatgccagtccaggcactggcacatagcagatgggcccccactcagccttgcccctcagagctccccagggcatcttcccgacaccaggcccctgtggctgctggcctgcagggtcacacctgtgctcagcattcaagtcctcgtggtctggcctctggcctggcatccagtctgctctctcctggttgcctccacccatccaccctgtgccgcagagccccgtctcatcccagtctcagttctgtacgctcttcaggaggcctttcctggccgctctgcttcctctgcccgggccggggccgcctcattgctgtcatgccattcattgtatctttggtgtctggcttctacatgcacctttgaagtctgtgagcaccagcaccatgaactcctcatcttgggactcccaggcctgtacaggcctaggcacatgcaggggtgga

SEQ ID NO: 739912 - DNA, 560 bp, Homo sapiens
aaaggccagaggctgcatcgcttcaggcatggctggatccaaggcccaaatggtatccacaggactctgcctccgtctccacaccccttgtccctgctctctcctgtgtggtttccttcctgggcagcctcctgcctgttgcaggctgatgtctaatgagcccagccccctggccacttgcccctggaagagggggattatttaacaagagtctcacaggagtcccaggacttcagctcactgggctggtatggggctgaatcacttcctccccgaatcaatccyggtgcccaaggagtagaacaccctgattgtcagactggtgggggctgcccagtccctggactgagagtgaaagaggcacggtagatgggggtggggtcacttggagaggaagagaaaggatgccgagactgcagcagtgtccagctgggggcttctctgccacaggcacttggaatgtggcctgtcacgttaaggggggattggactgggagcctcagggcaacacctggtgacagttgttccggagagctccaggagacccaaacagtgctggc

SEQ ID NO: 739913 - DNA, 594 bp, Homo sapiens
tgggtcttcagcttgagcaggacttgtcctcagctgtgatgactcaatggctaggggcagggctagctggggaatggcttcgtcacagtggggcagtctcaggtgtgccccagaacaagcattgcaagcactgggtggaagtgcaggacttcttctgacttagtgttgaatgtcccagatgtgttttttcagtcaagcaagtcactaaggccagcccagattcaaggaaaggggaattggattccacctttcaatgagaggaatagcaaagaatttgtagtcaactttcatctcccctgattgtagctttttttcatattgatttgtagttcgwtatatattccctctgtttagaagtatttattttggagagttatttttttatttatacattctcccatcatggctttgtttttgctctctttatagcttttcccccctttgtggctaatgctttttaagtcttgtttaagttttcccctccctcaaggtcataagagctgtctaactttctaatcacctaaagctttctgaatttctctttctatttaggtcattaatcaacctggaatttaatgtatggtgtgaagtagg

SEQ ID NO: 739914 - DNA, 571 bp, Homo sapiens
gatcttggcctctacttgctgctcggcgctgtggggacggatcctgatggcagcctgtggttggggcaagaacggggtgagatgctgttcccggtgcttggtcagggcttggaaatgggcgcatccaccatcaatgtgactgtgcagtctccaggggtctgctcctggccatctgtcttgagccctgggctgkgggtgggcttgctggaggggaactgaaagagggaaacgtgtccagccctggtggcattgccagcctgctggacccagcgtccaaacttgtggggtggccaggacctcctgccttctgcagaggcctcctttgcctgcctgaggagcttgaggggagaggagccccaaggaaggctggtaagaaggtagggaggaagggaaattggcgcactgcaagagggaagggtgtgaaccacccccgagatgggaatggtgagtctggggtcagcaggaagggctgaggccctccccggggctggggatgcagaggaaacagagatgcgctcctgccctgggggagtcacggtctcgtccatgatacaggccctgatgcctgacg

SEQ ID NO: 739915 - DNA, 594 bp, Homo sapiens
gacatttccaacatcaaaactctataaacatttattattgtctactgttcacaatggacaagtccatgcaaatgtacctccagagtccaaggaagctgagaggccaaagagtctgataaatccagttttttagaaagaaacatttaatagggacttaggaacaaaagccgtatctgtgtctcgggatccccatgccattacaccccacatycgggatttatatgctatatggaaagcataattcagaatggatgtgtagggctattgcagtgtacatcaaggttgtttgacataagggcaggatatacagtaagtacctgattttacactaggatcaatgggtaaactggaaattttagaggctttcccagaacagatgttaatcagaagccaggctgggcggtgtggctcacgcccataatcccagcactttgggaatccgaggtgggtggatcacctgagaccaggagttcgagaccagtctggccaatatggtgaaaccccatctccactaaaaatacaaaaattagctgtgcgtggtggtgggtgcctgtattcccagctacttgggagtctgagacatgagaatcgcct

SEQ ID NO: 739916 - DNA, 594 bp, Homo sapiens
gacatttccaacatcaaaactctataaacatttattattgtctactgttcacaatggacaagtccatgcaaatgtacctccagagtccaaggaagctgagaggccaaagagtctgataaatccagttttttagaaagaaacatttaatagggacttaggaacaaaagccgtatctgtgtctcgggatccccatgccattacaccccacatccgggatttatatgctatatggaaagcataattcaraatggatgtgtagggctattgcagtgtacatcaaggttgtttgacataagggcaggatatacagtaagtacctgattttacactaggatcaatgggtaaactggaaattttagaggctttcccagaacagatgttaatcagaagccaggctgggcggtgtggctcacgcccataatcccagcactttgggaatccgaggtgggtggatcacctgagaccaggagttcgagaccagtctggccaatatggtgaaaccccatctccactaaaaatacaaaaattagctgtgcgtggtggtgggtgcctgtattcccagctacttgggagtctgagacatgagaatcgcct

SEQ ID NO: 739917 - DNA, 594 bp, Homo sapiens
gacatttccaacatcaaaactctataaacatttattattgtctactgttcacaatggacaagtccatgcaaatgtacctccagagtccaaggaagctgagaggccaaagagtctgataaatccagttttttagaaagaaacatttaatagggacttaggaacaaaagccgtatctgtgtctcgggatccccatgccattacaccccacatccgggatttatatgctatatggaaagcataattcagaatggatgtgtagggctattgsagtgtacatcaaggttgtttgacataagggcaggatatacagtaagtacctgattttacactaggatcaatgggtaaactggaaattttagaggctttcccagaacagatgttaatcagaagccaggctgggcggtgtggctcacgcccataatcccagcactttgggaatccgaggtgggtggatcacctgagaccaggagttcgagaccagtctggccaatatggtgaaaccccatctccactaaaaatacaaaaattagctgtgcgtggtggtgggtgcctgtattcccagctacttgggagtctgagacatgagaatcgcct

SEQ ID NO: 739918 - DNA, 633 bp, Homo sapiens
aagttaagatccactatttctattcctagtaacagtgctacaaaacaacagcctattcaaaaaatcagatgaaaatcaaaattataaacaaattcttaaatttaatctataacatatcaagactagcttctattcaacaatctcactgtccattactaaaacatcctctttagaaaaataaaagattcaatgagagaaggaagtcaaatagtcactaattaaagctttctaaattatctgtaagttgtgacaaactatgtcaaatatagtctatactactgagctcttttctccttacatctytgatcagagtgttaacaacccactcttgtgaaaatataagtccccaaagtcatgaaaaaatacctaacctaacagataacttcgtaagaaagaagatcctgccaagcaggaagaattgctgctgaaagcaacatggcaggacttaaaggaaacatgccacaaagttatctttgggacaagtgatcagagatggggacaaatgttaacagggctgaaacagatgaacatgagttcacatcatgagtcacttaaaacattactgaaaatattcaactgaaaggaaattacggttcttaaaaatcttaggttccagctgggctcagtggctca

SEQ ID NO: 739919 - DNA, 545 bp, Homo sapiens
gaaggatgagattaacgggaagccactaatagaaatgtttaatttcagggaggccatcacatcaatttagaaaagtaaccaatagtttaaagagacaaaggtagaggaaacaacacaaactaaaaaatagcttaaacacataaccattctcaaattatgaacacagattatgattcatgaattcagaagatcaarcaacgtctattttatcattctcgctaagggagaaaagcaacttaaaatgctaattatccactgttcttaattagcacaggtagtaaagaaacatgttgagaagtaatggctacaattaacaaagtaacattatgaaataggtagttccttgataatctgtagcctcaaaatctagttctatctggagtaaaaaaaagaagactgtactggggaaaattaaatctgtggaaggtcactgaaataaccagtagcataatcattccaatataattgtgaatgttcataattaaaatattttaaattttgaatatttaaaatatactcaaaatctaattcatggccgggggcag

SEQ ID NO: 739920 - DNA, 625 bp, Homo sapiens
gaaaattttttaaataaacttagtgtagccaaagtgttcactgtctatgaagtctacagtggtgtatagtaatgtccttgacattcattcatcactcactcactgacttacccagagcaacttccagttttgcaagctccattcccctatacaggtgtaccattttttatcttttacaccatatttctactgtgctttttctatgtttatgtttacactcatgaatacttatctttgtgttagaaaaacaccacagtattcaatacagtaacatgctatacagcgtttatggcctaggaacaacaggctataacccatggcctactgtgcagtaggctatactatctaggttttgtctaagtagactctatgatgttcgcacaacgacaaaatcacctaaaaatgcattgctcagaacatttaagcaacgcgtgactgtgcactgctaaaactaagtgtgtttcaacaaatgatgcagggataacyagacagccacatgcaaaaaaactcagttggacctctgcctcaaattatacacaaagctcaactcaaaatgatcagagacctaaatttgagagctaaaactaagaaactcttagaagaaaacataaattgtcatgaccct

SEQ ID NO: 739921 - DNA, 533 bp, Homo sapiens
ttctgggtgtccagcgctggggcacagtgggatcccacactccctgtccctccagcctgtttctcatcacctgagggttttgttttccgtgttccggttgaagagatgtctgtgccaggagggttcctcccttcccatttgcaacctgggatgggtgacgcagatttatccgagacttgggagtgaggctgagagtcagttctttcgtatcctaagaaaggctgaccgtcccatcaaggcccgtgtgctgaaactgtccgtgtgcaggctcaggtggagcaggtctctgtcaggcagccatttgtatttgggcggtgggtgctttgcctagcttagtgcctaccatgcccaggcttgcaaatggggctktttgggctttgatgtgggctcaggctcagagggctgaagtggttgtggggaggggcttctggggactgtgtccatgtctctgtcgtttttccccatcacaccgtacactcccttgaggccagccgtccatcaccattgagtcatagtcgacagtttgatttaca

SEQ ID NO: 739922 - DNA, 500 bp, Homo sapiens
ttgaatctgcctatgacttggaagcccccacttccagttgtcctgccttttcagaccaaaccaatgtacattttacatatattgattgacatcttttgtcttcctaaaatgtataaagccaaactgtatccctaccaccytgggcacatgttctcaggatctcctgaggctgtgttatgggccattggtcattcatattgggctcagcttaaatctcttcaaatattttacagaatttcactctttttatcaacaaaggtaataagtcataagtgagattagtgtccttggtcattcatattgggctcagcttaaatctctccaaatattttacagaattttactctttttatcaacagaggtaataagttataagtgagattagtgtccttataaaaagacatgagagagattgctttctctttctctgctctctgctatgtgagattacaatcagaagatggccactgaaaaccaggttgtgggtcttcaacaggaat

SEQ ID NO: 739923 - DNA, 500 bp, Homo sapiens
ttgaatctgcctatgacttggaagcccccacttccagttgtcctgccttttcagaccaaaccaatgtacattttacatatattgattgacatcttttgtcttcctaaaatgtataaagccaaactgtatccctaccaccttgggcacatgttctcaggatctcctgaggctgtgttatgggccattggtcattcatattgggctcagcttaaatctcttcaaatattttacagaatttcactctttttatcaacaaaggtmataagtcataagtgagattagtgtccttggtcattcatattgggctcagcttaaatctctccaaatattttacagaattttactctttttatcaacagaggtaataagttataagtgagattagtgtccttataaaaagacatgagagagattgctttctctttctctgctctctgctatgtgagattacaatcagaagatggccactgaaaaccaggttgtgggtcttcaacaggaat

SEQ ID NO: 739924 - DNA, 612 bp, Homo sapiens
ctgctgtctcagaagatctccccgaggatggggggactactgtaatttgactatgaaataactcccattgtaatgaaggttaagaatgaataaacataacagctaccaacacatagaaatgcagtctatagtttgcccatgcacctggctgattctcctattttgctttttttggagaacttacatttaagcactgacggtgcctggatttgtctcttgaactccactaaaaaaataaagtgttattccacttagcatttgagtgcatatacttttgtaatgttttctagtggtttttaaatgttttcattttatttttctaagcagatccttaaaggcagggactttgtgaattctcaacatttatcccaattcttggcaatcagtaactaattgctgaataattgagaatcaaaacagcaaatgccacttccaatcttyggtcttgcaaaagctatacttggaatgtatgacattattgattaaaatgaggtttgggtacatctttgtcttctaattttccatgctatttttattttcaaagaggcagtatggtataaggctaaagattggctacttgagcctggtaggtatatgtatcagcttcaccgc

SEQ ID NO: 739925 - DNA, 616 bp, Homo sapiens
ggacaaataacctggctttataaggaaactctgtaaagaaaaagcaaagaaatgaaaagaaaactataggttgaaatccacattcttctattttttaattatagttttttaattaacaagtaaaaattgtatatattgatgttgtacaacatgatgttttgtggaatggctcaatcaagctaattaacacaagcatcacctcacatacttactgttttgtggtgaggcagttttaaacctgtagtttaagagacacttggtagatatatcaaccgagcaaaatatatgactttatttaaatcacatttaaaattattttttaaaacctccaaaatataaaacatttttragacaaataaatctgaatacaactggatgttaattttaattattgcatttatcaatttgggaatatacaattctttttctgaggaaacagatttcagttctctgattaaattttcatttttgttgtatatatccatgaacatattgatcatgattattttaaaagactgtttttagtaacaccaatatttaaaacacctgtgatcctttttcttttttgttttttgtcatttcttggcatgcctggtaatttctaattgactgcttg

SEQ ID NO: 739926 - DNA, 512 bp, Homo sapiens
ataataataatttagaatgataatatataataatttagaatccatctataaatggattctaaattattgagctaatctctgattgaaggacctttacattaattatctttaccttaatcatgctgtgataaatatgtgaatatactttgttgtactgtagaataacttcctaaaactagtatttttatattaaatactttatatatttaagttttcctagcattatcaaattattttccagaaaatgttatagcaattcacatcctaaccagcccagaatgcatgttagtgatccaacaactctaatctaatgrgaaaaaagagcattcattattttctctaccaactgctcaagtaaacatctcttcatatttaatgactatttatatgatcttgcttataactcatatgtttatattttttgtccactaattaaggagttttcattttcttaaaagtgttgtgattgcttgcttatgattgctagtgatataaataagattaaccatttc

SEQ ID NO: 739927 - DNA, 425 bp, Homo sapiens
cttccatccttcaagcacccaacactttcacactttgtattggtctgttctcatgctgttaataaagacatacccaagtttgggtaatttataaagaaaagatgtttaattgactcacagctccacatagctggggagacctcacatcatggtggaaggtgaagaaggagcaaagtcacrtcttatatggcagcaggcaaagagagcttgtgcaggggagctcccatttttaaaaccatcaaatctcatgagacttattcactgccacaagaacagtatgggggaaaccacccccatgattaaattatctccccctggcctcaaccttaacgtggggattattacaattcaaggtgagatttgggtggggacacagccaaaccatatcattccaccctggccccttccaaatctcatgccctcac

SEQ ID NO: 739928 - DNA, 619 bp, Homo sapiens
gtaatgctttatattattcaaattactgtcatattcaccttttctttttcattcttcaatgtccttttaaaatctgtttattcaataagtatttattgaattttgactatactgttctaaaagacagggatacagaaatgaacaagatagttcaattccttgaattcaaaaagtaaactaatatcaaatgataaawttttttctaaaaaataaagcaggataatgtaacagggaatgactacgggtaaggggtgctctttaaactgggtgatcacagaaagtgtctttgcaaggtgccatttgagctgagctgtgataacaataaggacaccagggggcagagctttctgggaacagctgatgtaaatgtcctttagtgggtggaacttggagagccaagcagagagtgataggagatgagacctgcaatgtgagcaagatagttatcatgcagaggagtggttctcaaagtgtggttcatattcaccttgggtgagggttcccaagacacttaaagggatcaatgagatcagtatcataagaacactaaaatgttacttgcctttcctctatattgacattcatgttaatagtgtaaaaggaaaatatcttgggcccc

SEQ ID NO: 739929 - DNA, 619 bp, Homo sapiens
gtaatgctttatattattcaaattactgtcatattcaccttttctttttcattcttcaatgtccttttaaaatctgtttattcaataagtatttattgaattttgactatactgttctaaaagacagggatacagaaatgaacaagatagttcaattccttgaattcaaaaagtaaactaatatcaaatgataaatttttttctaaaaaataaagcaggataatgtaacagggaatgactacgggtaaggggtgctctttaaactgggtgatcacagaaagtgtctttgcaaggtgccatttgagctgagctgtgataacaataaggacaccagggggcagagctttctgggaacagctgatrtaaatgtcctttagtgggtggaacttggagagccaagcagagagtgataggagatgagacctgcaatgtgagcaagatagttatcatgcagaggagtggttctcaaagtgtggttcatattcaccttgggtgagggttcccaagacacttaaagggatcaatgagatcagtatcataagaacactaaaatgttacttgcctttcctctatattgacattcatgttaatagtgtaaaaggaaaatatcttgggcccc

SEQ ID NO: 739930 - DNA, 680 bp, Homo sapiens
ataaaaatgactttgacctcatggatcccctgaaagggactaaagggtacctcagtggctcatactttgagaactgctgttctacagcatatcaaagttctagaattagacttccctaggttcaaatccctgcgctactacttgcaagctgtgtagccttaaacaagttaatctacctctccagacctccattttctcatgtttaaatgaggatgacaaaatattaccttgaaggattcagagaggattaagtgaaataatacctgtaaaaaatcacagcccaaagctaggcatatagtgaaagagatcaactggctctattctattaacaagtggatgaggaactggggcccagtagggaagtcacttgtctgaggtcacactcaacagatgttggttccctttttcccaggcactgtgccagggtttctacttgagtttagctgtatcagtcatgggctgccaggagcactggatttttaagtgtcattttcactgtccctcatggtggtaggacagaacaaagccctcatagagrcaggaggtcaagagagaggagctgcaagtgtggccatcttcatgtgactgtgtgctaccctccacgtcactttctgactcctcttgcagtgttccaagaccctctctaaccctattttctacagttcctcacatgccctctc

SEQ ID NO: 739931 - DNA, 493 bp, Homo sapiens
ggcgatggtccacaccatggtgaatgtgctgggtacccctgtcaggcccagggagagtgaaagagcagagagggcacaggaagcaggggtagagggcatgagggagagattttggagaaaagcagggagagggagggagagagaaaagggtgggttgtcagtctgctgtctttggttgcataggttgttcaccacggagggatgctccactgagggggtgaagctgtatgcctgaagggctgtgtctacctagacggacattctctttytaattgtgacagaggccctttatagattagcagtggccctgtgtatttcgggaactaaagggaaatggaaagatgttcacaaaatctgtcccacaggtcagccctaggtgcagctgcaacctgagggacttgtcctgggatcagacattttgaggactttcttgacccttggctgatatccttgcaggcaggacctgcagctaagcaagacgtaggactgcaag

SEQ ID NO: 739932 - DNA, 641 bp, Homo sapiens
ttgaaaagtcaccacaatacttaccagatcattaacaggagatttgaaaaggcacttcaaagcctctctcccagaattgctgagacaggtgtaagagtctatctgagcaaagagtagccagtttaaagtgatgttggggattcaaagagtaggtgttcatgaagctgggttgagcatcagcgggataggtaaccttctaatccgagcattgtaacaacccatgcagtggtgaggaggtctgacagttttagatgaaacacaaaatgtatggactttattgctcctctcacactttaatgaggaatttgaccgcaattctaggtcttcaaatgcctggtacttattttggcaagaataaacataaacaaatcattctgcaccacagtcttcataattaattttacyaattaaagttaatgaggtgatataactgcaaatcaaatgcctgaatggctggggttgggtgggcaggtaaactttccttctaccaaaaattctacacgaaggaagataacaaagggttgtttccaataggcagactgttaaattgcaacccgtagaagaaaccactttagtgaaactttaacattagtagttgcatcatgacaaacctgagtgttgtttgaatggatatacaagcc

SEQ ID NO: 739933 - DNA, 573 bp, Homo sapiens
agcctggagacctcacaaggatgtctttgacctcatcctgggccggatcctttacacactcatgctactccttgtgctttaaaagtgaagcatggctgggcgcagtggctcacgcctgtaatcccagcactttgggaggctgaggtgggcagatcacgaggttaggagatcgagaccatcctggccaacatggtgaaaccccatctctactaaaatacaaaaaaaaaaaaagaaagaaawttagccaggcatggtggtgcgccctgtagtccccagccacttggaggctgaggcaggggaatcgcttgaacctgggatgcagaggttgcagtgagccgagatcatgccactgcactccagcctggtgatagagcgagactccatcaaaaaaaaaaaaaaaaaaagcagcatacatcccactcctggcccaattcccctcctcatccagcatctcctcacccctcagagacctctgagactccacccgccagggcaacactgccagtgccaagacctccaggttgagagacagcggggaaatcaattgcagggggatatttcacccctctgtgt

SEQ ID NO: 739934 - DNA, 490 bp, Homo sapiens
ctttgacctcatcctgggccggatcctttacacactcatgctactccttgtgctttaaaagtgaagcatggctgggcgcagtggctcacgcctgtaatcccagcactttgggaggctgaggtgggcagatcacgaggttaggagatcgagaccatcctggccaacatggtgaaaccccatctctactaaaatacaaaaaaaaaaaaagaaagaaaattagccaggcatggtggtgcrccctgtagtccccagccacttggaggctgaggcaggggaatcgcttgaacctgggatgcagaggttgcagtgagccgagatcatgccactgcactccagcctggtgatagagcgagactccatcaaaaaaaaaaaaaaaaaaagcagcatacatcccactcctggcccaattcccctcctcatccagcatctcctcacccctcagagacctctgagactccacccgccagggcaacactgccagtgccaagac

SEQ ID NO: 739935 - DNA, 512 bp, Homo sapiens
ctgagctgtgttttgaaggataagtaggagatgttaaattaaacaaggggaaaggaaaaaataaaaaataaaaataaatttaaaaaataaataaggggaaaggcgttgtaggctgcctggcatattaagtggatcagcatggtgctgggaggagtgcatgcaccaggtaggggaaatgaggggagagggggktggtgagatacaggggctggatcattaggggatcagcatggagctgggaaggtggagcttcatcctgaaaagtgagcatgtaagcaggagaataatgagataaggagatgcttctggaagctctcagactgcaacatggtccatgggctggagcaggtccaggtggggcaaagaagccaggcaggagggcttagaccaagcaatagtgggagagacaaggaggtggaaatcatcgggaagttatttaggatctcagagtagtaggactctctgatcagtcagttgtggagggtgatggtgaagaggaatcctgtatgatt

SEQ ID NO: 739936 - DNA, 640 bp, Homo sapiens
gcctcccaaagtgctgggattacaggcatgagccaccatgcctggccaagtagtagttttttacatttacatttaagctaattaagattaaaattaaatagtcatttcctcggtcacactagccatattttgagttctcagaagccacattttgaccagtggctactactgcgttggaaagcatacttctacaaccttgatgtttgagctcatttttaatcaaattccccgtmaccaaggacacagtactgtgttagcaagcgaccacctctctttagatggcgcacaaaatctaccgctacaagactggagacctgccttatagttgtttccctgtttccagtcaagggagtcactctaattctctgggcctctatttattcatttgtcaaagagggactattatctcaaacatctcctccagctctcaaatgctgtattatttctctcttctaaaagaggaaggaatgagggcattggtaaagccctgggcctgaaggtacacacacaagctctcttcaataaaatctgtaaagagtggaatatgttgccactctttagcacctgccaacgtgctgtggcaatctggaggcgcttggtgctctctccttttatgcagtactaaggatccagctaattc

SEQ ID NO: 739937 - DNA, 535 bp, Homo sapiens
gatcccttgaacccaggaggcagaagttgcagtgagccgagatcgaaccactgcactccagcctgggcgacagagggagaggctgtcaagaaaaaaaaaaaaaaaaaaaagtaaaataacatttgaacttgcatgagttgtggagggagcccaggagttcctgtgtgccaacaggggttgggggccaaaaagtatctgaggtactagctggtgatttcaccagaacatcaccataaagaaggcaaagtgactctayaacgaagagctgcagaaaggactcctcaaaccagcaatcaaatagctttcccatgcagcccttggggatcaggagtcacagtgagagccagatgaggctgaggcagcaaggtaaagcctctaaccttgcaggcagcatgtgattgtgccacaaggccaagacctgaagctaagttagcttcccctgcatccagctgccatcttggaataaagcggagaaaggaaaatccttgcattggtggagagacccagacactatgtaattactcaaaaagagatt

SEQ ID NO: 739938 - DNA, 585 bp, Homo sapiens
tgtaccatataatgaaataattatacaactcaccataatgtagaatcaatgggagccctgtgcttcttttcctgcaactagatggtcccatctgggggtgatgggagaagtgacagatcatcaggcattaggttctcataaggagcatgcaacctagatccctcgcatgcacagttcacaacagggcttgcgctcctatgagaatccaatgccgccactgatctaacagggggcagagcttaggtggtaatgcaagcaatagggagcggctgtaaatacagatgaagctttgcttttttgcctggcactcacctcctgctgtgcagcctggttcctaacaggccacggaccagtacctgtatagcaatacacaggtacatcccattttattgcatgttgctttattatgctttgcaaatactttttttttttttttttttgagatggmgtctcactctgtcacccaggctggagtgcagtggcgtgatctgggctcactgcaagctctgtctcctgggttcacgctattctcctgcctcaccctcccaaggagctgggactacaggtgcccaccaccaggcctgg

SEQ ID NO: 739939 - DNA, 619 bp, Homo sapiens
caattaaacctttattctttataagttacccagtctcgggtatgtccttaaagcagtgtgagaacagattaatagagaaatcaataacaaaaagatagctagaaaataccaaaaacatttggagtctaaataacacatttttgcaatatttcgaactagaggaaaatgaaaatacaacataatcataatttctggatatagtaaaagtagtacttagagggaaggctttagcattgaacttatatactaaaaaagaagaaagatctaaaataataatgcaagcttctaccttaggaaactagacaaagaaragcacattaaacccaaagcaggcagaagaaaaaaaataataaaagaacagaaattaatgaaactgaaaacaggaaatcaacagaaagaaaaaaatttaacaaaaccaaaagctggttctttgggggaaaaaaaattcaataaaatacataaacctgtagctaacctaaccaagaaaaaataacagaagatacaaatcattaatatcagaaatgaaaaagggaccattactaccaatcccatggacattaaaaggatgctaataaagaaacagaaatatctctatgctcacatatttgataacttagat

SEQ ID NO: 739940 - DNA, 619 bp, Homo sapiens
caattaaacctttattctttataagttacccagtctcgggtatgtccttaaagcagtgtgagaacagattaatagagaaatcaataacaaaaagatagctagaaaataccaaaaacatttggagtctaaataacacatttttgcaatatttcgaactagaggaaaatgaaaatacaacataatcataatttctggatatagtaaaagtagtacttagagggaaggctttagcattgaacttatatactaaaaaagaagaaagatctaaaataataatgcaagcttctaccttaggaaactagacaaagaaaagcacattaaacccaaagcaggcagaagaaaaaaaataataaaagarcagaaattaatgaaactgaaaacaggaaatcaacagaaagaaaaaaatttaacaaaaccaaaagctggttctttgggggaaaaaaaattcaataaaatacataaacctgtagctaacctaaccaagaaaaaataacagaagatacaaatcattaatatcagaaatgaaaaagggaccattactaccaatcccatggacattaaaaggatgctaataaagaaacagaaatatctctatgctcacatatttgataacttagat

SEQ ID NO: 739941 - DNA, 633 bp, Homo sapiens
aggtagtgggaaacaagctcatattctattatttgaattacaagttaacatttttagatggtacttctacaaaaataaaaacatgtaaatcccctgactcagcaattcccaatttggtattttattctactgaaatacttgtagaaaatgtgctatggaaacgaaattattcaccacagttctgttcatatgtaatagcaaataactaaaatcctaaatacccttaatatgagatatagttaacagactatagtgcaggatcattgcatcttatttatggaaagaaatgtgtcctcataattcaagagtaatcctgtcaaaaaaaggacgagcagttctatttaccaatgcagataacaaagacagtgcaataaaagggaattattggtattcaatacaaagaatgagtaaatctatgtattgacataaaaagtatatatayatagtcatattaatgagtattacatatattattgaagcaagctctagatcagtatatatagtttaaaataagaaacaaagtatacatgtatacttttcatgtacaatatagtatagctgtatatgaaaaaggtttgtaaagacacataccaaacttacaaccatggttatcttctgataacgctatttttg

SEQ ID NO: 739942 - DNA, 469 bp, Homo sapiens
cgacaatcacatgactactacacaaggggttagaatggaagggatgttgtggaggcaaactctattggtttgctagggctgccataaaaaaaaatcacagactgggaggcttcaacaaacagaaatttattttctcacagttctagaggcttcaagtccaagatcaaggtgctggcrggattgcttcttcagaggcctctctacttaacttgtagatggctgtcttgtctctgtttttatggtcttccttctgtgtgcacacatgtctgtgtctgtatcccctcttcctataaggacatcagtcatattggattgaggcctaccctaaagagctcattttaaaacagtcacctctttaaagaccttatatccaatatggttatgttcccattactgggagttaggacttcaaaacatgaatttcaggggacatatttcagcccctaacacaaacccaacatcagcatca

SEQ ID NO: 739943 - DNA, 458 bp, Homo sapiens
ttgatatgccttccaataaaaattaaaattgctagataaaataattttcttaaaagcattaaaaaggtgacaagatagtaaggaacctttaaaccagaagggagtggaacactaatgccattttctctacaaccttataggtgctggagtattttatttgtttgtttgtttatttattttgagacagggtctcactctttcacccaggctggagtgcagtggcacgatcacagcttactacagacttgacctcctgtgttaaagtgacccttctgcctcarcctcccaagtagctgagcaccatcatgactggctaatttaaaaatttttttttgtaaagacaggttctcgttttgatgcccaggctggtctcgaactcttgggtttaagcgatcctcctgcctcggcctcctaaggtgctgggatgacagatgtgagccaccacgcccagcctaggt

SEQ ID NO: 739944 - DNA, 329 bp, Homo sapiens
gtttaaaaataaaaaccagtgagcaaagggcaaaaatgaatactcctatatcttatatgagtcttaattcaccattttactttagattgactttttaaacattaattctaattataaaagtaatgcaaatagattttaaaaaactcttggccaggcacaatgccttatgcctgtaattccagcacygtgggagaccaaggcagtagcctgaggccaggaatttgtgaccagcctggacaacacagcaagacccctagctctacaaaaataacaataataatagtaattagggcatggtgatgcacatttgtagccccagctgctcagga

SEQ ID NO: 739945 - DNA, 578 bp, Homo sapiens
ctccaacctgctggctttggagaatacaggtgatccaggtgaggaaggatcccacccaatgcagcccacctgctctaccaaaaagcagccaggctgcttctttgagaaggtccctgatcccattcctcctgactgggcgagacctcccaatgagggtctccagccacctccaacagttgcatgtgggctggcaacargttagtacccccacaggatggagtttctagaggaaggcacaggctgccatctttgctgtttcatggcctttgctggtgatacttccacgtacgggagaaaccaaagcaactggggtctggagtggacccccagcaaacctcagcagccctatgatagagtggcttgactgctaaaagaaaaacaaacaaacaaacagaaaacaacagcatcaacaaaaaagacctaacacaaatctaattcaaagggcagcagcctcaaggattaaaggtagataagttcacaaagatgagaaagaattaattcaaaaacaacgaaaactcaaaatgccagagtgtctcttctcttccagatgactgtgacacctcaccagcaagggcaca

SEQ ID NO: 739946 - DNA, 578 bp, Homo sapiens
ctccaacctgctggctttggagaatacaggtgatccaggtgaggaaggatcccacccaatgcagcccacctgctctaccaaaaagcagccaggctgcttctttgagaaggtccctgatcccattcctcctgactgggcgagacctcccaatgagggtctccagccacctccaacagttgcatgtgggctggcaacaagttagtacccccacaggatggagtttctagaggaaggcacaggctgccatctttgctgtttcatggcctttgctggtgatacttccacgtaygggagaaaccaaagcaactggggtctggagtggacccccagcaaacctcagcagccctatgatagagtggcttgactgctaaaagaaaaacaaacaaacaaacagaaaacaacagcatcaacaaaaaagacctaacacaaatctaattcaaagggcagcagcctcaaggattaaaggtagataagttcacaaagatgagaaagaattaattcaaaaacaacgaaaactcaaaatgccagagtgtctcttctcttccagatgactgtgacacctcaccagcaagggcaca

SEQ ID NO: 739947 - DNA, 649 bp, Homo sapiens
ctcagcagccctatgatagagtggcttgactgctaaaagaaaaacaaacaaacaaacagaaaacaacagcatcaacaaaaaagacctaacacaaatctaattcaaagggcagcagcctcaaggattaaaggtagataagytcacaaagatgagaaagaattaattcaaaaacaacgaaaactcaaaatgccagagtgtctcttctcttccagatgactgtgacacctcaccagcaagggcacagaaccgggctgaggctaagaattgacagaagtagacttcagaaagtggataacaataaactttgctgagctgtaacccaatgaaaagaagctgagaatcatgataaaacaatacaggagctggtagccagaatagccagtttagagaggaacataactgacctgatggagctgaaaaccgcatctcaagaacttcacaatgcaatcacaagtatcagtagcaggatagaccaagaggaggaaagaatctcagagcctgaagattatctatctgaaataagacaggcagactagaatagagaagaaagaatgaaaagaaatgaacaaaacctctgagaaatatgggattatgtaaaaagaccaaacctatgactgattgggatccttgaaagagacagggagaatgg

SEQ ID NO: 739948 - DNA, 562 bp, Homo sapiens
tatttaccacacaaacagaatgccgaactgaaaaaccacatgatcacctcaatagacgcagaaagggctttcaataaaaatcaaaattctttcatgttaaaaacccacaaaatctaggcattgaatgaacatacttcaaaataataaaaaccatgtattaaaaacacacagccaacatcatactgaatgggcaaaagctggaagcattcctcttgaaaactgggatgagacaaagatgccttctcttaccactcctaattcaacatagtactggaattcttagccagcacaatcaggcaagagaaagaaataaaaggcatccaaataggaagagaggaagttaagctctccctgtttgcgartgatatgattctatatctagaaaacctcatcatctctgccgaaaagctccttgatctgataaacaactgatacccaaagcaatcctaagcaaaaagaacatagcgggagacatcatagtccccaatttcaaactatactacagggctacagtaaccaaaacagcgtggtcctggtacaaaaacagacttccagaccaatg

SEQ ID NO: 739949 - DNA, 471 bp, Homo sapiens
aagtgacgtgctactggcatctaatggggagaggccagggatactattgaatattttataaggctgaggatagttccttttacaacgatgatgtggctcgaaatgtcaatagtgttgatgctgaaaaactctggtctagaatgtgtccaatgaccatagcgtggctttagagggtaaagatgctcgttgtamgtctccatgttgctaatatattaacatagggcttagtgaaaagtgttatgggggatgtcttaagtctttcctttaaattctcatggtcctcaaatattcctaaatacttcttcaatgatttaataattgccttctcttttccattaactgttctacttttaagcctcccaattgccaagtgaacctggagcagaagactctttgggaaccactgacctgggtggaggagaaaccaccttgggcgttctgctgcttcatgatccacttcacaatgttagt

SEQ ID NO: 739950 - DNA, 653 bp, Homo sapiens
attttagttggactgatgaaagagaaaagtggtagagagagttcttttattgttcgtgatattttctgagaattgcagtatagactagaatataaaacttaactattgacctcatgtgacttttgtgatgctctctctggcaaatagagataaaaatagtttgaaaatgttattgcattttctgtttgttgtacctcttttctttctttttttttctctccaactgaatcagtccstttttgttgttttgtaacctcttccagagttaactacttccattgtaggtgatgaaatgtataaggcaccacttcaaatgttggcactgctataagcatgttctttcctgctaattcaactcagaattaaaacttttgattcttgttttgttttttgttgttgttattgttgttgttgttgttgtttttgtactccatactcagaaatagtttccactgtagaagttatctcatggcagttgtgttctttctagtagtggtctacaaccagactctagtttctccaagaacactacaagatagattgagtttaaatatgtactaaactaaatgacactctttcaaatgagtttgaatgcattttgtttttagacaacctctatgacattttttccttaaaaacaatgcctctgctcc

SEQ ID NO: 739951 - DNA, 614 bp, Homo sapiens
aaggatctagggatccctggaaaaatagctgatttcaggcctatggcagtaaaagcacaagctaattcttgattcttttttgggatgcaaaataaggatatactataaaaaaaaaaaaaaaaagactcaggagccagcttgaagctctcccattggccaaatgcaggataatttgaacattaatagtatgaatatgtcataataccaatgaactatagaattccataattacatagaattctaataattatagaattaattttctccaaataaaatatgaagctaaaaatgcaaactggaataaatgrttaaaggaaatctactttataaagccaattattgaatgttgaagaaatgatacagttaaaaaataactgtttcttacaactatcatagtaattaataatttgcttaaacaagaatcatcaatggatgctaaaattaataggtgaaattttaatgctaagcagagtatttgcatagtctcaaagtttttccctacaaattacttttaattataaacacggaaatagtaattttaaagcagagaaacctgacaaactccacattaaccaagagatcaaagctaacatcaccaatattgagacaaacca

SEQ ID NO: 739952 - DNA, 550 bp, Homo sapiens
aaaaaaatatatatatatatatattttatgtgtttcctagctctgtctgcctaaaagaaagaatatcacagttaataatgagcacctttacctcccagatactgttttcgaaatagcattctgcactctaaatagatcccaaaggatctagggatccctggaaaaatagctgatttcaggcctatggcagtaaaagcacaagctaattcttgattcttttttgggatgcaaaataaggatatactataaaaaaaaaaaaaaaaagactcaggagccagcttgaagctctcccattggccaaatgcaggataatttgaacattaatagtatgaatatgtcataataccaatgaactatagaattccataattacatagaattctaataattatagaattaattttctccaaataaaatatgaagctaaaaatgcaaactggaataaatgattaaaggaaatctactttataaagccaattattgaatgttgaagaaatgatacagttaaaaaataactrtttcttacaactatcatagtaattaataattt

SEQ ID NO: 739953 - DNA, 613 bp, Homo sapiens
agaatattaaaatagaatgcagtgttcacttaaaattgtttccagggttcaaaaaataggttgagtttactcatcaaccttctgaaaaataaccgtatgattatgaactcatggtcatgttatatttaatgcagctagtaaaaaayggtctgcacagattcttctgctaaaattaggaacacaggtaacagcaatctgtgttgtaaagcaacttgaataaattttaaaagaaagagataagcgaaggaaccatttacagaagctctttaaagctatgttaaggaatttctcttcaacctaaggatattggaatgctatcaaagagtatgaagccagtgtattaggccattttccatttctacaaaggaatacctgagactgggtaaagatgtttatttgattcacagttctgcaggctgtacaagcatggtactagcgtctgctcagcttctggggaggcctctggaagcttttattcatggcagaaggctaagggcgaacaggcgtgtcacatggcaaaagagagaggaggaggtgccaggctctgtttaacaatcagatctcatgttaataactgaaggaactcattcttgcctcgaggacagcatcaagc

SEQ ID NO: 739954 - DNA, 613 bp, Homo sapiens
agaatattaaaatagaatgcagtgttcacttaaaattgtttccagggttcaaaaaataggttgagtttactcatcaaccttctgaaaaataaccgtatgattatgaactcatggtcatgttatatttaatgcagctagtaaaaaacggtctgcwcagattcttctgctaaaattaggaacacaggtaacagcaatctgtgttgtaaagcaacttgaataaattttaaaagaaagagataagcgaaggaaccatttacagaagctctttaaagctatgttaaggaatttctcttcaacctaaggatattggaatgctatcaaagagtatgaagccagtgtattaggccattttccatttctacaaaggaatacctgagactgggtaaagatgtttatttgattcacagttctgcaggctgtacaagcatggtactagcgtctgctcagcttctggggaggcctctggaagcttttattcatggcagaaggctaagggcgaacaggcgtgtcacatggcaaaagagagaggaggaggtgccaggctctgtttaacaatcagatctcatgttaataactgaaggaactcattcttgcctcgaggacagcatcaagc

SEQ ID NO: 739955 - DNA, 564 bp, Homo sapiens
actccctcacaaatgaatggatgaatgaatgaatgaatgaatgaggctcaggctctgtggctcccctttgaaaaaataatgctctgtatcatcagcagaataaaggaaccctggggaccacatttatgttccaagcatcttcaaagcttttgctggctaaaagagaacaattacccaaagttattctagagtgttattactgctcccaaatagtttcaacagccttcagggatgacagctgacaaatgccatgcaaagtaaaaagttatctattactattaatgacaaatgakaaatcaacagaaacctggagatttcctaggctattctggctgcctcccttgctctgcttcatcagccatggaagacacagctgccggcggtttaagtctagagacacatgaggctttcttctgcctcttaggcaggctggcaggtgaaggggcagctggattccagggtggagaggagagagtgaagggcctttcacctcacaggtcctcactgcaccctagtccagagaggaaggtcaaatattgagaaagaagctttttagccaaaggg

SEQ ID NO: 739956 - DNA, 596 bp, Homo sapiens
tgtttcaattatggcccattcctttggggataaagcgccaactcaataatatgatataaaaagccacttggggtttaatgtccacctgctcctccacaaggtgtcccaatacctgtgaaagctttctccttccgccccatgcctatgcctatgccccaccacactgagagctcacacgccctgaccccagccctcctgctcactgctctgccactaggctgccctgccctgcaccacagagaactccacattccttgcagatgttccctcccagaggccttcccakgctttcagccccaggtgcccctgcatgggcttccacagactcccctgatccggccccagcccaccgtgcctatcacatggaattgtaaactgtctgttgatgtgtttgtttgacccattatcatggaaacttctaaagaacagagactcttattttagctactaatcccaggtaccccacacagagcctagagcacagtttgtgctcagaataaactgctgaataaagaaataagcgagtccccatcaggcattagaacagataaaatgctgaaattcccaaggtaggccaggagttaaaatatagacaa

SEQ ID NO: 739957 - DNA, 558 bp, Homo sapiens
gtgaggccagaggttccttagcacttcagggagcctatggcaagagtgactgacatggggccaccagttgtgcctcctcagggtccacctctgggcatgagaaagggcagggataagtggggaatctcagggagaggatccagtataatcaaggacacaggcctcactctgtaagatattctcacaaytggcaatatcaactccatattatgccaatagacatttatgtaatatctaagttatgacaggcactgccatgagaatgcagcaatgaacccaacagaagtggctctaccttgggggatgcaatgaaagtcttttattttctgaaggaagaagcttggtgggtggaggagttcagtgatgtagaatctcaggggaagtgagggaggccctcttgacaagtgccgtatggactgctgggactttgtggtggtagaatgtattctattcacaacacaaatctctgacccactgatatcagcttggccatgagacttgctctgatagatgaaatatgtgtgcatgtgacatatgtcatatcagagcagaagcctt

SEQ ID NO: 739958 - DNA, 609 bp, Homo sapiens
aaatcctggctctgttgctttctatctgtgtgaccttagacaggtcattttcactctctgggcctcaaatttttcacctctaaaatgggatgggtgacctcctcatggtgaagatgggataactaaataaagtaatgcatgtgaagaggctggcagggcacacagagcaggtgctcagtgaagctggctttcctccatatccacctttcagagcacccctccatcagctttgtttcctaactcctggcctgcctcctttcttgtggcgccatctcacagccaaatgacaacaagccctctctgtccctcacaagtgagtatcttcctttgtctaccrtcaccctcaccccaagctcttctctgctgtgggcagccagactcagcttcatgggcatgtgaccttgttacctggggcagtgactatgtgacagagctgaatttctaccctgtcctaactttgcttatctttaacaaacagaatgcctgtgataaaaagttccctttgcagccagaccagctgagactggtacatagaaccaagacagctgaccaaaggacttcaaaaagacctcagtcttcatgataatcttatttccatgctaaatgata

SEQ ID NO: 739959 - DNA, 612 bp, Homo sapiens
gattgctgccttggtagcacttcctgagctgcagacagaatccatggcttgtttgcagcttctctggtactgatcccaccggcctgtatcttcactcctgctggaccatctatcccttctctatatagaatcatctatctctcctctctccccaaaccctccataaactccctttctgtccattgaaaatggagaaagcagttttgtgctgggagtgggagcttggtgtgcacccctgcggcaccagtcttgaggttctcctgtttctgctagtgtaggagagccctcccacaatacctcccctctggtcatggtctctggaggccttttctctggagaaacccaagacaccctcctcattgattccctttattcagcagaggctgcaggcatccctttctcrtctagatattttggtggttatctatgatgagaaattccacctcaaatcttttttaaaaggagttcaaataaacaagcaagtaaatcgtgaagggaaaagccaggaagcacaatcctgtagggtcttcatcctctcactcaccccctagctggcagggcagggccctctctggccgccagggagaaatcaggtataaaagagttttagga

SEQ ID NO: 739960 - DNA, 564 bp, Homo sapiens
tccccaagccagcctgagtctctgtgtaaagatggcagaaaatcccagccaatctgcattggaaaagtagtgtcagcaaatattaaactttatttatgttaagtcagtgggatttgttaaagcagcataacctggcttattctggctgatagtgttactcccagatatgtgggacttcatcagtatctattgaatcaacagcatcatctaccataggctggtactgttttatgacagtaaaccctcctctgtaaagtagctgtttacaatccctattttcaattgaagaaaccgtatcagaaaggttaagtaatttcccagaggttacacagtttgtaaatggcaggaccaggatttaaaccctacctgtccagttccaaagctcccccttctccttycatatatgccatgctccgtctccttaaatgggaaggatgaaaaacacccagtacaatgcctagcacacagtcatgcccaggcactgggagttcctctccagactgaattcctaccacgtttataattggaaccacacttcagcacaatgctatcaggcattgtgtg

SEQ ID NO: 739961 - DNA, 583 bp, Homo sapiens
atcaacaactgaggtctcaggagtgcctttttacctgccaggtgcatggctaaagtgggcacatagagagggaaggagaggcccagaggaaaaagaatgctggtgtaggcaatttgggtttattttgaaataaaacaacatcagccatgaagttaaattaaataatagtcataaaagggccagcccaagacttggcacaagattaaatgctcaggaggtgtgagttccccttccttctgcaaattatagctacagtaatcgagaccttcactttggcaatgcctgttccccgaacatgcttaatacactgttaaasggagagtataagatttccagctgctgcacttagtgtctcagccagggctaatattcaaccggtttgcccaaaaggctgtaccagttgtttacaatgagcatccatcccaactggatcatgcctgtaccttctagttatgaaatactttgaatatcacatctggttccaagtattcatttatttaatacatatatattgactgcctcctctacgccagatgctggtcaaacagcagggaaagactggatggaaaaaaaaaaaccacct

SEQ ID NO: 739962 - DNA, 583 bp, Homo sapiens
atcaacaactgaggtctcaggagtgcctttttacctgccaggtgcatggctaaagtgggcacatagagagggaaggagaggcccagaggaaaaagaatgctggtgtaggcaatttgggtttattttgaaataaaacaacatcagccatgaagttaaattaaataatagtcataaaagggccagcccaagacttggcacaagattaaatgctcaggaggtgtgagttccccttccttctgcaaattatagctacagtaatcgagaccttcactttggcaatgcctgttccccgaacatgcttaatacactgttaaagggagagtataagatttccarctgctgcacttagtgtctcagccagggctaatattcaaccggtttgcccaaaaggctgtaccagttgtttacaatgagcatccatcccaactggatcatgcctgtaccttctagttatgaaatactttgaatatcacatctggttccaagtattcatttatttaatacatatatattgactgcctcctctacgccagatgctggtcaaacagcagggaaagactggatggaaaaaaaaaaaccacct

SEQ ID NO: 739963 - DNA, 660 bp, Homo sapiens
aaactatcagccttttttcttttcacttgctctggcctaaattcttatttttgtctctttctccctacaagcaaagctgttctttactgacatcatcaaccttctcattcagtcttgggataccacccagcaggtgcccccaaaccttgaactctcagagaagccatggtccatcccaacttaaatgaaactcagacactttagaggaagtcccaggaaagcccaaggctccagatggtcyacatagcactgaagcaccgctcctctgaactggacttgtttattgctccccagtagggaagaccctatggaacatcctaatgatgacttgacatcgggtagaccaaatgttcatgtccatttttcccaccaatcacaactctcttaaagttagtagtcacttgggagaccattaagtcatcctcctggttccaggaaaggggtctttttattattatgctttgtgattcagctcttgtcccaaatactctatgaaccccccaagttgagttaactgttcccctctgtgttgccatggcccctggatttccctacaccacagcactcatcacaataaatcataagtgtctttcagtttgcctttctcccactaggtcaatgttctcaaactgaagcctgagtcagaaccccatgcagggc

SEQ ID NO: 739964 - DNA, 622 bp, Homo sapiens
acaggtgtgaaccaccgcacctggccatttccatcttcttacacttccagctgaggaaagaacagaggaccccatgggtctagcatacaggagccttaagatggaagggatgggtttactgaatgaagttaagacgttaacctgcagttctaggcatctgttggtcagcaagattattrggacagaggtacagaagagctgattacatattcctgaacagatgcatggaactgcatgtgaagaaataagatggagataaagagctttagatttaaatataagtctgggagaaaagtcggtctatagatgaagcttggtttcgcctcctgaaataggcatctagaggtaagtcacaaggtaagcagccagatgcaagatgacgacttcccggaaatgagaaatagactgtttctctcagggttgagaaatagctcaagtctctacccatatccaaaagcagatgttgggagaatgcaggaaggaagaaatggaagaaatgcctggaagactaggtgctgatcctcaggccaggcattccaatagccctgggtacccacgctgaggaagaatgttaaaaaccaaggggctgggagagccttctgtatctgactcctatcagcat

SEQ ID NO: 739965 - DNA, 543 bp, Homo sapiens
agaataggcagtttttctggtagctatgtgtggtcgtctcactaaagagacagcaaatggaacataagtagaacttgtgaattcaggtcccaggcactatccttagagcagtggtacctcatttatcccttttttaaaatcttcccattggttagaatccagacagtagctgaagctctaacagaaatcttggaatataatgcaaccttgggaatgaatgccttgcacagagtgacaagcctggagattttgaggscctcttccaaaaaaagcaaagtttggggaaagagaatgtcagttttcttggcttcaagactagacttaggaagactcagggtagagtagtgctttccagggaacagggtcaagttaggagttgagctactgaagtttttggtttcaagtctctggtcagaaccctagggcagaccagagtttatgatagctcaggtcatgggtgtatcaaacaccacactgagggcttgtgtcgagagatcagcgatactctagagtcactgtgagaccctcaagccatccaccagc

SEQ ID NO: 739966 - DNA, 514 bp, Homo sapiens
accttgggaatgaatgccttgcacagagtgacaagcctggagattttgagggcctcttccaaaaaaagcaaagtttggggaaagagaatgtcagttttcttggcttcaagactagacttaggaagactcagggtagagtagtgctttccagggaacagggtcaagttaggagttgagctactgaagtttttggtttcaagtctctggtcagaaccctagggcagaccagagtttatgatagctcaggtcatgggtgtatcaaacaccacactgagggcttgtgtcgagagatcagcgatactctagagtcactgtgagaccctcaagccatccaccagcacttgtmtaacttcttactccttagctgttaacacccagactcgctccccctaaactagaacacaccttggtctgtgtcagtcttctgagcaaccagctctcatggactatcttccctactatccctaggggttcccagaaagggacagtatgagccctaagtaactgaggcata

SEQ ID NO: 739967 - DNA, 619 bp, Homo sapiens
ttagaagtaggaattttggtgtgtctatgactctggtctgtccctgcgatggaccccactctgcaactgctggagaagcaggggaagaaggtgggggtgaatggcaagcaccgtccatcctactgtgcctctctggaatcaggctgcaagctcctccaggacgggcactttgcagtcctggcacagagctgtgcccacagaagggwcttcatacatgcagtatgagatgcaaagctctccatgacctgtctctattttcacatttcaatcctttacgcctattcttcctcacctcatagggctatcgtgaggggtaaataaaaaatactgtgcttaaagcccttcacacactgcctagcgtacacatgcacacaaatgctcgacaaatggtagttgttattgtcaccatctgggaccttgtatatggctccaaggtagagcttagtgtgctgggccgtcaatatttgtctgcgacagctgcaagtgtcccggggatggtctcttcacatttgtatactcggtgcctagcagagcgctcacctcacagaggccctgaagctggctatgtgactgagcaacgaagattcaaggtccagtcctgccttgaccccaacccact

SEQ ID NO: 739968 - DNA, 594 bp, Homo sapiens
ctatggaccatacagaaagacatgcaaagcagaccagattggctacagcttcagatcagcctcacaaatcgtctctcgcaattaaaacactacagagagccctctgctcagtcctgcagctgcccactgccctcctactgtccaccgtggccctgctgcactctggctgcgtcctctctgggatcgctgccaccttccacctgggcctcgcagctgcggcctctgccagagccagctcctgatggacccatgtggaaatgggacctccagatatcatcctggcagtcattgaagactttaagagggacaccaatagcaaaaagatgaatctgggagttggtgcctaccgggatgataacggaaagccttggacgtgctgcctagcgtccccaaggcagaggcccagattgccacaaaaagtttggacaaggaatacctgtccaytgggggactggctgaattttgcaaggcatctgcagaactagcccttggtgagaacagcgaagtcttgaaaagtggccggtttgtcattgtgcagaccatttctggaactggagccttaaggattggagccagctttctgcaaagattttt

SEQ ID NO: 739969 - DNA, 636 bp, Homo sapiens
gaggcaggtcggctacatagggttaaagctgaaatactaagaaggatcccattccaggggcatgagatgtgttttcatgtctaacatttgttgagggtgtgttctctgcctggaaccctgtgagacattttagatatatttccccatgtaatgctcatggtgagctggtaagatgagatgtattgttctcattctattaagaagtaaggtaattatataatttgtcatctagattaagacatatagggcattaaaagtgatcattaatacattggtggaatgacaagcataaactgagaatttcccaatgaaactgggatttatgctcactttaaataaagtaatttaggatcagagacgttaaatgacttaaactgagaactgggaattagtctcactccagaatttatgctgcttaattataccacgctgccagtgaaaaagagaagggatagggaagagagactccagagtaataygaaagaaaggggctcatggtgttagtttctgttttattatagaatttcctgaaaagatacaaaggcccttctgaccattggattggccttagaagagaatcatcccatcgcatttggaaatggacagacaacatggaatataataacatgtatgttt

SEQ ID NO: 739970 - DNA, 558 bp, Homo sapiens
acagttagggaatatcaaggttttataacttaggacttaaaagtttggagttttctcctcccaacttaaaaggtaatcaatttggagaaaaggtaattcagaggcagaaaaagatgaactctaaatgttgttaaatgacttcatttatttcttcattcattgggtattttgagcattttataccaaatgctttaaactgtttgtcrgatagttccaacatctctgtcatgtcctccttggcttgtgttttctttccccatggaagttgacattttcgtggttcttcatatactgtgtaattttggattgtaatttgaacattttgaacaaatatttagttagactggatcttatttaaattttggagtatattgatactattgttttagcaagcaatcaccctggtgagatgaagacaatctgtgggatctggttccaatgtcagttccattctgaaagcctttgtagtgctattcagacatgtgcatcaaccaggggtgaaattgggaactgtgcaatgctctactcattagttcaggtcttagcatctttagtgtg

SEQ ID NO: 739971 - DNA, 612 bp, Homo sapiens
catagttttcttttcttgtgatgtcttaatctgattttcctattaggataaagctggcctcatagaatgagttaagaagtattctctcggctctaacttctaaaacaaattatagacaattggtataattttttccttaaatatttggttgaattcaccagtgagtccatcttgacatggtgctttctgttttggaaggtcaacttctgtaataaatgtwaacatatttaggtcatctatttctccatgtatgagtttagacaaattatgtctctcaagtgattgatcctctgtgtggacatagaactgtccattttagcatccatgggatctgtagtaacaactccttatttatttctgatatagataatttgtgtccttcctcttttcttcttaattagcctggctagagccttatccatttttttttttttaatctttcaaacctagtttttggttttgataacttttttctatcagtgtcccattttttatttctgctctaattatttcttttcttctgtttaatttgtacctgatttgctcttctatttctagtttcctaaggtgtaaacttagatcattaattttagatctttatttttttctaat

SEQ ID NO: 739972 - DNA, 586 bp, Homo sapiens
gtctttacccaaatctcatcttgaattgtagttctcataatccccacttgtcatgggagggacccagtgggagataactgaatcatggagttggttaccctcgtgctgttcttgtgatagcgagtgagttttcatgatatctgatggttttataaggggcttttacccctttgttaggcacttctgtctcctgctgccatgtgaagaagaacaygtttgcttcctcttccaccattattgtaagtttcctgaggcctccccagccatgtagaattgtgagtcagttaaacttctttcctttttaaattatccagtcttgggcagttcttcatagcagtgaggatggactaatacaactgctaacattgtctaagaaagatccttgttatgtggctcagaggccctccatgtattcttaactattcactctcctatccttccaagaataacactaatttgacctctacaataatcactttatcactccagttttgccttttttcctccaaaacaatgccttttaagtctattttaatcgatagatttcctcttaatatcatttaaaaatatttctttacatttttag

SEQ ID NO: 739973 - DNA, 586 bp, Homo sapiens
gtctttacccaaatctcatcttgaattgtagttctcataatccccacttgtcatgggagggacccagtgggagataactgaatcatggagttggttaccctcgtgctgttcttgtgatagcgagtgagttttcatgatatctgatggttttataaggggcttttacccctttgttaggcacttctgtctcctgctgccatgtgaagaagaacacgtttgcttcctcttccaccattattgtaagtttcctgaggcctccccagccatgtagaaytgtgagtcagttaaacttctttcctttttaaattatccagtcttgggcagttcttcatagcagtgaggatggactaatacaactgctaacattgtctaagaaagatccttgttatgtggctcagaggccctccatgtattcttaactattcactctcctatccttccaagaataacactaatttgacctctacaataatcactttatcactccagttttgccttttttcctccaaaacaatgccttttaagtctattttaatcgatagatttcctcttaatatcatttaaaaatatttctttacatttttag

SEQ ID NO: 739974 - DNA, 660 bp, Homo sapiens
accaagagcaaagccatagctgtgacagacaacactgtgtctcctgtgacctgtgcacggttcacccaggtgtggggggccgtggtgagaggtaacactggagaaaagggcatgactaggtcttgaggaccttgagtgcacgccgtggatattattgtggaagcaaaggggaaccatggaaataatcataaaaagtcacagcctccccatacaagacatgcatctgtgtctgccttatacagcactaactaagcgccatgcaccatttaaagtactacaatcctcatggaagctagctaaggggctactagtgtcttcctcatatctagatgaggaaactgaggcacaggtagatgagatcacctgcttgtagacacgctgctaataagtggtggagataggctgctctcwgccctgcaactgcactgtctcactcagccacagagggacagagagttttgtgcctctctcctctcactctgtgctcctttcctgggtaagagctcctccactcagggcaattttgccttcagggaatggttaacaaactctggagacatttttggtcacaactaggggaggagagtgctgctggcatctagtgggtagaggccagggatgctgctcaacatcttaccatgcacaggacagcccccatgg

SEQ ID NO: 739975 - DNA, 598 bp, Homo sapiens
gtgtgtgcaccacacaggccctattctccgctccagacagatgagctgtctcccttcccatcaaaggaaaggttaagaaggatgagacagggaaattcatgtgatgatgaaaaccaggtcaggtgaggggtttgaaatatgctttggttccggccacatgtggtggctcatgcctgtaatcccagcactttgggaggctgaggctggtgcatcacctgagatcaggagttcgagaccagcctggccaacatggcaaaaccccatctccacaaaaaatacaaaaagttagccgggcatggtggcaggcgcctgtaattccagctacttgggaggctgaggcaggagaattgtttgaacctgggaagcagaggttgcagtgagctgagatcgcaccatwgcattccagcctgggcaataagagcaaaactctgtctcaaaaaaaaaaaaaaaaaaaaaaagaaagaaagaaagaaagaaatatgctttgattccaattgcctagcaggagccagtagcattgcaggcatttccctagctccagttccttaatggtgccatgcactttaggaacccagaggtaatcagagaaagttgcttc

SEQ ID NO: 739976 - DNA, 606 bp, Homo sapiens
accgcgctttggcgaaactgggttcgctgctgatttgcgaacctttgcctgactttctcaggccttgagagatctaagtaaatttggtggcccattgaaaggacctggagagagcgtatgaaggtaacaccccgtcaaactgcatgcggcctcagacctgctcctgtggagagctgttggtacctggagcctgaggagatattcagggaaaccagaagaggacaagagraaaaggggaagggacttgggagaacctggcaccagaggctttcctgggacttccaggactcaaagccataggggcccacccgctacattcctgtctttgcccctcttcctacagatctgcctcttctccaagaaactcaaccactagtgacaatgaccagcctcctgactactccttctccaagaggtaggtgaaggcctttcctaatcccagtgagaaagaattgttcaacatccccttccccagaccagtcctggaagcctcagcccaggtgggaagactcccacctctctctgcctgcctcacacaggaagggcctgggaggaagcaggaactagagtgtgccccttagtacggttttaatctgaagtcacatg

SEQ ID NO: 739977 - DNA, 574 bp, Homo sapiens
ctcatgaacatctttttcatgtttttctttaaactcttgagtatattgagccatctatcatctttatcatttctgagttttgtttctatgaaattatttttctcctgattataggttatattttctttctttttttttttttttgagatgsagtctctctctctgttgcccaggctggagtgcaggggcgccatctcggctcactgcaagctcgatctcctgacctcgtgatccacccgcctcagcctcccaaaatgctgggattacaggctcacgtgagccaccgcaccctgcctataagttttattttcctactttttggcatatctagtaatttttaactgaattttggacattgtaaatatgatgttaagcatctggatttgttattgttctttaaagagtgttgggctttgttcaggcagactaggtaaattacttgcaaatcagtttgacctttttgaggcttttttttttgagacagagtcttgctctgtcacccaggcttgagtgcagtggggcaatctcagctcattgcagcctcaacctcctgggcttaagggatcctcctgcc

SEQ ID NO: 739978 - DNA, 652 bp, Homo sapiens
ttctcagcaaccatagccatttccctgtggcaaacacagggagaaagtggtacacagtgttcctttctctctaagaggtgagccagaagtctgcccaatttcaagggcctgctgagaagaacaacagagcaccctaattagcccaggtttcctaacaactatgctggcgatgccggagccgcrcaaatcccctgggtctcctcatcctggagcatttgttctgtctcttactccctgccccgctgcctgaagactcctcaaatactggtgatagagcgtcttagtgctgggggcctcctgagccatgggttaatactcaggtagacaatttacaaaagtcctagaggccaggcacagtggtttatgcctgtaatcccagcactttgggaggccgaggcaggtggatcacttgaggtcaggagttcgagaccagcctggccaacatggtgaaaccccgcctctactaaaaatacagaaattagcccagcatggtggcacgtacctgtagtcccagctactcgggaggctgaggcaggagaatcgcttgaacctgggaggtggaggttacagtgagccaagatcatgccactgcactccagcctgagcaacagaatgagacactgtctccaaaaaaaaaaaaaaaaaaaaaaaa

SEQ ID NO: 739979 - DNA, 509 bp, Homo sapiens
ccattttacagatgaggaaactgaggtgctcagttcatttgtccaaagtcacataactagtaagatgtagggatgggatatgagcctagatgattggattttgaagaccgctcttttgaccaccatagtaaatatgtaattttcagagccatttaagcctacagtgactcctgtggaataatgaaggaggcaggcacttctgtattccaggactttggggatttcagaatgggttcatatgattttcttttttatttttggtagtttaaaaattttattctatcagtatttttaataaatgtttattgctgcattcccracacccccagtgtattactgtttcattgttttgctatccttgtagtactggaatttagttggaagaataagacatttacttctaatctgatttaaaaaaaaccagatgggtagtatttgaatacagccagtgttttaaatgtaaaagaaaatgtttaatctggtatttctagagttgagtcatgcattac

SEQ ID NO: 739980 - DNA, 581 bp, Homo sapiens
atttttcatataagaggggatcagaaatcgacttttattcctacccaacaagaagcgacaaatggatgcaactttaagaatagtttttagcaaattgaaaagagaaatacaaatgaaatgattcaaacttcagaatgcacagagacccagagacaggaagggaatgtytaaatcctcacggagtcccaaaacaaaatccttccaatgcaattctttccgtcaactccactttaatagaaagctattaactggattctcaccttatttataggtactgtgttattttaatgaaaactaaatctcgcttgctctgctcaatcctttctctgctcaattgatttcctgtggctacatgggaataaattatttttaaatcttcaccttcgtcacaagagtgtgagcccacctgaatggggagacaattgatattagacaaattgaaaatattcttgagaatgtcatgcaaaatcccctctgggttgaatcgacccagttttgacttaaattatgatttttgcgtagtggttttaagtaaaaaaaaaatgcacagacattttgtgaaagaggaaagggaagagacg

SEQ ID NO: 739981 - DNA, 514 bp, Homo sapiens
gaaagtgattgaaattaaataaccctttcctgatttcataatgcaactgcagacagcagagacggtgagatagagcccagtattttacaccaagggcacatgaactttttttttttttgagatggagtctcactctgtcacccaggcgatctcggctgggtgacagtggcgcgatctcggctcaccgcaacctctgcctcccaggttcaagcgattctcctgcctcagcctcccgagtagctgggattataggcatgtgccaccatgyctggctaattttgtatttttagtagagacggggtttctccatgttggtcaggctagtctcgaactcccagcctcaggtgatccacctgcctcggcctcccaaagtgctgggattacaggcgtgagccacttcgtccagcccacatgcacttttatctaccacgggtggcctggacctcgaccgtacatcagcaataaaacactaataaccaaatcaggcacggtactttacagtttacaaacagct

SEQ ID NO: 739982 - DNA, 613 bp, Homo sapiens
tcagtatagtatacaagttacagtgcaaatatgttttctcatgggtacatactctagatagatacttgttggatcttacagtaactctttgtataacatttcgaggaatgccaaaactttttccgaagtggctataccaatttacattccctccagcaatgtatgagggttcctaattcttcacatcctcaccaacacttaatattgtctacttttttggctgtaggcatcctggtgatgtgaattgctgtctcattgtagtttttatttgcatttgtccagtggctaatgacactgagagtctttcaatgtgcttactggccatttatgtatcctctttggagaaatgtcttttcaaactctgcacattttaaaattggttacttttccttttatttttgtgttttaagggttctgacatctggatactaaatccatatcagatacatggtttacaartatttcatcccattttgtgaattgtcttttcactttcctaatactgtcctttgaagcacaacagttttgaattttgatgaatttccttgcattttctatatacaaaattatgtcatctgaaaatagagttttacaaactcttcctttctaatct

SEQ ID NO: 739983 - DNA, 596 bp, Homo sapiens
ttcagagtttatcttacttggagtttgttgagcatcttgaatttgtagatttgtatttttcattgagtttaggaagttttcaagcattatttctgtggcaggccaggtctcactaatgcaggcctccataacaactgttttagtactaagtggttaagttaaatattcaaagctgaaacagccaatgccctttatacaaaggctggaatgtaagaaatgcccaccaagggttttgcctaggcctttcctgggccttaaagcattacaaaataacaaaggaattcttaataggacccatttagaattaaaaaagttttaccggggatctgaaggaactccccaaacctctgcgatttagcaggagaccagataagggyaattacctccagcacctggacccatttagattaagtaaatttactgaggctccagaggaaggtcttcaagactcagaccttagttatagattaaaagaagctaatcacttatgtctttagatgaatgcacacttacacgtagacatatagcttagaaggtatataagctttggaaaactttgtaattttgagttggtctggcaataatttccaggcctt

SEQ ID NO: 739984 - DNA, 574 bp, Homo sapiens
tccccagttcatttgcatcttgttattgggcagcgagaaatagcagcccgaccctcagtttggtctgggaacatttcttcaactagtctttctgcctctttctttctctctttccttctggtattcacattatgcatatgtttgtctgcttgatagtgtcccctgggtcccttaggctctgttcacttttccttttttttttttttaatttaagacatttattcagcatcaccattaggytattgcatttagcaatcaatatcatgggtgcaaaaaataaaactacattaaaaccctttgttggaatgctttacactttccacagaacagaaactaaaataacctgttatgcaattattcacaaatacactcctcaagctttttgcccatacacatgagcatttgtctaaaacatgtcttctttgtagcagctaagccctgccatcaccatgcttggctgagttcacaaatctgttgtaacctgtagcttccatcacttctctggctcctctgtcttactaagctttgtttcctaattaaaatcttctgccactgacatatctactgctgctac

SEQ ID NO: 739985 - DNA, 491 bp, Homo sapiens
cttaaccttttttgtgccatggcccccacccctacccccagcagtctggtgaagcctatggggcccctctcagaatcatgttttaaaatgcataaaataaaacacatatgattatcaattctactgaagtttctaagaatgtcaatcccattgaaatagttaccaagttttaaaaaaattrtagtatagcgtgtgctatttatgtgtatctttattaatgccttaaatacaagatctagcagtgggtctgaatttccaggaagtaatgaatgtaaatatttttagatgtctgttctgatggtaatgtgaaatgaaactatcagggatttcactggtgacaaagtcatgggtgacattccaatgaaagaaaatactgaatttccattagaggttagtgaaaataaggatgtaatcttattctcatgtaagctcagatctcttgcataccaagtatgggtcctttggggatccatggaccttagattaagact

SEQ ID NO: 739986 - DNA, 599 bp, Homo sapiens
tttagagatagagtttttcctctgttgcccaggctgacctcaaacttctcgcctcaagtgattctcctgccttggcctcccaaattgctaggattctaggtgtaagccactgcacttggcctttttcctttaaatattggaaagtaaaaaaaaaaagcaaaacttttttyttttttttatagagacggggtctcactttgctgcccaggctagtcttaaactcctggcctcaagtgatcctcctgccttggcctcccaaagtgctgtgatcacaggcataagccattgtgcctggcccttcccttttaatatcggaaaattatacagagtaacacaaagaaaaaagatactaatccagtgcttgggattataaatactgaagtatttattaactgcaattgatagtccaaacagtacttccgtcctaaagaaacatccttaaaaacactctaaccccagatataatgctaaatcttactttgatgttgtccagaacccttttaaactccaaaggttcatcttttccctccatagctgcaggatctaagccatctcctccataaatgaactggataatatcgccagtagagcttcggact

SEQ ID NO: 739987 - DNA, 592 bp, Homo sapiens
atgcctttgaaatggttatctagtactagattcttatcagtgcctagctatgtaatgtgtgtagcttaagatttttaagaaagaaggataaaatgctcaatataaatttaaaaagcacttttattggaatattgaatcatatatttgctttctgtaagtccttttatctataaaataatagttgagaaaggcaaatagaatatgtggaggaattaaaaattcagttgtagggtggtaaatgaaaaccaaatttttcattcaccacattaaatgtaaatgggtattatactcaatttaagcagcaaagttgcttytttttttttttttttttttgagacagagactcacactgtcgcccgggctggagtacaatgttgccatctcgcttcactgcaacccctgcctgctgggttcaagccattctcctgccgcagcctcccgtgtagcttcttaagatgtgaagatttttaaattaagatgactcttgggatgaaccatcttgtgttggttaaagacttttactgacatatttttaataatttttttaacttttattttcaggtcaatggcacatgcgtaggtttgttatgta

SEQ ID NO: 739988 - DNA, 588 bp, Homo sapiens
ggaggccgaaggccagagagcgtcctccctgtcccatggcctaaatgcctctcagaactcacagatggtcagtcgggagtacaggcagttcctgtcattccactgcccatctgtgtacatctccacacactgctcttttccccgacctgcgggctcccctcggtaccagttggtgtagtttacaggggtcccrtctgagtagcggaagtctccagggctgggaccctcagtcaggcctacataggcatatgtgttgtacttcttcacgaagcttgcaatggcctcattttcctctggattccttgggacagcaatgcggccgcctgctctggcacatgcctcctgaatggcatcaaaagtgatggactgcccattgctggagaagaccttctctcctactgtcattatggagccctgcagactgagggctgagagcagaggagtccgggtcaggccactgaccactttgtctctaagccacctccctcacctggggtctctgctaccagattctccccagtctctccatctctgcctctctctgtgtcttctcttcctcttccaattgcagttttctaaattcacttt

SEQ ID NO: 739989 - DNA, 628 bp, Homo sapiens
caaacaaacaaagtgaggggtattttacacagtaactcccctgtgatcttcacactgtgttcaggtcatgaaggtgaagggaagacagagggactttgtgggtttcaggaccctggagaagcgtgacaaccgaataaggcacatggctcaraaacggatcctttgctataaaggacactattggggcattgtgtacattttgcatagggcctgaaggctatttggagttattgtatccgtgtttatttcttgattacggttataatgcaaaaatgcctttgcgtgaaaaacacattaaagtattggggtgttggggtttcatgttgacaacctactctcataggttcaggggaaaaaaaagtcgtacgatactggcaatttttctgtaattttgatgttgtttcagaataataaaatgaaaaatgaaactgaccaaggccacctggttaataagtgacagctctgggtcaaaactcaggtgtgcctttcccctaaagccatgccctgccctgccaaccacaaggccctgcacatccaagttggcctctgttcctgctcatcacctgcaaaacagccctgcctccccacagccaagttgctggagcttcgccccacctgcccccaacct

SEQ ID NO: 739990 - DNA, 636 bp, Homo sapiens
tagggagaaggtatttatggagaagaccttaatttggagagtggagcattttgaaaaaaatgaagtggcttactaagacgaatgcttattccaggaaaataagaatgcagaagaaataaaaaggggaaaatgactacattcctccttcccagctatacctccgcatcccttcacaacctggaacttcagtcctggacccccgtctccacatacggcttgcatattgtcatattgtaagaattcataagaaaatactcaactcattactcttctttctgaaaacttttctttgtcwttcattttcatttctcattccagatacactttttaatacctttattgttttgacaggctggtagacaaatatgaataagtgggttgtcattgttcttttgttcttactgaatttgctctattttactctgaactaagttgctgtgatgttctctgtcagccaggggtcctaagaagcagaccattttcatgcattcttgtgacaatggacataaacccaacccctaaagggcctatttcctcccgggcaccccagaggtgcacactggactgtttccgctgaagaaaagccggggcccatctgctaaagggcctgacgagggaatagccctacgtggcttg

SEQ ID NO: 739991 - DNA, 616 bp, Homo sapiens
tgtcaacttatcttttagtatatatagagaattgtatggttttcttattgatattttaataccatgagttatattgattccttcattaaaaaaccatccttgcattatttaaataaaccccacatggtgttagcatatacccttttaaaaaatatgttctgcttgctaatattttatttaaaaattttgcatttatgstgtcttaaagatcatactatagtcttttgtctcacccttttggcttttgtttttactgttttgttggattcttagatttaagttctcttctccctctctacaatattcaggagcagtttaaatagcattgagttatctgcttcttgaaattctgatggatttttacctgtaaagctttctacaagtagtgctttaatggatagtggctttttgacaacactctcaatttcttctctggtaattggactctttagatttcctatcttttctaaggctagttttcaccatttatgttttttcttgaaaatcacccattttgtccatgtgttcaaatttattttcaaagcattgagctcagtaatctattacaattcttttaatttcctctatacggggtaatttccccattctcatttct

SEQ ID NO: 739992 - DNA, 593 bp, Homo sapiens
tagtattatcacattttatagcaatttacataacaaaagctgaaggaggataggcttgtgttgatattttgcctttcttaaggctttaatttgcttattgacatggtgtaatttactacaaatcatcaataaattaagcaatgtgctttgaattttctaagaaaccaccatctgtaatttgtatttctataaagaagttcatggaaaatagcagttatgctaaagctattaattagagtggtasaaataagaaactcaggatataaatataagtcactttaaattcaaagctagtctgtcttgagatgtccattacttagctgagtgcaggggctggattcagggagtgggaaggaaaagctaaaatttcaatagtttttacttgttcttaatcttctttgattttgttctaattttacatcttcataggatattggatttttacatctgcacacttacctggttaatgttcgttaaaagtacagcagtattctcacaagttgatagacataagaaatcaagaaaaaatgtagagtacaagaaaatttctacgaccacatggctctatatttttttggattgctttagtgtgt

SEQ ID NO: 739993 - DNA, 601 bp, Homo sapiens
cagagggaaaacaatgtgaagaaacacagcaagaagatggccagcgacagacaaagagcccccgaggctgccaaaaccaggagacaggcctgaaacagatcctttcctggaaccttcaaagggccatcttgatttcaaacttctggcctccagaattgtgagacaataaatttctgatgttcttagccaatcagtttgtggcactatgttttggcagccctagaaaactaacacattatcttaacaaatgtttcttgtctaagatagacattttatttccataacatccacagtggcttaggraatttatgtaggaagtcatacactgtaattatttatttataaatttctgaggaacaacgatgaaactagcaacattagttgtttgatattcttaaaattcagagtagtaagagacaatgttgttagtcaattgatataaacaatactgaataaatgttgtgtgatgtggctatcatgtataaaatagttgtacagatttgaacatgaattcaatgccagtattgcacatatgtctctgtattcttctcaagaaacacaaataattaataggacgacacctgggtttaacaccagcata

SEQ ID NO: 739994 - DNA, 638 bp, Homo sapiens
aaacctatgtttgattggtgtacctgaaagtgacaaggagaatggaaccaagttggcaaacacacttcaggatattatccaggagaacttccccaacctagcaaggcaggccaacattcaaattcaggaaatatagagagcaccgctaagatactccttgagaagaataacccccagacacataattgtcagattcactaaggttgaactgaaggaaaaaatgttaagggcaaccagagagaaaggtcaggttacccataaaggggagcccattagaataacagcagatctctctgtagaaaccctgcaagcyagaagagagtgggggccaaaatacaacattcttgaagaaaagaattttcaacccagaatttcatatccagccaaactcagcttcaaacacaaaggagaaataaaatcttcacagacaagcaactgctgagggattttgttgccaccaggcctagcttacaggatctcctgaaagaaaccctaaatatggaaaggaaaaactggtaccagccactgcaaaaatgtaccaaattgtaaagaccatcaacactatgaagaagctacatcaactaatgtgcaaaatcaccagctggcatcataatgacaggatcaaattaacccataac

SEQ ID NO: 739995 - DNA, 566 bp, Homo sapiens
acaagtatatgtattgctaaaggacaattatgttctaatgtttctatcctgagtgtggaatgtagattatgtgtatgtttttgttttgctaattcagattatttaattcctacctattgcctttagagaaaaaatgtaaaatccttggcaggaaataaagaaggtttccccctgtgaattcgctcaaagctaattatttaaaattaagctttccatgctttccaccatgttctctacagggcactcatattgaactgcrtacttgaaatttccctaaatatcctacattgttacatctttttaactttgcatatattttctcctgattggtattctttcctctttcacctagaggagttttcaggacaaaactcaatcctcacttcctctagaaatcatatcaccttctcccacaggttggtttggttgcccctatctgtgctgctataacaatgaatttacatatgtctctatcatatgggttacaactgtctgttcagtggttaattttttcgtatttatttataaacttcattgaaatgaatgttttttttttttgctttttt

SEQ ID NO: 739996 - DNA, 546 bp, Homo sapiens
ttccctgttaatactgctttctctgtatcctattgattttggtatgtgtgtttccattatcatttgtttcaaaatgttctcaattttcttcctaattccttcattgtcccactggtcattcaagagcatctagtttaatttccatatacttgtatagttttcaaaattccttgtgattttaatttctrgttttgttccattgtggtcagagaagtttcttgatattatttcaaggttctgaatgttttaacacttcttttaccacctaacatatgatctattctggaaaatgacccatgtgctcactagaaaaatgtgtattctgcagccattggatgaaatgttctcaaaatatttattattttttatacaagttaatttccattttttggttgattttctgcctacatcatctgtccaatactgaaagtgggatgttaaagtctcctgcttttattgtattgagatttagctctttatctccaataatatttctttcatatatcttggtgctccatttttgagtgcatatacatttacaattgt

SEQ ID NO: 739997 - DNA, 635 bp, Homo sapiens
gcacatgttattttaaataataatttctaaaaataacaatacataccccttgcagttattctaagaaatcccaagacaataaggcaaatctgaatgatcaaaagattgcaaacaatgtatttgcctattttctgtttttttttctacaaaaatgtgtatgtggatttgtgtgagagtgtgatatcaaacttggattattcaatatacagttttgttactggattttttttttaaagtaaccgattatgaatattatccaagtgcataatcttactaaccgkaatttatttaactattcccctattgttagatatttaagttgtttcagttttgactttattattaaaaatgttttggcaaatatctgtgtatctttctcccaggaaacttttaccaatttataattcccccaatagatcacagcgctcttttcattccatttataggcaaaagttgtcttatttttaattacattctttgtttcttagggagatgaccaatttaatatgtttaataaacatttaaattttttctttggtgaactgctcatttgtgattcttctcaatttaatttgttgtgtgatatgttgctctcaggttcataagaattaattatgtcttaaagacattatctg

SEQ ID NO: 739998 - DNA, 666 bp, Homo sapiens
cagatcacgaggtcaggagatagagaccatcctggctaacacggtgaaacctcgtctctactaaaactacaaaaaattagccaggcgtggtggcaggcgcctgtagtcccagctactcgggaggctgaggcaggagaatggcgtgaaccacggaggcggagcttgcagtgagccgagatcgcgccactgcactccagcctgggcgacagagcgagactccgtctcaraaaaaaaaaagagtttataggtcgaccatttttcggaaagttaataattccgaaaaatcatgattttcaagcagtctaatgttgttagcattcactgcagcttttgaggtgccaaaacaactttcgttgcagcaccacaactttgcctctgaaatagactctgcggaagtaggtccttgccacctgacccagccttatcatctaaccctcagaaccaaaatgttatgctccagtggcatcacagcccccacaccatgctgtgatttgcttctcttccagtgctgatattgtcccccactcctctctcatcctcaatgactcaatcaggtgtcatcatgccaaggattcttaagctcccaccctcctaggtcgtgttagatatttctccttaattctccttgaatgccctatatatatttatgactacatttgtcatact

SEQ ID NO: 739999 - DNA, 666 bp, Homo sapiens
cagatcacgaggtcaggagatagagaccatcctggctaacacggtgaaacctcgtctctactaaaactacaaaaaattagccaggcgtggtggcaggcgcctgtagtcccagctactcgggaggctgaggcaggagaatggcgtgaaccacggaggcggagcttgcagtgagccgagatcgcgccactgcactccagcctgggcgacagagcgagactccgtctcagaaaaaaaaaagagtttataggtcgaccatttttcggaaagttaataattccgaaaaatcatgattttcaagcagtctaatgttgttagcattcactgcagcttttgaggtgccaaaacaactttcgttgcascaccacaactttgcctctgaaatagactctgcggaagtaggtccttgccacctgacccagccttatcatctaaccctcagaaccaaaatgttatgctccagtggcatcacagcccccacaccatgctgtgatttgcttctcttccagtgctgatattgtcccccactcctctctcatcctcaatgactcaatcaggtgtcatcatgccaaggattcttaagctcccaccctcctaggtcgtgttagatatttctccttaattctccttgaatgccctatatatatttatgactacatttgtcatact

SEQ ID NO: 740000 - DNA, 666 bp, Homo sapiens
cagatcacgaggtcaggagatagagaccatcctggctaacacggtgaaacctcgtctctactaaaactacaaaaaattagccaggcgtggtggcaggcgcctgtagtcccagctactcgggaggctgaggcaggagaatggcgtgaaccacggaggcggagcttgcagtgagccgagatcgcgccactgcactccagcctgggcgacagagcgagactccgtctcagaaaaaaaaaagagtttataggtcgaccatttttcggaaagttaataattccgaaaaatcatgattttcaagcagtctaatgttgttagcattcactgcagcttttgaggtgccaaaacaactttcgttgcagcaccacaactttgcctctgaaatagactctgcggaagtaggtccttgccacctgacccagccttatcatckaaccctcagaaccaaaatgttatgctccagtggcatcacagcccccacaccatgctgtgatttgcttctcttccagtgctgatattgtcccccactcctctctcatcctcaatgactcaatcaggtgtcatcatgccaaggattcttaagctcccaccctcctaggtcgtgttagatatttctccttaattctccttgaatgccctatatatatttatgactacatttgtcatact

SEQ ID NO: 740001 - DNA, 480 bp, Homo sapiens
ctacactgttcattccaggtagcctttcgtctaatcttttttcaaggtttttagcttccttgtgatgggttcaaacattctcctttagctcagagaagtttgttattactgactttctgaagcctacttctgtcaactcrtcaatgtcattctctgtccagctttgttcctttgctggcgaggagctgtgagcctttggaggagaaggggtgctctggtttttagaattttcagcttttctgctctggtttctccccatctttgtggttttatctacctttggtctttgatgatggtgacctacagatggggttttggtgtggatgtcctttttgttgatgctattcctttctgtttgttagttttccttctaacagtcaggtccctcagttgcaggtctgttggagtttgctggagatccactccagaccctgtttgtctgggtatcaccagggggggctgtagaacagcaaatactgc

SEQ ID NO: 740002 - DNA, 480 bp, Homo sapiens
ctacactgttcattccaggtagcctttcgtctaatcttttttcaaggtttttagcttccttgtgatgggttcaaacattctcctttagctcagagaagtttgttattactgactttctgaagcctacttctgtcaactcatcaatgtcattctctgtccagctttgttcctttgctggygaggagctgtgagcctttggaggagaaggggtgctctggtttttagaattttcagcttttctgctctggtttctccccatctttgtggttttatctacctttggtctttgatgatggtgacctacagatggggttttggtgtggatgtcctttttgttgatgctattcctttctgtttgttagttttccttctaacagtcaggtccctcagttgcaggtctgttggagtttgctggagatccactccagaccctgtttgtctgggtatcaccagggggggctgtagaacagcaaatactgc

SEQ ID NO: 740003 - DNA, 480 bp, Homo sapiens
ctacactgttcattccaggtagcctttcgtctaatcttttttcaaggtttttagcttccttgtgatgggttcaaacattctcctttagctcagagaagtttgttattactgactttctgaagcctacttctgtcaactcatcaatgtcattctctgtccagctttgttcctttgctggcgaggagctgtgagcctttggaggagaaggggtgctctggtttttagaattttcagcttttctgctctggtttctccccatctttgtggttttatytacctttggtctttgatgatggtgacctacagatggggttttggtgtggatgtcctttttgttgatgctattcctttctgtttgttagttttccttctaacagtcaggtccctcagttgcaggtctgttggagtttgctggagatccactccagaccctgtttgtctgggtatcaccagggggggctgtagaacagcaaatactgc

SEQ ID NO: 740004 - DNA, 536 bp, Homo sapiens
tacttttatcttaaaaagttaaaatttaggaagggaaggaaggcagtgaagtgtttggttttgtctggaaactaaaacttggatttctaatactcaatatttttaggaagcttatttgctttttagcgctgcaagtttccctggagatttgatttttttcttaaggaagtgtgtcctttttcgaaatatatrgatattgcgatttgatgtgatcatttgactcaacagctatggatgattcacataattaaactgggttacagtgcggcttttgatgattggtaatactttgtaaggttcctctcccataaaatggcagtaattatagtccctacatttcataaggttgttgcaaagatgaagtcagatgaaataatatgtgcaaaatgtttcacacagtacccagaatgttaaaaatttatacataatagctattatttagtttcttcaaggcattgaaattactttgtactgtggggaaaagaaagagagatcagactgttactgtgtctgtgtagaaagaagtagacattaag

SEQ ID NO: 740005 - DNA, 624 bp, Homo sapiens
acccaggttgaagcttggaatcttcagggtggctctgatccactcaaatgtcttggtggggaaaggaagatgagttttatggacagaggaatctaggattgggaggttttttcatgtgatcactccaaatctgtgcctgagacttgcccagtctcagatttcttttgttttctattccaattgtcattctctgtcccccattcaaaatacaatctaaagyaatgaatatactatttaatcttgatctggagtcatatttttttttgagacggagtctcgctccgttgccgaggctggagtgtagtggtgcaatctcggctcactgcagcctccgcccactgcaatctccacctcccgggttcaagtgattttccagcctcagcctcctgagtagctgggattacaggtacgtgccaccacacccagctaatttttgtatttttagtagagatggggttttgccatgttgccaaggctggtatcgaaatcctgacctcagttgatccacccgccccggcctcccaaaatgctggaataggcagtgctgggcctggaatcataattttttaaattttctcaatatctacataaaagtgaaagaaaggaaaaaaaaaaggtggttgg

SEQ ID NO: 740006 - DNA, 624 bp, Homo sapiens
acccaggttgaagcttggaatcttcagggtggctctgatccactcaaatgtcttggtggggaaaggaagatgagttttatggacagaggaatctaggattgggaggttttttcatgtgatcactccaaatctgtgcctgagacttgcccagtctcagatttcttttgttttctattccaattgtcattctctgtcccccattcaaaatacaatctaaagtaatgaatatactatttaatcttgatctggagtcatatttttttttgagayggagtctcgctccgttgccgaggctggagtgtagtggtgcaatctcggctcactgcagcctccgcccactgcaatctccacctcccgggttcaagtgattttccagcctcagcctcctgagtagctgggattacaggtacgtgccaccacacccagctaatttttgtatttttagtagagatggggttttgccatgttgccaaggctggtatcgaaatcctgacctcagttgatccacccgccccggcctcccaaaatgctggaataggcagtgctgggcctggaatcataattttttaaattttctcaatatctacataaaagtgaaagaaaggaaaaaaaaaaggtggttgg

SEQ ID NO: 740007 - DNA, 624 bp, Homo sapiens
acccaggttgaagcttggaatcttcagggtggctctgatccactcaaatgtcttggtggggaaaggaagatgagttttatggacagaggaatctaggattgggaggttttttcatgtgatcactccaaatctgtgcctgagacttgcccagtctcagatttcttttgttttctattccaattgtcattctctgtcccccattcaaaatacaatctaaagtaatgaatatactatttaatcttgatctggagtcatatttttttttgagacgragtctcgctccgttgccgaggctggagtgtagtggtgcaatctcggctcactgcagcctccgcccactgcaatctccacctcccgggttcaagtgattttccagcctcagcctcctgagtagctgggattacaggtacgtgccaccacacccagctaatttttgtatttttagtagagatggggttttgccatgttgccaaggctggtatcgaaatcctgacctcagttgatccacccgccccggcctcccaaaatgctggaataggcagtgctgggcctggaatcataattttttaaattttctcaatatctacataaaagtgaaagaaaggaaaaaaaaaaggtggttgg

SEQ ID NO: 740008 - DNA, 627 bp, Homo sapiens
tagctagaaagaaatgcaaaaggatagggagctgctatcctaaatgacagtgacctagtcaattgaaactagctagaaggaaatgcaaaaggatagggagctgctatcctaaatgacagttacctagtcaattgaaactagctagaagcaaatgcaaaaggataaaatgttcatgggtgtgcactacgttttttagtttatttttttgataactgtttcttagtaaagactcagtttgctgctttagaatttaaattttgaaaaaagacatggcttggttaggggttattcaggcagcctttacatatgatacaaagggacagtgtgttctcctgaaggcaaggcagcatttttgttgttgttyctacatttaaggcagccatcagaagaaataaggaatccattcagtgaaataaataagaaaagggcttctttcctcaagtcttcgagaactaaagaaagcttaactgtggtttgaactacaaaggatacatatgaggtaaggcaaaaagcctatggaggtatgtaagaaaaattgaagtggaaggtgataatagaatggtattagtgttaaatctcctgatgttgataattgcactgatgatctcagaatatgtcctattctta

SEQ ID NO: 740009 - DNA, 627 bp, Homo sapiens
tagctagaaagaaatgcaaaaggatagggagctgctatcctaaatgacagtgacctagtcaattgaaactagctagaaggaaatgcaaaaggatagggagctgctatcctaaatgacagttacctagtcaattgaaactagctagaagcaaatgcaaaaggataaaatgttcatgggtgtgcactacgttttttagtttatttttttgataactgtttcttagtaaagactcagtttgctgctttagaatttaaattttgaaaaaagacatggcttggttaggggttattcaggcagcctttacatatgatacaaagggacagtgtgttctcctgaaggcaaggcagcatttttgttgttgtttctacattyaaggcagccatcagaagaaataaggaatccattcagtgaaataaataagaaaagggcttctttcctcaagtcttcgagaactaaagaaagcttaactgtggtttgaactacaaaggatacatatgaggtaaggcaaaaagcctatggaggtatgtaagaaaaattgaagtggaaggtgataatagaatggtattagtgttaaatctcctgatgttgataattgcactgatgatctcagaatatgtcctattctta

SEQ ID NO: 740010 - DNA, 544 bp, Homo sapiens
gaaaggtattgaattgaggaactcaaactcaggcataggtgaaaggcaggaagctctgcagaaagtaggggaaataagtggaaattgatatatctcaaagtaagactctaaagcctccttccttaccgtggcttagaatgttggcatctataacacccaccaaagtatgaaactggaaggagaatttctcctgaggaaaatggccatgcctagaaaaaagacttacagatgctgacacatttctggggaggttttccctagggaatagctggggccctacygaatcattcttcaataagactataattcaatacattgtacttctccacaaaggttttgtttttaggtttcagtgcctcacttttagatataaatgaataggtaagaatcatcagacacttgaggaaagtttccagcataaagaaatagagataaaacaaacaggaaagaatgtggaggaaactgagacaataaaggaatcagaaaagttaggacctacgatttatggtctcagagagataaaagaagctattgcattcatgaa

SEQ ID NO: 740011 - DNA, 569 bp, Homo sapiens
atttgttagataagaataaacattagagctaagatcttgaatgacaagaaaaggtcagctaggtaaagagctgggttaaaagcctcctaagcagaggacacggtaagtgcaatggccctgaggagggaatagccttgacttatggggagagcagcaagaaggtccagtgtagagatgaggagtgtaatggaagagaagtgtattygttatctattgttatgtaacaatattaccacaaatgtagcagcctggcacggtttagctgggtcctctgcaaagctgcaatcagggtattggccaaagtagggttctcatgggaggctcatctgtgaatctgcttccaagctcaagtagttgttggcagaattcaattttttgcaggctcttggctgtagggcctcaacctcttgctggctgttggctagaagctgccttcagttccttgctgtgggggccttcccattatggctgcttgcttcctcaacatcagcaagggagagagagtttcccagcaagagaggttacagtcttgtgtaaggttataacagaggtgatgacccgtcatcctg

SEQ ID NO: 740012 - DNA, 646 bp, Homo sapiens
aaatgaaaagtgtaggtagcattaagtcaagttttccactatatttacactgaaggacttttaggagaaaagtctcttatttgtataaatgaaagctcaataactttattttattaatattagcacttattgagttggaatgagttacaatcttgttttggctaactttgtcaaaaatattttcggtcagatgcagtggctcacacctgcaatcccagcactttgggaggccgaggcaggtggatcacttgaggtcaggagttcaagaccagcctggccaacatggtgaagccccatctctactaaaaatacaaaaattagctgggtgtggtggctcatgcctctagtcccaggtactcaggaggccgaggacagagaattgcttgaacccaggaggcgggggttgcagagattgtgccactgcacttcagcctgggtgacaaagtgatacttcatctcaaaaaaaataaataaataaaarcattttaacagtattatgtttgtgctttcaatttcaattctaagttacagtttttactaagtttgagtaaatccttgagatggacatagtaggatgaattttgaggagtaatttagcaactatcaggtattttttgttaactgttatagaagaatatgtattcat

SEQ ID NO: 740013 - DNA, 587 bp, Homo sapiens
agggggatccaagcaaagagaaaccctgtgtgtggcagaaaagtggttggttatacgggaggctggaggaggcggtgtctgatttgtatagggcccaagggattggtttgaacaggtgtgtcattcacgtagctggcaaaaaacctggccatcccaacttagccctttagtatgcacatgcgggcctgccatgatgtcccaaacatgtggagttatctggaggtgcccatgacacttggcayacctggtgacaagaagaagaaggtgggaattgccatattgggtggacccagtttctaatgacgtgcatttgcatatcaaagcttgcccgcctggccctctttaagtacctttctgttagaaaagaaatagtttggaggttgctttcattaaaagaaaaaccctgactgagaactccttttaccttctctatctgcctgaaaattatttcttaataactcctgtattagccccaccatccacccagagtcactcaggccaaaaccctagaggtccaccctcgattcccttctcccgtttaactcacatccaatccaccataaagtcttgtcgagatgacctctaaa

SEQ ID NO: 740014 - DNA, 636 bp, Homo sapiens
cgttgtttacccctgtgctgtcctctttacgttattgcattctagatactttccttgcttgagaagaaactacatgtccttgggcacacctgcatgacattttcttactgttttaaaatttttatttttgagacaggctctccactctgtcacccaggctggagttgcagtggcagratcatagttcatgacaaccttgacttcctgtgctcaagagatcctcctgccttagcctcccaagtagctagggctacaagcacatgccaccacacctggcggtttaaaaaaaaaaatttgtagagatggggtcttgctgtgttgcccaggctggtctccaacttttcacctcaggcagtcctcccacctcagatttccttacttttatagtggttaatatgtgaggctgctcaacacattttgttttgtaatgtctttgctctattgtctgtatcagcagttaaactttttggtctcagaccccctcaataatcttttttattttgagacagggttttgctctgttgcccaggctggagtgtagtggtgcactcatagtgatcatagctcactgcagccttgaactcctgggctcaagtgatcctcccacctcagcctcccgagtaactggaactgcag

SEQ ID NO: 740015 - DNA, 726 bp, Homo sapiens
cacacaacacacagctgaatttctaaacactagcaataaataaaaccaaaaattttgaaataattgcacctataatatctctgaaacataaaacttctaggtatatataggatctgtgtgctgaaaacttacacaatgctgtaaacaaaatcaaagaagttctaaataaatcaagagtatatggattcatggattggaagacccaacacagtaaagattttaattcttcccaaattgatctatacctttaatgcamctccatcaaaatcccagcacaggatattttatagagacaagatgattctatgattctataatttacatgcaaagataaaaggtaaaaagaagaatacagagagtctagaaataggtctacacaaatacagccaattgacttctgacagaggtgcaaaggcaacccagtaaacaaagacactctttcaataggtgctattggaacaattgaactgtcatgtgcaaaacattgaaccgcaacctaaagctcctaccttatataaaaatcaattcaaatggaccacagatttaaatataaaatgtaaaactataaaacttttagaagaaaatatgggataaatattcaagacttagtccttagacatggcaccaaaatagtaattgatggaagaaaaaatggatcaaatggacttcatcgaaatttaggactttggctttgtgaaggatcctataagaggatgaaatggcatg

SEQ ID NO: 740016 - DNA, 726 bp, Homo sapiens
cacacaacacacagctgaatttctaaacactagcaataaataaaaccaaaaattttgaaataattgcacctataatatctctgaaacataaaacttctaggtatatataggatctgtgtgctgaaaacttacacaatgctgtaaacaaaatcaaagaagttctaaataaatcaagagtatatggattcatggattggaagacccaacacagtaaagattttaattcttcccaaattgatctatacctttaatgcaactccatcaaaatcccagcacaggayattttatagagacaagatgattctatgattctataatttacatgcaaagataaaaggtaaaaagaagaatacagagagtctagaaataggtctacacaaatacagccaattgacttctgacagaggtgcaaaggcaacccagtaaacaaagacactctttcaataggtgctattggaacaattgaactgtcatgtgcaaaacattgaaccgcaacctaaagctcctaccttatataaaaatcaattcaaatggaccacagatttaaatataaaatgtaaaactataaaacttttagaagaaaatatgggataaatattcaagacttagtccttagacatggcaccaaaatagtaattgatggaagaaaaaatggatcaaatggacttcatcgaaatttaggactttggctttgtgaaggatcctataagaggatgaaatggcatg

SEQ ID NO: 740017 - DNA, 605 bp, Homo sapiens
ataaggtgcccagttacatttgaatttcagataaataatggctttgtgtgtttgtgtgtgtgtgtgtgtgtgtgtgtgtgtgtgtgtgtgtgtttaagtatgcccccactgctgcatgagaaattcttgtcctaaaaaaatcatttgttgccgagctgggcatgatggctcacacctgtaatctcagcacttcgggaggccayggcaggaggattgcttgtggtcagaggttcgagaccagcctgggcaatatagcaaggctcagtctctacaaaaaaagaaaaagaaatattagccagttgtggtggtgcacacttgtagtcctagctacttgggtgcttgaggtgggaggatcacaggaccccaggagtttgaggctgcagtgagctatgatcacaccactgcattccagagtgagaccttttctcaaaaaaaaaaaaatactcattgtttatctgaaattcaagtttaactgggcatcttgtattttgtctagcaactccacaaataacccttcctagtcaatcctgaatcctttatcctctagatgcatctactgtctgattttctttttgtcatctgtgatggttaatattagttgtcaa

SEQ ID NO: 740018 - DNA, 542 bp, Homo sapiens
taatcatctacagtgtatgtattaatctaggcactgggagtatggttgtcttagtctgtcttctgttacctaacagaatactatatgctggataatttataaagaaaaaaaaacttacttagttcatgaatatggaggctgagaagtccaagaacatggcactggcgtctggtgagggcctccttgctgtgtcacaacatggcaaagggcatcacatgacaagtggtcaagcatgtgcatgtcagctcaggtctttctttcccttcttatcttcctcttcttataaagccaccagtyccatcatgggggtgggggcccacactgatgaccttatctaatcctaattatgtcctaaaggttccacttccaatcaacatttgaatttggggattaagtttccaagacatgaaatttaggggacacattcaaaccatagcaatgttaggaaatgactcccagtcccttccttcattcagacttaacaccagcagcgcacatattggaaaaaacaattcaaacaaacggcatgatttcagataatg

SEQ ID NO: 740019 - DNA, 487 bp, Homo sapiens
gttgccccaagacactggaaacaaaactaagggcaaagacgtgctcactatcacacatctaaagagacccaccagcagcagacatgtccccaaggtcttcatcaaaaagaaacacaaccagcccctctaacaccaggctccaccccaaaccaccaacacacaccatctataggaaagactggggagggaagagaaagaagaggatggtgggggaagtggtcacgtaragagccgtcattgtgatgagaggagctccaagagaatccctcatagaaatgggggtgccccagggaggggaacatcacacaccggggcctgtcggaaggtaggggataggggagggatatcattagcagaaatacctaatgtagatgacaggttgatgggtgcagcaaaccaccatggcacatgtatacctatgtaacaaacttgcacgtactgcatatgtatcccagaacttaaagtataataaaaaaagataatattt

SEQ ID NO: 740020 - DNA, 630 bp, Homo sapiens
tcaaggaagcttgggctcaaggaaatcttctccagatcttaacaggtagagtgatccaaggtgacacgtaggttacatatgcaagactgaagccactctctccaccacaagcatccactccttcccccaacatgtagctgaatgccatccccagccagcagggccagcatctggmatcatctttgaccttgtgttcttactgatggtggccaacactgtcagatgcccttccagcatccattccccactgttagatccattccccacctcttcccagctaccacaggcctgatttgccttagggtggcactgtgcccagcccaaggaaatggattgcaactggtctgaaccaatcgcaacaatcccattgctcacattccctgccttccttgcagttaggaaaggccacatgacccaggtctggccgaaaaggccgaagtaaaagtctgccaaagataagcctgagcatttagttggctctttgatacaaggaactgatgggctggcactcccttcctcttcttcctgcctgggatatagaggagatgtttggaaccctagtagctatcttgtgaagtcaatgacatggttgaaaggacatcagaaacatagactctgacagtactcagc

SEQ ID NO: 740021 - DNA, 661 bp, Homo sapiens
gtcctggtaacttagtgaattttaatggtgttccctgagatggtaaacacaggcagcctctgtaaacatataaatgagtgaatggatggatgaatgatagatgtacaaaggcaggaccatttgatgaggaggaggatgatagtaaatacatagtacttgcggtaggtttaacctatcagtttttttcttcttttgcatgctttatatagctggtgctcttttcttcattatttcaacagattaggttagctgcatcttctaattgtatatcawattttggatacatattactttctctaggtcaagtgtcttggcaaatcttcctttcttcacgtaagatgtgtattggcggcagccgtgggaggtccagacacaggtggccatggaactcgctggtaatagaggacacatctcttaactgggttgctctaagaactgatgcctaaaccatctcagcatggcgtataaaggagaaggtgggcatggccagcctccctcagctacactgtctcaggttagccctggaagtctttacacacgtagaacccatacccataatatatgtatggcatctgactttttctacccaaatatgggaggtgtggaaagccacatttaccagctccctcagtgcctgattggaagaggggataaggttata

SEQ ID NO: 740022 - DNA, 615 bp, Homo sapiens
cttttaaataatttcagtctctttgttaaatttgtctgatagtattctttctctgtgttatcttgaatttatttgagtttccaaaacacagctattttaaattctctgtctgaaaggtcacatatctctgtttcttcaggattggtscctggtaccttattggtgaggtcgtgttttcctggatggtcttgatgcttgtaaatgttccagtgtctaggcattgaagagttaggcatttattgtagtctttgcagtctggacttgttgtgtccattgttcttgggaaggcttttcagatattcaaagggacttgggccccaaacccaataatgccatggttctcgcagacttatagaggtaccaccttagtgatcttggataaggtctggaagaattctctgcattaccaggtagagattcttgtgtgtgcgtgtgggtttttttctttactttatccgaaacaaatggagtatctccctttgtgctgggcctcctggatctggggatggggggacacaagtacccctgtggccaccaccactgagactgcactgtttcacacctgaaggcagcacagcactgggtctcgcccaagacctgctgtaaccaccactt

SEQ ID NO: 740023 - DNA, 532 bp, Homo sapiens
atcttggataaggtctggaagaattctctgcattaccaggtagagattcttgtgtgtgcgtgtgggtttttttctttactttatccsaaacaaatggagtatctccctttgtgctgggcctcctggatctggggatggggggacacaagtacccctgtggccaccaccactgagactgcactgtttcacacctgaaggcagcacagcactgggtctcgcccaagacctgctgtaaccaccacttgcctaccacctaagttcactcaaggctctagggctctattatcagcaggtggcacatctagccaggtttgtgtccctcctttcagagtcatgttcccccaggccctgttgggtccagagatgctgtctaggagtgagattgaagtcttttttttttgagacggagtctcgctctgtcgcccaggctggagtgcagtggcacaatctcagctcactgcaagctctgcctcccgggttcacgccattcttctgcctcagcctccctagtagctgggactacaggcgcctg

SEQ ID NO: 740024 - DNA, 532 bp, Homo sapiens
atcttggataaggtctggaagaattctctgcattaccaggtagagattcttgtgtgtgcgtgtgggtttttttctttactttatccgaaacaaatggagtatctccctttgtgctgggcctcctggatctggggatggggggacacaagtacccctgtggccaccaccactgagactgcactgtttcacacctgaagscagcacagcactgggtctcgcccaagacctgctgtaaccaccacttgcctaccacctaagttcactcaaggctctagggctctattatcagcaggtggcacatctagccaggtttgtgtccctcctttcagagtcatgttcccccaggccctgttgggtccagagatgctgtctaggagtgagattgaagtcttttttttttgagacggagtctcgctctgtcgcccaggctggagtgcagtggcacaatctcagctcactgcaagctctgcctcccgggttcacgccattcttctgcctcagcctccctagtagctgggactacaggcgcctg

SEQ ID NO: 740025 - DNA, 488 bp, Homo sapiens
caaaccctggaagtcagttgattactatatactacagcagaatgactcagatttcatagaaaggagcaaccaaaatgtcacaacccaaaactttacaagctttgcttcagaattagattgctttataattcttgaatgaggcaatttcaagatatttgtraaagaacagtaaacattggtaagaatgagctttcaactcataggcttatttccaatttaattgaccatactggatacttaggtcaaatttctgttctctcttccccaaataatattaaagtattatttgaactttttaagatgaggcagttcccctgaaaaagttaatgcagctctccatcagaatccactcttctagggatatgaaaatctcttaacacccaccctacatacacagacacacacacacacacacacacacacacacacacacacattcaccctaaggatccaatggaatactgaaaagaaatcacttccttgaaaat

SEQ ID NO: 740026 - DNA, 641 bp, Homo sapiens
aaacagaaactatctgacttagctcagggtagagagaacttgcctcataatgggctcttatgacattaatattttatattcttatgtgcctcataatttccaaaaaatattcatagcagagagtctccaaagatggccatcaccaagaccttctcccactgtatgtatatgstgctccatctagcaagaaataggagactgtttctttcccccttgaattcagactggccttgtgtctgctttgaccaaaagaatgtggtggaagtcacatgttggaacccttggagaactggccacttctgttttctccctttaaaaaatcagccaccatgtaagaagtccaaccacattgggacccaggttacaagaaagtaagagccttaacaaccaggggcctgtggacaaccagaggaggccatctctccctcttcttcctcatcaccaccactcaggagaaaaagcccagtcatgtttcagagccagtctgcccccatttttgggtagggtgagcaattgtcaccctatttgccagggatgtacctggaatatttgcaattttagcactgcaagccccacatccctggaacccctcagtcctgggcaatctgggacagttgcccaccctcctttcaggatacctg

SEQ ID NO: 740027 - DNA, 620 bp, Homo sapiens
tacctactttgcaagacagtgtgaacagaacagagagcacgcaaagctgcgcttaacaagtctcatcacacagcccgcttttgtagtggcgaggcagcacctggagggaaggcctgcgcctccacaggtggctgatgacggggctctccagcctmaaacgctggaaggcttagtgcctggagtgccctccaaggggtgcttgctcctctgcctgcccttgccgggcccctcacccgacgccgcgcttcaccctgacacacacagactttccatggctggtggtcatgctgccctgccctgggagcacatctgcccaggatcacagagatgtcagggggaagccgctctgacttgatctcaggcacaacctgacactggagttttctttcaccagtcagcagaggaaacatgtgggatgaattaactaagccaaccagggaaagcaacgaaagcaacggcagttggacttcaatcggttcccagacaatggagcgtggggtgagcccacctctatccagcagggcaaggggcctcccaggtacattcaaggaccccccaccccatcccctagagagttgtcccaccctcaggcctaggatgtgggatttgaacccaggcag

SEQ ID NO: 740028 - DNA, 620 bp, Homo sapiens
tacctactttgcaagacagtgtgaacagaacagagagcacgcaaagctgcgcttaacaagtctcatcacacagcccgcttttgtagtggcgaggcagcacctggagggaaggcctgcgcctccacaggtggctgatgacggggctctccagcctcaaacgctggaaggcttagtgcctggagtgccctccaaggggtgcttgctcctctgcctgcccttgccgggcccctcacccgacgccgcgcttcaccctgacacacacagactttccatggctggtggtcatgctgccctgccctgggagcacatctgcccaggatcacagagatgtcagggggaagccgctctgacttgatctcaggcacaacctgacactggagttttctttcaccagtcagcagaggaaacatgtgggatgaattaactaagccaaccagggaaagcaacgaaagcracggcagttggacttcaatcggttcccagacaatggagcgtggggtgagcccacctctatccagcagggcaaggggcctcccaggtacattcaaggaccccccaccccatcccctagagagttgtcccaccctcaggcctaggatgtgggatttgaacccaggcag

SEQ ID NO: 740029 - DNA, 638 bp, Homo sapiens
gcccggcctaggctttcaatgaatatcacattggcattatctattgcctgcctactatttcctaaggtgcaggggtaggggtaaacactgatgtaaaaatgaatatcatctgaccctggcctgaaggacctcagagaataatggtgagtcaaatatgaaacaaatctttataagtaggggacaggggctcatgtctataatcccagtactttgggaggctgaggcaggaggtttactagaggccartaattcaggaccagcctgggcaatatattgagtcccatctctacaaaaaatttaaaaatcacccaagtgtggtggtggtggcatatacctgcagtccttagctacttgggagactgaagcatgaagattgtttgaacccaggaggtcaagccattgcacccctgcacttcagcctgcgtaacagagtgagatctgtttccaaaagaaaaaaggaaaacaaacaaatccccaaatcattgtagttcaacataaatgttagcatgaagaagtaagggaaagggttctgtgtagggactacagaaacacagagaggttttaattaattgcttgcagggtgtggaaaggtttcacaaagaggttaataaaattacgtcttagaaatgagtagcagt

SEQ ID NO: 740030 - DNA, 588 bp, Homo sapiens
tgacccttcagccccccaccttagatagatcacttgatctttctaggcatctgtaaaatgggaagactatagccagagttggtcatgggtctgggctgtgtgaaggcaaggtcagagagggagatggtagcctatccagccaccagcccttctcttcagtgccctttccctctgtattttgggcaggtgtgcacattgagagaggagaaggaggatagcatgagttgggtataagaacagtagatgagcttggctgaagtgagtaaccagatgggtaagckggggctgtggtgacctgggagcaggactggtgtcagagggctgtgggggtggcttagaatgctccagggaggtgggtggatggagggctttggggcagagggagagaggtctggggcagagggagagaggtctgtgccaggagttggcaagtctggtaatctccatgagaatcagtgtccccatcagcaaagagggaagcgtgtccattgtcagccatccacagttgtctctatcacaaagtggcttggaagattggctaatatccgggtgcaaggaatcattagcagggaggccaagtttggggag

SEQ ID NO: 740031 - DNA, 610 bp, Homo sapiens
acaaagcacttctaattaattctctaggtaataacagaattgctgtgtcatggcccggtgcggtggctcacacctgtaatcccagcactttaggaggctgaagcaggcagatcacgaggtcaggaattccagaccagcatggccaaaatggtgaaaccccgtctctactaaaaatacaaaacttagccaggcgtggtggtgcrcaactgtagtcccagctacttgggaggctgaggcatgagaatggcttgaacccgggaggcagaggttgcagcgagccgagatcgtgccactgcactccagcctggacaagagagccagactccctctccaaaaaaaaaaaaaaaaattgctttgtcagctgggtgtagggctcacgcccctaataccagcactttgggaggccaacgcgggtagactgcttgaggccaggggctcgagaccggcctggccaacatgatgaaaccccgtctctaacaaaaatacaaaaaattcgctgggagtggtggtgcacgcctataatcccagctactctggaggctgaggcgggagaatcacttgaattcaggctgcagtgagctgagatcgcaccacggcactccagcctcgg

SEQ ID NO: 740032 - DNA, 652 bp, Homo sapiens
gtgtattcactgtgaacatttatcaagctgtacactcatgatttgtgcaatattctataatatgctgaacataagttattaaaaataagtttatattttaaaaattaatcagaccacacaattttttttagacagagtctccctacattgcacatgttggtcttaaactcctgagctgaaggggtccttccaccttggccttccaaagtgctgagactacaggcgtgagccaccatggctggccgacaccacagtttttattctctaaatattacctggagatgtctttagcatccctgctgagattccagaaaaaaataatagtgagaaactaagagctgcttctaaatgaacactcaaaaaagaaactaggccgrgcgcggtggctcatgcctgtaattccagcactttgggaggccgagacgggcggatcacttgaggtcaggagttcgagagcagtctggccaacacggtgaaaccccgtctctactaaaaattcaaaaattagccaggcatggtggtgcacgcctgtagtcccagctacttgggaagctgaggtgggagaattgcttcaacctgggaggcagaggcttcaatgtcaaggtgcttaaggacttagctattctttaaaaaattaaccagtagtaaagac

SEQ ID NO: 740033 - DNA, 612 bp, Homo sapiens
ttttatagtttcgtactttgagactctaaagtctaaattttatggaactatggtactttacaaaatacatgggtaggtagtcagtgttcagtaatagattgactaaaacctttgctctcctctctaaaaatgcttaatttcctggacaagatcagaaaacaaaatttcrcaatacagtccctaagatgttataattgtgccctttatctgaaattgcaaaagcaatttagggttaagagaactgatttccttcagagacacggttcttagcattgggtcttgtttataccctttaatcattttttatttataatctttttctgagtttatcttctactgctctaaaatgctttctatggtattgtttgagaagcattagagggaacatcctttctcaaaaattcctttttcaggaacccagacatcccacattgagttagtctttgagttagggcttttaggagtaacaggttaagttatatttagacattaggctaggtcattatcagcaatatctgggaggggatacatttatcaggatgtttttcctctgggacagctaagagagaatgcctccaaataatagctaagcaaggaacaagacagagagag

SEQ ID NO: 740034 - DNA, 604 bp, Homo sapiens
ctgtctcccaggctggagtgcagtggtacgatcatagctcactgtagtcccacctcagccttttgagtagctgggactacagatgcacaccaccatacccagctaattttaaaaattttttgtagagacaggttctcactatgttgcccaggctggtctcaaactcctgggctcaagtgatcctcccaccttggcctcccaaagtgctgtggttataggcgtgagccactgtgcagagcctgtaattttgttctttaaacttctaatttattttctatgtttgacggcatttgcatcccagctcccttctttgctaaattatgagaacaggcagtttaatgtaaactgaacttccaagactactctacttcacccacgaacaatctttaaatctaatattagccttcttacagagtggctgtgtgcatcargtgatgcaaattacctaagtgtctagcataatacaactcacagaggaggtacttgacaaatattagccccccagctacagtttgaaaacatgcagttctgtgataatatgtcatggttggattacttcttcagagatttttttcataatctctgggtttaaaccctgtgatat

SEQ ID NO: 740035 - DNA, 619 bp, Homo sapiens
atgtaataaactgtatttgctttttattagagaaatccttgggaaaaacacaacggaacctactaagaagaggtaagcattttgatttcctctcaagagtaaaaagtgaaggattgaagtgaaatttcagattatcatttgtttttattgggtacacaggattttgtgtttattatccatatagtttttgaccccaaattaggtacatctattagayaggaaattttgcagtgctgagtgcatagttgactgagaattctggttattttgctaaccaaagcttcactgcactggggagggttagagtcccaagatttccttctctttagttccctcttggtgcattgttatcttggtccacttacactgtatcttctacccagtattttcatttataaaatttatgtccatcatttacttataggttcaatatatacatccttatctttaaaagctgtgaagctgtatattttatgtttaagaacctgggaaggagatttagcccaacaacaagaaccaaatacacctatctcgacttgagtcattcctgactctgataggtccttaaaacaagactgtctcactgacaagcaatctctgttaattgtcacctccccac

SEQ ID NO: 740036 - DNA, 631 bp, Homo sapiens
ttttagtgcctggagcatctcactgcctgactgggacttccccagcagtacctaagcagtgactctcctcctcatcaaaaggtactggtgctctgtcccattcctccccatccctgataacaatggcaccccgagaagcctgtcttagctagacagcaatagtgaattgaaggkttactctctcaggccaagtttactggtgactccaatggctaaagagctgacactttgtctgattagagtttggttatgggtgctttcccccattctgcttacacaaagggctcctttttttcattgacgttggggcactagttttatgctctgtatatcctcaggacaatcctaggaggcaggtactattattatccacattttacagttgaagatatgactcagagaggccatgtaacttgtcagagttcacactgctaggaatgcgagagctgtgattggaacccaagtcacctgacacttcggtagacatgagtatcaagtccaacaagagccagaataagtcccccaaggtactcagcttgcttgaagtccaaggacacttctgagacttagttagggttaatttcaaagttgtctccttaattgggagggtttggattgtagaaaggctcat

SEQ ID NO: 740037 - DNA, 631 bp, Homo sapiens
ggggccctcttctacatgactagaatgcagccatcagagccggggttagcaatgagctatgggttcccatttatcctgataatgtcctttgtagtgaaaggatccggttcaggatgcactattgtgtttagttgtcctgtctcctggatctccttgagtctggagcactcctcagctttttttttttactctgatgacctgcagtcttgkaagggggcaggccagttgctgtgttgtgcccctcagcctgggtgtgtctgatgctccctaagcattggattccactcatgcatctcgggcaggaatagtgcacaagtgctcctgtggcctgcccattgagtcccatcaggtggactgtgattcgctttgttccatcactggtgatgacccttttgagaattatttatgctgattctctacttatcccaggtttggctagcaagagttccttcacacaggcttctatgtccctttgacctgtccccttgttctttgatcatttccttaccttctagcacacaatacccaagggtcatcttatactttccataactcagccctggaatccatcatttctccaaggttcctttgagtgatgagtggtatttagaaggtgctagttgtgctcact

SEQ ID NO: 740038 - DNA, 539 bp, Homo sapiens
taatcacattgggggtcattttgaaaatcaaatgatagctggggatcctgcaggggcatcagttgtgtgtggcccttctgctggtatcatctatctgatgtattgagctagctttcccgacctctgacttaatgtggtgtagattaaccccattcctggctccctgggtaggcgattttgttataggaaaggggtcccaatagagaccccaagagagggttcttggatctcgcgtaagaaagaattcagagtgagtccatagattaaagtgaaagcaagtttattaggaaagtaaaggaataaaagaatggctgctccgtagacagagcagccctgagggctgctggytgcccatttttatggttgtttcttgatgatatgctaatcaaggggtggattattcttgtctcccctttttagactatatagggtaactgcctgtggttgccatgccatttgtaaactgccatttggggctttcacagtgggagtgtagcagtgaggacgaccagaggtcactctcgtcgccatcttggttt

SEQ ID NO: 740039 - DNA, 631 bp, Homo sapiens
ggggccctcttctacatgactagaatgcagccatcagagccggggttagcaatgagctatgggttcccatttatcctgataatgtcctttgtagtgaaaggatccggttcaggatgcactattgtgtttagttgtcctgtctcctggatctccttgagtctggagcactcctcagctttttttttttactctgatgacctgcagtcttgtaagggggcaggccagttgctgtgttgtgcccctcagcctgggtgtgtctgatgctccctaagcattggattccactcatgcatctcgggcaggaatagtgcacaagtgctcctgtggcctgcccattgagtcccatcaggtggactgtgattcgctttgttccatcactggtgaygacccttttgagaattatttatgctgattctctacttatcccaggtttggctagcaagagttccttcacacaggcttctatgtccctttgacctgtccccttgttctttgatcatttccttaccttctagcacacaatacccaagggtcatcttatactttccataactcagccctggaatccatcatttctccaaggttcctttgagtgatgagtggtatttagaaggtgctagttgtgctcact

SEQ ID NO: 740040 - DNA, 658 bp, Homo sapiens
actcctggcttcaacaatatctgtgtgatcttgagtgagctgctctttctcattgagctgcacaagaaaatgttgttaatcctccctcactaaccagttcccaagttttatggtatggtttcattcaatgttgaaatttctaagctctttttaaaaaatgataaaataaatatgtttaatagttgagcttattcaatatacctgaagatcaagagaaattgccaatgagacagccaagaaggatgaacatattaaataaggtagaacatttgaggtgtggctgaggaatgaactagctcacgtaaatatttctgcatgagtgggcgtgtgtgcacacatgtgtgctccasagcagtgcttctcaaacttaaatgtgcacaggaatcttgtggggctcttgtgaaaatgaagattctgattcagaagtccaaagcggagcccaaagtcctgcatttctaacaagttcccagtgatgctgacaatgctaggccaggggctacactgtgagtagcaaaaggagtcactcatgacattaaaaatatctaagaacgtcagtaggttcaggtccctgttagtgtttttgtttgcctggagtttttctttctattattaaatcagccttttaaataaaaatgaagcacctagtaatatgcataaa

SEQ ID NO: 740041 - DNA, 658 bp, Homo sapiens
actcctggcttcaacaatatctgtgtgatcttgagtgagctgctctttctcattgagctgcacaagaaaatgttgttaatcctccctcactaaccagttcccaagttttatggtatggtttcattcaatgttgaaatttctaagctctttttaaaaaatgataaaataaatatgtttaatagttgagcttattcaatatacctgaagatcaagagaaattgccaatgagacagccaagaaggatgaacatattaaataaggtagaacatttgaggtgtggctgaggaatgaactagctcacgtaaatatttctgcatgagtgggcgtgtgtgcacacatgtgtgctccacagcagtgcttctcaaacttaaatgtgcacaggaatcttgtggggctcttgtgaaaatgmagattctgattcagaagtccaaagcggagcccaaagtcctgcatttctaacaagttcccagtgatgctgacaatgctaggccaggggctacactgtgagtagcaaaaggagtcactcatgacattaaaaatatctaagaacgtcagtaggttcaggtccctgttagtgtttttgtttgcctggagtttttctttctattattaaatcagccttttaaataaaaatgaagcacctagtaatatgcataaa

SEQ ID NO: 740042 - DNA, 476 bp, Homo sapiens
cacttatgtcatggattgttaagaagactaagagttgtcatgtgttctgtcaacaagaggatggatgaacaaactcaaggatattcagtcaatggagtgctactcagtaaggggaaaaacaagcaacacaccaacatgaacgaatctcaaatgcatcacactgattaaaagaggccagaaacaagagtccatactgtatattcccaccaatgtgaaattctagmatgggcaagatggatctatggtgatagaagtcagaacagtggttgtctatcaggagaggggtatgaccagccagaggcacaaggaaactctctggggtgacagaagtattctttattgtggtggggtggtagtcacacagcgtatgcagtggtcaaaactcatggagtcatactctcaaattggtgcattttattgcatgcaaattctaccttaatacagaaagaaaacaataacaaagaatgaacacaaat

SEQ ID NO: 740043 - DNA, 476 bp, Homo sapiens
cacttatgtcatggattgttaagaagactaagagttgtcatgtgttctgtcaacaagaggatggatgaacaaactcaaggatattcagtcaatggagtgctactcagtaaggggaaaaacaagcaacacaccaacatgaacgaatctcaaatgcatcacactgattaaaagaggccagaaacaagagtccatactgtatattcccaccaatgtgaaattctagaatgggcaagatggatctatggtgatagaagtcagaacagtggttgtctatcaggagaggggtatgaccagmcagaggcacaaggaaactctctggggtgacagaagtattctttattgtggtggggtggtagtcacacagcgtatgcagtggtcaaaactcatggagtcatactctcaaattggtgcattttattgcatgcaaattctaccttaatacagaaagaaaacaataacaaagaatgaacacaaat

SEQ ID NO: 740044 - DNA, 534 bp, Homo sapiens
tttccctgggataaaatacacacgaaaccctcagctttgcagcatgtgacccaaatgaagccctccataagcggcagctagtattactttcccctcttgagcttacgcttttataacaaaaatcttcgtacagcttctgataaaagtcaagggcaagagaaagcctatgtcagaatagttgttcactcaccaagggcagaggaactgactgggaaagggtgcaggggttcttccggagtactggcaatggggatgcataagtgtacatgcgtgaaaacccatcgggctgtgcactcacagctgggtgtgttaagtgctttagtattatacctcatagaaaagcttaaaggaaaaattgacaaaaacaaaacctctgcagtgttagaaattcctttygtgttgagtctaataaaactttctgtgatgatgaaaatattctctctctctgctttccaatagagtagccagtaaccatttgtgattattgagccacttaaatgtggctaatatgactaaaaacctgaatttctagtt

SEQ ID NO: 740045 - DNA, 586 bp, Homo sapiens
gcaccaacactggttatgctcacaagggtgctttcttgctcatggccatcctgtcaggcagcctctcatgtgttttccattcagagatgttgggtcacaccaccagtaagtggcagagctgggatttgaacccagagtgtctgtgtccaatggcatgctctttccagcctctccaaaccccctcctggtgtggcagtttaagtgccctgcatttttccaacaaagctgcttcctgagctccctgtgtgtggtcaagctgtctgtgaaggctccattccarccgcccacctcgctctgaacctgtctcatgttttgagggtaatctgcaggtaaattctctggagagcgggtgacagagaaggactgagccgcagctgcctccctgggcaggactgagaactgacagtgtctcaaagattccctccctccccacaaacaccacagcagcgattccacaggcaaaattatagccagatcaaggacagcaactggggattaaaaactttaaacccattaggtttgctttcagcatttgatcccaaagccaaagcttccccagggacccacgttttggttacatgagtca

SEQ ID NO: 740046 - DNA, 622 bp, Homo sapiens
aatcattttgaaaagaagtatatttcagtaattaaaggaaaaaggtggcagatctttgtttttggtgattaagaattacacaggtttctcattagacccttaaagagaactgaagcatatttcaataaaaatatcaattagaatttctgcttgacacattctcctcctgcatccatccctaaaatgatgcatatacttggccacaaattccacrttaattcttagatctgtagcagtgtgagctaaaccatgacagaataaattagtccatcagggttttcaacctagtgaacaagttaaggagaaaaacattgagcacatttaatacattcttcacccactggatactattgagatcattatctgatgagagcttggtccagccctggaaccctccgcaaatcttctctttgacaattgaattccttgtaaaaaatgtcccctgtcaattctgttggatttgggtttaggcatcatgatgggggatgatctaaactttttgcctggaatttatagggttcaatttttgtgtttaattgactgatttaataaatgctttattcttatctttagcacaggggctgccaagagaatgaacagttacactgtagaccatgtgttt

SEQ ID NO: 740047 - DNA, 602 bp, Homo sapiens
atgagaatgaaaataatagtaatatagtacctttgtagattatttttatttccttagctatttccttcagtattgtaatgtaaattatgtaataaaatcagaagaaatcatttcttacctacagctcttatttcttttaggctcatgccttgttctgattgtgggttagtgctgatttgtactgctcaatataagtgagattcgggtatcttaaataaggaaaagatacgacttgttatatctgcattcttgttatgaaaactaaaaagaaacatttctctaaatatatgtgtgctatatgaatacattcattgtctacctgtgaatatgtgatctacagatatcttggaarataaggaacaattattttctgattcacgatttagggtcctgttacaaaatatacaacagcaattctatatacttaggaaatttttacagacagaaagtggtgactaaaagatatatctcctttcagattactttggttaactaatgtatcagcatggttctaataactgtaagccctttcccagagttcagtttatttttcaccattttatgcacatggtgtgtatgtttgtatcaacatagatgcagat

SEQ ID NO: 740048 - DNA, 665 bp, Homo sapiens
tcttttccccactagagagaaagttcgtgagggcaggatttttgtttgtttcattcactgcgtctgggacagtgcctggcatttggtacacatcattttattgaatacattaagtcattcttttttttttttgagatgcagtcttcctctgttgcccaggctggagtrcagtggtgagatctcggctcactgtaagctctgcctcccgggttcacaccattcttctgcctcggcctcctgagtagctgggactacaggcacccaccaccacacctggctaattttttgtatttttagtagagatggagtttcaccgtgttagccaggatggtctcaatctcctgaccttgtgatctgcccacctcggcctcccaaagtgctgggattacaggcatgagccaccgcacctggccacattaagtcattcttgattcctgtcaattctcatacaccccagagacaattcatcagcaaattctgttggatgtatgttcaaaatagatccagaacacatctggttcctaccacctccaccatttccaccctggtgcaaaccacatcatcactcgcctgaattatagtaagagcatccctacctgggcttcctgcttccacctttgcttcctgtcagtctgttctcaaaacagccagggggatcctgctaa

SEQ ID NO: 740049 - DNA, 665 bp, Homo sapiens
tcttttccccactagagagaaagttcgtgagggcaggatttttgtttgtttcattcactgcgtctgggacagtgcctggcatttggtacacatcattttattgaatacattaagtcattcttttttttttttgagatgcagtcttcctctgttgcccaggctggagtacagtggtgagatctcggctcactgtaagctctgcctcccgggttcacaycattcttctgcctcggcctcctgagtagctgggactacaggcacccaccaccacacctggctaattttttgtatttttagtagagatggagtttcaccgtgttagccaggatggtctcaatctcctgaccttgtgatctgcccacctcggcctcccaaagtgctgggattacaggcatgagccaccgcacctggccacattaagtcattcttgattcctgtcaattctcatacaccccagagacaattcatcagcaaattctgttggatgtatgttcaaaatagatccagaacacatctggttcctaccacctccaccatttccaccctggtgcaaaccacatcatcactcgcctgaattatagtaagagcatccctacctgggcttcctgcttccacctttgcttcctgtcagtctgttctcaaaacagccagggggatcctgctaa

SEQ ID NO: 740050 - DNA, 665 bp, Homo sapiens
tcttttccccactagagagaaagttcgtgagggcaggatttttgtttgtttcattcactgcgtctgggacagtgcctggcatttggtacacatcattttattgaatacattaagtcattcttttttttttttgagatgcagtcttcctctgttgcccaggctggagtacagtggtgagatctcggctcactgtaagctctgcctcccgggttcacaccattcttctgcctcggcctcctgagtagctgggactacaggcacccaccaccacacctggctaattttttgtatttttagtagagatggagtttcaccgtgttagccaggatggtctcaatctcctgaccttgtgatctgcccacctcggcctcccaaagtgctgggattacaggcatgagccaccgcacctggccacattaagtcattcttgattcctgtcaattctcatacaccccagagacaattcatcagcaaattctgttgratgtatgttcaaaatagatccagaacacatctggttcctaccacctccaccatttccaccctggtgcaaaccacatcatcactcgcctgaattatagtaagagcatccctacctgggcttcctgcttccacctttgcttcctgtcagtctgttctcaaaacagccagggggatcctgctaa

SEQ ID NO: 740051 - DNA, 621 bp, Homo sapiens
gctggaaatcaggttacacacctgatgtggataatctcactaatccacatgacaatcctttgaggtaggtactattattaacctcattttatagttgaggaaatggaagcttagggaatatgagtaatttacatagatctccagcctggattcgactccaaagctcaagcatttaaccaccgccttagatgagaagtatttctgcatttaaagaggatccgctttccttttgtgaacttagactgtgagggtatggattctgtagcaggcaggattttttaacttgctaacattttattttgaaatacttcaaactacagaaaagttgagcacccacatatcctttatctaaattcaccaattagcatrctggcacacttgcactcttactctatacagatattttctaaatcacatgaaaataagtagtaaacattaaattcaccaattgtcagcattttgccacatttgtgccatttctctaaacagattgatgggtattttctttttaaaaaaatttttgtgggtacataataggtgtatacatttatggtttacatgagatattttgatataggcaaaatatcgatgtgtaatatgatgtgtaataatcatatcagg

SEQ ID NO: 740052 - DNA, 503 bp, Homo sapiens
actgtcacaggaatgaaaatgaacaattctcaaatatattccaatatgtaatctgtatttaaatttccccatttttccctaagaatatctgttattcatgcattcatttctttttctttctttctttttcttttttttttttttttttttgagatggagtctcgctctgtcacccaggctggagtacacaggtgtgatttcagctcactgcaacctccacctcccggattcaagggattctcctgcctcagcctcccaagtagctgggattacaggcgtgygccaccacgcctggctaattttttgtatttttagtagagacagggtttcaccatgttggtcaggctggtctcgaactcctgaccttgtgattcgcccgcctcagcctcccaaagcgctgggattacagggcgtgagccaccgctcccggccctttttttgaaaattttttacttttaacccaggatccaatcaacgtttacacattgcatttccttattatg

SEQ ID NO: 740053 - DNA, 489 bp, Homo sapiens
ctggtttccttccctctctactccattcttctagattctgttgtctcctgattaaatgtaaaaaagatatcatcttcattatacctagtgcactgtttttttattattgaaatataatttgcagaatacaaaatccacacattcaaagtgtacaattcagtgatttttagtacaatcagaaaattgtgcaaacatcaccattatctaattccagaacatttccatcacccctgaagacactccatattagcagtcattccccgcyaacactctccactttctgtctcaatagatttacctattctgggcatttcatataaatggaattatacatgtggccctttgtgtctgacttatttcacttagatttatcttttaattaatgaattttactttttagagcagttttgagttttaggtttgcagaaaaattaagcagaaagtacagatgtcccttatccctccggcacccctaacatacacttctcc

SEQ ID NO: 740054 - DNA, 634 bp, Homo sapiens
atacttatagagtattaaaaatataagtattatcatactttataagtaagataataaaggttagacatcaaatgtatttttccctacttttctaagatatactggattgccttgatgtagtaactcagagacagaagagatcaygagaagacattttaataatatagttagaaatcacaagtattggattcaatgctgatactactgggtcagtagaatcatatctaactggttaacattgtctggatgtattaactcaactttgacaagaagaaataataacaatccaatgccacacaattttagtaagaattacctcaactagtatctgtgaagagcaaatggtaaactgtacaaaaccacctaatattagtgactgccattagcttttgttctttctatattattaaacaattaatttcaaatgtacaaatgaaactgaaatacttgaaaactaaataataaaatcagtaataataacaagagtagattgcagaagaaattctaaaatatgccacctgtcggtttatgtgaaagtgaaagggtgaatgagaaaaaaaaaaaagtccttcactatccaataatagtagtgcacaagctagagtctgtatatagatgctcgactaccgtcttc

SEQ ID NO: 740055 - DNA, 561 bp, Homo sapiens
agttaattttaaaaagctttcatgctattgttagattattttgattatacacttttgaattgaaattatactttttctaaataatgttttaatctctgatttgaaattgattgtagggaatggaaaagatgggataatttttcataaatgaaaaatgaaattctttttttttttttttttttttgagacggagtcttgctctgttgcccaggctggagtgcaatggcgtgatcttggctcacagcaagctctgcctyctggattcacgccattctcctgcctcagcctcagaggtagctgggactacagttgcctgccaccacgcctgtctaattttttgtatttttttgtaaagacagggtttcactgtgttagccaggatggtctcaatctcctgaccccgtgatccacccgcctcggccttccaagagaaatgaaatttttttaatgcacaaagatctggggtaatgtgtaccacattgaaccttggggagtatggcttcaaacttgtcactttatacgttagtctcctacggacatgttctattgtattttagtcag

SEQ ID NO: 740056 - DNA, 561 bp, Homo sapiens
agttaattttaaaaagctttcatgctattgttagattattttgattatacacttttgaattgaaattatactttttctaaataatgttttaatctctgatttgaaattgattgtagggaatggaaaagatgggataatttttcataaatgaaaaatgaaattctttttttttttttttttttttgagacggagtcttgctctgttgcccaggctggagtgcaatggcgtgatcttggctcacagcaagctctgcctcctggattcacgccattctcctgcctcagcctcagaggtagctgggactacagktgcctgccaccacgcctgtctaattttttgtatttttttgtaaagacagggtttcactgtgttagccaggatggtctcaatctcctgaccccgtgatccacccgcctcggccttccaagagaaatgaaatttttttaatgcacaaagatctggggtaatgtgtaccacattgaaccttggggagtatggcttcaaacttgtcactttatacgttagtctcctacggacatgttctattgtattttagtcag

SEQ ID NO: 740057 - DNA, 633 bp, Homo sapiens
agaaaactagggattggaaaacaaagctgtttcttcaatattttttatttattaaaaaatactactagagtttgtaatcctggctgacttttatctcaaaagagtcaactctgtattattgaagtgcagattaatggtttaaatattaattgcatccaaaatttacatattcttatataattaaaatatacactatatttttgaaaagtttaattattaaygatcagtttaacaactagagatataagaatatatatgctattggaatttgtgattagcaaattccacttggagtctgcaacgtacaatgacatgcaaattccattttccattgtttgtattgtatttttaaacatcaaaagaaaaaatgtttttaactttaactctaatataatgttgtcaaataagtgaaagagttgttagactttaaaaaaacacattacaatagtgagaagcagaataagttatttgtgatatgaaagagaaaaatgatgagttaatataattttaattccagttgagttaagaaaatgaaaaagtgcatcattgtctcttctacttgcaaatgatatttcttctatttttaagagagtaaaatttgtctttcagttgacagtgagttacaggtgaaaa

SEQ ID NO: 740058 - DNA, 612 bp, Homo sapiens
aggtgtttttatttcttggaaaaatgtttgcctatattaacatgtaatttccactgtacacctaaaaataagaaaaattattactatataaattcacaggtgggaaaaccagggtggagaagcttttgtttttgttgttcttattagcatcaagtggcastgctaggtctaggatctgtactctcagattcttgattaaggattttttttccgaatcccaggttgacaataaagatacgaatcaccactttaggaggctgtggcaggcgaatcacttgaggccacgagtttgagaccagcctggccaacatggtgaaaccccgtctccactaaaaatacaaaaattagccaggcgtgctggtgcatgcctgtaatcccagttactggggtgactgaggcactagaatagcttgaatttgggaggcagagtttgcagtgagccaagatcacgccactgcactccagtctgggcaacagagtgagactccgtctcaaaaaaagaaagatctcaatcaccattttgcctaagagctgtctggataactcctatgtgaaaatgctctaggtgaaagatataggaatgtagtcactctttgattataatacaacatg

SEQ ID NO: 740059 - DNA, 597 bp, Homo sapiens
aaaatcatgtcatagtttctgaatgtgtagagctaggattctaaatgaaagaataaaggaaaccatggacttggatggttttaaagtatgcttctttgtaattttgagaggaaagtcagaaaagaactgcaaaaatgatgtatgaatgtaatcactctgtcttttgtagccttgttttctgttctttttttcttgaccttgagccagttttcattctgttgtatacaactctttccagtagaacggatttacattgcttgcagcctggacttggcccctgaagagatattagaggaacagtttartggttaacgagttatgttgggagctgaggttgctgaggcagaacagttgtccagactagttgcttggggagcaaggttgtctggatggtgtaagtttaacttaatggctttggcagtggctgaaggtggaggttaaagcatgtcttagagtgggacagagtaaaggggctgctgctctgaagttcagttgctcacaatttccattttattttcaatgaacttaggatcctcttgtagtttgggggcttatagagctctgaaaaaggtaagataagaagggcattagcaaact

SEQ ID NO: 740060 - DNA, 584 bp, Homo sapiens
  misc_feature 130: n = A,T,C or G
attttagtgatatgcttcatccccttgcttctttctccccaataaggagaacttcctttgcagtaaatgagctaataatgtccagggaggagttttggctgtaaaattgtatgacttgcctttgctttanttcacagtaaatattaatatttcaagatgcactccaaaccccataacaaaagattttaaaacagtcaggcctaaaggaaaacatgtgaagataatggaaaccaggctggtaagcctaaaaagaattccacgtccttgatctagcttkggttgtgattgcagaaaaaggagagttagtatatgaaaaggtagcattctgtctagtgatacgctgctactatgaggggtgggtggtggggcttgggttttgagaatctatttgttcatttaataaaaatattagacaccctgtaaaggttagttttattcgttagaggaaaggtacatttatggccatagactatgacctgaatttaaggccagataaattaaaagggcttgttactaagcctaggaagagcccaggtgaacacatttggaaggattaggaaaactcatcatctcaacaagggaaa

SEQ ID NO: 740061 - DNA, 655 bp, Homo sapiens
tgcctgtttgccaaattccattttttttttctttttccttcctccactgacatctctgcttttgattggcagggaaattacttgattccaccaaggtcattacagtggaaatcttaaagccaactggcatatttattgggcatctctcatggcagtctctcctgctagcccagagggagattaccgggagattctggtctgtcctgcttctacccaacagaggtcatggaaaaggggcagtctaaaatttgacatwcaggcaatggagccaagaattaactgaggcatccatttctttcaatcccaaatctagtaatttcctttctgactttgtcaacattcatccacatggtataagcaacaaggaaccactgccaagtgcccagagagagcctccaggctcttgttctgaagtaacttttgatcagcccctccctttccaaacccttaataaaagaattcttgctcttccactttttgtctaagctcagggtggaccccttagataatagtccagattcaatgttgaggcaacactgggcttggctgtcttacaattaccctcctcaccatggtcagaggaaaatcttctgaagccacagaagttcatcttttcagatttaagaccttcaatacatattccccaagggaaaat

SEQ ID NO: 740062 - DNA, 504 bp, Homo sapiens
agatcagtgccaagcctaagggttgtgcatgtcatggccctgaaggtgggtgcctgttaaagtttttcatactcagcacctcatctgactcattgtagtcctgtccttgtattagacccttgaccttaataaacagagaattcctacatctcctttccttggaaacagatttttgaaacactgcaaacattcacgtgttcagacttcttttcactgttcttgttgatcctttacttatctactgattttcaaaaatacrtatatttaaaagtatatatatatatatatatatatatatgaatgagttgtgttacaaacatatatagatatatgtttgtagatatgtgtatctgtagacatatgttttacaaacatatagatgtaggtttgtaaaacaactccccaaatgtagaaatacagagaggaagaaagtgaagatctcctttcaggtcttctggtcatcagattactcattctcttctctagagatgattgttgctattg

SEQ ID NO: 740063 - DNA, 572 bp, Homo sapiens
aatgggggtaaaaaggccctgtcctttgcctcaatatggcaaaattctgaaatccatcccatatgctgagcctgccgtcaatttggctgaggcctctgctgcatcacagctcagctttctcctgccccgtcccactttcttcacttctgtttttcccccctcttttttccctctcacttctttatgagagttctcaccaagagctttttatcaatacacttcctgcagtttaatctctctcttagagtctgtttctggggaaatctgatttaagaaagaygcacggtggaagggccttctaggtagcggagacagcacaagccaagttgtcttggcagtgtctagcagcaagctgtgtgcaggtgagatggattcacttgggcatggtgggaagggaggcgccagtgggaggcaggggccagatcactgagggccttgtatgcaggttgaggagtcggtttcatcctcagctttttcattcatttattcattcaacaaacatgagttttgtgtctgctatgtgtaaggcacagtccaaggccctgggaatacaatggcaaaaaaatgcaaac

SEQ ID NO: 740064 - DNA, 516 bp, Homo sapiens
aggtcaggaggaggtagctgcaaagttcagagcttttgcaattagaggcaaaagccaattgccaacatgcaccacacctcggtggataccagcgcaggatgttcagggaacaggtacaccacggaacatcactgcaggtaacagagtgacagactgatgcctaagtccaagcaggacaagaacagatgaataatacataagctgtcctgtgaaaatagactactcccragtggtagaaaaaggacacaagagaggcataaagaaaatacagaagactgagaatgtatgcaaaagtagctgagatagaaatcagactacgattgtaataatattttaatttcactgaaaaggcactgattggactgaaaatactggaattacaaaaaaagaataagttgtctggtcaagacagtgactgggagagtagaggacaaaatggaattataaaaaattacaattaaagaaaataaaattactttaaaaaaacacacatcaatcgttatgtgtaaattttga

SEQ ID NO: 740065 - DNA, 469 bp, Homo sapiens
gatcaagtaggcttcatccctgggatgcaagactggttcaacatatgcaaatcaataaatgtaattcatcacataagcagaactaaagacaaaacccacatgattatctcaatggattcagaaaaggccttcgataaaattcaacatcccttcatgttaaaaatgctcaataaactaggtattgaaggaacatayctcaaaataataagagccatatatatgataaacccacagccaataccacactgaatgggcaaaacctggaagcattccccttgaaaaccagcacaagacaaggatgccctctttcaccactcctattcagcatagtattggaagttctggctatggcaattaggaaagagaaagaaataaagggtattcaaataggaagagaggaaatcaaattatctttgtttgcagatgacatgatcctatatctggaaaaccccattgtctcagcccaaaa

SEQ ID NO: 740066 - DNA, 469 bp, Homo sapiens
gatcaagtaggcttcatccctgggatgcaagactggttcaacatatgcaaatcaataaatgtaattcatcacataagcagaactaaagacaaaacccacatgattatctcaatggattcagaaaaggccttcgataaaattcaacatcccttcatgttaaaaatgctcaataaactaggtattgaaggaacatatctcaaaataataagagccatatatatgataaacccacagccaataccacactgaatgggcaaaacctggaagcattccccttgaaaaccagcacaagacaagkatgccctctttcaccactcctattcagcatagtattggaagttctggctatggcaattaggaaagagaaagaaataaagggtattcaaataggaagagaggaaatcaaattatctttgtttgcagatgacatgatcctatatctggaaaaccccattgtctcagcccaaaa

SEQ ID NO: 740067 - DNA, 635 bp, Homo sapiens
atgagtacacatgaaaatatgaaggggaacaacacacactggggcctgttgggggagcaatgggagggagagcatcaggaagaatacctaatggatgctgggcttaatacctaggtgatgggttgatctgtgcagcaaaccaccatggcacatgtttacctgggtaacaaacctgcacaactagcacatgcacctcagaacttaaaagttgaagaaaaaaataaataaatattaaatttaattcttggataaatgtaatgttaagcaaaaatttcaaaacacaatgtctgaagctcagtctagtagatcaaagtaagctcataataaacagacccttccagagataacaactatagctyctggccaaaatacataaagcaaatatctaaggactctggggaataaacaaaaggaggcagttttgggagaggagggcactaaaacttggagaaaagaatcagcatgaagtgagtttcccgtttttgttgctttggcctaatagctgatcaaggttgtgacacagcatgaggaagttaaaactctgacagataatccctagtttctccagcttaaggacaaaggggaggagccaggagcaacagcactgtaatccacaactgagaggggtagagaat

SEQ ID NO: 740068 - DNA, 635 bp, Homo sapiens
atgagtacacatgaaaatatgaaggggaacaacacacactggggcctgttgggggagcaatgggagggagagcatcaggaagaatacctaatggatgctgggcttaatacctaggtgatgggttgatctgtgcagcaaaccaccatggcacatgtttacctgggtaacaaacctgcacaactagcacatgcacctcagaacttaaaagttgaagaaaaaaataaataaatattaaatttaattcttggataaatgtaatgttaagcaaaaatttcaaaacacaatgtctgaagctcagtctagtagatcaaagtaagctcataataaacagacccttccagagataacaactatagctcctggccaaaatacataaagcaaatatctaaggactctggggaataaacaaaaggaggcagttttgggagagsagggcactaaaacttggagaaaagaatcagcatgaagtgagtttcccgtttttgttgctttggcctaatagctgatcaaggttgtgacacagcatgaggaagttaaaactctgacagataatccctagtttctccagcttaaggacaaaggggaggagccaggagcaacagcactgtaatccacaactgagaggggtagagaat

SEQ ID NO: 740069 - DNA, 559 bp, Homo sapiens
caaacctgagatgacacagatgtgggaattagcggacaatgactttaaagtagctactataactatattcaataagataaaggaaaacttattggtaaggaatgaaaataaaggaaatcttatcagaaaaaaaggaaaatataaraaagccaatggaaattttagcaataaaaatataatatttgaaattaaaactcactgcctgatcttgggaaaaatggagctaaaagaggcaaaagtcaatgaatctgaaaatagatcaatagaaatgatccaatctgaagaaaagaaaaagaactgaaataaaataaaaataaaataaatctcagagacctattgaacaatatagaatatacaagaatatgaaagaaatgtatagtcttaaaggaccaaactttaaccctactatggtaaaaccagacaatatttaaaaagtaccatatgtatgtaattggagtccagaaaggatagagagaaattaggattaaaaaatttaaggatataaggaacaaaaatttgtcaaatttggttaacaatatacatgtacatgtttgataaa

SEQ ID NO: 740070 - DNA, 549 bp, Homo sapiens
agcagagagagaaggcagcatacatctgcattttcttctatgcacttatcagaaagatcaaagactttaagactttcactgtttcttctactgctatcttctaagaacttcaaagaggaaccaggagtacaggaggaacatgaaagtggacagggagcatgaccactgaagcacagcaccacagggaggggtttaggcctccagatgactgtgggcaggcctggataatatccaacctcccacaagaaggtggtggagcagagtgttccctgastcctccaagtaaagcgagactccctttcatggtctgctaagtcacgggtgctttcccaggcactggcattaccgcttgaccaaggagccctcaagcggcccttatgcaggcgtgacagagggctcacctcttgccttcttggtcacttctcacaatgtctcttcagcacctgaccctatccccgctggttattcctttgttatatcagtaattaaacaaacagtaatattaaaggctaatgattaataatggttatactaatgattgataatgtc

SEQ ID NO: 740071 - DNA, 549 bp, Homo sapiens
agcagagagagaaggcagcatacatctgcattttcttctatgcacttatcagaaagatcaaagactttaagactttcactgtttcttctactgctatcttctaagaacttcaaagaggaaccaggagtacaggaggaacatgaaagtggacagggagcatgaccactgaagcacagcaccacagggaggggtttaggcctccagatgactgtgggcaggcctggataatatccaacctcccacaagaaggtggtggagcagagtgttccctgagtcctccaagtaaagcragactccctttcatggtctgctaagtcacgggtgctttcccaggcactggcattaccgcttgaccaaggagccctcaagcggcccttatgcaggcgtgacagagggctcacctcttgccttcttggtcacttctcacaatgtctcttcagcacctgaccctatccccgctggttattcctttgttatatcagtaattaaacaaacagtaatattaaaggctaatgattaataatggttatactaatgattgataatgtc

SEQ ID NO: 740072 - DNA, 606 bp, Homo sapiens
actcaggttcccttccatggaggtggctatgttacccatttcaggagggaaaatattaattggaatggaaatttctttctgtttgtgatttttttttgctgaagtcggcatatggaaaggatcttctcttaaactacaatccctgacttgaaaactacaatccctgacttgaaaaaggttaattgtttccattggtccctaacagtgactcttttgccaaaacaaaaataaactcactctaaaatgtaagttgtgatttccaaaaatcactgacaccttgaagcttggctcacaaactcactcaaagaatttaagataatttggggtgattttggggggagttggggaccactttaaaatctaatgaaggctacggacccttccagaggagtgcgtgttcataaacatgcagtyaaaattatgtgcaatttcaggggatcacagaccctctgaaaccctttcatagacttccttggatttgatttatttattggtttattaaacacagttgatccttgaataatgcaggcgctagttgcattaacccccatgcagtttaaaatccatgtataacttttgattcccataaactatagcccactgttg

SEQ ID NO: 740073 - DNA, 618 bp, Homo sapiens
gcatatatatacttcttgcatggaagagcaaaacaaattcaagttgtcatgcctgataatttcagatgccaccgtatagcaaagggtgaacatgttttcaaccctttaactttttacggtgtttgaagaccagctactccttaatatttatcaatggattaagaagtttaagaatttggcagatttatcaattkgggttttggtactggaagttgtcttgcggctttggcaagtgtccctttatatttaaatttgaaagttgtaagcactgatgttaatgtgattggatcagcatgggcatatgtaaaatgtccttttctggttgcctctctatgctattgtgttcagatacttacaccataattaaacagtaagttatagacttgctgagtttggcatagatagtgcactcatttaatctgtgcctctcaaacttcagaatattagcatattaccacaaataatttttggtgaaactattgagatattaaaatttttgaaatcactactgttacctgttatagaaaatagtgttggcttagtctagtctctgtgtaactggttacattttgatggttgtctatactcaactggatatgtgtatgtaaattagaaaat

SEQ ID NO: 740074 - DNA, 393 bp, Homo sapiens
acttcgtttaatgctcaatatcactgacatcttggtagaacggatagcatacaagccatataccattctttttaaaagcagagttatgcaaaatgtgctttaaaacatgttgtgaagaaatgcaaaatcacagtttttaaaatgggaagaaatcttgactgccctttgttttgtcagaaggaaagtytatcacccaataaaaaagaaattatacttgtagctttaaataggcaagaatcacattgtcaaaatgcacatattttcttggaaatagtcacccttaggcaggaaaaacaaaattgcttttaatgacagaaatttttagattgtgcttggaagggaagggtgtttataagaaataaagctaatgagtcagagagcaaaataaaatga

SEQ ID NO: 740075 - DNA, 553 bp, Homo sapiens
gcagaggttgcagtgagccgagattgcgccactgcactccagcctgggcgacacagcaagacagcaagactccgtctcaaaaaagaaaaagaaaaagtaatgccttactaataccagcaatgccatacagaatctagcctctcctcctgtctgaattacctcatacctcattccactccacaaatacccaacatgccttgtttytgctcctcaaacataacaagcttgtcccttagggcatttgcttcttcctctccctggaatgctcttcgtccagatcttcatatggcaggtttcctttgtcatttgggcttcatttcaacagtcatctcgcaggccttccttgagcacccaaatctatgctgttccttctacccttcagtcactatcacatatatcatgttaccaggtgtttttttcaacatggctaaattatcttttcttcttcttaatttttggtttcctccattagaatgtaaactcttgaagtcgggggccttgtctgcctagctcttttttttttttttttttttttttgagacagagtcttgta

SEQ ID NO: 740076 - DNA, 625 bp, Homo sapiens
aggctcaccccagaacctgagctgctcctaaaaatgttgtaggaacctgtaccatttatcttgccatgctttgtcagctctggctttgtggaagggaacctaaatcaatacccagtttagctgaagaaaatgagacggttataggtgggtttacatctcacttaggcttctgatgtcagaaccgggagtttarcatgagcggcttgaaggaaggtgagtcagtgaggttgagatggaataaaggagctctgccaggcagggggtccagccaacttctagaaactgccaaagccaggaagaggcaaggtggaagaaaaggtactggtgaaaatattgagtctcatagaggaaccagagaataacaccaaaaaacaacaagataggtgtctgaaatgtttgtacccagtcaagcaagggtttcgccattcatttatgagtgcattgaacaatttagacagttagtaggtaagttttagatcatagaattgactttatttttcaacaaatgattattccttaatccatttattcattcaacaaatatgtactgaacgtgttctgtatgtcaggcactgtcccaagcactgaatggctgtgcatgagagacaagcacatgttaaatttt

SEQ ID NO: 740077 - DNA, 625 bp, Homo sapiens
aggctcaccccagaacctgagctgctcctaaaaatgttgtaggaacctgtaccatttatcttgccatgctttgtcagctctggctttgtggaagggaacctaaatcaatacccagtttagctgaagaaaatgagacggttataggtgggtttacatctcacttaggcttctgatgtcagaaccgggagtttagcatgagcggcttgaaggaaggtgagtcagtgaggttgagatggaataaaggagctctgccaggcagggggtccagccaacttctagaaactgccaaagccaggaagaggcaaggtggaagaaaaggtactggtgaaaatattgagtctcatagaggaaccagagaataacaccaaaaaacaacaagatakgtgtctgaaatgtttgtacccagtcaagcaagggtttcgccattcatttatgagtgcattgaacaatttagacagttagtaggtaagttttagatcatagaattgactttatttttcaacaaatgattattccttaatccatttattcattcaacaaatatgtactgaacgtgttctgtatgtcaggcactgtcccaagcactgaatggctgtgcatgagagacaagcacatgttaaatttt

SEQ ID NO: 740078 - DNA, 590 bp, Homo sapiens
tcttaacttaaagatcacttcatcccaaaaggctttttgtaactgccccaccaccaccaaattagatgagttcctccattctttgcgttttctttcattatgctaatccctgtaataattcatataacggttattttaagtacttatttattgccactctcccttctagaacataagctccctgatggaaatgatggggtctgctgtgttccctgctctacccagcatccagcaagtgcctaccatcaattacgcacttggtaaatattgttgaataaatgacagaagttgctatacaacaaagatttaatytagaaagctctgtggacttggatagacccagtccagagagcagcatgtgtcctcatggtgcatgaaatacaccaaaaagttttaaaatctcttgcaggggctcttgttcctgaccttttcttttcttttttttttttttttttttttttttttttgctggactgcctgacagaggtttctgttttcctcatgccctggatgtccacacagctgcacaccgagcacagacttattcataggcagcttcctgtcacatgaggggctccagatttagtttt

SEQ ID NO: 740079 - DNA, 561 bp, Homo sapiens
gataactctatgaactcctagactccagttggccaacttaaagctgaagaggtgttaccgcctcagctcaacaataagccaatcatggcaaaaaggaacctgtatactgttgtttggtgagctctgccctagcaacactcaacacaagaagatgcacaagaagatgtgtgcaagaactttcatatcagtactgtgtataaccatggaaatatcaaaactgacttaaatgcccatcagcaaaatgaatatactacaataaactatccagctacacacacacacacacacacacccaaatgaatctcataattttgcgcccaaaagggaattatcagaaaatacatatagtgaaacattacataaaatttagacrtatataaaaacagaggatacatgttataaaaagtataaagaaaagcatgagaaagagaaatactaagttcaggataatgatagggaggagagggaatggagtgaaaaggaaatgcaatatcctaggattacaagggatttcttatgtagttataaagttttatttatcaagctgggtggtaggtgggt

SEQ ID NO: 740080 - DNA, 524 bp, Homo sapiens
attaggcaaaactgaaaaacacagagaagcgaaaaaaggaaaaggcagacgttccagaatttcaccattcccaattcttctgcacgaccttccggaatttcaccattcccaattcttctgcacgaccttccggaatttcaccattcccaattcttctgcatgctcttatgttcagggggggctggcttaaaaacaacctttcacttttttccccgaatgcacacacatgtataaatgtggttagggaaacccttgggggtggttaacacattcataaaaagcttccrcacgcctacgcctgccaggcactgactgcattattcatcatttataataatcataaacctgacgatcagctgttgttcggagtgagaataggttcccactccttgtgttccgaggtggaagtctctgcaatggggcagcattcctattctctctgccttggagagctcttccctgcagttggccccatccatggagctggtgttgagggaggcgcgctttcccaatcctccgtacca

SEQ ID NO: 740081 - DNA, 622 bp, Homo sapiens
acaaatcaatcataaaattaagagaggtgcaagtttgaggggtaaaagataatacagaaaaatcaattgtattctatatatcagcaaaaataattataaattaaaaatgtttaaaagatataatttacaatagcataaaaaatcaaatatctaggagtaaatttaatagaagatataaaagactcttacagagaaatttattataaagatattttaaaagaccaaaacaaagggatatattatattcatagatcagatgattccataatgtaaagatgtcatttctcatctatttgatctataaagtcagtataatccctttcaatcttccagcagatctttcggggacattgaaaagatagcttaaacatttttaaagaactgcaaaaggccaagaatgccaagacgattttaaaggaaaaaatgttaagatatttcactttctgatctcaaaacttwttacaaaggtagaatgagtaacaacagcgtgacactgccaaaggtatagaaaccaaaggaacagaagagagaggcctgaagcagatacttatttttggacatttgctttataacacatgtagccttgaggagaagtagggaaaatgaatactttttcaataga

SEQ ID NO: 740082 - DNA, 663 bp, Homo sapiens
agaatgatttatcttcctttgggtatatacccagtaatggttggattgatgggtctaatggtagtcctgtttgttgctctttgaggaatcaccacactgcttctacaatggttgaactgatttatactcccatcaacagtatataagagtttgcttttctctgcaaccttgccagcaacttttattttttttaactttttaatagtagccattctgactggtgtgacayggtatttcattgtggttttgctttgcatttttctaatgattagggatgttgagcttttctgtttatatgggttttggctgcctgtatgtcttcttttgataagtgtctgttcacttccaaagtgattatttttaaaagctggaggaataaaagacaactcgctttcaaacaatcgaaaatagaattggagctaagttcaacaaaattaatcacagaagctataactgccaatctaatattccaaaaccagcaaatattttcccagaaaaataaatgtaaaagaaaatactttttagaaaaataaaagcaggaactttattatcaaagaaatagtacaggaatttccttaggcagaagaaaaaaattatcccagggagaagctcagagatacaataaatgaagagcaacctaaagaataaacgtgtaggaaattg

SEQ ID NO: 740083 - DNA, 663 bp, Homo sapiens
agaatgatttatcttcctttgggtatatacccagtaatggttggattgatgggtctaatggtagtcctgtttgttgctctttgaggaatcaccacactgcttctacaatggttgaactgatttatactcccatcaacagtatataagagtttgcttttctctgcaaccttgccagcaacttttattttttttaactttttaatagtagccattctgactggtgtgacatggtatttcattgtggttttgctttgcatttttctaatgattagggatgttgagcttttctgtttatatgggttttggctgcctgtatgtcttcttttgawaagtgtctgttcacttccaaagtgattatttttaaaagctggaggaataaaagacaactcgctttcaaacaatcgaaaatagaattggagctaagttcaacaaaattaatcacagaagctataactgccaatctaatattccaaaaccagcaaatattttcccagaaaaataaatgtaaaagaaaatactttttagaaaaataaaagcaggaactttattatcaaagaaatagtacaggaatttccttaggcagaagaaaaaaattatcccagggagaagctcagagatacaataaatgaagagcaacctaaagaataaacgtgtaggaaattg

SEQ ID NO: 740084 - DNA, 572 bp, Homo sapiens
tggggagggaagattagacagaaaaaccagcagaaaatggatgatgttatattgccagaagcaggggaagtaattggatgttgtctatatctgcaattagtagatgtcatttaaagtggctctgctgtactttttactttaagtgaaaaacttaccaaaccttaggtggraaacttgccaaactagcttaaaagtaaagatagatagcaaaaatatttctatgtaatcagctgctatgttctagaaaagaaaagaaccagcctgtaggagttttgactcccaccttcctgttcttgcccttcatttttgaaaggcaattattcttgtttctactggaatctcattttctccccaggccccacagctgttggcactgacttctttccctaccacctcccatgtcataccagagatgtctaaggtattctccttcccaacgtaaaaggcagagcttgcttatctggacataacttataccttagctctctggtcctgtgcatggctatttacccccatggaccataaaattaggatccattggtcccctcctcagtctgaaactccactgcttt

SEQ ID NO: 740085 - DNA, 572 bp, Homo sapiens
tggggagggaagattagacagaaaaaccagcagaaaatggatgatgttatattgccagaagcaggggaagtaattggatgttgtctatatctgcaattagtagatgtcatttaaagtggctctgctgtactttttactttaagtgaaaaacttaccaaaccttaggtgggaaacttrccaaactagcttaaaagtaaagatagatagcaaaaatatttctatgtaatcagctgctatgttctagaaaagaaaagaaccagcctgtaggagttttgactcccaccttcctgttcttgcccttcatttttgaaaggcaattattcttgtttctactggaatctcattttctccccaggccccacagctgttggcactgacttctttccctaccacctcccatgtcataccagagatgtctaaggtattctccttcccaacgtaaaaggcagagcttgcttatctggacataacttataccttagctctctggtcctgtgcatggctatttacccccatggaccataaaattaggatccattggtcccctcctcagtctgaaactccactgcttt

SEQ ID NO: 740086 - DNA, 613 bp, Homo sapiens
agggacagggacctgatctgtgttttattcttctgccttgtcatcagcttctttcccatttgattttcctaatttctatgagggagtgagaaacagagtggtgaattctttagtgatgcctttggccactctttaagagttaggaatagcacccaatagtagaaccatttttcaaatgacagagaaacctataaaatgtccctcattgtaagtgaataagtgctgatcagcttgaacaaaatggacttgtttttagctgatctcatctgaagccgtttccgtttagacaaaaacttctttgtattagaagaggtctttgaaatcctagaggactctcattttccaaagacataagtatttttattaaagaaaaaagcatttcctatattggaaataaagttttaaaaagacacaataaaaattatacaaacaaacagtgtcayaaagtgaatatcgattttgtcagggtctggattggacatggttctaataaaacactgttttgggctttgaaaattctagttttaatcagtgcaaggtgggcacagtttaagttttaactgagttcacatgggtaaagaaataaaatcctgccaacagagatttaatggat

SEQ ID NO: 740087 - DNA, 601 bp, Homo sapiens
actacatttcaaagctttcttgatgataagttcttccttttcaccatgtccccactatgtaatgagctcagatcctgctatggtctgaatgtcttaatgtttatatcccccccaggtttgtatgttgaaaacctaatcaccaatgcattgattattaggtggrcctttagggggtgagtagagcataaggatgggccctcatgaatgggattagtgcccttataaaagcggcactagagagctctcttgcccctttgccatgtggaggatgcagcaagaggacaccttctatgaaccaggaagttggccctcaccagacatggaatctgctggtgccttgaccttggacttcctggcctccaaactgtgagaaataataagtttctattgtgtgtaatacaccaagtttatggtcttttgttatagtagcccaaacagactaaggtctcaagacagagtcacagagtgactctagcacaaatttactaatcttaagagatgaccaccctatttttcaggatcataaatgggtttccccaaaaggacctacttttctcaccaagttaagagcttaaaggaaacactcattcctttagagatc

SEQ ID NO: 740088 - DNA, 579 bp, Homo sapiens
gtaataggaaaaaaaatttcagaaataacccacaagtacaaggcaattcaaaataatctttttataggaatggcctactatgtaaatctcagagatagttattaaatggtaacattttagttagaactttacgtaaaggatctggctcaaatttctgccagttgtcatgtgacccgattaatatcaatattctcctgaaaatgctttattaatgctaagtttaaagaataataccatactcttggaaaatatgtttagtttgtgctgttatcgaatgttatatatgctgaatttcaagaagcttgcattcaaaatggcaccaaataatagcttctaagggaatgaagctatattatcctgatatttgattctataacggaagtcacggacataactctaaatctttcagtcatgagtactgaaatttcagactytaaagtgtcattcaactttctaccttatcttttttagagattagttataatcaaataaagagggctaaaggcagacttatctccaaatctttgccatatacatatttttcatttacaaatattatatattggcaaaaattcttat

SEQ ID NO: 740089 - DNA, 566 bp, Homo sapiens
caaatgccgtgcttttgagataccttttagaatagaaatcactcaccatataagtgtgcttttgtgctcagaggttagatagtggggtgggagggagaaaaaaaatagaggaaatccacatggtgtacgtggtaagtatgtcagtcttctgaacaatagagaaaagggtcttacagaaactaactttgctaggcaggctctttaaagatgtgtcaatcaatcctgaacaaacaggaagcttagaagcctgcttaggatcactcatgtggagcaatacattaagttgaacaagtgagaggaactcaggtggtgttgaattacccctcttaggttgctgcaggtacaatcacagtaaattatgaaatgcctcctggcagtgtggttccaacygacaaatagcatttaccttatagtttctgcaggaagggttgaaggcattagttccacagacaaacaatgcatcatcgtttttctttagaagaactttaataaagttgtggcactcatcctgaaaaataattcaaactgttttgtatcatgtccattcagtacagaaactgattctt

SEQ ID NO: 740090 - DNA, 547 bp, Homo sapiens
cgtacactcagaagacaagactctgggcagccggctttgtgtccataatcctgtgtgcgcctaagtagttcatgatgcaggcctagcagctgttgtaatgtttcatcacattaaaagcaaactatttttgcaaattaaagccttcagtaagttgatgaaaaaagcaattactgagggaaaaaggaaaaagcacaatccattctacatcayggtctatggctggagataacagtcaaaaacttaacccaaagtggcagctgcaggagaaatgaaaattgcctaccttatgttttcccttcattctgcatgtgtctacatcggcctgtctagatttccatgtcagtttctgcagggatcaagaaagaaatcaattagagcccagaggttgttgcatttgattttagaagtaagagttcccttggggagactaaaggctgaacatatatttattgaaagctttctgcaccctttctccatgattaattcaccgtaacaacaaaagattccagatgaaaacgtccgtttaattttgaactcctatctattc

SEQ ID NO: 740091 - DNA, 623 bp, Homo sapiens
aaatgaaaattgcctaccttatgttttcccttcattctgcatgtgtctacatcggcctgtctagatttccatgtcagtttctgcagggatcaagaaagaaatcaattagagcccagaggttgttgcrtttgattttagaagtaagagttcccttggggagactaaaggctgaacatatatttattgaaagctttctgcaccctttctccatgattaattcaccgtaacaacaaaagattccagatgaaaacgtccgtttaattttgaactcctatctattcattaaaccacaaaatggtcttcttctgtttgagataaagatgaaggagaaaagaaagaagaataaacaagagtgtggaaatttttcataaactatccaaattaatttgccaaattatgctcatttggataaaatatatgtccttgccctttcctttcagttgataaatcaatttttataaagaaggcttttttcttaaaatacagaagtcattttcttaaacataaagaggacattcactctaggtggacaaagatttaattcaggttatactccttcacatagattaatggactgaagggatcttctactcctatggcacaggttttattaactaaaatat

SEQ ID NO: 740092 - DNA, 598 bp, Homo sapiens
cttacttccaaatagtggagcagtgttccagcttggggaatcttgcaagactggagctcaacacagcactttgctctcttctcattgaggattctggacgacactcaacctttctttcatgtcttagtgctgctggaaagagctgattaaatagatatgtgaagaacacatctgcctattcttgcataacattttagaatgacttttttttttttaactcttaggagagataaagactatgttaacccagtaggaaaataccgtgtttgagaaaaaagtcattctgccttagtcttttagttattcaaagtgaacgtggggaatctcctctttraaagacgttcatgtgttgttactctccatgtgttccataggtgtgtattttccttctcattgctcagaacttgaaatccttactagtgaaagcctggatgatgcaggttgacctctctgcttcccagtaaccagggctaagtagcttctagagacgtttatccattttctgtgcctccatttcctcccaaagaaaggcaagcacacacgtgcagggatccttgtgctatgctagagtgacacgcctaggcatgcctgcagggct

SEQ ID NO: 740093 - DNA, 643 bp, Homo sapiens
ctcaaccataggcttaaatattcaataaaccatgctataaacagatatgctgtcatctaggctttgttattccacttctagagcataggcagagtagatttaacataattcttaagggccttaagatttttggactggtaaataaactctgacttcaacttaaaggcaccaactacactcgctggcaytgaacttcttctccccagctatgaagtcctagatgacatctcttctaatagaagaccatttcatcttcacaaactcagttgtttagtgtagtcgccttcagtgatcttagctagatcatctggacaacttcctgctgttgttgtcccttgcactctgacgttaatggggatagtttcatgaaccaacctctgcttgcttccagcttttcttctgtagcatcctcacctctcagtcttcgaagaaagaattgaagaattaattaggctttggcttaagggaatgttgtggcttgtttaatctatatagaccactcagactttctccatctcagcagtaaggctgtttcactttcttgtttgcatgttcactggagttaacactttcaagaactcttcctttgcataacttggctaactggtgtaagaggcatggctttcacctgcctgggctttca

SEQ ID NO: 740094 - DNA, 534 bp, Homo sapiens
atgcattgtcaaattagagaaatacctttccagttttaaaattttatatcattatcctttttttgtttcttagtttttgaagacattacactctgggttttttttggtcagctgttataatccaggtttcacgcttcaagtctttagataatawcatcttattgaaaattttgcagaaggattttcttgttttctcagtggctcagctaaaatcagtgagtggaaaattttctcggattggtttttgaagatacccaataaatcctgtataacctaacagacagctgccttttcttttcttctttagtattttttgaacatgaagtgagggtcgtattgatgagagatcactaaagaaggttaagcctcagcaaaagtcttccaaaaaatgggctgtgctaaaatttcatgtaatactctagcgtttgacacattaaactaaactgagttcataacacattttaagaagagttttctccgttgctcatttgaccattccttgctccttcaggaaacagacaaggttatgtagga

SEQ ID NO: 740095 - DNA, 599 bp, Homo sapiens
tatttttaacttgcatgaacatactcattggctatgtctttgggcagctttttaagaaactgtaagtatgccattggttaatagttatttgatggcttgaaaaagttaatatttttagagctattaacgtacttatgcctggaaaaaagggtataaccagaatcctttttatcacaaattccagcagctacaatattaataacagactccatatctggcatttttttaaagcacttatatccagtgtgacgttgactttagacaactttattatagtaaattttactaaaatctgttaaccaaatagcttttctwtttctaaaggcccctaatccaccatgtgtggtgaatgtgttgattgaatttctgttgttttgcatcgtgccctgaatcaagcggggaatttcggcagtgtcatcacacagatgcgtgtgccacccttgctgcttttctccttatttctaataattttgtcctttcagcttgtgttttggagctgtagctgagttttgtttagttggataagatgttgcagggtttgggaggatgacaggagtgagtgaaacggtaattgctgcttcatgcattagcatagaatc

SEQ ID NO: 740096 - DNA, 662 bp, Homo sapiens
agaagggctcattagtgaggttggtttgtgtaaactcttggtgccatctcatctgtgataaaggttgttatccccctcctggtatgggagtgggggtggaggttccgggggcactttcccaagggtgatgtgtgctttttttttttttttttcaggtagatgtggggaggacagagctcattctgtgcctgcattttctcagttgccttaagctgaaaataatcattatgtcagagtggcatagtttggggttatgtgctctgaaccccttcaaatgaaataatgaatttagatggcctaaatcataacatatacacatacacacacaagatagccagaaattatayttccggatggagtatacaatctgcctttggggtggtcttaccaaaaagtcagatatggatcttatttagtctctagatttaactatcaattaacaaaaaatacagaggacagaggtgcatgttggataacagcacaggaaaaaaaacccagactgtgagaactcgacaagacaggtgaatttttttttcaacaaataaattgcaaggaaaaacagatggagaaaaaaatcattagaataaaagagatattagagataaatcaaccaagtgtactatagaagccttatttggatccttctaactgtttaaaaaatt

SEQ ID NO: 740097 - DNA, 662 bp, Homo sapiens
agaagggctcattagtgaggttggtttgtgtaaactcttggtgccatctcatctgtgataaaggttgttatccccctcctggtatgggagtgggggtggaggttccgggggcactttcccaagggtgatgtgtgctttttttttttttttttcaggtagatgtggggaggacagagctcattctgtgcctgcattttctcagttgccttaagctgaaaataatcattatgtcagagtggcatagtttggggttatgtgctctgaaccccttcaaatgaaataatgaatttagatggcctaaatcataacatatacacatacacacacaagatagccagaaattatatttcckgatggagtatacaatctgcctttggggtggtcttaccaaaaagtcagatatggatcttatttagtctctagatttaactatcaattaacaaaaaatacagaggacagaggtgcatgttggataacagcacaggaaaaaaaacccagactgtgagaactcgacaagacaggtgaatttttttttcaacaaataaattgcaaggaaaaacagatggagaaaaaaatcattagaataaaagagatattagagataaatcaaccaagtgtactatagaagccttatttggatccttctaactgtttaaaaaatt

SEQ ID NO: 740098 - DNA, 563 bp, Homo sapiens
ggacagagctcattctgtgcctgcattttctcagttgccttaagctgaaaataatcattatgtcagagtggcatagtttggggttatgtgctctgaaccccttcaaatgaaataatgaatttagatggcctaaatcataacatatacacatacacacacaagatagccagaaattatatttccggatggagtatacaatctgcctttggggtggtcttaccaaaaagtcagatatggatcttatttagtctctagatttaactatcaattaacaaaaaatacagaggacagaggtgcatgttggataacagcacaggaaaaaaaacccagactgtgagaactcgacaagacaggtgaatttttttttcaacaaataaattrcaaggaaaaacagatggagaaaaaaatcattagaataaaagagatattagagataaatcaaccaagtgtactatagaagccttatttggatccttctaactgtttaaaaaattacgatcagctaaatttgatcattgactgggtatttgatgacattaaggaagtaaatgttaacttaggtg

SEQ ID NO: 740099 - DNA, 670 bp, Homo sapiens
tgggcaagctgcttcatctctccatgtttctgtttcctaatcaataaaataggaaaagtaataggaactatctcattggatttggtgaggattaaatgaattaatatatataaagtatctggcagagtgtcaggatgatggttactatatattagttgtattctttctttctttttttcttttcttttctttttttttttgagacgaagtcttgctctatcasccaggctagggtgtagtggtgcgttcttggctcaccgcaacccctaccttcctggttcaagtgattctcctgcctcagcatccctagtagctgggattacaggtgtgcaccaccacacccagctaatttttgtatttttagtagagatggggtttcaccatgttggtcaggctggtctcgaactcctgacctcaggtgatccaccaacctcggcctcccaaagtgctgggattacaggcatgagccactgtgcctggcctagcttttaaatttctaatctttttagctttttgtcttcatcataatatcaggatatgtgcccacaaattgggggatttgtcagtgtatgtgcatgtgtatgcaggtatgcttttttttcttttaggtaagtgggttttacttcagaaagttagtcattacctttgaaacatcctccaactaatccaa

SEQ ID NO: 740100 - DNA, 551 bp, Homo sapiens
gtcttttttttttgtctcaaagtctataaaaataagatcgtcaaaaattaaaagttgaagatttcagcaaatacaacttaatttctgattatccatatcactttaaggaagcgtcagagtgtaaaaaaagagaaagttttaaattaccttttgarattttcataatctctatcccttatatatttgtgaatttttttgataacagtaatcacccaaaaggtcaagaaataggtaggtgaggtgagggaagcactccgtggtacttagaagatgaatggttagcaatggatgtttatttatcctgatacatattcatattttacatcagtttcttgaactctatgaaattttaaaaaaggaacattttaatttggtacagctgtttcatgaaaaccattattagcatgaagagaaagtgctattcgaagcaatggtacaaaggtttaatttttatttccaagggaaaacgtgcacgtgcagtaaaagtaataaaggaaagctgagtttcccttgaggtatgcgaggctgaatgaaatctgctatattatcct

SEQ ID NO: 740101 - DNA, 647 bp, Homo sapiens
tgtgaaataaaggtaatatgaaaataacgacagctaccattgttgagggtctgctttgcaccgaacaccattacaagtgtttgaggtatcatacattttttacctgcacaagaatacagtagtcttgcacggtaggtatttgcactgtaccatargtaagctcagagaagagggttcttgcttaagatggcatagtacgaaagagagaggaaagccttcttgtgactcatcctctctttgcagaggagcttagcttctgagatgctccagtgtatcttgtgggtctagtgcattttgttttctggaagaattgcctactgatggggatgccaaacaaagtgccgacccactgagaaatagtgtgagaccttctgcttctcggctgctttgggtcatctgtgagtgttgcagtccttaggggaggatgtgaggtgggttgccaggcaaacagggcagcttgccttctgcacagtctacttatcacagggcctggctgacattcattcattcatttacttattttacttgtgtgtgtatatatatacacacacaacatataattatatattaaattaaatattaagtatatattatatataacatataattatgtaatatatttttataaccaatatatatacacatac

SEQ ID NO: 740102 - DNA, 553 bp, Homo sapiens
tgattacaccactgcactccagcctaggtgacaaagtgagaccccatctctaaaaacacaaactcacacacacacaataacaacagccaaacctgtacttaattccatctgcaaggaaatcaaactggttttgattttttttttttttttttttgagacagggtctggctctgtcatcaaggctggagtacagtggcacaatctcagctcactgcaaccgccacctcctgggctcaagagatcctcccacctcagcctcctgagtagctgtgaccacaggcacgcaccaccatgcctggctaattttttgtatttttggtagagacggggctttgccatgttkcccaggctggtcttgaactcctgagctgaaggaagctacctgcctcggcctctaaaaatgttgggattgcaggcataagccaccacacccagcttgctttttacttctgtagatttttcatcctattaaaaaaaacacacagctcaatgggatgttattttgtacacatataaatatggccaccagtgggatccatacatacaaattata

SEQ ID NO: 740103 - DNA, 680 bp, Homo sapiens
  misc_feature 675: n = A,T,C or G
aaattattacagtatatttcagactgctctatgttgaaccctagtgaaatgcctctcagaccttcctaaggatcacaatctcatgtcccttttttttgttattaaatgcccagtatgtgttagcgattttaacaaaattcaaattttttttttttttttgagacagagtctcgctctgtcacctaagctggagagtgcagtggtatgatctcggctcagtasaacctctgcctcccgggttcaggcgattctcctgcctcagcatcctgagtagctgggattacaggcacccgccaccacgctgggctaatttttgtatttttagtagagacggggtttcgccaggttgtccaggctggtctggaactcctgacctcatgcgatctgcctgccttggcctcctgaagtgctgggattataggcgtgagccaccatgcccggcgttgacttcttaataataaccatactgactggtgtgagatggtatgccattgtggttttgattcgcatttctctaatgatcagtgatattgagctttttctcatatgcttgttggccgcatgtgtgtcttcttttgaagtgtctgtttatgtcctgtgcccactttctaatgagatttttttttttcttgtaaatttgtttaagttccttatcagtgttggacattagatctnttgtc

SEQ ID NO: 740104 - DNA, 605 bp, Homo sapiens
atatatatatatatttttttttttttttgagacagggtcttgctctatcacctaggcctggagtgcagtggcatgatcatagcttattgcaagcttgaacttctggactcaagtgatcctaccagcctcctgagtagctrgggactataggtgcacaccatcatacttggctaattttttatttttttagtagagacgatgtcttgctatattgcccagcctggtgctgaactcctgctctcaggcgatcctcccgcctcggccacccaaagtgctaagattacaggtgtgagtcactgtgcctggccaacaatgaagcttttgcatgcaagtctttatgtcaattccatagagttgtatatttcttcaatctttagtgttcagtgtttactaagttaaggaatgatggtgcctaagtcatttagctaaatgatgtatttaagaaagatggctgcaccattttccatgaactattaggataggctggtgagaaacagggaaatacttccaatgactacggattagcagatttccttcctgctgagctgccagatctgtaagttgcaatgtaagaccagcctaaccaaaaacaaaataaaataacc

SEQ ID NO: 740105 - DNA, 593 bp, Homo sapiens
tgttttaaagtgattatacaaattgctcttttgaggatgtactgaagggtgccttacgcagaatcagaaacacctgtttgctggccatttcaataacctgggcaataaatgatggtggttagcaccaggatgctagtggtgaaagtagcaaaaatgatcagaattgagctgcattttgaacatacagttaataagttctgtggcatgacagaaaaatgattccataatatttstattgagcaaccttgttgatgtgatattcaaactaagtcctaatattaaacaatgtaggaatttcaatgaaaatatgaccaaagggagaaaatggctcccaacctactgtaattaaagttcccttctgttgttttaaaatgctactatggatagagaaaacaagatatggatttggaagaaaattacccacagtctaattgtcagatttattgacttaaagatgttacatggcaataaagttgaaagaaaaataagaagaaattctaaaagccagcatgttagatttattccctccacaaaaagaattgctaatatttataaagtgagataatatgccaaatacttgtacttggcataat

SEQ ID NO: 740106 - DNA, 593 bp, Homo sapiens
tgttttaaagtgattatacaaattgctcttttgaggatgtactgaagggtgccttacgcagaatcagaaacacctgtttgctggccatttcaataacctgggcaataaatgatggtggttagcaccaggatgctagtggtgaaagtagcaaaaatgatcagaattgagctgcattttgaacatacagttaataagttctgtggcatgacagaaaaatgattccataatatttctattgagcaaccttgttgatgtgatattcaaactaagtcctaatattaaacaatgtaggaatttcaatgaaaatatgaccaaagggagaaaatggctcccaacctactgtaattaaagttcccttctgttgttttaaaatgctactatggatagagaaaacaagatatggatttggaaraaaattacccacagtctaattgtcagatttattgacttaaagatgttacatggcaataaagttgaaagaaaaataagaagaaattctaaaagccagcatgttagatttattccctccacaaaaagaattgctaatatttataaagtgagataatatgccaaatacttgtacttggcataat

SEQ ID NO: 740107 - DNA, 449 bp, Homo sapiens
tggaagaaaattacccacagtctaattgtcagatttattgacttaaagatgttacatggcaataaagttgaaagaaaaataagaagaaattctaaaagccagcatgttagatttattccctccacaaaaagaattgctaatatttataaagtgagataatatgccaaatacttgtacttggcataattgcattttctcaacaaatcctatataatcaacattgttttatttgtatatgtgtgaaaaatcatgacacctgcagtttaagttacatttgtatgaaacagtcaatatgtggcagagycagaataaagcccacgtttagattaaaggaattctctttccattgcacccacccgtattgcctgtggaaaccctaaacaagccatttaaatttgttggaattccgtttttcaactttttaaaacctcttaagagtccagtcctaa

SEQ ID NO: 740108 - DNA, 531 bp, Homo sapiens
ttagattattttgattatacacttttgaattgaaattatactttttctaaataatgttttaatctctgatttgaaattgattgtagggaatggaaaagatgggataatttttcataaatgaaaaatgaaattctttttttttttttttttttttgagacggagtcttgctctgttgcccaggctggagtgcaatggcgtgatcttggctcacagcaagctctgcctyctggattcacgccattctcctgcctcagcctcagaggtagctgggactacaggtgcctgccaccacgcctgtctaattttttgtatttttttgtaaagacagggtttcactgtgttagccaggatggtctcaatctcctgaccccgtgatccacccgcctcggccttccaagagaaatgaaatttttttaatgcacaaagatctggggtaatgtgtaccacattgaaccttggggagtatggcttcaaacttgtcactttatacgttagtctcctacggacatgttctattgtattttagtcag

SEQ ID NO: 740109 - DNA, 619 bp, Homo sapiens
actgcactccagcttgggtgagagttagactgtatcaaaaacaaaaagaaattaactctgtagtttatttctgttaatggcaaccctgcagaaaagttaaacttagaatatgtctcaaagtaatctctgtctgatcccttaatgaaggatctcttcaaacacagcaacttttgtctgtcttctgaaygtaggtacagctgtggctgtagaacagaccatgtaattttcatctagattccttacaaccacaaggacaattattacaatgaaagccagagaactagctcagttttgattttattactaggataaatccagccaggtagtgtggtggctttgatgttttctgtctatatctaagggggaagctgcttcattattcgatattaagataaatagggcctaaaaatagtcctaggtcaaacaccattatgattaactcaactttcaaaaccatttacctaatgtaggatttgttaataagtcttcttcaaaattagcaagaaatacaactaatgcctaacccgtcatgatgaattaaagactgatccaaaaataactgacagttctcttccagttgccctcttctttgacaatcccaccagtctatgctctaagc

SEQ ID NO: 740110 - DNA, 632 bp, Homo sapiens
ctctcccatgaaacttttgtagcttaaatacacaagaattttttgaaaaggaaataagataatgatgcaaaatagttaattttttaaaaaaatgttagacactgcagtggatgcaacaaaatactttatatgaaagatttatccagttaacttttgtggagtattaggtattagactaataattagcacacttacttaagttagaaagtataataatgcgccggacgcggtagctcacgcctgtaatcccagcactttgggaggccaaggtgggcggatcacaaggtcaggagatcgagaccatcctggctaacacggtgaaaccccatctctactgaaaatacaaaaaaatttgccgggcgtgatggygggcacctgtagtcccagctactcgggaggctgaggcaggaggatggtgtgaaccccggaggcagagcttgcagtgagtcaagatcgtgccactgcactccaacctgggcgacagaatgagactccatctcaaacaaaaaaacaaaacaaaacaaaaaaaagtgtaataataatttatcattagctggatgatatgctgttgtttcccatgtcacctgtataagatatgtaaaataagaacacattatttacatctaatatag

SEQ ID NO: 740111 - DNA, 575 bp, Homo sapiens
gagggagaaggatggaagaaaaggagagcattggacagttgatcgtgatggaaaggaaagatattttcttttggtaaaaggtgaaatgggagcccttataaaccctgatcagcccaaagttggaaagaataatgttatgatcatgaaagtgttacggatatggttcttttcccccagatttggcctgatcagggattctatatgctggaatttcatgtatcacctattaatgcaataatgttattaataattataaattaaagagcagccgacttagtaggttcttatttgcagacaccatgccaaaccctttattatccattatttcatttaattacctcaagaaccctatgggtaattactattgccttttgaaagtaagggaaacagaagckgagaaatgaaataactcgtctgaactccactgagaggcagcgcagggaggccaatggtgggggctctggactcagaccctggatttaccctaagaataccacttcctgggtgccaggtactcctgcctgggacagagaagcagggagtttgaatgcttttgttgtaatgataatgagaat

SEQ ID NO: 740112 - DNA, 522 bp, Homo sapiens
gaaaaaataattttatatttttgcaattcttcctaatgtgtagcttaatagaggacagctgtcttctcaactgtttctgtttttagtctgttgtgatatgttttgatttaaagtattgaagaaagtctggttttgttcagatgtgtagttggaagagggaaagagtattttaataagcttttaagttaattgtagataccctttgataccacaccagaactcaacattagtgcattcttaaaggttagttgtggtgtagaattttaactgtggctgtgtttgtaacattcattggtcatttggaaaatattgrttcactgagttatacagatctttcaaatgttgacacatttcttgatataatatcaaacaatcagatttgtaaatattgcccctgatctcagctgaaaagcacatatttgaaagttctcaagctcattgtggcagataagtttttcagagctttaattttgcatgaaagctcaaattttatcattagtaataattattacagttacatta

SEQ ID NO: 740113 - DNA, 527 bp, Homo sapiens
caatgaaacaaataatggatagaagaaataggaaagagatggtatgattgtaggtttaaaagtgaacatgtaaataattaagtgtaaatagaccaaaattctaaacaaaaggcagagattgtcagactggaccaaaaaaaaaagcaagaaccaagtrtgtgctatctatatgagatgtactgtctatatgagagacattctacatataaagatgcaaatacactgagagtaaaaggatagaaagaaatataccatgcaaatagtatgcacaagaaatttgtagtaactctattcttaccagaaaaacaagacatcaatacaaggaagatttctggagactaagaggaatctttcataatgataaaagagttaatacattgggaagttataagaattacatgtgtatatgcacctaataaatacagtttcaaaatacatgaagcaaacaactgaactaagggaaaacagtcaaactacaaccgtagttggacacttttcgctctgtagttgataataaaactggatcg

SEQ ID NO: 740114 - DNA, 552 bp, Homo sapiens
gggggaggtggcaaaaggggcctttagccttgtctgtaatgcttttaaattttataaaagaaaaccatgcacatagtgtgttctattttggtaaaatagacgtaacacaaaatttaccattataaccattttaaatatacaattyggcggcattagttcattcacaaagttgtgcaaccatcaccaccatccatttccagaactctttgtcatcccaagctgaaactcaatacccattaaacaataactccccattctccccttccccaacccctgaaaaccattattccattatctgtctctgtgaatttgcctattctaggtacttcataaacatggaattgtatgatatttgtccttttgtatctggcttatttcacttagcataatattctcaaggttcatccatgtgacatgttatcagaatttaattcctttccatggctgaatatattattctattatatgtatataccactttttttaatccattcatctgctgaggaagacctgtttctaccttttggctattacaaataatgctgctgtgaa

SEQ ID NO: 740115 - DNA, 523 bp, Homo sapiens
agtttgtggcattttgcatgcccatgtccctctccctccccagcaaagcatggttcaaccaggaaaaaacctcccataccttggctcttcccttgggccagaaacaaaagagtggaccatgcatgcaatgtactgacttgtctgggggctgcctggccacccacctcgacctcccaaggtgctgggattacaggcgtgagccaccacacctgtcctggagtgggaggctgagatgggagtatcacctgaggtcrggagttcgaggccagctcagccaacatggtgagaccccatctctactaaaaatataaacattagctgggtgtggtggtgcatgcctgcagtctcagctacttgggcacaagaattgcttgaacccagaaggtggaggttgcagtgagccaaaatcatgccactgcactccagcttgggcaacagagcaagactctgtctcaaaaaacaaaacaagttatgggtatacagtatataaagatctaacttttaagacattgataatataaat

SEQ ID NO: 740116 - DNA, 552 bp, Homo sapiens
gggggaggtggcaaaaggggcctttagccttgtctgtaatgcttttaaattttataaaagaaaaccatgcacatagtgtgttctattttggtaaaatagacgtaacacaaaatttaccattataaccattttaaatatacaattcggcggcattagttcattcacaaagttgtgcaaccatcaccaccatccatttccagaactctttgtcatcccaagctgaaactcaatacmcattaaacaataactccccattctccccttccccaacccctgaaaaccattattccattatctgtctctgtgaatttgcctattctaggtacttcataaacatggaattgtatgatatttgtccttttgtatctggcttatttcacttagcataatattctcaaggttcatccatgtgacatgttatcagaatttaattcctttccatggctgaatatattattctattatatgtatataccactttttttaatccattcatctgctgaggaagacctgtttctaccttttggctattacaaataatgctgctgtgaa

SEQ ID NO: 740117 - DNA, 617 bp, Homo sapiens
aggtgagaccctgtcaatcctgcaaagaacttcatgcctttgcattaggaaaacagtgcttgagtgggctttctctattttgccctgagagggatggtgctgatttttcgtcctccatgaaaggaagacttgacattgagttcttaagtgaaagaaggaggcatctactgttttaaaatgaatgggatacaccgacttttagaagccataggcttgaaaatctaagttgtgactttgttttgccttcttttggccttctcaggcaaggtccacctggtggtggagttaagatattgcaacccagctctattctatcttgttaaatacctgaagaaaagacgcaaattaaaacttctccaactcttgttttatcacayctgttatctgtaaaacacctataactagcttgttaaagctattttaatttcagtatagtgaatcactaatttttagttgctgaggttggcattttagtgattattaagcatttctgtcagtctttgaaaaaaaaacatatgttttatgctttgaagatctctgaagactttcctttaaaaaagaatgggcatgtattgtaattgttttatgtcaaaggatatgttctgtagaaaaaaaaa

SEQ ID NO: 740118 - DNA, 601 bp, Homo sapiens
aaagcgtgcaagccacaaaggcaacagagagagtctgctagcaagatgtaagccacgttgttatataaactaatcatggaggtgactcccccgtcacccttgccatcttctattggctagaggtaagtcacaggactcacccacactcttgggcaggggactgcacagggtgtgaataccaggacaggggattattgggggcatcttagaggctgcccaccatagagactgaggcaactccccctttcctacaaagcactggagtagagcagggccttggagaagccagagctccaaacctcttcagccacagggtcccaggcggtggaggaaatgtctcagagctggagcagcagccaatggcaggctctcctggagcctctacaagactacggtcattcccagagcccccaggctgggctctgagggcctyctaagggtggggactggagagaaagagaacaaaagggcttgtggcttccctgagagtccatctgtgtgctctgcccagcaccccaggcactgtcctcctaagactcagggcgcacctccagaaacaacccagcctgggacactcagatagctgccctcagcttccatc

SEQ ID NO: 740119 - DNA, 626 bp, Homo sapiens
ctggcgtaaaggctctcgggtaggagaagggcacacagcccaaggagctcgcctgagaggcaggatgcagagataaacaaggtccagagagttcatagttttgtggaggagagagcaaaatgaggcaaaatggacaattataagaccagaatggagggtatgatcttgggtaagttaattaaactctttgatttctttttgagacagagtctcactctgttgcccaggctggagtgcagtggcacaatctcggctcactgcagcctctgcctcctgggttcaagtgattctactgcctcagcctcccgagtagctgggattacaggtgcacaccaacacgcctggctaattttttatattttttggtagagatggggtttcaccttgttggccaggctgctctcgaactcctgacctcaagtgatccacccgccttggcctcccaaagtgctrggattacaggtgtgagccactgtccctggccagttaattaaactctttacatttctggtgcctcatctgcaaaactgtgatattttagtccccacctttcagggtcattgtgcagatgaaatgcaacaacacaatgcccggcgtatagtaagcattcattctatgtgggggcg

SEQ ID NO: 740120 - DNA, 633 bp, Homo sapiens
agaaaagtgaaaatggttggtgatgtgatggtgccatggtttgttttcctgccaagtttctatccaaattcattattcaaattgtaaactttaaaaggagatatatcattcttggggtgttggttgtcttttcatttcagattctttgtattggtattgcaggctggccacaaagtacagttcaacattattttacccatgacagttctccatattacccgaggtaatagccaagraagaaaaagatgaatgatctaaaaggaaagatgtaggacttctctagatttctttctagaaacatgcttcatgtctgtttcaaacagaactcaactccaacaatataaaggatatagtgaaaggtttttcacaaatctcaaggcgaaggactgggaaaagttgcttagaaggcctcatggactaagtcaaatttccactttcaagctttttatattccagggaaaatagtggtcactgtgtggtatccacttcatggtcaaactttcaggatgactttctcccatctagcaattaaagccaactatttaatatttggtgattttaacctttgtggttcattttacagttattacttctctaaaacctttgtgctgggaattaacaagagttcttcaa

SEQ ID NO: 740121 - DNA, 601 bp, Homo sapiens
ggtctcacagtttatatgaatttgatcagggtagttgaaaaactaggtcaacgttctagatgtcctaccttccagtagatagagttatttgaagaacttattatagattatttcaaatttcaaaattcaaaattctcagatcatctcctaagaaccacaatggggtaaggagttgagctgtaaaagaaaggagaggaagaagggacagctaaaatttgtgaaaattttgacaaaagaggawcatagaattgattgaatgattgccaagcacctgcaaatctgcatgattcagcatattaggtaaaaacatcagaaaaatgattgatttagcaggatgtggtggctcatgtccataatctcaacactttgggaggccaaggcaggaggattacttgaggcaagaagttcaagaccagcctgggcaacatagcgagacacccttctaccaaaagtaaaaacaaaaaaattagctgagtatggtggcatgtgcttgtaatcccagctattcagaaggctgaggtgagagaatcactttagcccagtaggttgagactgcagtgagccatgagtgcaccactgtactccggcctgacaaagtgag

SEQ ID NO: 740122 - DNA, 601 bp, Homo sapiens
ggtctcacagtttatatgaatttgatcagggtagttgaaaaactaggtcaacgttctagatgtcctaccttccagtagatagagttatttgaagaacttattatagattatttcaaatttcaaaattcaaaattctcagatcatctcctaagaaccacaatggggtaaggagttgagctgtaaaagaaaggagaggaagaagggacagctaaaatttgtgaaaattttgacaaaagaggaacatagaattgattgaatgattgccaagcacctgcaaatctgcatgattcagcatattaggtaaaaacatcagaaaaatgattgatttagcaggatgtggtggctcatgtccataatctcaacactttgggaggccaaggcaggaggattacttgaggcaagaagttcaagaccagcctgggcaacatagcgagacacccttctaccaaaartaaaaacaaaaaaattagctgagtatggtggcatgtgcttgtaatcccagctattcagaaggctgaggtgagagaatcactttagcccagtaggttgagactgcagtgagccatgagtgcaccactgtactccggcctgacaaagtgag

SEQ ID NO: 740123 - DNA, 665 bp, Homo sapiens
tatgcaggcatgtatctttataatattaatagaatgatttaggcccagcatgggggctcatgctgtaatctcagcacttgggaggccaacacgggtgtttgcttgagcacaggagtttgagaccagcctgtgcaacatgacaaaatcccatctttacaaaaaaatacaaaaattacccagatgtggagacacatgcctatagtctcagctacttgggaggctgaggtgggaggattgcttcagcctgggagaccgaggttgcagcaagccaaaatcatgccactgcactcaagcctcggtgacagagccagaccctttctcaaaataataatagtaataataataataatagaacaatttctttttatttatttttttttttgcagttgcaagatttaatagagtgaaatagagtgaaaacagagctcccatacaaaggcaggggacccaaagggggttgccrttgccggctcgaatgcctgggtttatatcccgatccttgtccctcccgctgtgctcccaggcaatagatgattggctacttctttacctcctgtttttgcctaattagcattttagtgagctctctgattggttgggtgtgagctaagttgcaagccccatgtttaaaggtggatgtggtcaccttcccagctaggcttagg

SEQ ID NO: 740124 - DNA, 624 bp, Homo sapiens
ctccccttgatgatggggaggtgggagggagcacaaaagcaatctcctggaaaccaagactcagtgtcagcaggtgaagtgtgtccaagatcaaacacagcaatcacctacaaatgtgaaagcaaaccaaagtccaacccatcccgggctcgtgtgtgttcttgctgttggcttcttgcttcacactgcttttctccccagggttttcactsggttggacagataggtgtggatagctagtgggggctgaggttgttgattgagaagtgtgctgatgaactcgggaaaaattctaaaagtaaaagctaaaaaatggattcacgatcatttccaggctgcctagagcagctgagaccactggctgtaaggacaggggcaatatggagcctgaagtctcagtcggatggggagaacgtgtgcatatgaaaatcactacaaagcaaaatacttaagggcaaaataattaaggacaagggtaaggcagtgtacaaaataatggagtaagcctgacagagtcttgctaacctgggaagccttcccaggaacttgaagggggataccgactggggacaaggaggcacctgtgtaatgactgtagaggcacagctctccacattctccaca

SEQ ID NO: 740125 - DNA, 655 bp, Homo sapiens
tgggttgaatgaagcttatcatctatgagcatttttcctgctactctaattttcttcagtccagacttctctagtttttcattcacacctgaagctccaggtgagaatcatggctactgagaggacacccctcaagcgtgattgggcaggaggaaagttacaaactcaatgtacttatttccacattttggcaaagaatattcctgccagcaattagttttctattttgaaatagcatttaagcatcttcaggagtttgtaaaatcttttttgtcccttattgtaataagtaataggacaaagttyccctcaggccagaagcatgaatttagtccacaaaaacatatttgtaaatatttttaaatctgagatttagtttttcaatttcataagatccatagaagtttatggtttaaaaagccaaatcatttttacaaggactatagtgagaaacagtcttctaaattcctctccctaactctgttagctgtttcttctgtttccattttttcctaaatagtatgtttatatcattatttctacatttattaatttcaaacattatctgttaacttattacagataagaggacttggcctcctgatgccaccttattccttctctctctcttcactttccttatcctccctgtatg

SEQ ID NO: 740126 - DNA, 624 bp, Homo sapiens
ctccccttgatgatggggaggtgggagggagcacaaaagcaatctcctggaaaccaagactcagtgtcagcaggtgaagtgtgtccaagatcaaacacagcaatcacctacaaatgtgaaagcaaaccaaagtccaacccatcccgggctcgtgtgtgttcttgctgttggcttcttgcttcacactgcttttctccccagggttttcactgggttggacagataggtgtggatagctagtgggggctgaggttgttgattgagaagtgtgctgatgaactcgggaaaaattctaaaagtaaaagctaaaaaatggattcamgatcatttccaggctgcctagagcagctgagaccactggctgtaaggacaggggcaatatggagcctgaagtctcagtcggatggggagaacgtgtgcatatgaaaatcactacaaagcaaaatacttaagggcaaaataattaaggacaagggtaaggcagtgtacaaaataatggagtaagcctgacagagtcttgctaacctgggaagccttcccaggaacttgaagggggataccgactggggacaaggaggcacctgtgtaatgactgtagaggcacagctctccacattctccaca

SEQ ID NO: 740127 - DNA, 624 bp, Homo sapiens
ctccccttgatgatggggaggtgggagggagcacaaaagcaatctcctggaaaccaagactcagtgtcagcaggtgaagtgtgtccaagatcaaacacagcaatcacctacaaatgtgaaagcaaaccaaagtccaacccatcccgggctcgtgtgtgttcttgctgttggcttcttgcttcacactgcttttctccccagggttttcactgggttggacagataggtgtggatagctagtgggggctgaggttgttgattgagaagtgtgctgatgaactcgggaaaaattctaaaagtaaaagctaaaaaatggattcacgatcatttccaggctgcctagagcagctgagaccactggctgtaaggacaggggcaatatggagcctgmagtctcagtcggatggggagaacgtgtgcatatgaaaatcactacaaagcaaaatacttaagggcaaaataattaaggacaagggtaaggcagtgtacaaaataatggagtaagcctgacagagtcttgctaacctgggaagccttcccaggaacttgaagggggataccgactggggacaaggaggcacctgtgtaatgactgtagaggcacagctctccacattctccaca

SEQ ID NO: 740128 - DNA, 734 bp, Homo sapiens
tattacctggatccttctcttcgttcctacccctactcttgtcaccattctaggtgacttcaacctcctcacagatgattaatccaacaccttggcctcttagttccctgactctgtcacctctaataatcttccccagatctgaccttagccatcaaatttcagagacacattcctgaactaatcatccctcaaactgcactacctctgaaatcttgacttccagaatcctattctttgaccacaacttctcatccattcagctcagctgctctagttctccaagtccagaaattctgcaaccttatgaagtcctccagtccacagttctagccctttttcatattcttcatctctatgtccttacttccctccttaccatgtttagattccatggtgccagtctgtttttgctgccataacaaaatacctgacactaagtaattttaaaaaaacagaaatttattttgcacattcagaccatagcacatggtccacctatgaaatcacttctatgcaaacacttacctccctcaccattcttttcctccattagastagttggtcagaatcctaattctgagattaaatccaactgctacttgctttgtttctgtacctgaacagctaaatggtactggagaaaaacacacagccatactgtagtagacattgctagtgttcatcaatatctgcttcttctcttctacctggtcacatgtgtaagcccataa

SEQ ID NO: 740129 - DNA, 684 bp, Homo sapiens
atgaataatggagctataaacattcatgtataggtttttgtaggaacatatgggttcatttctcatggcagacacctagtacccaggaatgaaattgctagattctacggtaagcttatgttgaacctcataagaaactggcaaactgttttccaagtggctgtaccattttacgttcccaccagtaatgtatgagggttcctgtttctccacattcttactgcctcttgtcaccatctgtcaattttattttgctattctaatgggaatatcatggtggttttaatttgtatttcttctaatgactaacgacattgacaccttttcatgtttcatttgtcttctttgatgagctgtctattcaaatcttccacccattttttcttttttctcaggttaycttattattgaggtgtaaaacttctttatatatttcgtatagaattccttatcagatgtatgatttgcaaatattttctcctatttctctatgggttgtctgttcactttctcgagggtgtcttttgatactcaaaagtttccaattttgatgaagcctaatgtatcaaattttaaaatttatagatcttgcttttggtgttgtatgtaaaaaatttttgcccaacccaatccactaacaatttctcctatgtttcttatcaaagtttcataattttggctctt

SEQ ID NO: 740130 - DNA, 646 bp, Homo sapiens
aggagttcaagattacagtgagctatgatcacaccactgcactctagcctggatcacagacagactctgtctaaaaaaaccccaaatgtatacactttcatcagatggagtattctatatatgtctattaggtcaagttggttgatagtgttgttcaagctcttttatatccttttcattttttgtatagttatttcatcaattatttagagtggggtattaaagttaacaattattattgctgaaatgtcyatttgtcctttcaattctgtcagtttttgcttcgtgtatttagggctctgttgttagatgcatatatttataattattatatattcctgaagaattgcctgtgttttcattataaaacaccgctctttgctgttaataagtttttttttttttttggtcttacagtctattttatcagtagagccactccagtctctcatgaattttttttacgtggaatatctttttccattcctttactttcaatttatttgtgtcttttaattgaaaatgtgtttcatatatggcatatggttagatatttcttttttatatggtttgacaatatttaccttttgatttgcattttccatgaattaatgcttaatggaatttgatatggttctatttatat

SEQ ID NO: 740131 - DNA, 549 bp, Homo sapiens
caaatatctggacttgcttctctgtcatcttaaaattgaaaatacttttaaataaggagccttgtgatttcattttgcattgagcctcacaaattttgtagctgtccctgcaggaggggagcgtgctggctgtgcaggggaggccagcaccaagcctgggaggtggacgttacctgggtgagttggaatggattctgagttcctgggcattttctttcctgctgatgatctgattctcttcctatgccatagtttctttaagaactgaatttataraacattcattataggctaggtgttgtgcaaacaggcatttaattctcacaataacactatgggcagaattattagcctctatataaatggggtataataatttcccaggcttataaagctttatagccaaggaaatggaagctcggaagttatgtaacttgcagaaatttaaccccggccaatggcaggacccagatccaacctcaggcatgtgtcacagtgacattcttcaaccccttccaactgacagcttgttttctgacctgggtttag

SEQ ID NO: 740132 - DNA, 553 bp, Homo sapiens
tccctgatctgcttcctgctgctctgtcactggagtctagtttgcattgtctacaattttatgtaaatggaaccatatagtattgtgcttcttttgcctatgttctttcacacagtataattatttcaagattattgcaagttgtggcatgcattactaggtcattcttctttatggctgactagtgttttattgcatgaatacacctgtttatttgtcccttctcctgttggcgggcatttgagttatttccaagttttgttcattacaaatgaggctagcatyaataatagtgcattaatctttatatgctttcagctctcgtgggtaaatattaggagtggaagggctgaatcacatggaagttgtataaacctttcaagaaacttccacatttgtttccaaagggcttgcgcctttttatatttctactgttgccagtaggccagttcagattcttttttttaatttaatttaagttccaggatacatgtgcaggacgtgcaggtttgttacataggaaaatgtgtgccacggtggtttgctgcacctg

SEQ ID NO: 740133 - DNA, 537 bp, Homo sapiens
cacttcttgcgatacagggagtaatatcctctcccatcatggatattaagaacaatattacaaaggaggtgtccaccccctgcgatattgagagtcatattatgctctccccttagggataagaacaatatcgcaggaggtgtgtacagcccctgcgatattgccactagtatcatcgtctccctcccgggatctaagaaacaatatcacaagggggtgtataccccctgcgatattgagagtaatatcttcctctcccccgctggctattaggaacaatgtcacagaaggggtgtacaccccctgttatattgggagtgatagcatcctctccgtccctggatattaggaacaacatcactagggagtgtacacctccagcgatattgagactaatatcmtcctgtcgccgcctagatattaggaactgtatcacaggggtggtgtacatccgtgcgaaattggaagaaatatcctctccacctttggatattagagacaatgtcacggtggaggtctacgccccttgcgatattg

SEQ ID NO: 740134 - DNA, 638 bp, Homo sapiens
agataaaagacacaaaataccgatgttgggaatgaaagaggtacatctttacagagtcttcagatattaaaattataataatattatgaacaacattacaacagtaaatttgaaaacttagatgaaatgcagaagttccttaaaaagacacaaattaccaaagccactcaagaaaaaatagataacctgaaaatattatgtctattaaggaaattgaatttataattaaaaaccacatgcaaagaaacatcaagcctagatgactcactggtgaattctctcatatatttaagaaagaaagagcaacaattatacacaaacttcccagaacattcaagaggggcaaataattcccaacttattctatgggakaagcattccttgatacctattactttcaagagtataaatgcaacaattctaaataaaattttaacaaatagaatccaacaatatagaaaaggataatataccataacccaatgcaagattgctttaacattcaaagttcaattcacgtaattctctacataaacgcatttttaaaggaaaaaaaatgagcatctcactagatgcaggaaaaagatttgacaaaatcaaacaagtattcctgagaaaaacttactagattagaaata

SEQ ID NO: 740135 - DNA, 540 bp, Homo sapiens
cgggtcaagggacggggaggctggatcctgttgcaggggcatagtccacatggatggagtgctggccatgtgctaagtgctgttctaagcttgatacttactttaacttaattgatcctcacaacatccctatgcggtaggctattactccattttacggacacaggaactgaggaacacgggcccaatttcacctaaggtcactactgaggaccagggttcagattaagtgtctgcctccagactgaatcattcttacatggtgcctttctggatgagctcattgccctggasgggtggaggtgaggggttttgtcctgtgtacccttcctgaagcctgacagatcccgccccagaggcagattctggctgttgccatgttatactggaacccagaattatcagccacccacttgtagggtacagagaaaaggaactgctctgcagtgatcagggctgtgagaaatggtttactgtgatgaggtctgtcctaaccacctcaaagaagtatctgtcagcaccccagggacatgctccttt

SEQ ID NO: 740136 - DNA, 540 bp, Homo sapiens
cgggtcaagggacggggaggctggatcctgttgcaggggcatagtccacatggatggagtgctggccatgtgctaagtgctgttctaagcttgatacttactttaacttaattgatcctcacaacatccctatgcggtaggctattactccattttacggacacaggaactgaggaacacgggcccaatttcacctaaggtcactactgaggaccagggttcagattaagtgtctgcctccagactgaatcattcttacatggtgcctttctggatgagctcattgccctggacgggtggaggtgaggggttttgtcctgtgtacccttcctgaagcctgacagrtcccgccccagaggcagattctggctgttgccatgttatactggaacccagaattatcagccacccacttgtagggtacagagaaaaggaactgctctgcagtgatcagggctgtgagaaatggtttactgtgatgaggtctgtcctaaccacctcaaagaagtatctgtcagcaccccagggacatgctccttt

SEQ ID NO: 740137 - DNA, 616 bp, Homo sapiens
atttccataaagatgtgaagatgtgagatttgagttttaaacaatataataaaactgaatttgttaaagttctacttaggcatataaacaagcattattaaatgacattattttacactattgaaaatgagggaaatgcatacattttctcaaagtcatttcatgagcctgtgttttgaggaatacagtaaacgyacagcctctcacattgaagtgttagcaggttgcactgacattgctgtctttaggtgctgacacatttcatctatttacaatatagttatgaacttggagctttggggaagggttctgggctgagagaaagagaagctgggcttctgggccacagccagtttcagacaaagataagaatgacttaacaatttgttttctacgtttgcaatgtttctcctaaattccttttgtgttatcagtagacatggtagttgctttttcttttgaggcctttgaggttaaaatgcacttaacagcaattgtttatttttggacatgcatatcatactgtctttcatccgatgctgacgtggctactttccatcaggtcaaagaaagttcaggtttctaagggaattttgcactgacagaatcccacatt

SEQ ID NO: 740138 - DNA, 558 bp, Homo sapiens
ctcctgcaggataaactcaaagagatccacaccaagaccaagacaccataatcaaactgtagaaagcccaagacaatgagagaatcttaaaagcagcaagatagatatgacttgtcatgtacaaataattctaagtaagattaataatagctttcttgtcagaaactttggaggtcagaagacagtgggatgacatattcaaaatgctgaaagaaaagaaatgtcaactaagaattatatatccagcaaaacttctttcaaaattgaaggagaaataaagacattccaagataaacaaaatctagtacaattcatcactagcagacatactttacaagggcagtccttcaggctaaaataaaagaacattagacagtaacctttatccacatgaagaaataaagttcactgrtaaagataattacataagtaaatataaaagaaaatataagtatatttttgtaactcctttttttcttctatatgacgtaaaaaacaactccatcaagcatagctaaaaatttatatttacagatacataatatataaacataaaat

SEQ ID NO: 740139 - DNA, 635 bp, Homo sapiens
aagaattttaagacaactcacagaactggagaaatatttgcaaatcctgtatctgataattgcctactattcataatatttaaaaagtttttgcaactcaacaataaaaagacaaaattaggcaaataatctgcataggcatttctccaaagaataatacaaatcagccaggtgcagtggctcatgcctgtagtcccagcattttgggagcctgaggcaggcagatctcttgagctcaagagttcaagaccagcctgggcaaggtggcaaaaccccatctctacaaaaaatgcaaaaattagcactgggtgtggtggcgcatttctgtagtcacagctatttgggaggctgaagtgggaagattacttsaacctggaaggtcaaggttgcagtgagctatgattgcaccactgcaccccagcccagacaacacggtgagatcctgtctccaacaacaacaggaaagaatatatacaaattgccaataagcacataaaaagatattcaatatcattagccattggggaaatgcaaatcgaaaccaaaaaaagtgatcaaaaccaaaccacagtacaataacaaaaatgagatactgcctcaatcgcactaggatgactgatcaaaaagacaatagc

SEQ ID NO: 740140 - DNA, 634 bp, Homo sapiens
gcaaaaaggttaagaaggtcaagcagcctgtgtaatcatctgtgcataaatttgtttttatatcacagataaatatcatgtattatctgatccactaacattttatattgtgtaaattgtgtccaaatgtgcatcttttaaatttagtacaactttggaattcttctattctttgcttagatggtatgaaacttcatagtgagactggcttctaaagctcagcctcattttcttgcttgcacacctttaartgagctgttactggttacctttgccttatgctagtcaactgtgttcagcatggcacacagatgcattacatgtccactgagcggggtctaggtcagtttttcaaaagatttactcaatgaccatctgaccagttatcaagtcactaaaaactgccagtcaaataccttagcccaggtttacaagagccacaggcgtttggcaaagccagccaaggtcagtgtagtctatgttgtcctgttccttggggcctctgaattttcggaagaaaactccttttctattctaaattaaaggcagcgtgtatgttgttagtctaggttttataaatattagggtgggattctcttcccaaacttcttttgtgtgtagtttactgagtttc

SEQ ID NO: 740141 - DNA, 583 bp, Homo sapiens
aaaggataatcacacagcaggctaagccatagtgatgtactgatttggaagtggcagtaagagaaaggaggttcgatgatgaagtcttccgaagagagttgtcagataaaataaaaggtgcctagtgaaatttgcatttcagataaacaataacttttttagtgtwtgactcatgcaatatttgagagatataacacatgcatgcacgcacgcacacacacacacacacaattcaaatttatttgctaaatcttacaacccggttgctgacttgccatttctgatttagaaacaatggaagagaaccaggagaagaacaggagtaatgttttgctcatgttttccttttaactccagacacctgagaagaaatgtgaaccaggcacttggaccttgaatctggaactgaaaggaaaggtctgggctgaagttatttttgtgcggtttcttcagaaatatatcaaatttcacatgttctaaacaagcatatacttttaattatcaaaccattcccttctatagatttcatctttgtattagtgatacacaaagtagcagatataacctcttattatccccaaat

SEQ ID NO: 740142 - DNA, 553 bp, Homo sapiens
caccctgaaagaaaaatgaatcatttgagtttcaagtgaagaaattttgttttagttattttgattccattatgagaaatgctgtagtattttattatttatttatttttatttttctaattttttaaaatagattgagggggtacaagtgcagctgtattacatggatattatgcagtggtgaagtctgggcttttagtgtaccctaagyagtatacactaaatcatctacattgtgcccaacaggtagtagttcattcctcacccccttgccaccctcccacctgttggtgtctccagggtctatgattacacactgtatgtccatgtgtacccattgcttagctcctatttgtaagtgagaacgtgcagtttgtggctttctgtttctgagtcatttcaagagatgatggtgagccagactcagaaagatgagaaaagtgaaaggattcaagagatatttaggatttcaggaataatcagaagttacggatgaagaaagcagcagttccaggtttgggcaactgctgaattgtgatgctcttcactgtga

SEQ ID NO: 740143 - DNA, 530 bp, Homo sapiens
gagtttggcgtgcaaagggacagaatgatgtaacttggaattgatggagtgctaattccctgtggggaaagctttgaccagtgggaaagagaaggaaaggggacccaagaagataaagttcttcttttttcctcaccctycaacttaataatttcataaagcatgcccaggaatatactgtgtgctgagctgttacacctgcctagtaacatcatggcctattgggaagcagtagccagacatataaacacagcattccatttattttccacatctgttccttgcctgcttgcccttattccttactctccctgcacactgaaattaggtgcattggctccatgttctagagagcttggcaagcaaagccatttggtgagaattaccacgtgggattgttaaaaatgcaaattccctaatgttgacttcctccaccttaaacatgaaaacttttctgggtcattatttaattccagatgctatccttgagtcatattaatctatgcatttaaaagagaatctgtgacata

SEQ ID NO: 740144 - DNA, 585 bp, Homo sapiens
atctgaatgggcatttctagaaatatgataaactaatagtgtaaaagcacgtgaaatgatgctccgcatcactagccatcagagaaatgtgaattatagctgcaatgaaataccactctctacctactcatatggctatcataaaaggatagataagaagaagtgttggtgataatgtggagaaattggaatcctcaaacactgcttggaagaatgtaaaatggtacagccactttagaaaacagtctgccagcgtctcaaaaagttaaacatagagtgaccatatgacacgcaattccagtcctatatagccaagagaattgaaaacatatgtgcacacaaaaacttgtacactgtttacagcaacattattcataataaccaacatgtgggaacaactcaagagtgcatcaacaagacacatggagaaacacaawgtggtatatccatacaatggaatattattcagccatgaaaaggaatgaagtgctgatacatgctacaacatggatgaacctcaaagatattatactcagtaaaagaagccagacaccaagaaccacacagcatttgattccatttcta

SEQ ID NO: 740145 - DNA, 633 bp, Homo sapiens
tcttcttcttttttttttttttttgagacggagttttgctcctgtcacccaggctggagtgcagtggtgcaatctcagctcactgcaacctccgtctcccaggttcaagtgattatgctgccttggcctcccaagtagctgggattacaggcacctgccaccacgcccagctaattttttgtatttttagtagagayggggtttcatcatgttgggcaggctggtctcgaactcctgacctcaggtgatccacccgcctcggcctctcaaagtgctgggattacaggggtgagccactgcgcccggccctctcttcttcttataaggacaccaatcattgcatttagggcgttgccctaaacccaggattatttcctcttaaagtccttgactagttacagctgcaaaagccctatttcaaataaggccaatttctcaggcagacatgaacgaagacactatactaagacaaaacaaagggagtgaatagcactgagaaattaacactagctgtactggagatcagaggtgctcaataaacattgagcacatttacagacctgccctaggggttgccttctcccacctgctaggcacagtgagcaaggctgacccctcatctgccatgttgaa

SEQ ID NO: 740146 - DNA, 589 bp, Homo sapiens
aagataatcaggtaagtaataaaacaagtagagtaaaatgttaatggtagaatctaggtatttggtgttcactgcacaattctttcaacttttctgtatgctcaacatttttcataatgctgggaagaattgcgaattaggaatccagtgctaagacaatagggagtagtggggactgcagtgaactcgggggcataggtctctcctacytggctgtaattgttaattggcttgtgattgcaggtttggtgttgccagatattctcatttttacatgacgtttaaatgtaaacatttacatttttctgatgtttaaatgacaagaaacaatttatgccaatggtcaagtgaaacatttgcaggtgcactccagtgtgttacttctgccacaaagcaaagctgattcagagcacgtgttttgtgatcagactgtcttctggtcctggcacccactccctctggcagtgaggccttgggcaggcgtctcacctcttggtgcctctttttttcatctgtaaaacggagctaaaaatggagcctatatcagtaggctaaagtgaaccttaaatgtgataatactagcttagca

SEQ ID NO: 740147 - DNA, 596 bp, Homo sapiens
ttactgctttccacccccccttcccccaccacatacacacacccatatatgttttgctattttaaagaaagagatttaacagccataaggcacttttaaaaataacattcacatctgggctgaccacctgtatgccaaaatttagcttgatgttaattaaaacaggcatgttataaacctcaggaaatagcagctgacccctgactatgaatgtaatgctataataatacgtagtaaaaataagacattttgaggctgttgcccaaaccactcrtgcattaaaattctcaccactgtatactcttgcacgaggatgggtaaatcaactgcagaagtggtccaaccaaaaaaataataatgataacaatttaaggggtaagcgccattcattaatgcaacagatgactttaaatggctatcctggacaggcaccaccagtctgccttgtggagaggactgtgcatggagcttggaagactgatcagctccatcctgataggataataataatatcaacagtaaagttattgaacactttactgtgtgtctggcactgtgttaagcacttttaacatacatgagtgcatttatcctcc

SEQ ID NO: 740148 - DNA, 574 bp, Homo sapiens
atagctgtggattagtcaaagttcaaataataatggccagtgcatttatcaaaaatgaaataactcacagttataactgtatgataagtctccattgcttcttgtgacataaataaaagagtagctaatgttacccctgagcaaagtagagtgttgtgtgctttcgttggattatcatttttaggtgtgttatacccatgtgacagatgaggaaactaagattcaaaaagattaagtaaattgtctaaggagatgactagaaagtggcagacttgggaactgacaacaggaagcatgattrtgataatactctaaacctcaccagaccacactgtctataagagatgctgaggccgggcgtggtggctcatgcctgtaatcccagcactttgggaagttgaggcaggtggaacacttgaggtcagaagttcaagaccagcctggccaacatggtgaaactccacctctactaaaatacaaaattatctgggtgtggtgtcatgtacctgtaatcttgggaggctgaggcatgaaaatcgcttgatcctgggaggtggaggttgcagtgagccaa

SEQ ID NO: 740149 - DNA, 634 bp, Homo sapiens
gccttgtatgcacctagagtcctgtggggatttagatttcaaattgaggcacgtcatttttgagggctggcctagtcctgtgcagaggcagagtctgaatcatttctgaggttgagagtcctcaaaactgtctctcctgtccccaaaatattttccgccactctcttgccacaatctctgaaatttccacctttatgaagttctttgggttaagttattaaaggtyctttcttcatttattccagaaatatctattaagctatgatgtattaggcactattccaggtgttaactatgcaactataggcaaaatagacatagacccttccctcatgaagcttacaatctcttgagtagaagggtggatggcagggctgggagataagaagcaaagaaataaatatattgatgaaatgtcttcattcaacaaatatcaagtgcctactctttacaaattcaacatagatcctaagatagtttacccaggtggtcacttcaaataatttatcagattagcagccagggacctaataaacttgaggaaattggaatcatgtcaaatgctgtctagtgtctggtttctctctttctcccctctctgccctaaaaccatttgatttggccctctctctag

SEQ ID NO: 740150 - DNA, 625 bp, Homo sapiens
ggatttggaaatgttgttgatcagctctccagtgacacatgcgtgtggactgggtgggacacacgtgcggcacacactccactcacacacagccaaaccttcaccacctattttactgcttctacctcacctcctaccttygccatccatgtagcctgacatatattttgttcacattttgatgcatggttccaatgttatatttttccatttgagaaaatgtgcaaccagatcaaaagcacctggtgacttaggaacaccagggtcccccactggtgaagctaatggagtcactaatttgcctggccaataaaaccaatgatttctatactaaaagcctttgagtgaagcctccggggcttgcttcagggcaatggaagggggctagtttcctcttagccaataacctaattatttttttaaagcactaactgtacctttcattataataatgcatataattgattttactgattatgtctttcatggcatctattagtcactgagaactatatttacttctttctgttgtttttatgattgtttagctttgggatctcataataggtaattaataaaatatgttaatctgagagtaatttacctaatgagatctccaggaatg

SEQ ID NO: 740151 - DNA, 560 bp, Homo sapiens
gccataagaagctgagaaggaagctgtctggggctcctgggtggacctagaaaggagaatgagggggtgtgtttggaagctggggatagctgaggcctcatagctagatagagtttgctcagggcatccaaggaatttcacctattgagaaagctgggacgtaaaagctcccagtgaagggggttggcatccatgtgcctggagctgggggaaagcyttggctgcaatttcctctgcttttaaacgaaggaggaaatggaaggtgctggtgcataaaacaggggaatagcagggtgattttgggtgctagctgtccacctgggtctctacagcttcctccattctagcaacctgtccaattttcaccttcctcttcctcttttttttcttcttcctcttctactactgtttctagatcacatttattgaaggctacctctaggccaggcacattgccaacagctttatatgcatcatcttatatatactgcataacaacgctaggaggttgataatacacaaagatattagagagaaggaaactaaagctcagagagggt

SEQ ID NO: 740152 - DNA, 652 bp, Homo sapiens
taggggcccagctctctgctgtctagtcgccgacttccaggtcacaccccaccacttcagggtatgcaactgtgagccagcgtcacaaatcagatctgaataggggtcttcatggccaaggggtcaggtttcaggtcctctcacctccaagttacactgaagctgacctttttccacttttgctgtgttttcttaagtctatagcacataccatctgttttcaattttgtgaagagtaataaaaraatctaatccagtttttcaaaacacttaatttttttaaggaaaaatagtctcttttttcattttagtacttcagcgtttaacaaatgatatttacttaccaacacaatttatgcaatttcccaccctgataatgcatctgtttttctcctgtccattttaacacttactgtcttcttgcgttagctattaaagactgagaggagttaaagatgtaagccaaagcaggtaatttcctaaagagaagaaatgtaccttaaatgatttctctttgctagacctgtttgttctcccttcatttggctctttctgaagaaaataaagtaaaataaaataaaataataaagttggggttgtggggggtaattagcaacaaatatcttttggatccaaagaggtgacaggaagc

SEQ ID NO: 740153 - DNA, 610 bp, Homo sapiens
ttcaggcaatccagaacaacaccgaccagccagagctccccccatcaatggagtctctctaaagagctacatctccagtcaatttctccctctgcccactccttctctgtttctctaccttccacagatgttattccaaagggcactccagaataaacaccctagcctactaaactccatctcagagtcgacttcccagagaatggagcctgtgaccaagctaaattcaacaccatgaatgttatctaccaaatcagagtatcagagagtaagggctgagggctctctttggaaggagagggaaattaagttataacagaaagatttctaaaggaggggagatttgaactacatctggaatggtggttactattaggtagttgaggaacaacaggaccttttagtgaggaacaattcakgaaaaaggcaaaggggcaggaagtacaaagtatgttcaagggaaatttaacagagtcacccaatgaaataagtgagatgtaagaaagaaaccagactgtggatggagcttgcactttaaaaaaaaaaaaaaaatgcacttcatctgttagaccaattgacaaccaatcaacatttggcactgcagatgaat

SEQ ID NO: 740154 - DNA, 480 bp, Homo sapiens
catgtattttgggattgcccagaaaagaaatctgggattttttctaagacaaagtggatttactaagaataaatcatgccaaacttttttttttcagtaaagtttcaagctgatagattaaaaaaacatgctgtgagcataatgtatctgacttcagaaaagaattggatgaagtcrcttattatacctttctaaataatataaaaaagaacgagctaggtaatagtaccgctaggggttgctaagtcactgtatagcaaattatctagtggtttttgacagggctctgtcttgggtattgaactgtccaacatgtcagtgacttgagcaaagacagcattttatcgtgtttgcaattcaaagctagaaaacagttgaacatgttggatactatcattcatatttacaaagtcctaccagataatacaatgggccaaaatcaatcagatgaaatttaacaagaataaatgtaaagctatc

SEQ ID NO: 740155 - DNA, 602 bp, Homo sapiens
gtgggaggattctgagcaggggcgagctgtggtttgatttgcacttagaagataattgggatgtcgtgaagactggactgtaacgggctagagtggaggtgaggaaagcagttcgagttggtcatgaagcagttggtgaggaaaacctaagtggatatttgcctcttaggggcaagcagtgttctaggcttcrgcagtgaacaaaaatcctttcctgatggagctcgaatcctggcaatctgctgttgctgtagtcccaggaggagacagcgtggtaccttaatttaggctatggctgtaggagtgagtacagtgggacatcattggctttgggtatatttcagaggtagaactggatttgagcaaggattagaagtgggatgtgggaatgagacaggctcggtttctggcctgagccactgggtagatgatgatcgcattactgaggtgaagtaggaaattgttaggaagaggacatttggtgaggaaaacccaagtttcttggcttcgttacattagagatgcctattataaatttaatggaaatggcaagtcaccaattaggtatttaggtcgggagaagtttgaggtcggagagagac

SEQ ID NO: 740156 - DNA, 506 bp, Homo sapiens
gttttctttttgcttgtttgtttatgcaaacagcattgttatcaacttaaaatactgagttgtaagacagtatttgcaaacatcttggtaacctgaaactaacatacaacgaatacagaaaaaataaaaagcaagaaactaaataatatcaccagagataaaggaagacaagaaagaaaaaataaaggaaaagaccacaaaacwaccagagaataaataacaacatggcaggaatcagtcttatcaataatgacattcaatgtaaatggactaaactctccaatcaaaagacagagtggatgactggattaaaaaaagacaacgacaacccaatcatcttttgcctacaaaaaacatatttcacctataaagacacacataaactgaaaataaaggaatggaaaaagatattccatgccaatggaaaccaaaagagagcaggagtagctatacttttatcagctaaaatagattttaagactataagaagagaccaaaaaacggcc

SEQ ID NO: 740157 - DNA, 508 bp, Homo sapiens
gaaaataaaggaatggaaaaagatattccatgccaatggaaaccaaaagagagcaggagtagctatacttttatcagctaaaatagattttaagactataagaagagaccaaaaaacggccattgtataatgaaaaaggggttatttcagcaagaggatatgacaattttaaatatatatgcacccaacactggaacacccagatatataaggcaaatattatyagagctaaggagagagataccaatacaataatagctggagatttcaataatctcactttcatcaataaacagattttccagacagaaaaacaacaaagaaacattgaacttcatctgcactatagaaatggacctaatagatatgtatagaataattcattcaataactgcagaatacacattcctttcctcagcacatgggttattctcaaggatagatcaagggttaggtcacaaaacaagtctcaaaactttcaaaaaaattgaaataaatcaagcatttc

SEQ ID NO: 740158 - DNA, 522 bp, Homo sapiens
aaagtaaaacaaaaactattaatagatgtggtggtacctgagacgcatgtcaaaaggacatgcggcaatataccttgcaggactgggctgcttcttagaattttaaaaggcagtcttctgcagtagcacactgctgtttcaattcacagccacaggtgatctgcaatcaagatcagttattgacatatggctattaaggctttgaagtaaatctgtattttacttcaagtaaaaataataataactctagtgaggccacttagaattaatcaagagtgtccaattcattttacatattgttcacattaaaaagacaaagcttgstcgggcgcggtggctcacgcctgtaatcccagcactttgggaggccaaggcgggcggatcatgaggtcaggagatcgagaccattctggttaacaatggtgaaaccccgtctctactaaaaatacaaaaaattagccaggcgtgctggcaggtgcctgtggtcccagctactcgggagggtgaggcaggagaatggcg

SEQ ID NO: 740159 - DNA, 522 bp, Homo sapiens
aaagtaaaacaaaaactattaatagatgtggtggtacctgagacgcatgtcaaaaggacatgcggcaatataccttgcaggactgggctgcttcttagaattttaaaaggcagtcttctgcagtagcacactgctgtttcaattcacagccacaggtgatctgcaatcaagatcagttattgacatatggctattaaggctttgaagtaaatctgtattttacttcaagtaaaaataataataactctagtgaggccacttagaattaatcaagagtgtccaattcattttacatattgttcacattaaaaagacaaagcttgctcgggcgcrgtggctcacgcctgtaatcccagcactttgggaggccaaggcgggcggatcatgaggtcaggagatcgagaccattctggttaacaatggtgaaaccccgtctctactaaaaatacaaaaaattagccaggcgtgctggcaggtgcctgtggtcccagctactcgggagggtgaggcaggagaatggcg

SEQ ID NO: 740160 - DNA, 494 bp, Homo sapiens
atgtatacatgtgccatgctggtgtgctgcacccattaacttgtcatttagcattaggtcaactgggtaatccttaagatctaaatacaagactttgaaaaatgttttcccttttatacaggaagccaactttgcccctggtaggctgtctaaatctgctccacagggagtgaagaaattcttctacaactttatcctgaactgattctttattgaaagaggagtacctgtggatttaaaaatcttttaaattctctcaaaaaggaagcctatgygtctgtgattaattgtatcactcatatatgccatttcttacttccacagaaccacgtatctaacttcctaacaaatttcaacaccacagggcatgtcctgtgacttgataccaagcacgacctatagcttaaaattggaacacacaattatgaattaggccaatgagtaaccagaaagtgttcctggaaggaaagctaagaaaccttcctaactccatg

SEQ ID NO: 740161 - DNA, 594 bp, Homo sapiens
ctatttcatagggctaatctgagacttaaatgaaatttgaaagtgcttaggaagtatttattaaatgatgcattctcaacagagagtatattacctcccaagaggtgaaaattggttcttgggaagtgaaaaatattagacattaaaatcatttgtggttgaccaaagctcaactctattcaacaaaattttatycttcactataccattttttattaatgataaatttaaattttttctttttaaaaggacaataatgaaataaaggttgaaaattattaccaagaaaactccaatatgctacatagcctgtgaagaaaatatatggcctcaaatacttacattgttaattttaaaaaaagaaaatctaagcattacattcaatagattagaacaggcaaacaaaacaatcccataagaaaaagcaataaaataataagtgtaaaaccagaaattaatgaattttaaaaaccaaaaaatgagcagaactaataaggtcaggttaaaacagtaaaaaaaaacacatacaaactgactcaaaaaaacatgcaagttacaaaacaacacacagagtatattctacacatcttacac

SEQ ID NO: 740162 - DNA, 594 bp, Homo sapiens
ctatttcatagggctaatctgagacttaaatgaaatttgaaagtgcttaggaagtatttattaaatgatgcattctcaacagagagtatattacctcccaagaggtgaaaattggttcttgggaagtgaaaaatattagacattaaaatcatttgtggttgaccaaagctcaactctattcaacaaaattttatccttcactataccattttttattaatgataaatttaaattttttctttttaaaaggacaataatgaaataaaggttgaaaattattaccaagaaaactccaatatgctacatagcctgtgaagaaaatatatggcctcaaatacttacattgttaatttwaaaaaaagaaaatctaagcattacattcaatagattagaacaggcaaacaaaacaatcccataagaaaaagcaataaaataataagtgtaaaaccagaaattaatgaattttaaaaaccaaaaaatgagcagaactaataaggtcaggttaaaacagtaaaaaaaaacacatacaaactgactcaaaaaaacatgcaagttacaaaacaacacacagagtatattctacacatcttacac

SEQ ID NO: 740163 - DNA, 623 bp, Homo sapiens
taaaagagaggaaatgtctagctcatttgagtcatttattagatgtcattatgtaccacacacaatgctacgtgattccacaaacctttcataattctttaaactaacccatatagtacatgtgtgtagttattacctttamatgaggaaactcaggctcacaatggtggtcacatacctaagggaacaaatatcagaggtagatataaactaaacctatatatgctggctgccccagtccaagaaaatttcctctctctcactgcattagtccattctcatgctgctgccaatcaagacatacccgagactggataatttataaaataaaaaggtttaattaacttacagtttagcatggctggggaggcctcaggaaacttacaatcatagcggaaggggaagcaaacacatccttttgcacatggcagcaggaaggtgaagtgccaagcaaagatctggtgagatctcctgagaactcactcaccatcacgaaaatagcatgaaggtaaccaaccctatgattcaattacctcccaccagctccctcccacaacacctggggagtatgggaactacaattcaaaatgagatttgggtgaggacacagccaaaacatgtca

SEQ ID NO: 740164 - DNA, 524 bp, Homo sapiens
tgatctcatcaaatattatgcagattatagtagaagctgcgtttaccatgcagatcgccattctagactgaggcattcattctctagctgctgggagtgttgcctgccgtgtagctcaaaactgagcccctccccaggaactgccctcagttgaagagaaatcccccttcccagaacatcccttacccagtgacttctatggggtgagtgtgaatgtgtaaargttcaacccccttgtcccaaagtagaatgaatttgaagagccatctcagctctagagctccctgtgcggatcagctcttgcctctgcccaaacccgtctttgactttctccccaacaactatggatcccgtgggcactttccaacaagcttcctgcatgcagatctccatttcagaatctatctagggaacctaacctaaattagcacaggccttgctccagtcattgataaaaacaaaaagggccatacatgatagatactgctggtgtcaggcttcttacgtggtccaaaaactgtaca

SEQ ID NO: 740165 - DNA, 643 bp, Homo sapiens
ttgactcatctacacaacagttgagcttctgccaccaaatctacttgatacaattcataccactctctcatgacagttattccccatttttgtccaacagctttttaagaaagtcaatactgagaattcaagtgcattgactcccctttgctttcaattatcttctaaagattatctgatttttcttttcttactacctagtgcttccctccgtgtgtgtgtatttgtgtggtattgtagatttctgagcatatttaagatcaccactagtgtctcctatgagtatatctttactgagagaatagtgatatcagaaatgcactctacacctgaaggcagaagatatttatctattaagtttagcygtaggctggtctaccttctcgtccttttcttaggataaaggaaggtatggaaataggattcccatgaggggaatactattcctctagtgtaagacatgatatagaagaccatgaaattccttataatagaatacgaacgaagtattcaattatgtttttaagtcacaagacacaaaggcaagtaaggttttgttcactaaggctgaagggttctctaaatcttaagtcctaaggattctaggcaattctgaaagatgtagcaagaatgacccacatga

SEQ ID NO: 740166 - DNA, 658 bp, Homo sapiens
caagctccgcctcccgggttcacgccattctcctgcctcagcctccccagtagctgggactacaggcgctcgccaccacgcccggctaatttgttgtatttttagtagagatgggggtttcaccgtgttagccagggtggtctcgatctcctgacctggtgatcctcccgcctcggcctcccaaagtgctgggattacaggcatgagccaccacgcccggctgaaatcacttttaaaatatagggaaatgttagataaaagtggagaatgctttaaaactgccartcaaatagaaaaccaaggtttgaagaggataaatcatgagtaaaacacccagcaataaaggcctccactgttaggttgatgttttcttaagggtttaggaaaagatgaattcatttttattctctaaaggaaaaaaataatgggttttacctgattctttttttactttaagcagtagaaggacaaacaaggaaagtcagtgtaatgacaatgaagaaaccgaatgtgtacaggaagtgtacagaaagacttttcaaattccaatgggcaatgggtgaggcaataaatattagatcaacacaaaaatggtattaacagttaacttttgtattatgtttcacagcctacaaatgttttttatgcataccatgtt

SEQ ID NO: 740167 - DNA, 658 bp, Homo sapiens
caagctccgcctcccgggttcacgccattctcctgcctcagcctccccagtagctgggactacaggcgctcgccaccacgcccggctaatttgttgtatttttagtagagatgggggtttcaccgtgttagccagggtggtctcgatctcctgacctggtgatcctcccgcctcggcctcccaaagtgctgggattacaggcatgagccaccacgcccggctgaaatcacttttaaaatatagggaaatgttagataaaagtggagaatgctttaaaactgccaatcaaatagaaaaccaaggtttgaagaggataaatcatgagtaaaacacccagcaataaaggcctccaytgttaggttgatgttttcttaagggtttaggaaaagatgaattcatttttattctctaaaggaaaaaaataatgggttttacctgattctttttttactttaagcagtagaaggacaaacaaggaaagtcagtgtaatgacaatgaagaaaccgaatgtgtacaggaagtgtacagaaagacttttcaaattccaatgggcaatgggtgaggcaataaatattagatcaacacaaaaatggtattaacagttaacttttgtattatgtttcacagcctacaaatgttttttatgcataccatgtt

SEQ ID NO: 740168 - DNA, 607 bp, Homo sapiens
ctgcttctgggaggcctcaggaagcttccaatcatggcagaaggcaaagggggaatgagatgtctcacatggtgggagcaggagcaagagcgagagggaagagaggagctacacgcttttaaacaaccagatctcatgagaactcatgaggacagtactaaggggacatggtgctaaaccacaagaaactggccccatgagccaatcacctcccatcaggctccacatccaacattggggattacaattcaacatgagatttgggcgaggacacagagccaaaccacatcaggccccatctctccagtgaaacagctcttgctgaggtcaggaatgatctcccattgttaattattttgatgagttctctgttctcacctccatgattgttaagcaacatttggcaccattaatcaacatccttaaaacacttgtaacacttggcttttaaatattaaattctgccttgyctactacttcactggatgctatttctcagtgtttatcctcactctcgcaatggattgatctgtggacttctcttatctatcaaacagactttcattggtgagctcattcagttttaggactttaaataacatctata

SEQ ID NO: 740169 - DNA, 618 bp, Homo sapiens
aaaaatgacagcatagaacttcatgtttggttccaccatgttaaaatttggaagtcattatatctatccttagcaaaaaaaaagctggacataaggacaaactgaaaatcaatgacttttcttggactctttagagaactgagtttgcagagtgaactgccaccccaaaatccgaagagaaagactcattcaaagagacaaagccagaatctgtttagctagatagaaaatgctgaagccataaacttaaacagtattattttctagggtccctgtaacaaattaccacaaactcagaggcttaaaacaatagggatttattctcccaccaaaagtataaaataaacattcatcaatccatattgatattaacaaatgagtgaataaatgggggcgaatagacaaatctgttcagaattctgaagagtgaatgtagatrctgacccctcaaggagatggagcataaccaactccccagtccttaagtgtgggctgctcagagtggtttttttccaaagagtagagtataaaaaagagaaaaaaagagtaaatctgcagaggagaaaccaaacaaacactacctctgccaggtgataaggggagtatcaacagtgatag

SEQ ID NO: 740170 - DNA, 597 bp, Homo sapiens
gtttgccagtattgtattgaggatttttgcatcaatgttcatcagggatatcggtctaaaattctctttttttttgttgtgtgtctgccaggctttggtatcaggatgatgctggcctcataaaatgagttagagaggagtccctctttttctattcatgggaatagtttcagaaggaatggtaccagctcctctttgtaccactggtagaattcgggtgtgaatctgtttggtcctcaactttttttggttggtaggctattaattattgcctcaatttcagagcctgttattggtctattcaggggttcaatttctttctggttcagtcttgagayggtatatgtgtccaggaaattatccatttcttctagatattctagtttatttgcatagaggtgtttatagtattctctgatggtagtttgtatttctgtgggatcagttgtcatatcccctttatcattttttattgcatctatttgattcttctctcttttcttcttaattagtcttgctagtactaggtctatcaattttgttgatcttttccaaaaaccggctcctggattcattgattttttgaagggttttttg

SEQ ID NO: 740171 - DNA, 631 bp, Homo sapiens
agaagtgcaagcctctgtgttcactgagtgttcatctaaattacatctagtctgcattttcatgacatcaaaaatgacttacttgtttttcactacagcatattacctcctggtgttttcaccaggtgtttttagatgtcactgttactgttactatcatttttgagtggctgtttttcaaatcatgaaggtagttgtaagataactaccttataagccataggcatttgcatttatttcaatctttttggctacctaggaaaaacaatactttagtccaaagagctttgaagtcgatagacttaaatagaaatctagacrttgtcactaaccagctatgaacgaacattgggcaatttccttaacctgagcctttaccctgagactgttaagtacaaaatctttgacaaaaattctgggagaaaaaaaaaactccatagattataaataaaattaaggccaagtattaaaaaaaagaaaattctggaagaacatagcatggttgtggccccaggacatttcttagaaatcgtacattttgagtagtgggaagatgaaagtaaaaataagcctttttaacagatttgccactgaaattatcaatagtcaggtactttgtagaacaagttta

SEQ ID NO: 740172 - DNA, 647 bp, Homo sapiens
aagattttagatggtattcaaattaatattttctatttagttatatatttaatgtataatataaaaatatgattagcatattgacctgtagtttgatagatgttctgtctaggataaagctaactgtaaaaaaaaatagtgaatcagtttaaagaaaaacataacgtaaaagtgggcacagatccagagaggtagcaaaaatcacaggggtggttccatkaatggctgacacttaggaaactctgaattaggccatcctcgagactagcccaccattcacctctgttcatcccccgtgggctcataatcgttttcatttcacctgtgatttggaaggaagaagtttcttgcccaaatgcctggatgtgtctgcttgactttcagaacttctcacctcagccctaaagagggagcctgtgggttctcagagagatatcacaatttgagtcccaaagaagaggccagatacccacccaccttcccccaaatcttaagcacctgcgccagtacagtcaagaagaggaaagtgtgtgaagacccaggtctggctctgccacttgcctggccatgtcaccttgaagctgtgacctgactccctatattgtttcctcagttgtagaccaaaggcaatggtgtctgccctccta

SEQ ID NO: 740173 - DNA, 647 bp, Homo sapiens
aagattttagatggtattcaaattaatattttctatttagttatatatttaatgtataatataaaaatatgattagcatattgacctgtagtttgatagatgttctgtctaggataaagctaactgtaaaaaaaaatagtgaatcagtttaaagaaaaacataacgtaaaagtgggcacagatccagagaggtagcaaaaatcacaggggtggttccatgaatggctgacacttaggaaactctgaattaggccatcctcgagactagcccaccattcacctctgttcatcccccgtgggctcataatcgttttcatttcacctktgatttggaaggaagaagtttcttgcccaaatgcctggatgtgtctgcttgactttcagaacttctcacctcagccctaaagagggagcctgtgggttctcagagagatatcacaatttgagtcccaaagaagaggccagatacccacccaccttcccccaaatcttaagcacctgcgccagtacagtcaagaagaggaaagtgtgtgaagacccaggtctggctctgccacttgcctggccatgtcaccttgaagctgtgacctgactccctatattgtttcctcagttgtagaccaaaggcaatggtgtctgccctccta

SEQ ID NO: 740174 - DNA, 530 bp, Homo sapiens
ggatgtctgccttctgaatgtgtttctggggcctcttgggctgctggcggtaggtggactcggcctcccgacagttgtaggccctgttgtccttcttttctgtccggcagatggacatgaacaaagccaggatcaacccgaagatgcccarcagtacagccaggcagatcaccgtcagcatcgacatgctcaaggccccaggcttgcgggctgagtccctcaggtggtccacactggtgacaaacatgaccctcaacagggctcgggtctgtaagggggggcttccctggtcctctactactatctccagctcccactcactcccaatgaggctgctggcattggtgacattgacgaacagctgccccgtatgagggttgaggatgaagaggtgggcttcatttccattgcggatgctgtagaggggctctccatttgcccccgagtctgcatctcttgccacaatggttgtcaaaaggaatggccgggagctgtgagtggccagtggaggtgtgtcagtgcccgctggg

SEQ ID NO: 740175 - DNA, 530 bp, Homo sapiens
ggatgtctgccttctgaatgtgtttctggggcctcttgggctgctggcggtaggtggactcggcctcccgacagttgtaggccctgttgtccttcttttctgtccggcagatggacatgaacaaagccaggatcaacccgaagatgcccaacagtacagccaggcagatcaccgtcagcatcgacatgctcaargccccaggcttgcgggctgagtccctcaggtggtccacactggtgacaaacatgaccctcaacagggctcgggtctgtaagggggggcttccctggtcctctactactatctccagctcccactcactcccaatgaggctgctggcattggtgacattgacgaacagctgccccgtatgagggttgaggatgaagaggtgggcttcatttccattgcggatgctgtagaggggctctccatttgcccccgagtctgcatctcttgccacaatggttgtcaaaaggaatggccgggagctgtgagtggccagtggaggtgtgtcagtgcccgctggg

SEQ ID NO: 740176 - DNA, 553 bp, Homo sapiens
tggttcaatttactcctaatgtagcatatatagtacaaatttaaggagcaaaatgaactagcattgtttgaacataaacacgagtcactcaaggtgaaataatttattgctaaaaccatgaattgttaatttatgagctcatgatttttttaaaaagtgatcagcgttggactaaaactgtcttttctaaccagtatgaccttgaaattcacagggcaaaaaaatgactttaagttgtaattaataaaaaccaattatacaatgaattatcgtgaattcaaaaggaaataattatgaggctttaaraagttcaattggttcttagaatataacaaaaaaagcttgaaaacatttgaaaaagttctatctacttgcttcattatttataagtgagaaaaactgtcagtaacctaaatatctttttatatggtatgcttaaaatgtcattaaatgctgcactcaaaagaatatgaaatattaataacatggaaaattattacaatagaattctaactataaaaaataagtaatcaggtgtttttccctcaaagga

SEQ ID NO: 740177 - DNA, 542 bp, Homo sapiens
cagtatttgttcaatttaagaaatgaggttggatttagagattcttcttagagattcaaattatgaactgggaaatatttgtgctgtaaacttatttgcagtacttagtacacaaaagcacttaaaggctgaaaagagtttttagatgttttgttaggatttagagaaagccttttaaagaaatcagataaactttttagacattaatttgataggagggaaaaaatgcttaactatagcatgattttcttttgagtgaaacactcatgaaataagaaagcccccttgccccactgagtttctccattagaatacaagtatttatcttacttccagtgaaaatgtgctcatgtcatggtgtctatcatgtaggaatttggcagtaataccagtrttactggcgagaaattaatactcacagcaattccagatcaaggcaataaaactgaaatttaaatattgtaactctaatgtgaatatcaataaatgttttacacataacaaatatttgcatgaaaatattggcagctgggtgtggtggt

SEQ ID NO: 740178 - DNA, 641 bp, Homo sapiens
agaagtcctttgctgagtccgtatgtagcctccactctttccaccatggtcacttgttcttggmctattgaggaagaccggtgtgactgatgaaaaaggataacttctccacagccttgtaattttgttcacctggttattgacaagcccatctgtagtggatgcctttggtgtacatttacaagggacaaaaataatttttacatactgctcattctcagtggtccatccacatagctcttccctagatgttcttgtatgctctgttcctatactattttcttccaagtccttaaccatccatccacattgagtgttaacctttaccccatgattcagtgtaaagccataattctggccatttctcagtgtaggtaaagaggacaagcaaatgtactagttacagttctgttgggatgatttcacatttgagggatgctcattattggagatgtcatgctgtagaagtccacttttgcttggtaccagacattatacaaaccttctctaaaccgggcccaagtttcctttccaggcacctggtcttaaggaaatctttgtgaagccacaggtgtggttgtatgctaggagtaggtgttagagatacctgagacatctgctcttgcaatttcttgtgcctt

SEQ ID NO: 740179 - DNA, 641 bp, Homo sapiens
agaagtcctttgctgagtccgtatgtagcctccactctttccaccatggtcacttgttcttggactattgaggaagaccggtgtgactgatgaaaaaggataacttctccacagccttgtaattttgttcacctggttattgacaagcccatctgtagtggatgcctttggtgtacatttacaagggacaaaaataatttttacatactgctcattctcagtggtccatccrcatagctcttccctagatgttcttgtatgctctgttcctatactattttcttccaagtccttaaccatccatccacattgagtgttaacctttaccccatgattcagtgtaaagccataattctggccatttctcagtgtaggtaaagaggacaagcaaatgtactagttacagttctgttgggatgatttcacatttgagggatgctcattattggagatgtcatgctgtagaagtccacttttgcttggtaccagacattatacaaaccttctctaaaccgggcccaagtttcctttccaggcacctggtcttaaggaaatctttgtgaagccacaggtgtggttgtatgctaggagtaggtgttagagatacctgagacatctgctcttgcaatttcttgtgcctt

SEQ ID NO: 740180 - DNA, 641 bp, Homo sapiens
agaagtcctttgctgagtccgtatgtagcctccactctttccaccatggtcacttgttcttggactattgaggaagaccggtgtgactgatgaaaaaggataacttctccacagccttgtaattttgttcacctggttattgacaagcccatctgtagtggatgcctttggtgtacatttacaagggacaaaaataatttttacatactgctcattctcagtggtccatccacatagctcttccctagatgttcttgtatgctctgttcctatactattttcttccaagtccttaaccatccatccacattgagtgttaacctttaccccatgattcagtgtaaagccataattctggccatttctcagtgtaggtaaagaggacaagcaaatgtactagttacagttctgttgggatgatttcacatttsagggatgctcattattggagatgtcatgctgtagaagtccacttttgcttggtaccagacattatacaaaccttctctaaaccgggcccaagtttcctttccaggcacctggtcttaaggaaatctttgtgaagccacaggtgtggttgtatgctaggagtaggtgttagagatacctgagacatctgctcttgcaatttcttgtgcctt

SEQ ID NO: 740181 - DNA, 624 bp, Homo sapiens
cagccacatttgaaaagctcctattgtgcaattcctgctctcttcgctggcacctaaacccagtcgccaggcctgttgatttttccctccagtatctcttgcattcatatgctcttctcccttcattctcccccaccctgtcactttcttttatttacaaatgttytctgagtgcctactgcatgctaggtaaggcgccaaaatggtctggagataaagtgtgagcacagcaggagacagagggagatagccattcttgagcagtagttggcaaacctttgctgtaaatgattaggcaataaatattttgagctttgtgggccattaggtctctgttgcacctcttggactctgccacagacaatgtgtaaaacaatagtggacgtgtgttctaataaatgcttaggcagtgactcagatttggcccatgtgttgtagttttccaaccctgttctagagggtgagggaggccgttaacaaatacacaatgtgtgtatgtgtttgtcaagttataactgctacgaagagaatggaaagctaggtatctttttgtgtgtggtggcggggggtgttcttttttatatacgctggtagaggaagcctcccccatctccagacagtggg

SEQ ID NO: 740182 - DNA, 624 bp, Homo sapiens
aaagggaaataacaaagatgagagcaaaactaaatgaaactgaaacaaacaaacaaaaaatacaaaagataaatgaaacaaaaagctggttcttcaaaaagataaatcagattgatagaccactggcaagattaaccaagaaaagaagagagaaaatccaaataacctcactaagaaatgaaacaggagatattacaactgacaccactgaaatacagaagatcattcaaggctaccatgaacaactttacacacataaacttgaaaacctagaagagatgtataaattcctggaaaaatacaaccctcccaggttaaatcaggaagaattagataccctaaacagaccaatgacaagcagtgggatagaaatggtaatttaaaaattaccaacagaaaaaagtccaggaccagacagattcacagcagaattctacmagacattcaaagaattagtactaatccttttgaccctatcttacaagatagagaagaaagaaccctccctaattcattctatgaagctatcatcaccataataccaaaaccaggaaaggacataaccaaaacagaaaactataaccaaaaaagaaaactacagaccgatatccttgatgaacaaag

SEQ ID NO: 740183 - DNA, 442 bp, Homo sapiens
cagaatccagaaaataaggaagctgggactacaggtacagatgtggagtttcagcattctagtggtggttgaggcaatgtgagtagatgcacaaatggaacatgatactatttctcctacagacagatctgacaaatatatatgaatatcaaatcaccactgctctcccacttctaacaaccactcatacccctcggagaacctgtgcaaccttaggcaggggtggcagagattcgatatcccaaactgaaattcaraaataaatgtatttgcaaataatatatcatacatactaatagctatcatttattgagcaccttttatcctatgtacctaaaattctttcctcaaattctcacagtcatcctatgaggcagatatcatgcccctcagcttacagataaggaaactggggctggcaaaaaaaaaaaaaatcacttgt

SEQ ID NO: 740184 - DNA, 655 bp, Homo sapiens
aatttgctgtatttctgttttttttttttttttttatggtaaaccaatcctccagaatgctgtttggatggatgaaaaacatgacaaatcatgaacaaacaaacaaatataaattcatgttttattatatttatctatatataaaagaaataggtgtcagttaattgtttaaccattatacattgatgttttaatgtatgaatcctgaacttgaaagacaastctaatactagcaatttgatctaaaataaaaaattcctactgttttcattgtaaagacaagtatagggtgattttaaaataactattccaatttcaaagtaccttatttgcagaaataacaaagattttaaaataatacatgaaaccatcgagcaaagttgtaatgaagttcttgaagatgacaaacttgcttttgctcagtggcaacacattctgagtttcatagaagtgatttgttgggcagccactgggttgtaattgaaatctccatgtaatcaggattataggacataattttgtctcttacaaagtaagaaataaaataattggcctagttctggtcatgaacatggggactctattctgcagttgggtggagtgtcctacaaatgtcaattaggtcattgacatgctaataatatcattgagatct

SEQ ID NO: 740185 - DNA, 607 bp, Homo sapiens
ataggttgtgttgttagccagagagagcctggaatactggatttttttcttaaatttgtgtgcaataactttagtgctccaaccacatatcacagccttgcagacatggtgtgcttcctcagagtgctgtggcttctcctcttgcattctctcttctctgctaacccagaaaacccgcactgctgagaagaaatgatggcacacaacagtttcttcctctgctccatgctgggtatgtttgctctggcaccatgtggtatggttcctgactatgtgcagagcagggagtagagtccagagaatgagtgggggatgggaaggctgcagggcgcagctgaaggtggaatytgaaaggaatgggaactcagccaccatgctctttattcccaattcaggccctgttttaataaggacattttatggtgaagatcttaaagcaaactgactttcaaaagaaaaggagaagatggagaaagaaaggtaggaagagatcaaatatttctcctgattaagttccttttattctagagccatagtcttcaaagtgtagttaatgaaacactcaatagcacatttttattaataacccaacattatgcttcattaa

SEQ ID NO: 740186 - DNA, 607 bp, Homo sapiens
ataggttgtgttgttagccagagagagcctggaatactggatttttttcttaaatttgtgtgcaataactttagtgctccaaccacatatcacagccttgcagacatggtgtgcttcctcagagtgctgtggcttctcctcttgcattctctcttctctgctaacccagaaaacccgcactgctgagaagaaatgatggcacacaacagtttcttcctctgctccatgctgggtatgtttgctctggcaccatgtggtatggttcctgactatgtgcagagcagggagtagagtccagagaatgagtgggggatgggaaggctgcagggcgcagctgaaggtggaatctgaaaggaatgggaactcagccaccatgctctttattcccaattcaggccctgttttaataaggacattttatggtgaagatyttaaagcaaactgactttcaaaagaaaaggagaagatggagaaagaaaggtaggaagagatcaaatatttctcctgattaagttccttttattctagagccatagtcttcaaagtgtagttaatgaaacactcaatagcacatttttattaataacccaacattatgcttcattaa

SEQ ID NO: 740187 - DNA, 635 bp, Homo sapiens
cttttcccattgcttgttattgtcaactttgatgaggagtagatggttgtggtgtgcagctttatttttgggttctccaacctcttccattggtctttgtgtttgtttttgtaccagtaccatgttgttttggttactatatctttgttgtatagtttgaagtcaggtagtgtgatgtccccagctttgttctttttgcttacaatttttttgcctatttgggcacttttttggttccatatgaattttaggatagtttttttctaattctttgaaaaatracattggtattttgataagaataacaaatctctaaattgctttgatctgtatggtcattttaacagtgttgattcttcctagccatgagcctgaaatgttttttccatttgttcatgctgtttcttaatcctttcagcagtgttttagttttcttattgtagaactctttcacctctctggttagctgtattcctagatattctattctttttgtagctattgtggatgggattgtgttcttgatttgactcttagcttggacattgttggtatataaaaatgctaccgatttttgtacactgattttatatcctgaaactttgctgaattgtttgtcagttcttggagccttt

SEQ ID NO: 740188 - DNA, 651 bp, Homo sapiens
acatatgatggaatctggtccacctctagaaaactaggctcataacaaagaggggagttacctgatctattgaataaatgggaggtaggcttatattactgaccaagttaacgaacatttctaaggggtagttagtcttcaaaaaatttttgtgtgtattcatttttttaatcaaataaggctattagatgctatgcttgttcaagattccatatagcttttactcctaacatgtgaccttctggatgaaaattgcttgaaactctggtgtccatctcagcattttcttaagaaatggttgctactttgttctytgttgctaggaactcaagaatatagacgctcaggaatgaaatatggcatttgttggtaactctattgtaacatcattagatagactatctcggagaaaaacaaaaaggaatattattttaagagattacaatagattttgtaataaaggttactaaaagggatattgtaagaattatttcaaaagtcataaaatagatattagaaaatttgtgaattacagaaagccttataaaaattgtaatagtaaaaattatcatttgtgaagtacttgccacaatatgagaactaagcccttctatatattattgattcatttctcccaagccgcatgaaata

SEQ ID NO: 740189 - DNA, 581 bp, Homo sapiens
ttttagatttgtcgatgttttagatttttatttgacatctacaagagcaaagctggagatataaaatttggaagtcaatagcatatttgttctttaaggtcttgtgacttgatgagattacataggagcagactctaatagagagctaatgaggtcacaatactgaaccctcgtgtctttctgacatttggaggtyggtaaaagaggattcattaagtgggagaaaaaccagaagacaacttgactttagagctggataagtaaaaattaaaataatattgatagttatagtaataaggatgagtataacacaaggtggggaactgtcttcgtttgggaaactccttgatagttatgttaaatctgtctcttagagtacagatttgaacaaaataaaaaaaaagattgctaatctgctattcataaaagataagcaggaatttggaggacagggagaattttagtgagggtattgggaataagggcagagtgaatgactaaacaacacagtagggtggctgaagaacttctagattttaagttattttaatagctagaagtcaattcatctgtttccccaa

SEQ ID NO: 740190 - DNA, 570 bp, Homo sapiens
gccaccatttgtttttttaagcagcattcactttctccatttattcatattctttcatttgtttacatatttgtttatttattccatcagtcattttaagaggagtttactgggagacttgtgtattctttcttctttgtagggtctgtggtaacccaaagtcacatggatgaagcctctgcwtcatgtgagtgtcctagggagacaggtttgtaatacattgtttttgtagtgagtacgtggagatagttgtagagacaaagtgctgtgggaccacgaaagagtgacagcagttttactaaggacagcagttggtgaggttcttataattggtccctgaccattcagcttgtcttgccatccaagatccccttggctaaattccaggtgagtctgttttctctttttctatctccacttgttttccttcttaccatcctttctctaggctttacatctcctttctcattcattgaagacttgagttaaccatttttttccttctaatttgtggggaaaggtgccattttccttggccttctgtgttgtgtgttgacctaaacatcaggg

SEQ ID NO: 740191 - DNA, 383 bp, Homo sapiens
ccgagcaaaaaatgtcctcttctccctctcatgggtgcatatattctaagctttggaatcttgctctttagtgaaacagatgctgcagtgcgttgagtggtggcttgccggaatgtttgttcatatcctgactcctgaaacctgtgaatgggaccttgttcttgaaaagagtctttgtcaatgtattaataattaatgtaactaataatgaagtaattattaattactcagtgtaattaaggwtctctagatgagattatcctgaattatttaagtggatactaagttcaatgacaggtaggtgtccttgtaagagacagaagaggaagagacacagacaaaagacaaaagaggggaaggccatgtgacaatagagacagaaa

SEQ ID NO: 740192 - DNA, 541 bp, Homo sapiens
aaacttctggtaaattattatttctggtgttttcaaatgtatgccaaacattagccatgcctggctaatttttatatgttttgtagagacaggtttaaccgtgttgcccaggcaggtctcaaactcctgggtttaagtgatcttcccaccttggcctcccaaagtgctgggagaacaggcatgaaccatcacgcccaacatagttcttttttgttaaactagttaaacacaataacgtcattaaagcaagcgcccgttaaaggctagttttcctttcatttattgtwaaagtttataagatcataatcaggcttaaaaggaattagtaacactatggcttcctcattatacaggtatggaaactgaggcacaaacatgatttgaatggcatgtccagtgtcattcttctagaagaagagtcaaactcatgcccaagcactccacctactacgtttcatgacacaaatagctaaggtctatgtgtgtcatatgtgtgtgtggtggtgatggttgtgggagaagacagtgacttgcattttta

SEQ ID NO: 740193 - DNA, 595 bp, Homo sapiens
catgttacttgcctggcacctggggacatcgagttggccagctatgcctgtctggcactcttttgtaattcagacctgtggtctcagcccctgacatgccactctcatcttgctcacgatctggtcatctggctggaaggcagtattatagttgggtgagtgactgcagcacacttagccccatccctggcatgtgatagtacctagatgttactcttttcctatcaaaggccctgggaagagccccttgccctgttctagacgttaaaatgggtgtggatcactgatgcccagtcsacaaatcctcatggcagtggctaagtggagcttgcgttccacagtctaacttttcagtctgcatcacaaatgcttgctgcgtactgtccattttgtgtgggccacgtcctgtcccagccactggggctatatggaaggttaagtcagagccctgtccctgagaagctcatagcctcatagagcagacacacattcagggttgtacttcagagaaggatctctgtggaaggaagacctgggggattacagagaggaagagcctggagggagcatcagtggtgcccaacccagggcccag

SEQ ID NO: 740194 - DNA, 542 bp, Homo sapiens
tatgtctaggcaacagcaggttgaatatttggggggaagcaagagtaggctccgagctctgtgctggctgggaagagcagtttgaggtggaccgagagccctcgctggaccgaaaccggagagtgaggggtgggaaaagccagaagcggaagcggctgaagaaggaccctgggaagaagatcaagagaaagaagaaaggttatgtggtgatcattttcatttactgggccttgtctttgttttggcttggagatgtgcgacagcctcactccagccaggcctgagctctgcccttcagcacgggtttccgccttccctcgatgtgtggcgctgactctctatgatggttgctttatttccacatccatttggcagatgagagagmctcgaatatcccgtatgcttcccctgctttctccgcctttgtatcttttagagcttctgactttaggaactcattcagttcaaatgcctagtttcatctcagctgaaaaaaatgtcagcaacagcctcatcacaactagccaagatcctaattttgg

SEQ ID NO: 740195 - DNA, 641 bp, Homo sapiens
gacaaaataaaagaataaaaaagaatgaagcatgcctacaagatctagaaaattgtttcaaatggcaaatctaagagttattggacctaaagagaaggcagagagagagatggaaagtttatttaaggaataaaacagagcacttcccaaacctaaagaaaaatatcaaaacccaagtacaagaaggttatagaacatcaaacagatttaacccaaagaagactacctaaaagcacttaataaacaaactcccaaagatcaatgataaagaaaaaaaaaatcctaaaagcaacaagagaaaagaaaaaacaacataaaatggagcttcaatacatctgacagcagacttctcagtggaaaccatacargccaggaaagagtggcataacatatttacaatgctgaaggaagaaaactttaatcctagaataatatatgcagagaaaatatccctcaaacatgaaggagaaataaggacttttctagataaacaaaagctgagggatttaatcaacaccagacctgtcatccaagaaatgataaagagaattcttcagtctgaaagacaagaacattagtgagcaatagaaaaatcatgtgaaggtagaaaactcactagaaatagtaaatacaaagaaaaa

SEQ ID NO: 740196 - DNA, 641 bp, Homo sapiens
gacaaaataaaagaataaaaaagaatgaagcatgcctacaagatctagaaaattgtttcaaatggcaaatctaagagttattggacctaaagagaaggcagagagagagatggaaagtttatttaaggaataaaacagagcacttcccaaacctaaagaaaaatatcaaaacccaagtacaagaaggttatagaacatcaaacagatttaacccaaagaagactacctaaaagcacttaataaacaaactcccaaagatcaatgataaagaaaaaaaaaatcctaaaagcaacaagagaaaagaaaaaacaacataaaatggagcttcaatacatctgacagcagacttctcagtggaaaccatacaggccaggaaagagtggcataacatatttacaatgctgaaggaagaaaactttaatcctagaataatrtatgcagagaaaatatccctcaaacatgaaggagaaataaggacttttctagataaacaaaagctgagggatttaatcaacaccagacctgtcatccaagaaatgataaagagaattcttcagtctgaaagacaagaacattagtgagcaatagaaaaatcatgtgaaggtagaaaactcactagaaatagtaaatacaaagaaaaa

SEQ ID NO: 740197 - DNA, 574 bp, Homo sapiens
acatacatttatgaattaatttagataatatcaaaattattaaaatattcaatattatgagacaagtaatacttttttcatgtattcctattttaaaaatacttctaaacataatacgtgtatttttgttcacacaggtatttaacatttcttatactgtttattcctaggatattcatatttttattgaattcaattggctcattgtatctcattttctaaccagaatgttaaaataatgaaaggaagccagccaggtgcactgcatcagagcacaggctctgaaaccagatgtccmgggtctagggcataaatcctggcttgctcacttagtcagtatggacacatcactcagccgctccaagcctcagtgtcctcatcagtaaaatggagacaatgataatgacaataatagcacttacttcataactgctatgaggattaaatgagtgaatatttaaataatcttaaaacggtcttttaagatttaaaaaatcttaaaacagtccttgaaacttattagtgctatatatgcagggttttattttaaataaaataaataacttatagaaat

SEQ ID NO: 740198 - DNA, 513 bp, Homo sapiens
caagattggttcaacatgaaaatcaataaatgtgattcaccacataaacacaataaaaaacaaagaccatatgatcatcttaataaatgcggaaaaagccttcaataaaatccaacattcttttatgataaaaaccctcaacagactaagcatcagggaracatatctcaaaataataagagacatctatgacaaacccacagccaatgtcgtactgaacagaaaaaagctggaattattcccctagaaaattgctacaagacagagatacccactcctacttctcttattcaaaacagtactggaagtcctagccagtgtgatcaggcaagagacagaagtaaaaggcatccaaataggaaaagaagaagttgaactctctctttttgctgatgatatgattctatacatagaaaaccccatagactccaacaaaaggctcctggaacttatgaaggaattcagtaaaggttcaagatgcaaattaatgtacaaaatcagtagcttttcaat

SEQ ID NO: 740199 - DNA, 513 bp, Homo sapiens
caagattggttcaacatgaaaatcaataaatgtgattcaccacataaacacaataaaaaacaaagaccatatgatcatcttaataaatgcggaaaaagccttcaataaaatccaacattcttttatgataaaaaccctcaacagactaagcatcagggaaacatatctcaaaataataagagacatctatgacaaacccacagccaatgtygtactgaacagaaaaaagctggaattattcccctagaaaattgctacaagacagagatacccactcctacttctcttattcaaaacagtactggaagtcctagccagtgtgatcaggcaagagacagaagtaaaaggcatccaaataggaaaagaagaagttgaactctctctttttgctgatgatatgattctatacatagaaaaccccatagactccaacaaaaggctcctggaacttatgaaggaattcagtaaaggttcaagatgcaaattaatgtacaaaatcagtagcttttcaat

SEQ ID NO: 740200 - DNA, 525 bp, Homo sapiens
acacatcgacgtagtgcagctgggaagatggcattttgctgcctggtgatctcactccatatttccaccatgttaaaggaaggttttctgcattgtgtgagtcatctcatgaagggttttaacaccagttcttaaatctcctgcatgtatttcattatatacttagaagttaaggtgcttattaaagacacagcttcgtattttccctggctatwtctccttcactaataaaccagattttggagcttgaaatgttaacaagtaaacgttcagtgttttaattcagatatcaattgctttcatattgcgctgtggtttaaaatctcatatggttacaatcactgtgcaatgaaatgtcatgatctttcgagtcccctgggatcctcgccattgtgataagtgtgttgtgttaatggccagggctttgcctggctgaggtctttgtcagcagggaacaaacagtgatgctcctatggctgctcccatgaagactgctgcgagcacccgggtatgttctctttcaga

SEQ ID NO: 740201 - DNA, 525 bp, Homo sapiens
acacatcgacgtagtgcagctgggaagatggcattttgctgcctggtgatctcactccatatttccaccatgttaaaggaaggttttctgcattgtgtgagtcatctcatgaagggttttaacaccagttcttaaatctcctgcatgtatttcattatatacttagaagttaaggtgcttattaaagacacagcttcgtattttccctggctatatctccttcactaataaaccagattttggagcttgaaatgttaacaagtaaacgttcagtgttttaattcagatatcaattgctttcatattgcgctgtggtttaaaatctcatatggttacaatcactgtgcaatgaaatgtyatgatctttcgagtcccctgggatcctcgccattgtgataagtgtgttgtgttaatggccagggctttgcctggctgaggtctttgtcagcagggaacaaacagtgatgctcctatggctgctcccatgaagactgctgcgagcacccgggtatgttctctttcaga

SEQ ID NO: 740202 - DNA, 525 bp, Homo sapiens
acacatcgacgtagtgcagctgggaagatggcattttgctgcctggtgatctcactccatatttccaccatgttaaaggaaggttttctgcattgtgtgagtcatctcatgaagggttttaacaccagttcttaaatctcctgcatgtatttcattatatacttagaagttaaggtgcttattaaagacacagcttcgtattttccctggctatatctccttcactaataaaccagattttggagcttgaaatgttaacaagtaaacgttcagtgttttaattcagatatcaattgctttcatattgcgctgtggtttaaaatctcatatggttacaatcactgtgcaatgaaatgtcatgatctttygagtcccctgggatcctcgccattgtgataagtgtgttgtgttaatggccagggctttgcctggctgaggtctttgtcagcagggaacaaacagtgatgctcctatggctgctcccatgaagactgctgcgagcacccgggtatgttctctttcaga

SEQ ID NO: 740203 - DNA, 501 bp, Homo sapiens
gttcaagcgattctgctgcctcagcctcccaaattgctgggattacaggcgcctgccaccatgtccagctaattttttgtatttttagtagagatggggttttgccatgttggccaggctggtctcgaactcctgacctcaggcgatccacccacctcagcctcccaaagtgctaggagctaggattacaggtgtgagccaccgcacccagcsatgaagcctcttttataggggccttaatcccattaatgaagaaggagcctacatctcctaatcatctcttaaaggccctacctcttagtatgaacgacacttgaattttggaggtttacatattcaaaccatagcaccagttggctggtatataatcctggaatacttcatggaactagcaaatctttcaggatgacttcctaacactccaaaattttcttgaaataggactggatacaaaattttaccaatgctacaatgcataacaaatatatctataaaatggcc

SEQ ID NO: 740204 - DNA, 571 bp, Homo sapiens
gaatcagactgagaggcctcaggaaacttacagtcatggcagaagcaaaggggaagcaagcaagtctcatcacagtggagcaggagagagcgagagcgagggggaaagtgccacatttttaaaccatcagatctcgtgagaactcacgcactatcgtgagaacagcatggaggactggaaatctgcccccatgatccaatcacctccyaccagatgccccccctgacatatggggattacaatttgacatgagatttgggtgaggaacagagccaaaccgtatcaccaatgcatcagagacttggagaaggaggcaggacagactgaaggtcattagtgaaggcaaagggtatgttaggtagcgctcggacagtcaatcacgtccccctgcttggaagtgagaagaggagaggctgtgatcctttccaaccagcctccccctcttcccactttacttttggaagcaaagtggaaaacagcattggatccagagactgagagacaacccaacagatgactggaggtcaaatccaaccacatttttaccagttgtgtgaccttaggcacatca

SEQ ID NO: 740205 - DNA, 587 bp, Homo sapiens
agattctccctgataggcctcagaaggattccttgatcttggacttttagtctccagctagctagttttcccagcaaaatttatcacatagagaatcctttccccattgcttgtttgtatcgggtttgtcgaaaatcagatagttgtagatgtgtggtgtttattccgaggtctcatgaaacttttcataaagcattaatgatgtcaccactcttccacccaagcttcaccataaatatggtgtttgttctcgctttaattkttagcagaattcatgttgttctgatagaagctcttttcaaactgatatcttatccctgttaatgcctcaaactacatcctattgagacatgctctaacaagttagtatgagtttattttggtgccaaaattttttgaaatctatgcaaagttttttcataatatgcattttccatgaactttctgaagaccccttgtacagataatgtaagagccccatgcatattaaataaacataggtaacaatcatgattaaaccctatatgctatcaatgagtgatacaaggaacataatttagattaggaggtcaaataaaacctctccg

SEQ ID NO: 740206 - DNA, 562 bp, Homo sapiens
tgtctcaaaaaaagaaaaaagaaaaagggagacctaaaaacatttttaaatgacatcctagaaagtcaaagtctaaaatatctaatataagaacataaaaatctaggtcatttttcaaagtcaaattcaaaacaaaacctttgatcaagtccaggagtttgagaccagcttgggcaacataagtgagactccatctccacaagaaaatctgtaccccaactacttgcagggmtgagaggatcacttgggcccaggagttcaaggatgcagagagctatgatcgtgccaatgcactccagcctgggcgaaaaagcgagaccctgtctctaaaaaaaataaataaataaatattaattaaaaacaaagacaaaatgaagcctttggcatcaacataattcaatgcatataaaagtcttttctataaacagtgtggaaacaactggtaaacgtacaaagaaaaaggaacctcaatccctgcctcatatcatgatgccccaaagttaaatccaactatttaatatattaaaattaaaagctaaaactatagaactaaaataaaata

SEQ ID NO: 740207 - DNA, 590 bp, Homo sapiens
tgttttaaagtgattatacaaattgctcttttgaggatgtactgaagggtgccttacgcagaatcagaaacacctgtttgctggccatttcaataacctgggcaataaatgatggtggttagcaccaggatgctagtggtgaaagtagcaaaaatgatcagaattgagctgcattttgaacatacagttaataagttctgtggcatgacagaaaaatgattccataatatttstattgagcaaccttgttgatgtgatattcaaactaagtcctaatattaaacaatgtaggaatttcaatgaaaatatgaccaaagggagaaaatggctcccaacctactgtaattaaagttcccttctgttgttttaaaatgctactatggatagagaaaacaagatatggatttggaagaaaattacccacagtctaattgtcagatttattgacttaaagatgttacatggcaataaagttgaaagaaaaataagaagaaattctaaaagccagcatgttagatttattccctccacaaaaagaattgctaatatttataaagtgagataatatgccaaatacttgtacttggcat

SEQ ID NO: 740208 - DNA, 590 bp, Homo sapiens
tgttttaaagtgattatacaaattgctcttttgaggatgtactgaagggtgccttacgcagaatcagaaacacctgtttgctggccatttcaataacctgggcaataaatgatggtggttagcaccaggatgctagtggtgaaagtagcaaaaatgatcagaattgagctgcattttgaacatacagttaataagttctgtggcatgacagaaaaatgattccataatatttctattgagcaaccttgttgatgtgatattcaaactaagtcctaatattaaacaatgtaggaatttcaatgaaaatatgaccaaagggagaaaatggctcccaacctactgtaattaaagttcccttctgttgttttaaaatgctactatggatagagaaaacaagatatggatttggaaraaaattacccacagtctaattgtcagatttattgacttaaagatgttacatggcaataaagttgaaagaaaaataagaagaaattctaaaagccagcatgttagatttattccctccacaaaaagaattgctaatatttataaagtgagataatatgccaaatacttgtacttggcat

SEQ ID NO: 740209 - DNA, 446 bp, Homo sapiens
tggaagaaaattacccacagtctaattgtcagatttattgacttaaagatgttacatggcaataaagttgaaagaaaaataagaagaaattctaaaagccagcatgttagatttattccctccacaaaaagaattgctaatatttataaagtgagataatatgccaaatacttgtacttggcataattgcattttctcaacaaatcctatataatcaacattgttttatttgtatatgtgtgaaaaatcatgacacctgcagtttaagttacatttgtatgaaacagtcaatatgtggcagagycagaataaagcccacgtttagattaaaggaattctctttccattgcacccacccgtattgcctgtggaaaccctaaacaagccatttaaatttgttggaattccgtttttcaactttttaaaacctcttaagagtccagtcc

SEQ ID NO: 740210 - DNA, 629 bp, Homo sapiens
tcccatgaaacttttgtagcttaaatacacaagaattttttgaaaaggaaataagataatgatgcaaaatagttaattttttaaaaaaatgttagacactgcagtggatgcaacaaaatactttatatgaaagatttatccagttaacttttgtggagtattaggtattagactaataattagcacacttacttaagttagaaagtataataatgcgccggacgcggtagctcacgcctgtaatcccagcactttgggaggccaaggtgggcggatcacaaggtcaggagatcgagaccatcctggctaacacggtgaaaccccatctctactgaaaatacaaaaaaatttgccgggcgtgatggygggcacctgtagtcccagctactcgggaggctgaggcaggaggatggtgtgaaccccggaggcagagcttgcagtgagtcaagatcgtgccactgcactccaacctgggcgacagaatgagactccatctcaaacaaaaaaacaaaacaaaacaaaaaaaagtgtaataataatttatcattagctggatgatatgctgttgtttcccatgtcacctgtataagatatgtaaaactaagaacacattatttacatctaatata

SEQ ID NO: 740211 - DNA, 541 bp, Homo sapiens
catgctattgttagattattttgattatacacttttgaattgaaattatactttttctaaataatgttttaatctctgatttgaaattgattgtagggaatggaaaagatgggataatttttcataaatgaaaaatgaaattctttttttttttttttttttttgagacggagtcttgctctgttgcccaggctggagtgcaatggcgtgatcttggctcacagcaagctctgcctyctggattcacgccattctcctgcctcagcctcagaggtagctgggactacaggtgcctgccaccacgcctgtctaattttttgtatttttttgtaaagacagggtttcactgtgttagccaggatggtctcaatctcctgaccccgtgatccacccgcctcggccttccaagagaaatgaaatttttttaatgcacaaagatctggggtaatgtgtaccacattgaaccttggggagatatggcttcaaacattgtcacttatatacgttagtctcctacggacatgttctatatgtattttag

SEQ ID NO: 740212 - DNA, 622 bp, Homo sapiens
gcttagagcatagactggtgggattgtcaaagaagagggcaactggaagagaactgtcagttatttttggatcagtctttaattcatcatgacgggttaggcattagttgtatttcttgctaattttgaagaagacttattaacaaatcctacattaggtaaatggttttgaaagttgagttaatcataatggtgtttgacctaggactatttttaggccctatttatcttaatatcgaataatgaagcagcttcccccttagatatagacagaaaacatcaaagccaccacactacctggctggatttatcctagtaataaaatcaaaactgagctagttctctggctttcattgtaataattgtccttgtggttgtaaggaatctagatgaaaattacatggtctgttctacagccacagctgtacctacrttcagaagacagacaaaagttgctgtgtttgaagagatccttcattaagggatcagacagagattactttgagacatattctaagtttaacttttctgcagggttgccattaacagaaataaactacagagttaatttctttttgtttttgatacagtctaactctcacccaagctggagtgcagtggc

SEQ ID NO: 740213 - DNA, 596 bp, Homo sapiens
atatatatatatatttttttttttttttgagacagggtcttgctctatcacctaggctggagtgcagtggcatgatcatagcttattgcaagcttgaacttctggactcaagtgatcctaccagcctcctgagtagctrgggactataggtgcacaccatcatacttggctaattttttatttttttagtagagacgatgtcttgctatattgcccagcctggtgctgaactcctgctctcaggcgatcctcccgcctcggccacccaaagtgctaagattacaggtgtgagtcactgtgcctggccaacaatgaagcttttgcatgcaagtctttatgtcaattccatagagttgtatatttcttcaatctttagtgttcagtgtttactaagttaaggaatgatggtgcctaagtcatttagctaaatgatgtatttaagaaagatggctgcaccattttccatgaactattaggataggctggtgagaaacagggaaatacttccaatgactacggattagcagatttccttcctgctgagctgccagatctgtaagttgcaatgtaagaccagcctaaccaaaaacaaaata

SEQ ID NO: 740214 - DNA, 522 bp, Homo sapiens
cagagatacagtcaacaaatgcaagaggctgtagaagtgtccatttccctcaacaaaaggctctggacataaacattttaatatggcctgtggacaggcaagctgttgtctgacattttccctgttctgtcttttactatgagacgtccaccaggctttcactgagtgcctactacatgccaagctttcattgtgctaagcattggagatataaaactcagccattttaacttgtaatcacggaggacttagctagataaattttaatgacttgtaaaaattaagataaatgttttggttcccttttaaatagaaagacatatcaaaagataactacagaaattctcaaaagtttccactcaaatcgwgttgtgataaaaacagaagtgtgaggggtgcataagtaagaaaagcacattcaaaaaaataattcagttaaaagaattagttatgaactactcagaatgtttaacacagagcaaaccaacatatattatgttgaaaataaactagcctcggtgc

SEQ ID NO: 740215 - DNA, 629 bp, Homo sapiens
ctccttagggtctgtaagcggcctggttccctagcccactccttcactaaatacctgtgtctgagtgcatttgttgttcagccagggtctgcaagtaggacccagcaaggaagtgtttaatttggtaaaacagaaacactatatagttctaacagtttggaattgtagattggtaactcatttaacaaaaggataatacttgaatcacttasgatgaataggagtgcttaggtggcaaaatgttggataaatgttcatcataatttaaatttaacaagtttttagttatttttcaaaaatgatttacagggttaagaatgagtagggggtttgggggaaaggtgcatgagtacaacatgaaagagatcattgtggtgatgcatcagttctatatcttgcttgtaatgatggttacacaaatctacacatgacaaaatttcatagacctacatgcatacatacatacatacacacacacacgatcgtatgtaaaattggtaaaatctgagtaaggtctatggattgcaccaatgtcaatttcctgtttttttttttaatttttgattttaatttttgtgggtacatagtaggtatatgtatttatggggtatacgagatgttttgatata

SEQ ID NO: 740216 - DNA, 510 bp, Homo sapiens
atcccagactactcaggaggctgaggtgggaagatcacttgaacacaggaggcagaggttgcagtgagccgagattgccactgcactccagcctgggagacagagcaagactccatctcaaaaaaaaaaaaaaaaaaaattaaaattttttttaaaaaagcagtttcaccccacagtatagtatttgccaaaggtatttgtttcaggctgccccgcaccttttgaaaagctttcytatgtttaagaacttcccacagtttaaattccacttccccaatactgaaatcagcacttacctcccctgttttgcaggtgactcacactttacacaactatcaaaaagagaggaacacaaataggcaggtgctgcttggaattcattttctggccaagaaggaacagagtgacccagggagcctgggctgaaggtagggtgtccactggattggtttgatggtataagttctgttacttgcatcagagaactcaggctgataacttcctacacat

SEQ ID NO: 740217 - DNA, 510 bp, Homo sapiens
atcccagactactcaggaggctgaggtgggaagatcacttgaacacaggaggcagaggttgcagtgagccgagattgccactgcactccagcctgggagacagagcaagactccatctcaaaaaaaaaaaaaaaaaaaattaaaattttttttaaaaaagcagtttcaccccacagtatagtatttgccaaaggtatttgtttcaggctgccccgcaccttttgaaaagctttcctatgtttaagaacttcccacagtttaaattccacttccccaatactgaaatcagcacttacctcccctgttttgcaggtgactcacactttacacaactatcaaaaagagaggaacacaaataggcaggtgytgcttggaattcattttctggccaagaaggaacagagtgacccagggagcctgggctgaaggtagggtgtccactggattggtttgatggtataagttctgttacttgcatcagagaactcaggctgataacttcctacacat

SEQ ID NO: 740218 - DNA, 583 bp, Homo sapiens
agcaatgagcacttacataaaaaagtagcaaaacttcaaataaacaacctaattatgcatcttaaagcagggtccccaaccccctggccatggactggtactggtccgtagcctgttaggaaccaggctgcacagcaggaggtgagtggcgggtgggcaagtgaatactaccacctgagctccgcctcctgtcagatcagtggtggcattagattctcataggagcacaaaccctactgttaactgcgcatgcaagagatctaggttgcgtgctttttatgagaatctaatgyctgatgttctgaggtggaatagtttcatcctaaaaccatcccccatcaccccctgctgtccatggaaaaatcgtcttccatgaaactggtccctggtgccaaaaaggttgggaaccactgtcgtaaagaattagaaaagcaagagcaaaccaaaccctaaaatttagaagaaaataaataatatagatcagagcagtaaataaatgaaattaaaatgaagaaaatacaaaagatcaatgaaacaaaaagttggttttttgaaaagatcaagaaaattgacaaaccattag

SEQ ID NO: 740219 - DNA, 568 bp, Homo sapiens
taaagaattagaaaagcaagagcaaaccaaaccctaaaatttagaagaaaataaataatatagatcagagcagtaaataaatgaaattaaaatgaagaaaatacaaaagatcaatgaaacaaaaagttggttttttgaaaagatcaagaaaattgacaaaccattagccagactaactaagaaaaaaagagagaagacccaaataaaatcggagatgaaaaggagacattagaatggattactgcagaaattcaaaggatcattagaggctgttacgtgcaactatatgccagtaagttggaaaacctagatgaaatggataaattcctagatacatacaacctaccaagactgaactatgaagaaatctcaaacttgaagagaccaataacaagtaatgagattgaagccgtaataaaaastttcccagcaaagaaaaacctgggacccaatggcttgactgatgaattttaccaaacatttaaagaaggactaataccaatcttactcaagctattctgaaaaatagaggaggagaatacaagtccatactcatcctatgaggctg

SEQ ID NO: 740220 - DNA, 539 bp, Homo sapiens
cttctcaaggaagctgtcactcatctgatcacagccattcacaccatatgcatggacacagtgaccatgggcatggtcacagccacggatctgcgggtggaggcatgaatgctaacatgaggggtgagtccttgcaaaatattatcctacttttcractgtgttctaaatcaaccctctgtgtttatttgtattaagttttgggcttctggtatgatatgatttttaaaaagcaatctgtgactaaaagaaaggtctgaagctatcactatagaaaatattcttacctgaatacacataaaattaaatattattcagcctttaaaaagagggacattctggctgggagcatggtggttcacgcctgttaatcccagcaatttgggaggctgaggcgggagtaccacctgaggacaggagttcaagaccagcctggccaatatggtgaaaccctgtgcctactaaaaatacaaaaattagccggacatggtggcaggtgcttgtaatcccagctactcaggaggccgaggcagaagaatc

SEQ ID NO: 740221 - DNA, 558 bp, Homo sapiens
ctgatactaaaacctagcagagatgcaactaaaaaaaaaaaaaataggccaggcatggtggctcacgactgtaatcctaccactttgggaggccgaggctagcagatcacgaggtcaggagaccaagaccatcctggccaacatggtaaaaccctgtctctactaaaaatacaaaaaaaaaaaatgctgggcatgatgacaagggcctgtagtcccagctacttgggaggctgaggcagaagaattkcttgaacctgggaggcagagtttgcagtgagccaagatcacgccactgcactccagcctgagtgacagagagagactctgtctcaataataataataataataataataataataataatgatgatgatgatgatgtcaggccagtatctttgatgaacatagatgcaaaagtcctcagcaaaacactagcaaagcaaatacagcagcacattaaaaagctaatccaccatgattaagtaggctttattcctgggacacaaggttggtttaacatgcacaaatcaataaatgatttatggttcaacaacag

SEQ ID NO: 740222 - DNA, 624 bp, Homo sapiens
taaactacagtctagatagacaagtatttaaaaacatggcacataatgaatgatacacgtatctataaatacctcctaagtttcctggctggcccaaaatttgattgaattctctgactatatttgtgtgaaatacatttcccagaaaacacatgatatattttcctagcttcagaaaaaaaaggtaagttataagcttccttaaattcagcactcctatgttgattgttttagataaaattttaagcatttatataaatttaagtaatttcaagcatttgcagagtgcaaaagcaaaatgttgaacttctaatgycttaaaattgccagctttaaaaatatttagattatttgctgaaatcagaaaataaagacaacgtttagccatgagttaatgatcttgctgaataagttgcaaaataattttaaaaagagaaattgataacatggaaaaataactatgagaaaactttagtacaagcaagcaaaatttgaagaacttttaaatgtataaaagtagaaaatatttagggattgtttttaatcaagatgaagccttgaatagactggtttaaaaatttcagcttcaatattgtttaatagctttccttctattttatcagc

SEQ ID NO: 740223 - DNA, 504 bp, Homo sapiens
taagtcttaataagtacagatttattaaaggatgaccagagtccccatgaccactatagcctaggggaaccctatttcactagctttcctccaacctgatgaggaccctccagttccatgcagagcttcctccccaagtgtttctgggcatccctttgagataccttgtatgtctcataggacatggtgctgttgcagacacacccatttctgccaagtgctggctgtggattgttytgccacaaacactgcagtctctagctaggggtgacagctgctctgcccagcactgcagttcattgctaccaacagcagagactttaagcaagcagagcttcacattactgtgtcatgaggtgtggggtaagagccctgggctcttcatgcaggatgccttgctagatgggtcccctggaaatgtggcctgcatttcatcctcttgcagtgattttagcaaaacagacctctgtttttcattgcaaattcttccctccatagagctca

SEQ ID NO: 740224 - DNA, 600 bp, Homo sapiens
tgctgagagagctttttagggtttcttgtataagggcactaatcctattactgttttaacagcctgatgggttcttcttgcctgctgcccaaaaagccaatgcactgagacagcaggttttgcagcaaagaaagagtttaataattgcaggtccagccaagcagaaggatgtgaaacatttctcaaatcccctgccccaagaacttggaggccaggatgttaaggataatttgagggtagcggtctagagacttggtgtgacttattggttggggatgaaaccataggagtatacaaaccatcttcatgtgctaagtcagttcctgtgggattgggggtcacagtagagtcagttcattggtatgagtcatgggtcccattggagtcagttggttgccagaatgccaaagtctgaaaaatatttcaaagaccaatcttaggtttagacaatartgatgtgatctgtaggagcaatcagggaagttattgaaaagaggcaagctaggaaacaatagctgattaatgtttatgcctacattttagcagaattcaggccccttctgtaattctaaacttatggccttgtattagccttacaga

SEQ ID NO: 740225 - DNA, 612 bp, Homo sapiens
cccaggacaaaaatcctccctatgtccagtggatccacactgtctacactccctgcctggtagtcacatagcagccatctcagttatcagattgactgttgtggtatcacagtccttatattcaagtcacccttgttttacttaagaacggccccaaaatgcaaaggtagtgatgctggcatattatcataattgttgtattattagttattgctgttaactctttctgtgcctagtttataaattaaactttaccataggtacatatataagagaaaacatagtacatagaaggtttggtgcaacctgtggtttcagtgttcactgggggctttgggacacatcttccttggagaaagggagactacagtgctmctaaggcttcaggggcccattaaggcctagttcagaactcggttcatatcagctcttcagccctgtcgctgcagggcacacacgatggtaagtgagcctcactggtccctgctcacagaggtctcctccagtctatgctgctcagcaggaatgggtctcccatctgattctgaggtctgagtcttgactctactaaacacagtgtgtttgggtcccatttctgcttcacaggaatgc

SEQ ID NO: 740226 - DNA, 450 bp, Homo sapiens
ttatgctcttgtaatacattttggaaaattcactactcgtctttacctgaagtagaacaaggagaatcccatggggaaggcacctgactcaatgtgtttttctgaccaatcacttcctttctttggtgcttacaagacatgcttgaaactaggtaattccaagctaactttccagaggtccctgtcctgacatctaacagcaacagccttagccagagtcagccagatgatcagttttagaaattgaacccaatagagacagccctgggggatcctgccttacatttgcacctgtrcttcaattataattaaattgttcatctggttgtttgcttcacttacatgttaagaaaaacaagactcattctgtctcagtgacttgaaagtttggtttgctactgtaagcagaaagaaaaataggtgtgattagtgatttccagtttcattgga

SEQ ID NO: 740227 - DNA, 602 bp, Homo sapiens
atccaaaagcaaaagaatgaaataagacccttatctcacaccatttacaaagatcaactcaaaatgaattaaatacaaatgtaatacctgaagctgtaaaactactaagtgaaaacataggaagaaagctctataacaccggtctgggaaataattttttggatatgacctcaaaggtacagctaacaaaagcaaaaatagataactgaaattatatcaaactagaaagcttctgcacagccaaggagacaatcagcagaataaaacagacaacctacagaatgggagaaaatatgtttaaaccatacatctgataaggggttaatatgcaaaatatataaggaactcaaacacatcaatagtaaaaaactaagtaactcaattaaaacatgggcaaagcatayggcttaaagcaatctatagagtcaacactattcctatcaaactactaacatcatttttcacagaattacaagaaactattctaaaattcatatgcattcaaaaaagagcctgaatagccaaagcaaaaaagaataaagccggaggcatcacattactggacttcaaaatacgctacaaggatacagtaaccaaaacag

SEQ ID NO: 740228 - DNA, 670 bp, Homo sapiens
tggttctcaatcacaaaatacattaataacaataaaactatggaataaagggtcttaataactcttatcagtcctctttgtttgcttcaaaatattttatgcatcatattgttagctattagtatcaactaatcaaacatcttgygaaaagtttattttcctttttttctgtgagtgggtgtgtgcacatgcatgcagcacacagaactgaatttttgatcaaccatttaatgttataatacatgaatgaagacagctattgttcttttttaacctttatcctccattcccagtcctctttccttctattccataccatctactatatttaatgtgtatctacacaattccatctccataccttcaattatgcttaatattaataagcaatatataccattgtttttatatactatttagattttatagaagtgttactatactatatacctcagtcctcaatttgcattttttcactgaacatgatgttgatatctattattgttgattaacacagttcttaataagtcctgttaattgctgccactcaacgaatataccacattttacttgttcagtatgactttgatggacatttcggtttttaactatttcaaaccaaaatttaatgaatattctttcttctaagtttttccacaatttggttgta

SEQ ID NO: 740229 - DNA, 670 bp, Homo sapiens
tggttctcaatcacaaaatacattaataacaataaaactatggaataaagggtcttaataactcttatcagtcctctttgtttgcttcaaaatattttatgcatcatattgttagctattagtatcaactaatcaaacatcttgcgaaaagtttattttcctttttttctgtgagtgggtgtgtgcacatgcatgcagcacacagaactgaatttttgatcaaccatttaatgttataatacatgaatgaagacagctattgttcttttttaacctttatcctccattcccagtcctctttccttctattccataccatctactatatttaatgtgtatctacacaattccatctccataccttcaattatgcttaatattaataagcaatatataccattgtttttatatactatttagattttatagaagtgttactatactatatacctcagtcctcaatttgcattttttcactgaacatgatgttgakatctattattgttgattaacacagttcttaataagtcctgttaattgctgccactcaacgaatataccacattttacttgttcagtatgactttgatggacatttcggtttttaactatttcaaaccaaaatttaatgaatattctttcttctaagtttttccacaatttggttgta

SEQ ID NO: 740230 - DNA, 598 bp, Homo sapiens
tgtactccttccctgtattgtgcaactgcttagcctcgtccttatctgcaaatggcaacattcacagaatgtttctttgtactctttttttttatttatagctttacacacacacagagagacacgcaaagcatatattttctagtttgcctgttaccgaagttaataaaaaatttccttctatttaaaaaaaaaaggtggaagatttttttttaattttctgcaaaagattgtgtaatactggcattatttactttttaaggcttttgtagaattcaacagtgaaaatatctgggctctggagtcttcttttgaggaagacttttaatagaaaatgtatttacttaacagatataaggttatttctatttttatttcttatgtcacttttggaagkttgaattattttagaaaattttccatttaatttagtttgttgaatgtattagcccaaaattgttatttgttcataatatcttttcaatatctatagggtttatagagatattcccttttatccctaatattggacttcatttttttgcttgttttcttcaacagtcttgctaggggtttgtaaatttcattaatcatgtca

SEQ ID NO: 740231 - DNA, 622 bp, Homo sapiens
tcatcattcatattcactgttttcctgtatgcaaatgctccttgacttacagggtcccaataaactcactgtatatcgaaaatatcataagtggaaaatgcatttaatgctggcaacacagccaacggtcctcaatttacaagtggtttgacttgtgattttttgattttacaatagtgcaaacatgatatgcatttagtagaaatcatcagtttgctatgggattttgccctgataaacccatcataaagtaaaaaaaatcktaagtataggactgtctgtatatcatatctttgtttcatggttccttttaagattttctctttatctttggtttctggcttttgaggatatgcctacctttggttctctttgcatttaccatgtttgctgttcagtaagcctcttgaatctgtaatgttctttaccagctttggaaaatgccttcctcttacatctgtaaatattttttctgcccatttatcactctccactccctctgagacatatattccatttatgatagccttcttgatattttcccacaagttgttaagactgttcctttttaccagttgcttttctctctattcttcagattggacaatttctattgatttgt

SEQ ID NO: 740232 - DNA, 706 bp, Homo sapiens
taaatataaggaaactgaccttggggaaatgtttttaatctttacatcattagccttaaaaacagttaatttccaataacactattgattcaacccattactcacatatccaaaaatacactgggagaagttggcattttaagcggtataaaacagtggtgagcaggaaatgggcatttaattagaacatcatcagagactccaaatagccataaaatgatgatacaatgaatccataaatgcaaagcttctgagactacaaagacaaataatggaggctttgcaagaatggtctggggcttcgggtatgcaaacacacaattcagctgctgtttccattcccgagacaggctcagctaaggttgtgacaaaatcatgactctaaaagtcagcaataaagatcttagggaactttagatcatggcttttttaaagcttcactgaatttacacmaactctgacctagctgaagttgtcagcaaagataaacagttcggtaaactctacaaagaaatgtacagaaaaatcagaaaatcagcctactacacacaaaaataaacttgctgggcatgaatccaagaaaacccactcagattatcataaagatcactgaaaacactttctgtttgtaaggagaaatataattgcttgatacttgggaagagtttttccattcatagctcaccaaagtgagcagatccaatgg

SEQ ID NO: 740233 - DNA, 602 bp, Homo sapiens
tatttgaccacaatatttttcactgcttctacaatccaatagattttgtttttccaagaacacaatcatatatgcaaataattatttcattttatccttttctattttattctatttctatgtcatgtcttattgccctgaatcaggctagcaaaattatgttaactaatagtggtaatggagtcatttttgccgtatctttgatattactgaagatgctgatgtttggtgttgatttaaatcattaacctggtaatgtattgtggatggtgttgttgctgctgttgctgctgctgctgctgctgctgagaggtggagaagtggggaaagaagagggggatgctgcagtttagtctaagtgatacatttctaggtttagatatatttgcttaaagctttggcagccagaatctactggtacaaagaactaaatttttttctcaggatagcatcaggcaatamtctgtgctttgggagtaacaaagggttttcaggggagacaattctgaagttagcagcatctcagtcacttaattatccctggtcctgaatacttagtccaaagtctgactcacagcaagtgaagggttgtaaaaattggg

SEQ ID NO: 740234 - DNA, 667 bp, Homo sapiens
aatgaaaataccataggaactgataggtttcaaacaaacaacaaaaaaacttgcattttctgttttaacctttcattacgtacttgaactctctgaacctattaattgacaagaagtggattcaagcaggaatgacattcatagaaacaaaaaacaagtgtcaaaagcaattttattttcaaaacccttaaacttcattgtcccttcaaatcatacttaatcctgatttagcaatatgtgggtgtatgtttgatattcagtgaaaatcagtttttagaaatttgtgggaccagaatctttttatttagaagtatgctctttctgttatgtttaaatggatggaaaattatacagcttgctctgaccacagaaaagttgttagcatatactcaaaaagtttattgaaaaaacggttcagtatcttattgcttcaagtaacagggcatataatttaaaaccgaaayattgagaaactgtatttatcctccctgagatatcaagaagttggagaattccaatggtgtcatctttcttccctgccttcctcaggatgacttatgtttctcttcataattacaagatagcaaaagcggttcccagcatcatatgcagacccaaccaggccagtgaaaaggagaaatggcttttcttcccttgagtctccttt

SEQ ID NO: 740235 - DNA, 613 bp, Homo sapiens
atttctcttaatttcagttgtatgacatcagtagatgtgtttgtccagaaccttctgcagggcactgtggtaaaattattagccttctcattagattgttgcttggatcacccacagagcctagctgcaaaacttgcccatagtaagtaaatatttatggaatcaataccaattgccaagtgaatggaygtcagaaaaatttcagattgaggacatttggacaatacttttgcctatgttcactatcatggggaacaaaagcactggactcagaagtgattcccatcacaagtacattggccatgactccagaggaagaacagctgtgtggatgcttcccagaggacaatgcaataagtgaaaagattactgctggctttaggaagaaactcagagttacatagttttagatattgctggaataacatgaatctttttagaaacttattttagacaaaatcaaagtaatttaaattccttaaaatggggtatttgtttcatgaggtgacacgtaatttctttatacaatttagctggcatctcaaaaaatttgccaatgaaattgaaccatgggtagagactcaaggttttatagctttatacgaaatatact

SEQ ID NO: 740236 - DNA, 613 bp, Homo sapiens
atttctcttaatttcagttgtatgacatcagtagatgtgtttgtccagaaccttctgcagggcactgtggtaaaattattagccttctcattagattgttgcttggatcacccacagagcctagctgcaaaacttgcccatagtaagtaaatatttatggaatcaataccaattgccaagtgaatggacgtcagaaaaatttcagattgwggacatttggacaatacttttgcctatgttcactatcatggggaacaaaagcactggactcagaagtgattcccatcacaagtacattggccatgactccagaggaagaacagctgtgtggatgcttcccagaggacaatgcaataagtgaaaagattactgctggctttaggaagaaactcagagttacatagttttagatattgctggaataacatgaatctttttagaaacttattttagacaaaatcaaagtaatttaaattccttaaaatggggtatttgtttcatgaggtgacacgtaatttctttatacaatttagctggcatctcaaaaaatttgccaatgaaattgaaccatgggtagagactcaaggttttatagctttatacgaaatatact

SEQ ID NO: 740237 - DNA, 613 bp, Homo sapiens
tcatgtgttggaaacttaattgccattgtatcagtattaagaggtagggcctttaggagatgattaagtcatgaggtatgtgctctcatgagtgatttattgccgtcatcctgggagtgagatagttatgatgggagtggctcttgatgaaaggatacgttcagttctgtttctctctgtgacacaagcacttgcttcaggatcctgcccatctgccatgggatgacccccttccagaactatgagtcaaatacattkctgtttattatctagaatgcggtattctgtttatagcaacagaaaatggactaagacaccaggtaaactaaattgacagcagtggactcatagtcttgcttctctaatttatggtgtattattgctcatcagaaagaaccttgtctccatttatttgtcattgctcttgttactaacatgaagtggatagccatcaaatggattgggcacctggggtttttctgtaatgccttgtcctagctcctttacttaaacggccctaaatattctaatggtctttgatatactttttgaagcttatacacagaaaaaaatttaaaatttaataaaagaaattatacaggtttttatagtt

SEQ ID NO: 740238 - DNA, 574 bp, Homo sapiens
accaaacagaaaattcagaatatagaattcattagtagcaagtgccattgaaattattactgactttcattaaattgtttttgttattttgctatgactgtaaattctaacagattgtttaaaaatatcattctatttctatttagctgaaaaccttgtagtattatgctcttcattatatgagattctaaaatttccctgtgccagacaatacataaacagctggtaattttaagctgccttgaggaaaaaaaattccttggcctaaaaatgtatttgacttcaaaatttatgatacttctcagcatactttacaactgggttttcatatatatayatacatttcacatatttgttcacatgaaatttgaaaatgaatgtgttataaaagaatatcttgtctttttgtggttttatgagtagaaactgcataagaacacaaaatccaagtagggcattaaaatggcaaaatactctctgggggtatagacagtattacacaggtgttggcatttatattttgaactcccatctactgtgtttcttactcattagagataagcctaagtcactt

SEQ ID NO: 740239 - DNA, 658 bp, Homo sapiens
tatttcaagacagacttttataatttaagcatatatattctagtctctagggcaaccattaaaaactggataaacaaagaggtataggtagaaatgaaaaaagtattttaaatgaaatactaaaaaatgcatgattgctacaaaagagagaaaaaaataagaatctcagggaaagcagtagcaacaaagggaatacataaaaacaaatagacagggctgggctcacttactcatgcctygtagtctcagcacttcgggaggctgaggcaggaggatcacttgaggccaggagtataagaccgccctgggcaacatagcaagaccctgtccctaaaaaaattaaaacacaaatagccagatggtagatttaaaccaaaaaatatcaacatttaacattaaatgtaaatgagctaagaactccaattagaagaaattttcagagtgaattattagaaataaacaaaagagacccaactatattgttcttaaaagagacacatttcaaatataaagatacatataggaagatacagatagcctggaataagtatggaataagtatggatacagtatggaataagatacactatggtaaacaaaaatcataataaagctagtttggctatgtgtcagacaaagtaaatctcggaacaagaaa

SEQ ID NO: 740240 - DNA, 658 bp, Homo sapiens
tatttcaagacagacttttataatttaagcatatatattctagtctctagggcaaccattaaaaactggataaacaaagaggtataggtagaaatgaaaaaagtattttaaatgaaatactaaaaaatgcatgattgctacaaaagagagaaaaaaataagaatctcagggaaagcagtagcaacaaagggaatacataaaaacaaatagacagggctgggctcacttactcatgccttgtagtctcagcacttcgggaggctgaggcaggaggatcacttgaggccaggagtataagaccgccctgggcaacatagcaagaccctgtccctraaaaaattaaaacacaaatagccagatggtagatttaaaccaaaaaatatcaacatttaacattaaatgtaaatgagctaagaactccaattagaagaaattttcagagtgaattattagaaataaacaaaagagacccaactatattgttcttaaaagagacacatttcaaatataaagatacatataggaagatacagatagcctggaataagtatggaataagtatggatacagtatggaataagatacactatggtaaacaaaaatcataataaagctagtttggctatgtgtcagacaaagtaaatctcggaacaagaaa

SEQ ID NO: 740241 - DNA, 539 bp, Homo sapiens
atgttattattcactagaagcagaaaacgccttctgacaaaatccaacacctattcatgatgacatcacttagctacctagtaatagaagaaaacttcctaaatttgataaaaggcacatatataaaagcacttttaatggtgaactcatgagtgcttttgccctaagactaaaatcagaatgaggcaaagtatatacactcatatctcttctattcactttcacactagagattctaatgaagtaagataaaataagaaataaaatatataaaggttggaatatgagaaataaaacttccagaaagcatgatttctatgaagaaacgctaaaggaatctacaaaaatgctaaatstaatataagaaataagttatatttcaatatactaacaaaaaatgctgaaaataaaattaaaaataaatagcacaggaatatgtaaactacttaagaacaaatttaataacatgtataagaactctaatgtactgtatggcattccttagaaagtttaaagaattaagtaaaaggagaggatta

SEQ ID NO: 740242 - DNA, 626 bp, Homo sapiens
aacaccaggtcatgggggctatgaagtccagcagagtcaaaggaatgagaaaaagacagtttgagagagaaagtgggaccagggggctatcgtgagtgtggagactgcaaagtccccgagctctgggagcccacactatttagtagtgctcaaacagacaaacaggtggtgaggatgtgggggttgaaaggaaacagtgtatcaagtgaatgggaaacatggctgcttgagataatgggagtgctagaaacaaggagccagcaagtctagcagacatgcaagccrtgcctcagcttctcttccaacactcagcttttctcccaacaaatacacttgcagttccctgccatatggccctgttcagagacagttcacaacatggatcctacttcatcaaagccagcaggatagaaagagcaagtctgtgagcaagatggagtcttatacactataacataatcacaggagtgataaaccatcatgtttgtcatatactgccagttacaaacaaaaaataggtcttgtctacagtcgagaggagggaattatatcatggtgtgaataccagaaggtgaggatgattaggataaattcaggtctatctgccaaaagaatctctttaaaag

SEQ ID NO: 740243 - DNA, 565 bp, Homo sapiens
tgcaaaagacgagatagaattggctttaaacttccctagggcagggcgcggtagctcacgcctataatcccagcactctgggaggctgaggtgggcagatcacttgagaccaggagttcgaaaccagcctggccaatgtggtgaaaccccgtctctactaaaaatacacaaattagccaggtgtggtggtgggcgcctgtaaacccagctactcagaaggccaaggcaggagaattgcttgaacctgggaggcagaggctgcagtgaaccragattatgccactgcacgtctccagcctgagtgacagaaggagattctgtctaaaaaaaaaaaaaacctttcctaaagaaagggaagaaatgtaatcactgacaagaatctgtgtccataagataaaaacaaagggctagcaaaggagaagcacaatgatacctaatactatgatcagaggaaacttttccttctatcttgaatccaactgtgctttgcaagccttgataggaaggcaggagagcagcaggtgggaaagggatacggcaggtgatgagaccaggtagacttcag

SEQ ID NO: 740244 - DNA, 625 bp, Homo sapiens
gtttgcaaataataaaaattaagtgttaccgagatcaagagagtgttcaattagtatctcagtgtctagttacttataacactgagttagtttggatgcccacagccatcatgtcctggtgattgaatggtgttccttttactctctttgagtcctatagtcatagcccttggaaggcaaaagtcacctcagagtttatgtagcccagtgacctcatgttacagatgaaggcttttggccttaggttaaatgagttgctgcctagtcgtgaactggtactggagtgcaacccttctgatgctgttccttcttcaccacgctgctcaaacttgatctggttgaagtggctggttgttctggtattgtcctaccacaacccatgtagcattcctcacattaacttataaccagatcctggttactgtctgtagaacgaacratagctaggcagctttctttcctagttatcttttagagtatttaaaacaaaattgttgtctatgggtatttacatatatactttttcttttttaatttcacagacgatttgaaatggttattcccactgaagactctgttatcacagaaatgacatcaacattaagagacggggaaccatgtggaa

SEQ ID NO: 740245 - DNA, 614 bp, Homo sapiens
aaagaaactatttgaaatgctcaaaccactgcattccaaatacccgatataagagttataaaaataatgacagtgtgagtgttgtccattagctgaactagaacacaaacacttttccttttatatagctactagtggggaacaaagttgaatttcctctggattctgccttatctagctatttttacctgtgttcgaggtttcaartgtctgttttggggacagactttgttggtttgaaaatctgtgtgttgtaaactctataagtaaactcctttcctcctagtgttctgagtaactgggaaagagaaaattatctaaatgtttccctggacactggaatggtagtcagtgccattagaaacaaatattaagtttaactcagaggtattagatttttgatactaggagtgaagctaccttggccatgtcagacctttggtttctcttttcctaatgtaaatgttttgtgccaaatgttttggttcaagttcctcatgctcaagtgtgtttaggttattgtccatcgtcttttccaacagttttaaggcacctagcttctctactggaagatgtttgatgggggccataatattttataaattgttagcaat

SEQ ID NO: 740246 - DNA, 635 bp, Homo sapiens
tatcctggcctagcaataataagattctctgtagccctggtgtttttctcattcaacatgaaagtgactgactgttgatttcaccagggagagctgggaggcaccatcaccaatcccttgttgttgtttggcaatttattgtcactttgggtcaaggacctcagcatggaggttaaatggcccaacacagaggacatttgattaattgttgctgcttttctttttttacttcttcctagtcagtgtcatgtttgaaacacaagtgtttgcatcttactaaattcatattgcatcattagaaaaaaagtctcactttagtttcttgatagccctgttagcagatctttctcacctaattgtgttcatttaagcagtaaaagtkttaaaccgcacagtgttagcatatgtccacttagatattttggtttagtgccaaaggcaagatttcaatccttctataaataaagggagccttattagccagcttctctcctatttgtgcctgcaggtttctatctttttagaatttgtaagatcatgcatctgcttactctgcaattcttagaaggttagactagcagatctcagagggaacacagtggttctcacatgcaatttcaacccaaggggatatt

SEQ ID NO: 740247 - DNA, 635 bp, Homo sapiens
tatcctggcctagcaataataagattctctgtagccctggtgtttttctcattcaacatgaaagtgactgactgttgatttcaccagggagagctgggaggcaccatcaccaatcccttgttgttgtttggcaatttattgtcactttgggtcaaggacctcagcatggaggttaaatggcccaacacagaggacatttgattaattgttgctgcttttctttttttacttcttcctagtcagtgtcatgtttgaaacacaagtgtttgcatcttactaaattcatattgcatcattagaaaaaaagtctcactttagtttcttgatagccctgttagcagatctttctcacctaattgtgttcatttaagcagtaaaagttytaaaccgcacagtgttagcatatgtccacttagatattttggtttagtgccaaaggcaagatttcaatccttctataaataaagggagccttattagccagcttctctcctatttgtgcctgcaggtttctatctttttagaatttgtaagatcatgcatctgcttactctgcaattcttagaaggttagactagcagatctcagagggaacacagtggttctcacatgcaatttcaacccaaggggatatt

SEQ ID NO: 740248 - DNA, 564 bp, Homo sapiens
ccgagcagcaaggctcaggggcagaacttctgtctctagaaagcagagccttaatacagaataaatggaatgcgtatcagatggaggaccttaaagcagagcttgaaaatggaacacaggacctggttaccgcaaaaagccaactatcagttcacaggaaaagagaagaaactaagttaatggaacccaaatacccacccagaagagaggaagtgatagaggagtactggtacccagcctcaagccaccaaattaaggatttttaaacttccttggctaagaaaaggattggttccaaatcccagggaaggtctgaacatatgaaagtttaaaackttctaggagaaggatgaaaaagattcaggctgttggcagggcgtcatggctcatgcctgtaatcccagcaccttgggaggccgtggtgggaagaccacttgagcccaggagtttgaaaccagactgagcaacgtagtgagatctcatctctacgtttttttttttaagttagctgggtgtgatggtgtgcacctgtgctaccagctactcaagaggctgagaggcagg

SEQ ID NO: 740249 - DNA, 467 bp, Homo sapiens
acacagatgctccagttttttacccaagcctgaaaagaccccgtccttccctctgagcctgctagagagctgttcctttcttaagattcggcccaagggccccattcttagcaccacatctacgagaaagcttttcctgactttccacaaaacaaaagatggcracgtactttgagtagcttccactcaacatccaagactgcatatatcaaagtgcatcagacatgctgtacacttctatctccctgattagactcagagctcagtgaattcaagaaccaaaccacattcactcccatattcctcaggcctggaacatactagacattcaagtatttaccaaaggcaaagatgaggtcagaaattatgaataatgaaagttatatatctatatagagatagagatacagatacacacacacacacatcacccaaaagatatcagggatataagggaagcatttaaa

SEQ ID NO: 740250 - DNA, 467 bp, Homo sapiens
acacagatgctccagttttttacccaagcctgaaaagaccccgtccttccctctgagcctgctagagagctgttcctttcttaagattcggcccaagggccccattcttagcaccacatctacgagaaagcttttcctgactttccacaaaacaaaagatggcgacgtactttgagtagcttccactcaacatccaagaytgcatatatcaaagtgcatcagacatgctgtacacttctatctccctgattagactcagagctcagtgaattcaagaaccaaaccacattcactcccatattcctcaggcctggaacatactagacattcaagtatttaccaaaggcaaagatgaggtcagaaattatgaataatgaaagttatatatctatatagagatagagatacagatacacacacacacacatcacccaaaagatatcagggatataagggaagcatttaaa

SEQ ID NO: 740251 - DNA, 590 bp, Homo sapiens
tgcatcataaagctacaaaaattcggccgggcgtggtggcccacacctgtaatatcccagcactttgcaaggccgaggcaggcggatcatctgaggtccggagttcgagaccagcctaaccaacatggagaaacccygtctctactaaaattacaaaattagctgggcgtggtggcggctgcctgtaatcccagctactcgggaggctgaggcaggagaatcacttgaatctgggaggtggaggttgcagtgagctgagatcacgctattgcactccagcctgggcaataggagagaaactccatctcaaaaaaaaaaaaaagaataaagaaaactacaaaaattcaaacagtatgatgatactggccccagaacaaataggtgaatcaacataaaagaaaaggaagttttaggaatatatccaaacaaatatgaagatttactgtcttactgataaaagcagaatttcctatcagtggaaataagatgaattattcagtaaatggtaaaagtcatatgaggaaaattaacttggccctattccttacaccaaatcaaattcgcaacaaatcagtaatattaacattaac

SEQ ID NO: 740252 - DNA, 589 bp, Homo sapiens
aaagtatctgtggatataatttgatttcctggactcattgccattttttggatttagtgttatcatagagcgggtgtctgttaggtgtctgcccagcatctgttcctgtttctctcctgcagaactccagttgttttttcttttgttattcatacctacaaatgaatccacatgccttgggaagccagtgaacccacagctccagatgggcctgactggtgaaaaacttcccattctcttttccagggattggcatgaagggatgtctgttgagcggcggttgtaggagacatttctttgccccaaggaaaagctagaaaatttgatctctttcttctccgggatctggtcatgtggacatgtgactctgggatctgtgaagccttgttgctgccasttggaggatgaagccaacactgaggaggccgagcaggatgagggatctatctccttgatcctgccattgagccatggacccactgccttgaagctgcatctctggactttacactgcgtgaaataatacatatctttaatgtttaagccattttagttgtgttttctattactttagctaaaagtaccatta

SEQ ID NO: 740253 - DNA, 587 bp, Homo sapiens
gaaggaaggaaggaaggaaggaaggaagaaggaaagaaggaaagaaagaaagaatttaaaaaagaaatttacttttcacggttctggaagctgggaaatccaagagcatggcactggcatctgacagtcatcccatggtggaacagcagaaggtgggagggcaagagagggcaagtgtgtgtgagacagagagcaaacgaaggccaaactcccacaatgatagcattaatccatccatgagggcagagctctcatgacctaattacctcccaaaggtgccrccatttaacatcaccacaatggcaatcacatttccaacacataaacttttgggggacacatttaaactgcaccactgggaaaataaaagaagaacattgcaaagatcatcatgtcatcaggcctcagatatggagaaggcccagagaaggcattgtcatgacatgagactcaaagaaagaccaccagacacccacacatcaactctttaaactccagaaacgattaaggggtcttaaaatctgccatgaaggaaagatgaaacagaagagaacataaaagtaagtacctagtttaactatcttttc

SEQ ID NO: 740254 - DNA, 587 bp, Homo sapiens
gaaggaaggaaggaaggaaggaaggaagaaggaaagaaggaaagaaagaaagaatttaaaaaagaaatttacttttcacggttctggaagctgggaaatccaagagcatggcactggcatctgacagtcatcccatggtggaacagcagaaggtgggagggcaagagagggcaagtgtgtgtgagacagagagcaaacgaaggccaaactcccacaatgatagcattaatccatccatgagggcagagctctcatgacctaattacctcccaaaggtgccaccatttaacatcaccacaatggcaatcacatttccaacacataaacttttgggggacacatttaaactgcaccactgggaaaataaaagaagaacattgcaaagatcatcatgtcatcaggcctcagatatggagaaggcccagagaaggcattstcatgacatgagactcaaagaaagaccaccagacacccacacatcaactctttaaactccagaaacgattaaggggtcttaaaatctgccatgaaggaaagatgaaacagaagagaacataaaagtaagtacctagtttaactatcttttc

SEQ ID NO: 740255 - DNA, 612 bp, Homo sapiens
agtttccaaaatttatgaaaattataaatccatagatccaagaaactcaaacttcaaacatcagaagcataaagaaagccacatcaatgatttttaaaaaattcaaacaacccatgaaaaaagacacattatatacaagagacaaggtaagaattaccagtaacatttaaaaaaatgcaagccagaagacaaagaaatgccatctataaaatacyggggtaaaattagcaagatagaattctatgttcatgaaaatatccctaaatattgcaggtgaataaaacttgaaacatgaagaatgtatgggaaataatcccctactctgatggcagaattcctgtagaaataggcaagtatctatttatcttcctaataccaattcttatacataaaaagagcctatgagagtttattaatgatgatagtgctttagaaacaatgtggaatgtttgctcatagggaaactgacctaagtgtgcagatcatgtatttcattgttgcacatattttaggttttaatcctacagactaaagccttttcagtgctctgactcctgggctgatgttgcaactttgagggggaaatgaagtcaaggcgctgttttttcagtt

SEQ ID NO: 740256 - DNA, 583 bp, Homo sapiens
gtaatactagctaatttcttcttaaatttaaggaaaaagctgagcttctgacatctctggaggtttcagcaagaaaagattgtgtaggttccaaagagtctgctttggcaaaaatagatgcggaattagaagaagttggaccatcaagaagggttggagaggaaactgtaggagataattcaccatcttcagttgttgaagagcaatatctcaataaactaacaaggtaacattttatttaacaaaatgtttcacaataagaaataaaaatcacttaacttttaccttaacttactggtagaacaaaatttttgggtgttgagtccrttagacatgggtagaaacttgaccaaagaggagtatgtatgtattagctaagtaattaaggtgctcattcaaatggagtcacaaacacaaataaagaataccctacttctatagttttcaaagaaaatggaaagaaacttaagttctagaaaccagcactgctctagtggatttctgctgcctcctttttcttttaacctatctgtttacccagtaggataaactaataccacatttgatctcatattctgtattt

SEQ ID NO: 740257 - DNA, 560 bp, Homo sapiens
tagttattgagcttacatagaaaatccttgtagccacatagtcttcaactgatgacaggatgaaaagaccttcttttgcctaccaaactgccaaatccaaggcctttgcaggaaagaagtgctgataatacaagtattactcttggagaaaaggaatactcagtttcaatctcatatttgaacaaggtatatcccaaataatcaggagtatttagcaaaatgcaatcatgttaaaatgtatttcacttacctgtttcctcaaaaacatttgttaattcctttgagtgcacctattttaagaaaatttaaaaaaaaatttagaaatttatcaagtaaaactgaaattaattttatttcctttttttctttaagtaaagaaactatgttatctyccaaaaagctcttagaggaattctactaaacatttatggcaaaaatattgctactattttaaaatgttccagagcccactggaagagagaaagctgctaactgccttttataatcagtctcaatatcagtgcaaaagtatcaaagaaatagtacaagcagcacatcaa

SEQ ID NO: 740258 - DNA, 605 bp, Homo sapiens
gagagggttgcataggagctgaaatgtttcacgcaatcagcgaccttttatgcagagatcacaaatgcaccaccatcctaccttccaattcctggacgtaaactccccccactgcagacttccccaaggctcacgtaggcccacgtccactttatttcaggcataggtgagttcaggaacccaccctctgctcttccatctttttgtccaggttgctcagagacttccccgtggcaagtagggatgagttctcacgatggagctgcacaatctgagttggccagcaaagattaaggttgatcatggaccttctggaaggttctgggtgtasacaacctggcttaaaaatgttaaacaggagctcaaaaaaaatttagcccctctctcagacctaattaagatcgcggcactcatccatgcccaagaaccttttatcatctctctcttttacaaagagagcctctctgctgtgttttttctgcgatgtctcctttcacaaaagcagccagtttgtgcattcatgtctagggtaaggaagtcttcttgtaatcaactgaactgatcccacagatttggcagaggggaattcttgcaggcaactgagc

SEQ ID NO: 740259 - DNA, 593 bp, Homo sapiens
gtcattcccaaggatatactaatgaatttgtagccttaaaaagaaaaaaaagtttcatttatacattcacctgaggtgaaagaagtcatgttaacattctgagttttatgtggactttccataggctgaagtactctctccactgcacctcctgctctgtatagctcaccttaatttccattttgtaggccccaatgtgagaataattttttaaaaatgagactttgagtctgaatgtagtaatgactaactatcttccttcaaatgtgactttaagtttaaaatgtttaaactacatgaagtagttcaaggtccaaaatgtgcttcaggttgctccttttccttccrtctttcactcagccttctctttctctgcctttcttgtctggagaatcatctcccagcttggcattctagcaatggcatcagtcgaagatgaggccggacgccttcatcacatactgcccacttgtgctgaaatgctttcatatttatgcctgatatctccagctgaagagtgaatttcttgaggttgggaactgtgtaacatggcatagaactcatacagaaaaggggctcaaaagccatctcta

SEQ ID NO: 740260 - DNA, 621 bp, Homo sapiens
gctcattcacctcactttccagcagctcccccatgtttattgtaacatgactagtgatttatgttcttgactaaagcccttcttctcgttaagtttcaaataactctacggaggggtattgtagagaatttgcaatgtggagcaacttacagggtcagaccataaccgaagcagaatccagtggcagccacattctgtagaaacaggcagagaagagctaagcttgggcaatgttggcaagattgctggggagtgtacagtgcactatacagagagagttccagcaaagcttcattgccctcgtagcttcagacagacagcaacgcagctctctgtaggtgactagaagcagtgggtagcacaggagggttgagggcaatgaaagacatgaagaaagcctcaactaaaaggrgaaaagggtccaaagctgttcttatgtctgccgcggtcacagtcacaacagggtctggtgcccacatttgcacacatgtgttcctggtcagccccttccatccctctgcaccttactggacatagccgaggctgcattctgtggggtgagactgcagagcacatggccagtcagcaaggggagagccctggagatgggaagactggagc

SEQ ID NO: 740261 - DNA, 603 bp, Homo sapiens
actcatgatttggctggggctatgggttcctgggaggaagatctcagaagtgaagtgctagtttcatcttatcacattaagactgcatgcaattagcatgactcgccactgttgatgttcaccttgatcatctggctgaggtagtgcttgccactataaagctactccttctctggctgggcgcagtggctcacacctgtaatcgcagcactgtgggaggcagagtcgggtggatcacaaggtcaggagatcgagaccatcctggctcgatctctttaatagaaatcccgtctctactaaaaatacaaaaaaaattagccaggcgtggtggcggtggcctgtagtcccagctactcaggaggctgaggcaggagaatggtgtgaaccygggaggcagagcttgcagtgagccgagattgcaccactgcactccagcctgggtgacgcagcaggactctgcttcaaaaaaaaaaaaaaaaaaagctactccttctcactctaacccctattcatgttgtactctgtggaaggaaatcactatgcgtagtccaccatgaagtggggagttaggatccaacccctccagggtagagtatctacaca

SEQ ID NO: 740262 - DNA, 596 bp, Homo sapiens
gtttaatggactcacagtcacacatgactggggaggtctcacaatcacgggggaaggcaaacaaggagtaaagtcacgtcttacatggcagcaggcaagagagcatgtcccagggaactgccctttataaaaccatcagatctcataagacttattcattatcatgagaacagcatgaaaaaaactcaccccagtgattcaattatctcccaccgggtycctcccatgactcatggggattatgggagctacaaatcaagatgagatttgtgtggggacacagtcaaacaagattagacactaatagatgactttggcctaatgtccccatttctgtttacagaagctgagcctcagaaggatcaattgtctggttcatggctacagagaaacctggtagaagagccctacagagatggctattcagattctgtacacactgccagggcttttggagtgggctcatgtttccaagctatgcatatctgagtggcaagacagaaactatcttctataattcaatgtgctattacaccacaccccattcagacagaaatgtataatccagccacctccagaaaacctggtctaactgt

SEQ ID NO: 740263 - DNA, 609 bp, Homo sapiens
cttaataatgcccttgaatggtggcagtctccaatccatgctaggagatggctgtgcaacagttctcacagctggggagtggccgcaacagaaccaaatatagtaactccctgccacccaaggaggaagaatcctaaaagcaggcctggttttctgtctcacttttccaatacttaaaaattgaccatctccaaactcaatattgccaaataattcactcacttccttcattttgaaaatcatgctcatttaagaggaaatataatccatatacttctggttccattatacttagatcatcagcaatatgttcttttgcaataggtgtccaaatatcttttgcaatagatgtccaaatgtctctggagactttttttttccamgagggcaggaagctgcatttggacaagagtaatcaccaaagttcacacttgaaaattcaaacccataaggtttaaattgcaaacttgcccaatccttaaaccgaaaagactccaaaaagcaataataacaaggagctggcaagtattcatacatgacagctggaaaagggggtggggtggaatgagagaagaggacaatgactgatgtgaacaccatggggaagcc

SEQ ID NO: 740264 - DNA, 616 bp, Homo sapiens
aaccatttgtctttttattctactttttggaaatcctctaactttatcttccaatctttccattaaatattcaattttataatattttatattatatccgaaaacttcatttggttccccatatgttccttttttgctcttattctttatcttttatttccctgtgtgttgcttagcctgggtttcctggaagcagagcctgtgataaacacttatgcacagagaatttttggaaaatgtactcccaggaaggtgtacaggatatgaactaaacagagaaggsgggggggatttttttaaaagcgacatattagggagttggttactgctccaggcaactagttttcaatcccatgggacttactgagaaagacttttgaaatactctcaactgtctgctaaggtacaaaacagaagtatttattgcactcacaggagtcagaatggtgttaaatttccctcatctccaaattgtacatacataagtaccaaaagggttcctgcatttcagctggggtgaagagaaggtccaaggcagaaagcaggaggttatagcttgggccaaaaacaaggcaatatccagttgtagttgagcaaagctggtcaagactatgaa

SEQ ID NO: 740265 - DNA, 547 bp, Homo sapiens
agcctggatcctattatggatatattttcttgtttgacccataaccctgtggtaacccacctcctatatctgcctctgtccttccccatatggattcccttcttaccctccccaggctctgatacctcatactaggccrccttccaacatatgggcatcctctttaccccacaaagacttcaactacccattctgggttacacaacccccattagatactcttctcaccctatctgggctctaagtcaccgtgtcataactcccttcgccaccgtgtggtaaccttattcaccctgtctgggttctgatatcccactgtgatctcccctcctctgtgtggattctttcttcaccccattcaaactcttaagcccacttcaggtcatgggccaccatggctccccctcaattcccactggttcagatgccaccttgctctatttcacctctaggactgacttatttatgaagggaagaggaagagtccaaataactcctaaatatatgtgttgtacagattacctttgctaaatcttgttgaattaga

SEQ ID NO: 740266 - DNA, 571 bp, Homo sapiens
tcaatgcatgacttcaataaggcatgtgaataagtcaagaaacgagaaggtaaatgtcccatcttatagaaaggatgaaacccaagcaaagttgacagtccttccatttcaatttggtactttcaagtgtccaaagtcttgaaggctagagaaaattcaggccaaatgttggactgattattaggaaatagaagagttatgcattctgtatgcattcttatgacagcataatttgcattcaacaaatattaattagaagtcattctctatctaatgctctgacagctaytgatgtgcacaccaactacaggcatacctcagagatattgtggattctgttccagaccacaataaagctaatatcataataaagcaagtcatacaatttttttgattttccagtgcatataaaagttatgtttacactatactgtagcctattaagtagcaatggcattatgtctaagaaaaacagtatgcacaccttaatttaaaagtagcttattgtcaacgaatgctaacaacaatctgagccttcagcaagtcataaccttggctgctaactgatcag

SEQ ID NO: 740267 - DNA, 639 bp, Homo sapiens
ccactcttaggtatttactcaagaaaaatgaattgataaaaagacttgtatatgagtattcctggaagctttatttgtaaacagctcaaaactgaaaacaacccaaatgtcttggtaatttgttggataaacaaattgtgttatatcaatacaatgaaatgctatcagtaatacaaaataactgatacatacaaaaagcatgtatttcagatgggtgcggtggctcacacctgtaatcccagcactttgggaggccaaggtgagtggatcacaaggtcagaatatcgaggccatctyggccaacatggtgaaaccccatctctactgaaatacaaaaaaaaaattagccaggtgtggtggcgcgtgcctgtaatcccagctacttgggaggctgaggcaggggaatcgcttgaacccatgaggtggaggttgcagtgagctgagattgtgtcactgtactccagcctggtgacagagcaagactccgtctcaaaaaaaaaaaaaaaaagaatgtatttcaaagtaattctactgaacgaaagaagttagacatgagagtacatattgtatgattttattcatataaaacactacaaaacgcaaattaatctacagaaagcagatccataattgcctgaa

SEQ ID NO: 740268 - DNA, 627 bp, Homo sapiens
tttcatagaaaaatttgtctgagggttataccgtcagaaggaggagggtagaaagtaaagactctggctttctccatttgttcttttctctgtcttcccccaccttcctccctgcattagaaggactgtccactctcctctactatacagcaagggctcttatcaaaaagggtgggggaccagatgggcaactgtccttctagctagtcaggaggctragacaagaggatcacttgggcctgagagtttgggactgcagtgagctatgattgtgcccctgcattccagcctcagtgacagagtgagatcccatctctgaaaaaaaaaaaaaaaaagggtggggaactaaggctggctcaatattttcaaaaatcaatcaatataatacccatattaacaggctcaagaagaaaaaatatcacatgattatatcaatttatgcagaaaaagtgttagaaaaattcaacatgcattcatgcaaaagaaactctcagaaaaaaatatgaatagaagacaactttctcaacttgataaaaaacatatacagaaacctacatttaatattatgctcagttgtaaaggctaaaaactttcccactaagatgaggagaaaaaagcaagaatgtt

SEQ ID NO: 740269 - DNA, 551 bp, Homo sapiens
gtgcacatataacatagaccatattctgggccgtataacaaaatgtaacatatttagttgagctgaaatcatacaaaatatgtaacctgatcaaaacggaattgaagtagaaatcaataacaaggatatctggaaaattgtcacaatgtactcaaatattaaaaatgtaaataacccatggctcacaaaggaagtctcaagggcagttaaaaatatttttagttaaataaaaatgaaaaacaacatatcaaaatttgtgagatgccattaaagcagtgcagggaaatttataacattaaatgcttgaagttgaaaagagaaaagatctcaaaccaatcatctaagattatratataagaaattagaaaaaagcacagcaaaataaataatgaaaagaatagaaaccaataaaactaaaaacaaaatagagaaaaatcaatgaaatcaaaagtcagttctttaaaagggttgcttaaattgatcaaccttttcagactttcttcccttcccctcaaaagagagagagaagacacaacttactactatcagaa

SEQ ID NO: 740270 - DNA, 705 bp, Homo sapiens
ccaggttgttccttctcaatgtctctcagctactccctaagtaagatccagggcttgggaagctcaaggtgctctcctgtggcctggattgcacacttccccagtgggaagatggactgcagaggaacactgactccccatctcctgtattggggattttctgtttttagccagactctgccaggagggctgtctcccaaatttctctttcccagtgtctgaaatrttctgttcaattcctgtattccttcttggataaaagttaatgatgtgactatctgcacactattttgctttttccaagtgggttaggcatgctggaaaagcctctaatctgctgtctttgggggaaaaacccatacaaagattgtgttttctatttctgtgaataatatcactggcattttgatagggattacattcaatctgcaggtcacttctgatagtactgtcattttcacaatattaattattcctatccatgaacatgggatgtctgtttttgtttcctcttcaatttctgtcatcagtgttttagttttccttgcagacgtttcacctctttgactaaatttattcctatgtattttattcttttttggtggctattgtaaataagatggacttcttgatttatttttcagtgagttaattgttggtgtatatacacagaactgatttctgtatgttaattttgtattctgc

SEQ ID NO: 740271 - DNA, 547 bp, Homo sapiens
cagacatacattttgcaaatatttcctcccagtctgtgacttgccttgacattgttataacaatgtcttttgaagattaaaagtttcaaattttggtaagatcaaatttattgattttttcctattatagtttgtgctttttgtgtcagatttaagaatcccaaggtcactaagattttctcgtacatgttcatctagaagctttatagttttagttctcacacttagatggtccacttyaagtaaatctttgaaaatggcagaaaataagagttgaagttcatttttttttttgcatatggatatccaattgttccgtcgtcgattgtttaaaagattatcctttcccccactgaactgtcttggcacctttatggaaaatctattgattgtaaatgtgtgggtctatttctgggcactattctgttctagcaatccatttgtctgtctttatgctgttaaattaaatttagactaaactgcttccttatatattttaagttcggcctaaaggtttctccatacacagtgaactgtcacctaaatg

SEQ ID NO: 740272 - DNA, 610 bp, Homo sapiens
ttccgagtttcatctcacaagcccaataagactgcttgagctctccttctctctcggtctttgggccatcactttctagtcactgcttatgaactggcagatgccacaagaaaaaaagtagtgttgaatactggattcatatctctgtacctccctcttctctaggatctttkctcctcaagtcatcactgcactgatagctctttaatttcttaaaataaaatgttttaaaaatactttttccatatttctagttcttcttgatatgatggttgcaccacaacaagctagtctgacattaccagaaagagaaacctgataaacttattaccagtggcttagagtttccttaatgaggcttaatagaatactgaaactgattaacggaatttaaaaaatgaaatagagaagtacattctgcaagtctctgtaaaacataagaatctcattatgtctgttatcctatttgctgttttatgtctttctttctcaataagaccataaactccccatgggcacaactctgatacagtttatttcagtttcttcacatcatgccaataaatattccattaaattgagttgagtgggatgtacactattctaatta

SEQ ID NO: 740273 - DNA, 528 bp, Homo sapiens
ttagtgagatggttaaatgcttttctaaaaacccaagttgaatatgtaaacttctagagatgcagatgagaaagtcaaggtctagttaaatttatttgttcatataccaattttaattatgtgtatattggactttgtattgaattaaatgtttgtgtctactcaaaatttatatttatgtacattgtttgtttgtttgtttgtttgagacagggtctccctctgttgcccagactggagtgcagtggcatgatctcggctcactgcaacctccacctcccaggttcaagggatcctcctgcctcagcctcccgagtagctgggattacaggtacacwccactgtgcccggctaaattttgtatttttctagagataaggtttcaccatattggccaggctggtctcaaactcctaacctcaagtattctgcctgcctcagccccaacaaagtgctgggattacaggtatgagccactgtggccggcctaaagtttacatttttaaattctaacccccaatatgacgg

SEQ ID NO: 740274 - DNA, 555 bp, Homo sapiens
caggccctcggtcacccagaagagggattctagaagtgagcattactgtatgcttgcctttgtggcgggggcggggcacaattgtttcaaggttaactgcttctgggacagctgacatgtggacgtggctcaagtggctcattagccagttggctatggtgtgaattcagcaagggggagctggaaagaatatccaccccagtggaaggtacccaggaggtacccgctcctctgaattgtatgtagtgtattttaaaaggatcctttaaggaagttctctctggccagtacatttggccagatttctctccgttttggttacccagaggaagttcactcacatggtctgtgaagctcaaagctcttgacagctgcccctaaatyagcttctgaatgtctgctaaaaagacaaatgccaagggaagagcccagggctgtgccctaaacaatgttgttatgagctggggtggatatgactgtctcatacccactcatatcaccgcttatttataaatgggtttcaagatctcgggttacatcagagtagttcatact

SEQ ID NO: 740275 - DNA, 540 bp, Homo sapiens
aagacacatgcactcatacgttcatcgcagcagtattcacagtagcaaagatatggaatcaacctcgatgcccatcaacagcggattggataaagaaaatgcggcacatatataccatggaatactatgtagccataaaaacaactaaatcatgtcctttgcagcaacatggatgtagctggaggccattaccctgagcaaagtagcacaggaacagaaaaccagataccagatgttcttacttgtaagtgggggtgaaatattgggtattcatggacataaagctggcaataatagacactagggactactagaggtggggaggaaaagagagggagacagtattaaaaaaaaaaactattgggtactatgctcagtacctaggtgacagctgccccarttgtccaccaaacctcagcatcatgtaaataatccaggtaacaaacctgaacatgtaccccttgaatctaaataaaataaaagttgtcagggcatggtggctcaggcctgtaatcccagtactttgggaggctgaggcag

SEQ ID NO: 740276 - DNA, 639 bp, Homo sapiens
gaggaattctccctttaacatcctccattccactagtggctccatgtgggtcccgctcagagctgggttcggcaagactggccatgggggagtggccgtacctgagccatgtgcaatgggaggctctcagtggggagggggcagggaggggctgactccagtcccacgaggggatgagcatggaaggaagtaagaggctggaagagtgaggcaggcactctgggaggccaagggcacaagtagccctgtcttggggccctaacagcaaggcatggcaccaactggagagggacattctcccctagtctctgagaccacccccatgtcctcagaagagaagagtatttgacagaggagcgggagagtggacggagaacagcagcggggcctgagcagactgcagyacagaggccagggcagaccaacctgtgggacggccaggactcccagaaaacctggagaagctgcgtgggaggctggaggagtgggaaggaaatcctacagcattgcagaggggactcccaggcaacaaaactcaggcactacaagttcaggtgacaactttgtgtccacaggctgcctccctgcctcctctccgcttacctccttaaaagtagcccattctttattcagggtcca

SEQ ID NO: 740277 - DNA, 563 bp, Homo sapiens
gtttcccaagtggaatgtttcttcctctctgctctccttcccctcctctcctagttctgcccgccagaatcctatccatccttcttgagcagtggctggaaaactttttaaaggaccaggtagtaaatgttgttggctttgtgggccatatggtctctgtcaaaacggttcycctctgctgtggagtgtgagagcgtggctgtgttccaacaaactattttggaccttggaatttcaattaatataactttcctgtgtcaggaaatagtcttcttttgagtcttttcaaatattttaaaatgtaacaaccattcttagctcacaggctgcacaaaaacaggtgtctgccgcctgcgggctgtggctcgccatcccctgtaccagagcaagctgaacccacaccgcccttgttgaagtgtcaagaccatctcatttgaaagtaatcctttttgtctctgaaggtcctgcaggattttgtactgctttataacagtaacattcagtgcttacgttgtattgtactccaattatttgtgcttatttcttgcttcccaaacagattc

SEQ ID NO: 740278 - DNA, 580 bp, Homo sapiens
taatttccctaggcttctgtttcctcatctgtaaaatggggtcaatcataccaacctcatggaattattatgagcataaaataagttaacatatgtccataggacaatgcctagaattgaacggtcctcagtaagtggtcatttttattccgtactattatatattattattatttataccattttcattttagacattgtacaagacctatctatgaagaacatgtagactagttcaagaggcaaaacataggtacataagasagagctaataataaaggcaatagataagtgtggatgagacctacgaacattaaatgctacagatattctaaaaacagagagacttaggatcccagagactgaggggtccctggaggacatccatggagaagaaggagtgagaggtaaagctgaaaatgagactgcaacacagaatttcaagaaggtcttcccttcttgaaagaaaataatatcactccttcacttcacaggctttgaagttgtgatcaccttattcatgtgaggctgtggctattaagtcacacaacattactatgttccctccccacacacatat

SEQ ID NO: 740279 - DNA, 640 bp, Homo sapiens
agattatcacttaaacaatcacatgcatgaaatttaaatctagcacttgcacctaaattcaaactagaatgttacgttaaaaacctacaggctttgttcaatcttggagagactttaactcccaagggaaaaaaagagtcctgttgcacctcaatcctccctagggtgatggtaaggattaaatagatggcatcatttccattttacagataagttggatcagaagggtttctatcttgagtgtgcctggcaccttgttttacatctgtatatactccactgaaaatcattgtttattggttgagtcaccctatagtcaggaaatgggaaaaggaaataaaggtatgatttatgtagttttaggtgtaccgttgtttccattctgtctggttcaccatcctggggaagttttcctttctactctgtgtccaagtgttgaattcctcctaccctgtgagaggatgactacccagaaatgacctctggggttatctyggacttgaatggtgcggaggtaacaactgatggtgtggagcctacaaatgaatgtgaaaagcaacaggtcttcccccgccagtctcccttgcagcaaccccgcaggaaggcagtgagatgaaaagccaggtatggacccctgtgg

SEQ ID NO: 740280 - DNA, 618 bp, Homo sapiens
tcagattaaagatatggaggaaaaacatcagaaagttagtagtgataccctttgggtcacaaggattttttatgtcatttattcctgtattagtgtgtgatttcttatatttagaaaagtttaaaaacagagacattaagcactggcataactcaaaagcttctcatatgtaacaaggtagaatgattagcaaatacataaaatattttatatgtttcaaataaagaagttaattgttcagttgacgtggttaagcctaaagtttcctagttgtcattttaaattgaactgtgcctgggttttgtgagaatgattgagcctctgatattttgacagtaaggaattargcttggtaagttattactttcatattcttagagcctgtgatcaaggtaagcattaaaaacacttccactagttttagcaattgatatgcaaatagatgcatttgcagatagctcttgctcatgtttggtgctagccatggtcatatatatacatatatgtctatatgtatacatattttagtaccttctctgtcagtcagtcctgcctaatatccattgggagcaaatggtatgccaaacatcataatgggtgttcagaataagaaataca

SEQ ID NO: 740281 - DNA, 516 bp, Homo sapiens
ccacttggagggtttatgttatggatttccaggacagaggtatgagacccagctcctcaacttctaacacctcaaagcccaatgcagtcaaacccagcataacataaactgttaaccaaaatgcatctcaccttccacttttaaaaggaaaaggaatgatgycaaaatgtcattagggattttctaatcaatagaaaagatatgtcccaagatccggacacatatgttcaagctaaccttttgcttccagagatctgtgcaatgagaaagaatgaccagaacacactgaatgatgcttaaagacagactgagtcttacacttactgaagcagcaaaagcacacactgcattttagcaagatcgtctcctagcaaaggttgagaaagaaatagcttttcatgtagaaaaaagaagaaaagaaagtttgcatacgtagcccacctgcctcagaaaagagttagtttatgtcatcacatcctctatgccatcatttataaagcacagacaatttcagag

SEQ ID NO: 740282 - DNA, 653 bp, Homo sapiens
tgtcagaccgaaagaaggagggtcctgacacactcaggttacaagtctattctatttcaaaagtaaaaattgttaatttttgattttgtttagagaacacccatctctgggtttcctagttttatttctttcctctatttgtgttacatttggagagagatccaaattttgtggggcccaacgcttacacagcttgagggtctgcttgatgaaaaacatagaaaataacaatacgacattaggtatagaattgaatctttataaactatgaggctggaaaggggcgggtgcaagtacgggccttgaagcttgagccttatcagcctcctggtatgtctgtgtctaaccacatttgattccatttctctcccctttgtgtaggagggtgatagccaggagccagagccttgctctgaggggagaggsaggaacccttctcctgggctctccagtttgttctctactgtgcagttggggcagagtgtcctgcggatggagcaggcagctctgctcttcagcatcaccttggggagggtgactggggaaggcttggccaggctgcttggcagagtcatcctcttgaccatgagatgagtgagatactcatgcagaggccttggcacatgtcaaatgtttccctcagccctttgatt

SEQ ID NO: 740283 - DNA, 522 bp, Homo sapiens
ccacgcccggctaattttggtatttttagtagagatggggtttcaccatgttggccaggatggtctcgatctcttgacctcatgatctgcctgccttggcctcccaaagtgctgagattacaggcatgagccactgtgcagtctattaaatatcaattaaccaagcactatagtatgtgttttctgatccactcttttttcttgttttgtttggagacagaatctcactctgycacccaggctggagtgcaatgttgcgatctcggctcattgcaacctctgtctcttgggttcaagcaattctcccgcctcagcctctcaagtagctgggactacaggcgcttgccaccacgcctggctgattttgtatttttagtagagatggggtttcaccacattggccaggctggtctcgaattcctgacctcgggtgatcctcccacctcagtctcataaagtgttgggactacaggtgtgagacactgcacctagcttttctgatgcttacttctaacacccctg

SEQ ID NO: 740284 - DNA, 522 bp, Homo sapiens
ccacgcccggctaattttggtatttttagtagagatggggtttcaccatgttggccaggatggtctcgatctcttgacctcatgatctgcctgccttggcctcccaaagtgctgagattacaggcatgagccactgtgcagtctattaaatatcaattaaccaagcactatagtatgtgttttctgatccactcttttttcttgttttgtttggagacagaatctcactctgccacccaggctggagtgcaatgttgcgatctcggctcattgcaacctctgtctcttgggttcaagcrattctcccgcctcagcctctcaagtagctgggactacaggcgcttgccaccacgcctggctgattttgtatttttagtagagatggggtttcaccacattggccaggctggtctcgaattcctgacctcgggtgatcctcccacctcagtctcataaagtgttgggactacaggtgtgagacactgcacctagcttttctgatgcttacttctaacacccctg

SEQ ID NO: 740285 - DNA, 633 bp, Homo sapiens
caaacacctgccttggtctcctccccagtgccctgtgcggggctgatggtgcctgggaacctccagagccagtcacaccggatgaccggccctggttattaactaagccccaggtttggggggcaggtcagcactctcgggggggctttcctcctctctgggcctgttttcaatgagagcgaggtacgggaacgggagccccccggcacacgcagcaccatgttcctcgggctgtaggaggaagaaggcccagtggccacccacaaagcttcggggctcttgccaggcctcaggttgtgctcggcccagcgaagcagtaggccccgggccccaggcagagtgagggggcatggcaggaaaggggccaggartgggggaagtagccagactctgctagatccgaagcaatgcagcactgtgctttcctgatgggaatcactgggtacgactaggaagttctccgtctgggtaactgaagccagatgaagacatctgcctgtgttggggcagctgaactaacggatttgtctggtggctctcctgggtggcatggttaggcagaggctgatggggagggatgctggcagggtgggcagctgcccaggcagggtagggtgcctgcctcccagggtc

SEQ ID NO: 740286 - DNA, 495 bp, Homo sapiens
agttttctcatttaaaattggtgatccacctgagatcaggagttcaagaccagcctggtcaacatggtaaaaccccatctctactaaaaatacaaaaattagcccggcatggtggaacacacctgcaatcccagctactcaggaggctgaggcaggagaatcgctagaaccygggaggtggaggttgctgtgagctgagatggctccactgtactccagcctgggcgacagagcgagacccccgtctcaaagaaaaaaaaacctggtgatctagctgggcaacatagggagaccctgtgtttacaaaaaattcgcttggcgtggtggccacgtttctggttccagctacttgggaggctgaggcaggaggctcatttgagcccgggaggttgaagctgcagtaagccgtgatcgtgccactggactccagcctgggttacagaacaaaaccttgtgtcaaaaaataaaataaataaaattggtgaccataccacc

SEQ ID NO: 740287 - DNA, 632 bp, Homo sapiens
ttttagtaactatttaggtaacttggttttatatatgtttagtgtactacttttgaattacctagtaaggtcttctgcttattttgctactgaattatttaactttttactgatttgtataagcttttggtaaccccattataataaycatttgttcaaaattattttacatatatctccattcagctcctagtgttcatattcaatgtttttgagagaaaagaagtccgtcccttctaaaattgtctactctctaaggagtttaaataagtaccaattagtaaatacaattagggaagtttaaacattgtctaattgaatttgatttgtggaaaataaatgtttctcaccttctattattatttaaccatgtataggaaggcagccaatacattctgggctgaaaagtctctttttaaaaagggaaaatgtattctatcaaaaagggtaccaaattacaagtttgcactgcacgttgctgaacacattgtcttttttcaagcttaaactttctaaaacgttagcagtgttccctctgaaacacagagctgctcacattacagccctgctccaaaacatttgatggctcataacagcctacacagctgagcccctcatccattttcctaagg

SEQ ID NO: 740288 - DNA, 556 bp, Homo sapiens
gcattattatttatgtaaggtttcttttagcatatgcctttgagattgatccatgttgttgcatgtatcagtagttcttccccttttattgctgaataatattctattatatgactatgccacagtttagtcatttctgttggacactggggatgggggctgcttccagtatttggttgctttagccacatcccgcagaatataccataatcaggttgcagaacagttccatcacttcctaaaaaactccctcatcgtgtccctataaaggtaattaattataaaggtacctttccctatccataaycgctggcaaccactcgtgtgtgtttttgtttgtttgtttgtttgtttttgaggcagagttttgctcttgttgcccaggctgtagtgcaatgatgccatctcggctcactgcaacctccgcctcccgggttcaagcgattctcctgcctcagcctcctaagtagctgggattaccggcatgtgccacctcgtctcactaatttttgtatttttagtagagatgggttgtcgtcatgttggtcagggtagt

SEQ ID NO: 740289 - DNA, 645 bp, Homo sapiens
gaagcacataattacgtagcataatgtcaggaagtgatgggtgtcatggacaatgaagtcgggctggagatgggagctagagagatattgctagacagaaggtggttttgagcagagagacctgaacaaagagcgagaatggctgggtccttcagtggaggacaaaggacatctctggacttttctctgaaaacgataccacagaaaaatgaaatgacttttccaggatcacacaaccaggtggctacccagctgcagtactgctctggcctcaagatggtaacctgtaccaaccagttttaaaaatactgctccctgccttcaaggaagcctgcacttggatcatcaaatacagcctagagccaactgaggactccaggaagagcatgtgatgaatcccacagctaagtgcrcatgaatgcatgaatgcacgcctcagatatgtagacaggtgcacgttggctgctgcacagaacagactaaatagaggtaatgaaaccataagtgaagaccctgtttgtttacagttcttttcgtaagaggagtcatttatctctgctctttcattctggaaattagcatatgaaggtgtttgctgagtttcctaccttgagagaatgcaaagcttaataaaagaaaatgttt

SEQ ID NO: 740290 - DNA, 639 bp, Homo sapiens
tttcagataaatattgggtaagttgaattgttaaatatctgtgagaaactcatgaagaagagaaaactgaaggaggataaggtgaccatttttgtagacatagagattttcacaaagaagttggaaaaggttgattctagtggctcaatagggcagagtggcccaagtgtgccccgagcccttatctctctgagtgggaatcagtatttcctgtgctgagatcccatatcccagccacactcaccaatgagctaaaagatttttgcataatgcataatcgtggttttcttgctagagacaaaatgaaggggaatggtataatgcctagcaatgggttggacaacgggaatagttttcagatgggaagacttaaaagaaacagaaaaaagrtcgctgagccttgtgtgtgagtgcgtgcatgtgtgcaaacatgtcttgatgtttgtctggccatgtgtttaaccctcagaaaaatgatgagggtggaggcatttttagaatggcttgaatgccttctgacctagagatagaggaaggagccatggatcagtccttttttctttgacttaggtaattgaaaagggtgtatgccttctctcctggcccagagtataatctttactggggctggacttcttg

SEQ ID NO: 740291 - DNA, 643 bp, Homo sapiens
atatattacttagcatccatttactgccctttcctgcactgaggaaactgagctttgtcaatatgaaattagcccttaatctcttatctgaaggtcatctacagaggagaaagccctctcctgaggttggtatgggtagtctacttcaggaggtttcactgtctgtaaaattccgggcttstattgcattcatccttctttgattatggaaaactttcctctgcagctaacactcaggaacaatgtaataagtaacttccaattaaagttttccatatgtggcaaaaattgtaatgaatgaataagtaaagaccgcataatgaaagcctattagccaagtgaatatactcttttaagtgaaatttctataccacttttgtattatctgccatcagaagagaacgtgcaattactaattttatcttatctcagcttattattaaagagtagtaaaggaaacttcattccaggagccataatgtgatttttgattaataggaggttcttatgtgacaagaatatttctcttaggcaaggtatgcacatggatttccgcctgagctggcttggaagctacatctccagtggaacgactgttcaacaatagaacatgtgttcctacacgcgaggtcagattcttaac

SEQ ID NO: 740292 - DNA, 643 bp, Homo sapiens
atatattacttagcatccatttactgccctttcctgcactgaggaaactgagctttgtcaatatgaaattagcccttaatctcttatctgaaggtcatctacagaggagaaagccctctcctgaggttggtatgggtagtctacttcaggaggtttcactgtctgtaaaattccgggcttgtattgcattcatccttctttgattatggaaaactttcctctgcagctaacactcaggaacaatgtaataagtaacttccaattaaagttttccatatgtggcaaaaattgtaatgaatgaataagtaaagaccgcataatgaaagcctattagccaagtgaatatactcttttaagtsaaatttctataccacttttgtattatctgccatcagaagagaacgtgcaattactaattttatcttatctcagcttattattaaagagtagtaaaggaaacttcattccaggagccataatgtgatttttgattaataggaggttcttatgtgacaagaatatttctcttaggcaaggtatgcacatggatttccgcctgagctggcttggaagctacatctccagtggaacgactgttcaacaatagaacatgtgttcctacacgcgaggtcagattcttaac

SEQ ID NO: 740293 - DNA, 643 bp, Homo sapiens
atatattacttagcatccatttactgccctttcctgcactgaggaaactgagctttgtcaatatgaaattagcccttaatctcttatctgaaggtcatctacagaggagaaagccctctcctgaggttggtatgggtagtctacttcaggaggtttcactgtctgtaaaattccgggcttgtattgcattcatccttctttgattatggaaaactttcctctgcagctaacactcaggaacaatgtaataagtaacttccaattaaagttttccatatgtggcaaaaattgtaatgaatgaataagtaaagaccgcataatgaaagcctattagccaagtgaatatactcttttaagtgaaatttctataccacttttgtattatctsccatcagaagagaacgtgcaattactaattttatcttatctcagcttattattaaagagtagtaaaggaaacttcattccaggagccataatgtgatttttgattaataggaggttcttatgtgacaagaatatttctcttaggcaaggtatgcacatggatttccgcctgagctggcttggaagctacatctccagtggaacgactgttcaacaatagaacatgtgttcctacacgcgaggtcagattcttaac

SEQ ID NO: 740294 - DNA, 709 bp, Homo sapiens
taccctctgggatgttcaggttatcagggacacctgcttctaagctgggcaccttggccttggctcaccgcccagcctttaaagacaagcagcggacatgcactcctaagtaacccggtgggtgacccatcacactacgtggctgtaccacttcacattcccmccagcaatgtttgaggttttgtttacccacatccccaccaagtcttattattgtcagccctttggattataactgtcctagtggtatttcactgtggttttaattttcctttccccaatgatgaatgatattgatcacattttcatgtgctctgcctcttttttttttttgagtcattttatctatgaacttgtcacagctcctctcttagactgtaagagtttaaggcttgtgcctatttgtgaaataaatggagtaataatagatcttcctcatagagatcctgtgtgaattaaatcgtataatacaggataagcatttgtacatgtgcttcttatgcactgtattcatttatttattcctttagcagtttatgagaacctcttagatactcagcacaaagactcagaaatgagttaggcatggtctgtgccctggagaaaatcagacctcttctgatgtgatgtctctcaggaatctcaaatgcactgcaccccaaactcaactcattgccaggtccctgaagcccactccacactccacctg

SEQ ID NO: 740295 - DNA, 641 bp, Homo sapiens
caaaattctttgattgcgaacccttttcccctacagaatacctagcaccatcctatgggacaagaggctccaatagaacatagtttcagagacaatggctttggaatgttgttttatcttataatctacatttaaaagaataaagaataaatctctagatacaaaatccaataaccataaagtaaaagtctgacaaatatgacagcctgcaaattaaaatctttctatgcaatggaacaacaggataagtgggagaaaattcttgtaaaatatgttactgtaaaagggttamtattaatgatgcatgaaaaattttaaaaaccaataagaaaaaaatacccaaaataagaatagaaaaagatatgaacatgcaatttagtaatatagatgttcaataaatatggaaaagatgctcaaccatactagccaccaaaaagttgcaaattacacatcagatcaacaaaaatctacaagattgtatgtccaatggtagcaaggttatggggaaatggtcaattaaaggaaattggttactgtatcttccaaggtaattgacaatctctcctaaaatgtatatgtctatatgttttcatgcactaattcttctttgaacaatctatcctacaaggatctttacagat

SEQ ID NO: 740296 - DNA, 510 bp, Homo sapiens
ctattaccactaataaaaagactgcatttcccagttcagggctagaaaggttaatgatgatacattcttttttagtatcaaagattaacatgataacttgcatattaaagttaattcagacctactgctaatggaaggggcatacaaaattaatttctacagcacctcataaattatgatcactcactcttctttggctggtgttctttgtcttggcaggggctgcatgtgtacttaaagtgggcacacttcagttagtaggggggcatctttggcccctgaggaatttgggaagcttggggtgtgtgccttgtagctcttaatcactgcctgtckgccggtgttttcctgctggaatgtgtgtactccattaccagccagcttgttgactggcgtggatcttggttttaatatttaatgagatgatgaaaccgagctgaaatgagaagaatgtggaaggtgggagaaagaatgggaaagataagaaaagagctgccctctcttgatggc

SEQ ID NO: 740297 - DNA, 614 bp, Homo sapiens
agacggaaattaaaaaattctccaaactgaaagacaatagtgacacaacctatcaaaacccccgggagacagcaaaggtggtgttaagaggaaagttcatagccctaaatgcctacatcgaaaagtctgaaagggcacaaacagacaatctaacgttgcacctcaaggaactagagaaacaagaacaaatcaaacccaatctacaaattcaatgcaattcccattaaaatatcaccatcattcttcacagaattcgaaaaaacaattctaaaattcatatggaaccaaaaaaaaagagcccacatagccaaagcaagactaagcataaagaacaaatctagaggcatcacattacctgatttcaaactatgctataaggtcatagtcaccaaaacagcatggtactggtataaaaataggcacatagaccaatayaacagaatagagaacccagaaataaacccaaatacttacagccatctgatcttcgacaaagcaaacaaaaacatgaagtggagaaaggacaccattttcaacaaacggtgctgagataattggctagccacagataggagaataaaactggatcctcatctcttaccttatataaaaat

SEQ ID NO: 740298 - DNA, 563 bp, Homo sapiens
tgcaaatgtctaatttctctacatcttgctaacacttgttattgtctgccattttaaaaatcataatcatcctagtgtgtgtgaagtattatcgtggttttgatttgcatttccttggtgtctagtgatgctgagcattttgtcatgtgctttttggccacttgtatatcttctttgaggaagagtgtattcagatattttacccatttctgattggattgtcttcataagagttctttaaatatcctagatgcaagtcccttatcagatgtatgatttgcaaacattttctcccattctgtgggttatcttttsactttactggtggtgtcctttgaaacataaaagcttttaattttgatgaaatgtaatttatctatttttttcttttgtttttcatgattttgttgtcatatctaagaatcttttgccacatctaaggtcatgaagatctacctctattttcttccaagggttttatagctcttgctcttacatttaggtcttcgacccattttgagttaattttttggagatggtttgggtagaggatccaactccat

SEQ ID NO: 740299 - DNA, 615 bp, Homo sapiens
gtgtgtgtatgtaatgtaggcttcaagctctaagctctaatgaattgaaagttcccaaggtggggagtggctaacggcttgtctttctaggttctgaaatcgtgcctggtctatcactcacctgtcccaagagacacaccaccaccaggtactcactctttattctgaaacctagctcctgcccttaaacttgctttctttctyacctggtaattgagttgaaaaactcagcctgagcagcctgagatgtcaacttactggttccttactgggggccccacctggatcccttttggttcctgaaagtacaagtcattctataccctgaaatgtacctccaccctagaacagttttcaaaagacaattgccaaaaaatccttccctaatgtctattagctgttatcatgtctcccctttcaaatgtcttaccctcagctcaatcattcattcattcaaccaaccaaccaactaaccaaccaaccaatcaaccaaccaacccacccaccaacccaccaactaaccagtatttcctgagttctaggcactctgtgggaagcccattcccatttgaagttaggtataagtgatatataatataagttataagttaggaa

SEQ ID NO: 740300 - DNA, 599 bp, Homo sapiens
gtgtgttttaattctgtcttcgaagagctatgaacagaatgtaaaactctttctccatagaaaggcattttcatcaggccatttggctattgactcagatgcaacatctgatagaattcctaaggaggctgcccacattgtcagttttaattgtcagttaattttattaagtgtctgccctttgtggcctgtttctttggccttgaactgaatgccattgaactgaatgctaatatttattttctgtttaatggaacatgtatgttgggtggataactcccttgtttacattggctctttgcatatcaaatatcttataacgatcttatggtataattctattagtgcaatttgtacaaaactggtccctgatgagccctgcgtatactggagagcttaggactggtcatatctgaaagaccatgttgttaacatcgtttctccaccrtaaagatggcagttcctgtcctgggttcagacccacagagcaaacctagagcaggagggtggcaatttggggaacaaggatgaccttgttttctggctgtctctgggaccatggccatgaaagtgtctgggggctctggtttcaagagatg

SEQ ID NO: 740301 - DNA, 545 bp, Homo sapiens
cattcagcagttatttgaaaggatcccagagtgacaatctctggtagacggaacagaggagacaaaaagcacaccatccctcccacccgccttgcccggctcaccaggatacgccaaagcagcttcactctgtaaacaccagccaaagtcacaaggtccgggagatgttgccctgtttgttcaggagacactgggcatgcgcactcccccttggctcctcccctactcgccaacttcacagtgtgactctggtcacagggatgggaccagatcaatagactttgtcactccaatgccccagcttctttggtggcacctaggtcacctgaggggtttgtttcaggaaagcacattaatttagaaggagaataatgtgggaagaggccgcagttagagagatgtgtctaagcgcctggcctgtgctctctccaaattgccctcattcccaagcaggcycctgagcctgagtttgccctccgaggctcagtcaaaaatattgatgtgcaggcaggttactgagcttttgacagggtttttttcaccaa

SEQ ID NO: 740302 - DNA, 578 bp, Homo sapiens
caaaagccttcttggccctgctatccttttagctactgccctattctgttctttgctgcaaaactcctcagaagatttatcttcatttagtttctccagttcctttcttcccactccatcttaaacccaatccaatgagacttttgtaccctctcccatcccactgcgtggaaactgcctttcaagccgaagacctccaaatgactaatacaagtctcttttctttgtcctcatcttaactgagctttcagcacttgggacagctgaccgcttcctgactcactcttctcttggctcctaggacattgcacttgcctgggtttcctcccaccactctggcatcttcctctcattctcttttggggctcccactcctcttcctgacctcttcccatcagaggctcttmgggctctgtcttggcttctcttctctatccacattcacctactcagtgatctcatccaactcagagctttaaatgctgtcagtatgctaagggtttccaagtttccatcttcagcctagccctctcctcgtctatccaactgcctgttcaacactgccacttgaatgtctg

SEQ ID NO: 740303 - DNA, 564 bp, Homo sapiens
agatggctctgaatgttatagtttaaaaatactctccaagaatacaagccaaatgactgcaggattataagtcctctctcccagttgttcaggtattaaaaacaggcacaagtaagaataaccttcaacagaactaataaacagcacgtgagtaataatgcaatacaccccagtgaggatactacaccatgacaccccagtgaggatactacaccatgtatcttttcctctttttgccaaatacctctaaataataatgtcgacttccttccttctgcatagtccctcctctttaaaatttaaaaaaaaaaaaagcgttaaaggaaatatgatttaaatgtcaaattaagggcacattcttgggttcctcccttagaagcaatgctctcactgmtggaggtactgatggtgcctagaattcaacttccccagctgccattacagcatctgcagttacttaatgctatcgtcaattttccaatatttatggatgatgagccacgcccatcatctgccagtccacctgtcccccagacataactctgcccccttgtggcagatcag

SEQ ID NO: 740304 - DNA, 616 bp, Homo sapiens
taacacatgacatatagtagaatctttgcaaatgaggtgatgcgatgtttgggattttccttttttttttctttttttctttttgttttttgagactgctctgtcaccaggctgtagtgcagtggcgccatcactgcaacctctgcctcccgggttcaagcaattctcctgcctcagcctcccgagtagctgggactacaggcgygtgccaccacgcctggctaatttttgtatttttagtagagacggggtttcaccatattggccaggctggtctcaaactcctgaccttgtgatccacccgcctcggcctcccgaagtgctgggattacaggcgcgagccaccgtgcccggctgggattttcttaaacataaggggagggaggaagtagcttgtggatggggcaggattggcaggggttgacggttgttaaggcgaggtgatggttccactggggttcctgtgctagtctctatttctgtgtaggttcaagattctcgtatgtgttttgaagcggggtaaaccaatgatggaggtggctttattaagcctcccttatcgaattccattttttctaatggtatcccatcttttttttttgcatggtttagatgc

SEQ ID NO: 740305 - DNA, 652 bp, Homo sapiens
aactgcttgcttttgtattatgttacctgatttactgactaaaatagttattgaaacaggttactcttgggtttttaaagaagagtgtagtgtagacacttagaaatgtctgtttcaaacaaattgtttaaagtgtactgtaaaaacatcacattgtctaacctcataataattctcccggtttggaaacccaggattaagtgtgggctctgcccggagctcattgatccagttaaaagataggtagtccctacctaaatacgattggttttctyatacaatcccatgatagatttttgtaattttatgtttgatttgacattcatttttaatctccctctagcacaccagacttttctctgtaccttatgatgtaaaatttgctatttgattttcacctgagttatttcctttaatatgcatatttaatgctatttagcttacaactacctagggttgtgaaacagcttatcaagaatttgaaagtctgacaggaataaaaaggtttttgtgaatctataatatagttatttctatcagcattcctgatgaagctggggacactgaatttgtaaattccgatgagcctttttttgccagaagaaacaacttccccatccccagtgggggcaacatccctccctgacccacg

SEQ ID NO: 740306 - DNA, 568 bp, Homo sapiens
aaaaaggttctaattgttggtttgcttggttagctgaaatatgggttaaaagatcgcccactgtgggtgagctggaaatgcctaatctcccttggtgtaatgtacagggarggatcaaaaggcttaggaagattgggatgctggagtggattagtcactttagacctactcatccaagctgggagggtccagaagacatacccttcactaatactttgcaaaacagattcgtgagggcagcatctgcatccttgaagagctctgtgattgctcttctctgtatgccagatctaacagtgggaaccgcagtcactcaactacaaaatttaaatgcaatgggaataattggatcccgaggtggcacgagccaagtggcggcactcaaccatcaaaggcaaggtgggcatagctaccataatggacagcagaggcaaagcagccatcagaatagtctgactcatgtagagctctgggcattggctaattaatcacagtgttcctaaaagtgaaattgataggaagcccactgcattcttacttaatttatataagcagaaaacttccaggc

SEQ ID NO: 740307 - DNA, 719 bp, Homo sapiens
atggatgtgccacattttttgtatctgttcatttattggcagacacatgggttgcttctaccttttggctgttgtttactgaatattttttatacatggtataaaaagtttgaaaaaacatccttgagttagtggcaatatgcaaaaaagaataagaaagtgcttggaggatgtgggtttaaggaaaatcttgaaaacagcagatgccggacatgttatgaacatatgtatcttagttttctcttgtttagagtacgaaatatggtctaaaccataggtttagaaatttttgtagagtatgaattttttcttttcagaatatgaatcacaaaacgagaaggaccacagcagtagcacctacattcttacagagtcatgttggaatatagccatgtaccattaaatgtatgatcttagccaggcatggtggctcatgcctgtaatgccagcactttgggaggctgatgcaagcaggccagatgaagccaggagtttgagagcagcctggctaatgtggtgaaaccccattcgtctctactaaaaatacaaaaattagccaggtgtggtkgtgggcgcctgtaatcccagctactcgggaggctgaggcaggagaattgctttaacccgggaggcggaggctgcagtaagctgagattgcaccactgcacggcagcctgggcaacggagcgagactctgtctcaaaaataaataaatgcat

SEQ ID NO: 740308 - DNA, 582 bp, Homo sapiens
cacttcctgggctcaagtgatcctcccacctcagcttccctagtagctgggaccacgggcacatgccaccactcctgactcattttttgtagagatggggttttgccatgttgttcagactggtctccagctcctgagctcaagcgatctgcctgccttggcctcccaaagtgctgggattacaggcatgagccactgtgctgggccaggcatagattcttgaaggagtcagagtcaaaagtttagagcatggtcttgtccttgatcaagcctgtccttggttactttaaaggaaattggttaattttgacccagcttggtatgttaagatattggtatttctgagaggaggggagatttggacattactgtttaatggggatattgtttcagttttggaagatgaaacgtttggaagatggatgmtggtgatggttgcaccaccctgtaattgtacttcatgccacctagactgtgcactaaaacatgcttaagctgaaaccttttatgttagcatatatgtaaacacacacacaacagaggaaataccatgtttgaggtcagatggtgggtaaatggtag

SEQ ID NO: 740309 - DNA, 606 bp, Homo sapiens
tcagagaattttttttgtgtgtgtgtgactgagttttgctcttgttgtccaggctggagtgcaatggcgcgatctcggcttactgcagcctccgcctcctgggttcaagtgattctcctgcctcagcctcctgagtagctgggattacaggcgcatgccaccatgcccggctaattttgtatttttagtagagatgggctttctcyatgttggtcgggctggtctccaactcccaacctcagatgattcacccgccttggccacccaaagtgctgggattacaggtgtgagtcaccgtgcctgctgcgaaatttttattttacccaaaggtgacctcttagaatccacaaagagtttacaaaactattagtgtaattttgcctttgatttagagtggtgcatacgaatcacctgtgggatcttgttaaaatgcagattctgacaggcaggttggggtggggctggagagcgggctgaatttttcacaagctccttggtgatattatgttgctggaccaaccacattggagtagtaaggattttgaagacgttcctgaaaaatgccttagggtcataattacttaaaatgaagagcaagaagcactc

SEQ ID NO: 740310 - DNA, 642 bp, Homo sapiens
tgaagttccctgcagctctccccgtgatgtggttttgagccattccttagagactgggagaggagtctcctctgcgcaactgacccagagctccacaatccctgtaatgaagagaatgtgcttctcttccattcagcaggaaacaaaactgccacgcctcggaacctggcagcccttccactctggccactgagcttgccttcggtgcaacagaaacctctcctgctcttgtcaacactgtgcttagatgctgggtacataataatttgagatgatccagggccagagagcacaggaagacagaaaacaggcacctaaaaaacacttgttctcactctgctcaggagcttccaggacggtgccacgttttcacagccacagcacttgacaagacsgggagacagtgacatggagcctcttccatcacctccctccctacagtccccatgacttttctcccatctctaccctggtctaaaaccctcagccctcccctactgaattactgcaacacgccctcagcccatctgtcctttctcatctcagccatatcacttccctcttaaatcttctgaaatttttcttagagaaattctcctttcagaaacctttaaacagactgggtgcagtggctcatgccta

SEQ ID NO: 740311 - DNA, 622 bp, Homo sapiens
ggtgggtggagtctgaatggagccctttcctgggtggaggaagagatcttgcagtttcgaaatttcgaggggaattttatcaggaagagcaaataatcgcacaaaaggggaaaaatggacaaaactcagcatttgcctttcttacctctcctgagctggtctccacgtgagttccaaaacaaactccgttagacgattaacatttttttttttctctctctctcttttttttttttttttgacagagtctcactctatcgtccaggctggagtgcggtggtgcgatttcagctcaccctttccgggttcgagtgattcttgtgcctcagcctcccaagtagctgggactacaggtgcgcagcaccacgcccagctaatttttatatttttagtagagacggggttttgccatgttggcyaggctggtctctaacccctgacctcaggtgatctgcctgcctcggcctcccagagtgctgggattataggtgtgagccaccgtgcctggccgtgattattgaggctttagctgagcgcagtggtgtaagcctgtggtcccagctagttgggaagccgaggtggtagggttgcttgaggccagcctgggcaacataatgagacc

SEQ ID NO: 740312 - DNA, 556 bp, Homo sapiens
cacccgaggagattctcacttgattgcctgtgatggggcccagacctgtggtttttaaagctggcaggccattgctctgtgcctccagagctgaaggctcttgacatagctgttctcgtttgtggctggctcaccagagaggccgtggtaggacagaccccactgggcctggtcccagggttgagagcatgcggggctaccctgagactcctgagcctcctcagcctgcccctgccctgtcctgtccagacacagagaacacttgggctctgctgggcttgtggcccatgcccgctacactcacccaggaccatgcgatccgcaaccctgggtactgcttggtgacctccagcaaagactgcactgaatgaggccggccarcacgcacaacgcggcccgacctctgagctacccaaagggagagcagcaagttgcctgtgcgtggctggttcctgtgcgcccataggagcatgaaacgcccccaaagggcccactggccagatggtcactggggcaggcgggcagctgccattcactggactcctaattgtgttga

SEQ ID NO: 740313 - DNA, 698 bp, Homo sapiens
ccaggttgttccttctcaagtgtctctcagctactccctaagtaagatccagggcttgggaagctcaaggtgctctcctgtggcctggattgcacacttccccagtgggaagatggactgcagaggaacactgactccccatctcctgtattggggattttctgtttttagccagactctgccaggagggctgtctcccaaatttctctttcccagtgtctgaaatrttctgttcaattcctgtattccttcttggataaaagttaatgatgtgactatctgcacactattttgctttttccaagtgggttaggcatgctggaaaagcctctaatctgctgtctttgggggaaaaacccatacaaagattgtgttttctatttctgtgaataatatcactggcattttgatagggattacattcaatctgcaggtcacttctgatagtactgtcattttcacaatattaattattcctatccatgaacatgggatgtctgttttgtttcctcttcaatttctgtcatcagtgttttagttttccttgcagacgtttcacctctttgactaaatttattcctatgtattttataattcttttttggtggctattgtaaataagatggacttcttgatttatttttcagtgagttaattgttggtgtatatacacagaactgatttctgtatgttaattt

SEQ ID NO: 740314 - DNA, 610 bp, Homo sapiens
ttgtgcattcctctgtttgcattatatttttctcaagaaaactggttagcaatgtagattactgacttaagttctgacccattttcttattgccaaagatttggtatcagctgatgactaccctaacaaaaaagattyggtcatttccacttctgacggtgactagaaaaagcaaactgtttttcctctgttctcaccccataacagtcaacacagaagacttccgtgaccaacagtcagtggtgggggcagtgtcgagtggggcgagggggcccccacacacgaagtaagcaagcagttctgaggcagatgccaactgggtgtccctcaattcaattcagttccaacgctgtctacctggaaatggcatcaggtcccccagggtgagggctcagtcccacaagactgtctccacgtccaatgcccagcgcaagcccaagtgttcaacccatgcttctgaccaactggctatgagtcagggtgcccaccgccccctccttaggtttggttaatttgctacagcagctcacacaactctgagatttttatttatttatttattttatttttttgagatggagtcttgttctgtcacccaggctggagtgca

SEQ ID NO: 740315 - DNA, 545 bp, Homo sapiens
atccatttaggtgacagttcactgtgtatggagaaacctttaggccgaacttaaaatatataaggaagcagtttagtctaaatttaatttaacagcataaagacagacaaatggattgctggaacagaatagtgcccagaaatagacccacacatttacaatcaatagattttccataaaggtgccaagacagttcagtgggggaaaggataatcttttaaacaatcgacgacggaacaattggatatccatatgcaaaaaaaaaaatgaacttcaactcttattttctgccattttcaaagatttacttraagtggaccatctaagtgtgagaactaaaactataaagcttctagatgaacatgtatgagaaaatcttagtgaccttgggattcttaaatctgacacaaaaagcacaaactataataggaaaaaatcaataaattcgatcttaccaaaatttgaaacttttaatcttcaaaagacattgttataacaatgtcaaggcaagtcacagactaggaggaaatatttgcaaaatgtat

SEQ ID NO: 740316 - DNA, 545 bp, Homo sapiens
atccatttaggtgacagttcactgtgtatggagaaacctttaggccgaacttaaaatatataaggaagcagtttagtctaaatttaatttaacagcataaagacagacaaatggattgctggaacagaatagtgcccagaaatagacccacacatttacaatcaatagattttccataaaggtgccaagacagttcagtgggggaaaggataatcttttaaacaatcgacgacggaacaattggatatccatatgcaaaaaaaaaaatgaacttcaactcttattttctgccattttcaaagatttacttgaagtggaccatctaagtgtgagaactaaaactataaagcttctagatgaacatgtaygagaaaatcttagtgaccttgggattcttaaatctgacacaaaaagcacaaactataataggaaaaaatcaataaattcgatcttaccaaaatttgaaacttttaatcttcaaaagacattgttataacaatgtcaaggcaagtcacagactaggaggaaatatttgcaaaatgtat

SEQ ID NO: 740317 - DNA, 526 bp, Homo sapiens
cttttttcaagtttcttagcttcctttcattgggttagaacatgctcctttagctctgaggagtttgttatgacccaccttctgaagcctacttctgtcaattcgtcaaactcattctccatccagcttgttcccttgttggtgaggagttgtgatcctatggaggagaagaggcattctagtttttggaattttcagcctttttgtactggtttctctccatctttgtggatttatctacctttggtcgttgatgttggtgacctttgratggggtttctttgtggacatgctatgccttctatttgttagttttccttctaataggcaggcccctctgcctcaggtatgctggagtttgctggaggtccactcctgaccctgtttgcctgggtatcaccagcggaggctgcagaacagcaaagactgctgcctgttctttcctctggaagctttgtcccagaggggcacctgccagatgccagccagagctctcttgtatgaggtgtctgtcagcccctactgg

SEQ ID NO: 740318 - DNA, 575 bp, Homo sapiens
  misc_feature 533, 534, 535, 536, 537, 538, 539, 540, 541, 542, 543, 544,545, 546, 547, 548, 549, 550, 551, 552, 553, 554, 555, 556,557, 558, 559, 560, 561, 562, 563, 564, 565, 566, 567, 568,569, 570, 571, 572, 573, 574, 575: n = A,T,C or G
cccacacgggctgggcacaggcagaagagacatataacctgagtgctaagtgcggggcctagaaacatgtgacaatgctccatgtaggcagggccaaggcagaatagaataacatcacctatgttctgggtccagtgatatatcacaatttcatctctgggctgagactcaaatcatgctgggtgctgggcacatgacatgtcagtcacacctgcaggtaggtccagggacgagattaacaatcctgcacatgtcccagttttaggtatgagagtcaacactgttgcrggaagtcagggaccccaaacggagggaccggctgaagtcatgacagtagaacgtggattgcaaatatttcatggacacttatcacttccccaatcaatacccttgtgatttcctatgcctgtctttactttaatctcttaatcctgtcagccaagaaggatgtatatcgtctcaggaccctgtaataattgcgttaactatacaaattgtacagcgtgtgtgtttgaggatatgaaatgtgggcnnnnnnnnnnnnnnnnnnnnnnnnnnnnnnnnnnnnnnnnnnn

SEQ ID NO: 740319 - DNA, 575 bp, Homo sapiens
  misc_feature 533, 534, 535, 536, 537, 538, 539, 540, 541, 542, 543, 544,545, 546, 547, 548, 549, 550, 551, 552, 553, 554, 555, 556,557, 558, 559, 560, 561, 562, 563, 564, 565, 566, 567, 568,569, 570, 571, 572, 573, 574, 575: n = A,T,C or G
cccacacgggctgggcacaggcagaagagacatataacctgagtgctaagtgcggggcctagaaacatgtgacaatgctccatgtaggcagggccaaggcagaatagaataacatcacctatgttctgggtccagtgatatatcacaatttcatctctgggctgagactcaaatcatgctgggtgctgggcacatgacatgtcagtcacacctgcaggtaggtccagggacgagattaacaatcctgcacatgtcccagttttaggtatgagagtcaacactgttgcgggaagtcagggaccccaaacggagggaccggctgaagycatgacagtagaacgtggattgcaaatatttcatggacacttatcacttccccaatcaatacccttgtgatttcctatgcctgtctttactttaatctcttaatcctgtcagccaagaaggatgtatatcgtctcaggaccctgtaataattgcgttaactatacaaattgtacagcgtgtgtgtttgaggatatgaaatgtgggcnnnnnnnnnnnnnnnnnnnnnnnnnnnnnnnnnnnnnnnnnnn

SEQ ID NO: 740320 - DNA, 575 bp, Homo sapiens
  misc_feature 533, 534, 535, 536, 537, 538, 539, 540, 541, 542, 543, 544,545, 546, 547, 548, 549, 550, 551, 552, 553, 554, 555, 556,557, 558, 559, 560, 561, 562, 563, 564, 565, 566, 567, 568,569, 570, 571, 572, 573, 574, 575: n = A,T,C or G
cccacacgggctgggcacaggcagaagagacatataacctgagtgctaagtgcggggcctagaaacatgtgacaatgctccatgtaggcagggccaaggcagaatagaataacatcacctatgttctgggtccagtgatatatcacaatttcatctctgggctgagactcaaatcatgctgggtgctgggcacatgacatgtcagtcacacctgcaggtaggtccagggacgagattaacaatcctgcacatgtcccagttttaggtatgagagtcaacactgttgcgggaagtcagggaccccaaacggagggaccggctgaagtcatgacagtagaacrtggattgcaaatatttcatggacacttatcacttccccaatcaatacccttgtgatttcctatgcctgtctttactttaatctcttaatcctgtcagccaagaaggatgtatatcgtctcaggaccctgtaataattgcgttaactatacaaattgtacagcgtgtgtgtttgaggatatgaaatgtgggcnnnnnnnnnnnnnnnnnnnnnnnnnnnnnnnnnnnnnnnnnnn

SEQ ID NO: 740321 - DNA, 552 bp, Homo sapiens
cttttgggggatttttgtttcagcatcttgacccacacccgaagcaccacaccaaactaatactgctgggttcaaatcaccgttctgtctactttatttttatttattttattttatttttgagacggagtctcgctctgtcgccccagactggagtgcagtggcgcgatctcaactcactgcaacctccgcctyccaggttcaagtgattttcctgcctcagcctcccaagtagctgggactacaggcgtgtgccaccatacccggctaattttttgtattttcagtagagatggggtttcaacatgttagtcaggatggtctcgatctcctgaccttgtgatcggcccgcctcagcctcccaaagtgctgggattacaggcgtgagccaccgcgcccagtcctgttatgtctactttagacaccaagtcactgactcctaatgacagtcctacaagatgatatatatgtcccggttttaacatgcagaatctgaggctcagaaggtagaagaaggaacaggagacctcaggggtgtccttgagggtcaga

SEQ ID NO: 740322 - DNA, 627 bp, Homo sapiens
gtaacagggaggctgaggtgggaggatcgcttgagtccaggagtttgaatctagcctggacaacataaggagaccccagtgtttaaaatgaaagaaagaaagggaaaaaaagtatttactataataatatgcttttaagccgggcacagtggttcacacctgtaatcccagcactttgggaggccgaggcgggcggatcatctgaggtcaggagtttgagaccagcctaacatggtgaaaccccgtttctactaaaagtacaaaaaactatccaggcgtggtggtgcgcgtctggaatcccagctactaagggggctgaggcaggagaatcactggaacccgggaggtggaggttgcaatgagctgagatcgcgccattgcactccagcttaggcaacaagagcgaaactcgtctcaataataataataataataataataataataatawgcttttttacacccattgggggaaaagtttagaaaaatagcgaacaagtgtcctgcgctgcccagactagcaaacaatacagtcaggatggctaatggtgaccccaagaaaccaaagggcaaaatgtctgcttatagtttttttgtgcagatgtacagagaagaacataagaagaa

SEQ ID NO: 740323 - DNA, 631 bp, Homo sapiens
gattggaccccactctaacaccctcattttaatttaatcgcccttaaagggttctatctcaaaacacattctaaggtactggagattcggggcacttcaacatttagatttgggtagcagcacaaaatttttcacataacacctttcagtgatccaccctttggccccttttggctgagcaaagtggcttatgcctgtaatctgagcacttcaggaggctgaggtggaaaaaatcccttgagccgagttcaaggctgcagtgagccatgatcgccactgggtggcagagcaagatcccatttactgaagcaaaaaatgaacyaatcagggaatttaggatacccatcacattaaatgcttatcatttctttgcgttgagaacattttagatcgtctcttagctattttgaaatgtacaataaattattgttaacaataatctctactgtgctaacagtagagcttattcattctaaccatatcgttgtactaattaatcaaaatttcttcaccaccagcaccccaactttttgctgtacagaagttttggatataatcccaattgtctatttttgctttcattgactgtgcttttggggtcatatccaaaaatcattgcttggacaaatat

SEQ ID NO: 740324 - DNA, 605 bp, Homo sapiens
gagaccatcctggcaaacattgtgaaaccccatctctattaaaaatacaaaaattagctgggtgtggtggcgtgtgcctgtagtcccagctacttgggaggctgaggcaggagaatcacttgaacccaggaggtggaggttgcagtgagttgagatcacgccactgcactccagcctgggtgacagagtgagactccatctcaaaaaaaaaaaaaaaaaaattttaaactagtccagagctacatcccaatgagttgytgaaataatctggagcacttggtcctcccgtctatacaaatccctaatacctctgacagtaatttaatgtaatccacacttgtggtgatggttgatgttttattctatactattatctgatatttaaatcacactgcaattgtagttgtgaagtttatccagcctacaaaaattacaaacatgattttcaggataatagaggtgtcagtatagagcctcttttcatgtcatgatgaataaatataactatgtgacaattatatcaaaaaactgaatgtctgagaggcaatggctgcaatataaataacttattttttttctgaaaggtgggcatatcatatgcttca

SEQ ID NO: 740325 - DNA, 553 bp, Homo sapiens
tacatcccaatgagttgctgaaataatctggagcacttggtcctcccgtctatacaaatccctaatacctctgacagtaatttaatgtaatccacacttgtggtgatggttgatgttttattctatactattatctgatatttaaatcacactgcaattgtagttgtgaagtttatccagcctacaaaaattacaaacatgattttcaggataatagaggtgtcagtatagagcctcttttcatgtcatgatgaataaatataactatgtgacaattatatcaaaaaactgaatgtctgagaggcaatggctgcaatataaataacttaytttttttctgaaaggtgggcatatcatatgcttcatggatacagtactatccacagaaaatatctgaggtctgctgattatagtgaaactattatccctcttggccttaggcaatatctgtttgtagaaaagttagcattatgatgagtttcagatgaaaaaaatctgggaattggcagtttgcaggttcagatgtatcttgtgatagttctctgttaaaaag

SEQ ID NO: 740326 - DNA, 553 bp, Homo sapiens
tacatcccaatgagttgctgaaataatctggagcacttggtcctcccgtctatacaaatccctaatacctctgacagtaatttaatgtaatccacacttgtggtgatggttgatgttttattctatactattatctgatatttaaatcacactgcaattgtagttgtgaagtttatccagcctacaaaaattacaaacatgattttcaggataatagaggtgtcagtatagagcctcttttcatgtcatgatgaataaatataactatgtgacaattatatcaaaaaactgaatgtctgagaggcaatggctgcaatataaataacttattttttttctgaaaggtgggcatatyatatgcttcatggatacagtactatccacagaaaatatctgaggtctgctgattatagtgaaactattatccctcttggccttaggcaatatctgtttgtagaaaagttagcattatgatgagtttcagatgaaaaaaatctgggaattggcagtttgcaggttcagatgtatcttgtgatagttctctgttaaaaag

SEQ ID NO: 740327 - DNA, 599 bp, Homo sapiens
aaaaaaataagactaggcatcatggctcatgccggtaatcagagtacttatggaggctgaggcaggaggattgcttaagcctaggggttcaaaatcaacatagcaagacccctgtatctgaaaaacaaaaagaagctgggcgcggtagctcatgcctgtaattctagcactttgggaggcmgaggcagatagatcacttaaggtcaggagttcgagaccagcctggccaacatagtgaaaccctgtcttaactgaaaatacaaacaaaaattagccaggcatggtgcaggtgaccataatcatagatacctggaaggctgaggtagcagaatcccttgaacccgggaggcagaggttgcaatgaactgagatagcgccactgcacttcagcccgggcaatagagcaaaattccatctcaaataaaggaaaggaagaaaggaagaaagaaagaaagaaagaaagaaagagaaagagagagagagaaagaaagatctccagtcaaataaacaaaaaaattatttatttatttgaaactgagtctcgctctgtctctcaggctctgtttcatgacagtgaaactccatctcaaaaacaaaac

SEQ ID NO: 740328 - DNA, 637 bp, Homo sapiens
taaggccgtgcatctacaaccaactgatctttgacaaagctgacaaaaacaagcaatggggaaaagactccctatttcataaacggtgctggataaccagctagccacatgcagaagattgaagctggaccccttccttataccatatacaaaaatcaactcaagatggattaaagacttcagtgtaaaaccccaaactataaaaaccttggaagacaacttaggcaataccatcctggacacaggaatgggcaaagatttcatgacaaagacaccaaaagcaatcataacaaaaacaacaattgacaagtgatatccaattaactttaagagcttctgcacagcaaaagaaactatcaacggagtgagcagacaacctacagaatgggagaaaatttttgcgaactatgcatctaacaaaggtctaatatccagcatctacaaggaacttaarcaaatttacaagagaaaaccccattaaaaagtgggcaaagggccaggtgcggtggctcatgcctataatcccagcactttgggaggctgaggcagttggatcacctgacatcagaagttccgagaccagcctggccaccatggtgaagctccgtctctactgaaaatacaacaattagctgag

SEQ ID NO: 740329 - DNA, 578 bp, Homo sapiens
gaggagatgccaggcccctttaaacaaccagcttctgcatgacctaacagagtgagaactttttcatgaccacggggagtgcaccaagccatttgtgagggatctgctcccgtgactcaaacacctccactaggccccacctccaacactggggattgcatttcagcatgagatttggaggaaacacatatccaaaccatatcagcctcctcatatatggacattgaatggagtcctgagaaggatattgtctcactggtggccaaattaactttagactagaggctgttttggacctggctaacagtctgaaaagcaagccttgaaagtttcatactgtttcgcataacttaaatgcatgctaaaacaaaactcccaaatatttatgggaatataaaaaatgtcggcastcagcaatgtagaattcataatgtttgacgtccagtaaaaagttaccaggcatgcaaagaagcagaaaagtaggacccaatcgtgaaaaaaaaatcatccaatagaaagagaaccaagatgttacagatgatagaattagtagataaggacattaaaacagctattag

SEQ ID NO: 740330 - DNA, 578 bp, Homo sapiens
gaggagatgccaggcccctttaaacaaccagcttctgcatgacctaacagagtgagaactttttcatgaccacggggagtgcaccaagccatttgtgagggatctgctcccgtgactcaaacacctccactaggccccacctccaacactggggattgcatttcagcatgagatttggaggaaacacatatccaaaccatatcagcctcctcatatatggacattgaatggagtcctgagaaggatattgtctcactggtggccaaattaactttagactagaggctgttttggacctggctaacagtctgaaaagcaagccttgaaagtttcatactgtttcgcataacttaaatgcatgctaaaacaaaactcccaaatatttatgggaatataaaaaatgtcggcagtcagcaatgtagaattcataatgtttgamgtccagtaaaaagttaccaggcatgcaaagaagcagaaaagtaggacccaatcgtgaaaaaaaaatcatccaatagaaagagaaccaagatgttacagatgatagaattagtagataaggacattaaaacagctattag

SEQ ID NO: 740331 - DNA, 610 bp, Homo sapiens
ccctgccggcaccttgatcttggagttccagcctccagaactgtgagaaaatgtattcctgttgttgaagccatttctgttgttctgtggcattttgttatggcagccctagcaaactaatatgataattaactcttccaagtgctstttccattacaaagtatcccagaattttatattggtgaatctgtgttcctcaggccatgtcttccctgttggaaatgctgttattatgtcccaaggtgacttcaaggagtgggttagaggctgagacagagggtgtgagatcgtcactactgtaaccttgctttgttcagtatgaacatgctcagatattctctgttttgtattgggagatcgggaaaggatttattgaaaaaatgtttccattagcaaatgaagtttgaaggcaactaccatctacaagagcaaacaaatgcataaaattcaaatattattttgtcccaacctcagtgtcatgagggtctcttatacagaatagtagatgagaataaaatttgaattgataatactggaatagagtagtcattatgcaatgtaacaaacctcaaatattcagtggtttaacactatagatgtttatttacca

SEQ ID NO: 740332 - DNA, 610 bp, Homo sapiens
ccctgccggcaccttgatcttggagttccagcctccagaactgtgagaaaatgtattcctgttgttgaagccatttctgttgttctgtggcattttgttatggcagccctagcaaactaatatgataattaactcttccaagtgctctttccattacaaagtatcccagaattttatattggtgaatctgtgttcctcaggccatgtcttccctgttggaaatgctgttattatgtcccaaggtgacttcaaggagtgggttagaggctgagacagagggtgtgagatcgtcactactgtaaccttgctttgttcagtatgaacatgctcagatattctctgttttgtattgggagatcgggaaaggatttattgaaaaaatgtttccattagcaaatgaagtttgaaggcaactaccrtctacaagagcaaacaaatgcataaaattcaaatattattttgtcccaacctcagtgtcatgagggtctcttatacagaatagtagatgagaataaaatttgaattgataatactggaatagagtagtcattatgcaatgtaacaaacctcaaatattcagtggtttaacactatagatgtttatttacca

SEQ ID NO: 740333 - DNA, 626 bp, Homo sapiens
gttgacgagatgtggaacaactgtttttttttctcttcttttatttttttatttttatttttttattatactttaagttttagggtacatgtgcacaacgtgcaggttagttacatatgtatacatgtgccatattggtgtgctgcacccatcaactygtcatttaacattaggtatatctcctaacgctatccttcccccctccccccgagatgtggaacaacttgaactctcacaagctgctgatggaaatgtaacatagccactttagaaaacagttgggcagtttctcaaaatgttaaacagacacctaaaatatgatgcattaatttcattcctaggtatttacccatgagaaatgaaagtatatattcacaaaatgatttttatataaatgtttacagttttatttgtaatacccccaaatggaaacaactcaaatgttcattgtcaagtgaatggatgaacaacacaagcaaaacattctagtcagcaataacaggaaacaggaatggtacatgtcacagcatgaatttcaaaataattatactgaaagaaagcagacaaaaaaaagtgtacaaactatatgagtccatgcacagtaatgtccagaaaatgccaattaa

SEQ ID NO: 740334 - DNA, 401 bp, Homo sapiens
tgtccaagaggtagacaaaaattcatctttccatccaaatacctgtacaagctcaacccaatgagcttgtgaaacacaataccagcagttctgggggcccatcttgccactaatactagtctctaaattatgcccagacccccaagatctccacaaggctgggttccaaactctcacccccagtcaccaaggtctgtgtgcasacagagtgatggatccctctcaatgccccatgagcatgtcaactcccttcattgcaagacagctcctgaaaaaaacctccccaggctccagcatcttgggtttaatcagtgccaccttggtctatgcaaagatagacatccttgtctggggatcgaggctccagggacagcttttgcatcagaacccctctgggtctc

SEQ ID NO: 740335 - DNA, 608 bp, Homo sapiens
ctgccccagatgcttacccagggaaatcccttcaggcctaggctggaatcctaggacccagagacaactgaggcacgggccacaccacagataagcagcctccaccctgccatggtgggtaagcgccaccagccctggcaagtctctccttcctacctatagcactgctttctaaacccaaaagtgtgctattgtcaggggtggctgcaggttatacccaccttgcctgggctctctgcrggggtcccgcccccagagagacacccttgagtccaggtcttcagccctcctcctggcaggttcaaagtaaggctggccagtgttcgggggagacagggttcctcatccacagctgaggcatcgaggctgagcctagtggagaagacagggtactggggcttcagcaggtcttgcccacctggctgctgccccaggcatccaggggggcttgaaagaacatgcaagggggcccttccaggacaaggaagggtgcgcaagccacagaaaggggtccagacctcccaatatgagaggagtgggtggcaagggggagaggacaaagaaagccagcctggttagatttgttggagctacatttgcatctcaga

SEQ ID NO: 740336 - DNA, 608 bp, Homo sapiens
ctgccccagatgcttacccagggaaatcccttcaggcctaggctggaatcctaggacccagagacaactgaggcacgggccacaccacagataagcagcctccaccctgccatggtgggtaagcgccaccagccctggcaagtctctccttcctacctatagcactgctttctaaacccaaaagtgtgctattgtcaggggtggctgcaggttatacccaccttgcctgggctctctgcaggggtcccgcccccagagagacacccttgagtccaggtcttcagccctcctcctggcaggttcaaagyaaggctggccagtgttcgggggagacagggttcctcatccacagctgaggcatcgaggctgagcctagtggagaagacagggtactggggcttcagcaggtcttgcccacctggctgctgccccaggcatccaggggggcttgaaagaacatgcaagggggcccttccaggacaaggaagggtgcgcaagccacagaaaggggtccagacctcccaatatgagaggagtgggtggcaagggggagaggacaaagaaagccagcctggttagatttgttggagctacatttgcatctcaga

SEQ ID NO: 740337 - DNA, 565 bp, Homo sapiens
ctcactgcaatctctgcctcccgggttcaagcaattctcctgcctcagcctcctgagtagctgggattacaggctcccggctcactgcaatctctgcctcccgggttcaagcaattctcctgcctcagcctcctgagtagctgggattacaggtgcccagcaccatgcccaactaatttttttttttaattttttatttttagtagagttggggtttcaccatgttggccaggctggtctcgaactcctgacctcaggtgatccacctgcctcggcctcccaaagtgctgggattacagacgtgagccaccatgcccagcctggaatgactgctttattttcccctctataagttacgagagtcttcgtgtgtcatctccatgccaggagcctcatggcctcgttttcccggggggccactccccrtgtatatacctcagacactgctattctattagaaaaacatgtgaagttctctgattgggggaaagatccatttcctgctcatgttgatttcaacaaaagaaaggaataagtttccctctggatcctcagacttcactgg

SEQ ID NO: 740338 - DNA, 559 bp, Homo sapiens
tgaaggaataaaggaagctggctctgggaatagagtccacacaatgaggtctgagtggcttcccaagcaaaatatgattctaacccatgcaaaatctggttctatctccaggaatgctgagtaggcaaatctgaatgcctcctctccagagatgagtaatcttgtgtttgcctccttttcaagttggtggcaaaagtgaatcctatttttttgttttattttatttttgagatggagtctcgctctgtcgcccagcctggagtgcacgtggtgcgatcttggctcactgcaacctccgcctcccgggttcaaacgagtctcctrcctcagtttcccgaggagctggggctacaggcgcgccaccacgcctggctaatttttgtattttaagtagagacggggtttcgccatgttggccaggctggtctcgaactcctgacctcaggtgatcctcccgccttggcctcctaaagtgctggaattacaagtgtgagccactgtgcccggccacggatcctatttttacaacttgtgccaactctaggtaggttcggtcttg

SEQ ID NO: 740339 - DNA, 611 bp, Homo sapiens
acagttggttattcaaccctcgccgcctccccctttccggtctctagcagtcgccagtgcccatttttccatctttacatcatgagtacccaatgttaagctctcacttataagtgagaacatgtggtatttggttttstgttcctgcgtgaattccatgaggataatggtctccagccgcatgcatgttaccacaaagcacaagatttcatccttttttttttgagacggagtttctcttttgtcgtccaggctggagtgcaatggcacgatctcggctcactgcaacctccgcctcccaagttcaagcgagtctcctgcttcagcctcgaaagtagctgggattacaggcatgcacaaccacacccaaataattttgtatttatggtagagatggggttttgccatgttggccaggctggtctcgaactcctgacctcaggtgatccacccacctcagcctcgcaaagtgctgggattacaggcctgagccaccgtgcccggcccccagctttatgttcatctcctaccagccactcaccaccgctgctctgccggctctgaacctttttttaaatcatagtacctcacggtggtttatggcattatta

SEQ ID NO: 740340 - DNA, 611 bp, Homo sapiens
acagttggttattcaaccctcgccgcctccccctttccggtctctagcagtcgccagtgcccatttttccatctttacatcatgagtacccaatgttaagctctcacttataagtgagaacatgtggtatttggttttctgttcctgcgtgaattccatgaggataatggyctccagccgcatgcatgttaccacaaagcacaagatttcatccttttttttttgagacggagtttctcttttgtcgtccaggctggagtgcaatggcacgatctcggctcactgcaacctccgcctcccaagttcaagcgagtctcctgcttcagcctcgaaagtagctgggattacaggcatgcacaaccacacccaaataattttgtatttatggtagagatggggttttgccatgttggccaggctggtctcgaactcctgacctcaggtgatccacccacctcagcctcgcaaagtgctgggattacaggcctgagccaccgtgcccggcccccagctttatgttcatctcctaccagccactcaccaccgctgctctgccggctctgaacctttttttaaatcatagtacctcacggtggtttatggcattatta

SEQ ID NO: 740341 - DNA, 601 bp, Homo sapiens
cgcctctgggaattgcgccctttaccctccttgttgcctagggaactacattacccagaaaactcagcctcgaatgatagcgtagaagacctctgagggctcagaataaaggcgtttcctgtgtgcacgtgacaatgggtccggacttccggcgccctctggtggcggccattttgattggtgttggatttatttgtaggagaggctcctgagcgctaggtccgcactgtggtgactgaacccagaagtcggggagcagttgtcctccgctgcacagaggctactctggagctctgtgacggcgcccagcgtgacccactcctgggccaggatacggaccgtcgtgcccatatctcctggctggtcgccctatcctcccgactytgcttaaaaccacgtggttcgatggctgccgcggctacgctgaggctctccgctcaggtaattgtggggccttctgtgtcctcaggtcacctcatcgtcacccaaaagcagcgaggtagcagcgcctgttcacggctctgcagcccggacgccggcgttgggacactgaggcgcttgcgggaggggccccatttctgacacccgtgggatgcggtgg

SEQ ID NO: 740342 - DNA, 607 bp, Homo sapiens
acttccggaaggaggtggaggcgaccctcactctcccgccgtgcgcctgtgggaacattacccagaatggcctgcgttgggcgacggcgaccttcagccaatgaggcctccgaaaggtggtgtttccgtaagcgcacgcgcggtcgcggcgggacttccgttgtcctccttgtggcggtcgttttggcatttgtctggactgattacttggtagaaagccccggagcgctgggtcagcatcatccgtgactgactgagaaggcgcgagaggagtcttccccgctgcacagaggcgtggctgaggctcggcggcgcccagggtacccaggcccggcccggaataaggacatcctctctggccccgctccgctcacrgagtcagatggcggcggccgagctgacggccccggcccaggtatgtgccgcgtcctctgggccttccccgccctccccacgctagtcctagcacccccgagggcgcttgctcgcggccctgctgcccaggacaggacacgggggctcgccggaggggctcccgtttccaacacctggtgtgctagggaagggagggcgcgactggcaaggagcccctgatgagaggcgccac

SEQ ID NO: 740343 - DNA, 659 bp, Homo sapiens
accaagaaatgtagcatgacgagccgcagacagtacctctcagacaacggattaaagaaggaagtggctttattcggcccagcgcatcagaggactcgtgtctcaagaactgagctccctgaaaaagaaattcctggcccttttaagggcttacarctctaaggcatccacgtgaaagggtcatgatagatcaagcaagtgtggggaatgtgacttgacactacgtgcatcagctaacagaacagaaacttttgcaatgcttcttcatacaatgtctagaatttacagataacataagtagtttaggtcaggggttggtattattattatttttaaccaccggggccaggtggtagcaccaaggtcgtctggctatttatcttacttctgtttctttctaactttttgctttcttcctttcctcctgtcttataaactaggcaagggggagggaggaaggcagcaggagaagtggtggtctgcttcctacctcagcctccagagtagctgggaccacagctgcgtgccaccacaccacactaatttttgtgttcttcgtagagatgggctttcgccatgttgctcaggctggtgtccaaccccagagctgaagggatccagctgcatcggcctcccaaaatgctgggattacaggcatg

SEQ ID NO: 740344 - DNA, 581 bp, Homo sapiens
ctgcctttccgtacttctcatctcatggctttatgccccacctgttaatactcagccccatgtaccctgcagaccctcctctgaggtctagaatcctgtgtctagttgtctccaaaactctctacagggatgtcccaacaggcatctccattttcatatgcctaaaagtgacttcttggctgggcacagtggctcatgcctataatcccagcactttgggaggccgaggcaggcggatcacctgaggccaggagtttgagaccagcctggccaacatggcgaaaccctatctctactaaaaatacaaaaaattagccgggygtggtggcgggcgcctgtaatcccagctactcaggaggctgaggcaggagaatcgcttgaacccaggaggcggaggctgcagtgagccgagatcacgctactgcactccagcctgggcaacaagagtgaaactctctcaaaaattaattaattaattatttaaataaaagtgacttcccaaactcctccaaacatattcacccctgcagtcttgcacatctcagctaagggcaaccctgtacttcctggggctcagctga

SEQ ID NO: 740345 - DNA, 581 bp, Homo sapiens
ctgcctttccgtacttctcatctcatggctttatgccccacctgttaatactcagccccatgtaccctgcagaccctcctctgaggtctagaatcctgtgtctagttgtctccaaaactctctacagggatgtcccaacaggcatctccattttcatatgcctaaaagtgacttcttggctgggcacagtggctcatgcctataatcccagcactttgggaggccgaggcaggcggatcacctgaggccaggagtttgagaccagcctggccaacatggcgaaaccctatctctactaaaaatacaaaaaattagccgggcgtggtggcrggcgcctgtaatcccagctactcaggaggctgaggcaggagaatcgcttgaacccaggaggcggaggctgcagtgagccgagatcacgctactgcactccagcctgggcaacaagagtgaaactctctcaaaaattaattaattaattatttaaataaaagtgacttcccaaactcctccaaacatattcacccctgcagtcttgcacatctcagctaagggcaaccctgtacttcctggggctcagctga

SEQ ID NO: 740346 - DNA, 519 bp, Homo sapiens
gtgaaactctctcaaaaattaattaattaattatttaaataaaagtgacttcccaaactcctccaaacatattcacccctgcagtcttgcacatctcagctaagggcaaccctgtacttcctggggctcagctgaacttcttgtcatgtttaaaatatgyaagatactatgttgtaagtgtgttactttgtaaaatgaagaaaaaattaagcatttacttaaaacaggtgaggaaatacatggtttcataaatttttttgacgtatgggagaaagaatgtttgaagacctctccctgcgtgatctgcaccctcaggacctctcagacgccatctccttcctgtgtcctcccagccccctctgctccagtcacacaggcccctttccttttcctggagccaaggttgctcctgcctcaaggcttccatgtgggctggccctctgcctagaactccctggcctctcagctgcaagtgacaagcagcctttcttcctgaggtctttgttctgacatcacttc

SEQ ID NO: 740347 - DNA, 519 bp, Homo sapiens
gtgaaactctctcaaaaattaattaattaattatttaaataaaagtgacttcccaaactcctccaaacatattcacccctgcagtcttgcacatctcagctaagggcaaccctgtacttcctggggctcagctgaacttcttgtcatgtttaaaatatgcaagatactatgttgtaagtgtgttactttgtaaaatgaagaaaaaattaagcatttacttaaaacaggtgaggaaatacatggtttcataaatttttttgacgtatgggagaaagaatgtttgaagacctctccctgcgtgatctgcaccctcaggacctctcagacgycatctccttcctgtgtcctcccagccccctctgctccagtcacacaggcccctttccttttcctggagccaaggttgctcctgcctcaaggcttccatgtgggctggccctctgcctagaactccctggcctctcagctgcaagtgacaagcagcctttcttcctgaggtctttgttctgacatcacttc

SEQ ID NO: 740348 - DNA, 369 bp, Homo sapiens
ccgggccctgctgctccccaggcctccccttcgcagtcaccgcttcccctgcgcccgcgttggggaggtgcccggggcctgtcctgtgacacccggtgttcttgcctgcccagctccacccgctggaaaatgtgctcctccrggatccaggtgtcttactccaaaccctcctgtgaatgtgtgggccaaagggatcaggaaacagagaggggctgagagtgaattacaaaaactgagaggaaagaatgaaggaaacccataaacacatggcaaagtagaggatgggtcgggattcgcagagacgggaagagcgaaagaaggatccaggcgcggtggctcacgcctgtaatcccagcactttgggaggcc

SEQ ID NO: 740349 - DNA, 455 bp, Homo sapiens
gggttaaaaagacatatcaagagtcagtgtaaatgtttacagtcttaccttcactgagttctaaggcccgaattaaagcaatgagttcagctttctgagttgaagtgccctggggaaacgatctggcttcagcaacagtgtccagagttaccaccgcataccctgcacatctctcttcttgtgggttgayaaagctgctcccatccacgtatagttcccagtctactgatgcccagagtaaactgagtccaacacttctacacagtcatgctcgacagggatctctaatactgggagcaaggtagcggggttcagggtgttacaaacttcaatggttatatggggattttcacaaagcaaactttggtacttagtaagtctagcattcgttagccaatgatgtcctctagtattcattaaagtcaccacagcatgggggtcctttatgttcaggt

SEQ ID NO: 740350 - DNA, 608 bp, Homo sapiens
aaaagtgtaagagaaggaacattcacctctaaacacacatactcaaaacctgaaaatccagattaccagagaaggatttagccttacctagggccgaaatgaatttagagagccaagcaaaatataaaagcagaagcagtgggaagagccccataggcactcttgatcctcagggaagccatttctgactttatctcacaggggtccttgggaagggctgccagtggaattggggaagggctacagggagaagaaaacttccagctaaaccctgtaagaattttgacctagtgtcartgttccttggcagaatcgatgaggggacagtgaatgagaagcacagatacgggcacaaaagccatggcaggtggtgaggggtggcgcctgaaagcccaggttgctttctcaatggggaggcttatagcctggggcaagatctcagtactgctcacggactggatataaacttggtgctgtttgtggggtagggtgtgaatgaaactggccttgctggcttcatgggagctgagtgaggcctgtcactgctggctttccttcacttccatcctgacctgtatgatacagcagaggcagccataatccccctg

SEQ ID NO: 740351 - DNA, 521 bp, Homo sapiens
agaggggctttcactctttttgcccaggctaaagtgcaatggtgtgattttgactcactgcaacctttgcctcctgggctcaagtggctctcctgcctcagcctcctgagtagctgggattacaggtgttcaccacaacacccagctacttttttgtatttttttggtagagacggtgtttcaccatgttggcaaggctggtctcaaactcctgacctcagatgatctgcccgcctctgcctcccaaaatgttgggattacagccatgagccaccatgcctggctggatttttttatttctgtgaataattcttctgccacatacttccatyactacattcaaatagaagcattgacaatggacacaatatagttttgtattggtgtctgaatttgatggagtaaacacctcttcaagttttcataaactgattttagaagcatttccttagggaactgtgtgggtttctttttttctttttcttttttttttttgagatggagttttgctcctgttgccc

SEQ ID NO: 740352 - DNA, 580 bp, Homo sapiens
atttgcacagccttggtgatttcaaccagccaaggagctcagtccaggtggatccaatcatccaattatctaaatggtgactgtgactttgtcaagacaggcgccaaatggtgcatgtgaacggaacatgtaccaaatgcagggcgctgaaatactgtcctggacagatgtgttacatgactttattttcagcttatttctgtggacttgcccttgaagatagagctttgttgatatgttccattctgaaatgttatttagctaaagaaggaaaaattgattctacattagcrtctttagagcatgctaaaaggttaaaaatatctcttggggaatatgttttgtatacataaatatttagatagaaatatttatataattctctatgtgggtttttgtcttcctatgtatatatgtagatgtgtcaatctttgtattgatatgaaacgttgtgaatagtgagataaaaagtaacttccagttggatgctgtggctcacacctgtaagcccagcactttgagaggctgaggtgggtggatcacctgaggtcagaagttcaagaatagcctggccaacatg

SEQ ID NO: 740353 - DNA, 468 bp, Homo sapiens
ctcaattcttaagagacatggtgataattcatgctgaagaggagctctacaaacctgaaagatgtgaaagtgcttttagcaacccctccaacttttctatacataaaaaaaattatactggtatgaaactctagaaatacataaaatgtgaaaaagcctttatatggttgccacgcttgattgtacataagataattcatactgccaaaactcctacaagtgtgaagaatgtggcaaaacttttcatcagtgcttacaccttatttcatagtaaagctagtatctttgagaaaaatcgtacaaatataaagaatatrgaaaaaccattaatgcctactcacatcttactcaacataagaagattcataattaataaaagcattaaaagtacaattactgtcaaaaaatctttcagaaaatataaacctttaaagtgaaaaaaaatttattctgaagacaaccattaca

SEQ ID NO: 740354 - DNA, 675 bp, Homo sapiens
tttagattaacatgacaaaagtaacaattagagaaaacatttgacatgggataaaattaatcaaaaccacatcttttcaatggcttggcataatttccatgcttttggaaatggccagataattagcaagaaacaaagacaagattttggctttgctcaatgatggtttttgaccttttgaaatctaaaatccttgctaaagtattcaaagggagtattttattggtggctgcccagggtttccaaggcaatgaaggaagaattttgataggcaggaaaatgcacactatatacacacattgctcttctctgatttgctttaacactgaaaaattgaagttgtaaatgtagtctcaatttagagtaaattaacaaatgacttgtttttcaaaaaagccaatgtataaaattaatgggtaacagaagccattagctgctaaaaactagtatgactaaattcartaagtatctagccatgcaaataacagtccaattaaatgaagaccctcataggtgcatatggaaagcattgctgtgcagtgtggtgcctccactcagcattttcttctgcctcttcacagagaaaccagtttcccctgagtgactcagggtgcatactgggaactgagaatgctgtgttcagagtgattactgaaaacatggttaacacacttc

SEQ ID NO: 740355 - DNA, 676 bp, Homo sapiens
tgtgttcagagtgattactgaaaacatggttaacacacttcttccatatgataataaaatgttataaatcttactctgcctcagaaaagcttttagtaaatgattatagtactcaatttgggtttatggagaatttcaatgttccagataattcagacacttaaatgtcaatgaaatcccataaaacatatttgaataagataaagtcttcttagctaacaaatttgtattactagtacatttataaaaaaatagaaaaccagtactttaagccaaataacagtatttgacacgttagtagcacccaaacaagtgctcttcacgatcattgttaaagcagcaatagcaccacgtgctttcctgggacctgctggcctgttttccactgatataaagtggagaaggcattgaaatagcaaaggarggtgatataaattgaatacttatatgaaatacaattttaaataaaacatagcacttgatgttgtacaactataggcgagactattagtgtgaggtcatatttttacttatattgacaaaataatcattcacaatattcttatttagaataatattcctgttctgctgtatatttgctagcttttgatcaaatatttgggagctcaatagaaatcaacaaaatgaatctttattttaccacaagcattattga

SEQ ID NO: 740356 - DNA, 603 bp, Homo sapiens
catgatcacaccacttcactccggcttgggtgacaaaatgagactctgtctcaaaaagaaaaaaaaaaaaaatacaaagacccagggtcatagaaacatatagagacatacatatgtaacctgaatttgtgactatgttttataacatctcacaaatgtaaagtaagtcagaggttatgtccgtactcatgctcctcaagatagatgaatgcgattccatgaggcaaatttaataagccaatgagctcaagtcagctgttttcaatcagccaattagctgagcccaggcgattcctattagccaattagctcagcgcaagtgattccattaggccaattatgtcagcttaggcaattacaatcagtaaatttgctcagcccaggtgattacatttcgccaatygactcaatccaggtgattccaatcagtaattcgctcagcctaggtgactttaaacagccaattagctcagccttaacaatttcaatcagtcaatgagatcagcccaggtgactctaattggccaattaactcagcctcagtgatcctaatcagaaagctcagctcatgtaattttattttacttttttgacggagtctct

SEQ ID NO: 740357 - DNA, 772 bp, Homo sapiens
aggttttacacggctgtggtggatccaggttgggattccctctaccttcacagcggtgggagtgctcaggatgacagtctggggtcctttccaccgtggacacaaacaggctacgtttcagtccttgatccacactagatcacctggggagaaagggtgaactggggagaataagttaacagggcatctctcatttacccaggcygagattgtttgtgtaatttttcctgaagcctgtagctatcgctgtaactcaatttcacctaactctcggggagtgcctggaagtccccgcaatataggagggggcctatgatataatatttcataaggggaatatcctgttcttttagaaggggtacatctaattttaaataataccataggaagagcctgtatccattttaatcctgtttcttgacatactttccctaaactatttttgatagtccgattcatccgctctacctttccggaactctgaggctggtaggcagcatgcagtttccatgtgatccccaatacctttgccgtcttctgtaccaagtcagccacaaacaccagcccattatctgagccaatccgtaagggcagtccaaatctaggaataagatctcgaagaagcacacgagttacttcatgagctttctcagttcgtgttggataagcctccacctgcccagagtaggtacacacaagaactagtaaatacttgttacctccacactttggcatctctgtgaagtccacctggagatcttcaaagggggct

SEQ ID NO: 740358 - DNA, 634 bp, Homo sapiens
ctcttcctctaggagggaaaaataagaatgatacctctgaggtatgtaggaaatgcaaataaatgctctgaacgtcttctctatcctgggcactatattttatttaacttatcagaacaattttgtgaggcaggcattgtttccatcatcttagagataaagttcagaaatgttaggttccattaaattaaaaaagttaagcatatggcaattcaatttgaatccccccrgaggggttggttcagtaggaagtaacggcccaaaccctggcacaggctcaaccacttaccaaccatctgccctcagtttactctgctgtaaaatggagagagaacattaggatgtcaagtcctccccagtttgaatatcctaatattcttggaatgaaggaaactgcctgatagctttactttttttttttcttaaagcagcatttttcaaccattgttccttcatgagccattcaacctgtaatatttacctccccctccttagaacttgaattttttgttttgttactttgcatggttcctgatgaagtgattttaggcaaaggctatttgatttaaaaccagcatgttttagttaaatattacataactgttacaaagttcatttaattgaggctttaaga

SEQ ID NO: 740359 - DNA, 602 bp, Homo sapiens
tttcatcctccatgcaatcagagaccacattatttctgtagatggaggggaagatgcagggcttcctgagagaatttcccccatactctgaaaaggattatggaaaggttacgggtcaagaagaggagatgaaaagagcttccatttatgacacacaaactgtgccacsctttatcccattaaaggcaacgtcacattggattctccaagcaacttccggatgacgttattatcccaatgttacggataagtgagaaccaaaactatcaactcgtgcacagcttactgtctctattaacacgacttcacggttctgcggtcgccatcaccttgactctactaagctaggaaattcttgcccaggaagataagagttgcgaatagccctattattcattccagaagcctccagaaaagctagttacataaatatcgattgtgtcaaaacactatttactctcctagactctttaaaaccccatctttggtcatttcaccttgctgtgaacaccaatcctaactattatatcatgatccttacacaatccaaatcacatcccccattgaaagacccaccttagacgagactccaagaccccatc

SEQ ID NO: 740360 - DNA, 601 bp, Homo sapiens
tgtacctggtgtaagcatcggatcccacagattaaaggctcagtccacaagacttctccacttcagatgtcggttacaagtcccagattggaacctgaacttctaagctactggatataaattgaggattcccatgacccagtcttcagtatttattaatttgccagagtagctcacagaactcagaaacgttttagttgggtttactcatttgttttaaaggatattacaaaggttgcagatagacagatggaatagcagttctagaaaattagttgaatgcaggagaggatttgggaaccrtggtgtttatctggtcagtcagaagtagaggtgaaaactactacttgtgtacagcttctaaggtgaagggtagtcttgtgggactgagcttttcacccatgggatctgacactatctccttgtagatagtgtaagaattgagttaaattttaggattcccaggtggaagtctgcaaggaactggtcagtgtagggaaaccacacattttcttgaccagaagtaaagtatcctgtgttgagcacgagagcaatgaaaacagtttggttttttcctgtctcagtgaagggaagatatttg

SEQ ID NO: 740361 - DNA, 611 bp, Homo sapiens
taatttttttctcatacagtgtcactctcaggatactatgtttccatatttgatcatttattgacctttaatggagaactttatattttcatttgggttagaagtactgtctggggtccttttatttccttttgaaggattccctttaacatttcttgtcagacagttccaaggtactaattaccttcctcagctcttctttattcaggaacgtgtaaatttctcctttatttttgcaagcaagttttgctgaatatagtattcttggttttttgtttgtttgtttgagaaggagtctcgctctgtcgcccaggctagagtgctgtggcgcgatcttggctcactgcaacctccatgccccgccttcccccatgtgaggttcaagtgattctcctgcctcagccttccaagtagctgggattacaggcatgtgccagcacagccagctaatttttgtgtttttagcagagaygaggtttcaccatgttggccaggctggtcttgaacttctgacctcaggtcatcaatccacctcagcctcccaaagtggtaggattacaggtatgagccactgcacccagccgtatttttttttctttaagcactttcaa

SEQ ID NO: 740362 - DNA, 607 bp, Homo sapiens
cttccatgagttttggccaggagacttctcattcagttggaattgttacaaagttcaactggaggtttccttctccctgtggccttttcccagtgcctcttgcagccttcccccaggacccctgtgaggcaaggcagaaaatggcttgctaggggacccagagagcttttcccgctacccttgtttttcactcagctaatttttttttttttttttgagacagagtcttgctctgtcacccaggctggagtgcagtggtgcagtctccgatcactgcaacctccaaytccagtgctcaagcgattctcctgcctcatcctcctgactagctgggattacaagcacatgccaccatgcctggctaatttttgtattttttgtagagacggggtttcaccatgttggccaggctggtctcgaactcctgacctcaagtgatccacctgcctcagcctcccaagatgctgggattataggtgtgagccatagcacccagcctcagttctctaaattgactgagttccaggtaaggtcagaatcttctcccatgatctagaccttcaggtttgccagtgacggtttgtgttcttggcagacaatcttcctt

SEQ ID NO: 740363 - DNA, 371 bp, Homo sapiens
gatccctcttctggtccccaacccctggcccagtaccagtccatagcctgttaggtactgggctacacagtgggtgagcagcgcttcgtctgtatttacagccactccccatcactcgcatcaccgcctgagctctgcctgtcagatcagcagcagcactgcattctgaaaggcatgcaaaccctattgtgaactgcccatgtgagggatstaggctgcatgctacttacgagaatctcatgcctgatgatctctcaccctctcccatcgccccctgaagggaccatctagttgcaggaaaacaagctcaggggctcccaatgattctacattatggtgagttgtgtaattttttccatgtagtaataata

SEQ ID NO: 740364 - DNA, 744 bp, Homo sapiens
caggccctggtgaaggaagacactttcagggaagaggctcttacagtctatggtggtagccatcttcacatccagtcaccagttgcatctagggagctgctggctataaaagggatcatccagtggagttgtaaacaagggaaccatcttgcaagatctaggaagaggaaggggagggatgtggactgggtctgatcacagcccttggccctgcttcatactttggagcttattaagatcaattttgataaccatgtaatttcttagaaccatggcaggtagtattgtgctttaaaaaccagaggctcctgaaagtcgtttacaccaggtggattgataccatggctgtagctgatgcaactaacaagtactggggccagtgatcacaatccagagttggaaacaggagtgaagcccaccagcctgcctggttgatggacagcaggctctgccttctggaggcggcttatatcccaacagcctgaggcagggctctgtggcccaggccrgcagtggctgcctctcttggttctgcatggtacattttgccaaccctgaggaccagttcttggggttccaggcctcggccttcctgctccacgtgctcaagcccccacagggggctgcgacaccatctggctcctcacagggaggtccagccatgttctctgggctcccagtgagccccctcccctccggctacccccagaatccatccttcattcctccaccaagctcctgtgt

SEQ ID NO: 740365 - DNA, 594 bp, Homo sapiens
cccctcccccaccgcgccgtcgagtcctcccagctttgcttcaagttgtcttgcctttctagacctgccccgtctttccagaccgaaccaatgttcatccagcacgtattgatggatgtgttatgtctccctaggaagtgtaaaagccagttgtgttctgaccacctcgggcacaggtcgtcaggaactcctgagagtgtcacagacaggtgtgttcaactttgrcaaaataaactttctggattaactgcaacctgtctcagattttcagcatttacagatgtacacatgctcactctagagcctttgctcttgacccctgggtgcccctgcctttcacagacacctgtgtgctttctgtaggcagatctagggaattctctggcaagaaagcatttaggaacctgcccaggcaattcagtggtcagccaatatggggactgggagttaaatactagctctctgcttttacctactagttacaacattaagtcgctacagaacaccctcagttcacctcttagtgtatcctttgaaaaaggatacactaatctctttaaatgcatgactggtaatcaaatcagataatgcgtg

SEQ ID NO: 740366 - DNA, 532 bp, Homo sapiens
catacagaactgcagctcttgccacgtcattgcctgcctaagaccctttagcagctcccaatggtgagatggagcccagatgtctttgcaagacgtgcatgcccttcccagcctcgcctctttctgcatccctgcttggcacactcagycctccaggcacatgggtctcctgatgtctgccagtgtctgtgcatactctgttccctctgactggaagggcattctccaagacccggtttggattttttttttttagatggatggagtcttgctctgtcgcccaggctggagtgcagtggcgcgatctcggctcactgcaagctccgcctcctgggttcacgccattctcctgcctcagcctcctgagtagctgggactacaggcacccaccgccacgcctggctaattttttgtattttttagtagagatggggtttcactgtgttacccaggatggtcttgatctcctgaccttgtgatctgcccgcattggcctcccaaagttctgagattacaggcgtgagccaccgtg

SEQ ID NO: 740367 - DNA, 613 bp, Homo sapiens
cctgagttgctgggataataggactgagccacggatcctggcttaaaggagtcttctatctccactttatctttgggtctttgacatgcttatatgacacactgcctctgagtgtccaatgctgtagttttctttctttcctttctctctctctctttctttcttcttctttttttttgacacaaggtctctctctgttgcccaggtagtgtagtgtagtgtagtgtagtgtagtggcacgatcacggctcactacagccttaacttcccgggcctcaaygatcctcccatctcagcctcctgagtagctgggactacaagcacatgctaccacgccaagctaatgttttgtatttgttgtaaagaagaggtcttcactatgttgcccaggctggtctcaaactcttgggctggagagatcctcccgcctcagtgtcccaaagtgctgggattataggcatgagccaccgcgcccggccaaactccgtactttcaaccacaactaagaatccatatttctagcccagaccttattcttagcaacacacctgtgtacaccaaccgcttaactagtttgctcctcttggcatcaagacatctcgaacaaagccag

SEQ ID NO: 740368 - DNA, 572 bp, Homo sapiens
cctggtctccacggcggtgcagcctcagcctcctcgcttttcacggtcggcttgggcgtcccttcggaatgccttcctcactgatggtgctttattaggattcctcttgtgcttaattacctcctagcctcctgctggcagcggggtgccgcctcctcaccgtaattaggctccgtcgagagccctttcccttcttgccagccccagcaggctcagagttggcygaagccaggggggaggggacggccatgggaacccagcggtgtgacccctgccctcggcgacggggccaaggtcaaggccagagttgttggccagacccacatagaacctcaagacaccccccttatctctctcgcacccggaacgtgagcccagcgcctggacgtggagaattcctatctgaggaggggcgctggggttaggtgccagtgcttgggcccccggcagcctaaaccactcctttaagtggtccgacgggtgctggggaaatgtcccatctggaacccagggatccccccaagagcggcttccctctgctcttagatgcgagaaggaagttctgattttgc

SEQ ID NO: 740369 - DNA, 634 bp, Homo sapiens
aaacagggctttggcttgctcaccctccttcttgtccaacagggtgacaactggaggctcggtcaccaccttctccggttccgccagcactttctccttctcaccctcccctgccttccccggcccggtccctgccrtggccactatggtggccgcagcccgttcggtggctgctgggcccttctggttctccccggatacctcggatagggccctggtggtccatggagagtcgaaacacttgcccaggatggagatgaagtgttcaatcttggagctggtgccagggaacttgaaccagaaactggtgcagaccatgaagatgagtgtgtgaatgaccacgaggtaagggaagtacttggcataccagtgcagggccgtctcataacacagctggttaataaagctgtattgctgcaggtccaaattgttcttaaggcctttaacctcctgcagggccccaatctgctcagggatcccccgaggcagcaattgctggcacggggcctctgataagttctcctggagctcatgattgggtagacagatgatcttgtcctgtgtcacctgaggagcaaaagagaatgagggctgtaatcctagcactttgggaggccaaggcgagtggatcact

SEQ ID NO: 740370 - DNA, 567 bp, Homo sapiens
gaacttatggggaactggagtaaaggttactcttgctgtgctttagcaaagagactggcaacattttgcccctgccctagagatctgtgaaactttgaacttgagagagatgatttagggtatgtgacagaagaagtttctcagcagcaaagcattcaagatgtgatctggctgtttctaaaagcatatagtcatatgcattcacaaggagataatcagaaattggaacttatgtttaaaagggaagcagagcacaaaagtttgggaaatttgcagcctaatcatgtggtagaacagaaaaacccattttctggggagaactgtaaacttttggctgcagaaatttgcgtaactaaaatgaaactgaatgttaatagccaarataatggggaaaaagtctccagggcatttcagagatcttcacagcaatccctcctatcaaagacctggaggcctaggagagaaaaatggttttgtgggccatgctcagggtcctgctgctctgtgcagcccggggacatggtgccctgtgtcccagctactccagctccagccatggctaaaaag

SEQ ID NO: 740371 - DNA, 614 bp, Homo sapiens
gtgaggtgtgatttcttttctttctttttttttttttttttttttgagacggagtcttgctctgtcgcccgggctggagtgcagtggcgcgatctcggctcactgcaaggtcctcctcctgggttcatgccattctcctgcctcagcctcctgagtagctgggactacaggcgcccaccaccacgcctggctaattttttgtatttttagtagagacggggtttcaycgtgttagccaggatggtctcaatctcctgtgaggtgtgatttctgagtaatttcagggtgttacaagttcctttgcaagggatcgtatatcttgttatcagtagtgtagacctggagataaattagttccaggtagaggacttagaatgcatttttagatgggagcccccaaagtggtagggaagacctcaggtcatgatagggccaggggatgccaaggaaagggagagaagcgtgtgctataaggggtgagagagtgaagtgatgtggttgaatccccatattcaacctagagaaaacagagagaaaggagaccaccaaacatggcatatttctgaaagttagccagcatgactgactgcctatcagtacagaaccagtcagat

SEQ ID NO: 740372 - DNA, 557 bp, Homo sapiens
atccagaaaaggggttctcatccactccttcttatagaaccaagagactagcagctggtgtttatcttttcccttcaaggctcagggattagcagctttatagataaagatagtcctcatcataaacctgaatgcatttgcacaaaacagtagagttagcctatcccttccaactttaaatcctggtgcttgttcctcttccttactaaaaaatatcttttgtggtagatttttttctttttccagaataaggcactttcgtctgcattaaaaatctgttcaggcagacatmttttctctgcaatggttttcttaatggtgcctgggaactcgtctgctacctcttggtcagcaacagctggcttctcctgtcatcttgacatttttaaactcaaacctctttctataagcatcaaaccatcctttgctggcattaaattttccagctttagatcctttaccttccttatgctttatgttatcatataatgacttcattttttctcaaatcatattctatagatatgcctttcttatagcattcctgtgcccacata

SEQ ID NO: 740373 - DNA, 692 bp, Homo sapiens
cctaaaccaccatcaaccattctgctttggtttgaatgtctcccccaaagttcatgtgttggaaatttaatctccaacgcaacagtgttaaaacgtaagacctttaaaaggtgataaggtcatgagggctctgctctcatgaatgaatgaaggtcattattacaggagtgggttatcaaagcaagttttctcccacacttgcccacgtgtgcataccatgtgatgcctttcaccatgttatgatgcagcaggaaggccctcaccacacgtggctccttgaccttggacttcccagcctccagaaccatgaaccaaataaatttctgttcactataaattactgagtctcaagtattctgttatagaagcaaaaaatgaacaaagacacatattaaaatatttcccaatttcaatggcaaacactctattactgaaataacaaaaagctgagaaggtgacagactgagtttgaaatatttagagagtcaaccatggtggyagctggaaggtctaagaactccaagaacaagataaaatctgggaggaaaccttggagtaaagtaccaaggcaattcaatagggaaagaataatcaacaaatggtgctcaaacaactaaatatccacatgtaaaagaataaaactggatccccacctcacaccatacacaaaactaacctgaaatggaccacag

SEQ ID NO: 740374 - DNA, 627 bp, Homo sapiens
aaaaatgtgcctttacatctgtttaggatgacattttgggcatctagtactacattacaatctccatgagacaataaacacatagacttgttatttgatagttgcataattgtggttttcttctgcttgttctcagaggtggagagctgcctgtttgctttttattcctcttttttttttttccaggagaaaaaaacaaatgtaaaacacaccaaaccagagggaaagaaatagtcaatatgccgctgctgcatgtaagctgcaagtttatttgcctgtttactctctttgaaatacctgtgaagtgctttgccggcgggttctcgtccacatcctctsagtggcaatgctcattcacgaccagcagagggcaggcacgacctcctaatacaccgggaaggccattttgccagcaccaggaataaaggcgcccttgccatctgtaacctcaaccatctctctcaaccactgtagacctaattgccatgataaaaacagatctgtatgagctttgtagtcacacggtcttggttaaatcgcagctctgccacgtattagctgtgtgaccttcaacaacctacataacctctctgagcgcgtttcttcctcatttctaaagtgggacta

SEQ ID NO: 740375 - DNA, 592 bp, Homo sapiens
ccattcttgtcattcagggaccaggctcagggttgccagatcccaatatcttcaagagaagcctgaatttgaatttttatgaaatcacccaacattgaaatattggcaattaattaaaacattaaaaaaaaaaacccaaaggccaggcgctgtggcycctgcctgtaatcccggcactttgggaggccgaggcaggtggatcacttgaggtcaggagttccaggccagcctggccaacatggtgaaacttgtctctactaaaaatacaaaaatgagctgggcttggtggtgcacgcctgtagtcccaactactcgggaagctgaggcaggagaatcgcttgaacccgggaggcggaggttgcagtgagccgagatcaccccactttactccagcctgggtgacagcctaagcctgtgtctcaaaaaaacaaaaaaccaaaaaaaaaaaaaaaaaaaaggaaaagaaaaacaaaaaaaatcccctcctatgtatgacccaggctttatcctgagactatggataaaactgtgaacaagacagacacagtccctgccctcaaagagtatgcaagctggaaaatgggacagagag

SEQ ID NO: 740376 - DNA, 592 bp, Homo sapiens
ccattcttgtcattcagggaccaggctcagggttgccagatcccaatatcttcaagagaagcctgaatttgaatttttatgaaatcacccaacattgaaatattggcaattaattaaaacattaaaaaaaaaaacccaaaggccaggcgctgtggcccctgcctgtaatcccggcactttgggaggccgaggcaggtggatcacttgaggtcaggagttccaggccagcctggccaacatggtgaaacttgtctctactaaaaatacaaaaatgagctgggcwtggtggtgcacgcctgtagtcccaactactcgggaagctgaggcaggagaatcgcttgaacccgggaggcggaggttgcagtgagccgagatcaccccactttactccagcctgggtgacagcctaagcctgtgtctcaaaaaaacaaaaaaccaaaaaaaaaaaaaaaaaaaaggaaaagaaaaacaaaaaaaatcccctcctatgtatgacccaggctttatcctgagactatggataaaactgtgaacaagacagacacagtccctgccctcaaagagtatgcaagctggaaaatgggacagagag

SEQ ID NO: 740377 - DNA, 592 bp, Homo sapiens
ccattcttgtcattcagggaccaggctcagggttgccagatcccaatatcttcaagagaagcctgaatttgaatttttatgaaatcacccaacattgaaatattggcaattaattaaaacattaaaaaaaaaaacccaaaggccaggcgctgtggcccctgcctgtaatcccggcactttgggaggccgaggcaggtggatcacttgaggtcaggagttccaggccagcctggccaacatggtgaaacttgtctctactaaaaatacaaaaatgagctgggcttggtggtgcacgcctgtagtcccaactactcgggaagstgaggcaggagaatcgcttgaacccgggaggcggaggttgcagtgagccgagatcaccccactttactccagcctgggtgacagcctaagcctgtgtctcaaaaaaacaaaaaaccaaaaaaaaaaaaaaaaaaaaggaaaagaaaaacaaaaaaaatcccctcctatgtatgacccaggctttatcctgagactatggataaaactgtgaacaagacagacacagtccctgccctcaaagagtatgcaagctggaaaatgggacagagag

SEQ ID NO: 740378 - DNA, 502 bp, Homo sapiens
tgtggagttgtgttcaaagttgtgtatgaatggtgacccgctctcagctggttgttgaagtgcagtgtaatgaactacaagttgcctacccagcttcctttctgcctttgtgccttgacaacatatccctgattttctaagttctccaccctagcttcacatgtgtcagggagctgactccatcctaggtgtaggaggtgattctgagyagtctaagccagtgttactcaaagtgtggtccattgagcagtgctgttctgcagcgaactatttatttactactgctgtgtaataagtatagaaacggagagtgtttagaaacttttatagctatttgactttgctatggcatccaaacatgtgaacagtggattcctctgttgaacagggtataggtgctgtcaaaattacctggtaaattccatatgataaaactgcatgcttatcatgtgcaaaataggaccacatatggacccacggatggtctaggccaatcaggcta

SEQ ID NO: 740379 - DNA, 502 bp, Homo sapiens
tgtggagttgtgttcaaagttgtgtatgaatggtgacccgctctcagctggttgttgaagtgcagtgtaatgaactacaagttgcctacccagcttcctttctgcctttgtgccttgacaacatatccctgattttctaagttctccaccctagcttcacatgtgtcagggagctgactccatcctaggtgtaggaggtgattctgagcagtctaagccagtgttactcaaagtgtggtccattgagcagtgctgttctgcagcgaactatttatttactactgctgtgtaataagtatagaaacggagagtgtttagaaacttttatagctatttgactttgctatggcatccaaacrtgtgaacagtggattcctctgttgaacagggtataggtgctgtcaaaattacctggtaaattccatatgataaaactgcatgcttatcatgtgcaaaataggaccacatatggacccacggatggtctaggccaatcaggcta

SEQ ID NO: 740380 - DNA, 494 bp, Homo sapiens
atcagagatttttgtcttggtttggatccattgctggtgagctaatgtgatcttttgggagtgctaaagaaccttgttttgtcatattaccagaattgtttttctggttcctcctcatttgggtagattatgtcaaaggaaagatctgggactcaagggctgctgttcagattcttttgtcccatggggtgctcccttgatttggtgctctccccttctcccaaggatagggctccctgagagctgaaatgcaatgaggkttatttcttttctggatctagccaaccagcagggccaccaggctctgggctggtactggaggtgtttgcacagagtcctgtgatgtgaaccgtcttcaggtctctcagctgtggatagcagaacctgctccagtggaggtagcaggggagtgaagtcgactctgagggccctgggttgtatttttgtttagtgcactggttttgagttggttggcctctggccaggaggtgaca

SEQ ID NO: 740381 - DNA, 472 bp, Homo sapiens
ccacacagagagaacagcaactacaaccccactgagcagaaagccagcttggcatgtctttggaacagtgaggaagccaaagtggttccagcgtgatgagcgagggggagaagatrccatgagatgaagtcagagtgataggcactatcgtaggaaggagtttgactgagatgctaaatattttgcagaatttttggaagcaggggagagacagctgacctgatttgtattttaagaggatcactctgctttgtgcatggagaatccattgaagggagcacaagacaggaagcagggttgatcatcagagctactgtggcaaatgggcaaatgaagccatttttatcttcctttgacaaggcaacttgtcaccaaagggacaggacatccttcttcaagtcaacatttctagggttttgcttattctgaatatggtggaggctatggtggtttacttgaaggtatggtttac

SEQ ID NO: 740382 - DNA, 606 bp, Homo sapiens
aagtaaaagaatattaaactaagactatggctattgatgtaaagaaatgtacatgattttaggaactagaaaccaaactgcaattacccaaatgtccataactaggtgaacagataaacacactgtagtatatacataaattggaatttattaaggaataataatgttcaaataatataatgaatatttttattatattattacatacaattacaagtatacatattattttattcatatattctaattattatattaatacatacaataacatgtataaatgttaattatgcttrctgaaaaacagtagacaaaaagtacatactttatgattccatttatataaaaatctagagaaagaaagtaatctaaataataaagagtgaatctgtgatggctcgaggctggtgcaggagggagtttgacgaaggaatagaatggtaggattatagagatacacagaaaatttttggttctatgctggatatgtttggcttctcgattatggtgacagtttatcaggtgggagcatatgtccaatgtatgagactgaacattgaaactgcaataatcatataatgaaatattgagcaataaaaggaatga

SEQ ID NO: 740383 - DNA, 606 bp, Homo sapiens
aagtaaaagaatattaaactaagactatggctattgatgtaaagaaatgtacatgattttaggaactagaaaccaaactgcaattacccaaatgtccataactaggtgaacagataaacacactgtagtatatacataaattggaatttattaaggaataataatgttcaaataatataatgaatatttttattatattattacatacaattacaagtatacatattattttattcatatattctaattattatattaatacatacaataacatgtataaatgttaattatgcttactgaaaaacagtagacaaraagtacatactttatgattccatttatataaaaatctagagaaagaaagtaatctaaataataaagagtgaatctgtgatggctcgaggctggtgcaggagggagtttgacgaaggaatagaatggtaggattatagagatacacagaaaatttttggttctatgctggatatgtttggcttctcgattatggtgacagtttatcaggtgggagcatatgtccaatgtatgagactgaacattgaaactgcaataatcatataatgaaatattgagcaataaaaggaatga

SEQ ID NO: 740384 - DNA, 606 bp, Homo sapiens
aagtaaaagaatattaaactaagactatggctattgatgtaaagaaatgtacatgattttaggaactagaaaccaaactgcaattacccaaatgtccataactaggtgaacagataaacacactgtagtatatacataaattggaatttattaaggaataataatgttcaaataatataatgaatatttttattatattattacatacaattacaagtatacatattattttattcatatattctaattattatattaatacatacaataacatgtataaatgttaattatgcttactgaaaaacagtagacaaaaagtacatactttatgattccatttatataaaaatctagagaaagaaagtaatctaaataataaagagtgaatctgtgatggytcgaggctggtgcaggagggagtttgacgaaggaatagaatggtaggattatagagatacacagaaaatttttggttctatgctggatatgtttggcttctcgattatggtgacagtttatcaggtgggagcatatgtccaatgtatgagactgaacattgaaactgcaataatcatataatgaaatattgagcaataaaaggaatga

SEQ ID NO: 740385 - DNA, 624 bp, Homo sapiens
taatctccacgtgtcatggaagggacccagtgggaggtaatggaatcatgggtggcaggtttttcccatgctgttcttgagatagtgcataagtctcacaatatctgatggttttaaaataggcagttcccctgcacacactgtcttgcctgccaccatgtaagacatgcctttgctcctccttgccttctgccatgattgtgaggcctccccagtcatgttgaactgtgagtccattaaacctctttttctttataaattagccagtctcaggtatttcttcatagcagtataaaaacagactaataaaatggataaaatattaacaatagcaaaacttgtttttgtaagtttatctagctttacttttcaattatatgaactgagataataatattatggatagaatattccaagwgaatattcacctagagcatatttcactgaaacatggaagcatatgtaaccacttccatgtttacctacatataatttttccttgtttaatcaatacattagtcaatattgatatagtttagatatttgcacctatgctattctcatgaagaaatttgatccccattgttgaaggtgggtcctggtgggagatgtttggatcatgga

SEQ ID NO: 740386 - DNA, 506 bp, Homo sapiens
gcacaggaaaaaaaaatacagcataatttcacttttatgtggaatctaaaaaaaatgaatatgcaaagttagaaaataaaacagtagtgttaccaggggcaccaagactgggtgggagaaaatgggaaggaggagatttaggtaaatggagacgaagcatatatagcatgaataagtctagagacctaatgtacagcataaggactaaagttaataataatgtactgaactcaggagtttttctaagagtasattttacgctcttgccacacaaaaaataaaatattagtgaccgtgtaggataagatatatgttaatttgctttactgtagtaaccatttaactatccatatatatatatcaaaacatcatgttgtacaccttacatatgaataattaagtgtggaaaatagaaaaaagtgtttgtatcatcttatacatccattactggtagaagactggaaaagagtttcagcggtttcacatcttctctaacacttgggagt

SEQ ID NO: 740387 - DNA, 556 bp, Homo sapiens
acactggtaagtatttgtgtattcaaacatatctaaacacatagaaggtacctagaaggtacaaggaaaatataatattataatcttatggaaccattgtcatatatctggtcagttgttgaccaaaacatttttatgcatgcatgcctgtgttacagtacttgtattagtgtgatagaattatagattatttccttgataatgataatgctctaatgttatttcacatgaaaaaataaatattatttttcaataagcaggtaaataatttttttaatctatcgttgtaactttgaattatacaatggtgttaacaacccggagaaaaaggagcataattaatatatccttaaaatagaacaatgcatttcaagatgratactaaatctagaatattattaacatcatatattcatagatagacaagaatttttctttttctttcattttctagctctttttatcactctactttgacccctctagattgtcaaaaattttctgatattaagtaaattcttatactaatgcagaaaatggtaagttcatataaaat

SEQ ID NO: 740388 - DNA, 617 bp, Homo sapiens
cccagaggggactcaccgatcccagtagtctgaaattgagttcctgcaagcctcaccactgtggacaaaagtgctgtggagccctaaataaatttgaaagaatatctaggacaaaaggaaggcaaatcttaggtaaggcctagtgcttaactggacctgagacagtggaatggtggggcacgtgacctattgagacaccagccacggtaggcaagtgaatgctggcagcacccatctcctaaacccaggatccacagctcatggttccaaaagagaactcttctctaggtgtgaagagataagaaggaagaatgggggagtggcaagagtagggaagactttgtcttgcatcttggataccagcccagcaacagcaggatagggcaccagtcagagtcgtggggccccctttccagacactagctrtagaatggcattcctagaagtacgctggctcagaagggaaaagaacccagtcctggaagcattcataacatgctaaccaaagagccccttggccttgaataaccagcagtaaaaccaagttactatgttgaaggctttggatgagcctctgaaacttcctggcttcaaatgagatgcagaccattagagct

SEQ ID NO: 740389 - DNA, 631 bp, Homo sapiens
tggatacaaagctcaataattagctacaagtggaataataggaaatgagtcatgtgcttattgtacaaattctaagcacataccatagtctttagcagtttgtgaaacacaagaaaagcagaaaacagtatctataatgaatcatcttataacatgtttgggaaaaaaagtataaggtatgtatttcataatttaacattgcttatcataagtaataaactagtgatggaggcagtcagtggtacagagtttgtgaaggagaacctttctgaagagcatataaaagtgatagaaggttgtgtcatatgttgcgttcataaatccaggaaaaagaaaaacatagtgaggttatattgggcctattaattaatgctattttattttgagcagtgaaatacattgtcaaartagaatcccaattattatcaatcagaaacacccatatttggactgaagggagaaaaattatctgtattttcaaataaatatgcatatttctggttaacaatcatatcaccctaaatattggaagaaaaaggtcagaataagttaaaatgccaaaattgtttttggtataacaattttcacacatattcacatatattttaacaggaagtgtttttaattcatt

SEQ ID NO: 740390 - DNA, 575 bp, Homo sapiens
aatgcattacttcggtcagaagtgtcttagggtggttatctagttcagtactccaagttattggggaccttgaggcttaagtatttttctgaatataatgctaaaggtaagttgcattcatttaaactaatagagcagacagaattcagcactacttaatagtttataaatcagtggtttcagttgtatatatgttaggaaatggagaggtatagagagagcaggtccatagctcagcacttttaagtggaagatcatttgaatctcagtcttcagcctgcaatgatttgtagccygcactgtcttactgatttacaaactgaaatcactgagaaatgtctttagttgagtgagaagaaaccagaacacttgttcctagtgttgtattgtttttttaagcaaattacttactgtatttttatggcaggagggagaaaaagtgttacaacggtttctaatgaagtccggtatttaaatgataaatgactaatgtgtttagtagagacaaaataaaccaataaatgattgttctttgccatttatgcaggaaactacccttttctcaacataaacaa

SEQ ID NO: 740391 - DNA, 637 bp, Homo sapiens
aggacaaacaagtcctaatttacaatatttagtctttctagatgttaaagaggttgctagtgtataaaaagagttagtaaactaatatatcaaatatattttgtcttaaaatttacaggaaagactgctgttaaaaacacttaggaaatgaaatgttaaaatccctcctaaacattacagatgcttatgactggccactaggttgagagaggtggaaggggaaagggctgttggccaaatgttcctatttagaagatactttcaaattatagtctytgttatgtatgtgcatcacttatttaatgctggcttgagtggaaaactgaagtcctatttgaaatacgcagtgtttctagatgtttaaaagtgtgttaaaagtaaagggctaaagtcacatcctttacttatttttttttgttatttcataagagtggttgcatttggggagtggctgcatttagatatgagattgttaaagttgatgttttggagagtatgctgactgttcactgggtggtggcaggtggagggaggagaaaggatgaggagagaaggattatgtgcccatgagttaggttagtccagagggttgaaccattgtactctatgtgcattttagttaatattgctgtgttta

SEQ ID NO: 740392 - DNA, 705 bp, Homo sapiens
gtgggatccaacaggaaggccaagtgggcatacattcaaacccctatctcatttcatcacactagctcaatttttatctatattacacattggattccatattataatttatttgataaaacgccttctatggtcaaataatgtttgaaaactagaaaacctctaagattcaagtctgaatatgtgacccagggtgatcccaaagcctacaagtcctccattctttcagggtcccctttcttttactatttaaatactgatgtgatgttgactgcaagacattctgtttcctatcccaaatttccaagaattcctgtaggcaattacattttcctggttaacacctctgacctcctgcttccaaatgctcctcctcacccctagccatctcatcattacttcttaatgttcccctaggcccatttggtctgcatcatcccaaaacatggacatggtgctcctttgattccttaaggcagtgctaacacaaggctgccatcgttagtggttaacatggcttttstttaagacttggggtgactgagggcaagttttcatacataaaacttcatacataaacatgaagctggatggaaaacatccagcattgtaaggagccccttctgaacttttcttcaccccattttcctgcatattgaacagactactccattttatattattctgtaagttttagcctctgct

SEQ ID NO: 740393 - DNA, 612 bp, Homo sapiens
gcacagtatgatgagaaagcccagagctttgaggaagtgaagaagaagaagatggagttcctgcatgagcagatggtccactttctgcagagcatggacactgccaaagacaccctggagaccatcgtgagagaagcagaggagcttgatgaggccgtcttcctgactgtaagtgccaagtaaaatgggctcaaacaccttgcgcccactctggcacatctacttttaaagcttcatttttcactattccttaagattatttatatctctgtgtgggatttatataattctggcatttaaacattatttgggcatgcctgatgcctatagaaaaggcccagcaaaccctgaaagcctcaatgcccagatccagctgaaagatacagctraaagagacagcctgcagcatcatcatccattgcgtcccactggattcattggtcactgtctaagagggagggaaagaagccttgttcctgccatgctttccctctgagggccagctggcatcctcagcctggctcctggggccgtcctcttcactctctaagctgaagtgaccactcatatgggctgttccccctctgagcctggccaaggggctgagagtaa

SEQ ID NO: 740394 - DNA, 613 bp, Homo sapiens
aacactgacacccaggctttcctgaaactcacattccaggaaaagcaaagtccccagccctcacccttttaactaaatgcctccctgtctcccagctgtaactgaaacctaactctgacctgaggacctccgttcttcatctgggttctgtctttccccaccccctagtacttcaaggtgtgaggggtgcacacgggggaatactatttcccctgacagaaaaccaggcctcactctttgatccttccctcgctctyttctggaagcaacaactctccactttctgcgatgggggcctgggcaccactcatcccttcgcctctgcccttgtagcctgggaaatccttacctgctctctaggggtggagaaagcttatgctgacccatcttctttgcctactgtttagtccagggccttagctcgtagaggttcagagcatctttttctctcaagacgttgctattgttttgatatttaagatcttatttgaatacttcaaagcagaacaaagaagctcctttctctttgcattccctgctatgatgtcctaatcttccctgatgcaatggatgcctcacgaacatgtccgtgaaaagaacggatccacaaaaa

SEQ ID NO: 740395 - DNA, 664 bp, Homo sapiens
cacttataagtgaggacataaaatatttgattttccatttctgagttacttcagaataatggcctccaactccatccaatatgctgcaacagccattattccattctgtcttatggctgcatagtattccatggtgtgtgtgtgtatatatatatatcacattttctttatccacttggtttatgagcattaaggttggttccatatttttgcaattgcgaattgtgctgctataaacgtgtatgtgcatgtgtccttttcacataatgacttcttttcctctgggtagatacccagtagtggggttgctgaatcaaatggtagttctactcttatttctttaaggaatctccatactgtttacattgcrgttgtactagtttgcattcccaccagcagtgtagaagagttcccttttcaccacatccacatcaactctataattttttgattttttgaattatggccattcttgcagaaggaaggtggaatctcattgtgatttatttgcatttccctgacaattagtgatgttagcattttttcatatgtttgttggctgtttgtatatcttcttttgagaattgtctattcatgtccttagcccactttttaatgggattatttttttcttgccgatttgtttgagttccttatagattct

SEQ ID NO: 740396 - DNA, 443 bp, Homo sapiens
caggaggcgcccacggaggatgaggccacctctaatcccattcatctctatatcctgggccaccaccagcctggctacagggcaggggaaacatggggaccttgctgaatttaaaaatgggctggagactcctgttaacsagaacagagggccctttaatagacattgtgattttattacctgtgatcaataggaaaatcaggtgctgaagaacccaccaaatgtagtaaacaccaggagaagagataggaaagccagtgggccatgagacttgttgtgtagccctggaaggcccactgtgccctgaatatttccaggaagatgggagtggtgatgtctagcacctcatctgccacctggtaccttcttcttaatgccaacttcaaatccgctacagaaaaatactgttccaaggcttctcactgcaggttgctttgtgttct

SEQ ID NO: 740397 - DNA, 443 bp, Homo sapiens
caggaggcgcccacggaggatgaggccacctctaatcccattcatctctatatcctgggccaccaccagcctggctacagggcaggggaaacatggggaccttgctgaatttaaaaatgggctggagactcctgttaaccagaacagagggccctttaatagacattgtrattttattacctgtgatcaataggaaaatcaggtgctgaagaacccaccaaatgtagtaaacaccaggagaagagataggaaagccagtgggccatgagacttgttgtgtagccctggaaggcccactgtgccctgaatatttccaggaagatgggagtggtgatgtctagcacctcatctgccacctggtaccttcttcttaatgccaacttcaaatccgctacagaaaaatactgttccaaggcttctcactgcaggttgctttgtgttct

SEQ ID NO: 740398 - DNA, 658 bp, Homo sapiens
ctcactgcaacctccacctcgcggatccaagcgattctcctccctcagcctactgagtagctggtattacaggtgtgcaccaccatgcccagctaattttttttattttagtagagacagggtttcaccatgttggccaggctggtctcgaactcctgacctcgtgatccacccgccttggcctcccaaagtgctgggattacaggtgtgagccaccgcacccagccaaggacatattttctatatcctgcatttccccactctctgctgacactgtccagagtgctctttggggaatgataatgatgacaagaataagcacaataatagccagcacttactgagcgctcaccacatggtaggatgggcacctctctgaacactttamgtgcatgaactcaccacaactacaaccctgtgaggctggtactagagttttccatctacaaataaagaaactgaggcacagaggggttacattacttgcccgaggctggagttatcaagtctgacagtagaatccacccgtgtaaatactatactttatacttgatcaagtctccgggatgatcatgggcttcactgctcagtttgggggtagcacaggtcctctgacacttgcgggtcctgtcactttacctttgtattttcctctgga

SEQ ID NO: 740399 - DNA, 362 bp, Homo sapiens
tttgtttagttgccttgattggcaatatactgcaattaaaacaccaaataatatgtgcaaatatatcattaattcatcattaaaatttgaaaacattgtatgatgatgtattcttttacaaggagtatacattaggcaagtaaaatactaattattaattraaacatattatgaaaagcagcatatgttaaaattgagtgaaccaatagataatatccatatttatttatttctatgtctttctgagtaattgtacataactgaattcaaattaatcagaaaaagctgctacatttcagatataagagtaattttctaatgccttaatttcaaatactgtgcatccgatttgttggaactgg

SEQ ID NO: 740400 - DNA, 590 bp, Homo sapiens
agaattgtttgtttaaaaacaaaaattcacacaaaaatttgcaaacaaaaattacaactccaataattggacgtccttgttactatgggagaatacacaggaagaaaatgataggctttcaaaaattaataataatggggtttttgcttgattactgcattagtttcccttcgctgctgtaacaaatcaccacaaccttagcgtcttaaacgaacacacatttattctccgacagctctgaaggtcakaagtttgaaatcagtttcaaggtggcagcagagcttatgttctcggaggctcagagggaagaatctgtttgcctgtctttttctgctgctaggggctttattggcttatagcccctttctctatcttgaaagtgtatccatccattctctgctttcatatcacatcagcctctcctctctaatattctgcctgttcttatggggacccctgtgattatgtcagatgaaccttaatgatccaggagaaaactttgctactcaagattcttaacttaatcaaatctgcagtgtaacttatgctataagagggaacattcataggttctggatatttacacttgg

SEQ ID NO: 740401 - DNA, 536 bp, Homo sapiens
taccataagttggggaaatagaagtagaaacaaattcttttcccaacccagaatcctctccataaagatagaagagaaagaagacactttcatgattgaacaagcactaaagcagaatgtgatgcacatcacaggcaaaagattgcaaaggcagaaaaaaaacttcactcttttatatagtcaagtaaatacaacctgtyacatatgtgttttaaagataaacaataacttattctaaagtaggaggacttgaaagcatcatttttttatacatagttcatcctcagtttacctggtaattggggtgaccacctgtgttagctaattaattgactttacccaggggaaaaacaaacttcccatctctttatggcagaaggtagttttgcaactggagcaaggaactaacaatagttaagctcttaccctcccacagaaatgggaagataggggtgctatcttttgatgtttacatttcaaagagatatctccaaggtccttgaaaagacattccttggttatagaactgacaaatg

SEQ ID NO: 740402 - DNA, 536 bp, Homo sapiens
taccataagttggggaaatagaagtagaaacaaattcttttcccaacccagaatcctctccataaagatagaagagaaagaagacactttcatgattgaacaagcactaaagcagaatgtgatgcacatcacaggcaaaagattgcaaaggcagaaaaaaaacttcactcttttatatagtcaagtaaatacaacctgttacatatgtgttttaaasataaacaataacttattctaaagtaggaggacttgaaagcatcatttttttatacatagttcatcctcagtttacctggtaattggggtgaccacctgtgttagctaattaattgactttacccaggggaaaaacaaacttcccatctctttatggcagaaggtagttttgcaactggagcaaggaactaacaatagttaagctcttaccctcccacagaaatgggaagataggggtgctatcttttgatgtttacatttcaaagagatatctccaaggtccttgaaaagacattccttggttatagaactgacaaatg

SEQ ID NO: 740403 - DNA, 385 bp, Homo sapiens
tctcttctttattgttttatttaatagtacctaggaaatgtttacatagataaacatgtgtcatggtggtttgctgcacctaccaacccatcacctaggtattaagtctgacatgcattagctatttatcctgatgctctcctcccacctctctaccctctcccgacaggccccagtgtgtgttgttcccctatctgtgttcatgtgttctcattgttcagctcctacttataattgagarcatgcagtgtttggttttctgttcttgtattagtttgctgaggataacagcttccagcttcatccatgtccctgcaaaagacgtgatctcattcatttttatggctgcatagtattccatggtgtatatgtaccacactttctt

SEQ ID NO: 740404 - DNA, 588 bp, Homo sapiens
tatgtagacccatggggcagggtagaaaacccagaaattaatgtatatatctacagccaactgactttttaaaaaggcgtcaagaacactcacaggggaaaggacagctgtgaataaatgcagctgcaaaaactggatatccatacgcagaagaataaacctagactcctacctcttaccctatacaaaattcaattcaatttggatcaaagacctaactgtaagacctgaaactataaaactactagaagaaaacatgggaaatgctttaggacattgttctggaaaaagattttaggagtcagacctcaaaagcacagacaacaaaataaaaaacaaatgagataatatcaaactaaaaagcttcttcacaacaaaggaaacagagggaaaagacaacccacgtaatgrtagaaaatatttgcaaactacccatccagcagtggattcagatccagaatatacaaataatcaaaacatctcaacagcaaaaaataaaactatccaattaaaaaatagtcaaatgacttgcatagacattcactagaagaacacttacaaacggctaacaaatatgggaaaaaatgc

SEQ ID NO: 740405 - DNA, 615 bp, Homo sapiens
atagcagagatggaatgatcctgagtgcattatgccaataaaccactcaattacctctaagctttgtgttatatgagagaatacactttctttatttttaagctgcttgagttgggttttctttacttgctgctgaaagtatcctgacaggtaagtgtgtagtgtgtatgcatgtgggaatgcaaggaggattaaatacagtagaagtcrgagtgaaaggaaggaaatagttaaggtcatccctcatgaaatggaagggatatggcagcatacgttaggtggtatgtaagctgagaacaggtggaaaacagcccacatctacctggattttcctctgtacctcctgccatacgtttatttgccctgcatggattgttaaaaagtaaagggaggcacagtaaaattttaaagagtttatttgagcaaacagtgattcatgaatcaagagtagcagtttcaaaccagaagtggttcaggagatccacagagagaatacaagtgggaggcatttataggacaaactcaaaagtaatgcaaagaaaatatttgattggttgcagtcatacagttgccttatttggtgtatcccattggaaaatgcctagttacataagt

SEQ ID NO: 740406 - DNA, 544 bp, Homo sapiens
gtgacttcagtaactaagataaatgggcccaaagaagaatgaacaatgaagaactttaaaactgcttttaagaatcagggatcttagcaagatggtggataggaggcaggaccagcttgcagctccagctcggacagacacgtaaacactcatattgtgaacttttgctacagaactgctgcaggaatatactaggaaagctgagagaatccacagaccctctgaaggaagtggattgcttctgcaggacccaagaaacagcccaaatactgtgagtgcccaaactgtgacagtgggaaaagaggattgtytgcccccaaacacaccctcactggggaacctggaggtatagatcatggaaaatggatttgaccttacctggatctgagtcagtttagagagctgagagaactacaggggtgtaagaagcggcgggaaaagccctgtggtctctctgggtccccagagaagccatttctgacttctctcacaggggtccttgaggagggctgccagagtaactgggaagagaccacagggagaa

SEQ ID NO: 740407 - DNA, 596 bp, Homo sapiens
aatagtaattatttctcttgtactatgacatttttatttttgaaattttttatattgagttatccttaacttggggtagtaagtctatgagttacttttcataaaggggaagtgagcgttttccacaaacataggtgaaaaaacacatttcgtgagtgaaaaatttgactcttaggtatacagtttgtgggttacaatctttccctttactacactataaacattattttattgtagccagctctctagatttttttttaaaagaaaagtgcaaggtcagtctgttttttatttcttttatatagcatgttgtttttaacattttcattttttatttgaaacattttaaatttattcttaaaattaacacaatattgaacatgtttatatatcattatttttactcatctttttttaaacattgtaagtcattcatctgtcccaattttgtcrtcaactcagagaagatttcttctcttatttttgtaattactaccaccccatttgtttacattttttttcttctggacttccaattatacaaacctttgatctttttattattttctgtatttttccttttatcattttattcc

SEQ ID NO: 740408 - DNA, 635 bp, Homo sapiens
atcacatcgctgtattgatccctttattgttatataatgagcttctttgtctttttttctactgttcttgacttaaagtcgttttatgtgatataaatatatctactcttgcttgcttttggtttccatttgtagggagtatctttttccattccttactttcagtctatatgtgtctttactagtaaggtgaatttcttgtaagcagtatatatttgaattatgtttttttcaatcaatgtaaccattctatatcttgtcagtggataatttaattcaattatgttgaagattattgatatgtgagtctttgttcttgtcatattgttaattgttttttggttgttttatatagtctttgttcctttctttttctcttattgattgttgtggtttagacgatttctgtaatggcaccatttgagttctttctattcctccttttgtgactgctttaccaatgagttttatatttttatgtgktttcatgatgggaaatgtcatcctttactttccagatataggacttccttgaatacttccttgaatatttcttttagggttggtctagtgagaatgaattccatcggcatttgtttgtctggaaaagactctttttttcctctttcatttat

SEQ ID NO: 740409 - DNA, 568 bp, Homo sapiens
tcatagagctcttccaaaatggtagaagactcttggcattcacagtcaatggctcatcaataaatcagcttgtgggaaagtttagactgcctttgaaataaaagaagaaaaagagagataaggtttgatgtaccttattttaaaatctacgatatggtcatgttggatataacagcaacaacaaacctcaccacatttatcccacagaaatcatcattttattgattgacatccctttgcatattctatctaccaactcttgcaactgaatctccgtttagtgctaacaaactgtcaagctttgctcyccttcaggactgggagtgtgtgacactggccttctagggacaagtcagaaatgcctctctcatatgcctcatgtagttcttgcagaattagtttttttttctaccagtgcatatgtgctcctgctccctcttccttaccctttcattttcatctgaactttgtagacatgattttaacagagggtctccattctatgaaaaagtaaatgagaaactacttatgctgacacttgtcaaagaatatgtaaaaagaaatatta

SEQ ID NO: 740410 - DNA, 545 bp, Homo sapiens
tatgtttgggggaaagtaagggaagattaaaagaatctctgcctggtaatccagataattcttctggatcttgtccaagactatcaaggcagtacctctgcaagaaccacagtgttgctgggcttggggtgctcctgaaacagatacagcttagatcatgacacttaagtcctttcgaatatataaaaagcctccccccaaaaaacagctaaatataagcccagacagtgaagactacaataaacacctaactcctcaatgcccagataatgaagaacatctgctagcatcaacgccatccaggaaaacataacctcaccaaatgaactaaagaaggcaccaggraccaatcttggagaaacagagatatatgacttttcagagagagaattcaaaatagctgtattaagaaaattcaaagaaactcaagataacacagagaaggaatttagaattctatcatatacatttaacaaaatgactgaaataattaaaaagaatcaagcagaaattctggagctgaaaagtgcaataggcatacagaa

SEQ ID NO: 740411 - DNA, 619 bp, Homo sapiens
aagatctacatgagaaaaactacaaaactctgttaaaagaaatcaaagaagaactgaataattggagagatatgccatgttcatgaatggaacgactcaatattgtcaagatgtcagttcttcccaacttgatctatagatttaaaataattccaacccaaatctcagaaagttattttgtggatattaacaaacttattctaaagtttatgtgaagaagctaaacaatattgaagggaaaaaaggaacaaagttggaggacttacactaccatattttaagayttactataaagctacagtaatcaaaacaatacggtattggtgaaaaaaatagacaaataaatcaatggaacaaaatagagggcccaaaaatagacccaagtaaatatagtcagatgatatttgacaaaggaacaaaggcaatactatgaaaaaaattagtaatttcaacaaatgactatccacatgcaaaaaaaaaaaaaaaaaatgaatctggacacaaaccttccaaaaactaactgaaaatggaccagtgaaatctaaaatggaaaactaaaaaactcctagaagataatacaggagaaaatctagatggccttgggtttgatggtgacatt

SEQ ID NO: 740412 - DNA, 491 bp, Homo sapiens
cactatggagaacaatttggagattcctcaaagaaataagtgttgaattaccattcaacccagcaatccccattactgggtatatacccaaaggaaaataataaattattctattgtaaatacagaagcacctatatgttcatcacagcactgttcacaatacgaaaaacatgcaataaatttaggcygtcatcagtggtggtttagataaggaaaacatggtacatatacactatggaatactatatagccattaaaaagaatgaaattattttctttgcaaaaacatggatgctactggtgaccattatcctaagtgaattaaggcacaaagagaaaaacaaatgctgcatgttctcatttacaagtggaagctaaatatgaggtaaacatggatataaagatgggaggaagagatggaatggggaagggctgaacagcaaactattgtgtattatgcttactatgtgggcgacaggctcagtcatacc

SEQ ID NO: 740413 - DNA, 491 bp, Homo sapiens
cactatggagaacaatttggagattcctcaaagaaataagtgttgaattaccattcaacccagcaatccccattactgggtatatacccaaaggaaaataataaattattctattgtaaatacagaagcacctatatgttcatcacagcactgttcacaatacgaaaaacatgcaataaatttaggctgtcatcagtggtggtttagataaggaaaacrtggtacatatacactatggaatactatatagccattaaaaagaatgaaattattttctttgcaaaaacatggatgctactggtgaccattatcctaagtgaattaaggcacaaagagaaaaacaaatgctgcatgttctcatttacaagtggaagctaaatatgaggtaaacatggatataaagatgggaggaagagatggaatggggaagggctgaacagcaaactattgtgtattatgcttactatgtgggcgacaggctcagtcatacc

SEQ ID NO: 740414 - DNA, 560 bp, Homo sapiens
ggaatccaaggcacagagagggtctacaatttgcccaaggttacccagctactaggtgacagaatattgattatgtacccaggaagaatgggtcgtgaaatgatgttcttaaccctgtgttatgatactttgtatggtggtgaaaaaataaagggaagaggaaagagaattaaagtattttggaggtctacatagtgccaatgcctgagccaggcattgtaatgtgtttamctatgatactaatgtcaagactttaaactctttatttttttcttttatgcccagatgtctttgggggaaattcgtaatttctactgtcttaaatgtcctcatctataaatcaaggggttgtatcacgttccttccaagaatcttctctgttctaatcctctgcttctgtgcctaggcatgaaataaaacaatctttttttcatgtttttgcgtatgtcttactctgtcaactttttgaaagtcttaacaaataataacttttgtattctggatttagagaataacataccctattcatcagtttattgggtctaatactacttgttcac

SEQ ID NO: 740415 - DNA, 607 bp, Homo sapiens
catatgacaggcgacaagtgctgcttcacaaagaattcttttccttacctttagttttgaaactgaaaatctcagagccacctactagactagcacctggtcctagaaattccagaagctgtcaagtccctttgctcaggccctaatggaagggctactctaaaggatttaaagaagtccgacctgtagttcggcaaattgatcccgtaaagcttcaattcctcctaccctaaacattcctgatataattcctgcttaractgatggcaattgacatacattgaattatgaaacagctttgggagccatttgtaaactgtaaatgaagtgtgctctcctattgccccacctgggacaaattgccaggtgagtttatcataacaccattgtatccatgtgtttgtcatttggttaggttaaaccaatttgtaaataaagaaagaaggctgaaagctgaaggtcaaatactacatcttttttttttccatctttgactactgagtggttttggacctttctctgcaattcatttagtgtagagcaaatcctgcataaaaccagtatgtaaaattgactgattcggaggctcttctgagcatgaggtttc

SEQ ID NO: 740416 - DNA, 597 bp, Homo sapiens
aggatggcccagctgaaatgtgaatgcaagcttgtctgattcccacgtctacgccatgtttgtcattattatcctcaaggaactctgactttaaataaccagtctacgttacaaaatctatacatgtgattgagactgattttttttttttttttttgagatggactttcactctgtcacccaggccggagtgcaatggcactatctcggctcactgcaatctctacctcctgagttcaaatgaatctcctgcctcaacctcctgagtggctgagattacaggtgcccgtcaccatgcccagctaattttgtatttagtagagacggggtttcgctacgttggccaggctggtctcaaactcctgacctcatgtgatccacccaccttggcctcccaaagtgctgggattacaggtgtgagccaccgyccctggcctgatctcctcctgtcacaagattaagcaggacctttgaggctgtcaggggagggtagatattggaaattgatgccaacttcataccaggcactggacaacaaacttgcctggcaataagatgcttgggttgatttagacatgactggtaaccagctcttcc

SEQ ID NO: 740417 - DNA, 625 bp, Homo sapiens
aaatgtgcctttacatctgtttaggatgacattttgggcatctagtactacattacaatctccatgagacaataaacacatagacttgttatttgatagttgcataattgtggttttcttctgcttgttctcagaggtggagagctgcctgtttgctttttattcctcttttttttttttccaggagaaaaaaacaaatgtaaaacacaccaaaccagagggaaagaaatagtcaatatgccgctgctgcatgtaagctgcaagtttatttgcctgtttactctctttgaaatacctgtgaagtgctttgccggcgggttctcgtccacatcctctsagtggcaatgctcattcacgaccagcagagggcaggcacgacctcctaatacaccgggaaggccattttgccagcaccaggaataaaggcgcccttgccatctgtaacctcaaccatctctctcaaccactgtagacctaattgccatgataaaaacagatctgtatgagctttgtagtcacacggtcttggttaaatcgcagctctgccacgtattagctgtgtgaccttcaacaacctacataacctctctgagcgcgtttcttcctcatttctaaagtgggacta

SEQ ID NO: 740418 - DNA, 611 bp, Homo sapiens
tgacaggctgatacccacagacatagcccctagacctatccctacaccagatgggaacacatagcccctgcaagatggactcaagttctggcctgcatcactgctggccaactacagaggctttggactccacataatccctagtgacaggaaggcctcagaaggtgtgacttttgggcatgccccagtgctgtactagcttcagtggccatgggctttgattacacatcagcactgcagcagccttagcagccgtgagattctagcccgtgctgtgacagctttagcagccatgggacttcagtttggcactgtgctggctgtgacagacctgggcttagagggcccccacgcactgcaatgtgtgcagtaattgcagtcttggggaccacaccctgacaacctgcccaaaatctctagataggcttactattgaaggacattcctagacaragctagactgtgaacactggaataagtatctgcttcatcaatgtgcagacattgacacatgaccaaaatgatcaagaacaatttgggaaacatgacatcatcagatgaacaaaataaggtgccagtgactagccctgaagagatggagcgctatgaac

SEQ ID NO: 740419 - DNA, 514 bp, Homo sapiens
agaattaaaacaatattcccaaatacactgaagtcacttacgaaccacactgtggtaatcctacattatgtcaattcacatcaatcattcattagtggacttatctaaaaaagtctgagccagcccgattaagcaaagaatgtcaaactcaaccaaccttcatcaaatggatttgatatgaattgcaagtgtattgttcacatacctttatgactgaaagcaacaattatcaaatattttccaatcttctaatgaatctaaaaactgtgtatgaagtggaaataactattgytacacttcctttccttcctattctttaccacggttgctttggattgctcactgttcagcagtgctccacacttcccttggtagtgaacaagcagacagctgaaggagtaaaaattctaggatttttgtttacatcttcattatttccctatgcccaatgcatttcccagctgattttcatgaatgctccctcctctgttcatctcttattccctctcattat

SEQ ID NO: 740420 - DNA, 619 bp, Homo sapiens
aatgagtcagaacggagcaaatgagatttcccttatatttgggttccaaaaattacagagaaaatgtgcctgaggcagaaacaaactaaaaaaaaaaaatggaggtaggttattgaggcaggagccacatgggagagaacctttggacccagaaggctgggacgactttggcctcctctaggggttatgaaactgttctggctccagagaactcaatcccagaggccctgaagtggccacaatgctaatgggatgaacacaggcccagctgagcaggactcactgtgtctcagcctcacagtgtcagagaaagcagggaaaggaacagagggctgtaatgggcctgtcccctagcrgggagccaaaggccagcttttatcttctcagagaaacaagcagagacagagaaaaagagaaaaggaaaaaaaaacacctctgcccagctccatgtggccagagagggggagagagagaaacgtgaatggcaacggaatacttttgtttggagaacgccatttctcctaaatggcttcaaggcaggcacctagtaacgtgccagggtctcggcagacattcagtaaatactggaaggaaaggaaagagaaaggatggaaggtgg

SEQ ID NO: 740421 - DNA, 615 bp, Homo sapiens; identical to SEQ ID NO: 737466

SEQ ID NO: 740422 - DNA, 568 bp, Homo sapiens
agatgcagcaatgtcctcgggtgagcagagaggagggatccatgacacacctgaaggaaaaggaatctgatacgagcagggcctttggtgcacaggacacgctagcctcccagcagcacacatcaaggctggcagttttctagatccagcccatgtgtcagcaaacaatggtcctcaactctgacctgctgcctgtttttataaataaagttttattggaacacagtgcaggctgtgcgttgcatactgagtgctttcacactacaagggcagagttgattagttgcaacagaggtgctttygcccacaaagcctaaaatatacactctttggctctttacacaaaactttttgctgccatctataacactacttagaaatcaattcccttgatccacatgattttctcaaaatataaatcggatcattccttcaattgttagatgaacttgggaaacttctctactgcctaaaagattaactccaaaggtcttagcaagccaaacaaagcccttatgtttggaagctgtaccagaaagtaggattctgttctggaaatacagacttc

SEQ ID NO: 740423 - DNA, 622 bp, Homo sapiens
caacaagaaaactagacagaaagtccaaacatcctgagagcatctataccatattatagcaatttgtaatattttatattcatagtatcagccaggaacatcaagcaaagtattgttatgttcagtataacttttcaaatgyaaataagtccatacaggttgagtatcactaatccgaaaaccaaaatctgaaatgctgtaaaatctgaagctttttgagcaccaacatgatgctgaaaagaaatgttcatgggggcatttcagatttcagattttctgatgagggatgcccaactggtaagtataatgcagatatttctaaatcagagaaaatatcagaagtccaaaacacttcaggtcccaagcattctggataagggttactcaacctggaatgtgttttggaaataatatgaagcaaaagatttaaaaaaaggttaaaaacataaaagatattaccatatgacccagcgattccactcctagatacatatcaaaaagaagcgaaagaaaatactcaaacacttgtacacacatgttcacagaagcaccattcacaacagccaaaggtggaaacaatgccaagggcccatcatcagatgaatggatgtggcatacccac

SEQ ID NO: 740424 - DNA, 622 bp, Homo sapiens
caacaagaaaactagacagaaagtccaaacatcctgagagcatctataccatattatagcaatttgtaatattttatattcatagtatcagccaggaacatcaagcaaagtattgttatgttcagtataacttttcaaatgtaaataagtccatacaggttgagtatcactaatccgaaaaccaaaatctgaaatgctgtaaaatctgaagctttttgagcaccaacatgatgctgaaaagaaatgttcatgggggcatttcagatttcagattttctgatgagggatgcccaactggtaagtataatgcagatayttctaaatcagagaaaatatcagaagtccaaaacacttcaggtcccaagcattctggataagggttactcaacctggaatgtgttttggaaataatatgaagcaaaagatttaaaaaaaggttaaaaacataaaagatattaccatatgacccagcgattccactcctagatacatatcaaaaagaagcgaaagaaaatactcaaacacttgtacacacatgttcacagaagcaccattcacaacagccaaaggtggaaacaatgccaagggcccatcatcagatgaatggatgtggcatacccac

SEQ ID NO: 740425 - DNA, 625 bp, Homo sapiens
ggagaagtttacagaggctgagctgtgttgcttggatcagctgtagaagcttgggctttcaggcgtcagatgcttgcttgcacagctagctgagaaggacactttgtgagccatgagcttcagggtctcagagcagtttcagagtggccttctgtttcattaattctctacccmggaggctcctggtgctgcaggatcctctttccaggggaaatcagactcacttaggaactgaatgacttctagcagttctctttctttttaactaattcagaacttgttactgttttattattttttatattatagatttacaagttttaaatcaatacgtcttttaatgttaatgccattcatctttaaatatttatcgaaaaattttcttatgtatacattatactgaaatccatttcatgttctggcttttatgaaagtttaaccctaaatctttttttttcctctacttgctctttttcacaattttaactctcacatctctcatctcgttttctacaaacattttaatcttttaaaaagatgttatttcaattcctagttttaggtctgttttagtcctttattttttatttatttattttttgagatggagttttgttctgttgcc

SEQ ID NO: 740426 - DNA, 625 bp, Homo sapiens
ggagaagtttacagaggctgagctgtgttgcttggatcagctgtagaagcttgggctttcaggcgtcagatgcttgcttgcacagctagctgagaaggacactttgtgagccatgagcttcagggtctcagagcagtttcagagtggccttctgtttcattaattctctaccccggaggctcctggtgctgcaggatcctctttccaggggaaatcagactcacttaggaactgaatgacttctagcagttctctttctttttaactaattcagaacttgttactgttttattattttttatattatagatttacaagttttaaatcaatacgtcttttaatgttaatgccattcatctttaaatatttatcgaaaaattttcttatgtatacattwtactgaaatccatttcatgttctggcttttatgaaagtttaaccctaaatctttttttttcctctacttgctctttttcacaattttaactctcacatctctcatctcgttttctacaaacattttaatcttttaaaaagatgttatttcaattcctagttttaggtctgttttagtcctttattttttatttatttattttttgagatggagttttgttctgttgcc

SEQ ID NO: 740427 - DNA, 629 bp, Homo sapiens
gttgaaaactctggaagaataaattagatgaaacaaagaatttcaaaacttcaattctctagagaaatatgctaaaagtaagatacaagattggggagtagatattgaagagttatgaaatagtttcattaatactgaatcataagcaataaaaatgtaaataaaagctttcctttgttctcttcatttcctttagtttaagatcctttgtaggacagctctctgggtggtcttggaatgaccaagttctctctctcccatcgtagctctcaagaataactgwagcatgtgcaggaaaatgcaccatcctgagaacagggagggaccggctggaacagcccaggttctactccagtcctcccctaaaaacaggatgtcctccaacactttagcccagtgagtctcacatactcagtgtataaaacctggaacagggtgctttccagaggccctcagctgcagtgcaagtggggcatatgcagtcaagattccattcacccagggcagttttcctgaaccttgagagactagcttgcaatgaatcctaggcttctgttgtatcttgctgcctatccagaagtggtaaacttgctttgtataacttgtatgcaagaatgttctgtcttacc

SEQ ID NO: 740428 - DNA, 636 bp, Homo sapiens
ctgtttttgccattgccatgaaaccaggaaattttattaaggtcatgggcagatcatcaattctgaattaagtattcaaaaacactttattcaaaaatctagataaataaatctgttaactgaaatgcaaccaaaattctgatgtatttcctttaaatctttttgaaattttcaaatcccttagatttcatataacttcawataatttcatgtaactcattaagacagatttgcttttcctcacagagaaaatacgttttttaaaaatggctcaaccttaatttaataagtatcccacagaaaagatactataaaaaatatggaggcttcagtgagtttttttctctagtccaaggtcatccaacatgtggctcaggatggctttgaattgggcccaacatggctttgaacctgggcccaaaacaaattagcaagctttcttaaaacactgagatttttgcaattttttaaaaagctcatcagctatcgtcagagttattttgttttttatgtgtggcccaagaccattcttcttccagcatggcccagggaaaccaaaagattggacagccctgaagtctagtccttatgtccaaacttgctttctccctgccaatactactgcttcctatggcc

SEQ ID NO: 740429 - DNA, 636 bp, Homo sapiens
ctgtttttgccattgccatgaaaccaggaaattttattaaggtcatgggcagatcatcaattctgaattaagtattcaaaaacactttattcaaaaatctagataaataaatctgttaactgaaatgcaaccaaaattctgatgtatttcctttaaatctttttgaaattttcaaatcccttagatttcatataacttcaaatmatttcatgtaactcattaagacagatttgcttttcctcacagagaaaatacgttttttaaaaatggctcaaccttaatttaataagtatcccacagaaaagatactataaaaaatatggaggcttcagtgagtttttttctctagtccaaggtcatccaacatgtggctcaggatggctttgaattgggcccaacatggctttgaacctgggcccaaaacaaattagcaagctttcttaaaacactgagatttttgcaattttttaaaaagctcatcagctatcgtcagagttattttgttttttatgtgtggcccaagaccattcttcttccagcatggcccagggaaaccaaaagattggacagccctgaagtctagtccttatgtccaaacttgctttctccctgccaatactactgcttcctatggcc

SEQ ID NO: 740430 - DNA, 588 bp, Homo sapiens
atatgaaagggagtttattaaggagtattgactcacacaatctcaaggttaagtcccacaataggctgtcttcaaggagcaaggaagccagatggatgtgtttgcttccccttctgccaggattgtaagtttcctgaggccttcccagccatgctaaactgtgagccaattaaacctctttcctttataaattacccagtctcgggtatgtctttataagcagcatgagaatggactaatacatacagtttgcaatgaatggrctggccacaaaaatataaggggcagagttttgagaaatgctttaagttaggggctaagacaaagaatatatatttgtttatatttacctaggtgaagaattttaaactttattctaaaggaaggggaatattgctacattttaaccaagaaggtgatcagattttcatctacagtaaataagccccctgaattacccattcttctcagttctaaagaatattttacccttgtcaaaataacagcttaagtcatgatccaaaagaaagattctcctctttgacactacctagtagtaccagcttttgtctatattctctttaaaga

SEQ ID NO: 740431 - DNA, 634 bp, Homo sapiens
gtcaaagcatataaaatggcaattagacaaaagaaataagttcaagaggtacaacatggtacctatagtaataacaatatgtggtattctcgaaaattgctaagagtaagtagatttttaagtattttcacaaaaaattaygtcagataatacctatgttaatttacttggtttagtcattccgctgtctatacatacttgaaaacatcatgtcatcaccataaatacatacaatttttatttttcaattaaattcaaaaagtaaaaaaaaatgaggtttagataagtgtataaaaaaagatatttaattttacagtaagtccaataagaggtactattcaacccttatgaaattttgggttgtttaaagatgtaatgagttccacaggccctaatgagtttcctgtcactggaagcattcgaccatgggctgatgtccaccctgcaggggcatcagcagagaatttgagcataggatgagtgtttgatttagatgacctttgaggttatactcaatcccaagatttctgattcagcagttctgtaatcagagtggcaaaactgccagaaaagctaatggaatccagctgccttcagtaaaagcaaagtattagatcaaaggaggtaaaatttc

SEQ ID NO: 740432 - DNA, 622 bp, Homo sapiens
ttagcctctttccatttcagtttcctcatgtataaaattatacatacccctacaagattgccatcaacacaaattagataatgcctataaaatgtttggcacataaatgctctgtaaacattagttgttggtacttttaaatgtgttgttcacaaatcttctcaatgttgtatattgttaaaaaaaagaaaaaggctttaaagtaacaggctgtaacattgaaggggccaaaagagaagcttacataatcctaaagctatctactcttccctgaaaatacagtgtatttggaataatttatccgaataaaactgtgggtaaaataatataatccttagtaataaatgatgtaaaaccctcttcagtcaaaagcacatttcaagagaaagaaaacactttgaatgactttgtgttaacggttaactcagtggttaaccrttaaaagatgattctagctagtgaaaatgcctaatgaagacccttgaaatgctagtgaaattcaagaccctgaaggacttgaaatgcttcctgatgagcatcactgacaccagatttttcagaaacttttattagctgctactatctaaaggacccatatttttgagatttgtgtctgttgttt

SEQ ID NO: 740433 - DNA, 617 bp, Homo sapiens
agcctgtaatttcaaggactcttcagttcctaaatgacctttctgttggatatccttttcactgtatatctgacattatgtgtaaacaacctagcagatgcatttaattaaccaggtattctccttgtttataatttttgcaattttttaaaaaaataaaaagacctttcatttarccttatctgtaaatgcatgtttttgaaaggttttaattagctgtatactatgaagcatttagtcggaatcactgttgaatttatatggacatatagattcctaagtagttacagttatatttatactcacccaggctaataaatggttatataagaaagtccacatgtattttagttcatgcttttttgtaattgtcagaaattcgtgtcctaaaagaaagtatgtaacttaattttaaggaggtcaaaatgttctaaaaatattaccttataaaaactgcattcctgtgagtaaatatatctctaatattcttcagttgaaaagaacatcattttcattagttgaaaggcacaatggagtaatacaaagaaaataagttttttgaccatttcttgattatgcccccaccaaatcaacatctaatctaatctaaaataaga

SEQ ID NO: 740434 - DNA, 529 bp, Homo sapiens
agggtgtgttttatagaattagaggggcatctcagagatatgagtaattccttataagattattagaataagacactgatcctgaaagcttctctaaatcagaattccagttaaaactaattgctctagaaagagtaacaccttccacagaaattagcmagaactattacgcaattaatttgttaagagtgtatttttagcaattatcgtcttgaaaaccttaatatattgcatagaggaattagagcagttagggttgaattcatcttactctggtctatttatctattttgctcaaatcaactgtactgaaatccaaaagaaattctaattgtgattttctttctctcccttttctcccttttctccctcctttttatgttatttctttttttttttttttttttttttttttttttttttttttttttgctaacatggcatttaactacaaattgtgaagagctgtcaggagctataaaaatcatacttcaggtagggacttaagctgaaagaacattcacccttt

SEQ ID NO: 740435 - DNA, 529 bp, Homo sapiens
agggtgtgttttatagaattagaggggcatctcagagatatgagtaattccttataagattattagaataagacactgatcctgaaagcttctctaaatcagaattccagttaaaactaattgctctagaaagagtaacaccttccacagaaattagccagaactattacgcaattaatttgttaagagtgtatttttagcaattatcgtcttgaaaaccttaatatattgcatagaggaattagagcagttagggttgaattcatcttactctkgtctatttatctattttgctcaaatcaactgtactgaaatccaaaagaaattctaattgtgattttctttctctcccttttctcccttttctccctcctttttatgttatttctttttttttttttttttttttttttttttttttttttttttttgctaacatggcatttaactacaaattgtgaagagctgtcaggagctataaaaatcatacttcaggtagggacttaagctgaaagaacattcacccttt

SEQ ID NO: 740436 - DNA, 569 bp, Homo sapiens
gtactgtggctaccacctcacttttgtatcattctgtcttattagcaagctacatttctaggttagcggttctaccaaatatgaatatgaaagtttatttttaataagacagtgttgcaaattatggtcaactaacatcttttcaccaaatacttcaagcataaaacatgagaatttttatagaaatatacagagacaccacaaattggtagctgtccatgacattaaacaaactggactcctaagagtggcttctcagccaggcacggtggctcacatctgtaatcccagcattctggggggctaaggcggatggatcacctgtggtcaagagttcgagaccagcctraccaacatggagaaaccccatctctactaaaaatacaacaaaaaaaaattagccaggcgtggtggcacatgcctgtaatcccagctacttgggaggctgaggcaggagaatcacttgaacccgagaggcggaggttgtggtgagccaagatcatgccattgcactccagcctgggggacgagagcaaaactccatctcaaaaaaaaaaaaaaaaaaaaag

SEQ ID NO: 740437 - DNA, 751 bp, Homo sapiens
ctcacagtatcctcttcacaggtccgaagtctgaaatcaaggtgttgacagggccgtgctccttctggaagctctaggggagaatccttccctgcctcttgcagcttctgggagctgtggacattccttgcactgcttcagcccagtctatgcctttgtcttcacgttgctttgtctgtgtgtctgtgtcttctctcttgtctgcatgtctctactttgtgtgtctcatttataaggacgtttgtcattggagttagggctacccaaataattcaggatgattccaacttgagatttttaatttaattacatctgcagagacacttttgccaaatgaggacacatttgcaggttttgggatgtgggtatatcttttggggagctactattcaacacagtacaaccccttttgtgatggaaaaatggtgatacattgtggttacggaattctctgaggttgcacagccaggagttggtagaattggaatttacacacagcagcctggctctagagcttgcatatggaccactactctcttttgccttttagtaaatgtgctccgtgattgttcacggtatgaatggagggcagcatggstgggaaaatagatggatgaaaagatgctggtaacagtagttggccaacattctccttctcaatgtactgaaaatagtaacaacaactgatattcattgttttatgctcttgacctgggactcgtccttggatcctcttttttggctattctag

SEQ ID NO: 740438 - DNA, 751 bp, Homo sapiens
ctcacagtatcctcttcacaggtccgaagtctgaaatcaaggtgttgacagggccgtgctccttctggaagctctaggggagaatccttccctgcctcttgcagcttctgggagctgtggacattccttgcactgcttcagcccagtctatgcctttgtcttcacgttgctttgtctgtgtgtctgtgtcttctctcttgtctgcatgtctctactttgtgtgtctcatttataaggacgtttgtcattggagttagggctacccaaataattcaggatgattccaacttgagatttttaatttaattacatctgcagagacacttttgccaaatgaggacacatttgcaggttttgggatgtgggtatatcttttggggagctactattcaacacagtacaaccccttttgtgatggaaaaatggtgatacattgtggttacggaattctctgaggttgcacagccaggagttggtagaattggaatttacacacagcagcctggctctagagcttgcatatggaccactactctcttttgccttttagtaaatgtgctccgtgattgttcacggtatgaatggagggcagcatgggtgggraaatagatggatgaaaagatgctggtaacagtagttggccaacattctccttctcaatgtactgaaaatagtaacaacaactgatattcattgttttatgctcttgacctgggactcgtccttggatcctcttttttggctattctag

SEQ ID NO: 740439 - DNA, 631 bp, Homo sapiens
ttcctgacagtcttattggctggccttacagtactttatgtaagagagtttggagtataagaaaatagccaggtgtggtggctcacgcctgtaatcccaggactttgggaggctgaggtgggcagatcacttgaggtcaagagttcaagaccagtctggccaacatggagaaactccrtctctactaaaaatacaaaattaaccgggcgtggtggtgcatgcctgtaatcccagctacttgggagggcgaggcaggagaatcacttgaacctgggaggtggaggttgcagtgagcagaaatcatgccactgcactccttggcagcaagagcaaaattccatctctaaataaataaaataaaaagtgagacaacatttttgctgaaaataatgatttgtccctgaacaggagtagtctcatgattctggattataacccattctccttttgagacttccatcatatttattcaggggttttacatgatggttgggtgatattcctcaccctgacgagataactctaggcagtcccattgatgaaacagttcgtatacctaggaatagtgcattgatataaagcaattgctttctgctttggcaggtattatatagacatggaataagaaagg

SEQ ID NO: 740440 - DNA, 589 bp, Homo sapiens
aaaccttgcttgtgtgaagctactaagaagttagagatgcttgttatagcagatggcttcaatcaccctaactagtacatgtgctaagcactctgtgaatctccaaggagtggataagtagatagcatttcctaaagttaatttcaagtgatttttctttcatgcaaaattttgagatattattwctccactagtttagccccatcttgaatgccattcacaagccttcttctataattaagtttctgaatcaggcttgctcaatgtaatcacatagcagaagaggaaggtagactagtccatccaagaaatgtggcagaaggggaagttgaaaaggtttgaaaaataagaagacatgccctgccattgttgtgagcaggccacatcaaaaacactgaaaacgattgtggctgcctctaagaacaaactggtccctggctgacagacagcaaggaaatgggaacctcagtctcctaaccgcaaggcagtcaattcagccaaccagctgaaggatcctggaagtagattcttccccagagcctccagaaaggaccacagccctggcaaaacctagatttttcccttttgg

SEQ ID NO: 740441 - DNA, 634 bp, Homo sapiens
attagaatcaatttcggagtgttatttcatgacacatttcatgacaagtggcatgtttattcctggcagtggaaaagtttttttttctccacgtacagaaataaactcttttactctcatccctgtaagggtagctttgctttttttttttttttttaaattgggccgggattcaagccttgtttccaatatgaagtaattcattacaattttaggccagaaacagcctgaggcttgtttaaaaagaaaaaaactagatggaaaatgttattttataatgcttgtcctggtttttaraataaatgtatttcatctttgtttttaacagaatttatgtattaataatttggggattttctgtaaagattgttttgttttgtcttggcaaataatcttcctatctttggagtgaatgagaatcaccatttgtcacctttgagagaatggatactcctgccctgtgatttttgttggtattggatagtgctagtaatctggaatgtaccctgtggttctgcaggtaatgacgaaagatgggcagtggtttacagactgggacgctgttcctcacagcagacacacccagatccgacctaccatgttccctccgaaggacccagaaaagctgcaggcc

SEQ ID NO: 740442 - DNA, 634 bp, Homo sapiens
attagaatcaatttcggagtgttatttcatgacacatttcatgacaagtggcatgtttattcctggcagtggaaaagtttttttttctccacgtacagaaataaactcttttactctcatccctgtaagggtagctttgctttttttttttttttttaaattgggccgggattcaagccttgtttccaatatgaagtaattcattacaattttaggccagaaacagcctgaggcttgtttaaaaagaaaaaaactagatggaaaatgttattttataatgcttgtcctggtttttagaataaatgtatttcatctttgtttttaacagaatttatgtattaataatttggggattttctgtaaagattgttttgttttgtcttggcaaataatcttcctatctttggagtgaatgaraatcaccatttgtcacctttgagagaatggatactcctgccctgtgatttttgttggtattggatagtgctagtaatctggaatgtaccctgtggttctgcaggtaatgacgaaagatgggcagtggtttacagactgggacgctgttcctcacagcagacacacccagatccgacctaccatgttccctccgaaggacccagaaaagctgcaggcc

SEQ ID NO: 740443 - DNA, 587 bp, Homo sapiens
tttagatttacaaaaaaagttgcaaaaataattctttgtaccctttacccagcttcccctaatgttaacatcctacataagcatagtttaattatctagactatgaaattattgaaacaatattattaacttatataccgattttatttgaatatcagcagtttttcccattgatgccttttttttttctttttcttaaaacacattcaacccattacatttagttctgggatctctttagtttccttcaacctrtgacatctcctcagtcttttgtttttcatgacgttggcacttgggaaaacagtagccaattattttgcagaatatcccccagtttggctttgtctgatgttctctcatgattaatttgacacatttaggcaagaataacacagaagtgagatgtttaccttctccttgcatcatatcagggcatagtcctgacatcttattatgggtgatataactttgatcacttagttaaggtgatgtctgccagcgtaaagttaccattttcctctttgcaattaataggtatctttttcggaggtgctttgagattatatgaaaatccagttgcagga

SEQ ID NO: 740444 - DNA, 587 bp, Homo sapiens
tttagatttacaaaaaaagttgcaaaaataattctttgtaccctttacccagcttcccctaatgttaacatcctacataagcatagtttaattatctagactatgaaattattgaaacaatattattaacttatataccgattttatttgaatatcagcagtttttcccattgatgccttttttttttctttttcttaaaacacattcaacccattacatttagttctgggatctctttagtttccttcaacctatgacatctcctcagtcttttgtttttcatgacgttggcacttkggaaaacagtagccaattattttgcagaatatcccccagtttggctttgtctgatgttctctcatgattaatttgacacatttaggcaagaataacacagaagtgagatgtttaccttctccttgcatcatatcagggcatagtcctgacatcttattatgggtgatataactttgatcacttagttaaggtgatgtctgccagcgtaaagttaccattttcctctttgcaattaataggtatctttttcggaggtgctttgagattatatgaaaatccagttgcagga

SEQ ID NO: 740445 - DNA, 606 bp, Homo sapiens
cattcgggtgagggggtatcgttggggagaggagacagttaaggacattgcagaaggcacacatctttgtgtctagtacgtctttatatcatgacactcacacatctgctgtaccctgtgctttactgggtgggagaaaaagagatgccattgtagctcttatagccccaggcatggaaactgtacgtgaccctgggtatatccgtgtgatcctgtcactccgtgaacatcatcagtcatatgtgttttcatctcagctccaagtccatgtgataaattggatattgcttttgcttatctaattctcattgccccagccagactgtcaagtcgttgtggtactgtttgtgcatygtactgaattatgacatccacatgatagatgtagaatgcccctttgaaatgtatcgcacacactctgtctgtcttgcacgctgtagagctggggtgggacagatgaggggtggatgctgctgcaggacagggctcagtatctgccctcccaaggtcaggcctgacattgctaggagacagaggcacggggccccaccttcctgtccaacctcccttcctgctcctcccccctcaccctctctcatcatcaca

SEQ ID NO: 740446 - DNA, 602 bp, Homo sapiens
ccctttagaatatgctataatattaaccaagtaccagagggagacagaactctgataatattgtttttcttctacatttttctatgaagaatactgtaaactagaaaaggcagagtagtaattgacgcccaaaaagggaaagttagcataaaagagtcttggtgatttcaatcactggctcctaaatgtttgtcttctgcaaatttttttttttaattagtgagtttactttacaaaactattttcaatttaaaagagtgccttttattccgatattgwtttattcatttgtttgtataggtttcacatattctttgtcttatttgcttcatttttaataaaattgtggtgatggcagatgtaaaaaaaaaaagaaaaaagaaaaaagaaaaaagaaaaacctctttttctttataaattacccagtctcaggtatttctttatcagcagcatgagaaaggactaatacgtgggaacagcagcaacagggcatactatagaacagttgataggtatgaactgagttaacacatgcaaagtgttatgaacagtgtctgacacatagcaggtactcagagagttccagctattcttatttttac

SEQ ID NO: 740447 - DNA, 602 bp, Homo sapiens
ccctttagaatatgctataatattaaccaagtaccagagggagacagaactctgataatattgtttttcttctacatttttctatgaagaatactgtaaactagaaaaggcagagtagtaattgacgcccaaaaagggaaagttagcataaaagagtcttggtgatttcaatcactggctcctaaatgtttgtcttctgcaaatttttttttttaattagtgagtttactttacaaaactattttcaatttaaaagagtgccttttattccgatattgttttattcatttgtttgtataggtttcacatattctttgtcttatttgcttcatttttaataaaattgtggtgatggcagatgtaaaaaaaaaaaraaaaaagaaaaaagaaaaaagaaaaacctctttttctttataaattacccagtctcaggtatttctttatcagcagcatgagaaaggactaatacgtgggaacagcagcaacagggcatactatagaacagttgataggtatgaactgagttaacacatgcaaagtgttatgaacagtgtctgacacatagcaggtactcagagagttccagctattcttatttttac

SEQ ID NO: 740448 - DNA, 404 bp, Homo sapiens
tccttggctggtctaaccacctgttagtccaatcatgatagtcacccagcagtgagacatggcttcggtggccctagtgatcatcctctggtcttttaatctccatagctactctcagtagacagaggactgctttatttgatacactctaatatgaggtgtgattataagtaaattaatcccttttgaaaacacacaggctagagctcacatagccaacgaattttmttcccattaaagtaatgcccttgggagtagtgtgctttaatgctttaatgctgctttaattcaacctattttacaatttttggggaactattttcaaatgcagtacctgcagttggtggtactcctctaatttagaggctggattattattattattttaaaaacattatttcggc

SEQ ID NO: 740449 - DNA, 613 bp, Homo sapiens
aggatttgtgaaaatcaatgggcagtaaatttacctctcagacaacctcagaatggccctcatttacatcagaaattgaaacaaggagatggaagtagtagaaatgggattactatagtccagcaccctgagaaggtggggcktcaggcctctgtgcactgagtcagagtcaaaatcacttagtgatatgctactatggagaggaaggctggctctaaaacagagcttctacttgaatactggcattagcttaatctttatgtgtgctttaggtacgaatgcttattgtccgtacaaatatggctccaggtgaagtatcattcttgattttccaaagtatcttctgtcaataatattttactttagagcagagtttctcaaatgtgcctgatgataagaactacttgggagcttgttaaacactggcattcctgagaccctccctagacctaattaggatttctaatttctggaggatacacatttaaaatccaggtgattcttaaccacctactactacgtgtttatttctgcaagtatttttatgaggcaaattagaaaagcttctctgttcttgttcattcatccagtcaataagtttttgagtaattcc

SEQ ID NO: 740450 - DNA, 613 bp, Homo sapiens
aggatttgtgaaaatcaatgggcagtaaatttacctctcagacaacctcagaatggccctcatttacatcagaaattgaaacaaggagatggaagtagtagaaatgggattactatagtccagcaccctgagaaggtggggcttcaggcctctgtgcactgagtcagagtcaaaatcacttagtgatatgctactatggagaggaaggctggctctaaaacagagcttctacttgaatactggcattagcttaatctttatgtgtgctttargtacgaatgcttattgtccgtacaaatatggctccaggtgaagtatcattcttgattttccaaagtatcttctgtcaataatattttactttagagcagagtttctcaaatgtgcctgatgataagaactacttgggagcttgttaaacactggcattcctgagaccctccctagacctaattaggatttctaatttctggaggatacacatttaaaatccaggtgattcttaaccacctactactacgtgtttatttctgcaagtatttttatgaggcaaattagaaaagcttctctgttcttgttcattcatccagtcaataagtttttgagtaattcc

SEQ ID NO: 740451 - DNA, 501 bp, Homo sapiens
gtttgagaatggcctggccaatgtagtgaaaccctctctctactaaaatacaaaaattagccaggcatggtggcatatacctgtagtcccagctactcaggaggctgaggcaggagaatcgcttgaacctgggagtcggggctgtggtaagccaagatcgcaccactgcactccagcctgggtgacagagtgagatcctgtctcaaaaaacaaaacaagcaaaaaaaaaaaaaaaaaaaaccacacacacacacacacacacacaagtgattatagcaaggttataaratacaaagttaatacacaagtcaacagctttcttatatgccagcaacgaacaaataaaatttacatgaacacccccaaaaataaagaattcgtatataaatctaacaaaatatgtaagatctatatgaagaaaactataaaactctgataaaagaaatcaaagaactaaataaatggagatagtgcatgttcacagaagactcaatattggca

SEQ ID NO: 740452 - DNA, 580 bp, Homo sapiens
gtgtatttcacttagcgtaatgaccttgagcttcatctatgttgtagcatgtgtcagaattcccttcctttttttaaaaaaaaaaaaaattattttaagtttatgagtacatatataggtttgttacacaggtaaaagtgtgtccaaggcaggtctggtagtaataaatttcctcagcattttcttgtctgaaagggttcttatttctctttcacttacaaagcttagttttgccagatataaaattctgggttggaatgtctttttttaaagaatgttaaattttgggaaccaatctcttctggcttgtaaggtttccactgagaggtgtgctgttagtctgatgagcttccctttgtaggtgatctggcctktttctctatctgcctttaacattatttcttctattttgaccttggagaatctgatgattatgtgtcttggggatcctctcatggagtagcttactggggttctctgcatttgctgaatttgaatgttggcttgtctagctaggttcaggaagttctcacggatgataccctgaaatatgttttccaaattggtttcattcttccca

SEQ ID NO: 740453 - DNA, 549 bp, Homo sapiens
gggcctgctccaatccctagttacctcagattttccagtacctggaggtatcaccagtgaaggctgcaaaacagcagatggcaggctgccccttcctccgtgagctccgtctcagggaggtatggacctgttgccaacctgaacacatctgtaaggaggtggctagagaccccagttgggagctctcagccagtcaagaggaatgggatcagagacctgcttaaagtcacagtctggccatgctttcatagagtagttgtgctgtgctaggrtactgcttccgcccccacttggcttgggctctccaaagtctggaggctggaacagctaagttgcccaaacagcaaagatggcagcccacccctccctctcaaagctctgtcccaggaagttttcagatctctgttggccagagaacactggcaggggtggctggagggcccaggtgggaggtcctattcagtgaagaggaatgaatcagggacttacttaaagaagtgctctggccgtgttttggtagagcagttgtgctgtgctgggggatcccgt

SEQ ID NO: 740454 - DNA, 521 bp, Homo sapiens
tagtagccttgactgatcttttgtatttctgtagtatcagttacaatatctcctgttttatttctaattgagcttatttgcatcttctctcttcttggttaattttaccagtggtctatcaattttatttgtctttttgaagaaccagctttttgtgtcatttatcttttccatttttttgtttcaatttcatttagttctcctatggtctttgctatttttttattattattctgctgggtttgggtttggtttgttcctgtttctctagttcattgtggtgtgaccttggattgtaaatttgtactctttcagactttttgatgtaggcatttaatgctatgaaccttcctcttaacaccgcttttgctgtatcccagagrctttgataagttgtgtcactgttatcattcagttcaaagaatttttaaattttcatctggattccattgtttacctaaagatcatttaagggcagattatttaattttcatgtatttgtatagttttgagggatcctt

SEQ ID NO: 740455 - DNA, 514 bp, Homo sapiens
aacctatccattacccctaaagtttcctcatgccactttataattcctccatcttgttcatttccttacccagcatcccaatgggaaacaaccactgatctgctttctgtcactatagattaattttcactttctagaactttctataaatggaagcatacataatgtactttttgttgggcttctttcattctgtgtaattatcctgaaattcctctatgttgttgcatgttatcagtaactcatttttattgaagagtagtatttaattgtatggatatgtcatagttcacccattcatctgttgaagaacatttgatttcttttttakctacaaagcttttatgaacattcatgtacaattctttgtgtggatgtatgctttatttcctgagtaaatacctaggagtccatggtcagtctatgcagtccatttaattttagccattttaatagctgtgtagcagtgtctcattgtggttttaacttgcattttcctaatcagtaaggatgt

SEQ ID NO: 740456 - DNA, 631 bp, Homo sapiens
agctaagaagtcttcccccaaaaccaccctccaaaaagactagaattcatttttatgctgcttcctagtgattacttttctaacatgaaacacttgaagttgtgattcagatgaacgcagcactacagagaagcccagtgtagcacagtagttaaaatgcaatctctggaatcggatctgaactctggctccatgatttactagctacatgatcttgaataatgtttaagctctgtctttaatcttcaatctcttcatcttgaaaatggtgaaaatatcttcctcacaaagtagctttgaagatttaaaaaaaaagggccgggcaatataagacatttaaaacagctcctggcacaaagtaagagctcattaagagctattgttacagatrttaataatataacaaaatttgaaatttcttatactttatataagtgaagactcagtttaatagtagcaataatcctgatatcatcacacaaaaataaattttaaagtagtaatgctataaatggaaacacaagagctgaatggacttgccatagctgtattcacaggaaaaaaaaagtttaatagtctttggcatagactttttttctttctttttagatttgacacaaggtctcactct

SEQ ID NO: 740457 - DNA, 496 bp, Homo sapiens
aaatttgaaatttcttatactttatataagtgaagactcagtttaatagtagcaataatcctgatatcatcacacaaaaataaattttaaagtagtaatgctataaatggaaacacaagagctgaatggacttgccatagctgtattcacaggaaaaaaaaagtttaatagtctttggcatagactttttttctttctttttagayttgacacaaggtctcactctgtcactcaggctggagtgcagtgtggcatgatcacagctcactgcagcctggaactcctgggctcaaacgatcctcccaccatcctctcaaagtgctaggattacaggcatgcgccacagtacccagctggcatagattttctattgtatatgtctgctacattttatatatttttatatatgatctactttatccttgggagacctcaagttgtaccttccctgaaccaaactttggcttttgaaagaaacacttttagttattatacc

SEQ ID NO: 740458 - DNA, 616 bp, Homo sapiens
taagttttatgtatgtattctaatagttcttgaggaatctgtatttttctgttcctagaggaatctagggaggaagtaaggtggagaggttaaagtcacagctcttcaatgatcttataactcacagagtttctgtttaagtyctcaaagtgacactgtgatgagcatctgtaaatgtgtgtgtttgtgctctcctggccacttcctcagatgaccttctaggcagaattgccagatcaaaagggtacacaccttggaagcattgatgtgggatgcctgtctcttttttttttttgagacagagttttactcttgttgcccaggctggagtgcaatggcttgatcttggctcaccgcaacctccgcttctggggctcaagcgattctcctgcctcagcctcctgagtagctgggattacaggcatgcaccaccatgcccagctaattttgtatttttagtagagatggggtttctccattttggtcaggctggtctcgaactcccaacctcaggtgatccacccacctcggcctcgcaaagtgctgagatgacaggtgtgagccactggccagtctcatttttaagactgcattggtgtggagctgtgagtttgtt

SEQ ID NO: 740459 - DNA, 616 bp, Homo sapiens
taagttttatgtatgtattctaatagttcttgaggaatctgtatttttctgttcctagaggaatctagggaggaagtaaggtggagaggttaaagtcacagctcttcaatgatcttataactcacagagtttctgtttaagtcctcaaagtgacactgtgatgagcatctgtaaatgtgtgtgtttgtgctctcctggccacttcctcagatgaccttctaggcagaattgccagatcaaaagggtacacaccttggaagcattgatgtgggatgcctgtctcttttttttttttgagacagagttttactcttgttgcccaggctggagtgcaatggcttgatcttggctcaccgcaacctccgcttcyggggctcaagcgattctcctgcctcagcctcctgagtagctgggattacaggcatgcaccaccatgcccagctaattttgtatttttagtagagatggggtttctccattttggtcaggctggtctcgaactcccaacctcaggtgatccacccacctcggcctcgcaaagtgctgagatgacaggtgtgagccactggccagtctcatttttaagactgcattggtgtggagctgtgagtttgtt

SEQ ID NO: 740460 - DNA, 616 bp, Homo sapiens
taagttttatgtatgtattctaatagttcttgaggaatctgtatttttctgttcctagaggaatctagggaggaagtaaggtggagaggttaaagtcacagctcttcaatgatcttataactcacagagtttctgtttaagtcctcaaagtgacactgtgatgagcatctgtaaatgtgtgtgtttgtgctctcctggccacttcctcagatgaccttctaggcagaattgccagatcaaaagggtacacaccttggaagcattgatgtgggatgcctgtctcttttttttttttgagacagagttttactcttgttgcccaggctggagtgcaatggcttgatcttggctcaccgcaacctccgcttctrgggctcaagcgattctcctgcctcagcctcctgagtagctgggattacaggcatgcaccaccatgcccagctaattttgtatttttagtagagatggggtttctccattttggtcaggctggtctcgaactcccaacctcaggtgatccacccacctcggcctcgcaaagtgctgagatgacaggtgtgagccactggccagtctcatttttaagactgcattggtgtggagctgtgagtttgtt

SEQ ID NO: 740461 - DNA, 598 bp, Homo sapiens
tcttctgttctagaaattagcatgggatatgcttcaaaaacatgactggccacagaaacagcttcatggttcattccattctttattgcatggttagtttttcactttttttaagcctgtgtctgcagtttacaagtagtgtagtatgcttgcaaccaaatcattccaatgctccccattggtctcctcttctgaaaaaggaaggtaatactagaatctacctmaaaggatcagagaaagggtaaaatggaacaactcgtgcaaagggctagcgttgcacctggcacatagtaagtgcacaataaatgtaagcacattttgaaatgtattattagtctttgggctaagcacctgcaccgaatttgttacctcctctttgctgctatttcctcattgatgaaattcagaaaacggtgggacctaattaactgtgttattgtgaagattaaatgacacaatacagtgccagcacctagttattactcaacataaatttgtcacagttctcacaagacatcagaacacccgctgatgtgctgtcccccatggcactcagcatattaagtgtggtcggcacaagcggctgcctggtgtgaag

SEQ ID NO: 740462 - DNA, 428 bp, Homo sapiens
acctgaatctgcagtgatgcattaatgaataatcaatgtcaagacatatctgaagggaaattattgtacttgtaggataaaggaagagtcttagagctataaaggcaacaataataataaaaatcaatttactggtcaaaaggaaaaaaaatcttcagaccttgaactttcgtatgtagacacagtttattccattgcatcattccattgtataaatacagcacaattcatgtatccattctattgktgatgtacatttaagttgtttctagttttgggctattatattcagggttggtaccaaccattgtgtgtatatctttaggtaaatacatatagctatttttacatataggcagtgcttctgtgaaagttgacttgctgggtcacatggaatacaagtgttcagttttagttcaatacagaca

SEQ ID NO: 740463 - DNA, 562 bp, Homo sapiens
cagtgtctattgttcccttctttatgtccatgagtacaaaatctttagtttccactgttaagtgagaacatgcaggatttgatttttggtcctgcattaattcgcttaggagaatggactccagctgcattcatgtgctgcraagcacatcatttctttctttttatggctgcttagtattctgtggtgtatatataccacagttttaagatccaatttattgttgatgggcacctatgtggattccatgtctttggtattgtgaatagtgctgcaatgaacatatgagtgcatgtatcttttagtagaataatttattttcttatggatatataaccagtaatgggattactgagtcaaatggcagttctgcttttagttattagagaaatcttcaaactgctttccacagggcctgaaataattaacattcccatcaacagtgtataaatattcccttctctctgcagcttcaccagcatctgttactttttggcttttagtgatagccattctgactcatgtgagatagtttctccttgtggttctgatttacatttta

SEQ ID NO: 740464 - DNA, 582 bp, Homo sapiens
gagtaagggcttttggttttgcttctatactcctatgcactttcagcacattttatattgggctgtgcagttggatctataagccagtagatgacttttatgggtaagagccagctgaaactaacatggctaggagaagcttgtttattgggagaagatctctgtttcctcgggcaataggctgatccatggagtggtctgagctccctgctcagcctagcatgggtgggggaccaaaagagaggggccagcctggaaaagcccacctacagttctgctgagggcaggcacaagcactggtgctaagggacaatccagtgggtggtcactgagggccsaaaagtgtgtgcaggcatggagctgggaaacttccagggcctcaagttctctgtctgggcagagtggagtggtccaggcttcaaatccaggacagcaggtatttcaggtgcatggaaatatgcctgggcatggactgcagacagccctgctgtacctctgtctctgcacagtaacagtggagcagctcaggatgctgattcagacaagtgggtgctcagaatacctagttatctgcctgagtgt

SEQ ID NO: 740465 - DNA, 582 bp, Homo sapiens
gagtaagggcttttggttttgcttctatactcctatgcactttcagcacattttatattgggctgtgcagttggatctataagccagtagatgacttttatgggtaagagccagctgaaactaacatggctaggagaagcttgtttattgggagaagatctctgtttcctcgggcaataggctgatccatggagtggtctgagctccctgctcagcctagcatgggtgggggaccaaaagagaggggccagcctggaaaagcccacctacagttctgctgagggcaggcacaagcactggtgctaagggacaatccagtgggtggtcactgagggccgaaaagtgtgtgcaggcatggagctgggaaacttccagggcctcaagttctctgtctgggcagagtggagtggtccaggcttcaaatccaggacrgcaggtatttcaggtgcatggaaatatgcctgggcatggactgcagacagccctgctgtacctctgtctctgcacagtaacagtggagcagctcaggatgctgattcagacaagtgggtgctcagaatacctagttatctgcctgagtgt

SEQ ID NO: 740466 - DNA, 607 bp, Homo sapiens
gttcctttgagattggatgagatcataaaaaaaaagaaatgtggagactaatatatgttgattttggaattttagaacaatagaatagttaccagtaacaccctggaagttttgcatgatggggaagagtttatttgatgaaacttgcaaactcggagaaatttggatcctttaattgagaagtattagtcaaaacatacccaatgactaagtaaaagacttattttgcaaccaggtccatcatgtgctattttaatttccatattaaagtttatttgttttcaattttaatacagtactcactgtataagaaataggaatcttayatggaacaaaaactctctgagaagcccctatcttaaagattgattatctcaaaacctgaaacagaaatgttcaaaactactactgtctcctcagtaggttattttctgataatgaactagacttgcttaaactctgtatttttctttgaacatagctttcaaattgcataattacttaaggttctagatcatctggctgcttgttagtgtttaaatgtgtttgtagacatattattttgtttacttggtaattattgttgacatacttgtctaccttttgg

SEQ ID NO: 740467 - DNA, 593 bp, Homo sapiens
cactaaaacacaacattaatttcaccataataataagatccagaaatgaaattgattaatgaaggcatagaatgtctttgttgggacttatttcaacacttgtatcactaggagaggtgactatactgaaaaggatatttcagtacatagtaagattgcatgaaacacttcaagataaaggagacatgtaccttggtactaaaagcacataattgtatagcatatacaatatgtgggacacagcccwaaaactttacatatgttaattcattggggggggggggcacacattaaatgaaatatagaaagaaatagatttatagaaagtatatttgaacaatgaattaatctgaagtggtaaggtttacttaggtgtctttatcagagtgtaataggtgcattttaatttttagagaaaaaaatgtgctcatgaatggctattgaaattttgcaaaatgcattgttgcctgcaccttttgatgtaatctcacattatgtctttgttatattcttaacgtagaaagttgtatcaattcatttggaatgttgaactaactttgcattcctgagatgaatcgttctggttcagacat

SEQ ID NO: 740468 - DNA, 548 bp, Homo sapiens
tccattttcacactgctgataaagacatactcaagactgggcaattttcaaaagaaagaggtttaatggacttacggtttcacctggctggggaggccgcacaatcatggtggaaggcaaggaggaacaagtcacatcttatgtaaacggcagcaggcaagagagcgtttgtgcaggaaaactcccattttcaaagccatcttgtgagacttattcactatcaygagtacagcacaggaaagacccaaccccatgctccccttacctcccaccaggtacctcctcacatcatgtggggattcaagatgagatttggatggggacacagccaaaccatataaaatacaatccctggtaaacatagataacaaaaattatcaacaaaatactaacaatctgaagtcaacagcacattaaaaaaatcattcatcctgatgaagtgggattatctctgagttgcaaggatagttcagaatgtgtaaatttataaatatgatacagcatgttaacaaaatgaaggataaaacccatatgatctttttattaaa

SEQ ID NO: 740469 - DNA, 597 bp, Homo sapiens
  misc_feature 93: n = A,T,C or G
tctgaaattcagtttccttatctataaatggcattaagaaactttcaaatttgcagggcctttgtaagatttcaaaggaataattcatatatngctgttagtacaatgcatgaataaagtgggtattcagtatatgttaattttataattcttattatataatatgtatattttgtgtcatattttatgtttatattacatctgtataatatgcatattttataytaaatgtatgtttatgaccaaacattcactgaaactgttaaaatgacagtttcttagaggtaggattctgaatggttatttcatatacacctggatttttcttcagtgaatacatataacttctgtaacagggaaaaaataaaattatataggaaagattaagctagaagctccagcagcaatatccaaacactgaaagttcagggtcttatttcttgtttctgcagtctccacgggttaggtggctctccagagaggtgcctgccaaacagtgatgtgagtctgtctgcatcataaagcagcagtacctagaacatgagatttctagacctctatagcagcagcagtgagctagagggctctctggggact

SEQ ID NO: 740470 - DNA, 652 bp, Homo sapiens
cccatttgtaataggaatgtctgtccaatgcccgtcccctggtgtatcttgaaaatagataacttgtttaatctgacatgcttacagcaagaagaaattcgcctcaaggtgaatcatgccatgagtcttacccacatctgatttagatgaaactttaaactttggacttttgagttgctactgaaatgagttaagacttttgagacaattgggatggaataactgtattttgtattgtgagaaggacataaatttgaggagtcaaggtcagaatgctatggcttaaatatggtcctccaaagttcataygtcagttaatcctcaatccaacttaatcctcaatccaacttaatcctcaatgcaacagtgttgggaggtgaagcccaccaagatggttgggtcatgagagaactctccagaatcgattaatgtcataatagtggaagtggattagttattttcagtgtgtgctataaagtgagtccagcctctggtgctttactttctgtctcgtgtgcttgcctctgcttttgacctctcaccatagatgacccctgccagatgcaacagccatgctgttgaacttcccagcctccagaactgtgagaaataaatttcttttctttataaattacccagtctcaggtatttt

SEQ ID NO: 740471 - DNA, 580 bp, Homo sapiens
tactcataaatatatatgcacccaatattggagcacttaaatatataaagaaaatatcaatctgcagacaacattgcctttgccatcaattccgtaattgaatatgatttcttttttctttagagctacatctgattccagtggggctttgttaatgcgatcctttctcactgtacctgttgcctgatgttccattgaactgakcttatcaagaagtgcaatactggtgaaaaagttatcgaatacaaaatgatattgtccagggtgtgtgtaagtccctcactaaacttatgaataagtgatgcaccaacaccgtattcttcatatttagtatttgggtttttaccctgatacggctgaaagcagcaaatgtggcacagacatgtggcaccacaacaaaacttacagccaaacataatgggctttccctgaataaattgtttgcacctgtgacaaccagaataaggaaccatggattcattaaagctgaaatatgtctcatttggaacaaatttcatacatctctcattacgtttgcttatgagaagtcgcaacttggaaaatttgtccattggatcca

SEQ ID NO: 740472 - DNA, 580 bp, Homo sapiens
tactcataaatatatatgcacccaatattggagcacttaaatatataaagaaaatatcaatctgcagacaacattgcctttgccatcaattccgtaattgaatatgatttcttttttctttagagctacatctgattccagtggggctttgttaatgcgatcctttctcactgtacctgttgcctgatgttccattgaactgagcttatcaagaagtgcaatactggtgaaaaagttatcgaatacaaaatgatattgtccagggtgtgtgtaagtccctcactaaacttatraataagtgatgcaccaacaccgtattcttcatatttagtatttgggtttttaccctgatacggctgaaagcagcaaatgtggcacagacatgtggcaccacaacaaaacttacagccaaacataatgggctttccctgaataaattgtttgcacctgtgacaaccagaataaggaaccatggattcattaaagctgaaatatgtctcatttggaacaaatttcatacatctctcattacgtttgcttatgagaagtcgcaacttggaaaatttgtccattggatcca

SEQ ID NO: 740473 - DNA, 632 bp, Homo sapiens
tattttaaaaaattaaaattactgtctcaaaaaatatctgtactccatgctgagttcagtattatttacaatagtaaaaatataaaacaaactaatggtccctcaacagacaaatgaataaagaaattggtatataaagacgatagaacattcaactgttgcatctacagcgaaataaaagagagaaaattcttccacgtgcaataatgtggatgaatctggagaacactatgctaagtaaaatatgtcagaacaaatacataataccacttacataaagaatctaaartaggtcaaactcataaaagtggatagtagaatgatagctgccaggggctgggggtaggaggaaatagggagttattagtcaaaaggtacaaaatttcagtcaagcaagatgaataagtcctagagatctatcgtacagcatagtgctgatagctaacaatactgtattgtgcactgaacaattttctagaagttatatcttatattaagtgctgttattataaataataataaggaaggcaagaggaaacttcaggaagtaatggatatgtttatgtcatagattttgatgagggtttcatagatgtagacttatctccaaactcatcaggttgtgtacattt

SEQ ID NO: 740474 - DNA, 614 bp, Homo sapiens
tactttcttcttggcagtgtgattatgcaaatggttttggggcaacaggcatgtttgttttgaattttcccacaaaaagggtactaccagttaagcctccaagacagatcctccattcctgctatctacatctgcaaaatatgctgttcatgttttgattgggcaatttaaggagtccatttgatatacagtatttctatcaattcatatcattcatttgagattatacacctcttccttctaccttctttccttcctttcttgttgaagtcagtcaaacttgagttcaaattctggctttgtcattttcttgcttcatgtctttagacaacttatataacctctctgagcaacaatcaagctacagtagcttctgtrtcttcaagggcgtacgtaataaaacctaccatgcacgtacatatacacatatacatatacatatacatgcatatacaaagagacacatggacatatacacacatgattaaagaacatatgcaaactgggcacacagcagatgctcaaaaaatgatagctctttattgttgctatgatcaaacacctactatgtatttttgataagcactaaggatacagaaataaataaggcatgg

SEQ ID NO: 740475 - DNA, 603 bp, Homo sapiens
cacctcactcatgagcaacctcatctctctgcctctgtgttatatattcagttttgtcatttttctatattttctgtaaactgaaaaatcttggaaaccactccccaggcaatctgtttgcacaagaagatgatgtgatgtgatttgtaccttgactaattcccacagtcatctttctctcttattccaagcaaaaggccagtaggatatcagtcccactgctttggctataattttctccaggtacttatgtggttaatacaaatcaaagaacagtgggttcctctgtctctttctactgaacattttcaatactctgatgaagtaggtatcatgtcatattgtgagaaaccccacttatcccatragctatcaagagatgaacttggtagaggagtatttcataaagattgacagaccaattatttatttacggcatgtaactatttttcttaggtgtcaactaaagattcctttgatctgaaccgagtggaagagcaaaaagattatagacaggagttcttagtcaattgagagaccctaggtcacacatgaaaatatagctttaaactgaaaatgttgcaaaggcaatttgttctgcct

SEQ ID NO: 740476 - DNA, 591 bp, Homo sapiens
cctagaattctgcaccctgcaaaactgtccttcaaaagtgaaaaaaccaaacaaaacaaaatttctcgtacaaaacgggaatttgttgagggaatttgttcccggtaaacgtgccttgcaagaaatgttaaaagaaattcttcagagagaaggaatataatataagtctgcaacttggatctacacaaaaaaaggaagagcattgaagaagatatagttgaaggtaaaataaaaactttatttgggaggccgaggcaggtggatcacctgaggttgggagttggagaccagcccgaccaacatagagaaaccctgtctctactgaaaatacaaaattakcccggtgtggtggtgcatgcctggagtcccagctactcgggaggctgaggcaggagaatcgcttgaacctgggaggtggaggttgtggtgagctgagatcgcgccactgcactccaacctgggcaagaagagcgaagctccatctcaataaataaataaatatatgagtgaatgaataaataaataaataaaaactttatttttcttacctttaattgatctaacagatacctgttcaaaataataataaca

SEQ ID NO: 740477 - DNA, 591 bp, Homo sapiens
cctagaattctgcaccctgcaaaactgtccttcaaaagtgaaaaaaccaaacaaaacaaaatttctcgtacaaaacgggaatttgttgagggaatttgttcccggtaaacgtgccttgcaagaaatgttaaaagaaattcttcagagagaaggaatataatataagtctgcaacttggatctacacaaaaaaaggaagagcattgaagaagatatagttgaaggtaaaataaaaactttatttgggaggccgaggcaggtggatcacctgaggttgggagttggagaccagcccgaccaacatagagaaaccctgtctctactgaaaatacaaaattatcccggtgtggtggtgcatgcctggagtcmcagctactcgggaggctgaggcaggagaatcgcttgaacctgggaggtggaggttgtggtgagctgagatcgcgccactgcactccaacctgggcaagaagagcgaagctccatctcaataaataaataaatatatgagtgaatgaataaataaataaataaaaactttatttttcttacctttaattgatctaacagatacctgttcaaaataataataaca

SEQ ID NO: 740478 - DNA, 517 bp, Homo sapiens
gcctgctcgccttttcatttgtatatattggatggtgagggttgtttgcaagtaatagtattaattaattttttataagccttaaagcttccaaagtaagtaaacttccttatactttatcatttcaaccactttggtaaataaaacaacgtacaatgtacatttttaccttggtcatattttctacctctcaccttcagaagaattccacaaaagcataatttaggtttcgtgcagcttctctctttcctctagtcattgaaatgtgaacaaaatatcttgaaaatagatagcaaaagaaaaaactggagcagcaactttacctgctaatgactatatacacccatttttctcattttttaaaaatatcatcrcatattactttaaaatgtcaagaactgcttcaacagccaggcaatgatggctggtatgctacctggaacatttttccttcacttgttaaagtttgcagttgaacaaagggtcagagtctattgacttgaccctcaaaatcacc

SEQ ID NO: 740479 - DNA, 575 bp, Homo sapiens
gataaaggcttagttccttttctctgataatctttgaatctggcccatcctttgttcttcttgaccctagtctccaacagatcactgaattctgctgaaggtaggtccttttttcccctaagcatttatcctgccatgcytgggtgactcaactgccttctcacttattaccttgcctccagtgtcttccccaatcccctccactttgtgatcaactaaatcttttgttttgtttttgcgacggaaacttgctctgttgcccaggctggagtgcaatggtgtgatctcggctcactgtaacctcttcctccctacagcctctgcctccagggttcaagcgattctactgccttagcctcctgagtagctgggaatacacgcacccaccaccacgcccggctaatttttgtatttttagtagagacggggtttcaccatgttggccaggctggtctaaatcttgttaaaatacctttgcatttcttattattaaaaatgtattataaagatagaggaattttaaaagtttggtacttaagcagaaatagcccagaaataaattcatgttaaagatg

SEQ ID NO: 740480 - DNA, 655 bp, Homo sapiens
agagcaaaaaattcaccaaagaaataggtgaaagaatttggcacatggtaagtacccaggaaatgttcagttcctgacttaccatctccctctttgaccttaactcacaaagcagatttccacagcatcagtgtctacatgagtaggagagaacctaattcttcttagcaagtgttcctcatgaaacaaaagagcttcatgcatggcccactgatgcctttgcttctgcaaagaagacttcacagtcaacctgttttccaggaaactcatgctggacctcttcctgtggcagtcctctgactcaagagactcaaggttcctggcctctgctatggggcaaccckcagtctgactcaccttgcagcctgcaccttcctgagcctcatccttatcatcctattagacttccactgcctgccaaccagtttgagacttcactacatggtgttgccagatctcactcctgctcttgagtgattccatcttggagcttggatcggtcctatcttatttcccttctgaatgacctctccatttcagctttgctttttatgctgataaccattcctattctgggttcatagatgggcttcagggggtcagtgaagcaatgggaaaggttgttgagtttttgaaaattcaacttactacgcaa

SEQ ID NO: 740481 - DNA, 536 bp, Homo sapiens
agatgctcaattaggagaagttttaaacaagaaccctgagtggtataggatatattcttgggttgtgaaatcctccggctcaaagtaaccacctactaaagtagccagaagccaggtaagattcattttttaaaggtcataaaatgtagcctatttatttcactcaataaatattcattaagtgggtactactttaagacttcatatgctttctactcttgtccagattcttaaaaataaacataattttatttattcaaattgtgataaagaattattttctcaagcactggaataaacagatctgcactgcctttattaccattastacactgcatgttaaccttcctattaaatgagaaaaatccctaagctttctactgtaataataatataaaaaattacatctaggggactatatttgataaatcaaagagcttaccttactgacaccaacttcagggattcggagagtatgttccatatccttttctctgcagagttaagtaaagtgtctttaataatttttgaagcat

SEQ ID NO: 740482 - DNA, 649 bp, Homo sapiens
gttcactttaaatgaatacatgtataaaatacacaataaggaaaattaaaaggcagataataaattgggaaaatatgtttattaataatgttaattattaatatgtttgttataaacaaaaggttaatattcttaacatacaaattgttcttataaataattaatagatggctgccacaatagaaaaaaatgtaaatgacatgaacaaagtcagaagatgaaatgcaaatggacagtaagtgtaagaaaagatattcaacttaataataaagaaaagaaaaatgttttggcttgtcaaagctggaaaggattggyaacaatgacattgtgtgtgttagaaatggacattctcgggggcattcccctgttcgaacccattgcaaggaatctaaaaaccttgaaaaaagattagacaaatggctaactagaataaacagtgtagagaagatcttaaatgacctgatggagctgaaaaccatggcatgagaacttcatgatgcatgcacaagcttcaatagctgattcgatcaagtggaagaaagggtatcagtgattgaagatcaaagtaacgaaataaagcaagaaaacaaggttagagaaaaaagagtaaaaagaaatgattaaagcctccaagaaatatgggactacg

SEQ ID NO: 740483 - DNA, 611 bp, Homo sapiens
ctgcaaactttcatgactatcattgctccactaaaaaatttaccaaagaattactacactcttccaacacacaaccacaggcagtagtttctgagagctgtacaggagctcttcaggcttttgaagtatcagatctgtacaacatctcagagggcagagccagggaacacagaaactgaatgaaggagtaaaatactgcctgaccaagagcttacactgctcttggttcagggagtccttgtcattcctgatcagtaagatttgagagatgcgagatcagtaacctctctgtatttgcttaatcccatcttttcctggattaaatttctcaaaatagctgatctatttcttctcaaatattgtacatgttttggggacagatgctttgtcttttaggtaatacaatgccagacaagcaggaattgctagttgttctattgttgagattacatatcaccaagatcacacactttgractctgagttggatggcataactagaagagagtttgagatatctctagtggaaaagaggtaattatgttacaccatttaaaagaagaatgtttaaagaacgttaagtgttaggtagccaatgtatgaactacagaa

SEQ ID NO: 740484 - DNA, 633 bp, Homo sapiens
aaggttctttatcgacatcttggagcagaagttatgagaggcctctgaatcatcctgagaattttcttcagtaagcattcataaaaattctgggatcaagggtgggttaagcttttgtgatggtttcataggtggtctactcacagcgctaagcttcttctggatctttggatcccaacacaaagtgatactagaccctcaaattgctacagggtagtctggaaagaactgtatagcccagaaataacttgaaaacccaaagtgtaacaaatgttggtgaaagaatcaaactgattttttttaaacataacttctttgggggtgaatttttttaaakaccatcatgtagattcctttgtcttgataatgatgtttgttacaatgctgttggcccagttgctctttgattggtatttgggagttaaatataaaagtaaatacaaaataattcttagatggaaaaatcacattaaaagcattctgggaaataagagttaatatcacatggccaggagttaaagtatgtttttatgttttctttaaaattgtaaatgcacatttttaccactaagacatactaattgttacttcaataagccccaacagaaaaaaaacaactgtttcatattttat

SEQ ID NO: 740485 - DNA, 633 bp, Homo sapiens
aaggttctttatcgacatcttggagcagaagttatgagaggcctctgaatcatcctgagaattttcttcagtaagcattcataaaaattctgggatcaagggtgggttaagcttttgtgatggtttcataggtggtctactcacagcgctaagcttcttctggatctttggatcccaacacaaagtgatactagaccctcaaattgctacagggtagtctggaaagaactgtatagcccagaaataacttgaaaacccaaagtgtaacaaatgttggtgaaagaatcaaactgattttttttaaacataacttctttgggggtgaatttttttaaagaccatcatgtagattcctttgtcttgataatgatgtttgttacaatgctgttggcccagttgctctttgattggtatttgggagttaaatataaaagtaaatacaaaataattcttagatggaaaaatcacattaaaagcatwctgggaaataagagttaatatcacatggccaggagttaaagtatgtttttatgttttctttaaaattgtaaatgcacatttttaccactaagacatactaattgttacttcaataagccccaacagaaaaaaaacaactgtttcatattttat

SEQ ID NO: 740486 - DNA, 618 bp, Homo sapiens
tgtatgtatgcatgaatgtatttgcatgtgtacatatagtatatgtgtatatacacatatacatctttcatatctatagccatctatttttatttctattatatttatgtcaataatctatctaaatgtctttttaaaaaattgatgagcttatggctattgtaacttagatttagtatacatacttattcagaagcatctagataacttcagagatagccacagatctgatatttcttagctagttcattaaatggatrcaagttggattatttaataaggcattggggaaattgcataagttttctccagtcttctgcagggagaatatcattaaaccaaccaaatagatatataaacatagactgtattgacaacagatacaaggatcagggttaagatatagtaaaattttaaatagagagtgtatctcaaatatctttaatcagtttatgctgcattccccaactgtttcctttacttcaatatcatcattcaaaaatacatggtaaactaatttctgccaaatataaaatatagcttagatttttattcactatagtatttacattttcatagaatatttacagtttaatagatgattgtaaaatattgcta

SEQ ID NO: 740487 - DNA, 566 bp, Homo sapiens
tgtacatatagtatatgtgtatatacacatatacatctttcatatctatagccatctatttttatttctattatatttatgtcaataatctatctaaatgtctttttaaaaaattgatgagcttatggctattgtaacttagatttagtatacatacttattcagaagcatctagataacttcagagatagccacagatctgatatttcttagctagttcattaaatggatgcaagttggattatttaataaggcattggggaaattgcataagttttctccagtcttctgcagggagaatatcattaaaccaaccaaatakatatataaacatagactgtattgacaacagatacaaggatcagggttaagatatagtaaaattttaaatagagagtgtatctcaaatatctttaatcagtttatgctgcattccccaactgtttcctttacttcaatatcatcattcaaaaatacatggtaaactaatttctgccaaatataaaatatagcttagatttttattcactatagtatttacattttcatagaatatttacagttta

SEQ ID NO: 740488 - DNA, 618 bp, Homo sapiens
tgtatgtatgcatgaatgtatttgcatgtgtacatatagtatatgtgtatatacacatatacatctttcatatctatagccatctatttttatttctattatatttatgtcaataatctatctaaatgtctttttaaaaaattgatgagcttatggctattgtaacttagatttagtatacatacttattcagaagcatctagataacttcagagatagccacagatctgatatttcttagctagttcattaaatggatgcaagttggattatttaataaggcattggggaaattgcataagttttctccagtcttctgcagggagaatatcattaaaccaaccaaatagatatataaacatagactgtattgacaacagatacaaggatcagggttaagatatagtaaaattttaaatagasagtgtatctcaaatatctttaatcagtttatgctgcattccccaactgtttcctttacttcaatatcatcattcaaaaatacatggtaaactaatttctgccaaatataaaatatagcttagatttttattcactatagtatttacattttcatagaatatttacagtttaatagatgattgtaaaatattgcta

SEQ ID NO: 740489 - DNA, 529 bp, Homo sapiens
acaacacttttaaattattctacttctattttaaagacatttcatcagtggctcctgactttgcttaaaattgctctctgtgtcttagctgatgcattttgtaattatgattcagagcagagagttaaaattacatctatgatttcttcttctgacaaactatctcagttaacttttctttccctgtaattaccttaatggttcagctgctggatgttatccctggaaatctgagaaactaggtaaatgtctcttgtaatgcttcctactgtaaaagcttgttaacctaatatcaagcctcattgaaaactctgwgttaggcaataatcagctgaaaaagaaaatatgttttcttataaacatctctaagtactgaatgtaacaaatataattacgatggaagaaatacaggcatgaaatattctttatgatgagtagaagatcaaattttaaaaagttatctcccttcctctagtcttggctaatgacaaagagttggatttatccaaccaaaggtgtaacctgaagt

SEQ ID NO: 740490 - DNA, 570 bp, Homo sapiens
ccttataatttacaatttctgtgattatatggcaaaaaaacaaggtcttgtcatttaaaaactttttaaaatactttgactgtagaaaaataaattcctagataaatatctgcataccaaatgccagatatatttactcaaacacactgaaacataggcaaacacatatggaggaggagctaaatatgtttaagaggatcaaataaaattatgtaattctgtcttttgtaagggcaaaagaaaaataacaataagtgatacacactttgcacatgtttgatagtggcactattggctacagttttctcagacatttaggaggagttttcatttactattttrgtaggaaaagagagattccagagcttccacttgactctctctaaccatgaattagaaagggaatgtgtagcttctgtaagttgctaagcaaaataattctagctctatattcagtaactgagtacataagcacaatgttcaggatcaagtggatgcaccttgaattggacttgattaaaagttacattaattgccagaaccctgttaaacatctctatggtctgattg

SEQ ID NO: 740491 - DNA, 558 bp, Homo sapiens
aacactttccatctatttactgtctattccacatattcatttttattgaaaaagacacatttctgtcattcacctgatcatcacctccttcatttgctgtgagtaaataaaatgtactaaggacatcctttgtgttggagttagctcccaagtaaataatatccctggaaggcagtacaattttaggagaaatgtgcttgcaaaagaagtagaaggaaaacaagggaagtgtaaaattgagattagtctaacttggatastatttcctttctagcatgaaacatgagaaaataaatttaggataagtcccaacaaatagcttacacttaattcaatctagggacaattttctgtatggctgcatttcaaatattgcattttcttcccagtagtttattccatttatataattggttcaactatgtcaaaataatgttttctaacgggtctcactatttgtttctcttttacccatggaaaaaaagtgagatatcatgcatacttattctggttattaatgtagaaaatagtttgagagcagctgtcatgatactctga

SEQ ID NO: 740492 - DNA, 545 bp, Homo sapiens
tcaaagcaattatgtatcgtgcacaaattctcacaagtagtaagtgggaagactcggaattcaaattcattgtgttgactccaaattctatctgctttctgctactccattctgcttccatgaaaggaatattcagggcgatgagacaccgacctggaggctatactgaggtccagctccttttagctcatatacaagcaactcttggctctgtgttgcagatacaaataccttttaccattagaagataaaagctcactttaacctcacttgaatataagagctttgttgcctaaaatattaaaaggraaacagacactcttggttaaataatatttcccaaacatttctccagatggtgtcaattcactcctgttgtaattccctaacgcttctgcttaggatctgtaaaacaaaccaaacaaaaccccaacctagtagaagactggattttacacatataagtctccctttgttttttttccccttgtaataatttttaagactatttttaatatgtaatgcatgcacacattgaaacattc

SEQ ID NO: 740493 - DNA, 591 bp, Homo sapiens
tgtaacaaatcatcataaattcaatggcttaaagcaacagaaaagtattccctcacagttctagagggcagaagtccaaaatcagtatcactgggccaaaatcaaggtgttagcagggccattctccctccagaggctccaaaggagaatccattcattgccccttcggccactggcagctgccaacaatccttggtttgtggccacatcactcccctctctgcctccatggtcacattgccttcccctctcctgcatgtgtcagatcttctgcttcctacttagaaggatcgcaatgtggtgacatgtagggcccactggataattcaggatcatttctccacctggagatycttcattacacctgcaatgacactttttcagtatgtcataacatttacaggttccagagatttgaatctggtatcttcaggggctattattcagcccactccagtaatttgttttgttttttgaaaaaacagtgaagccttccttcaaaaattaatgacaataataataacaaaactgctgtcgagatcatgttcatgttactacaactgggaaaagttaatattctgatgaatctct

SEQ ID NO: 740494 - DNA, 594 bp, Homo sapiens
atagcagacatgctttaatcctcacctgcagaaggagatctctgtgactcacctcttgacatgaacaaacttctgctaacactgccatagaaaatgcaaatgcctccacaagcaattccaaaagaaaaagcagacacagaaaaagcatggcttctgcctcatttctgccttcctcaccttgcaccagtgcaacataatggctggatttaaatcacatccagaatcctgagggcgggggtgtgcaggaaatgtggtgtttggttctccagcctcggcagtgcaggaaggcatattagaaggcaagtgaagtggacactgggggcagatctactaaacccatcacaagcrccaaatactgagttctagtcttaagctccgacaaagaacccacgtagatgtaactctgtttgcaatcaatgtgtccacagcttatatctctttatattccccacataactggtataatcccttgacagttacatgtaaattgtaagttccaattgattgcatgattggtttagaatatgttataacaagaaagcctttttttttctgactattgacaggatcccagaggggcttccgaatcatcta

SEQ ID NO: 740495 - DNA, 626 bp, Homo sapiens
atttgatcattgcacaatttatacatgtattgaaacataatgttctccataaatatgtataattattatgtgtaaattatttttaaaaagacatctgccttgacagaggacactgacggccatgtaatttcagcaccagtcaagtaagaaagtgcccatccccaaggacatttgcaacaataacacttttggttgttacagtgggaaataaggtgggggtggggcctgctactagcatctaggagtaaaacccaggttgctaaacatcctataaygtgtaggacaacccccgacaataaagtccaaaatgcaaaaagtgctgaggttggtaaaatctcaaatcccttcctcccctgccttgaataagcccaaggcagcaaagagagtgagggaagagataggtagaggacaagaaaagacttcacctcacttctgtagtgccatcctgcagaatttcagtgccatcccatgaagagagaggggggcagctttgaactgaatgagagacgcaaatgcaggcatacctcagtgatactgtaggttcagttccagagcgccacaataaagcaagtcacatgaattttttggttttccagtgcatataaaagttatgtttacactatact

SEQ ID NO: 740496 - DNA, 628 bp, Homo sapiens
ttttatttccttttttaaaaaatgttggctattcaagttggggtttttttgtgttcttttcatataacttttggaatcaatttgtctgtatttacagagaatcttgtttgtgtgtgtctttgtaattgtatgttcaaattggagacaaaagtttgcatgtgatactcttttgaatgtgagtcttggcckcaaagccttttcatttcattccacacaggccccaggtcactctctttggccaccccgtatgcagctaccaggtcctgttaatttattcttccattcgctgtctcattcaagtccacttcttgtcattgtcaagggcactgcacaggttgcacctgctatgatctcacccctgaatcggtgtagtgtgttcccactgctccttgctcactcacactgccttttctgcatcttgctgagatcttctttacctggaaccttcgctggctcccctttgcctgctgagccaaatccaggtgcttcaagttggcactcaaagtccctttagtctgtcttctccctacccttccagccctctgtcttcctccatcttcgtgacacctccctggtcacaatgggaggaaccatcgtctcctgtgagggcctggagttttctgcctag

SEQ ID NO: 740497 - DNA, 491 bp, Homo sapiens
tctctgaagtacagtaattttgctaggatatgtctcagtgatgaggacttttgttcatttcttctggaatctgttgttccttttcaatagcttgattaatgttctccttggtttctgaaacattttgataaattgtatccttaaatatttgttctgttacatgatttctgtttttttcttcagagccaccacttattggtttattgtgtttcattggcttttcttgtcctgctcttcattgtttcttgtgtatttttcattgaggtgtaattacatacaaaaactgcmcatgtttacgtgtacagtttgatagatcagtttcaacatatgcatgtacccatgaaaccattgccccaatcaaattgtgagcatattcatcaccccaaaaagtttccatgtaccctttataatgtctccctgtatcccttcctacccttttttccattcccatacatcactggtttgttttctttcactttagttggcatttt

SEQ ID NO: 740498 - DNA, 491 bp, Homo sapiens
tctctgaagtacagtaattttgctaggatatgtctcagtgatgaggacttttgttcatttcttctggaatctgttgttccttttcaatagcttgattaatgttctccttggtttctgaaacattttgataaattgtatccttaaatatttgttctgttacatgatttctgtttttttcttcagagccaccacttattggtttattgtgtttcattggcttttcttgtcctgctcttcattgtttcttgtgtatttttcattgaggtgtaattacatacaaaaactgcacatgtttacrtgtacagtttgatagatcagtttcaacatatgcatgtacccatgaaaccattgccccaatcaaattgtgagcatattcatcaccccaaaaagtttccatgtaccctttataatgtctccctgtatcccttcctacccttttttccattcccatacatcactggtttgttttctttcactttagttggcatttt

SEQ ID NO: 740499 - DNA, 556 bp, Homo sapiens
gagaaacagaaccaacaggagatatacatatatatgagacagagagagagagggagagagtgcactcttttaaggaattggcccacataattttgggggctggtaagttcaaaacctgctgggcgaggccagtggttcacactcgtaatcccagcactttgagaggctgaggcaggagaattgcctgagcccaagagttcragaccagcctgggcaacatggcaagaccccatctctaaacaaaaacaaaaacaaaaatctgctggataggccaacaggtcccagcagtttatgctgcaatcttgagttcgaaggcggtctggagattgaattccttttcactcaggggatgtcttcaaaagttttcatgtgattggattaggcccactcactatggagagtaatcagctttactcaaaatctattgatttaaatgttaatcatatctaaaaaataccttcatagcaacatctagactggtgtctgaccaaatgactggccactatcacctagttgacacacaaaattcaccatcacaggctttgagtcatttatt

SEQ ID NO: 740500 - DNA, 591 bp, Homo sapiens
gcatacaacaccttgttgctaactacagtcagcaaattatgccaggcctgggctaaatgctgggggtgcagagacggacaactcagtggagaagacagatgtcaagcaaataatcacccacattaatatgtgattcttacctgtgatatttctcatgaagcacaagggaggaagggtcaggagggcatatgctggggtcagggcmcttggggaagtcagggaaggcttctgcatgggggagtggagcttactaagctgaagggggtagatgggagagtgtctggggagacagcagatacatgtccgggcctaccgtaacaaaaggagcccatgaaaatctttgaatttcacaaggaaaagaatgaacttttaaataaaagaaaatgctttaatatataataatgatgtactcgtctttatagtaacacacttataaactataattatagtttatacattataaactataatttatagagaaagggacctgtgaaggcaaaagtgcctgaggtccaagaaggtcataatgtggccctggcatgaagagctgtggggcgggagcagaggcggtgggggtactgaggggagggc

SEQ ID NO: 740501 - DNA, 626 bp, Homo sapiens
cataggagctaactgcaggggtgatgagtgagcagtctatgtgtacttgccccctaaatgtacatagaagctcttgggtcatggtccaaactggaggcttaaagggacttctgccttcagctggagttctgagactgccgagggcctagtccaggagctgtcttgccctctgctgaactgcactgcagcttcagacaartctctatgtcctgggtctctttatagttaaaggggagaccctctcagcaaagactaggtcctggcaactggatgaaagctattgagtgtgtcagattcagactaaggctttgcaaagatcatatcactgagcagaaacacacagcctgacacataggatactgtgactgaggcaaggagggaacacagaagggaatctaaggtcttctagaaattccctgccctcgagtgaagaggaagggatgactccacacaggatgtccatggccccagtcagaagtggctactacagaggtccagggcccctcggtctcaccccacaagccagtcgtagtacagccctgtcccatcagggcaggcatcatcctgcagaccatcaggcctgctccgggcatttgagccacatgtggtgctctccctctaacaat

SEQ ID NO: 740502 - DNA, 613 bp, Homo sapiens
aatacataaccataaaagtaatattgaaggtaaatggggtaaatgtcccaagtgaaaggcacagaatggcaaactggataaagagccaagacccacgagtatgctgtcttcaaaagacccatctcacatgcaaagccacacataggctcaaaagaaagggatggaggaaaatttaccaagcaaatggaaaacagaaaaaggcagtggttgcaatcctagtttctgataaaacagactttaaaccataaagatcaaagaaaggcattacacagtggtaaagggctcaattcaacaaaaagaactcatgatcctaaatatatatgcaagctaatacaggagcacccagattcattaaacaagttcttagagacctacaaagagatttasactcccatacaataatagtgggagactttaacaccccacagacaacattagacagatcatcaagacagaaaattaacaaagatattcaggacctgaactcagctctggatcaagtggacctgatagatatctacagaactctctacccaaaaacaagagaatatacattcttctcatcgccacatggcatttattctaaaattgatcacataactggaagtaaaac

SEQ ID NO: 740503 - DNA, 614 bp, Homo sapiens
tacctcttcctaaacttcaaaaaagaaatatgatcaaacagaatgcattagccctatcagcctaatctcatttggatgggcagcagacagttccagactaatctccttcaagcactgcttagaagatgttctcacacatcacccttctgaaagagctcaccaaaccctactggatttgatttgatcctttgttatctgacaggtatggggatccatggagaaagcaaaattacttaacattattgagtgattacttcctgttggagattttgagcactataactgtttctacaataactcaaaaatacgccattcccagtaccaagggtgtggaaaaccatgtgtttttatctagagcacctcagctttagaggactaccatgggcaatgctgacaatacccacactgttgttttcatgagcccattcttctaacttctcctcagaaaggtcaaataaatatgtttcacgtgtacatwggcatacccactcacagagatgccaatttaaaaccatgctacattaaaaatgaagacaatcttcaaatgtacttcggtgggatataagacacttagaaaagcagccctttgaaacactgtaaagtgagcatgtatt

SEQ ID NO: 740504 - DNA, 618 bp, Homo sapiens
aggcctttgtcagggcatggcagcctaggacttcttacatagcacctcgggtatcagaagatgagtgtcccaggagaaccagtcagaaagcacatcatcttttctgatctagctttggacaccacttattattgtttcgctatactctattggtcaatcactcactgagrtcagcccatattcaagaagagagaacacagacccccacctttcattggaagaaaagtcaaagtattttcagacatgttttaaaaccactatatcttttgggagggtgacgtgggaggatagcttgaggctgggagattgagaccagcctaggaaatatggcgaaaccccatctctacaaaaaattcaaaaattagctggtcatggtagcacatgcctgtggtcccagctactcgggaggatgaggtggaaggattgcttgagcccaggagtttgaggctgtagagagtcttgtttatgccactgcactccagcctgtgtgacagagtgagaccctttctgaaccaagaatcaatcgatcaatcaatcaaaatcactacatctacttagcagagtgggaaaagctggaattttagaatttgtaaaagagcatgcaaacaaaaacaaggc

SEQ ID NO: 740505 - DNA, 589 bp, Homo sapiens
acttaggaagttacaactctgccttagtcttcacttcctgcttatacagtgcctcaaggtcaaccaaactgaggccctctctgttgctctggtgtttcctgggtatttacaaagccctgcacatccacatggccttctagattctaaagaatatgtcaaaacttttcaaagtctcttatgcacctctcatttcccagattttcctcttacatatctggccaggcttgtttgccccaactggtagcccagcttcaggcagctgaaatattaaagaatttccatagattgctctcgacaaatgccttggggatagatcttttcccagagatcaagttctgagtcaggttagayagtgacgacaacagtcctctcactaattgtgttttgttttgaaatatatagttatttttcataaaagtatattatttgtgttaaaatataattagtaatttttaaatgaagtaatatgaaataataacattatcttttgttttctcagttttaatctgtaatactttaaatactgatagacataatacacataaaccaaatctctttaaggtcctcaatgagtgtaaaggagttctta

SEQ ID NO: 740506 - DNA, 601 bp, Homo sapiens
catatcattaaagagaagtttgacattaattttattcttgctcctttattggtgatctgttccttccctcaaaagcttttagaattctctttggttcttagttgtttctacattttattgcagtatatctaagtgtaagtttatttttatctatactgttttgtaayctatagattgcttctacttcctcttattctggaaatttctctattattatttcttaaaatattgatacttctttgcttattttttcctctcctctagagtcctctattcgacagatgttaagactgttcctactccccatatttctttattatttgtttatatatatattttttttttgagatggagtctcactctgtctcccaagctggagggcagtggcacaatcttggctcactgcaacctccacttctggggttcaagcaattctctgccccagcctcctgagtagctgggattacaggcactcaccaccaagcccagctaatttttttgtatttttagtagagacggggtttcaccatcttggccagactggccttgaactcctgacctcgtgatccacccacctggacctcccaaagtgctgggatta

SEQ ID NO: 740507 - DNA, 606 bp, Homo sapiens
actggagtgcagtggcgcaatcttagctcactgcaacctccatctcctgggttcaagtgattctcctgcgttcaagtgattctcctgcctcagcctcctgagtagctgggattacaggcacctgccaccgtgcctggctaatttttttttttgtattttttagtagagacagggtttcaccatgttgaccaggctgatctccaactcctagcctcaagtgacctgcccrcggcggcctcccaaagtgctgggattacaggcatgacccaccacacccagccttacctaagcttttatcaaaatatggacctttgacacaggcttagaaaccaacatcactctctcccatatcatctgttgactttattagaaccttggtcttctctacattatcctagaatcttgcacagggataacaaagaaggtaactatttaaactgcacatactataggtaagtatcaactagctgctgtgttacgaagtaggtaaattcatttgaactatgagcagaaaccacaaattagttaactcaaagcataatagcaataacttttgagaatatgaatcccatagctagacattacttatcaactgaacttggatca

SEQ ID NO: 740508 - DNA, 606 bp, Homo sapiens
actggagtgcagtggcgcaatcttagctcactgcaacctccatctcctgggttcaagtgattctcctgcgttcaagtgattctcctgcctcagcctcctgagtagctgggattacaggcacctgccaccgtgcctggctaatttttttttttgtattttttagtagagacagggtttcaccatgttgaccaggctgatctccaactcctagcctcaagtgacctgcccacggcggcctcccaaagtgctgggattacaggcatgacccaccacacccagccttacctaagcttttatcaaaatatggacctttgwcacaggcttagaaaccaacatcactctctcccatatcatctgttgactttattagaaccttggtcttctctacattatcctagaatcttgcacagggataacaaagaaggtaactatttaaactgcacatactataggtaagtatcaactagctgctgtgttacgaagtaggtaaattcatttgaactatgagcagaaaccacaaattagttaactcaaagcataatagcaataacttttgagaatatgaatcccatagctagacattacttatcaactgaacttggatca

SEQ ID NO: 740509 - DNA, 626 bp, Homo sapiens
gagtaccacaccagaggaaacaaatgggaggctctcagcatttgactggacttttcaggatgaagagaagacacacaatcttaagaatccctcacacaaaatagttgaatggatttttataaaaatctaactgtatgctgcctacaagagactaacatcatctttaagtttacacaaaaactgaaagcaatggaacagaaaagagtattctatgcaaatgaaaatcaaaagaaagtatgggtaatacttatattrcacaaaatagactttaaagtggtcattcaagaggatataaaaatattaaatatatatatatcaaatattggagcatctaaatatatgatatggttacattacataaagagaataaaggattagttcatatggtcatctcaattatgcagaaaaagcatttcacaaaatataatacattttcataatgctcaaaaaattaaaaggaatatacctcaacacaacaaagatatgacaaacccttagctaatatcatactcaatggtgaaaagttgaaagcttttcctgtaagatcaagaacaagacaaggatgcccactctcaccacttctattcaacatagtacaggaagttctagctagaacaactagacaa

SEQ ID NO: 740510 - DNA, 626 bp, Homo sapiens
gagtaccacaccagaggaaacaaatgggaggctctcagcatttgactggacttttcaggatgaagagaagacacacaatcttaagaatccctcacacaaaatagttgaatggatttttataaaaatctaactgtatgctgcctacaagagactaacatcatctttaagtttacacaaaaactgaaagcaatggaacagaaaagagtattctatgcaaatgaaaatcaaaagaaagtatgggtaatacttatattgcacaaaatagactttaaagtggtcattcaagaggatataaaaatattaaatatatatayatcaaatattggagcatctaaatatatgatatggttacattacataaagagaataaaggattagttcatatggtcatctcaattatgcagaaaaagcatttcacaaaatataatacattttcataatgctcaaaaaattaaaaggaatatacctcaacacaacaaagatatgacaaacccttagctaatatcatactcaatggtgaaaagttgaaagcttttcctgtaagatcaagaacaagacaaggatgcccactctcaccacttctattcaacatagtacaggaagttctagctagaacaactagacaa

SEQ ID NO: 740511 - DNA, 626 bp, Homo sapiens
gagtaccacaccagaggaaacaaatgggaggctctcagcatttgactggacttttcaggatgaagagaagacacacaatcttaagaatccctcacacaaaatagttgaatggatttttataaaaatctaactgtatgctgcctacaagagactaacatcatctttaagtttacacaaaaactgaaagcaatggaacagaaaagagtattctatgcaaatgaaaatcaaaagaaagtatgggtaatacttatattgcacaaaatagactttaaagtggtcattcaagaggatataaaaatattaaatatatatatatcaaatattggagcatctaaatatatgatatggttacattacataaagagaataaaggattagttcatatgrtcatctcaattatgcagaaaaagcatttcacaaaatataatacattttcataatgctcaaaaaattaaaaggaatatacctcaacacaacaaagatatgacaaacccttagctaatatcatactcaatggtgaaaagttgaaagcttttcctgtaagatcaagaacaagacaaggatgcccactctcaccacttctattcaacatagtacaggaagttctagctagaacaactagacaa

SEQ ID NO: 740512 - DNA, 621 bp, Homo sapiens
aaaggcctcaggcatctagggagggctgtctccacagatcactcataagtaaattatttgctggcctcccataaacaaggacatgccaattgtaactgtgggtctacagtctaagtctagttcctaagactaaagtctgttatacatatcttaccaggtacagaacaaagacaagatgargtcagtcacttcctccatctacccagaaatgtctgcattattgattctcctttactcctttttttctcttcaggggttccctttatcccatgtaaaatgtagattcactggccactaactaaagtctcataagaatgtaactgcctacctgtctctcttccaaatgccgtaatctcttccaaattacataagaatgtaattcatctaactgcctacctgtctctcttccaaatgccttcccctgctttaaggaagtgtataaatactgaactcctgaaaacctctctgaaaaacaatcagagaagaacatatgtctatggcttattttttcgcagaataccctaaagctggcttaataaatctagatagttgagactgttacagtaggtagctagtcaggtgtattagttcgttttcatggtgctggtaaagacatacctg

SEQ ID NO: 740513 - DNA, 634 bp, Homo sapiens
cttattttttcgcagaataccctaaagctggcttaataaatctagatagttgagactgttacagtaggtagctagtcaggtgtattagttcgttttcatggtgctggtaaagacatacctgagactgagcaatttacaaaagaaaaaggtttaattggacttacagttccatgtggctagggaagcctcacatcatggcagaaggcaaggaggagcaagtcatatcttaactggatggcagcaggcaaaaaatgagggagcgtgtgcaggagaatacctctttttaaaaccatcagatctcgtgagacttattcactatcacaggaacagcatgggaaagatttgcccccatgattcaattacctcccacctggtctctcccacaacaygtgggaattcaagatgaaatctgggtggggacacagccatgaggcacgagcagggcaagagagggctcccctaaccaccaccaggaatgccaggcaaccatcaggtgatggtcaggcagtttgtcacatggcctctccaaaatgataattggtcacagcctctgccagagaaaggcagtttcccattagataaaaacaactgaaactggagatcagcagcttcccaataagatctcaggaattgg

SEQ ID NO: 740514 - DNA, 610 bp, Homo sapiens
ttacctggctgctcggtgccaagctgtaatctgttttttctcagtgcttgctccataatgatccctgactcctgcaaaggctgcagcatgaatgagatatgactccgcagcagcaagtcggtgcttaaattgaaatattatgggaagggcagcccactgcagacttttgatgtagcagctcatggctcggggggagctagggacacggaagccattgtccactgtactcagttcctcgtcatttccaggggagagcggagagagcagagagcgtcaacacaaataattccaactggatctgcaaagtgagtgctgcaagctgaagatttgccccctggccggtatctgtgggaaacaaagccaagaagaatyattcagtatattttaaatggcttaaaattcatttatatatggcaggcacctgagagtcacttctgggcagaaagacaaacacatgaatacaagccataaatgaaaagaatcaaccagttacaccattaaaaatgtctgaatataatgccagttactacgagtgtggagggtgcatctctgagatggtgaatttcttcccacctaaaagcagggtgacctaggaggaattggtagtgtc

SEQ ID NO: 740515 - DNA, 658 bp, Homo sapiens
accaggacaaacctacaaggcatgcacagccctctcttgtaatgagcacactctccagctgtattggaaggagtctcctccagagtctccagacgcgttggaagcccgctgcacaggaaggagcggcgttcatgatgctgcagccgtgaccacgtgcacatcagcgtgagtgcagtcaacacagacggcccatggcactgagagcccagtgaggccctggacacgtgacgcttaactaacgtggagatctgcactccagggatttaactgtgcagcttagctttaaagacttgagatggtgagaaacacattgatgaacatttttcaccacattcagtaacaaacttgttcgcttgctcctgagtgaggccaaaagaaattcatatttctgaagaactgtgcggagaaacagtcttgggtcctgcagtattgccctgagggaagcccccrctaagccgtctctcggccaggtccctggaactttctaagcctggttgattttctcctgtggagcctgctgatgtgcctggccaaagacttgatgtcatcactctgctactttatactatcagcagtgtaggtaaattatttgtagtgctgttattgctttcaatattcataggtctcatttaatgagttttacaaagtgctcggcacc

SEQ ID NO: 740516 - DNA, 575 bp, Homo sapiens
atacatttttgtgttaaaatcttaattcttttgtaacacttagcttaaagcacaaacacattgtacagctgtacaaaatttttttttcattatattcttggtctgtaacctttaagctttattctctctttttttttttttttttttttttgagatggggtctcactctgtcgcccaggctggagtgcaatggtgcaatcttggcccactgcaacctctgcctcccaggttcaagtgattcttccccctcagcctcccgagtagctgggattacaggcacccgccaccatgcccagctaatttttstatttttaatagagatggggtttcatcatgttggtcaggctggtctcgaactcctgatctcaggtgattcaccttccttggcctcccaaagtgttgggattacaggcacgagccaccgcacccagcctctatattaatttttaatttgtatttatttatttatttattaaacttccttgttaaaaactaagacacacaccttagtctgggcctacacagggtcagtagaaccccatcactgacttccacttccactcttgtcccactag

SEQ ID NO: 740517 - DNA, 654 bp, Homo sapiens
gagaaaccaagcttgtttaagtaagaaatgcttgcacaatgaataaccagaaggtgctgtggcatcagctggaattctgtggcggaaggattgaaaacatgtcaaattatgtcaaattgatactttcatcaattactatatagttaggatatggtataaatctttgtttcaggctcttcttcctcagtgggaatcattctctgtaaactgatgagtctctgatattctctcctctatttgygtgttcttaaaaagaaaggagaaaaatcaacccatgctatctaataaaaaatgctaacaacttcctgtgtcagttatattatagttaatttatttataaatctaacataggatatcttaacattttgtaaaattaattataaatgcaaggttttagtactggtatgaagttattagcatttgaaaatgtgatacaaccttatttttcttctattatattaggttgattatcttattattatctttattattatttaggttcattaccttctattatcttagatttagttgccttttccttgcttctacagacacaacttaatataccttaaccaaacaatgactaagaaggcctttcctgtacccatgggattttctgtcattctgacgtgggtcagattgaaacaattgctc

SEQ ID NO: 740518 - DNA, 625 bp, Homo sapiens
tatatatatatatatatatatatatatatatatatatatatattcctgtgtttctatgggtagaaattatatcactgactttgaaaatcctaattttattattattaaatcatttgctaatttttaaacaatttttattttaaattctcaaaatctcacaaatgtcattttttatttctttttttcattttaagacttttagcagataaatctcattttttgaaatttgtatctttttgggaaacttcacatgtctttattcggactttgacatcttgcatcatgaatgcctatggggcaaactttattttccactattargagttcagacctctgggggtaggaacatatggctgtagggagaaacagcaccaattactggaaatccttggaaatgccaagagtcctaatatcctgagaatttactttgccttctctgtgaaagttgtccagtgctacacgtaatagacttcccctttggaatcagtgttgcaatagagagaaaacaggctttaaaatcagggtggggacctggttttaaaagcaatttctgcttagtatttttgtgatcttaggaaagtacttaatctctctgaactttaatttgctcattaattgattaaag

SEQ ID NO: 740519 - DNA, 638 bp, Homo sapiens
agtgacaaattccttaatagcagtatataaataatttttgtgttttgaccaaatttaattcaggcatatcttaaaaagatcaatgttaatcatatttaaaattatgttttgaagttaatttaaattatatgtttagtctgtcctagatattaaacacaatatgaatttttaaaaaaagaaagtgctgtcagaatagagttaccagtcagcgtaaaataatttgtctcatcaaagatcatgacaaggaagaagtggacagaggtggcagggcacagagtcaggggtttgagaacaggggtttcagtcaactgagaggctcccgtgggagaaggagcatcgaacagagaaaacaggactcattcttgcaaatgtttttctgaaaatggcccaagtggcagataggttcagatatgaggatatagacttgacttgaaatgcccaccatggagatattctttcttctgtctgagagactggttgattattgtcttaagagtgagsctttggggcttcctctagtggagaaacagtccaaaccaaaaagagccggtccatcggatggctggtgtaaaaatggacaatgtcttttccagtggcctggccatttaaataaaggcacatattggggcatggagttc

SEQ ID NO: 740520 - DNA, 606 bp, Homo sapiens
taggttgtgttgttagccagagagagcctggaatactggatttttttcttaaatttgtgtgcaataactttagtgctccaaccacatatcacagccttgcagacatggtgtgcttcctcagagtgctgtggcttctcctcttgcattctctcttctctgctaacccagaaaacccgcactgctgagaagaaatgatggcacacaacagtttcttcctctgctccatgctgggtatgtttgctctggcaccatgtggtatggttcctgactatgtgcagagcagggagtagagtccagagaatgagtgggggatgggaaggctgcagggcgcagctgaaggtggaatytgaaaggaatgggaactcagccaccatgctctttattcccaattcaggccctgttttaataaggacattttatggtgaagatcttaaagcaaactgactttcaaaagaaaaggagaagatggagaaagaaaggtaggaagagatcaaatatttctcctgattaagttccttttattctagagccatagtcttcaaagtgtagttaatgaaacactcaatagcacatttttattaataacccaacattatgcttcattaa

SEQ ID NO: 740521 - DNA, 606 bp, Homo sapiens
taggttgtgttgttagccagagagagcctggaatactggatttttttcttaaatttgtgtgcaataactttagtgctccaaccacatatcacagccttgcagacatggtgtgcttcctcagagtgctgtggcttctcctcttgcattctctcttctctgctaacccagaaaacccgcactgctgagaagaaatgatggcacacaacagtttcttcctctgctccatgctgggtatgtttgctctggcaccatgtggtatggttcctgactatgtgcagagcagggagtagagtccagagaatgagtgggggatgggaaggctgcagggcgcagctgaaggtggaatctgaaaggaatgggaactcagccaccatgctctttattcccaattcaggccctgttttaataaggacattttatggtgaagatyttaaagcaaactgactttcaaaagaaaaggagaagatggagaaagaaaggtaggaagagatcaaatatttctcctgattaagttccttttattctagagccatagtcttcaaagtgtagttaatgaaacactcaatagcacatttttattaataacccaacattatgcttcattaa

SEQ ID NO: 740522 - DNA, 639 bp, Homo sapiens
agctacaaagtacaagctattaaaaattagatggaaaagttttaagaaaatgttacttttactgaaagcaagcagtggcctataaataacattcttaggagccttttctatttgcattcaaaactgagtgttctcttcctattcctttttgatagtttgagtcatggtcttagatattagctatttgcgagaggaaactggtttgtaataattctgcaaatggaagccccatttctactgaacatcctagttttaaacagaagaaaaactgtaatcctggggttggtatggaggaggtttatcctgcagaataagttgatacattagtacctgatttcatatcttacatatttatttgagctgagcattagtttgtagtgtaactattagtaaaaatrgagaaacaaaacttacgttcattaatagtattttaagaaaattatttttcaaatgtcaccaataaaagttttggcaggaagcttgttgccacattgatctaactttttttttctcccctatttcagttgcactttgtaaaatggctttttctttttcctcttaagggttctactcttcaggtagataatttttcaaatgtgaattatcttttgtgtctatattgatagctcttaaaggagt

SEQ ID NO: 740523 - DNA, 630 bp, Homo sapiens
gctaagaagtcttcccccaaaaccaccctccaaaaagactagaattcatttttatgctgcttcctagtgattacttttctaacatgaaacacttgaagttgtgattcagatgaacgcagcactacagagaagcccagtgtagcacagtagttaaaatgcaatctctggaatcggatctgaactctggctccatgatttactagctacatgatcttgaataatgtttaagctctgtctttaatcttcaatctcttcatcttgaaaatggtgaaaatatcttcctcacaaagtagctttgaagatttaaaaaaaaagggccgggcaatataagacatttaaaacagctcctggcacaaagtaagagctcattaagagctattgttacagatrttaataatataacaaaatttgaaatttcttatactttatataagtgaagactcagtttaatagtagcaataatcctgatatcatcacacaaaaataaattttaaagtagtaatgctataaatggaaacacaagagctgaatggacttgccatagctgtattcacaggaaaaaaaaagtttaatagtctttggcatagactttttttctttctttttagatttgacacaaggtctcactct

SEQ ID NO: 740524 - DNA, 497 bp, Homo sapiens
aaatttgaaatttcttatactttatataagtgaagactcagtttaatagtagcaataatcctgatatcatcacacaaaaataaattttaaagtagtaatgctataaatggaaacacaagagctgaatggacttgccatagctgtattcacaggaaaaaaaaagtttaatagtctttggcatagactttttttctttctttttagayttgacacaaggtctcactctgtcactcaggctggagtgcagtgtggcatgatcacagctcactgcagcctggaactcctgggctcaaacgatcctcccaccatcctctcaaagtgctaggattacaggcatgcgccacagtacccagctggcatagattttctattgtatatgtctgctacattttatatatttttatatatgatctactttatccttgggagacctcaagttgtaccttccctgaaccaaactttggcttttgaaagaaacacttttagttattatacct

SEQ ID NO: 740525 - DNA, 482 bp, Homo sapiens
aaccacaatgagacactgctacacagctattaaaatggctaaaattaaatggactgcatagactgaccatggactcctaggtatttactcaggaaataaagcatacatccacacaaagaattgtacatgaatgttcataaaagctttgtagmtaaaaaagaaatcaaatgttcttcaacagatgaatgggtgaactatgacatatccatacaattaaatactactcttcaataaaaatgagttactgataacatgcaacaacatagaggaatttcaggataattacacagaatgaaagaagcccaacaaaaagtacattatgtatgcttccatttatagaaagttctagaaagtgaaaattaatctatagtgacagaaagcagatcagtggttgtttcccattgggatgctgggtaaggaaatgaacaagatggaggaattataaagtggcatgaggaaactttaggggtaatggataggtt

SEQ ID NO: 740526 - DNA, 523 bp, Homo sapiens
aaggatccctcaaaactatacaaatacatgaaaattaaataatctgcccttaaatgatctttaggtaaacaatggaatccagatgaaaatttaaaaattctttgaactgaatgataacagtgacacaacttatcaaagyctctgggatacagcaaaagcggtgttaagaggaaggttcatagcattaaatgcctacatcaaaaagtctgaaagagtacaaatttacaatccaaggtcacaccacaatgaactagagaaacaggaacaaaccaaacccaaacccagcagaataataataaaaaaatagcaaagaccataggagaactaaatgaaattgaaacaaaaaaatggaaaagataaatgacacaaaaagctggttcttcaaaaagacaaataaaattgatagaccactggtaaaattaaccaagaagagagaagatgcaaataagctcaattagaaataaaacaggagatattgtaactgatactacagaaatacaaaagatcagtcaaggctactatc

SEQ ID NO: 740527 - DNA, 545 bp, Homo sapiens
acgggatcccccagcacagcacaactgctctaccaaaacacggccagagcacttctttaagtaagtccctgattcattcctcttcactgaataggacctcccacctgggccctccagccacccctgccagtgttctctggccaacagagatctgaaaacttcctgggacagagctttgagagggaggggtgggctgccatctttgctgtttgggcaacttagctgttccagcctccagactttggagagcccaagccaagtgggggcggaagcagtaycctagcacagcacaactactctatgaaagcatggccagactgtgactttaagcaggtctctgatcccattcctcttgactggctgagagctcccaactggggtctctagccacctccttacagatgtgttcaggttggcaacaggtccatacctccctgagacggagctcacggaggaaggggcagcctgccatctgctgttttgcagccttcactggtgatacctccaggtactggaaaatctgaggtaactagggattggagcag

SEQ ID NO: 740528 - DNA, 602 bp, Homo sapiens
gatgggaagaatgaaaccaatttggaaaacatatttcagggtatcatccgtgagaacttcctgaacctagctagacaagccaacattcaaattcagcaaatgcagagaaccccagtaagctactccatgagaggatccccaagacacataatcatcagattctccaaggtcaaaatagaagaaataatgttaaaggcagatagagaaaaaggccagatcacctacaaagggaagctcatcagactaacagcacacctctcagtggaaaccttacaagccagaagagattggttcccaaaatttaacattctttaaaaaaagacattccaacccagaattttatatctggcaaaactaagctttgtaagtgaaagagaaataagaaccctttcagacaagaaaatgctgaggaaatttattactaccagacctgccttggacacacttttacctgtgtaacaracctatatatgtactcataaacttaaaataattttttttttttttaaaaaaggaagggaattctgacacatgctacaacatagatgaagctcaaggtcattacgctaagtgaaatacaccaatcatagaaaggcaaatac

SEQ ID NO: 740529 - DNA, 572 bp, Homo sapiens
gaatctaatgcagtcattttataaagaaaagagaaacctaaatttgaatgttgagatcataatctttaaaactacacactagaaacaatagaatttcaatttattgtttaaaatttacccagaatccctcagccaagatartaacacatgtcttgagaagttaaataatgtacctattacaaatgatgtttcagtcatcagatatgtacttatccttagaataaattataaatacttagaaaaatataccattacctatagtattgagtacagaaaaagctccattgtttttagctgtcaatgctcttttcaacctagtttctcactgttaaaaaagcttcaaataatcatattcaaaacctcttaacttgctgattatattcagcaaccatagctaaatatttcagtaccaaagctgaaaaatcataatggcatatcagcacacacataataaattatggttaatgaatactatacaaggtgtgttttgattggctccaagtttgtgatctgctcatggatagcacattgtatttttaagaggaaggaaaatatagtgatgatatgactgc

SEQ ID NO: 740530 - DNA, 649 bp, Homo sapiens
aatagcattggcaggggaatttcttggatcccaaacatggactcctttagaactactaggtaaaggataaccacattttaaggtattttttttaaccacttcccgaaatcgcagtttgcattaccaccccttcctgccccacttggagaagcaatgcaatatgtaatgtcaagagtttagactgaggattatagaatctgctctctactcttggctctgccaagaagagggctacatgacatgggacaggtcatttgtcccctctgagcctcagaagtgattagagtactctgtatttccctggttctttctgggtctttctgtgttgttttcattctttccttctgaatgttccctttgcttgtcctctaacagcaatsattcactccgcctcccagttggggccaattctgctgtttgacctgcagttggagccagtgctgcttatcccagtcaacattattgatcaacattactgaacaaataagtgatcacatacatgaacaaatttttgactctttcctctcagcatgctggacctctcagtaggctgttattacatctcaacaaataggggtgttaaaattaacttaaattgtgctcaattaatcagaacttattcaagactttttgtgtgtcaggcattaaa

SEQ ID NO: 740531 - DNA, 586 bp, Homo sapiens
ctgtgagtctctcccatgctgttcttgtggtactgaatgggtctcacaggatctgatgcgttttaaaatgggagttgccctgcacaagctctctttttgcctgctgccatccatgtaagatgtgacttgctcctccttgccttccaccaagattgtgaggcctccccagccacgtggaackgtaaatccagtaaacctctttgttttgtaaattgcccagtctggagtatgtctttatcagcagcgtgaaaacagactaatgaagtaaattggtactagtagagtaaggcattgctgaaaagatacctgaaaatatggaagcaacattggaactgggtaacaggcagaggttggaacagtctggagggctcagaagaagacaggaaaatgtgggaaagtttggaacttcctaaagacttctgaatggctttgacaaaaatgctgatagtgatatgaacaataaggtccaggctgaggtggtctcagatggagataaggaacttgttgggaactggagcaaaggtaactcttgtaatgtttcatcaaagagactggtggcattttgcccctgcccaggagacttgtg

SEQ ID NO: 740532 - DNA, 622 bp, Homo sapiens
ttgaaaatcaatcctactgtactcaccctcataacattattacaaatagctcactgaacctatttcaaccccagaaattcatgcatttaacaactttcaatttataaactttaacagatcacacaaagctattctctctaccaaaagatggcataagtgggcttgggcttgtatggccatttattctcccataattctgaaagacaaaaaaaaataaaataaaataaaaatcatgcagccaggcagtggcycatgcctgtaatgccagcactttcggaaaccaatgcgggcagatcacttaaggttaggagttcgagaccaacctggctaacacggtgaaaccccatctctactaaaaatacataaattagtcaggcatggtggcatgtgcctgtaatcccagctactggggaggcttaggtgagagaattgcttgaacccaggaggtggaggttgcagtaaggcgagatcgcaccattgcactccagcctaggtgacagagcgagactctgtctcaacaacaacaacgaaaatcatgcaacacatgagatgtgttatacccaatagcagcaagagggaagaaaacatgatcaataacattgaaacactttcagaatgtgtt

SEQ ID NO: 740533 - DNA, 622 bp, Homo sapiens
ttgaaaatcaatcctactgtactcaccctcataacattattacaaatagctcactgaacctatttcaaccccagaaattcatgcatttaacaactttcaatttataaactttaacagatcacacaaagctattctctctaccaaaagatggcataagtgggcttgggcttgtatggccatttattctcccataattctgaaagacaaaaaaaaataaaataaaataaaaatcatgcagccaggcagtggcccatgcctgtaatgccagcactttsggaaaccaatgcgggcagatcacttaaggttaggagttcgagaccaacctggctaacacggtgaaaccccatctctactaaaaatacataaattagtcaggcatggtggcatgtgcctgtaatcccagctactggggaggcttaggtgagagaattgcttgaacccaggaggtggaggttgcagtaaggcgagatcgcaccattgcactccagcctaggtgacagagcgagactctgtctcaacaacaacaacgaaaatcatgcaacacatgagatgtgttatacccaatagcagcaagagggaagaaaacatgatcaataacattgaaacactttcagaatgtgtt

SEQ ID NO: 740534 - DNA, 445 bp, Homo sapiens
cattttgtgagtagtgtggtgaatgctagatgatatccatactttcattcaactgctgaaagcaaaagtatgggtgaggaaacatgtggattctcacttttctttcaggataccttcacatagcatgtgtgacatacatgtcttgttgattgagtcagaatgctattatcaatcgtatacattattaataaagcttcatttcttatttttgggatttaaaaaatataaatagaagttccaatagccttcccccaaactggatggcctttacgtactccattgcwcagaccactgctatgtcaatcaaggcaggcaagactaccttgccttcatttacaaaattatcttgctttatttgcaagattggcttttatatgctgattactttaccacataaatctcctattattatgcagccaaatttaatgtttttccattgaagttt

SEQ ID NO: 740535 - DNA, 580 bp, Homo sapiens
cacgcccagctaattttttgtatttttagtagagatgggatttcgccatgtcggccaggctggtcttgaactcctgacctcaggtgatccgcctgcctcagcctcccacagtgctgggattgcaagtgtgagccactgtgcctggygtgtatgtttattttctattctattaatttctattatctttgtgatttcaaatctttcttttggcttattcacttgttctttttgtaccatattaaattggatgctttgctcattacttcttgacctttatttttaaccaatataagcacaaaatacataaatttttctctgagcagttttagttgcatcctacaaaaatttttaagcagttttattgagatataattcacatgccacccgattcatccactcacaattcaatggtttggggtacttatattattaattttttaaaattgtggtaaaaatatacataccataaaatttaccattttgaccatttaaagtatataattctgtgacataattgcattcacaatattatgcaaacatcaccagtatctatttccaaaactttttcattacttcaaag

SEQ ID NO: 740536 - DNA, 514 bp, Homo sapiens
tcacaattcaatggtttggggtacttatattattaattttttaaaattgtggtaaaaatatacataccataaaatttaccattttgaccatttaaagtatataattctgtgacataattgcattcacaatattatgcaaacatcaccagtatctatttccaaaactttttcattacttcaaagagaaactttgtaatctttatgcattaaagattaactccccacttccctttccctctgcccctgattactgctaatctacttttgtctataaaaatttgcctattatagatattttatataagyggaatcatataatatctttttatttattattcacttagcataatatctccaaggctcatccatgttgtatcatgtatcacaacttcattcctttctatagttgcataatctttcattgtatgtatatgctacattttgttaatccattcgtctattgatggatccttgaattgtttccaccttttggctattgtgaataatgatgcaa

SEQ ID NO: 740537 - DNA, 587 bp, Homo sapiens
ttagttgcatcctacaaaaatttttaagcagttttattgagatataattcacatgccacccgattcatccactcacaattcaatggtttggggtacttatattattaattttttaaaattgtggtaaaaatatacataccataaaatttaccattttgaccatttaaagtatataattctgtgacataattgcattcacaatattatgcaaacatcaccagtatctatttccaaaactttttcattacttcaaagagaaactttgtaatctttatgcattaaagattaactccccacttccctttccctctgcccctgattactgctaatctacttttgtctataaaaatttgcctattatagatattttatataagtggaatcatayaatatctttttatttattattcacttagcataatatctccaaggctcatccatgttgtatcatgtatcacaacttcattcctttctatagttgcataatctttcattgtatgtatatgctacattttgttaatccattcgtctattgatggatccttgaattgtttccaccttttggctattgtgaataatgatgcaat

SEQ ID NO: 740538 - DNA, 518 bp, Homo sapiens
atctacccatgttttaaatcatccctaaattacttatatctaatacaatataaatgctgtgtaaatagttgttatactgtatcatttagggaataataataagaaatatagtctgtatatgttcagtacagatgctttttttccccccaaatatcttcaatacatgattaattgaatccatggatgtaaaacccatggatatggagggccaactgtacttctattccatgtatcacaatttattttattattactgtgttccctgttraggacaggtaattctgtatatctaatcttcagtgcatagtatgatgcactattatcactttacagaagcttgatttagttcatttgatgtatagctttatatttataaaattatttattccagatcattctcctgtttttaagatttctctcctgtttttaagacttcaaagatgtgactatagtttttttagacattcaacctaacaaaatacctcagatctgtttaaaaaattatcttcatgatttta

SEQ ID NO: 740539 - DNA, 529 bp, Homo sapiens
gacaatgaggtgctcagataagggaaatcccttgggcctaatattctttaactaacaaacaaaatgtgcttggggaaacaaaggaagaagcattaataggggtagcaagtaagggaaggggtgaggaggacaccgacagattagaagtagaagaatcatctggcccaggcctcaagctctggttaagctaccaatttaaatacttattaatttaatggcacttaactratctttccctgcttaatattaacaatgcataaagctaacatttctccctcaataataaatgcatttgtataaaacaaaagtttgaaactactttttttaatgcacattttggtttttattaattataatgattagaaactccaaaactggaagtgactcagtcacttttagacatttgagcaaaatattctgttacagctttctgagcagtcaaaaatcagcagaatggaatacttacgctttttacggcttaagatagggatcccaataaacgtctgtgcaaaagtctacaagtaaaatt

SEQ ID NO: 740540 - DNA, 656 bp, Homo sapiens
aaagtcactcattatttctagtactttttccatagattacatagtattttctacatagaaaattatctcatctgcaaataaagaccattttacttctccttttctaatctgtatgccttttatttgcatggttaggacttctgagactgttgaattgaaatggtaagagtagaaattattatctcatttccagtcttacaaagaaactatgaagtattttatcattaagtatgatgctgtaagtttttaatagattctttccattaaatagaagaagtttcattttatttctcctctactaagagttttaatcatgaatacatattgattttgtcaaatatgttgtgtcaattaagatcacacggttttagtttttcagttggttagtattattaattacattaattgattttcaagtgttaaacaaacattgaactcctggaargaattctacttgattataataccttactttctatataaatgtattgttagatttaatttccaaatctttcttgagaatagttgcctctatgtttagcagagatattggcctctagtttgcttttattatactctttttgtctagttttggtgtttgggtaatgataacttcataaaacggtatggatgtttcttctatattctccaatatc

SEQ ID NO: 740541 - DNA, 652 bp, Homo sapiens
ggtgtcatgttctcccatcctctgagaagccacctctctctgccaggctgtgctcttgctctgtctccatagctgttcttacttactgttgattcttacatggaattgatggcatccttgccactagagactctgaaatatgtttaatcgtatgagtctggtgcctggcagcatgacaaagagcagtcaatgaatggttgagtgaatggataaagccaatatgaaaaaaattatagccttctttcctaacagaaatatattagtgatatgtttttcagatatgcggtgacctaggttatttgtttgttttatttttttagaggtggggtctcactctgtcacctatgmtggagtgtgatggtgagatcatacctcactgcagcctggaactccttgaactcaagtgaacctcctgcctcagccttgctagtggtgtcttaggttatttaaagcactgttgaccaaggatggaaatgacataaacaaattttacaaatgtctgtggcaaatgccaactgtgtatggcacatctaatttaacagaatttaaaggcaaagcatggtttggtggagagtaacaattattattgtattctgccaatgttttcagaatatttaattcacgcatttcagataacacaaaggatcctgaa

SEQ ID NO: 740542 - DNA, 526 bp, Homo sapiens
ctctgtgctgactgtagtccacatctgcaaactattgtttcatatgttttggctatgtttacagttaagtcaggatggtaaatccagtttctttattccattttgacccagataagaatattctctctctcgtctactttttaactttccttattttctctttctccatatgtcactaagagaaaatacaaaaaacacatagtagtagttacttcaaatggaaacattaagctatggtatgtaaaagccattgcaatgatgttactcagcctttcccatcctgaaggaattgcctcaatgaaaagtttataaatttgytataaactaatcagaattctcaattattgtttcagtttagtgggaattcaaatacatgtcaagttattaagaaaaacagggcgaaactgcatttctaagtatgtactctgttgaatgctagttttaaggaatgttagaaaataacagtcttgtagaaagagtttgggaagcctcagttaaattaaaatcatgtttctttattgttgca

SEQ ID NO: 740543 - DNA, 531 bp, Homo sapiens
attatatatgtatatcagaaagggaatttaaaatgtctatgattaatatattaaagactactggaaaaggtaggcaaaatctataaacatatggataatttcaggagccataagaaacagaaaaattacaatgctagagataaaaatatgaaaatagagtttaagacgcctttgatagatycacaagtgaattcaagaaagtttagatacgaatcagtgaaatcaaaataggctaatcaaattaatcttatgtgagcacaaggaaaagaaagccagagaaaaacaaatagaacattgcattccagagttgtgcaacaataccaagcagcctaacctatgtgatcagaatcccataaggaaaagacataatagctgagaattcttctacagataatgaaatatgtcaagccgtcaatacaaccaagaagctcagagaaaaccaagttggataagtgaaaataaaatgaaataaaatccaaacacatcaatttcaagccactgaaattcaaaaccaaaaaagacaacaaaaac

SEQ ID NO: 740544 - DNA, 655 bp, Homo sapiens
atccccagaggatgctgcccatgggaacttccatgcccaggaagcaacacacagggcggctgcttcacctctgccttcagagctggacagtgactcttagagacagacacggggggtggaggaggaggcagctccagcagctaaaaatacctgcaaattctatgttgtttcctgcatgtgcgtacacagtgacgatgaagacaatgatgatggtcacaatatccctgccattagtgagcacctctggggtacctggcgtgattctaatggctttccacacacaaacatataaaattaactatatatatatatgtstgtgtgtgtgtgtatatatatgtgtatatatataatgtgtatatacatatgtgtgtgtttatatatatgtgtgtgtgtgtgtatatatatatatatatatatatatatttttttttttttttaagacagagtcttgctccgtcacccaggctggagtgtaatatctcgatcttggctcactacaacctctgcctcccaggttcaatatttacatatttttaacgcataaagtctctctctgtcacccaggctagagtgcagtggtgtgatcatagttcactgcagcttcgacctcctgggcttaagtgatcccaggagggatcctgagcctcccaagtag

SEQ ID NO: 740545 - DNA, 655 bp, Homo sapiens
atccccagaggatgctgcccatgggaacttccatgcccaggaagcaacacacagggcggctgcttcacctctgccttcagagctggacagtgactcttagagacagacacggggggtggaggaggaggcagctccagcagctaaaaatacctgcaaattctatgttgtttcctgcatgtgcgtacacagtgacgatgaagacaatgatgatggtcacaatatccctgccattagtgagcacctctggggtacctggcgtgattctaatggctttccacacacaaacatataaaattaactatatatatatatgtgtgtgtgtgtgtgtatatatatgtgtatatatataatgtgtatatacatatgtgtgtgtttatatatatgtgtgtgtgtgtgtatatatatatatatatatatatatatwtttttttttttttaagacagagtcttgctccgtcacccaggctggagtgtaatatctcgatcttggctcactacaacctctgcctcccaggttcaatatttacatatttttaacgcataaagtctctctctgtcacccaggctagagtgcagtggtgtgatcatagttcactgcagcttcgacctcctgggcttaagtgatcccaggagggatcctgagcctcccaagtag

SEQ ID NO: 740546 - DNA, 606 bp, Homo sapiens
atgaaggaagagacggggaagagaaaaaggaagtatgtgctgagatctacactggaggacaattcagaccacaggtttatctcaatgtgatcctctccaacgtcttccttgccctatccttcctgagcaggactatctgatattcccccatccagaggtttccaatgtagttggggctttcatactgattttctatgtattaccttatgagtttttcaaaagcttccttttctttccgcaaagcagtgagatagcgttgttcctcagttgaacctccgtatataagaaagtaaaccctgcatgttaagacagaacttttaggttggaaaaacagcatttttaatccctgaaaggaacagcagaacatgtgaaatcagcaacctagagcgctcaaataayaaatatttgactaagaatcaaaggtttcatttatcacacactagctcaaattaagctgcctaaaccccacctgttaaaggtctcgttaccacacagggcattttttattttcttttgccaaaaggaagaaacgagtttaggtaaacactgaaatataactagagggatagaataattctctcctcataactataaacaaacagaaaa

SEQ ID NO: 740547 - DNA, 649 bp, Homo sapiens
attggactatattatgtcattttaaatcagtttagtctcataagttggactatatgtttgtcctccaaggtaaattataaacttcttgaaggcagggaccacatttagccagtcattcaaaagtatttaatgtgtttctgttcaactaatcttttttctatgttcttctgggtatccaaagggattcagtgttacataaaatataatccttgttatcaaaaaatttatagcccactcctaggttgtaagcttcgtgtacaattcgaagttatgttgtgaccaccaagtgatactgtgcttgccaggtttactgcaatatgacaaggtgaatgtcagccaccaatgacacgtgctaatactatgacatcagagcccaccatgttagccatgtasaaatagctatgctgatatgtctaactttgaaatagagccacgaaatggagaataactcaggagaaattagttgttaaaaatgtacacttatacacagtgtaacatttcagtcaacaacagaccacatatatgaaggactgcatatacacaggtggtcccacatgattgtaatgccatatttttactgtacctctatgtttagatcctgtcaacctgaaaggaaaagtccaaggcaaaattaagtagagagtttcat

SEQ ID NO: 740548 - DNA, 580 bp, Homo sapiens
agaaaaattagaaagcagcttgacctcaggttcctcatcagtcacacgtgatttcattatgtaatagagctttggtttaaccagggacacttcactcaggagcgctggcaacatctaaggacattttggttgtcacaactggggttaggtgccattgacatctaatgggtagaagcctgggatgctactaaacattttgtaatgcacaggatagcccctcatagtaaagaattatctagaccaaaataccaatagttctgagactgataaatcctgcaatagaataatgaagratgaagtggtgaagaaaacaggatgaggcccaaatattctttactcagtcaggctaacatttaagtataaaggcaacaataaaatattccaaatgcagaaagtatggtgttagtgagatcttttaaaaatatatcttgaaagataaacagcaaaataaaatgtgaatcaaaatgagaaactcataatttaagatttaacatataaaaactgatgtcgacattgattccaactaagcatacagttaactataaatgtctaaataacatttatttgtgatatgcagcct

SEQ ID NO: 740549 - DNA, 568 bp, Homo sapiens
taaagatgtggtattctatttttatacctagaaaaattcaattttgacaaagctgtcagctttgggaaggcagctcataacaacagtgaatgggtgagatctcattacttcgaagttcatacaacaaacaatacacctgacaagggattaatatccaaacatacaaggaactcaaacaactcaatagcaagaaaacagtcaattaaaaaatgaacaaaagatctgaatagacatttctcaaaagtaggtatacaaatggccaaaaagcatatgaaaaagtgttcratatgactaatacctatcaatgctttttcggccttatcattgtaagaataatacttcattagtaaagaatgtcattgattttcaattaaaattcaatcagaagagaggtgaacttaggaaggcctaaaatatttatccaataaaaccttttgttctgtcatcaaaggggacttaactttcaaccactttgttgactttgttgctatgtatggccaacctgagagagaaaaagcaaaccattttagacagccctgatgtataatcttaagtgtagcattaaaga

SEQ ID NO: 740550 - DNA, 568 bp, Homo sapiens
taaagatgtggtattctatttttatacctagaaaaattcaattttgacaaagctgtcagctttgggaaggcagctcataacaacagtgaatgggtgagatctcattacttcgaagttcatacaacaaacaatacacctgacaagggattaatatccaaacatacaaggaactcaaacaactcaatagcaagaaaacagtcaattaaaaaatgaacaaaagatctgaatagacatttctcaaaagtaggtatacaaatggccaaaaagcatatgaaaaagtgttcgatatgactaatacctatcaatgctttttcggccttatcattgtaagaataatacttcattagtaaagaatgtcattgattttcaattaaaattcaatcagaagagaggtgaasttaggaaggcctaaaatatttatccaataaaaccttttgttctgtcatcaaaggggacttaactttcaaccactttgttgactttgttgctatgtatggccaacctgagagagaaaaagcaaaccattttagacagccctgatgtataatcttaagtgtagcattaaaga

SEQ ID NO: 740551 - DNA, 591 bp, Homo sapiens
acataaactgaatgaaaaacaaaaaccatatgatcatctcaatagatacagaaaaaagcattcaattaaatgtagcattcatttattatttaaaaaagcccttaataatctaggcatcaaaggaggatatctcaaaatactaaaagacatatrtgacaaacccacagccaatattatactgaatgggaaaaagtcaaaagcatcttccttaaaaaatggaacaagataagaatgcccattctcaccacttctatttaacgttgtactggaagtcctagccaaagcaatcaggcaagaagaataaagaaaaagaattaaaattccaagaagaagtcaaattatctctgttctctgatgacatgatcttatacctagaaaaccttaaagactcctccaaaagactcctagacttgtaaaattaccccagtaaaatttcaggatacaaaattaatgtacaaaaatcagtaccattctatacaccatgttcaagctgagaaccaaatcaagcactcaattccatttacaatatacacaacatgcacaaaatacctgggaataaatacatttaacccaaggaagtggaagatctat

SEQ ID NO: 740552 - DNA, 576 bp, Homo sapiens
ttatagatgcttctatattgctgaaatttacgtggatccaactagatgacatcagacaaaggtaacaataattctttaaaaatgtacacagtacatttttaaagcattgggtacagaatgaaattgtaaattttggctaaaactaaagcaaataggtccaaatcacaacacatgtataggagaacctggtgcaccaggataagcacgttcaaaagcctgtaacccttatagaatctgcataggtctgaatactctctgagaggccaaacctaaatttggagcataaataccaatactttcaaaatataacctaaatgcccttggctccttagaccagctttgaaaacaggtggtaaatytgacaaatggtatagaaagaattctttttgagaaacaccgtatcctaatacctgtatttcatttaagaaactcaaaaaattaattgcttcattagctttcctatatatagagttcatttatacatcagcagcatgcctgttaaaaaaaattccaactccccaaacctttagctgagatgtcaaaggcatgaaattctattgttagactcattccgcc

SEQ ID NO: 740553 - DNA, 612 bp, Homo sapiens
ctttccatacccaattggatcatctctacaccccctggcatgtcaacacacactcagaaaacacaattttagttcattaattaggtatgagggacaacatatattcacacatcatacacgtatacacatttcattttatctttaaaatgcttaaatttaaatatagtgcttttattttactatctagaattttttaaaagcagttatgagaataaaaacatggcaaattaagggtttcagattctgtttttattactacaaatggttgctctttatttggcaactattaygtcacagatattttatattacgtatacctaattctcataagaactgggaagtagaaattatttttcccattttatgaacaaataaaattaaggcttatgttgattagccgtatcttgcaaaaaaaaaaaaaaaaagtggtggagccagagtggatgagactttatctttaaaagcacaaaatctaagctaggcacggtgacatgtgccaatagtcccagctatttgggaggctgaggtgggaggatctcttgagcccaggagttcaaggccagccaaggcaacacagcgagatcctatctctaaataaatatacaaaaccac

SEQ ID NO: 740554 - DNA, 544 bp, Homo sapiens
gcactaaaccatattaggtagtagatggctcttcaagatgagagtaaatggtcagaagcatacctgttttccttgagttaaatattgcatgctttttattttgtgtaaatataaccaaaggtattatggagttgggttgtcacgatagctttatcatcagtttgacaatttgatactagttatgtactattattartgtatgattcaaggaagaaaccgaaattattgttctaaaaagagataatctttacaaataaataatttcacttaatatttttaaagtatgtggacaaaagatctctgcacattaacctatgtatgagggttggagataattgttctagatttgttcaaacccttacaaaactggtagtgtcagaaatgaaaggagcaattcaaacaatatggaaactgagaaaaaaatatgagttcgttcagtaacactcacctcctccttttttttttttttttttttaaagaaaattatcacctggtttagatttaaaaatagcttttcaattgcagacttccaagtttgtctcaa

SEQ ID NO: 740555 - DNA, 619 bp, Homo sapiens
ctagatttgttcaaacccttacaaaactggtagtgtcagaaatgaaaggagcaattcaaacaatatggaaactgagaaaaaaatatgagttcgttcagtaacactcacctcctccttttttttttttttttttttaaagaaaattatcacctggtttagatttaaaaatagcttttcaattgcagacttccaagtttrtctcaatgttctcagcactgtggggtcaacgtggatgcacagtgtgtgttaacagtgcttttgtaaccatctcgggattttttaaatgtcttgttatttctgtgaagtcacacaaaaaagcgactgctgaaatatgcaagaaattagagcaaggtgataggatctggagcaccttataaaagcctgaccttatgctttaatttgtttatctcccacacaatcttttcttttcgaaagtttgattgtgttgtagttggattttgtggattaggacaattatgctgaatgactttaaaatctctttgcatgcacttttagcttgggcacgtcttgtaattcctccgagagaaaccagaaagtccttcccagaattcccagagtagggctgtgcaagaaaaccacccaagaaagagcaatatga

SEQ ID NO: 740556 - DNA, 619 bp, Homo sapiens
ctagatttgttcaaacccttacaaaactggtagtgtcagaaatgaaaggagcaattcaaacaatatggaaactgagaaaaaaatatgagttcgttcagtaacactcacctcctccttttttttttttttttttttaaagaaaattatcacctggtttagatttaaaaatagcttttcaattgcagacttccaagtttgtctcaatgttctcagcactgtggggtcaacgtggatgcacagtgtgtgttaacagtgcttttgtaaccatctcgggattttttwaatgtcttgttatttctgtgaagtcacacaaaaaagcgactgctgaaatatgcaagaaattagagcaaggtgataggatctggagcaccttataaaagcctgaccttatgctttaatttgtttatctcccacacaatcttttcttttcgaaagtttgattgtgttgtagttggattttgtggattaggacaattatgctgaatgactttaaaatctctttgcatgcacttttagcttgggcacgtcttgtaattcctccgagagaaaccagaaagtccttcccagaattcccagagtagggctgtgcaagaaaaccacccaagaaagagcaatatga

SEQ ID NO: 740557 - DNA, 619 bp, Homo sapiens
ctagatttgttcaaacccttacaaaactggtagtgtcagaaatgaaaggagcaattcaaacaatatggaaactgagaaaaaaatatgagttcgttcagtaacactcacctcctccttttttttttttttttttttaaagaaaattatcacctggtttagatttaaaaatagcttttcaattgcagacttccaagtttgtctcaatgttctcagcactgtggggtcaacgtggatgcacagtgtgtgttaacagtgcttttgtaaccatctcgggattttttaaatgtcttgttatttctgtgaagtcacacaaaaaagcgactgctgaaatatgcaagaaattagagcaaggtgataggatctggagcaccttataaaagcctgaccttatgctttaatttgtttatctcccacacaatcttttcttttcgaaartttgattgtgttgtagttggattttgtggattaggacaattatgctgaatgactttaaaatctctttgcatgcacttttagcttgggcacgtcttgtaattcctccgagagaaaccagaaagtccttcccagaattcccagagtagggctgtgcaagaaaaccacccaagaaagagcaatatga

SEQ ID NO: 740558 - DNA, 614 bp, Homo sapiens
atgcatctctttgttttgttttgtctttagattgattcatgtaggcttatcacaaattgttataattaagcctctggtggtatttttgaaagcagaaagaaagtctgtgaagggcataggatcattttaaatgtacctgaagtctttagcaataagagaggatacactttagcagaaggrtgaagcatgttgttattgcagacttcttggataatagaaagcctcagaatttaaggttgtagtttctagaaatataaatagtaaccaaaaaccaaggacacatcctagccatgccaggggacttgctgagcttaacagtggtatgctggcaccaacttgcactggctcaggaaagccattgtgttcatctcttcctacctccacattgagtgatgtcatgttggtagtttgaaactggccatgttgggagtggttaaaccacagatatcatcaaacactacaaagtaaggtttgtttgtcttttcctgagaggtgattgttaaacatttgctaacacacagttaatgagggggtatagttttgagaattttaataacataatcagtggtaggtatgattgtgcactatagctgtactacttcaagcaacataat

SEQ ID NO: 740559 - DNA, 521 bp, Homo sapiens
gttgtactcggatttgaccttcattgctaattgttggtctgtgttcctagcttatggcttatttggacatacatttcttctgttaccacttcaaagcttttgtctagaaattagactggtaaaataatatagaagggttttcccctatgatatccttttcctttgatacaaataattgaaaattgggtatgatagcataaaaggacttaaagtttgaaagttttaagaaagatttggagaatcaggagtaaaagagaacaaatgcaygtgagtatgaaatattattttgcccaaaatgctacttaaaatggatttgaatttaggtttattacagaagatggttacacattaggtctttgaagttctaacatccagatgttctttaaaaatctattttaaagttctaactggagattttagaataaaattgccagaatgtgaagaggtaaaagaaaagtcagattggaaggatgctacaaaaaataaacttcaccatcaatgaccaggcagtgtgaatggaa

SEQ ID NO: 740560 - DNA, 632 bp, Homo sapiens
gctttccactcaaaataatccctacatcaagtggtatattttggggaggcagactctgctgtcctttaacgttaggcacagatcatttttggaaaagaccaagaagtatatgttctgaattctaataaaaatggaagaaaatacaattattaaaaatcaccgggagccaagatggctgaataggaacagctccagtctacagctcccagcgtgagtgacgcagaagatgagtgatttctgcatttccaactgaggtaccagattcatctcactggggagtgtcrgaaagtgggtgcaggacagtgggtgcagtgcatcgagcgtgagccgaagcagggcgaagcatcgcctcactcgggaagtgcaaggtgtcagggaattccctttcctagtcaaagaaaggagtgacagatggcatctggaaaattgggtcactcccaccctaatactgcacttttccaatggtcttagcaaacggcacaccagaagattatatcctgagcatggctcggagggtcctatgcccacggagtcttgctgattgctagcacagcagtctgagatcaaactgcaaggtggcagcgaggctgggggaggggtgcccaccattgctgaggcttgagtaggtaaac

SEQ ID NO: 740561 - DNA, 632 bp, Homo sapiens
gctttccactcaaaataatccctacatcaagtggtatattttggggaggcagactctgctgtcctttaacgttaggcacagatcatttttggaaaagaccaagaagtatatgttctgaattctaataaaaatggaagaaaatacaattattaaaaatcaccgggagccaagatggctgaataggaacagctccagtctacagctcccagcgtgagtgacgcagaagatgagtgatttctgcatttccaactgaggtaccagattcatctcactggggagtgtcggaaagtgggtgcaggacagtgggtgcagtgcatcgagcgtgagccgaagcagggcgaagcatcgcctcactcgggaagtgcaaggtgtcagggaattccctttcctagtcaaagaaaggagtgacagatggcatctggaaaaytgggtcactcccaccctaatactgcacttttccaatggtcttagcaaacggcacaccagaagattatatcctgagcatggctcggagggtcctatgcccacggagtcttgctgattgctagcacagcagtctgagatcaaactgcaaggtggcagcgaggctgggggaggggtgcccaccattgctgaggcttgagtaggtaaac

SEQ ID NO: 740562 - DNA, 620 bp, Homo sapiens
ttctgcatttccaactgaggtaccagattcatctcactggggagtgtcggaaagtgggtgcaggacagtgggtgcagtgcatcgagcgtgagccgaagcagggcgaagcatcgcctcactcgggaagtgcaaggtgtcagggaattccctttcctagtcaaagaaaggagtgacagatggcatctggaaaattgggtcactcccaccctaatactgcacttttccaatggtcttagcaaacggcacaccagragattatatcctgagcatggctcggagggtcctatgcccacggagtcttgctgattgctagcacagcagtctgagatcaaactgcaaggtggcagcgaggctgggggaggggtgcccaccattgctgaggcttgagtaggtaaacaacgtagccgggaagctcgaactgggtggagcccaccgcagctcaaggaggcctgcctgcctctgtagactccacctctgggggcagggcatagccaaacaaaaggcagcagaaacctctgcagacttaaatgtccctgtctgacagctttgaagagagtagtgattctcccagcatgcagctggagatctgagaatggagagattgcctcctcaagtgggtc

SEQ ID NO: 740563 - DNA, 574 bp, Homo sapiens
tatgatgtatcacactgatttatttgcatatgttgaaccatgcttgcatccctgggataaatcccacttggtcatggtgaatgatctttttaacatatcgaatttggtttgctagtattttgttgaggatttttgcatcaatattcatcagagatattggcctgcagttttcttttttgatgtgtctttgtyggttttggtaacggggtaacactggcctcatagaatgagtttggaggtagtcccttctctattttttggaatagtttaagtaggattgatattagtttttctttaaatgtttggtagaattcagcagtaaagtcattgagttctgggcttttctttactgggagaaattttattatggtttcatcttgtttcttgttattggtctgttcaggttttggatttcttcatggttcaatcttgtaggttgtatgtatctcggaatttgtctatttcttctaggttttccagtttattggcatatagttgttcatactagccactaatgatcgtctgactttctgcactgtaagttgtaatgtctcctttttcatctctgatttat

SEQ ID NO: 740564 - DNA, 574 bp, Homo sapiens
tatgatgtatcacactgatttatttgcatatgttgaaccatgcttgcatccctgggataaatcccacttggtcatggtgaatgatctttttaacatatcgaatttggtttgctagtattttgttgaggatttttgcatcaatattcatcagagatattggcctgcagttttcttttttgatgtgtctttgttggttttggtaayggggtaacactggcctcatagaatgagtttggaggtagtcccttctctattttttggaatagtttaagtaggattgatattagtttttctttaaatgtttggtagaattcagcagtaaagtcattgagttctgggcttttctttactgggagaaattttattatggtttcatcttgtttcttgttattggtctgttcaggttttggatttcttcatggttcaatcttgtaggttgtatgtatctcggaatttgtctatttcttctaggttttccagtttattggcatatagttgttcatactagccactaatgatcgtctgactttctgcactgtaagttgtaatgtctcctttttcatctctgatttat

SEQ ID NO: 740565 - DNA, 745 bp, Homo sapiens
ccaaaccagtctcatctctctcctggattattgcaataggcccactgttctctctgattcagcctttgccttctaaaagtctattctcaacacagttaccagagtgatcttttcaaatgtaatttctcctgcaaaactctgcaagcttcccatgtcactgaatctaaaactaatcaattatctagacctaactacctgtttacaaggcaattcagctcataggggaacatctagataacatcacaagaatacaattaaccatttccaaactgtggaaaattctagaagataaattactyagttttttccaacaggtgaatgccttaaaaagggagggagaactgttatagactaaaagatgtatcaaccaatcacaatgtgtggactttgtttggatcttgatctcaacaatacagttatacaaagatattttagcatatttggaggaaattgagtatggcttggttatgaaattatataaaagaattatgattaaattcatttggtgagataatgatatttctgttatgctttttaaaagttcatatctttgtaggtacatactgctgcattcaaggagaaatgacataatgtctggaatttgctttaaaatacagcaagtcccccactcctctatctcaaacacctaaataaaaagaaatgaacaaaagactaaaagtctgtgtgtgtggtggttggaacaagaatggcagaatactgataactgttgaaactggattatgtg

SEQ ID NO: 740566 - DNA, 540 bp, Homo sapiens
aaatcctgcttccgttatgtttctgctaactttcctctttcctacagagtttgagattttagaaataaaagtcaggtggggtgtggtggctcatgcctacaatcctagcactttgggagcctgaggcaggaggatagcttgaggctaggagttcaagaccaacctgggcaacatactgagaccctgtttctcaaaaaaaaaaaaaaaaaaaaaaattagccgggtgtggtgcctcgtrtctggtgcctgttgtcccagctactcgggaggctgaagtgtgatgatcacttgagcctaggggctgaagtgaccctatgatcacaccactgcaatccagcctgggcaacagagagagaccctgtctctgaacaaacaaaacaaaataaaaacaacaaaaaaaaaaaaaagaaagaaaagtcaagatgattaacatgctattgctgctttcagccctgccatacccctcctctgagcaatgaacacaaagcctgctacctgcttgagtccagaagggaaagggtgaaaaaaaaagaagaaaag

SEQ ID NO: 740567 - DNA, 541 bp, Homo sapiens
agggttttaccatattgcccaggctggtctcaaactcatgaactcaagtgatcccgccccgacgtcccaaagtgctgggattacaggcatgagccagcactcccagccaggtttcttttttgcgtggtgtaactgtcctaaaattgattctggtgatgcttgcacaactctgtgaatatactaataatcattgaattatataacttaaatggtgaattataacagtatgtgaattatttctcaataaaactgttagaatgagcctccaaagagcttatttatgtggattatagttatcaatgtctaccatattagaaattaaaactgagaaatttttaggccaggtgcggtggcttacgcctgtaatcccaacactttgggaagctggggygggaggatcccttgaggtcaggaatttgagaccagtctgagtgacatagcgaggccccatttttacagaaagtaaaaatattagccaagcatggtggtgcatacctgtagtcccagctactcaggaggttaaggcaggaggatcacttgg

SEQ ID NO: 740568 - DNA, 660 bp, Homo sapiens
ttatagcagtgaagaagatagattaagcttaagttctcatgtagcttatgttctgattggagaagaagtcagacaaatcaacaaaacaagattctctccagttaaaataagttctatgaagaaactgaagctgagtagagtgcaataaaacatgatgctatgaactgaattgtgtgctccacaaattcacatgttgaagccctaacccacaacgtgatggcatttggaggtggggcctttgggaggtaatgagatttagatgaggtcatgagggtggggcccttaccatgggactagtgaccttataagaaaagacagaacttgctttctctctccatcatttgaagatactgcyatggccatttgcaaagaaggaaaagagagggttcccaccagaacctgactatgctagcaccctgatctcaggctttcagactcctgatctgtgagaaaactcatttctgttgtttaagctatccagtctgtgacattttgttgtggcagcctgaattgacagaaacacatgggcctgccattttagattggatggtgtgggagggactatgtgaaaggctgatatttgagctaagacccaaatgttgagaaaaaggcagtcaagtgtagatctgggacgaaggaataagtttttgagtaagaggg

SEQ ID NO: 740569 - DNA, 660 bp, Homo sapiens
ttatagcagtgaagaagatagattaagcttaagttctcatgtagcttatgttctgattggagaagaagtcagacaaatcaacaaaacaagattctctccagttaaaataagttctatgaagaaactgaagctgagtagagtgcaataaaacatgatgctatgaactgaattgtgtgctccacaaattcacatgttgaagccctaacccacaacgtgatggcatttggaggtggggcctttgggaggtaatgagatttagatgaggtcatgagggtggggcccttaccatgggactagtgaccttataagaaaagacagaacttgctttctctctccatcatttgaagatactgccatggccatttgcaaagaaggaaaagagagggttcccaccagaacctgactatgctagcaccctgatctcaggctttcagactcctgatctgtgagaaaactcatttctgttgtttaagctatccagtctgtgacatttygttgtggcagcctgaattgacagaaacacatgggcctgccattttagattggatggtgtgggagggactatgtgaaaggctgatatttgagctaagacccaaatgttgagaaaaaggcagtcaagtgtagatctgggacgaaggaataagtttttgagtaagaggg

SEQ ID NO: 740570 - DNA, 606 bp, Homo sapiens
ttgtgtaatgccgtaaattacattcaatacccaattattaaacacagctttatgccaagcacagtcactatgttttccccagcaaacacgtttcttacactggttttgctacaccccagtgtcacccaaaggtgtgagagatttttgtaaaaaaccaaccaagtaaacaacaagttttgtaaaatttctatatctgtaaggcaaaatttacatgttacatttgtataacttgagaaagtgaaatggttggttattttttctagtcttgagtttaatggtgctagaactttctattaccagcagaggcgttttggcagttcgcatctgtgtaagagaaatccatatagctagctccgaatcagggagtgatccattttagagatttacgtggacaggaaatggaaaaccatccatcctygagacatctacgctttccatgtttctctttctgggaacacacctcttatattcttttctctgtgccactgatcaaagttcccacttgtcagggcagattggctttctctgctactctctcagctcacaattgactgaaaaaggccacctcattctcatctcaatgtaacctttcattaagatgcctgc

SEQ ID NO: 740571 - DNA, 623 bp, Homo sapiens
gaaactcagtaaactacacacaaaagaagttttggaagagaatcccaccctaatatttataaaacctagactaacaacatacacgctgcctttaatttagaatagaaaaggagttttcttccgaaaattcagaggccccaaggaacaggacaacatagactacactgacctttggctggctttgccaaacgcctgtggctcttgtaaacctgggctaaggtatttgactggcagtttttagtgacttgataactggtcagattggtcattgagtaaatcttttgaaaaactgacctagaccccgctcagtggacatgtaatgcatctgtgtgccatgctgaacacagttgactagcataaggcaaaggtaaccagtaacagctcayttaaaggtgtgcaagcaagaaaatgaggctgagctttagaagccagtctcactatgaagtttcataccatctaagcaaagaatagaagaattccaaagttgtactaaatttaaaagatgcacatttggacacaatttacacaatataaaatgttagtggatcagataatacatgatatttatctgtgatataaaaacaaatttatgcacagatgattacacaggctgcttgaccttc

SEQ ID NO: 740572 - DNA, 620 bp, Homo sapiens
aactttgcatatagtatcttctgtcttaaaaatcttttaaactctgatgtggtctaaatattctaaaagctaatttaaggcatggataaatctgcttatataatactgattttaccacataagtttcttttttcttaaaatggctgcttttctttaatgtatgaacaaaaatttccaattatatactaacatcaagttcaaatcaattccattaaaatttagactttctttacaagctacctacctccactagttttatgcaaaaatagtgagtagtaaaaccatttggttttcacagaattttaagatgacaccatttatttatggaccaagagctatgttcttataaactctactatttgtyctactggaatagtctatataactaggacaaatattattgtctttttacttctgcccttcatgagttttatccatctcaagaacacttaattttctccaggctataggcacaaatgttcaaactcattaaaattaactaggttgtgtatgaattttaaaaatactttgatcaaagaaggaaaaagagtcattagcttttggggggaaattctgacctggggaaattttcaagtgttttaaaaagttctttaacacac

SEQ ID NO: 740573 - DNA, 453 bp, Homo sapiens
ctgggtggcagagcaagtccctgtcttaaaaaaaaaaaaaaaatatatatatatatatacacacacacacatatatgtatatatatatatacacacatatatgtatatatatatatactctcaaatctgtttataaacttaaaatggttttataaacaagccccatctccacaaaaaaatccctaaacattagcatgaagtgaagtttactaatggttctaattctttgggcacttcacatcaaacaaaaactgggyaagtcactgacaatgtccagtgctgagctatcccgaaggagctcacagccccacatggaaaatggccacaaactgacctattcaatcagcatgatgcacaccatgattaagaccagaataagctgctatgggaacagagacgtggccctacctacctaaacagccaaccccacggtcattatataggtggtgttaa

SEQ ID NO: 740574 - DNA, 538 bp, Homo sapiens
atggtagaagttttgccaatggccatgtgaaagagctgatggaaggtaaactgacatctcctaatttcctcagtgcaatgatgccttcttttttctctgcagtatcctcagtacctaaaacagcacccagcacagcaaatgaatgaatgaatctaaacaaagacatagagacgagtccactatgtaaatctgaacaaatattttaagaaaagaaaaactagtttaaagaagaaaagcaaggccaggcacagtggctcatgcctgtaatcctaataccttgggaggccgaggtaggtggatcacttgaggtcaagagttcaagaccagactggccaayatggtaaaaccctgtctctactaaaaatacaaaaattagccaggcatggtggcagatgcctgtaatcccagctatttgggaggctgaagcaggagaatcacttgaacccgggaagcaggggttgcagtgagccgagatcataccactgcactccagcctgggcaacagagccagactctatcaagaaaggaagagagaaag

SEQ ID NO: 740575 - DNA, 479 bp, Homo sapiens
cctcactatcatataattaacctcaaataacatattttccttattaaagcaaacatgagttatcatgtgggcaagttctgatgtacttatatataaatacaaataacttataaattttctgatacatcaacttctaaggaargaataatagtttggctaacaatactatatgaatggcatttgctaagtatctctaaactcctttactgctttgaccaccatgggatacagaaaggaaattagttatagggtccaaaattaacatgggttcaaagttcatgagaatagattcacttggtatgaagagtgacatcaatgtcaaattaaattcgatacatctggaaaagttcctaaagtttgtaatttcagagggaaaattttgccaagattcttttgttttctctttaattctcattctaacaaaagtattcctttctttacccaaattgatatcaaaatatttagaaaattttgccttc

SEQ ID NO: 740576 - DNA, 469 bp, Homo sapiens
ccccggaggggggcgccggccgagacctgagacgtggcgctccctctctgccggcctcggcttcaggtacgtgcggttccctcggctaaatctggcccgggggatggggggcaggggccgtctggtcctccggaactcgaactttgtgattttgttctttctgtgtgacatcctcatccgttctgagggagaaactccttaaagaagacgagagagtcagtcgttgcgggttcttggaggagcactttgggggtgagactcccggctagttcgggtcgatttcagcgggattaagtcmaggaaatgaacaaatctgacgaatcagggaggccagagaaggcgtccccaggtagccacgctgagcgttaagagagaagtcccgtatggtcaaagtcattcgtccaattctgtgtcaattattccttgttgcacttttgcaggatccttgggccttactaagtactcaggt

SEQ ID NO: 740577 - DNA, 742 bp, Homo sapiens
agaaaatttctgcaaactatgcatctgacaaaagtctaatatccagcatctataaggaatttaaacaaatttacaagggaaaaatatcccattaaaaagccagcagaagacatgaacagacgctttttaaaagaagacatacatgtggccaatgagcatatgaaaaaaggattagtatcactgattattagagaaatgcaaatcaaaattacactgaggcaccatctcacaccagtcagaatgactgtaattaaaaagtcaaaaaaacccaacagatattggcaaggttgcagagaaaagggaatgcttakacactattgttgggagtgaaaattagtttacctgttgtggaaagccatgtgatgattcctggaagagctaaaaacagaactaccatttgagccagcaatcccattacttggtatatactaaaaggaatacacatcattctatcataaagccacatgtacatgaatattcattgaagcattattcataatagcaaagacatggaatcaatctaaatttccatcagtggaagactggatatagcacatgtggtacatatacaccatggaattctatgcagccataaaaaagaacaagatcatgcactttgtaggaacatggatggagctagagtccattatcctaagtgaactaatgcaggtacagaaaaccaaatactgcatattttcacttataagcaggagctaaatgatgagaacacatggacacaaag

SEQ ID NO: 740578 - DNA, 517 bp, Homo sapiens
tcttctgaattgacctatgatacaccagaacacctgggatcctgacttatatatgttatatattattgctgaaaagatcagaagatgttagcaaattggccaataaagcatagtttgctgaccctagatcaaatcawtaaaattgtctatactaaaggttgagaattcactggagtgttaattgacatatctaattctcattaaagaaaataaatgcttagttttcatttgtcatgcaacatggtaaaatagagtttggattaaatcaatttttgataagttttttttcaaaatacatgaataagtgctactaaaataagaattatgttatccttttggacccacccgagcccaagatcacccctgaagattcatgcttcaccccagcccacattcaggctccaggaatgcccttgtagaacctaacaacagaccagcccctgtggttccaagctccaggccaaccactatagaactagtctctaagtccactccagtggttgctggtgccattttg

SEQ ID NO: 740579 - DNA, 604 bp, Homo sapiens
tgtgcctgtattgagcgggaggatgaaagaaaaccatatttaatgtgtgctttctaatgactctctgctttaactgacttagttaaaaattatcttacctgactacaagtgatccccttgagaaagagagcttcatgcagtcaggcaagccgcagtcagggctgtcactgcttgagtttactgtcatgtgctcctgctggaaatcaatcagattccttattctttaaattacacacaggtggaaacctagagaagggctgggttgactggccatcttgaaggctgaaattggtggcatcagttgctctctgctaccctgacagatccataagccgtggwgttcatggttagagacagagcccttcaggccccaaggaagggtatgccatgggtcacctagggagggctgctggagaattcctctcttcacaggcagagaaccgaggctgtttgtccaagactcacagatgtttgaccacacactgaaaaactcagactccagtattgagaactcagtaggtgtttccttaccacctgttttctgaaaggatgcagggtcatctcagtttggaaatacaggttagtctgacaaacacacagtttt

SEQ ID NO: 740580 - DNA, 619 bp, Homo sapiens
cttagaaacgtatttagtactgtttctgccagtctaagccttaaaaaggtctgtagctcatttgggattgctgagagctgaggagctgctgttctgaatgtcttcgttttaacttttttttttttttcaagatggggtgaggtcttgctgtgttgcccaggctggagtgcagtggcctgatcgtaacttactgcagcctttgcatcctgggctcaacctgtctcagcctccccaggagctggaactataggygcatcccaccatgcccagctaattttttattttttgtagagatggggtcttgctgtgttgtccaggcaggtctcaaactcctgggctcaagcactcctcccacctggccttcccaaagtgctgggattacaggtgtgagctaccatgcccggcatatcttcagatcattcatatctggcacagacagttgaccttttttttagtcaacagagctggtttgcacaggagattgtaagtgggtctatagagatggaaagttacaggttccatctagtagaggctactagtttttgaatagagggagagaaatctattccaaaggaattgcttcctcaatccccactggccactgcttgtgcggtgccag

SEQ ID NO: 740581 - DNA, 645 bp, Homo sapiens
ttttccaaatgaagaggatacagacttttagtgacaaggtcctgttgctgagtctaagttgggtctttctgtttattgtacataatttcaccaacatacaaggtatagcatgagaaattaccagaaccatttctttagaactcataaacatttgttctgtgctccaggatttcctcatctttggctaatccctttggtgagtttaatcatctgttatattgtaatagttgctcattttcttaagtcatggagcatcgttgttcaaccacaaacatctctgcaccttggtaacacgagttctgtggtacatgaggatgatcgctaacctatgcccaggaacaacgcctactttgccctaagcactttgtcagggyacaaggcagtgagatacagttaaaatgaggtaggctccttcccttaaagacttttaagtcttattcgggatacacagtgtacacattgaaagcacttggaaggggagtagatatagggacattcctgcaaattaaggccaaggagagacaccatactacaaagaatatcaataaaagacatgtgaaggcagttggcaaatctccaggtatctccaggtcctcaatgtataacatgttaatatcaacatggatatatacctgcttttttcag

SEQ ID NO: 740582 - DNA, 557 bp, Homo sapiens
aaaagaaagctcctcaaatcttcaactctccgctgagtcataggtattgctcacaacttcaatggctatagcctccattgtgacagtgtgccctgaattctttgttgaggatgtgctggtgcagagagtaaaatcagcgggtgtctgtacttctatattaagctataaccaataatgaatattgacattttgttctactagatttatgtcccagctttggtctgtggtgtccagtttagcaagtgtaagcacctacgtgatttgctcattttctgaccagaaataagacggtacttcagataaacatattcttttcatttattaatgttaacccatttcaacagactcyaatacatcactggataatcagatcttgctaatttcttttaattttgggtgcctaggatctcctagatgatgcagagagaaatagtgattctaggtcagtttattgtactctttaacttaatgagattagttctatcattttatttctgaagcgatgttaagttttagttgatgcagtttgtcaagtaaaaaaaaaaatattgtttcta

SEQ ID NO: 740583 - DNA, 647 bp, Homo sapiens
catgatctcaaaggtggtaggtgggggtgagcagcatcacctccaactaacctcatccccttggacctggtaaactccttgtactttggggaggaatgtggccagagagaggaccatagtggagcccttgaaagcacaggctccagggcaaagtgttcttttgctcaattatatgggcattcttcttatgggtgtagttatttgcttattgctatgtaatgatttggatttaataatgctatattgaaagtgcaatggcctacagaactgagggatcatgttttagcttaaattcaatagaaaaaaatgactcctttataaaaaaaagtatttaaatttgtaagttgtcatccctatccactaagggatattaaatgtattaaatgctgggaaatatatatgcacatatatatttatatatgtatgtatgtgtgtgtgtgtgtgtgtrtatatataaaatagtgatcagagaaaaagacaaatgaagacaaacagcaatgaggataaaaatggtccaaacatatgaactcccagatgccattttggaggaaaataaaaatttccatagaaatcaatagataaggaacagacatttaagaaaatgtgcttggaacaagtgcacataaaataaataaaatttagtataa

SEQ ID NO: 740584 - DNA, 515 bp, Homo sapiens
gggatggggtcccaccaattcacatcacagacatcaaccagggcacattgggtaagcaggcaaccaattctgtcacataaagcatttatctttacattaggtatagctttaacattccgactaaataaaaaaaataagtccatggtcagtatctgagcacctgctctcttggaaagaggttaaaggcacttatataatatttaatgctgcagtcctctctattttgcactttkgtatttgaataatcccccttctgagtaacacattctttttttttagaggtgttaatagttgcaaccaggttaacgtcacgtcctgctggcctgggagccctctgctcttgaggtggctgcttagctattatcagctccatgatgggcttatctaaaagttacactgtcaggggacagtctttagacacttattttcaagtcagcctctcccagtttctccttacttcagagttatttaaaatggaagagatactacagagttagtatctcttactattagtc

SEQ ID NO: 740585 - DNA, 588 bp, Homo sapiens
tgagatcaaggtgttagcagggttggttcctcctaagggttgtgagagaatcatctgttccacgcttctcacctaccttctggtggtctgctggcaatctttggtattccttggcttgtaaatgcattaccctcatccctgctttcattttcacatagtgttctcctgtgtgcatgtctgcctctgtgtctaagttctccctttttataaagacacagtcattttgggtcagggcccaccctaatgacctcatcttaagttgatcacctttaaagacytattcaaaagtaaactgaggcacaatacagttttaaagagtttgagcaaacagcaattcatgactcaggcatgagtctaaaccagaagaggttcaggagctctaccaagggagcacaaggggtggggaggcttctacaggacaaacacagatataaagcaaataaaatagttgattggttacagttgtacaattgccttatttggtctctcccattggaaagcttctgagtcatttaacttacattgtgtttttctttaatataggcatttacaaaaagttgctgaagttaagttttgcctatgtttgca

SEQ ID NO: 740586 - DNA, 423 bp, Homo sapiens
gattccatgtcaaaaagaaaaaaaacgaagtagaaggggctattcctaattttatcacaagagctatggtaactgttaggaatgctgcttgggttagtatttttgtggttttcattgtccagagtacattatattgataataacagctatgattagaattgtagatgtggttgcttgtgaaaggaagtattggttcaatctaaatacacagataggtcctggccaagacatgcactcaggagagstttcaggagggattcaatcccaaactcctgctcccaaatgccaaggaactatccaaactgccaactcaagtcagcggaatgtagaacccaggcccggcagggctcaccatgcaacacagagcagcacactcagagcaccagctcctccagccagcagcgctcaccccacatgccagcc

SEQ ID NO: 740587 - DNA, 422 bp, Homo sapiens
aagatatattttacattattaaaataaatggaacatgtaatacttgcacagttcttgtaagaaatctctatccaaattagcttgctaattactgctgctatctcataacagagagagatcagctcaatgaggtcacctcaaatgaggtaatggagctataattggayatctttactgccaatcatttcttccctagaactggttagaaaaatggtcagaaaatccttgtagcaaacacttcttggacaaacctatctgttcttaaaaagaataatgatagatgagggtatttatatctcctcagacacatgagaaaaaaatctcagaagtaggaagaagccacaaactagtgcagcaacatttaatgttgtgtattctatagtctggagtagaaaattaagatagcaaaaccagccaggtat

SEQ ID NO: 740588 - DNA, 482 bp, Homo sapiens
cctcactatcatataattaacctcaaataacatattttccttattaaagcaaacatgagttatcatgtgggcaagttctgatgtacttatatataaatacaaataacttataaattttctgatacatcaacttctaaggaargaataatagtttggctaacaatactatatgaatggcatttgctaagtatctctaaactcctttactgctttgaccaccatgggatacagaaaggaaattagttatagggtccaaaattaacatgggttcaaagttcatgagaatagattcacttggtatgaagagtgacatcaatgtcaaattaaattcgatacatctggaaaagttcctaaagtttgtaatttcagagggaaaattttgccaagattcttttgttttctctttaattctcattctaacaaaagtattcctttctttacccaaattgatatcaaaatatttagaaaattttgccttctca

SEQ ID NO: 740589 - DNA, 517 bp, Homo sapiens
ttagcagttatcctaggcgtaaacatgaggataagattatctgctttgcctccttccctgaatttgtatgagaataaattgatgaatgtgaaagtctctggggtatgtggagtgatatttaaccatgaagcactataattaaaatctatagctgcattaattaaattacaactggattaacttaattagcttgattttttttytaatagagcactggaattagacaacagagattagaaatataatttgggtatgactggaagaaagaaatgtttgagacttcagagcattgtggggaagacctggggtgagttgggtgctattggagtagcagctctgggttctagacactctgtctccaacctctctgtgactcagtttcctcatctgtaaaatcggcataataatcactcttgatttataggactggtgtgaagattaaatgagtttatatttttaagtgattagaaatgcttggcacataatattaggttgttgctatgtgaccactgttgac

SEQ ID NO: 740590 - DNA, 649 bp, Homo sapiens
agcatcagattcataaaacattgcctgggtggctggctggctgtctcactgtcttgaggctgaagcaaggcacaggggaccaggaaggagacattagttgccaagtctctgctgacaagaatacttgcctccgcccttttagagcatttaacataagcaaaagaaacaggggaaaaagacttggcttgccagcaaaccattacacaaatctaaagatgtggtattaagttttgttcctgtaagtgttctttccatgactagccctattaattggtgcttcagcttcaaaactatttcagtttttatgtcacagaagagacttgagaatccaattagctacgtttattagaaacacttgaacatttttctacacattgttttcatgttaaataacayagtgataaggggaaaagttagaggaagtttgaagcgattgcattaggctttaattttccaccaagtgtttgcatgtatcctggacaaaccaactctgcaaatgcaaaaggaaactggttttttcactctttgggagaaagcacaaatgaaacagcccaattatagggaaataacaaagaacggtgggtaacctacttgacagacaacttaatttaactctattttcaatatctagaatacacattaagtagcc

SEQ ID NO: 740591 - DNA, 649 bp, Homo sapiens
agcatcagattcataaaacattgcctgggtggctggctggctgtctcactgtcttgaggctgaagcaaggcacaggggaccaggaaggagacattagttgccaagtctctgctgacaagaatacttgcctccgcccttttagagcatttaacataagcaaaagaaacaggggaaaaagacttggcttgccagcaaaccattacacaaatctaaagatgtggtattaagttttgttcctgtaagtgttctttccatgactagccctattaattggtgcttcagcttcaaaactatttcagtttttatgtcacagaagagacttgagaatccaattagctacgtttattagaaacacttgaacatttttctacacattgttttcatgttaaataacatagtgataaggggaaaagttagaggaagtttgaagcgattgcattaggctttaattttccaccaagtgtttgcatgtatcctggacaaaccaactctgcaaaygcaaaaggaaactggttttttcactctttgggagaaagcacaaatgaaacagcccaattatagggaaataacaaagaacggtgggtaacctacttgacagacaacttaatttaactctattttcaatatctagaatacacattaagtagcc

SEQ ID NO: 740592 - DNA, 614 bp, Homo sapiens
aatggaatactacacagcaataagaagaaatgactattgatagaggcaaacataaatgaatttcaaaataatttgttgattgaaagaaaccagacaaaatgagtatgtactatattattttattgattaaaattatagaaaatgcaaagtagtgatagaaagtagatacacggatgggagttggtgggcagtgggaaggggcagaggaaaggattaccaaaggcacaagaaaactcttgggtgtaatgcgtaagtgttcattatattgattgcagtgacagttttatgactatatatctatatatatatakagagagagagacacacacacacacacacacacgttgcaatttaccaaattatataccttaaaccagtagtttactgtatgtcaattatacctcaagatagctgtttaaaaggagatcaaattcagatgtagacaaataggtctacatctttaaagagataaaataatattgtgaaccaaattaatgcatctggatggcagggcaagtttaattcagattgtaaattcttcttaggcatcttgaaactgtggggaaactgggaagaaggaagccatatcaggtttatcacatatgttacatttg

SEQ ID NO: 740593 - DNA, 556 bp, Homo sapiens
gtcaggccctgaaggactcaaggctgaggtgctggactcagggcatgaaagctgcttcccaaaggggcctggacaccaggtgggccgtcagcactgcactgagagctgaacatggcctctgcccacagacacaagagccggtgggagggtccgtgccgaggacacatgtgcgtgtcccaaccctgggactcacgaagccctctcagatctggagttctcagcgccagtcatggccaaagtgtggctctgtcatcgtgggggtcctgagtgtggccsctgctgaacttgagatcccacaaattcccccaaaacagccggaaaaaaatccaggggcactccctacactgaagaccttaagggcctcaggccccacccactcacccctttccctggaagacaccaaaaatgcagatgccaacccagcggaggatgcaggggcaggatcctggtgggggctgggccgcatgggggcagggtctcatgggggcaggaccgcgtgggggcaggatcctggtgggggcaggatcctgggggtggaagggccgcctgggggcag

SEQ ID NO: 740594 - DNA, 586 bp, Homo sapiens
ccaaccacagcttgtctgctgaagttgcagataatttcaggtcacattctttatcatttgcatgctctttatcatttgcattatttttgaatgagtctaaatcatttcaaaagcatctggtcttcctagggtgctttcgaaatgaattagcctcattcaaaaaaaaaaatattcaccactaaggttttaaacagcaaatgttcgctgtgataacgtcttagagttgtgaattactgtagascacacaaaacacttcttcagtattacaccttacccctccaaagtgcctgtggtgtaggagtcagtcactcctatctctagaaaaggatggtggctaggagagttgtctgatttttacataatcccagaaagtacttaaggtagattttaaagatcgtggaatacagaccgatggcataaagggaaaagggaggggaaagaaagaaggaatgaaatgaagccagaggttctagtcatgtggcaagtcacttacaaggatcggacaatgctccgaaactgagcaagttaagggtgtgtgtgtgcacgcgtgcgcgtgtccgtgtccatgtgagtgcgagtgtaaata

SEQ ID NO: 740595 - DNA, 586 bp, Homo sapiens
ccaaccacagcttgtctgctgaagttgcagataatttcaggtcacattctttatcatttgcatgctctttatcatttgcattatttttgaatgagtctaaatcatttcaaaagcatctggtcttcctagggtgctttcgaaatgaattagcctcattcaaaaaaaaaaatattcaccactaaggttttaaacagcaaatgttcgctgtgataacgtcttagagttgtgaattactgtagagcacacaaaacacttcttcagtattacaccttacccctccaaagtgcctgtggtgtaggagtcagtcactcctatctctagaaaaggatggtggctaggagagttgtctgatttttacataatcccagaaagtacttaaggtagattttaaagatcgtggaatacagaccgatggcataaagggaaaagggaggggaaagaaagaaggartgaaatgaagccagaggttctagtcatgtggcaagtcacttacaaggatcggacaatgctccgaaactgagcaagttaagggtgtgtgtgtgcacgcgtgcgcgtgtccgtgtccatgtgagtgcgagtgtaaata

SEQ ID NO: 740596 - DNA, 624 bp, Homo sapiens
ctaaggttactttatctcgaagacttaagtaatggttaccacctcgtttatgaaacaatacacctttccatctaattcaaaggcccccttttctagtgcttgccataagcactagactcagatctgtttctacacgtttatttctgccttgtggatctgtgtcctaaaccgtgctgttttaattactggaccttctgagctacattttaatgtccgacagtcactttctcaggttttttcatttctaaaagttttgacaatttttaaactttaattttttcatataagtttgtttgaaatttatatggaaaatacattttgtttcggttccaggaaacctggaatttggagcaaarttatattaaatatacacctcattttgagagtggccgatagcgtttccctggcatcccaactccgctgggagccacaataaggacccagaagtcagtcttccccaggtgggcagaggatgcaagttcctgccttgctcttcctgagttgccccagaagctccgtccttcacggaaacgtgctgggggcagcgccagagttccaggccagggaaggccagccgggttctccagctcaagaggcaggcagcttcctgggtcagaaaaagta

SEQ ID NO: 740597 - DNA, 624 bp, Homo sapiens
ctaaggttactttatctcgaagacttaagtaatggttaccacctcgtttatgaaacaatacacctttccatctaattcaaaggcccccttttctagtgcttgccataagcactagactcagatctgtttctacacgtttatttctgccttgtggatctgtgtcctaaaccgtgctgttttaattactggaccttctgagctacattttaatgtccgacagtcactttctcaggttttttcatttctaaaagttttgacaatttttaaactttaattttttcatataagtttgtttgaaatttatatggaaaatacattttgtttcggttccaggaaacctggaatttggagcaaaattatattaaatatacacctcattttgagagtggccgatagcgtttccctggcatcccaactccgctgggagccacaataaggacccagaagtcagtctyccccaggtgggcagaggatgcaagttcctgccttgctcttcctgagttgccccagaagctccgtccttcacggaaacgtgctgggggcagcgccagagttccaggccagggaaggccagccgggttctccagctcaagaggcaggcagcttcctgggtcagaaaaagta

SEQ ID NO: 740598 - DNA, 624 bp, Homo sapiens
ctaaggttactttatctcgaagacttaagtaatggttaccacctcgtttatgaaacaatacacctttccatctaattcaaaggcccccttttctagtgcttgccataagcactagactcagatctgtttctacacgtttatttctgccttgtggatctgtgtcctaaaccgtgctgttttaattactggaccttctgagctacattttaatgtccgacagtcactttctcaggttttttcatttctaaaagttttgacaatttttaaactttaattttttcatataagtttgtttgaaatttatatggaaaatacattttgtttcggttccaggaaacctggaatttggagcaaaattatattaaatatacacctcattttgagagtggccgatagcgtttccctggcatcccaactccgctgggagccacaataaggacccagaagtcagtcttccccaggtgggcagaggatgsaagttcctgccttgctcttcctgagttgccccagaagctccgtccttcacggaaacgtgctgggggcagcgccagagttccaggccagggaaggccagccgggttctccagctcaagaggcaggcagcttcctgggtcagaaaaagta

SEQ ID NO: 740599 - DNA, 605 bp, Homo sapiens
ccagggtcacctaacagtttggatccagctggtccaccttatagactcactcacagccttttacttcaggctctgcctgctgcgcacattacaaacatctgtttctagcgatcagggactttgtttaaatcatgtcacgctttgccacacggggaaagtccattcactaagagcctgtgaggtgtgatgttgctaatcacaggtctgttttgtgggaaatgtgtaggratttatagtgtctctagtggtggatattagacaaaccgatgggggatattctggtctgcgtgtttgctgtgggatgtcgaagggaatgggtggacgtagctgaccagctggaatgaaagtgggaacagggagcaggatttcgcgtgtgaagaccctaatccccagcgcctcattcagtggcttgtattaattttccactggaggttggagctgttcctttgcatcatccccctgccaagcatccagggtgctttccatgtaagcgtcatgcccaggtggtgtctgttgtgtagtatactcctgagcactcacgcagcctcccaggagctgcctgttcctgggatctgctgacaagcagaaaccacggtaatggtgct

SEQ ID NO: 740600 - DNA, 650 bp, Homo sapiens
tgtcagataaataatctgcaaatattttctcctgttatgcaggctgtctttccactctgttgatcatttatttcgctgtgcagagcttttttagtttgatatagtttcatttgtctatttttgtttttgctgcctgtgctttcagagtcttgcccataaaatctttgctcagaccaatgtctggaagtatttctcctatgtttgttccaggagtttcatagtttgggtctcacatttaagactccacctatttgatttcattttttgatatggtgacagataggggtmtagtttcatttttctgcatattgatatccagttttcctagcaccatttattgaagatactgttttcttcccccaatgtatgtccttggcacccttgtcaaatatcagttggttgtgaataggtagatttatttctgagtcctctgttccagtccatctatgtctgtttctatgtcagtaccatgctattttgtgacaacagctttgtagtacattttaaagtcagatagtgggatgcttccagctttgctctttttgctcaggattggtttggctatctgggttctcttgtggttccataaaaatgtggggattgtttttttatttctgtgcagagtgtcattggtattttgatagggatag

SEQ ID NO: 740601 - DNA, 619 bp, Homo sapiens
caaattacaatgagattttgagtaagaagagcaatgcctagcagggtgtcaggctcactggaggccttaagaaagtcttactgaattatgttaaccaacttacttttaactcattaataaaagtttttctaaagctaattttaaasagtttcaatttaatgtcttttgggacttaaatcaaatgaatatatgtaacatatgtaatttttttttaaaaaaagaaaccagcttttattttttaaagaccgaacaaagaaacaagtttttctttggatttggctaagctgggatgctaataagatggctgtttgcaaatggaccagtttgtgtccacagagtgatatatataggctctcatataaatatgcatacacatatgtatgtacatgtattattttctccctctttctttttctccttctctctttcatttgttctttttttaaactcttctatcttttggaagctatgagggcaaacctaaatatgttgcaaggtaactttatttttatctaatgaacatgcaacagcccaattgaacaaaataataaatggtacgttttaagtattaacgtctatttgatctgaagtgtggaaacaaagtcatttgagctactta

SEQ ID NO: 740602 - DNA, 526 bp, Homo sapiens
gaggtggtctcagatggagatgaataaactgttggaaactggagttaaaggtcactctctacacaaagagactggtggcatttacccctgccctagagatctgtggaaccttgaattttagagagatgatttagggtatctggcagaagaaatttctgagtggcaaagcgttcaagaggaagcagaccataaatgttcagaaaatttacagcctgacaatatgatagaaaagaaaaacccattttctgaggagaaattcaagctggctgcagaaatttgcataagtaatgaggaaccaaatgttaatcgccaagacaacggggaaaatgtcttcagggcacgtcagagtcttcaaagcagcccctcccatcacaagcccagaggcataggaggaaaaaatggtttcatgggctgggtccagggccttgctkctttgtgcagtctcgggagtggtgccttgcattccagccatggctgaaaggggccaatgtacagcccaggtgattgcttcagagggtgcaagtcc

SEQ ID NO: 740603 - DNA, 597 bp, Homo sapiens
tgggaacctccacctagatttaagaggatgtgtggaaacacctggatgtccaggcagaggtttgctgcaggggcagagccctcatggagaatctctgccagggcggtgtggaagggaaatgtgtggtgggaacccctacacagagtgccactggggtactgcctagtgcagctgtgagaagagggctaccatcctccagcacccagattggtagatcaaccaacagcttacactgtgtgcctagaaaagctgcagacactcaacaccagcccatgaaagcagctgggggggaggctgtcccctgcaaagccacacgggtggagctgcccaagaccatgggaacccasctcttgcatcagcgtgacctggatgtgagtcttggagtcaaaggagaacattttggagctttaagatttgactgccccactaaattttgggtttgcataggtccttgtccccctcattttggccaatttctcccatttggaacacgtgtatttacctaatgcctgtacccccattatatctaagaactaactaacttgctttttattttacaggctcttagacagaagggacttgccttgtatcagatga

SEQ ID NO: 740604 - DNA, 658 bp, Homo sapiens
gctttttattttacaggctcttagacagaagggacttgccttgtatcagatgaaactttggtatgtggacttttgagttaatgctgaaatgagttaagattttgggggactgttgggaaggcatgattggttttgaaatgtgaagatatgagatttaggaggtgccggggcagaatgatatgatttggctgtgtccttgcccaaatctcatcttgaattgtggttcccataatccccacgtgatgtgggagggaacaagtgggaggtaactaaatcatggggatgggtttttcctgtgctgttctcatgatagtgaagaagcctcacaagaactgatggctttataaaaggtggttcccctcacatgctctgttgccaaacgccatgtgaagaagtatatgtttgcttccccttctaccatgattgtaagtttcccgaggcctccccagccatgctgaactgtaagtcaattaaactacccagtcttgggtatgtctctattagcagtgtgtgaacggamtaatacaaaaggcttactctatgcttttcattttattcagtctttcagctttgtttgattacacatagagcaccaagtttcctatttttaataaggaagaaaaaaccttatcaataaaattgcagttttgatgaattt

SEQ ID NO: 740605 - DNA, 544 bp, Homo sapiens
ctctcatatcaataaaattaaaattctaactttcaatgtctattataatctgtttatagactactcagtctctaaatgacataggcactgattctcattttttattactgaaagatattgtgaatgaaaagcctttaataaaggtattttataatcccccatttattatttattatgatggtgattatcaattagtttttttttatatatttgatgtttgaaaactgtcattgtttccacattcaagcactgaatgcatttaaagtgtgcatttctttatgtattattaaatgttagcaccattttctatgttcattgtaatktataaagttgtattattgggtatttttaaatatttttatttttatttttttaaagcagctgcactgagaatgttcctcgtgtggctggtgcacacggagacactctcactgccagcaaagcagggagagctgacaaacaaccacatagatattttttaaatggttcatgagaacttttatctattaaggttagtacctgctatagtttggatatttgaccc

SEQ ID NO: 740606 - DNA, 484 bp, Homo sapiens
caatgagaccgtttaagcagtcttgggaaatgaatgagaattgtgataggtaacactgagggtggtagttggaaagaagacattctagactgaatgaacaccttatgtaaaaacacacagtgagagtggtgaacagcaaaactgttatatgactagaacatakaatgttaaggtaggatgtggttgaacatgccaaaaagtgtgcataaacacatggacattaaatatcaaaaagattttatatagaagtaacaaatcatatataaatcttagtaattttactctggcattgacttagagggtacaaattgaaggtaggtatgcccttatttgagaaattatgtgagtctgaacttaacagttgaaccaagattgtactacaaacattatgatgtaaacattagaaaacaggatttttttttgctttgatcaaaattgtatattcagcacccagaagagtacttggcacataaattgaatgact

SEQ ID NO: 740607 - DNA, 589 bp, Homo sapiens
cttccatggtcgaaccagcaggaaattgaatccctgaatagaccaacaacaagttctgaaattgaatcagtaataacaagcctacggaccagaaaaagctcaggaccacatgggtttatagcttaattcttcaaaacataaagagctagtatcattcacactgaaactattccaaaaaattgagaagatactcctctgtaattcattcattgacgccaacatcaccttgataccaaaacttggcaaagacataagaaaargaaaaaaaactccaggccaataactctgaggaacactgatgcaaaaatcctcaacaaaatacttgcaaccagaatccagcagcacatcaaaaagctaatccactaaaattaagtagtctttatcctgagattcaacattgttttaactcacataagtctatagacgtgatacatcacacaaatagaactaaaaacaaaaactacctgataacttcaatagactaaaaaaagccttttgataaaatttagcatcccttcatattaaaaaccctcaatgaactaagcattgaaggaacatacctcaacatagtaacaatcatctataacaa

SEQ ID NO: 740608 - DNA, 433 bp, Homo sapiens
aatagtgaagacatggaatcaacctagattcccatcaacagtggaatggttaaagaaaatgtcatagcatatacatcatggaatactatacggccaggaaaataatgaaatcatgttcttggaagccatacaaatggtgctaraggccattatcgtaagtgaattaatgcagaaacagtaaatcaaatactgcatgctctcacttataagtgggattttaaccttgagtacacacggacccaaagaagagatcaacagacactgggtcgacttgagtggagggtgttagagggtgaggatcaagaaactacctattgggtactatgcttattgcctgggtgataaaatagtctgtacaccaaacctccgttacatgcaatttacctatgtaacaaatgtacacgtatacccctgaacctaaaataaaagttag

SEQ ID NO: 740609 - DNA, 567 bp, Homo sapiens
aatctgttttttgcctctttcatcttctggtggctgcagcattcctttgcttgtggctacacaactcctatctctgcctctgtctcctcgtcttctatgtgtataatgtctccatcttatctctcctaaagaacatttgttattggatttaagtccaartaaataattcaggataatctccttatgtcagtgttcttaactaaatgatatctttaaaaactttttgtaggaaggtaatatttttatgttccagtcattggaaactgatatcttttggtgtttttttttttttttttttttttttttgagacagcatctcactctgtcacccaggctagagtgcagtggtgcaatcctgactcactgcagcctccaactcccaggctcaggtgatccttccacttcagcctcccaaggatcttgtactacaggcaagtgtcactacgcttgactaatttttgtagagatggggttttgccatgttgcccaggctggtctcgaactcctgaactcaagtgatgtgcccatctcagcctttcaagtgctagaattacaggcatggaccac

SEQ ID NO: 740610 - DNA, 562 bp, Homo sapiens
ttagctgtcatgtgaattcctactcagtgccagaccatgttgcaggaagtgtaaatatagattgatcaagacaatcagaaaaactgctcttgacatgtgaattagggaaccatatgattacatacagacatatgtgtaatatcagacagtgattagtgctttgaagtaaatgaatccagaaagaatacctggggatccgtgtgaggtgagagtagagtgttgcagsggattgtcaggcaagatttctcttaggagacagcatttgagaagtgcaagtgcctgtgggccaagggttccaggcacagggcgcagctagtgcaatggtcctacggccagaaagaattcagctttggttcatttttggaaaacagtctccagtgggtcatcccctcagagctgctccagtttccagatgagagagaatggtgggcaggatgaaggtggggagcacggaggtaagtctgagtagggatatatttgaacagattctatgttttgaaatgggctcagactgaatgaaatatctcaaaaatgaatacttgatgggcagcctgagagagaa

SEQ ID NO: 740611 - DNA, 613 bp, Homo sapiens
aaatatgtacaattattaaatgtaaactaaaaataaaagggaagaaaagaaatctataaacttggaacatccatagggtagatctcatctatatccttcatccataatcaagttttttatagaggagaactccagagaacttccttcatttatctctacattttcggattatgcttttctcctttcgttaaaaatcacgtctacgatactttataagttgtcctaaaataaattctttctctatgttcaatcaaaaaagaaaagatttgacttaatagtaggtataagaggtagagaaagttaatagaaaacaaaggaagatttttattaacctactcaacaaatccatatatttaaattagacatcctatctgtaaaggggcagaatatttaatgaccatcacttaaattcattatckgtgaaatattacttaactagcacattttcatcaaaaaattctctgagtgagcattgtgcttccgccttagatatatgacatgataatttccctttttttgtaagacattttatactacttttatattatccaaccaccttctacagaaaaaaagatacgtgactaaagtctatactttgtctgatagcattatt

SEQ ID NO: 740612 - DNA, 621 bp, Homo sapiens
cccaatttatgagtaatttctgacttatacacactagattcgtggatgattcacacacacaagtcaatgtctagaaaataagcctcttatttcacctttgcctgtgtctattaattctcctctctccactcccttatagtatccccagcagatatttcagtactttaaaaggcctcatgttcttttgtgcctcagggcctttgcacatattgcccccccccmcccccccgcacatcattctttgcctcatggatgtcaacatatcattcctgtcttagctgaagtgccactctcaaagtggtcttcatgaccacctaatctaacatagccccctctgtgctcacagctccctactccttcctgcagcacccatcataatttctatttgcatcgttctttatgtgggtagattacatccacctttcacattagacctcaaatattattgactcagaagtgacatctttgtttccattgatattggaaatacctggtatggtattaaaaaaaaaaagtagtcacatgagtgaatcaatatgattagaaccctggaggaagaacttcctctgtatcaaatggaatgaatttctcactttagagacacacagacagaccacatga

SEQ ID NO: 740613 - DNA, 621 bp, Homo sapiens
cccaatttatgagtaatttctgacttatacacactagattcgtggatgattcacacacacaagtcaatgtctagaaaataagcctcttatttcacctttgcctgtgtctattaattctcctctctccactcccttatagtatccccagcagatatttcagtactttaaaaggcctcatgttcttttgtgcctcagggcctttgcacatattgcccccccccaccsccccgcacatcattctttgcctcatggatgtcaacatatcattcctgtcttagctgaagtgccactctcaaagtggtcttcatgaccacctaatctaacatagccccctctgtgctcacagctccctactccttcctgcagcacccatcataatttctatttgcatcgttctttatgtgggtagattacatccacctttcacattagacctcaaatattattgactcagaagtgacatctttgtttccattgatattggaaatacctggtatggtattaaaaaaaaaaagtagtcacatgagtgaatcaatatgattagaaccctggaggaagaacttcctctgtatcaaatggaatgaatttctcactttagagacacacagacagaccacatga

SEQ ID NO: 740614 - DNA, 627 bp, Homo sapiens
catgttatttttaatagaagagaaatagtgtaaatatttaatgagacatattgttaaaggatattgtttcattgaaaaaaatgattattttaaattagggtagaacattcaatacactttattttaaatgcagatttccttctccaaactctatttcttccaataagatcaagtatattaagtcatatatccagtcagcaagttggtcatggcacagttagtacatgtactgtgcctcccaccttcttaattcctaacatgagtgtgaatgagtttgaagtttgaatgctgtagtgcttttttactatagtactctgttaggtratctggtgattgttcctatagttgctatgtgcttggtcaaccactttgctaagtcatctcagctgtactactcgaggattttatgcaaatcagctccttcttcaactgccttaaaacaggaagcttttctctatttctgaaactccttgaacttccttccttagaatacttcccactatagtcaaacaagtaggaacaaagagaatggtccaatccttcttccctctacctgataatatagtaatcattgccgtgaaatcattaggctgatgcttcacagcttataaccttcatcttattcat

SEQ ID NO: 740615 - DNA, 538 bp, Homo sapiens
ttatatatactatgtatacacattatatatcacattttatttatccattcattcgttgatggacacttaggttaattccatatctttgctattgtgaacagtgctgtaacaaacattgggatggaggtatccctttgatatattttcctttgatttcctttcctttggataaataaatacccagtagtgggattgctggatcatatggtagttctattttcagttttttgagaaatgtccatgctgttttctgtagtggcsgtacaaatttatattcctaccaacagcttataaattatattaagtgaaataaaccaggcacataaagaaaaatattgcatgttctgactcataagtgggagcaaaaaaaaaaagttcatcttgtggaagtagacagtagaatgaggggtggagaatggttgggagcaagcggtagggacaaagattgaggtcagttaatgggtacaaacatagagttagacagaataaataagccctaatgttggatagcagagtagggtgactgcagttaacaata

SEQ ID NO: 740616 - DNA, 538 bp, Homo sapiens
ttatatatactatgtatacacattatatatcacattttatttatccattcattcgttgatggacacttaggttaattccatatctttgctattgtgaacagtgctgtaacaaacattgggatggaggtatccctttgatatattttcctttgatttcctttcctttggataaataaatacccagtagtgggattgctggatcatatggtagttctattttcagttttttgagaaatgtccatgctgttttctgtagtggcggtacaaatttatattcctaycaacagcttataaattatattaagtgaaataaaccaggcacataaagaaaaatattgcatgttctgactcataagtgggagcaaaaaaaaaaagttcatcttgtggaagtagacagtagaatgaggggtggagaatggttgggagcaagcggtagggacaaagattgaggtcagttaatgggtacaaacatagagttagacagaataaataagccctaatgttggatagcagagtagggtgactgcagttaacaata

SEQ ID NO: 740617 - DNA, 538 bp, Homo sapiens
ttatatatactatgtatacacattatatatcacattttatttatccattcattcgttgatggacacttaggttaattccatatctttgctattgtgaacagtgctgtaacaaacattgggatggaggtatccctttgatatattttcctttgatttcctttcctttggataaataaatacccagtagtgggattgctggatcatatggtagttctattttcagttttttgagaaatgtccatgctgttttctgtagtggcggtacaaatttatattcctaccaacagcttataaattatattaagtgaaataaaccaggcacataaagaaaaatattgcatgttctgactcataagtgggagcaaaaaaaaaaagttcatctygtggaagtagacagtagaatgaggggtggagaatggttgggagcaagcggtagggacaaagattgaggtcagttaatgggtacaaacatagagttagacagaataaataagccctaatgttggatagcagagtagggtgactgcagttaacaata

SEQ ID NO: 740618 - DNA, 632 bp, Homo sapiens
agcaaacaggattttttcttatatagactttttttagcatttttatcgattcacctaaaatgtttccataatttgcccacaaggcagaatgaacatagactgttcttgaatatgatactcaagcttcaaagctgtaaaatactctcttctttcataggtactgaaaggtttgtctttggctatgttttctaaaagcaacccccttcaaaaatattagaaaataaatgaaaataaaatgctagtattaattatgaatgagaaacttaaactgataaaagtaaaaattgttcgacatttttagagctgtaatcttcagtaaaacagctaacaactgattgagagttaattataaggggtttccccatagaacatggaagagtgcaaaggagtactcagtagctgtttaatagcaaagtttctaccattgaaaatgwcaaaatccaggaagagaacacaaaacaaagaagaaaaaatgctctaagtctaggacctcaagagccatacaggtagcaaaatagaaatggttatttcaagcctgagctctgcatctaactaatgatgtcaacagaagtgtttaccttgtgttgttgttttgcagaatgagttaatatattgggacctacttttaggaa

SEQ ID NO: 740619 - DNA, 559 bp, Homo sapiens
ctctctttaccttattactccttttcatcctttgcacttagttgaagtgcggtgactccccaagtgactcatttcattttatctcatttccaatagctcctgtcggctttgattttggttttagcagacggagcctaaatccttgcttggccatgggatttgggtttctccagcagccagacgtaccagtgttggccacacggttgtgagccacctgtggctaacacctaaatagacaggtaaggatgaagcagttcatgaccaagaggccttttggaatcagctgtgaaaggacccatttaacattgcataacccaggctttacttcattggatggctttaatatatctgggagaggaaaaaggggatttagtagtgyttcctctggatgcacaaataatgaaaagtgctgtgagctcccgagtgctgtatcattggttacccccaacagcccatctctgtgccctggaggagcaagagggaaacccttcacagatgcttgaaatttggtggacaaacaggaggaacactcaggaaaacaggagcagaatttagggcc

SEQ ID NO: 740620 - DNA, 606 bp, Homo sapiens
tgtaaagcagtaagaatgggtgagatccctaagggtaaatggcagagaacagactggagacctaagccctggtacactctggccttcagaggggtcaggcaagcaaggcatcctgccaagtcctctccctctgaagcactgcatgctgtggtctgcagcttttattctcccacataaatacaataaacagaagaaaaaatatgtactttcattcttctcttcctctctctagaaatgtacatgctagtaggtagcttagtaagagctgtttagatcytccagactcttagaatttgttaagtttaccatgtttaatgaggaacattgagagctcagctgtgcttgctataaactgatgatgcatccataaataaatgcaatgtccagagagctcaaatgtccaggcttaatcttatggcaaatcagaatgcaagcaaccaaaattgtttttaatatcaatgttccaattcacatcaacacaatatttgtggttctaggagataaagggaagcattttactcagttgttacccaaatgagaagcagagcaggaaaatggcattacttatgcttttcatattttaaaagttttcatattgttagaaaa

SEQ ID NO: 740621 - DNA, 610 bp, Homo sapiens
tttcacctgttaaattcttaacatttttacaagattgtacagttttgagagtaggaactgagttttcattctcattttccatgtcttcaatatagtgggaattccacaattctgttgagtaaatgaatggggtcataagtcattgtaagcaattgacttccatacatcattgatgatttaaatmagtggttcccaagtcggggtgattttcctcctacaggacatttggcaatgtctggagaccacaactggctagggtggggtgagagattgcctatttgcatttactgggtagaaactaaggatgctgttagcagtggtttcttaagatgctaccctgaacccaaggcttcagtaatatttcctaagaaatgctattgtgtatcaagaggtggccaagggaccagatcttcaaagccaccattctagctttaaccagagaagctctttaaaaatcttagatatttagatcttgagttcctttatagatcttgatttaaaaatgtccgccattaaacaagccaacaaaaatcatgccactactgagaaccaataagttactacataaagtgaactaggaaacgcagaagactataatgggcaaagaacg

SEQ ID NO: 740622 - DNA, 610 bp, Homo sapiens
tttcacctgttaaattcttaacatttttacaagattgtacagttttgagagtaggaactgagttttcattctcattttccatgtcttcaatatagtgggaattccacaattctgttgagtaaatgaatggggtcataagtcattgtaagcaattgacttccatacatcattgatgatttaaataagtggttcccaagtcggggtgattttcctcctacaggacatttggcaatgtctggagaccacaactggctagggtggggtgagagattgcctatttgcatttactgggtagaaactaaggatgctgttagcagtggtttcttaagatgctaccctgaacccaaggcttcagyaatatttcctaagaaatgctattgtgtatcaagaggtggccaagggaccagatcttcaaagccaccattctagctttaaccagagaagctctttaaaaatcttagatatttagatcttgagttcctttatagatcttgatttaaaaatgtccgccattaaacaagccaacaaaaatcatgccactactgagaaccaataagttactacataaagtgaactaggaaacgcagaagactataatgggcaaagaacg

SEQ ID NO: 740623 - DNA, 641 bp, Homo sapiens
gataaatggcaaacaacaacagcttgaggcacatgaattggaaatttattaccttgtagatagaagataaaaagatttagtgtagaaggatagaaaataaattatccatctgcctactgaaagaatcaattttatctgagatttgtttggagaagcttatagaatagagtgctttcaacgttactttcatcctgtacttcagccagtcaaaatattagttaatgctgagagattatagacgttttaagattcagaacataccatgtgctcttaggaaattccttatgaaaatgctgcagcaatatggastggaagtcagaagtggtggaggccccaatccaggagaacagagaacaagggtccaaggatgaagttgggccatgagtctgtagaggcttaagtccagttcagaattgtaaggcagactcaggaataaaagtcagatctattacaatagacaataataagaaatttatcatatgattaagatcaattgcatgaacaaaatatgtgtaactgggtactccacataaaaaagaggcaaaaaaaaaaaaaacaaaaaaaacaaaaacaaaacaaaagcatttccccaatacaaaacaatttgctcaggatcagatgctggtgagtcaatcacactg

SEQ ID NO: 740624 - DNA, 641 bp, Homo sapiens
gataaatggcaaacaacaacagcttgaggcacatgaattggaaatttattaccttgtagatagaagataaaaagatttagtgtagaaggatagaaaataaattatccatctgcctactgaaagaatcaattttatctgagatttgtttggagaagcttatagaatagagtgctttcaacgttactttcatcctgtacttcagccagtcaaaatattagttaatgctgagagattatagacgttttaagattcagaacataccatgtgctcttaggaaattccttatgaaaatgctgcagcaatatggagtggaagtcagaagtggtggaggccccartccaggagaacagagaacaagggtccaaggatgaagttgggccatgagtctgtagaggcttaagtccagttcagaattgtaaggcagactcaggaataaaagtcagatctattacaatagacaataataagaaatttatcatatgattaagatcaattgcatgaacaaaatatgtgtaactgggtactccacataaaaaagaggcaaaaaaaaaaaaaacaaaaaaaacaaaaacaaaacaaaagcatttccccaatacaaaacaatttgctcaggatcagatgctggtgagtcaatcacactg

SEQ ID NO: 740625 - DNA, 624 bp, Homo sapiens
gttaaactaaagaatatccaagaaataattgaaataaaactcaggaaagcgattatatcggggtgaggggagatatgattgagaaatctccaaaatgcaacattctattctctttctttctctagtattcactttatatctctcgtccattattttttgtcttatatgtgctatgtattttctttgttcatatgttctttcttagtgaatacttaaatttttttaaataccattacttttaattgtatgacacataatttactaatttattgagtgagggtgtattagtttcctagagctgtcataagaaaatacyacaaactgggtggcttaaaacaatagaaatttattctcccacatttctggaggctggaaatctaaaatcaagtgtcaagtggcccatgttctttgggagggctcttagagaagatgctttccttgcccctccctcgcttctgttggtggctggcactcctcggtcttacttggtttgccgcagcatcactctgatctctgcgtctgtctttgcatggccgtctcccacttatgtctgcatttctgtctccaaattttcctcctatgaggacagcagtcatattggatttaagcccgcctttaattcag

SEQ ID NO: 740626 - DNA, 617 bp, Homo sapiens
agctctaatggtctgcatctcatttgaagccaggaagtttcagaggctcatccaaagccttcaacatagtaacttggttttactgctggttattcaaggccaaggggctctttggttagcatgttatgaatgcttccaggactgggttcttttcccttctgagccagcgtacttctaggaatgccattctayagctagtgtctggaaagggggccccacgactctgactggtgccctatcctgctgttgctgggctggtatccaagatgcaagacaaagtcttccctactcttgccactcccccattcttccttcttatctcttcacacctagagaagagttctcttttggaaccatgagctgtggatcctgggtttaggagatgggtgctgccagcattcacttgcctaccgtggctggtgtctcaataggtcacgtgccccaccattccactgtctcaggtccagttaagcactaggccttacctaagatttgccttccttttgtcctagatattctttcaaatttatttagggctccacagcacttttgtccacagatggtgaggcttgcaggaactcaatttcagactactgggatcggtgagtcccctctgg

SEQ ID NO: 740627 - DNA, 633 bp, Homo sapiens
tggatacaaagctcaataattagctacaagtggaataataggaaatgagtcatgtgcttattgtacaaattctaagcacataccatagtctttagcagtttgtgaaacacaagaaaagcagaaaacagtatctataatgaatcatcttataacatgtttgggaaaaaaagtataaggtatgtatttcataatttaacattgcttatcataagtaataaactagtgatggaggcagtcagtggtacagagtttgtgaaggagaacctttctgaagagcatataaaagtgatagaaggttgtgtcatatgttgcgttcataaatccaggaaaaagaaaaacatagtgaggttatattgggcctattaattaatgctattttattttgagcagtgaaatacattgtcaaartagaatcccaattattatcaatcagaaacacccatatttggactgaagggagaaaaattatctgtattttcaaataaatatgcatatttctggttaacaatcatatcaccctaaatattggaagaaaaaggtcagaataagttaaaatgccaaaattgtttttggtataacaattttcacacatattcacatatattttaacaggaagtgtttttaattcattct

SEQ ID NO: 740628 - DNA, 637 bp, Homo sapiens
gccacttggctcgtgccacctcgggatccaattattcccattgcatttaaattttgtagttgagtgactgcggttcccactgttagatctggcatacagagaagagcaatcacagagctcttcaaggatgcagatgctgccctcacgaatctgttttgcaaagtattagtgaagggtatgtcttctggaccctcccagcttggatgagtaggtctaaagtgactaatccactccagcatcccaatcttcctaagccttttgatccytccctgtacattacaccaagggagattaggcatttccagctcacccacagtgggcgatcttttaacccatatttcagctaaccaagcaaaccaacaattagaacctttttaacttcctgagctgcaacattaaatgcataatccctgtgtagtgggccctaatcaataaattcagcctgatcaacctctatgtttcttccaacattatcccacacctttaatagccattcccctgcctgttctccagatttctgcttatataaattagaaaactcaagtagttcttttggaatgtagcacacctccttgtgggtcacactatgaacctcacctctaggggcctgcttctagttataggttgggagtggttc

SEQ ID NO: 740629 - DNA, 655 bp, Homo sapiens
gcgtgggtcagggagggatgttgcccccactggggatggggaagttgtttcttctggcaaaaaaaggctcatcggaatttacaaattcagtgtccccagcttcatcaggaatgctgatagaaataactatattatagattcacaaaaacctttttattcctgtcagactttcaaattcttgataagctgtttcacaaccctaggtagttgtaagctaaatagcattaaatatgcatattaaaggaaataactcaggtgaaaatcaaatagcaaattttacatcataaggtacagagaaaagtctggtgtgctagagggagattaaaaatgaatgtcaaatcaaacataaaattacaaaaatctatcatgggattgtatragaaaaccaatcgtatttaggtagggactacctatcttttaactggatcaatgagctccgggcagagcccacacttaatcctgggtttccaaaccgggagaattattatgaggttagacaatgtgatgtttttacagtacactttaaacaatttgtttgaaacagacatttctaagtgtctacactacactcttctttaaaaacccaagagtaacctgtttcaataactattttagtcagtaaatcaggtaacataatacaaaagcaagcagttta

SEQ ID NO: 740630 - DNA, 597 bp, Homo sapiens
gatcttcctttgtttttaggtaacatttaagcactgagtacttattacaggctctctgtaagtgttctagattcagcaccttgtttaaacccctcagcggcactgtggaggcaaatatgatccccttttttacaaacaagggcaatgaaactcttaaatgttactttctaaagggaacacgctggtggagccagatgggaatttggtctgcttgactcyaaaattaaatgattctctctataactattgctgtccagctttaaaagtagatacaataatttttgtaatttttaaaaatgatgttatagacctgctaaaacagaaacatttttcctaccatgtaaatctttatgggaattgaagagcctttcatttgctttaattaaataccttgtgtgattggaacaatttcaaagttgcattaatgcaacttggccttaaaaatttcaaaggaaatattatcattgtcatttcatttcacagtctcagttccattctctctctttagcaagaattatataagggcctaattaaagttttagcttactgaaagatttttaatgttttttgcacccttaaaactttagaaagcaattt

SEQ ID NO: 740631 - DNA, 535 bp, Homo sapiens; identical to SEQ ID NO: 736294

SEQ ID NO: 740632 - DNA, 583 bp, Homo sapiens
accttcctcaccgcccatcatgaccaccctgccccacagacacgggtctgagctgcagtgcgtggtcaagggcacagaggagtgggcagcggtggccgtggggaccggatgagccagcctggtggggcctgaatatggcagcgccaggcagtgatgccacgtgggccttgctgggggcggcatccgaggctcagcacacctgtagcttttgaaggccatgccctcctgctgggtctcttgtcttcacccstcaggaggccttccccagcctcacttttaacatcacagcctctgcccctctgccctgacaccaccccctctgctgctcgttctctcctagtgcttaactcgtgtgttgctgggttctgtccccctccttctctgttgtatgcccaggacaggggttggcagtggcagatgccgaagatgtggatgaccacacgggcgaacgaaggcccatgtcgttcaggaggccccgagcattggacacccaggccctgagacgtactcagttcggtctgcatctgttgatggtgaatattgcaggactgatagccactgaccgcctgtagtgatgtgtgag

SEQ ID NO: 740633 - DNA, 615 bp, Homo sapiens
gtatctattccttttcaatatttactgctgagaccagctcggttgtggagaccctaacccagcggtgctggaggaattaaagacacacacacagaaatacagcatgtgaagtgggaaatcaggggtcttacagccttcagagctgagagccttgaacagagatttacccacatatttattgacagcaagccagtgataagatttactaaaagtattccttacgggaaacaaaaggatgggctctggctagttatctgcagcaggaaaatgtccttaaggcacagatcgctcatgctattgtttgtggtttaagaatgccttaaacggttttccaccctgggtgggccaggtgtccsttgccctcattccagtaaaccgacaaccttccagcgtgggcatcatggccatcaagagcatgtcagagtgctgcagagattttgtttatggccagttttggggacagtttatggccacattggggggcctgttcccaacgtgtcccctttatttgttttgcaaagtgataaaagcaaaggcagctttgttacggtgagctacttcttgcagagtcaggatccacatctgcagactatacaaataacacagattaaaagc

SEQ ID NO: 740634 - DNA, 691 bp, Homo sapiens
tcaggatccacatctgcagactatacaaataacacagattaaaagcacaatcttcattgaaatcacagagcttccaagtgtttttatccattttaatggattaccagctgctaatctgtctgcagctccttcaagcactccagttcctggcattaaggtcaggtgtgctgggatgcttcaaatatctgttctttcaattttgcaatatccaaagacaagtttgtacggtgtccttctagatgcttttttattctttcccaaattttgatcttattaagagctattaacagtttccacaaatccttatgtttagctcctacaaagggccataccatttgaggttgaggtgccactacaccgccatggttccagataataggaacccttgccgtatttcttatcatttctaccatctgacaattttgttcagaccagctgaacatagtgtggccgtggcacgcagacagagaggtgcaattcaagctaaacatccccttaggrgatcaatcaataatgattccataggaatcgttgccagcacccctgcctgttctgcaatgcaatcttcccaaacatgtacgttcattttctctgactgggtccaatcctgtttacagataggtttttgagggcggtatgcctcaattatagaagcagatttatcatggtaaatactgagatcagaaagcat

SEQ ID NO: 740635 - DNA, 590 bp, Homo sapiens
gaacctgagggcaaccactaccatctactgaggaccatgctttctcaccctgaggcaggtgctcctgtcctcaccctttacaggtgaggaaccacggctgggaaaggccatcaccctcacatggttatatcaaggcctgtgtctaaaccgttattctacaatgcctctattttcattaaaataaagaaactctaaatgaaatttattcatttttataaacaaaataaagtagaaatgagattcctaccctgtggcaacaacagtgttctttgctcttatgcgatggatggacccgtcctctatgcacagtgcgatgacaccacggcactccccrttctccatcaggagatccaaggcaaaatactccacaaaatagctggtatcatatcgcagagactaaaagaaaggaaaaaaaaagggcaagaagtgttaagccaaactttaaggttttaaggtggtatctgctcatgtgaataggtgaaagaacttgatccaaatggaccaggtaaatccaaggagatcagcaacagtgtcagtgacactgtcagagcccgagaggcattccacgccgagcagtacagacaaggcag

SEQ ID NO: 740636 - DNA, 597 bp, Homo sapiens
cgctgaggtcccgcgctccccgaccgaggtagagcgggccctgttccggggaggtggtgggcaccaacatttttaaagccccgtgggtggttctccgggatcgcccagaccgaagggcctgaacgcccagaccgcagggaatggggtcggaggggggcgctcgtccgcggaggtgggcgggagcggcccggggcctccgacctcttgtttattatacatcccttgattaactaaactatttgtaattgtgtgtgtttgtggaggtcacatgtaaacaaacttaaagtgactctactttgtgaaaatgtgaaacytcgtgtaggtactcagtaaatcagtaaattcttactaacgttagcccccagcctagctatggagggtgcatgctgagcccgaagcagagaactctgtaatctctgcattcatcaccaccacgaggaggcctcagaagcttctagcactgtttgcaccttccccacatcacccctccctgccttcctcacagtcttccttctgatcagaagaccctttccttctttctctgcctgtcaaaatgctgctcactcttcaaaccctagctcatatgaaagtgtccgg

SEQ ID NO: 740637 - DNA, 598 bp, Homo sapiens
ttctgcttccccccttttctctcagtcttcttgattgccctttccccatctctctctccgtgcttttcccatctctccgtgctttctcccctctagtgttcctgtacctcctgtttcctcccctgacccagaaaacatagttttagagctgaaagggactggttgagttcactgggcccaactcagtttcttttaattaaatattttattttggggtcatgtaaatcacatgcagttgtcatcagyaatgcagagagcccgtgtaccctctacccagctttccccagtggaagcatctgcaaaacgatagtgcagtgtcacagccaagacatctgccaggatgcggtcaagataccccaatccctggggcctcacgtgctgccctgtgtaccgcccctccctccatagcccccggcagctactgatctgttcttcatctccagaactttgtcatttcaagaatgttatgtaaatggaatcaaacagtatataacctttcgggttgacttttttcattcagcataaccccctgaggtccatgcagattgttgctgtatcagtagttcatagatagtttcattgctgagtcgtgttttat

SEQ ID NO: 740638 - DNA, 598 bp, Homo sapiens
ttctgcttccccccttttctctcagtcttcttgattgccctttccccatctctctctccgtgcttttcccatctctccgtgctttctcccctctagtgttcctgtacctcctgtttcctcccctgacccagaaaacatagttttagagctgaaagggactggttgagttcactgggcccaactcagtttcttttaattaaatattttattttggggtcatgtaaatcacatgcagttgtcatcagtaatrcagagagcccgtgtaccctctacccagctttccccagtggaagcatctgcaaaacgatagtgcagtgtcacagccaagacatctgccaggatgcggtcaagataccccaatccctggggcctcacgtgctgccctgtgtaccgcccctccctccatagcccccggcagctactgatctgttcttcatctccagaactttgtcatttcaagaatgttatgtaaatggaatcaaacagtatataacctttcgggttgacttttttcattcagcataaccccctgaggtccatgcagattgttgctgtatcagtagttcatagatagtttcattgctgagtcgtgttttat

SEQ ID NO: 740639 - DNA, 436 bp, Homo sapiens
agctccacgacttccaccagcagcacttcctccgggagctggagcgctgccagcactgccccttggccgtgggccgcagtttcctgagacacgtaagtgcaggccatggcgtgggtgccgggcaacgtggtgggtgaagccggtgtcagagaggcggggcctacagggcccacgtgtcaggcggttggaatagcttcagtccaggtctaggagstggtcctgacaggatgttaagaccagccgaaaaacagatgccccacacggataacctgtgggtctccagtgctcggtgctttgcgcgtggtgtgaccgactgtgtccctgctgcccctggaggcggaggctcacagacaccatcacacccattctgccagcagcccttctcctttaccacttccagctgataggccagaagcagttcccagaatcaccttcc

SEQ ID NO: 740640 - DNA, 610 bp, Homo sapiens
gcttgggagtcagacagcgcgggctctgagtcctgactagtactttctagctatatttctaaacctcggtttcctcatttggatcataggcttttaaagatctactttgcaatgaacaaacagttatcaatgaacaaatgtatgtagggtcacagtggctgacacagtcagcattcaataaatggtaacttctgctattattattattattattattattatttgagacagagtcttgctctgtcacccacactggagcacagttgtgcratctcagctcactgcaaccttcaccttccgagtagctgggactacaggcatgtgccatcacacccaggtaattttttgtatttttagtagagacagggtttcaccatgttggccaggctggtcttgaactcttggcctcaagtgatccacctgcctcggcctcccaaagtgctgggattacaggcatgagccaccacacccggcctcctgctattaataaaattggacataccacgtagaacaccaacaagggactgaaaacagacacagatacagcaagaaagtgctgataaaatcttttagatatgagagaggacaaaacagaaaaaggaagagtttt

SEQ ID NO: 740641 - DNA, 593 bp, Homo sapiens
aagatttgactgtgagaacaaaacttttaattaggagttttgaattcttctcatgagatctgcaggattccagaccttatcaacacttgggaaaatccagtggatttttttttttttaaataaccccatgttctttgctaacaggaaacagaaaaagacttttttttttttaatttggaattggttctgttgtaaattaggatgacactactaaacagtttcagatataaattactttcaatgatttttttttccctttcatccagaactggagcttgtatttcctgttgataaaagaaaaaaaaaaaaggcactgtatttaccaacctccctgatccagccaatccctctggcctytgtctttcaaatgaatgtggaatttgcttgaatctgaggaagtttagaagcggagctccagaccacccactttcaggatctataagatggtgctggagttaggctgagctgaggcactaatgcaagctcatgggttagaccagaggttctcttgactccatcagaaaaagtagtttgcaaatatcttcttgctagtgtcctccagtggaggggctgactccagggcccctggctgc

SEQ ID NO: 740642 - DNA, 578 bp, Homo sapiens
ttagtcactgaatcaggaggcaggttggcccaagtcttggtcatacctgcttgttcctacttttctagatgcacatttatataagccctaaccttaggtaacagctgcacctttttttagggcagaagttcctcaccgcatttaggttcaagcaataagcctggayccaggcaccaaccacctagggcccttttactcccaatactgcagaggagttatcttgcctatctgtgtgtgtctccagagcccacaagctcacagctttagtaactactgtgttatatttctggtctgtttctagcacatagatatttatttttctttatgtatgtatgggcatgtggtttactttttttaaaactttcttttaaattcgttcttaaaatattttatttataattgctaagtgtttggagtgcaggtagcgacttcaaagcatgagcttacaatgtcattttgatctgcagaggcaggctctggggatgaaaatagcagcagttcctatgatgccatctttgagacatctaccattaccgctactgctatgttgatattgtcctttgtttcccatctatcaa

SEQ ID NO: 740643 - DNA, 610 bp, Homo sapiens
tgtatagtgatactactttgtactttaaaaataatcatgtggttcaaagatacatatataagtagcaaaagttataaaacctgcccatgaatgatacatcttaattacagaataatggttacctctaaaaccagagggagggggaagaatgaaggaggggttagattttagctgtatttgtgttttattccttaaagggactcaaattaaatatgacaaaacattaatatctgttaaatatgagtagtggatatgtgtgawatttgttagaggcttgaaaaattcatgattaaagataagaaaaatttaagccacaccttctcattgaaaaaattaggaatataaagaataatatcaaatacttaaatattaaaagtgatcaataaccctaccacctgaaggtaattactaataatattttggtattttcccttctagtcttttttttaacctatgcatagtaaaataattttcatcatatatttataattttgtatcttttctttttatttaatattggctcttaagaattttccatgtaattattctaatttttataataaccacatatacttcatatttgtatagcacttttttctgaatttaagca

SEQ ID NO: 740644 - DNA, 610 bp, Homo sapiens
tgtatagtgatactactttgtactttaaaaataatcatgtggttcaaagatacatatataagtagcaaaagttataaaacctgcccatgaatgatacatcttaattacagaataatggttacctctaaaaccagagggagggggaagaatgaaggaggggttagattttagctgtatttgtgttttattccttaaagggactcaaattaaatatgacaaaacattaatatctgttaaatatgagtagtggatatgtgtgatatttgttagaggcttgaaaaattcatgattaaagataagaaaaatttaagccacaccttctcattgaaaaaattaggaatataaagaataatatcaaatacttaaatattaaaagtgatcaataaycctaccacctgaaggtaattactaataatattttggtattttcccttctagtcttttttttaacctatgcatagtaaaataattttcatcatatatttataattttgtatcttttctttttatttaatattggctcttaagaattttccatgtaattattctaatttttataataaccacatatacttcatatttgtatagcacttttttctgaatttaagca

SEQ ID NO: 740645 - DNA, 382 bp, Homo sapiens
aattttgtcaaattgcttaattaatatcagaaaactgttttcctttgacagcatcattaaaattttttcttcatttatatttgtagcatttgtattcttatgagatgaaattagtttttgaagcaagaataaaataattacattgtctgttctgaactctttttacaaaataaaaatctctaaaacagtcttgtaagtaataggaaattggactckcacaaatattttctataatctgaaatagcttaccagtgatttaattttagtaaaatatgtcttcaaagcaataaattatttctgtatgcaaattaaatggttaaaattagaacttattgtcaccttatcctttacatctgtctttattccattgtctataaaaatc

SEQ ID NO: 740646 - DNA, 665 bp, Homo sapiens
gcatagtcacactaatacacaagtgcatacactatcatgtacaaacaggcatgcagtcacaatgtgcaaatgcgtgcagacacactaacatgtaagacatgcatagtatgtgcacacagacatgcacactaacgtacgtggacgtgcacacaggcaggtacacgtccaccggcaggtgcgctgacaggtacatgcgagcacgcacacaaacagacatccgttaagtgtgctcccggggacgtcacagtaagccacgcacatctcacgccygcactgcccagaagaggtcagggccgacctccagatcttcggagggcttctcccagcccaaccccgagaaactgctgggccaagagagtcaatgccatcccagacgcacgccacacatgaatacaaagcccacgcgttgtccattctggcccaccttctcctgaccctacaggcctgtggggacctgcccccgccccgaccaaggggaggcaagccccggcgctgggaggaggcacaggtgccactgagggtccccgagtgtgtgtgcctgtgcatgtgtgtgtcaaaccctactcctgggtctacgtcgttctgcggctttaattaacacgctattctgaaggcactttcagatttacagaacggagcaggaagtacagggattccctgcacgc

SEQ ID NO: 740647 - DNA, 665 bp, Homo sapiens
gcatagtcacactaatacacaagtgcatacactatcatgtacaaacaggcatgcagtcacaatgtgcaaatgcgtgcagacacactaacatgtaagacatgcatagtatgtgcacacagacatgcacactaacgtacgtggacgtgcacacaggcaggtacacgtccaccggcaggtgcgctgacaggtacatgcgagcacgcacacaaacagacatccgttaagtgtgctcccggggacgtcacagtaagccacgcacatctcacgcctrcactgcccagaagaggtcagggccgacctccagatcttcggagggcttctcccagcccaaccccgagaaactgctgggccaagagagtcaatgccatcccagacgcacgccacacatgaatacaaagcccacgcgttgtccattctggcccaccttctcctgaccctacaggcctgtggggacctgcccccgccccgaccaaggggaggcaagccccggcgctgggaggaggcacaggtgccactgagggtccccgagtgtgtgtgcctgtgcatgtgtgtgtcaaaccctactcctgggtctacgtcgttctgcggctttaattaacacgctattctgaaggcactttcagatttacagaacggagcaggaagtacagggattccctgcacgc

SEQ ID NO: 740648 - DNA, 601 bp, Homo sapiens
atttttatgaaaataaacatgaactgaagatgtattcagatgaaaagtttgagggaatttatcaccactaatcttcactaaaataaatgtaaaggaactttttcaggccaaaggcaaattatccaaaaatatcttgttttcaaacacaagaaaataggagaaaatttgaaaatcaatagaaaaggtaaacttgtgggcaaacccactgaaaacaataaaaataatgatatattgtagaattaaatatgcatacaattaggatacagaaaaatgatgcaaaagccaggataggaaaatgaggttaaagaattataacgtgcttgcatccaggagcaagtgtgctaastctgatacatcaccaatgcaggtgaggagtcattaagagaatgatttaaaatgcacatgactaaaagcttagtggagaaaaataagaaaaagtattaactcatcaaaaactaacaggaaaagatgaaaaccagctaatgaggtcacaatgaagaaaactgtaatggggtaaatctaagcacagaagtatcgttaattaatgtagtcatataaattacacaaatactccaactaaaagacaaagattgtcatgctg

SEQ ID NO: 740649 - DNA, 419 bp, Homo sapiens
atttctctgctcagtgaaaattaaagtggatcaagcatagggtaccatgttgaaatatggcaaaatagatgcaaattgattttttattgcttaaaaatactggcattttgcaaattctatgagagggtcacatttaacaaaacgatggcagattcttggcatcgtcaaacttattrgttaacattcttataagactacctatttttctataatctgagatcttaactgtactccttaaatgcagattctctagaaaataatattttaacaaaatgttcaaagtttaaggtaacgtttaaaatgatttgtggcaaagagcatcttttctagaaatgaaacacatcaacatctttgtctggttcagttttagaaagatcagttctccatttgccactgcctattacgagaatttagaatga

SEQ ID NO: 740650 - DNA, 569 bp, Homo sapiens
ttaaatcatctctagattactttcaatacctaatgcaattctcacacatcactgcatttgtgtggattcaatgtaatactcggcatgcaacaaatgcaagttttgctttttggaactcagtggaattttttttcccaaatattttctatctgaggttgactgaattcatggatgcagaacccacagacacagaggcaccacygtacatattcaaaaaagtagtaacatagcagcagttttggtgtctagtcaggtaaggaaactgtaaagtccattaaggattagtaggaagttgctgtaagatcgaacactcagaacatccaggttatgtggactccaggcctaaaccactagtgaggatcagaaaaagtatcagatcagaaaccaggcaacaggcccacaggtctggaagacaaacagaaaatgagcaagaaggaaggtcaaaaagccaagtgaaccactcaggtaataaagacccaggagataaagacttgagggaccgctcagacacatgaaagaggagatctgtggggccacaacaatgtctgtatctgagtcaatactggcct

SEQ ID NO: 740651 - DNA, 555 bp, Homo sapiens
agcatggtatggtacaaaaacagacccatagaccaatggaacagaatagtgagcctagaaataatgccacagagctacaaccatctgatcttcaaagttcacaaaaacaagcaatgggtaaagaattcactattcaataaatggtgctaagataacaggcaagccatacgcaaaagattgaaactgaactccttccttacaccatatacaaaaatcaattcaagattaattaaagacttaaatgtaaaacctaaaactacaaaaatcctggaaaataacctaggaaatactatccaggacataggccttggcaaagatttcacgatgaagatgcaaaagcaattgaaacaaaaaccaaaattgacaaatgggatctaattaaacaaaagagcttctgcacagcaaaagaaactatcrtcagagtaaacagaaaacctacagaatgggagaaaatacttgcaaactatgcatctgacaaaggtctaatatccaccatctaaaaggaacttaaacaaatcaacaagcaaaaagcaaacaaccccattaaaaagtagg

SEQ ID NO: 740652 - DNA, 631 bp, Homo sapiens
cagagttatctctctaaaatgcagaaagaaatttaatccccaattgcagatacattccctgcctctgtagaatttagcacagcaaccaaggccattcaccagccaatactatgccaggctaatctattgctgtttctaatcgcaaatccaagactccaaccaccccttactaatcagagctcccaatcgagtgtgtcatacaatctcatatcatggtttatgcttctcaatctattgaaaatacccaaaaagactgtttcttgacctagtaaaatccacaccatctttctcctcctctgtaccatatcaagttgtattggattttgtcacctctttatgggtctggctaacagagtattagggtgaaaagtagaacaaaatatttcttgcttcgaggctttgtggtgcagaccaaagggaaaataacaaaatgtggtgcctgagaatgagaatgaaatttaaatgtggggagtccaatctgctttttcctatacyaatagttataaattaccaaatacaactacataaataagatacagaagagaaaagatgaggggaggtactggtgggagtcacagagctaaaaatacaaaacagatgcaggcaataggaggccgtctgattgtcctgg

SEQ ID NO: 740653 - DNA, 618 bp, Homo sapiens
atagtactttatatacatagagtgccttatgtacattcactagtgcattattactttaataggatgaaaataatgtaaatgaatatactgagtgagccagcggccaatttgtgagagcattttcaacccccacacacagacacatatgcacagacaagctttaaggatagtcacaataaaacctagttaaaagtttataaatgcagatgaaggtccctcaaaagaatctgcacaggtacactgcttataaagactttcaaatttggtaagacttcaattcatccagtgaatctctcatgttacacattaaaaaactgaagtttccacagattaagtagcttatccttaatttccaaattagttaattgcagaggcagttcaaaaaaatggtatttcatgatatttgaaagagaactaagattgcatttcttcagctataaactagaaaaaactaagctataaaaatgttatctatrtgtgtaaatattagattggtgtgaaagtgatcagtttttcccatgactttgaatgggaaaaacagcaatcacttttgcaccaacctaatccatgggttaatatgcacatttatatcccctcactttgtcacctactaagacc

SEQ ID NO: 740654 - DNA, 551 bp, Homo sapiens
caaaaaaatagcatagtattccattataaaacatatacaataaatattcatgagtccatacagacatgaataagtgatcaaataataaatactggggaagaatagctctcccatgcagaattctaaataatttatgtagacactccaaggaagtagagcatgtcaataaatccccactctagatgtgtgagcagtgcaaagtgactgccattcaaagagtacagtatggaaaggaatacaaagaataactttggygtggaaaaacctgacaaactatctcagccaggtgatctaggttttcatcatcagtgataagtcatttggcaatatgcatttttgataggctgtgataagaagtaaccccataagactatcaaggttagacaggccaaaaaaatgctatgtagttccaccttgtttgtttaggatacttgctgatggaatttaactaccatgctgtgacaaagttcaaacatgaccacaggaaaagaccatataaagaggccatgtttatatcatttcctctctattagtggaggcagtgtgaagtt

SEQ ID NO: 740655 - DNA, 482 bp, Homo sapiens
catatgtttttcgggtgatgggagtcattgtaaggagcaggcccagcacgattctctaccatttccatgcctgatgctttagtgctaggtagatgagatgacgtttagaagtggtccatgtataacaaaagccctcttgtgttctagtaattgatgcagttcaaaaaattattgtttgttcattgctatagcacaaaaatgaaatgcacctttcccagacaggtccataatataytcaacaagtggcagatcctttgcttccctaaaggtcagaatatgttatttttgggtcaggctgcccatcaaaagcagaattgcatggtggatatatgcttgccttctagaactggacagttgaagcctggttccatcactacctgattgtactctatggaaaataacttagtctttctgtgtctcaatttcatcatggaatatacctcttagggtgtttgaagggatacctggaattaattgggtaa

SEQ ID NO: 740656 - DNA, 461 bp, Homo sapiens
attcagaatttgacattaaatttaattgccatgtccagtttgtctcctttaatccagaaaatttactcagctttcatcttttatgattttgactttaagaattcagcccaattactttgtagaatgttcctcaatttgggtttgttgcatgtttcctcctgattgaattcaggttatgaggtcatgcttttcttttcttttggcaggaatattaaaraagtgatgtttcctcctcagggtgtcataactgtaggcagatgatatcagtttgtcctattattgaggatattaagttggatcacttggttaaggttgtgttacgttaacccatcctaaagtttttattcctgttgtaaaaaaacaaataacagtgaatgtatgtaaatattactatttagcaaactcacattcattattttctgtgtccagcaaagaatgctgcctggatcaattgttatagt

SEQ ID NO: 740657 - DNA, 547 bp, Homo sapiens
ctaccggagacaacctcagaaggacttgtaacttcagtggatccctttcttttcaacccaccttaacatttcaagaaatacaaaacaggaaaaaactcacccacccaccatctcactcctcaccagccaaataaatcatccttttttatttttccatgttttcctcctgtttgtatcatcataggcagatacacacacacacacatactcacacatttatatatcttgaaatgagcagatcactggctctgaagtcagacagactcggattcaaatcttgtccctctaccttgacaaatgcgtggcctaggttatacaaatgtctctgaacttcagttttcactttgtaccacgggctgtaatctgtagtatctaggtcactaggattattctcagaatacaataatgtggcataatatatggaaaatgccaaagacagtgcccgctgcatagtaggtgcttaatattacagtagccataattatttccattgatcctgtaattcaacaaacgtttagcmagtcttgtatcatgtgtcagagagcag

SEQ ID NO: 740658 - DNA, 668 bp, Homo sapiens
ccagtcaggcacctagaagaaaagagaaaatgaaaacaataatttttcgaaaaccaggaataatatgaagaaaaactacagcagacatgcattttaagctggtgcttaacatcaatgggcaaagtaaaacttctctaacatagagtttgtaggaacaagataagcagttgaggaagagtcttttaattagtggcttcattattttatttgaaatcctgaaaattcttaagccaccagctattttcataagcaaatgagaataccaaagcatttaaaaaacccaactaggaaaattatttttaatcatttgaaattttgagtttattgtaccaatatagcccacattcagtacaaatattgcaactgatrccacatatggaaaatataatttattcataaatatgtataatttccgtttgtttttcattctctgactatagatctatttatacgtttgtcttagtttgggctctcctagaagcagaatcaaaggcaaggattagaatgatagcagtttatttgggaggtaagaagtgggcaagtgggataagaaagtgagacagggaagatgattagaagtggattatcaacccagctatgtactatggcaactgaagtgaattttcattgaggaagttcttggatccaggataaaacacctgccacag

SEQ ID NO: 740659 - DNA, 312 bp, Homo sapiens
ccaccacacctggctaatttttaaattttttgtagagaaggggtctcactatgttgcccaggctggtctcaaactcctggactcaagcaatccttctgtgttggcttcccaaagtgctgggattacaagtgtaaaccaccatgcatgtccactgtactcattttctaytgctgtgtaataaatattttaaatttaccagctcaaaacaacacagatttatgatgtcaccattcctgcaagtcaggaatctagacattgcttaactggatcctctgcttggggcctcacaagattgtctgcaaagaattgacc

SEQ ID NO: 740660 - DNA, 621 bp, Homo sapiens
taaatgagtcagaacggagcaaatgagatttcccttatatttgggttccaaaaattacagagaaaatgtgcctgaggcagaaacaaactaaaaaaaaaaaatggaggtaggttattgaggcaggagccacatgggagagaacctttggacccagaaggctgggacgactttggcctcctctaggggttatgaaactgttctggctccagagaactcaatcccagaggccctgaagtggccacaatgctaatgggatgaacacaggcccagctgagcaggactcactgtgtctcagcctcacagtgtcagagaaagcagggaaaggaacagagggctgtaatgggcctgtcccctagcrgggagccaaaggccagcttttatcttctcagagaaacaagcagagacagagaaaaagagaaaaggaaaaaaaaacacctctgcccagctccatgtggccagagagggggagagagagaaacgtgaatggcaacggaatacttttgtttggagaacgccatttctcctaaatggcttcaaggcaggcacctagtaacgtgccagggtctcggcagacattcagtaaatactggaaggaaaggaaagagaaaggatggaaggtgg

SEQ ID NO: 740661 - DNA, 662 bp, Homo sapiens
aatgtaaatacaatgggaataattggatcctgaggtggcaggggccaagtggcagcattcaaccaccaaaggcaaggtgggcatagctactgtaatggatggcagaggcaaagcagcaatcagaacagtctaactcttgtggagctctggcattggctaattaatcatggtgttcctagaagtgaaattgataggaagcctactgcattcctacttaatttatacaagcagaaaacttctaggtcaaatgaataaaagactaatttgaattttttaaaaaaagagagaatcactgcctctcaatcaatttccagacttgagccagttcaaagacccagaaccccttgagtgaaggggatgccccatccttttgatgtaggaccccactacattactgacratttatgcagtgaatgtttcttcctttcttccccgtggagatttctggccttttaccagtgtaactgtgcactggggaaagggaaataatcagacaactcatggactactggatgctggctctgggctgacattgattcgggggacccaaagtaggggcttatggaggtaaggtgattaatggagttttggctcaagtctaacttacagtgggtccagtggttccctggactcaccctgtggtcatttccccagtgccagaa

SEQ ID NO: 740662 - DNA, 544 bp, Homo sapiens
ggcaaagcagcaatcagaacagtctaactcttgtggagctctggcattggctaattaatcatggtgttcctagaagtgaaattgataggaagcctactgcattcctacttaatttatacaagcagaaaacttctaggtcaaatgaataaaagactaatttgaattttttaaaaaaagagagaatcactgcctctcaatcaatttccagacttgagccagttcaaagacccagaaccccttgagtgaaggggatgccccatccttttgatgtaggaccccactacattactgacaayttatgcagtgaatgtttcttcctttcttccccgtggagatttctggccttttaccagtgtaactgtgcactggggaaagggaaataatcagacaactcatggactactggatgctggctctgggctgacattgattcgggggacccaaagtaggggcttatggaggtaaggtgattaatggagttttggctcaagtctaacttacagtgggtccagtggttccctggactcaccctgtggtcatttcc

SEQ ID NO: 740663 - DNA, 662 bp, Homo sapiens
aatgtaaatacaatgggaataattggatcctgaggtggcaggggccaagtggcagcattcaaccaccaaaggcaaggtgggcatagctactgtaatggatggcagaggcaaagcagcaatcagaacagtctaactcttgtggagctctggcattggctaattaatcatggtgttcctagaagtgaaattgataggaagcctactgcattcctacttaatttatacaagcagaaaacttctaggtcaaatgaataaaagactaatttgaattttttaaaaaaagagagaatcactgcctctcaatcaatttccagacttgagccagttcaaagacccagaaccccttgagtgaaggggatgccccatccttttgatgtaggaccccactacattactgacaatttatgcagtgaatgtttcttccwttcttccccgtggagatttctggccttttaccagtgtaactgtgcactggggaaagggaaataatcagacaactcatggactactggatgctggctctgggctgacattgattcgggggacccaaagtaggggcttatggaggtaaggtgattaatggagttttggctcaagtctaacttacagtgggtccagtggttccctggactcaccctgtggtcatttccccagtgccagaa

SEQ ID NO: 740664 - DNA, 610 bp, Homo sapiens
actattcagagaaagggataagtttggggaaagataccacttttcttcatatagaaataaaaaatttaggttttgcacaatatttaatttgaaatgccctatcagatttataattggtaagcaccactttaagttaatccattaaaaagagaaaatttatttttgtggagactgtatcttcttaccctgaaaaataaacctcgatacattttatttcatttatgttcagtaaaattatatttcatgtttcctgaaaaaacatatgcaagtattgattttaaaagaagtaatgacataaaagcattgacctcatatttgtctttttcattatatttgaagtgtattatttatttaaaagttagcacttcgtgaatttctgttggtatttaatccattctctagtgaagagataaatgcayatgcatttccattgtctacttcttttatagtttcctagtcaaacactaccagatcctcacatgtcaatacctttgtgtgagatttgggaaacttatcatgatttctaagaaaactttcatctcttgcaaatcttacaatctcatttcagaagtaattgcatgatttcattgcattgtattttttgctgtgg

SEQ ID NO: 740665 - DNA, 675 bp, Homo sapiens
actaaaaatcatcaagtagtagaacagcctgaaggagaaaaaactatacagtggaaaaatcaccaaaggataagcatttggtcaaaagaatattacagtcacttaaagaatattttaacattttgattattccaatacccgggccagatctgggacctgcctccatcttttttgcagttcagatagcataaagtgtgagtcaatgcctgataacataataatggtaccatctggtcaggttctacctgactcttgggcacattcttgaaattataatacttcaatttccagttataagttaccatgtgtcatttggttacacaacacaccatactctttttttatggacccacacgtgcattgtcactcatcattcactgaagatgtttacatattttacaattttatttatgttaattattttttccaactcaaatgttattcaatcwtcaaataatcttcatccatttcttgttttttcttcccctcttatacctcttgtgaatcttattcactttaaaatcccctaaatcacagctcctagattggtaaaggcatccattgctgggaaggtggtgcaccccacctccatgagaaggaagttcttatgctgaggaatcttcacctggctgttcatttgtgtgcgttaagtgtgttgcagtctccgaattctga

SEQ ID NO: 740666 - DNA, 663 bp, Homo sapiens
gattggtaaaggcatccattgctgggaaggtggtgcaccccacctccatgagaaggaagttcttatgctgaggaatcttcacctggctgttcatttgtgtgcgttaagtgtgttgcagtctccgaattctgagccattgtagtaaattattattgaatttgaggaggaggttgtggaaaccctcaacttatagctggtcagtcagaagtaccataggcacagtcttgcaactggcttctaaatgtgggaaagtggagagggggtagtcctgtgagatttaattmtttagctgtgaggtctgtgctaactctgggtagctagtattagaaatgatttaagtgttgaataccagttgacgtctggagaatcagtcaactggtggttggtgctaataatcccacagaacaaagtccacatacattatcaaaatgattaccaagatggaattattcttatgactaaaataagtttaaaacaaaaaaagtactatgggtttaattttatttcatattctctatcctaattttatttttaagcctccaagagttttctatttcttaccttcctaaaaattctgccatcttgacatatccaaaactaaaacagaaaaagacaaaatcttcagtcatgggctgtgcaggattcaggtggtgaatgactgat

SEQ ID NO: 740667 - DNA, 663 bp, Homo sapiens
gattggtaaaggcatccattgctgggaaggtggtgcaccccacctccatgagaaggaagttcttatgctgaggaatcttcacctggctgttcatttgtgtgcgttaagtgtgttgcagtctccgaattctgagccattgtagtaaattattattgaatttgaggaggaggttgtggaaaccctcaacttatagctggtcagtcagaagtaccataggcacagtcttgcaactggcttctaaatgtgggaaagtggagagggggtagtcctgtgagatttaattatttagctgtgaggtctgtgctaactctgggtagctagtattagaaatgatttaagtgttgaataccagttgacgtctggagaatcagtcaactggtggttggtgctaataatcccacagaacaaagtccacatacattatcaaaatgattacmaagatggaattattcttatgactaaaataagtttaaaacaaaaaaagtactatgggtttaattttatttcatattctctatcctaattttatttttaagcctccaagagttttctatttcttaccttcctaaaaattctgccatcttgacatatccaaaactaaaacagaaaaagacaaaatcttcagtcatgggctgtgcaggattcaggtggtgaatgactgat

SEQ ID NO: 740668 - DNA, 587 bp, Homo sapiens
tagactcaggtctgaggatgagatccccagtggtttctgataccacacagtccatctctaacattctcctgtcatggttgtaattcctcattaatagatttctttttcctgcatacccgctacattcctggttctgtgctgggactcacttgccgttgtatttcctctgcagagacctggttcgagttcacccctcaccacgctggcttcyctgcactgggggcctttgtttccataacccacttcggaagcaaattcaagaagggaagactggtcagaactcaccctgagagagacctgactttcctgagaggtcagcgctggggtcagaggggattaaaagggggtgggaagtggaggagaggcaagaattttccttctgagggtctagtttgcccagctcttaaatttcttgggggaaagaaaaggacttggtaggcttccagaaagaggaatggtgtattccttctgctgagtcttcagtgtctctcaaaggtctccttaatgcggcagatacctgatatcctatcaaacaatccaggagagggagcttaatagaggggctcaagtccagggctgtggcttcc

SEQ ID NO: 740669 - DNA, 547 bp, Homo sapiens
taggtcctgagcacagcccttcatccacttcatgcctccctccctgttttagttgtgaaggctgccagaacaaagtgccatacataggctggctggcttagcaacaacagagattaatttctcagttctggaggctggaagcccaagatcagagtaccagtagggttggattctggggaaccctcttctgggttgcagagagccaacttcttgccacatggcgggctttaatgttgttttttgacaycagcattcaccatatgctggtatagacaagtctggaaggagaatctatctccaacctgcaaatggctaactaatgttgtgggatggtaggctggtgattgtaccactgcactccagcctggtgacagagcgacaacctgtctcaacaacaacaacaacaaaaaagaaatggcaaccccaaggtgatggtattaagagatggggcctttgggaggtgttgagaccatgagggtggagccctcttgatttggattaatcccttataaaagaagcctcagagagctcactccaaggaatgcgg

SEQ ID NO: 740670 - DNA, 627 bp, Homo sapiens
ccgccccactcagctcatgttccaacactgcacaccaagctgcccatctgtggatttatccccaccatctccagccccaacaccctgggtcatgctgcccctctatgtggacttctcctcaccccactaccccactggaatgctggctctccacgccagatggcccccagccccctcctcccctaaccctacctagtgtrgagtcgcaaaacccctttgggctttgacaccaccataacttcacaccctccctgacacccccaccttgctttttccctctaaatcattcaggaaagacagaaggaaagagatgaacagaggaagagcaaatgccatgctcttagtcaccgtgtacgcccacttcctgaagtccatgcttgcatcctgctcactctcacacattcccgactcacccaggaaaactccctgaggccaggggtgctgagctctccatctcactgcccagaggccagtgttggagtgacccttcacatgcttgttggaacattgaataaatgatgccgtctgctctaatcctccattttcttttcttttttttctttttttttctttttttcgagacagggtctcactatgtcagccaggctggagtacaatggtgcaatc

SEQ ID NO: 740671 - DNA, 578 bp, Homo sapiens
taataacggcactgtcatcttaatatttagttgtttaaaagtcatccatttttctcctataaagacatattttagttatattttgcaaatatttcctaagacttatttaggcttgattatatttttaaaattctggctctagcaaggtaaaataacttgatttatcaacatatgacaatcatactgaagtaaactatctagagccctaaaaaaggtgggtacccagccrtttccttgggttatttcatagagctcaaaggataacaagcatttcaacatgagcagcaaaataggaaagctgggataagggctctgagtagtcccagctactcaggaggctgagccaggagaattgcttgaactcgggaggtggaggttgcagtgagctgagatcacaccactgcactccagctagggcgacatagcaagactaggtctcaaaaaaaaaaaaaagcaagagtctaaacaaactcataaccaaccataaatatctcaccctattttgttaaaaacacacaaaacccctgaaaacataataatttcttttattgaagatagtgaagaaagacctgtgaggt

SEQ ID NO: 740672 - DNA, 605 bp, Homo sapiens
tttcatgtttagggcttgattaaattatattattaatttaataagactttttatcctgagagagtcttggtggttttttattagaaagaggctaaaaatagaaacacattgactctgggctttaagtgttctctttaaataaaaccctcctagaggtcccatcttcattytgagtttcaaggctgattaaagcactgcttattaaaagcaggtcttctctataagggagggcaaacccttaattctaaaaaaaaaaaaaaaaaaaaaaaaaacgtggagaagagccagggtatagtaagtgttttaatagttacacagttacttaccaagcacacccagaattatcaacaaaacagacaattttatgcgagtaaacaatatgaatcagttgctttaagagcccaatttccataagagaaagagaatgtgtgctttcacagtcataaaataatgaccaatggtgtcgtcaacacttttcattcctacatatcaatattcttgacgagtatcatctgatggaatgtatattattctatctagagaggcgaatgatttgacacaaataccttaactcagcatagctgagatggtgctgggtttaagac

SEQ ID NO: 740673 - DNA, 549 bp, Homo sapiens
ccaggatgtttactctgctagcactgtgctgcagaaatcaactgcctattaaaccatttctctagtctggtttgaagaagtattttaaattttatctagattttagcaattactagaatatttttaaggaggaacagaaatagaaaaaagtgacaacactacttccatctggtttttgctgatgaggaacaagttctgttaccttcctccagttttaattccttgctattgaaagtgtggwccctagattggtctgtggaattggcatcacctgggagcttgctagaaatacaacaacagaggctccactcgacaacactgactgaaccagaatgtgcagtttaacaagatccacaggtatgcacataaaatttggagaatcactgatttagtttataacatttttctttgtagaagtgtactttgtgttttgtttcacttcactgggtttttcttaaagtactatgtgtctgatgtactacatcaaacaatataaaattatatatgtaaaaagttaataatcacccccatcctagccagctgtgataa

SEQ ID NO: 740674 - DNA, 620 bp, Homo sapiens
ttaaggttttagatagttcttcccctcctaaaacgcccccaaattacccctccatcagcggtataagacagtattcatttttttaataccctcattatcaccgggaagaatcaatcgtttataccaatctgctaaacaaaaatggcaccttatttttaattatacggagagtgggcatctttttacatggtattcttccatttgcatttctactttctgaaatcctgtttatgtacactgctgttttttctayagaggatttcaactctccttattgattaatgtaaattccataaagattaagaaatgataaataaaaatatttttccagattacttgtgtattttactatttaggcctgctttgaaagtcttttaccattacaaaataaaaaagaatttatattctatatgaaaattatgttttaatgtttagtgtagggacctaacttcatatttttttctgaaagttatcaacaataattattatttaatctttttccttgctgctccaaaatgctttgttatatcctaattcctattcatattcaggtttctagattcattttattagttcacttaggtttttgtctagtcttatgccaatttttgaacttattt

SEQ ID NO: 740675 - DNA, 562 bp, Homo sapiens
ggtttacctttttcaatgtttttctatatatttacttggttacatatgtacctacagaacacatatagttttatttacaattttctttaaaatatgaaaaatcaaaagggcatgtattcttgagcaggcataaatgccacaatccagaacctattatattagcagagaccctgagatggaagaaagctagctgtatcactgccttaacacagctggaaaaagagttggcttgcagttaagatgatgtgggagtagtgccattaatgaggctgggagtggaggcattacataagcagacaccttcccttaccgcttacctacacagccttctccatcgggccttcgggccattccaggagggcagatgcacatgaaggtgccgattagattcttacacaycatgcccctagattcacagtcgtgtaacccttcagcacattcatccagatctagaacaaaaaataaaaattaaaaattatctggagcaagctgtagtttagtacttttaagtcacaggttgtggtcttctgacacttaacatgtaattttatggtgggacaga

SEQ ID NO: 740676 - DNA, 600 bp, Homo sapiens
tgttaattcatgtggggttttctttgtgggttaatacattttcacgtagacattgtgaattttttgtagttaaatctatcagttttttctttgtttcttttgtgctcctttaacaatctgtttaattaagtttttttgctgttatttttgaaaayatcttcatcaggggtctcaggcccaaggaaggaatctcacccaaaatatgtttaaaacactggcatagtgttgttttttttttaatttttgaatttgaataacttcaggtagagcgtatactccagttgtattacagccgccactattctctgttggcttgtaaagatccacccagtttacgtgtttctgttacatggctggcctataggtatttgaatttagacagttcagatattgttagaataatttcaaacgcaccaagacctgggcatctaacttgtatgtggtccatggcactaatgtgagagaaatagcaaaccgtttacccattgctgccatcatctaattgttgtcaggtgtcagtaagcttgcattaatttgtcatagaaactgaattgactattttggtgtactatcttgtatttaaatgtctcatttagtctc

SEQ ID NO: 740677 - DNA, 637 bp, Homo sapiens
cagagccatggatcctagcaattggagaaatggtaccatatttttgttgctgattcaggacatgtaccaccttcgggaggacattatctcagccatacaattatcctacactgtgctgtaactgaattttcaaaaggtttcattattttatcaagccatctgcttcagggtgatgggaaatgtggtaataccagtgagttccataagcaagagcccattgccagatttcatttgctacaaaagaagtttcctggtcagtaacaatgatgtgtggaatatcacagtagtgaatatgtgtttctcttaagtccacagatggttgttttggcagaagcattgcaggcagagaagaaaaatttctgtccagggtaaatgtctgtttcaatgagaacaaaacactgagcttcctgtgatgccagtataatcaacctggcactaagtgactggctgatctagwcatggaatggtatggagttaaatgttggtctctgctattggcattttgggtactcagcagtgactgtagtcagatcagccttgggaaatgaaaatccatgttgctgaacccatgtgtaatttttatccttgtctttatggtcactttgttcatgggccaattgggcaagggcatgggtgg

SEQ ID NO: 740678 - DNA, 681 bp, Homo sapiens
taatttaatagtataaaaacaggtatgcaatttatatatataaatatatttttgagagcatgctttaaaatatttactaatggaggtattggatgaaaaatgtctaaaaaccactcattttgagaataatgaaatatttgaaaaatcttagtatgtaaagatagaaaatgatctgaggcttccttaaataacaaatactaaaagtttcacaagagcaaagtgtaacaagwtcagttatacagcttggtatacacacaagaccaaatatcctagattaatcagatgaatttccagaaggtgccactgagtagaatttcaggaatcttatttagcctgactttatgggagaattttcttataattagaacgattcagaaatgaaatgggctgatttgagtttttttaactttaataatctgttttattctcttttcatcatgtacatttacatgtgatcttcagagatactgtatatgaggtttcttttttaggtgacttattaggctagaaaagttctgaagtccctcctaagtctgatattctatgatttaaaatggatctaaagttataaagtaccatagtatgatcagttttgaataggcaaaacggaattcagagtgatagttatgtgtgcaatgtattttgtagttatagcttcatcttcactgtttatagctaaaa

SEQ ID NO: 740679 - DNA, 517 bp, Homo sapiens
tccctcccaccgcctctgtttttgggttttggaggcgagatggccaggaaggccgatccatgattcaaaagccctggaattgtctgaaacgcggatgcaaagtagaatgtgaaatgcaaagccctgcttgggcagaacttacaatgtcatgctgacggcccagagaatagaatagaaatcctctccctttctattctccattcactccggagggagagtccaccctgtgctcagctgcagagacttccctaaagccaccgcctgggatgctggacggagtgctcaggccagcgaggagtgaggtcaccacctgccggataaacacagcaaggatgcggacgcgggcgcgggagcctgaggtcccakctactcaggaagcagggcgggaggatcgctgaacctgggggtccaggccagcctgggcgacaaagtaacaccccctcccgcagggctcccttcctcgtttctctctttctctctttatttttcgttgttttttttttacgttttaaaataa

SEQ ID NO: 740680 - DNA, 517 bp, Homo sapiens
tccctcccaccgcctctgtttttgggttttggaggcgagatggccaggaaggccgatccatgattcaaaagccctggaattgtctgaaacgcggatgcaaagtagaatgtgaaatgcaaagccctgcttgggcagaacttacaatgtcatgctgacggcccagagaatagaatagaaatcctctccctttctattctccattcactccggagggagagtccaccctgtgctcagctgcagagacttccctaaagccaccgcctgggatgctggacggagtgctcaggccagcgaggagtgaggtcaccacctgccggataaacacagcaaggatgcggacgcgggcgcgggagcctgaggtcccatctactcaggaagcrgggcgggaggatcgctgaacctgggggtccaggccagcctgggcgacaaagtaacaccccctcccgcagggctcccttcctcgtttctctctttctctctttatttttcgttgttttttttttacgttttaaaataa

SEQ ID NO: 740681 - DNA, 504 bp, Homo sapiens
gtcttggcagattggcccattcggagtctctgaggagcagcctcattctctgtccagtgtcatgtccagcctggtgtttgccgagtcctcaacaccggttcattatcttcactctcagacacaagcgtccttcctcctgggatccctgttaaacgggctctggggaggacgataatatcttgaatttcctggcaaccaacagcccatgggcgtatgtccccctcctaaaataatccatctccaaaacccaggccttgtgtgaaccttgcaggtgcctgtgattgctgttgactcactgctctgtgtcctcctccacctgcaggtgaaatgcaagaactgcggggcctttgggcactcagccaggarcaagacctgccccattaagaggtggagtggggcccttcctctgcaggtcctgggctcacacaaggagaaggagaacctgaaaccagcaaaggcccagctaccctttacgactccagggccctttacgacgaatgacag

SEQ ID NO: 740682 - DNA, 578 bp, Homo sapiens
caactggacttggatccaaacaggcacccgaggcgactgcacagacagcagccaccaagacagcaaccctgcagcccagagtcaacctccagcccgcacccagctcacctttcctgggcccagcccagggctgccccgtcctccagcctggaccacccattcatgttccagggaggcccggcagtgtcaccttcatgagaggggacaagggacagaagagccccaggttcagaacgcctcccacatcccgtcctcctgaaaactctgcttctgctcagagccctcgcttctcaaggcagcctgaggggcrgggtccccaggtctcaacgagtgtcctctatgaggaccttcttgtcacttcctcctctgaggacagtgacagtgactgaggcccccaaggcaagaagacccagcttcaagcccatgcgacttggaagtggctgaaaggctgagaaggggagaggcaggaagcagccctgtgcggggtcagcccctccctggcagcggtgtctgttcaaacgtggaccccagatactatcggggatcaacgaacctgcctatttacattgtgtaaattt

SEQ ID NO: 740683 - DNA, 578 bp, Homo sapiens
caactggacttggatccaaacaggcacccgaggcgactgcacagacagcagccaccaagacagcaaccctgcagcccagagtcaacctccagcccgcacccagctcacctttcctgggcccagcccagggctgccccgtcctccagcctggaccacccattcatgttccagggaggcccggcagtgtcaccttcatgagaggggacaagggacagaagagccccaggttcagaacgcctcccacatcccgtcctcctgaaaactctgcttctgctcagagccctcgcttctcaaggcagcctgaggggcggggtccccaggtctcaacgagtgtcctctatgaggaccttctkgtcacttcctcctctgaggacagtgacagtgactgaggcccccaaggcaagaagacccagcttcaagcccatgcgacttggaagtggctgaaaggctgagaaggggagaggcaggaagcagccctgtgcggggtcagcccctccctggcagcggtgtctgttcaaacgtggaccccagatactatcggggatcaacgaacctgcctatttacattgtgtaaattt

SEQ ID NO: 740684 - DNA, 645 bp, Homo sapiens
cgcactgcaactggacttggatccaaacaggcacccgaggcgactgcacagacagcagccaccaagacagcaaccctgcagcccagagtcaacctccagcccgcacccagctcacctttcctgggcccagcccagggctgccccgtcctccagcctggaccacccattcatgttccagggaggcccggcagtgtcaccttcatgagaggggacaagggacagaagagccccaggttcagaacgcctcccacatcccgtcctcctgaaaactctgcttctgctcagagccctcgcttctcaaggcagcctgaggggcggggtccccaggtctcaacgagtgtcctctatgaggaccttcttgtcacttcctcctctgaggacagtgacagtgactgaggcccccaaggcaagaagacccagcttcaagcccatgcgacttggaagtggctgaaaggctgagaaggggagaggcaggaagcagccctgtgcrgggtcagcccctccctggcagcggtgtctgttcaaacgtggaccccagatactatcggggatcaacgaacctgcctatttacattgtgtaaatttaacctgtattaaaatggggctgttgaaagtgtcctatagatttctttttcaattacatac

SEQ ID NO: 740685 - DNA, 563 bp, Homo sapiens
agcattaaatgcctacatcaaaaagtctgaaagagtgcaaatagacaatctaaggtcatacctcaaaagaactagggaaacaaaaacaaatcaaactgaaatccagcagaagaaaataagaaagatcggagcagaactaaatgaaattgaaagaaacaaacaaaaaacaatagaaaarataaaccaaacagaaagctggttctttgaaaagacgaaattgatagatcattagtgagattaaccaagaaaagaagagggaagatccacgtaagctcaattagaaacaaaacaggagatattacaactcatatcacagaaatacaaaagattatttcaggctactatggacacctgcacacacataaactagaaaacctagaggagatggatacattcctggaaatatgcagtgcacctagattaaacctggaagaaatagaaactcagcagaccaatccaagtagcaaggttgaatccatagtaaaaaaaaaaaaaaattgtcaacaaaaataatgtcaaggaccagacggattcaaagctgaattctatcagacattcaaaga

SEQ ID NO: 740686 - DNA, 598 bp, Homo sapiens
cagcagtcagtattaaaatttttatctttatgacagctgtaatatccactttcctagcattgctaactattgtttttggattgagtggtaaaatgaaaatatggtcagttattttattcttaacatcaaatggattctcttctgtgagtcaataaatgtcagtataaatgtacataagaatgctccatttatgataaatttggttctctcattttctstattgaatgaaggccaatgcaaagaacattgcaacgaatggatgtaaggcttctgtagggaaactttatcaatccaatgattttgaggagaggaagaggtaattatttcatgaacaactttttgtggatagaaagcagttcttggaatggaatgtttatgttttttcctgggaaaacaggcagtaacagggttgagaatttattatagtgtaccacatatcatcatgaaatgaaatttattttacttgacataaaatgacagcaattcactctgttgccgtgttctgttttttttctgggtaagatttaatcttatttcaaatctaagcaagttgcttatattgagaataagtggattaaaatggataatgagaactgaa

SEQ ID NO: 740687 - DNA, 575 bp, Homo sapiens
acgtttggttcccaagacaatgttgcatttcacctggcagatagtaggatatcaataaataatattatttagtaaattcattaattacttcactgaaatacttatgaagcatatcagtgtttcagggggtgttttggtgcttgggttatagcagagtatataataggcaagatccttgccttcatggggcttacattctcatgacaatgggcaagcaaaacraatgaacatgatacctgtagttataattacctgaagtcatcaaaaaaacaaaactggaaggtggtgatagagggtgtctcggaggaaggggactaaccgtatattggatagtgtggggatcctcatggatgaggggacatttgtactgaaaggtcaacggcaagaaagccagtcatggaaacttacagagggatctgacaccatgtcaatcagcagattgctagtatcagcatcaagcaaacaacatcagacctcagggaaacaggggaattgccatgtccaaagggccaagactgcaaaacaccacctatgctgcttgagtacctgccaaaagagatcctggttccatcctt

SEQ ID NO: 740688 - DNA, 613 bp, Homo sapiens
tataccaaaaccaattttaagtctagaaggtttatttttatattcttaagttatagcaaagttaacaatatagttatgagattaatgaatccaattaagttaaataaatggtgtaattaagttaaatatagttattaaattaataaagttaatgaatataattaaaatactttaaaaataccgaattataatatttaacatgaatctattttgtgttgcttttatgaaagtgtcaccaaactaaatatttattcattttccccttcatatatacagtgtaaattatagttattgatcttattgttctttctgatcaattcttttttcaagtagctatgtaaagaaatgaccatgagtcacgttattttacagtaaagaataatcctattargtttatctatagttttctaacaatttacctaacatgagaaatgtgaagaaaaacaacctcactgcatctatgtatacacatacacatgattgacatgatttcatgtattgcataaatgtttctcccaatatattgttgcttcatgatcaagcttttttgttcaagttacatcctatttagctgacttgttaacctaaaataagcatagaaaataactaaatg

SEQ ID NO: 740689 - DNA, 553 bp, Homo sapiens
atcaggcactggattctcataagcagcacgcaacctagatcccttgcacgcccagctcacaataggatttgcattccagtgggaattgaatgctgctgctgatctcacaagaggcagagctcaggtggtaatgctctcctgcctgctgctcacctcctgctgtgcagcctggtccctaacagrccagggaccagtactggtgtgcagactgggggttggggggccctgctcaaggtgataatattaggaatggggctgttgggagttgattatgtcatggaggtagagctcttatgaatgagatggtgcccttgtaagagaggcatgagagggttctcttgccttttgaccatgtgaagacacagcagaacaatggccatctatgaaccaggaaactggtcctcaccagacaccaaatctgccatgccttgcttgatgttagacttcccaggcttcagtacagtgagaaattaatttctgctgtttataagccacctagtaaaataattggttatggcagcacaaactaagattagtaccagaagtgggttgc

SEQ ID NO: 740690 - DNA, 553 bp, Homo sapiens
atcaggcactggattctcataagcagcacgcaacctagatcccttgcacgcccagctcacaataggatttgcattccagtgggaattgaatgctgctgctgatctcacaagaggcagagctcaggtggtaatgctctcctgcctgctgctcacctcctgctgtgcagcctggtccctaacagaccagggaccagtactggtgtgcagactgggggttggggggccctgctcaaggtgataatattaggaatgggrctgttgggagttgattatgtcatggaggtagagctcttatgaatgagatggtgcccttgtaagagaggcatgagagggttctcttgccttttgaccatgtgaagacacagcagaacaatggccatctatgaaccaggaaactggtcctcaccagacaccaaatctgccatgccttgcttgatgttagacttcccaggcttcagtacagtgagaaattaatttctgctgtttataagccacctagtaaaataattggttatggcagcacaaactaagattagtaccagaagtgggttgc

SEQ ID NO: 740691 - DNA, 613 bp, Homo sapiens
aggaagaaactaagatgtgagaatgatgacacttaatcttgatgctgctaactgtagcaaagtaatagtaaactcagattttttttttttttttgaaatgaagtctcgctctgtcacccaggctagagtgcagtggcacgatctcagctcactgtaacctccgcctcccaggttcaagcgattctcctgcctcagccttccaagtagctgcgactacaagcgtgtgctaccasactcggctaatttttgtatttttagtagagatggggtttcaccatgttgaccaggctggtctcgaactcctgacctcgtgatctgcccgcctcggcctcccaaagtgctggtaatacaggggtgagccaccacgcctagtcttaaacttagatttttatctgacttggaagcaatatctgatcactgggtatcagtggggctttaaattgattactggagctctaaaattgactactgaatgtgctctctataccagatctatattatgacttcagttaatgacctaagaaattggaaaacttgagccacaatggtctgtttagcctctggaaggtcccactaggtatctgattgcatgaacgtatcattttcttttgta

SEQ ID NO: 740692 - DNA, 613 bp, Homo sapiens
aggaagaaactaagatgtgagaatgatgacacttaatcttgatgctgctaactgtagcaaagtaatagtaaactcagattttttttttttttttgaaatgaagtctcgctctgtcacccaggctagagtgcagtggcacgatctcagctcactgtaacctccgcctcccaggttcaagcgattctcctgcctcagccttccaagtagctgcgactacaagcgtgtgctaccacactcggctaatttttgtatttttagtagagatggggtttcaccatgttgaccaggctggtctcgaactcctgacctcgtgatctgcccgcctcggcctcccaaagtsctggtaatacaggggtgagccaccacgcctagtcttaaacttagatttttatctgacttggaagcaatatctgatcactgggtatcagtggggctttaaattgattactggagctctaaaattgactactgaatgtgctctctataccagatctatattatgacttcagttaatgacctaagaaattggaaaacttgagccacaatggtctgtttagcctctggaaggtcccactaggtatctgattgcatgaacgtatcattttcttttgta

SEQ ID NO: 740693 - DNA, 671 bp, Homo sapiens
tgtttctcaaaagcaatcctggtgttcaggtttttctcttcacaaagttgttgtgttggacagatatacccattgaggattattaagaaagtctgacccaaacaaacaaatatacagatagacaaaaatttattgacactggycaccaaccaaagaggaagaactgcaaaatttatggccttaatttaagcttcttatagcctatatcataaccaggctttccctctgagggtaattcccagttatgggtagtagagactgtatagatagagctcaaacagagagaagcaatattattgtgctgaggagaccgaggttagcgtttaagcctgagacagtggtaagaaattggaaggcacgatcttagagaggagtcacagagagtgaaacctccaggtctctttttaaaatgcccaactgttttgttgttgtctaaacttcacatgcacaagacagaaatccaagtcacttagtagaaaatgttggcaagaaatctaaggaaataaacagaaatttaatgaggaggaaaaagaaattggagttcaatcctccaccaagttagtgtgaatttgagagtgcttcaaaagttctgtagatctcaagcaggggcaagttctagacgtaatgacaaacctgaactatttctaccttaacataaactctatatgaac

SEQ ID NO: 740694 - DNA, 622 bp, Homo sapiens
tatctgactggttctgtactgataggcagtcagtcatgctggctaactttcagaaatatgccatgtttggtggtctcctttctctctgttttctctaggttgaatatggggattcaaccacatcacttcactctctcaccccttatagcacacgcttctctccctttccttggcatcccctggccctatcatgacctgaggtcttccctaccactttgggggctcccatctaaaaatgcattctaagtcctctacctggaactaatttatctccaggtctacactactgataacaagatatacgatcccttgcaaaggaacttgtaacaccctgaaattactcagaaatcacacctcacaggagattgagaccatcctggctaacacgrtgaaaccccgtctctactaaaaatacaaaaaattagccaggcgtggtggtgggcgcctgtagtcccagctactcaggaggctgaggcaggagaatggcatgaacccaggaggaggaccttgcagtgagccgagatcgcgccactgcactccagcccgggcgaccagagcaagactccgtctcaaaaaaaaaaaaaaaaaaaaagaaagaaaagaaatcacacctcacaggcaa

SEQ ID NO: 740695 - DNA, 564 bp, Homo sapiens
tcaggcacatgtttgctgtgggggtggtaccttcatggagaacctctgccagggcagtgtggaagggaaatgtggggttgaagcccccacacagagtcctcactggagcactgcctagcggagctgtgaaaagagggtcactgtcttccagaccctagattggtagatccactgacatcttgcactgtgcactttgaaaagccacagatgctcaacgccagactatggargcatcagggagggaggctgtagcctgcaaagtcagagggtcagagctgcccaagacaatgggaacctaccccttgcatcagcatgacctggatgtgagacatggagtcaaaggagatcattttggagctttaagatttgattgccctgctggattttggacttgcatggggcctttagccccttcattttggccaatttctcccatttggaatgggtgtgtttatccaatgcctgtacccccattgtatctaggaagtagctggcttggttttgatattacaggctcataggcaggaggaacttgccttgtctcagatgagactttcgactgtg

SEQ ID NO: 740696 - DNA, 568 bp, Homo sapiens
gaacttatggggaactggagtaaaggttactcttgctgtgctttagcaaagagactggcaacattttgcccctgccctagagatctgtgaaactttgaacttgagagagatgatttagggtatgtgacagaagaagtttctcagcagcaaagcattcaagatgtgatctggctgtttctaaaagcatatagtcatatgcattcacaaggagataatcagaaattggaacttatgtttaaaagggaagcagagcacaaaagtttgggaaatttgcagcctaatcatgtggtagaacagaaaaacccattttctggggagaactgtaaacttttggctgcagaaatttgcgtaactaaaatgaaactgaatgttaatagccaarataatggggaaaaagtctccagggcatttcagagatcttcacagcaatccctcctatcaaagacctggaggcctaggagagaaaaatggttttgtgggccatgctcagggtccttgctgctctgtgcagcccggggacatggtgccctgtgtcccagctactccagctccagccatggctaaaaag

SEQ ID NO: 740697 - DNA, 625 bp, Homo sapiens
taattgctgcaatgttaccattttgattttaattttggccctctccaagtctttgttatcatcaagttcttctttccagtgggagatgggaacagcttgagtaagtagactgtggcaccttttgtcctacattggcagaagttcaagcaatttaaaagctaccaaactgagtagctttcagtaacagctttgtaagcagtttttcattctgtgcttcaaatagactgatgctggagaataggaaagttgtgttcagtttcactttggaaaagttggtaaccacagtctgatgcagcctttcatttgtttctctaggttcagtagtaatgtctcctcttttattcctgattttagtaagtttagtcttctgtattctttttcttgaccagctaaagatttgcctatttytgttaatcttttcaaatacacaacttttggttttattattacctttctcctgcttgttttagatttagctgctcttgagtgttttaaggtgcttctaatggtaaggctgttgatatgagctcttatttcttttttaatataggcatttataaatttgcctttatgcattagtttcgtggcatcccatatgttttgatatgttatgccttcattttta

SEQ ID NO: 740698 - DNA, 522 bp, Homo sapiens
gcaagtaatcccagcactttgggagtccaaggtgggaggatcacgaggtcaggagttcaagaccagcctggccaatatggtgtaaccctgtcactactagaaatacaaaaattagttgggcatggtggcgcgtgcctgtaatcccagctactcaggaggctgaggcaggagaattgcttgaacccagtaggtggagactgcagtgagccaagattgcaccactgcactccagcctcagcgactgtgcaaaactttgtcttgggaaaaaaagaaaaaaaaagcaagaaccaatcgtatgccatcttcaaaagacccatttcacacataaygacactcataagctcaaaatatagggataaagaaaaaaatctaccaagcaaatggaatacaggaaaaagcaggggttgcaatcttaattttacacagaacagacttcaaccaaaaaagatcaagaaagacaaaaaatgaatattacataataataaagggttcaattcaacaagaagacctaactatccttta

SEQ ID NO: 740699 - DNA, 610 bp, Homo sapiens
ttggagcattctgaagttctctacagacatctcatttcaccagatttttgatttttattttaagtgtttcctttaacctcttgttgtctccaaccatcatttccttccttgggcactcacagtcttaaactatttcctttgattgttcttgaaaatgcaccattggaaaagtttattctcattaggtaagcttcaagtcatacataataaagactactttgaagatgggtgtggggatatggcagactcgttgaacaatgatggttctctgggaacaggtaagttcaggaggcccaacttcttacccctcttcrgtagctattattcagttgtttgcagactgttggtttttaaggctacaatgaagagggaaaaaggagataaaaagagggccacttagaacgccacaatgcttgctgttgttactgagattcacccatttttcttttttcttttctttcttttttttttctggatggagtcttgcttcattgctcagcctgaagtgcagtgctgggatgtcagctcactgaagcctctgtctcccaggttcaagcgattctctgcctcagcctcctgagtagctgggattacaggcacacgccatgac

SEQ ID NO: 740700 - DNA, 640 bp, Homo sapiens
acacctgatttcagtgcaaggcagcagctgccattgactgtcatctgttcctctgggtattggctaccatggtcagtagaaatggtggggcaggaagttggcaagctttttgccaactagtatggccaagtcatggcaggagggtcagctctgggctgtgtttaggggaagacgagccagagtgtgatgtctggggctcctggtcacatgacaggaggggatgctgaatccaagcagaccggaacctagtcctgctgaattccagggcagtctgctactgcagctttgctctgagtcccgtgctacatgccttaaactaaacgcgwaaataataggtggctttgatgctgagtgggttcctcagccatctggatccagagaggagtgagtgagcctctgtgagctgggctcaggctgccatgcccataccagtgtctaattgcaagcgggtgtcagtaactctcccaggccttgggaaggcatctctttttcctggtctttggtgtttaatattaagtttcagccaagctcatgatcacagctgttgtcaaagtatctgcaggaaaatccgtttttattgaagctgaaaaggtcagttttcttggacgtctccatggtgaaaataataaatgcagctcat

SEQ ID NO: 740701 - DNA, 640 bp, Homo sapiens
acacctgatttcagtgcaaggcagcagctgccattgactgtcatctgttcctctgggtattggctaccatggtcagtagaaatggtggggcaggaagttggcaagctttttgccaactagtatggccaagtcatggcaggagggtcagctctgggctgtgtttaggggaagacgagccagagtgtgatgtctggggctcctggtcacatgacaggaggggatgctgaatccaagcagaccggaacctagtcctgctgaattccagggcagtctgctactgcagctttgctctgagtcccgtgctacatgccttaaactaaacgcgtaaataataggtggctttgatgctsagtgggttcctcagccatctggatccagagaggagtgagtgagcctctgtgagctgggctcaggctgccatgcccataccagtgtctaattgcaagcgggtgtcagtaactctcccaggccttgggaaggcatctctttttcctggtctttggtgtttaatattaagtttcagccaagctcatgatcacagctgttgtcaaagtatctgcaggaaaatccgtttttattgaagctgaaaaggtcagttttcttggacgtctccatggtgaaaataataaatgcagctcat

SEQ ID NO: 740702 - DNA, 561 bp, Homo sapiens
gataagcctggacatcttgtcatgctggatagcaaggaggctatcagagactaaaagatcatatcaaaaggacacgggaaccatctgcaaggggctcccactggccaaacatagagccatttgagcatcagtaaagaygataattgtgatggataaaaacccataaaatatgtttaaatcttcaatttatgaaactacttaaaacattgtcaccttcagaggatgaggaacaaattcactctctgaaaaacaggtaaataatgaggaaagaatcgcacatttatcctgcctctgtttaatatgtgaactgtaccactgggtaagcaaatggtggacgactggaagcatctctttttaaaagtactcaagttaatatgtgaggaagtgacagaattagaatatcaccattttgaaacccctagtgaattaacagagctaagcattgtgctgcaacagctgttagcatcacacaaagagaggcaaaccggatattatgtgcctcctaacgaaggaatgcagcacctctggtcctgccaaaaggacagaaggtgagtgtgatcc

SEQ ID NO: 740703 - DNA, 555 bp, Homo sapiens
ttcagctcagaatctttggttgatagatcatgaaggttgagtcaaatgtgctctgggggaggaagggagaaaatcagcttcatgctgaagaagggctcctgctccaaatcagcaaagacaaagaaggttcattttggatgcaagttctgatccattaatggtggctacttagaatatgatgtgaataaggttttgagggctgcgtcctggccagggtgataataatgtcacttggggtacctgccatagacgtcagggacttagaacatgcaggctatgtgcttactgtccctcccagagcagrgtgctggctagacaatatcagacttggagtctgaagacgggggctaatgtcttagaagttgccaaaagtaaaaatctttgtaagttttaaagtcatttaacttctcttctctcatactaccttggtgatcctcccttagagggttggacaacaatccagtttaattgttggattcgtccatagatttgtacaaagtggtataaagacaggtcttatttgaattgggaaaaagagatgatttagattgtcat

SEQ ID NO: 740704 - DNA, 611 bp, Homo sapiens
gctatgcattctggggcttcaaaaccagaaagaggatacaggaacaaagaagaggaaagggaaacatttactcgaagaaggaaccaagtagaaactggaaatgcatatccaaataattaggacttgtaatatatgaaaattataaacatgtyagatattgtttctgatggtcaactgttgaaatgtcaagagaacggcttttctctcagtgaagaatatttgaagaattaaaaaacattccacccttaaaagaggtctgttctgacataggaagtatcttgaaacaggagaaatatgagagtccagatattgggtatgttcggttaaggcagtattatggaagatactccttcttggataagaggttgtacagatgacctacagttccctgcgactttacgatcctatgacactccttttaatatgtcctaaaagcaattctatgagtaaagcttatgaaccatacaactggaaggaaatggattaagatgttgacagtgattattactgggtagtgagattacagggattatagttttatacttttggctcacctatgtcctctaaatgttttacagtaaatatttcagaacattttagagaaaactctt

SEQ ID NO: 740705 - DNA, 595 bp, Homo sapiens
tgtggatgtcctttcagttacctcttcttctactgtcataatctgttaacatatctgggtgtattcattcataaatgtgtctttatatttaggtaggagcagaagttcttcgtcctctacttcagcagttggattcttcagagactcatcggtctcttcactttgaagtttcatgccactggaagaaagcaccgcatgttcccataatgctttgtattattttcgctggtatccagtccccagtggaaaagcaatyttgcagcatgtcaagagtgaaaatggacaaaacatttgcaatctggaacctggaattgaccttgggccagtaacagagctgcataatcattataataaaaatttaccaaaaaggacatatagaacagtattcatattacattatcatttgcattataagtccccaattatgcctagaaggagataccaagtcatatcttcaaatattacctcattcagaatgacagtggtatttagacaacagagtgatctgttgaatgacaaaaagcctacttacaaacttgttgggcagctgtgtcccaacaagcctattcaaacacctttataaatccatattaat

SEQ ID NO: 740706 - DNA, 600 bp, Homo sapiens
cttagtatgacgctgatacataactaaatttgatacttacatttttgtatgaaaatgagttgtgaaagttttgagtagatatcactttctcactttttgaactaagaaatttttgtaaagaaatatatatatatatatgcctttttcttagcctgtttcttcctgttcatgtwtttgcttatgtttggtgtgtagaactggataaatgaaaagttctgtgtttaagttcttcaaaatgtatatatttagtgctgcatctttcagtactttgaaatacctcatgtttctaaaaataaatagcaattaaattatgcaactaaaaaaactgtgacatctactaacagcgaatgaattcaatatttctctggataatataagccctatttacagctaaaagagacacagtcttcatggtctgtgaaagaaattcatattatattatgtgtacttagtaatatcctcaatgtgttcaaatgatagaaaagtgtaagttccttgaatcaattctcattttttccaataggaatgtaggcattcctcttttaattttttattttaattttaatttttaattatggatacataataattgtatacagt

SEQ ID NO: 740707 - DNA, 633 bp, Homo sapiens
atcatcttaatgtgcaggaagcccacaggtaaagagttgtgataggcagaattctaagatggcctccagcagtctcacttcctgttatacatatgtcatttgagtgtggacaggacctgtgaatatgataggatgtcactctcatgattaggttacattatatggcaaaagtgaaaggactttgcagatgtaattaaggtcccaaatcagttgatttggagtaaacaaaaagggagattatcctgggttaacggacttcatcaggtgaaatcccttaaaagaggagagaaattcctgaagagagaaagattctactgttggccctaaagatgctaatagccatgatatgagctatggagatcaaggtcctaaactagttgctgacaagtagtctctgaccaacagccaacaagaaaacaaaatggagacctcagtcatacaactgcaaaaaaaatgaattcttccaacaatccragtgatttcagaagctgattctttgcctagtcaagcctccagatgagaacgctgcctggttaacaccttgatgatatccttgttagaccttgggcaaaggcactggtcaagccatgctcagacttccgacccaaagaaactgaaataataaatggatgt

SEQ ID NO: 740708 - DNA, 570 bp, Homo sapiens
gaccaatatcctgaagcgtttcccctatgttttctttgattagttttatcgtttcaggtcttacatttaagtctgtaatccaacttacttgagagataggggtccaatttcattcttctgcatatggatatccaattttcccagcaccatttagtgacgagactgtctctattgtatgttcttggtacctctgtcaaaagtcagttggctgtaaatacgtggacttatttctggwatctattctgtttcattggttgctgacgagtctgtttttataccaatactgtgctgttttggttattatagccttgtaatatgaagtcaggtagtgtgatgcctccaagctttttttcattttgctcaggattactttggctttctggctcttttttaattctgtatgaattttaggattttttttttctatttctgtgcagaatgtcattggtgttttgacaggggttgcattaaatttgtagattgctttgggtagtctggtcattttaaccatattaattcttctgatccttatgcgtgggatatctttccacctgtttctgtcttctgcat

SEQ ID NO: 740709 - DNA, 608 bp, Homo sapiens
tccccctaatcacatggttagtgtgaccagcccccatcctgagtcattcattagcataaacccaggtgtgaaccaaggggctcaagaataacaaagaccctcctattactcaggaaattgtaaggttttcgagtctctctcccagggacaaaggccacattctttgttatagaccccagtctctgtattttttactctatagccttggtaccttgaaagtgtttaaagcactcagttgttggtttgatacaatttaatattttttaaaaaagttttcgttgtttcctttgaatctgccaacccaagtttacttaggagttggaaactttccatctaatatgggtttctattgttgaaaaaaattattctgatacttgttaaaatggtaaggaaaactttactcaagactattgcacctagtgcaatagcggagggctcaactctractacaacaaggagaagggggtggatttatgggtgaggggaatcagtggatggaaaatcacgaagaggagacatcaaaggtaggagattcttgttaaggcaggccaaagatttatgtatcaaaggtgggagatgaggaatttaatcatatatcaaggatgagg

SEQ ID NO: 740710 - DNA, 504 bp, Homo sapiens
tagactgggtatattgtattaaacactaactcagttactattgtacaaaattagaagttacagttatcactattgatgtttcaagtccaaactatttgcataagaatgactatcaggccaggcacagtggctcacatstccaatcccagcactttgggaggctgaggcaagtggatcacctgaggtcaggagttcgagaccagtctaggaagaaggtgaaacctcatctctactaaaattacaaaatttaggtgggcgtagtggcatgtgcgtgtaatcccagctactcaggaggctgaggtagaagaatcgcttgaacccaggagactggaggttgcagtgaactgagatcacgccattgcactccagcctgggcaacagagcgagattccatcttaaaaaaaaaaacaaaaaaccatcaaaagtataaaattagagtctcacttgtgactttcagtaaattctacccttgatcttagccaaaaggcggagaagcaatgactt

SEQ ID NO: 740711 - DNA, 626 bp, Homo sapiens
aaatcccccaacactaactagttataaatctccatcagcatggactttagggagactagactgggtaaaatgcaaaaggctatgtcatcaatcaattctctcctaactgcatgacagagctcatcataaagcaaaagttatctatgtaatgaaaggaagacgcacgtccttgagtcaaccagtgtggtcacagcatgattgatgtccaagagctagaggaacatgggccaaaactcatccaaaataggctgaaagtcagagactgaggagagacaggaagcattaagagactgctaagtgataaagagctgcataaatcagcttgctgcatgtcagagaacagcttgactttgacctgacatttgtttgtaggtcaattccttgctcacatctgtgtaggcctggagggtccctttcacttggccaagggttaatccaaggatcctagacaaaactgaaaaataagcaattytgtttcactactttgtaccttggaaaacactactcctttaatcctcaggtacttagtgacccctgactccaacaaaatatgctgtcagcatcttcatacaaattgtctaacacaaaataggtgctcagtatacattttcttttcctccttcttt

SEQ ID NO: 740712 - DNA, 735 bp, Homo sapiens
aagcttaggcaggtcacaggatccaaagatcaatacaagaaaacaatctgctttatttctttgtattaacaattaacaattttaaattaaaatttgaaaatacaacttacaaaaacaataaaaaatacttaggaatacatttaacaaaaatatgtaaaataagtacagtgaaaattgtaaaaaagtgacaaatgtaataatgctttattacatagaaatatgtaatcatacatttgaagactcaaagttggtaagatggtaattctacccaaattggyttataacttcaatgcaattctattcaaaattacagcagatgttttcctgaaattgacaagctgattctaatatttataagcaaatccaaataatctaaagcagccaaaggatcttggagcaagaatataagtggaagaattcacacaacattattctgctacttactataaatccccattaaaatacatagtatagtactgacttaagaattggcatgaagaccaatggaatagaaaaaaattccagaatagccctatacattaatgtttaattaattttcaacaacagtgtctagatagttcaatggtgaaaggatagttctttcaataaatgaagctgaaataatagaatatttttgagtaaaaaattgaccccaaccctacatagaattaaactgaaatgtaatagatacatctataagacttcttaaagagaatataggggtaaatttttgtg

SEQ ID NO: 740713 - DNA, 501 bp, Homo sapiens
gcaatgggactgctacttgctcttctttgtgtatctgttagaatttggctgtgaatccattatgtccagggctttttcgggtttgtagggtttttattacagattcaattttggaacttaatcttggtcagctgaagtactgaatttcttcctggtttaatcttgggaggatgtctgtttccaraaatttgtccatttcttctaggatttctagtttgtctgcatagaagtgctcataatagtctctaagggtttttgtatttctgtggggtagatggtaagattccctttctcatttctaattgtgtttatttgaatcttctctaattagtctagctagacatctatcaatcttatttactcttttgaagaaacaacttttaattttgttgagcttttatatagatctttacatctcagtttcattcagttgagttctgattttggttgttttttcagctagctttggtattggtttaggttaggttgttaattttgaga

SEQ ID NO: 740714 - DNA, 501 bp, Homo sapiens
gcaatgggactgctacttgctcttctttgtgtatctgttagaatttggctgtgaatccattatgtccagggctttttcgggtttgtagggtttttattacagattcaattttggaacttaatcttggtcagctgaagtactgaatttcttcctggtttaatcttgggaggatgtctgtttccagaaatttgtccatttcttctaggatttctagtttgtctgcatagaagtgctcataatagtctctaagggtttttgtatttctgtggggtaratggtaagattccctttctcatttctaattgtgtttatttgaatcttctctaattagtctagctagacatctatcaatcttatttactcttttgaagaaacaacttttaattttgttgagcttttatatagatctttacatctcagtttcattcagttgagttctgattttggttgttttttcagctagctttggtattggtttaggttaggttgttaattttgaga

SEQ ID NO: 740715 - DNA, 635 bp, Homo sapiens
cagtctatcatcaacaaaacagctaaggaaatattttctgaaacatcaagccacattatatcaccctctaatggcttctcctcatagttagaataaagtgccatgttattgctgtgacctaaaagttcctgcatgctctgtcccctaaatctatctaggctcatttcctaaatctctatttttatcacccttaataattttgctctggcacawtggaatttttgctgatctcagtacaaaacagcagactccttttaggttttttcactttctcttttctctatataatattacctatataatattatctttcctcaaatagttaagttgatcaggttgctcttaatactacctccacaaagagaaactcataaccattctgtctaaatgctctcctttttattgcccattttcatgtccttctttacttttaattactcgatgttacctacctataaaaatagcattatatatatatatgtatatttgggctgttttggttcatgcacccatactaaaatgtaaattttatgaggacttatttaactaagttatctttagtaccttgaagagtaccagacatttagtaagttctcaataaatgtatattgaataaataaattgtaagtgttcga

SEQ ID NO: 740716 - DNA, 635 bp, Homo sapiens
cagtctatcatcaacaaaacagctaaggaaatattttctgaaacatcaagccacattatatcaccctctaatggcttctcctcatagttagaataaagtgccatgttattgctgtgacctaaaagttcctgcatgctctgtcccctaaatctatctaggctcatttcctaaatctctatttttatcacccttaataattttgctctggcacattggaatttttgctgatctcagtacaaaacagcagactccttttaggttttttcactttctcttttctctatataatattacctatataatattatctttcctcaaatagttaagttgatcaggttgctcttaatactacytccacaaagagaaactcataaccattctgtctaaatgctctcctttttattgcccattttcatgtccttctttacttttaattactcgatgttacctacctataaaaatagcattatatatatatatgtatatttgggctgttttggttcatgcacccatactaaaatgtaaattttatgaggacttatttaactaagttatctttagtaccttgaagagtaccagacatttagtaagttctcaataaatgtatattgaataaataaattgtaagtgttcga

SEQ ID NO: 740717 - DNA, 611 bp, Homo sapiens
taattcccttctttgagtaactcttagtagctatagctgccataacaaaatactatacaacagaaattatttctcatggttttggaggaaagtctgagattagggcgttagcttgttagttccttctgagatctcgctctctggcttgtagatggccatcttctccctgtgtcttcacatgattgtccctttgtatgtgcacacagctgtgccctaatttctgcctcctataaaaagaccattcatatttgattaaggcccaccctaagaacctcattttaacatacttacctctttaaagaccttatctccaaacacagtcacattctgaggtactcagagttaagatttcaacatatkaggagcccataacaatgatacagagtctttttcagaggtggcttccacactccacttgtgtgtttctgaccagaatcacaaattgtatgctccattgactgtgattcatactccatcaattgtgatgtattttctccctgatctaggagaatcattcctcctgcatttttagttggcactgaatgggggagtgtgcgaattttcttccccctagtgatgatgacactttacaaatgcaaatgcagagtttc

SEQ ID NO: 740718 - DNA, 611 bp, Homo sapiens
taattcccttctttgagtaactcttagtagctatagctgccataacaaaatactatacaacagaaattatttctcatggttttggaggaaagtctgagattagggcgttagcttgttagttccttctgagatctcgctctctggcttgtagatggccatcttctccctgtgtcttcacatgattgtccctttgtatgtgcacacagctgtgccctaatttctgcctcctataaaaagaccattcatatttgattaaggcccaccctaagaacctcattttaacatacttacctctttaaagaccttatctccaaacacagtcacattctgaggtactcagagttaagatttcaacatatgaggagcccataacaatgatacagagtctttttcagaggtggcttccacrctccacttgtgtgtttctgaccagaatcacaaattgtatgctccattgactgtgattcatactccatcaattgtgatgtattttctccctgatctaggagaatcattcctcctgcatttttagttggcactgaatgggggagtgtgcgaattttcttccccctagtgatgatgacactttacaaatgcaaatgcagagtttc

SEQ ID NO: 740719 - DNA, 515 bp, Homo sapiens
tggtgaccttcaaatcctctttcaccctctcagcacaagtttaacccttctgtaaaattttccttgactccgttagagttagtaaactcattctctctgctccttttctacattgcttttgaaattgaattgtatttttaatgttaactttttcccaccagaataagtgttatttgagtgcaagaacaaaacattattcgttgtattttttgaagcgaacacagtgatttctgaaatgtagaacataaatacaggcttttaaaatgataagtaataartgtttacgtgcatttagagccttgcttttgttctcctcacaatcttgatactgtttctaaaattatatggcatattctctctctctctctctctctctctctctctctctgtgtgtgtgtgtgtgtgtgtgtgtgtgtgtgtgtgtagtgattctgatattttagaggtattctaaggttagacattttctaccatgtcgtaatgggaaaattgtccttctggaagtcagtcgtcat

SEQ ID NO: 740720 - DNA, 492 bp, Homo sapiens
cttgaaacaaagtttatttcgcgttctggtataatattacattaggttctttctatgttgtcttcaaattttgctatgtagcaattaacaatagcatttagataggtaagatacctcaaagtggatatccagaatgttaaaagtgaagaaataagtaaataaaattgaaaatctggtcagggattcataagtgagaagataaagtaagatcggctatgtgaaaacaactgatgaagmtgagtttgccagatgttcaggttttgcccatttgagcttatttcattgcagcactgttttctgtgctgatagagcactgatagagacactgcctcacactgtgacaccttggcagtaaagcagctgcccccttttcattttacagcacctctgtacctgtagcttaatacaagcaagcttaaaatggcacactagacatatgaacatggtgcaaggttgtatattcttataaagcattatttcttcggacattaa

SEQ ID NO: 740721 - DNA, 599 bp, Homo sapiens
ttcactataatcaagtgctattaatcataaggatgcagggatgattccatgtatacaaatctcttaatgcaatatatcacattaccagaatgaagaacaaaaactaagaatcatctcagtagatactgaaacagcatttgacaatatttagcagaagttcatgataaaaacttgcaaaaaattaatgatagaaagaatgtaactcaacctcataaaggctacatatgacaaaccctcatctaacatcawgcactattagaaaaagttgaaaacttttcttctaagattagaaacagaacacgggtgcttacttttgttacttcaattcaacgtaatagtggaattcctagacagagcaattaggcaagagaaaaaataaaaggcatctaaattggaaaagactaaaaattctccctttttgcacattaaatgatcatatatatagaaaactctgaagacttcatcaaaaatactattagaattaataaattcagtaaaaatgtagcatgcaaaatcaacataaaaaattagggtcgggcgtggtggctcacgtctgtaatcccagcgctttgggaggccaaggcgggtggatcacgagg

SEQ ID NO: 740722 - DNA, 599 bp, Homo sapiens
ttcactataatcaagtgctattaatcataaggatgcagggatgattccatgtatacaaatctcttaatgcaatatatcacattaccagaatgaagaacaaaaactaagaatcatctcagtagatactgaaacagcatttgacaatatttagcagaagttcatgataaaaacttgcaaaaaattaatgatagaaagaatgtaactcaacctcataaaggctacatatgacaaaccctcatctaacatcaagcactattagaaaaagttgaaaacttttcttctaagattagaaacagaacacgggtgcttacttttgttacttcaattcaacgtaatagtggaattcctagacagagcaattaggcaagagaaaaaataaaaggcatctaaattggaaaagactaaaaattctccctttttgcacattaaatgatcrtatatatagaaaactctgaagacttcatcaaaaatactattagaattaataaattcagtaaaaatgtagcatgcaaaatcaacataaaaaattagggtcgggcgtggtggctcacgtctgtaatcccagcgctttgggaggccaaggcgggtggatcacgagg

SEQ ID NO: 740723 - DNA, 638 bp, Homo sapiens
atgcaattagttcctacacttagattgctgtcaagatattttttacactaaatgtgctattttgaacatcttttttacattatgcttgctatcactgctttatgtgacacagtgattgctaaaggtactctccccaagaccccttcaccagacatgtacgccaacctgctagcctctgggagtgatggctaccaaaactcacagttgattacttctcttgaatgaatgactgaataggagcaccttacccaaaatggtagcttgtggtcactgactaactgatgaaatgacaggctcaattacctcaattggagccatctctgtggttgaacttgtgcttcagatattatagagggagggggctaaatttagwctccagccaaaggcccattcatggttagctttgttaccctactctctcctgcttcctgtacttccagtgtctggaaagcattctctcaatcactttagcaagaatgtccctctcagactctggggtgtttctaaggaaattaacctaaaatagctggtaccaggacttagtgcctggcatgctgtagcagtattattgttaacacctttacccacaaggaggcaaacatatacaagggaaatgctgaaggctgggttcctactca

SEQ ID NO: 740724 - DNA, 534 bp, Homo sapiens
gaaaactgaagttcagagaagtcaagatgtcttgcccaaggcccatccagctagcaaatgatagggctggaggtacggttagtggtcagacatgtttgcttgtttttagagctatgcctcttagccaccagaccatcttgccttccttgtaggatggagcggaagtcaccattcctcyctcccaggaagtggaaattgctgggaaagaaagctggagaaagttcagaccatttagttagcttttggtgagcaaccatggtgcactgggcccggcagggaacgcagagttggcggccaggccagccatccagctccccatctaagcagacagaccgaccccaggaagaggggtgggtgatgacagcggactggtggggtgccagcccatgcggtggtgatggctggtgttcgtcaccgggtggctcgagggtggacggtggtgggcccaggaatggggcatggtacacagagctgttctcggtggggctgcttggatggctgtacacgctggaggcttcaccactcggcgtgtgc

SEQ ID NO: 740725 - DNA, 567 bp, Homo sapiens
ctgcagaatagtaagaagcagaggatagtggctttagaacatgacaggcctgggtttgtactccggctttgccacttaccagctgtgtgacttgggcaggtagcttaccctttccaagcctcagttgcctggtctgtaaaatgaggtaatagttgtaccaatctcttagcaatgttgttagatttaaatgaggtactaaatgctccatacccctcaaaaaaggaccttccagaagggagtgaggctggggcatgaaatagttggagatattgctgaraggtcctggcatggatgagaactcaggccacagcagctgagcagacctactcctgggccaggggctctttctgtgctaaagccccctctcaggtgttccaggaagaaacaggtggttagagtctgaccattagagcatgaaagagaaagaacttagacctagtgattctggtagtaagttccctacttggtcctcctccccggcaccctcctactggaatgccatgcacagataaccaccttggatgacttaatgtcccggagcctcagtttcccctgtatgcctttaac

SEQ ID NO: 740726 - DNA, 639 bp, Homo sapiens
atggatccagaagttggatcacactcaccttctgtccttttggcaggaccagaggtgctgcattccttcgttaggaggcacataatatccggtttgcctctctttgtgtgatgctaacagctgttgcagcacaatgcttagctctgttaattcactaggggtttcaaaatggtgatattctaattctgtcacttcctcacatattaacttgagtacttttaaaaagagatgcttccagtcgtccaccatttgcttacccagtggtacagttcacatattaaacagaggcaggataaatgtgcgattctttcctcattatttacctgtttttcagagagtgaatttgttcctcatcctctgaaggtgacaatgttttaagtagtttcataaattgaagatttaaacatattttatgggtttttatccatcacaattatcrtctttactgatgctcaaatggctctatgtttggccagtgggagccccttgcagatggttcccgtgtccttttgatatgatcttttagtctctgatagcctccttgctatccagcatgacaagatgtccaggcttatcttacacatttcctgttctagacctgcaatcagccatttttccaagaagtcctggtttcaatca

SEQ ID NO: 740727 - DNA, 647 bp, Homo sapiens
aatgagctgcatttattattttcaccatggagacgtccaagaaaactgaccttttcagcttcaataaaaacggattttcctgcagatactttgacaacagctgtgatcatgagcttggctgaaacttaatattaaacaccaaagaccaggaaaaagagatgccttcccaaggcctgggagagttactgacacccgcttgcaattagacactggtatgggcatggcagcctgagcccagctcacagaggctcactcactcctctctggatccagatggctgaggaacccactsagcatcaaagccacctattatttacgcgtttagtttaaggcatgtagcacgggactcagagcaaagctgcagtagcagactgccctggaattcagcaggactaggttccggtctgcttggattcagcatcccctcctgtcatgtgaccaggagccccagacatcacactctggctcgtcttcccctaaacacagcccagagctgaccctcctgccatgacttggccatactagttggcaaaaagcttgccaacttcctgccccaccatttctactgaccatggtagccaatacccagaggaacagatgacagtcaatggcagctgctgccttgcactgaaatcaggtgttggaca

SEQ ID NO: 740728 - DNA, 647 bp, Homo sapiens
aatgagctgcatttattattttcaccatggagacgtccaagaaaactgaccttttcagcttcaataaaaacggattttcctgcagatactttgacaacagctgtgatcatgagcttggctgaaacttaatattaaacaccaaagaccaggaaaaagagatgccttcccaaggcctgggagagttactgacacccgcttgcaattagacactggtatgggcatggcagcctgagcccagctcacagaggctcactcactcctctctggatccagatggctgaggaacccactcagcatcaaagccacctattatttwcgcgtttagtttaaggcatgtagcacgggactcagagcaaagctgcagtagcagactgccctggaattcagcaggactaggttccggtctgcttggattcagcatcccctcctgtcatgtgaccaggagccccagacatcacactctggctcgtcttcccctaaacacagcccagagctgaccctcctgccatgacttggccatactagttggcaaaaagcttgccaacttcctgccccaccatttctactgaccatggtagccaatacccagaggaacagatgacagtcaatggcagctgctgccttgcactgaaatcaggtgttggaca

SEQ ID NO: 740729 - DNA, 488 bp, Homo sapiens
ttatttttgaagatgaccagagtaccttttgagtgataaagtttatatgcaaaatgatactatcatgtggaatgggaaacctaggttcttctctcttttgtaacagagggatgtctcagcatttacagcatatggaaaacttatttaattactcatatttacagtgtagaagaggcagtccaatcagagatagccccaagtcatttaacccaaggcatgtcagccaaraaagtcacacacaaaaatttccaaatacgttgaatttacttgggaattacaaacgataattataacctaaaatgtataactattgcaagccatatatccattttctctgaatttaagaacaaaattatcatgggattgttttagaaagtccttgagacagtctttatcttaggcatatatgtgtgagccctcttgcctcatgttctcccgggtctaatttgtttggatctctcaaaaagtgatttcaccgattcagaatt

SEQ ID NO: 740730 - DNA, 611 bp, Homo sapiens
ctgctctccacttggggactttttcccaccaggatccagtgaacagcgaaggagcaaaaagaatcacacagaacaggcaacatggatcagaggtgggggtgaaggtggggctgtcatgtcatatgggggctgtgggtgatcacaaaagtttccatagaaaaaagtgatgtcagaacaaagacttagggaagaaaygctgcttgtcacttgcagctgaggggccagagagtcctaggtagggggacagcccaggtgaaggccctgagataggagcaacctcagtcccagaaaaaggaaagaagcctgcgtggctggagcagagggagcgaggaggacacaggcaggagatgaagtcagaggggtcctgggagcccagatctgcagggatgaggccttgaaacatttttctcccacacctcaaaggaattttggaaacgatgtattttctcactcctttcatgtatacatgcaaatgtctctttacattataaatgacaacacttacaaataatgtaatttatctcccatacttaaaatacatgctgtcaagtttggctaagcttccagaaatacactgtcaccctcatctgagacatgtaggactgtaaggg

SEQ ID NO: 740731 - DNA, 513 bp, Homo sapiens
tggccctcagccttggtctgacccccctctggggtcactgtagcagcttcccagctggccttcccttcttaccacgtggccctcagccctggtctgaccccctccgggatcactgcagcagcttcccagctgggctttgcttcttaccacgtggccctcagccctagtctgaccccctctgggatcattgcagcagcttcccagctggccttcccttctcaccacgtggccctcagccctggtctgaccccsctctgggatcactgcagcagcttctcagctggccttcctgtttccgccattgctttgtgtattttccatgaaggagcaaacgatttcttttatcataccattcctcgactgaaaactccagtggctccaggtcggcaccaagcctgtgaagcctcagtctgacatctgctgccccttggacctctctgttggatatgactcttccgtgggcccctgtgccccaggctggactggtgttgccattgcttgaacatctgagtg

SEQ ID NO: 740732 - DNA, 441 bp, Homo sapiens
aaaataaatgtctatttatatttatacatgcatgcgcacacgtgcctgaaaaaagacccaaaggataccaatcaccatgttagcagtggctatttctggatgatgggcttatgtcttctttttcccaaaatctcctgccatgaatatgtattctttttgtaaacagaaaaacaatgaagaaaaaataatccctacagaacccaacctcttttgattcagagagcgyatttctgcagagtggtatttagggagaaaaggagagaactgtgcttccttaaactaaacagcagaattattaaaacaaaggcagaaggtagaatccggccacaggcattacctcgccatctctgagcagtggggggaaatggaagaacagggactggccaagggaaactgtctggattggattgtcgaggttttcgcttttgtaaagcttgacct

SEQ ID NO: 740733 - DNA, 658 bp, Homo sapiens
gtgaattcttgttgattgaagggccagtcctttctcaggagcctcttgtggaacatcttatcagactacctaattagcaggtgatgtcctataggtattgacaaagaagctaagccaagagtctaaatgtattttaattgggttcaaattaggccagaataccctacctttggttaaaggcaggctcaaaccctgtcctcatcttgtaataaatacttccttatttctttaaagaaaatactatggaaactaaggatctcagaaaggaagtgatcagctcctttagtctcaagtctgaacttatctaaccaagaaaaatatttgtagggcctggaaaaaacatccaggctttttttatttctgccacagcgtgttaggctggcagggccccaccttccactccctggtgaaggaaagtttgccgaagaaagggaggcagtgtgttctttgctttctatttcttytgctccatgttccatggtctgtactgggtctgaggtaggagtgtagccatggctgattggcctgggctagcatctcagcatgctgcccccaaaccagttctgttccatgagctgaaatctcatcttccgtggttgacagtaaactgtggacttgactatgggatggacttgacaatggtgtgcaggagacagct

SEQ ID NO: 740734 - DNA, 663 bp, Homo sapiens
aaacacctggcacatactaaggtctcagtaaatgtgagttaccgtcatcttcatcttgctcaaatccaccgccatcatcacctttctattgtacctggcacaggcccttccctatgggagcagctcagtcagtgtcgacttaagtgaataaaatgaatagaatatgcccccccgccccttccacagaaggtgaaatcaacaatcttcatttttctgcatgtccgaagtcaagcttatggtgctttattttaaatgaggtttgcagcgcctgacgctggaattcccagttacagacctgagcttcttacccaagctgcatcttgtgttacaaggcacaggacataccatggcactcccaccctgagctttcttccccaaagtagggcccacctgcctgggaatcacataggttcccccaacaaagggttctgacttgctgggctgagtcggggctggcacccacatgttcaacaagattccacagaggattctgatgtgagactccctagtctgggtgatattttttctacatyaagatagaagaaagcagtgcagcctagaaaggaagggaaggcttgattatttttctctttttagcaaagccactgaaatatgtccaaatctactcttgttttatttaaaagcggtggccctggggacact

SEQ ID NO: 740735 - DNA, 603 bp, Homo sapiens
ctagtttgatagaaattgttttcatataattgatacttgccagtgatactattgaattttcttttttcttctttcttttcaatcccaagtcccaaataccactttaagtttatagtctcactttttcttttttttgtaatcttgaaagcttgtggtttttccactccatacatacaattcgagagaaaatgtcattatagagtgaactctcaaaatgtgtccaaaaagattcttaatcaaatcaatgtgatagtaaaggtgccatcagctctaagttttataaaacgtcataactgttgattagatatgatagcaagttatcatcatttaattcagtgcaggacatttcctgtggcagagaaagcttctcartgcagaattactgtaatcttctccagaaagcaaactaaagtaaaacatctgagtaaaatacatcttttggaggaaagattacccacttttctgtaagaaaacatgatactctccttttcatagagtgacacagtcaataagcatcccatggatagttaacagtgtcactgaagcctgtgatatttctattacttgtgtaggatgcttagaaatcaattcttttcaacatca

SEQ ID NO: 740736 - DNA, 657 bp, Homo sapiens
ggctttattttctgaaaaaatcgagataatattacttatatgacaagattgctatgagaataaatgggatacaacatgcaaatcacttagtatagtgacaggcacattttaaatatttaataaatataattttgctggtattataattgttattatcaatatcagcatattataatctcatcgggatttattttgtgtyacatttaataataacagtatcctatttcatgtaatccttatttttttattttttatgttttgagacagggcctcactctgacacctaggctggagtgcagtgtcaggaatacggctcactgcatcctaaacctcctgggcctggattctcccacttcagccttccacatagctgggacttacaggtgcagaccaccacacccagattattataacttttattattgtatttttttgtagagcaggggttttgccatgtttcccaggctagtctcaaactcctgagctctattgatccacccgtcacagtttcccaaagtgctgggattataggtgtgagccattgcgcctggcccccttatgtttcttcaacatatttcctgaactaattacagactcggtgaattctttcttgctttgtattttgagaaatatagtgataaaaatcattatcctcac

SEQ ID NO: 740737 - DNA, 657 bp, Homo sapiens
ggctttattttctgaaaaaatcgagataatattacttatatgacaagattgctatgagaataaatgggatacaacatgcaaatcacttagtatagtgacaggcacattttaaatatttaataaatataattttgctggtattataattgttattatcaatatcagcatattataatctcatcgggatttattttgtgttacatttaataataacagtatcctatttcatgtaatccttatttttttattttttatgttttgagacagggcctcactctgacacctaggctggagtgcagtgtcaggaatacggctcactgcatcctaaacctcctgggcctggattctcccacttcagccttccacatagctgggacttacaggtgcagaccaccacacccagattattataactkttattattgtatttttttgtagagcaggggttttgccatgtttcccaggctagtctcaaactcctgagctctattgatccacccgtcacagtttcccaaagtgctgggattataggtgtgagccattgcgcctggcccccttatgtttcttcaacatatttcctgaactaattacagactcggtgaattctttcttgctttgtattttgagaaatatagtgataaaaatcattatcctcac

SEQ ID NO: 740738 - DNA, 619 bp, Homo sapiens
ttatgagtaaaaaaaggtcacttttttgtctgtctcctaaaataatccaaagttttcttcaaaatggaaaataaaatttttccatcatttatagtgactttgattgaaacagatctatcctttattaaatttggaactatgtagctcatattttttcacctatgccatatcttacaggctttaaatttttgcacattgtgcttttatttttctttgtttaccaaaaatatattaatgaaacctgaacatcaaaattatttagcacatccttgattactgacttctgaactctgttagtttattctaaatacatgtatttatttatttatttatttatttatttatttagagtcagggtcttgctctgttgcccagrccagagtgcagcagcacaatcatagcttgctataaatatatattaacacttttgatattttttgttcttaaggctcgcattttgctgtgattatagcctacctttgatcaatcaagactccctgataattatagcacttttctcacttcatgtttttcactttggatgcaaacatgaaaatatagtgttaaaaatcatggattcagaaagcaatcttcaataacaatcacttggttatattac

SEQ ID NO: 740739 - DNA, 610 bp, Homo sapiens
cttaccctatagttttgcctaattaaaaatagtaatatcgaacagacttattaaattccagatagtactaaatttcaaaagaaatttagttttacaagacagaaatgaattgcagaaaaatcttgaagaacttggaaatcataaccatatgtcaacatgaactgaaaaagaactattgtgataattataacaatgaaaacaataatgatagctacatatgatgcaccagtcacagttttaagacatatatatgtatgtctatatatgatgtaataaaactctgtgatagccaaacwtgtttgatacttttgtccaaatacagtgataccattttgaagtgatataatgtttttgagtgactataaagaatgggtagaaacacctgaaagtgggttacagttaagctgaatctgacatattggtagcacatccagatgctgtcatcagagaagcacatctagatgttgtcattggaaatacagcatcagatgtcaactacgaatatttaggatcaccagtaagaatcaactccaggattgcctctggcagaaactagattatcaaatcatttggcaaaactttagggctacattccatctgaggataattc

SEQ ID NO: 740740 - DNA, 539 bp, Homo sapiens
attatcctttcaagagaattggcttccaaagtgacttttcaagagaaccagaagggtcatcccatgccttagtagtagagctaaactatcccagaatagaggctacttcaaacctaccctaaacacgtttaaaaagaagccatgaaaggatcaaacaaatctgattttccagtaacttaactgtcttctaacgaagccattctttaagggaacatggcaaagttcagatacttaactcaatgtccaccagccaataaaaaattactagacatgccaagaagcaggaaaatgtgacccataacctagagtaaaaaaaaaaaacaaaaaaacmgtcaataggaaaagacccaacaatggcagacaatggaattagtaggcaaggactttgaaatggctattacatatatgctcgatgtgtttaaatatcgttaaaatataatcaggagagatagtgaagatatttaaaaaccaaatggaaattctagaggtgaaaaatacaatatctgaaatgaaaaatacattggatgggattaactgca

SEQ ID NO: 740741 - DNA, 569 bp, Homo sapiens
aaacatttggactcaagatccatcttccagccttccaaaatgttaagggctcctgtttgcaccttctcagaatgatgtgcttgctttcttcagaaagacaagtgttatttactactgtttacagcttttgtgatactgaatcccaggactcccacggacgtgtgctctgacttcttacgcagtgttctttcttaagccacagcaaaggaaataatggacattgagaggtcaagtgtgtgcctttcaccctgtgccctttaaatatcaataattattgtttttcttcytgaagaagcagcatctggttgtatggaatttggcagaagtgggcatcctgtgctagttcttttgatatttaaatatgagcaagataggtaaatggcaactaaatctgagccatctgaggaggaatgagagtaataaaaacaacgaaactgaaccacacgcattgagttagatgtttgtagattgtcttgttgacctgcctaccccagtcacatggaggagaatgtgaggatcgaagagactacatgatttgacacaatttcactgttcaaacacttctggga

SEQ ID NO: 740742 - DNA, 546 bp, Homo sapiens
cgttcaggaagagggaacatctgagcaaatcacagatgtatgggcacatgataatgttggtcaggcgtttggactgaagtgtgagtaatgcatagggaaataatgggatgcaggctggagtggtgggtgaggtcctaattttgacattggttccctgagtgggaaccattgaaaggttttagtggggacatgtgagacttccttcctcagtctggccctcccagtaccccttcttcatctgtctcttgctgtctgacttcttcctctttcccccagctgtactaggccatataccaggagctggggtgatgagggaattgggggtagggrtatctcagtcattcactgaatattttttttttagcctggcacctcctccttcctgtgttccactgggtctgcagccttgtgtgaggatggggtatgcgctcatgaggcaggagtatggggaatcgggggtctgatcattgcttatgtgaaggtcagctagtctccttgttttctgctcagtgtgttactcatgcctcctgaaggacttgatgcctc

SEQ ID NO: 740743 - DNA, 621 bp, Homo sapiens
cctgatttattttttccttttgtttaaagcccagtgtattgaactgggcagtcagcatggtatttactgttttatattgtccaggtaagaaacctggagcttattgggagcagaattacaaatataagcaatgccaaccttccctgcaccttagcattacctttaatagtgtcaaaaaaaaaaaaaaaaaaaaaaaaaaaaaaaaaaaaaaacttagaaggaggcatagttttctccacagtttttgagaaattctccacgatttttctcctgagctaagccagtgagaccacagaggataaagaggaaggcgtggaaggcaragataccagggggcagggcttggtgggactccactggcggtggggggttgaggaggaggtttccaggtgggaggtaaatgtgcctcctctagatggagatgtcaggggaaagcatgggttggggacgtagatttgccccttgtggtattaagagtaccactccccacagggacagtgaatgatgctggggccagcgcagctctgtattgtctttaaggcaaccaggaactgaacatacttgacccgatagctaggcctgaccctatgccatggacatggcatagcccatgcactgtgg

SEQ ID NO: 740744 - DNA, 617 bp, Homo sapiens
aggatttgtgaaaatcaatgggcagtaaatttacctctcagacaacctcagaatggccctcatttacatcagaaattgaaacaaggagatggaagtagtagaaatgggattactatagtccagcaccctgagaaggtggggcktcaggcctctgtgcactgagtcagagtcaaaatcacttagtgatatgctactatggagaggaaggctggctctaaaacagagcttctacttgaatactggcattagcttaatctttatgtgtgctttaggtacgaatgcttattgtccgtacaaatatggctccaggtgaagtatcattcttgattttccaaagtatcttctgtcaataatattttactttagagcagagtttctcaaatgtgcctgatgataagaactacttgggagcttgttaaacactggcattcctgagaccctccctagacctaattaggatttctaatttctggaggatacacatttaaaatccaggtgattcttaaccacctactactacgtgtttatttctgcaagtatttttatgaggcaaattagaaaagcttctctgttcttgttcattcatccagtcaataagtttttgagtaattcctgca

SEQ ID NO: 740745 - DNA, 617 bp, Homo sapiens
aggatttgtgaaaatcaatgggcagtaaatttacctctcagacaacctcagaatggccctcatttacatcagaaattgaaacaaggagatggaagtagtagaaatgggattactatagtccagcaccctgagaaggtggggcttcaggcctctgtgcactgagtcagagtcaaaatcacttagtgatatgctactatggagaggaaggctggctctaaaacagagcttctacttgaatactggcattagcttaatctttatgtgtgctttargtacgaatgcttattgtccgtacaaatatggctccaggtgaagtatcattcttgattttccaaagtatcttctgtcaataatattttactttagagcagagtttctcaaatgtgcctgatgataagaactacttgggagcttgttaaacactggcattcctgagaccctccctagacctaattaggatttctaatttctggaggatacacatttaaaatccaggtgattcttaaccacctactactacgtgtttatttctgcaagtatttttatgaggcaaattagaaaagcttctctgttcttgttcattcatccagtcaataagtttttgagtaattcctgca

SEQ ID NO: 740746 - DNA, 505 bp, Homo sapiens
ttgatgacttgtggaaatgataacactttggatgtatcgggttccataaaataatattacagtaaatttcacctatttctttttagtttctaaaatgtgtttcctaggaatttaaagttagggtcatgtatatggrcccatgtatatggcccattaatatgcagcccatgttgtatttgttgggctgcactgctctagagagaagtccatggggacctagtctagagattcccagagctaacctgaggccttggtgattcacctcttttgatactataaactgctccactatcctttcaataccaccctctctttctcctagagagtctgacatgagtcctggctctgccatttactaactggatgactgtgggcaagtttcctaactccctggcctcagttttcttatctgtacaatagggatagtaaagacaccaatcatatggttgttgtgggaattaaatgggttaatatatgtgaagggcttacagcccagatttaataa

SEQ ID NO: 740747 - DNA, 573 bp, Homo sapiens
ctccttagaaacaacatcaccttcacccatttacattcctggtttgttgttgttgttaagtgttaaagacaatactggtttctccctcagaacaggtgtgtgctcttggccacttaggagtggatgatgccctccccacttctacatcaaataaattttaaaaaaagagaaatataatttttggcaagaatttggtatttcagaaatagcactgcagttcccgttgagaaatcagaacattgctgagatttacatttgagaattattgcagcagtcctttttgtccgggcacggtggctcatgcctgtaatcccagcactttgggaggccgaggcaggcagatcacttgaggtcgggagttcgagatcagtctggccaacatggtgaaaccccrtctctactagaaatacaaaaagtagctgtgtgtggggtgggcgcctgcaatcccagttgctcaggaggctgaggtgggagactcccttgacccagaaggcggaagtttcagtgagctgagattgcaccactacacaccagcctgggcaacagagcaagactctgtctcaaaaaaaaaaa

SEQ ID NO: 740748 - DNA, 573 bp, Homo sapiens
ctccttagaaacaacatcaccttcacccatttacattcctggtttgttgttgttgttaagtgttaaagacaatactggtttctccctcagaacaggtgtgtgctcttggccacttaggagtggatgatgccctccccacttctacatcaaataaattttaaaaaaagagaaatataatttttggcaagaatttggtatttcagaaatagcactgcagttcccgttgagaaatcagaacattgctgagatttacatttgagaattattgcagcagtcctttttgtccgggcacggtggctcatgcctgtaatcccagcactttgggaggccgaggcaggcagatcacttgaggtcgggagttcgagatcagtctggccaacatggtgaaaccccgtctctactaraaatacaaaaagtagctgtgtgtggggtgggcgcctgcaatcccagttgctcaggaggctgaggtgggagactcccttgacccagaaggcggaagtttcagtgagctgagattgcaccactacacaccagcctgggcaacagagcaagactctgtctcaaaaaaaaaaa

SEQ ID NO: 740749 - DNA, 493 bp, Homo sapiens
gcatggagttaggaaggtttcttagctttccttccaggaacactttctggttactcattggcctaattcataattgtgtgttccaattttaagctataggtcgtgcttggtatcaagtcacaggacatgccctgtggtgttgaaatttgttaggaagttagatacgtggttctgtggaagtaagaaatggcatatatgagtgatacaattaatcacagacrcataggcttcctttttgagagaatttaaaagatttttaaatccacaggtactcctctttcaataaagaatcagttcaggataaagttgtagaagaatttcttcactccctgtggagcagatttagacagcctaccaggggcaaagttggcttcctgtataaaagggaaaacatttttcaaagtcttgtatttagatcttaaggattacccagttgacctaatgctaaatgacaagttaatgggtgcagcacaccagcatggcacatgtatac

SEQ ID NO: 740750 - DNA, 498 bp, Homo sapiens
tttggtctcttcttatagtcttaaaatctattttagctgataaaagtatagctactcctgctctcttttggtttccattggcatggaatatctttttccattcctttattttcagtttatgtgtgtctttataggtgaaatatgttttttgtaggcaaaagatgattgggttgtcgttgtctttttttaatccagtcatccactctgtcttttgattggagagtttagtccatttacattgaatgtcattattgataagactgattcctgccatkttgttatttattctctggttgttttgtggtcttttcctttattttttctttcttgtcttcctttatctctggtgatattatttagtttcttgccttttattttttctgtattcgttgtatgttagtttcaggttaccaagatgtttgcaaatactgtcttacaactcagtattttaagttgataacaatgctgtttgcataaacaaacaagcaaaaagaaaac

SEQ ID NO: 740751 - DNA, 457 bp, Homo sapiens
tcccttcttttgctttttccagattaaaagataaaacatagtttcccaagacttcctgttccttactctaccttgcctgttctagaaaatgtcatgcagtatgtttgtcataggatactactacctttaaaaataaatttccatctttagttgaatttgggaaataaaaatagctcagagacactaatacttgctaacatggtaaactttgaagaattttactatgtacaatctagtttgaataattctataaaaatttcacaacacataaatttatgaacatagatgaatattttcaggtatatttatttttgttcctrgaatatgtaaatataacttgaaatataccaatggtctgaataatgattctgaaaattcttttaatccaactaacaaattaaaattttatatcaatacttcattgtagtgtggcaggtctggctgtctgcagaaggaa

SEQ ID NO: 740752 - DNA, 600 bp, Homo sapiens
aaaagagatacagaacaaaactctctagaattgattcaggatagccaatgaataacagcaataccaaaatgagagaatagttaggaagaatagttcaaagaaatcacacaagatatgttttccagaactaaaaggtaagcatctggagtttgaaagggccaataaagtgactagaacaatgaaagcatatgtactttttacaaaatttcagaatgccagagaaaatgagaagatcctaaaagtttccagagagaaaaagtctgtgaatacaaaagtgagactaagaatggtatcaaatttcacaacagcagtactgaatgctagaagacagtggaacaatgctttaaaatctgaggaaatattatctctacttaaaattctgtttgaagccaaagtatcaaccaagtatgatgacaaactagaaayaggttagacacaaaaggacaacccatgcccccttttgaaggatatgctccagcaaaaaagggagtcagtcaggaaagagaaattcatagattacaggctccaacaaaagaagagtgagtgtcaaaggtcttgagggatagggagagatttgtgaaaggataccaatttacagtt

SEQ ID NO: 740753 - DNA, 663 bp, Homo sapiens
actttatacactgcttttattgtatctagaaaattttgataaattgtgtcatattttcatttttaaaattttttaaaaagtttcctttgagatttttaaatttgactcctggtgttatttagaagtgtctccaggtattttgagattttccattttctttctgttattttcttttagtgtaatttcattgctatctgagaacagacattgtatgattttttttagtttgttaagatgtgttttctgaacccagaatgtgatgtattttggtaaattttccataagagcttgagaagaatgtatattttggtgttgtttggtgaagtagtctatagttgtcaatgaaatcccgttgattgatgtgctgttgagtttaaggctgttcttactgattttctctgtgctggatctgtccattctgatacaagcatgttgaaatctgtaactatggtartggatttgtgaatttattcttgcagtttagtttttcactcaagtagtttgatgctctcttgctaagcacatgtatgcagaagattgttatgtcttcttggagtattaaacatttttattatgtaacggcatttgtttatgataattttcatatctataaattctgttctatctgaaatttgtatagctaattccactttcttctgcctt

SEQ ID NO: 740754 - DNA, 536 bp, Homo sapiens
cacagtcaaaattttttaggacaccaaaagcacaaaacctaaaagaaaactaaataataaaatgaggtcttcttccctaaaacttataaattcaggctagtcataagtaaaacatcagacaaataccaggtgaaggacatstacaaaatacctgaccagtaattctcaaatctataaaagacattaaaaccagaaaagtttgggaaactgtcacatctaagagatgccaaaggagatgaacataaaacacaaagtggttccctggttgggactctggaacagaaaaaggacattcgcattcggggaaaactacataaagtagcaactttaattaataataatgtatcaatattcattcattagttttgactaatgtaccatggtaatgtaatatgctaataataggagaaaagataggtgggggatatgtgagaactctctatactccctttgcaacttttatgtaaatctaaactgtttttaaaatctaaactgtttttgcttaaatttataaagtaaaaaattataaaattcat

SEQ ID NO: 740755 - DNA, 617 bp, Homo sapiens
ctcaatgctctccctggaaatgctagggccagggtgcctaaaacaaggtcgtgtagagagcagagtgtaagctctgccggcttgtctcacatcatgtttaaggctaacagaagccagaaatgtacacaattaaacttgccggagcagggaaacataattaaaggacactscttgagaaccatgagttaaagatcaccttttaattgctttccttctgggagagatgagaatgaatgaggttgtcaccattttccggtcaatcttgtatgttcccttttcataattgctgtaggaaggttccaggttgaattcaggaggctgcttccttgtcccttcgttaggaggagcccgtcattctcttgtccttctgcctgagtttgcaatccctgtgaccaacgccttcttaccccggccttgtcacactctctgtgtcttacccgcatctggaaatttacctacaggagagccagtcagtcaaaatcaacagtgaccccatgccttcttctgtagttttctcctttggtcttgtctgtgttcattccagttttagagtagcatttgtgatagcaagggatggggcccacccagcactggtatcgtggtgaagtctcatgcac

SEQ ID NO: 740756 - DNA, 617 bp, Homo sapiens
ctcaatgctctccctggaaatgctagggccagggtgcctaaaacaaggtcgtgtagagagcagagtgtaagctctgccggcttgtctcacatcatgtttaaggctaacagaagccagaaatgtacacaattaaacttgccggagcagggaaacataattaaaggacactgcttgagaaccatgagttaaagatcaccttttaattgctttccttctgggagagatgagaatgaatgaggttgtcaccattttccrgtcaatcttgtatgttcccttttcataattgctgtaggaaggttccaggttgaattcaggaggctgcttccttgtcccttcgttaggaggagcccgtcattctcttgtccttctgcctgagtttgcaatccctgtgaccaacgccttcttaccccggccttgtcacactctctgtgtcttacccgcatctggaaatttacctacaggagagccagtcagtcaaaatcaacagtgaccccatgccttcttctgtagttttctcctttggtcttgtctgtgttcattccagttttagagtagcatttgtgatagcaagggatggggcccacccagcactggtatcgtggtgaagtctcatgcac

SEQ ID NO: 740757 - DNA, 623 bp, Homo sapiens
agttgatcaattgagatgcaggacaaaagttagcaattaaagcctagagaaattaagcttcctaatggttttatattgacaatagtctgtgtatgtaatttctaaataatttttcatatattgaagattttcgctcatttttttttccacacatggagtgaaaaattgtaaaacttggagatactattagtgtaccacaatggttctcaatccagggtgatctgggttcctgggccaggtctggagacactttggccctcacatcggagggggttctgctggcatccaggtggtggggggatgcagggatgctgtcaggtggcctgcagtgtacaggtcagcgcccccatgcaaagaaccacccggcccaaaatgtctatggcactgaggttgagaaactctggtctgccaatttaatcaaaaaggttttggcctgaagatgagggccccacagtgtggtcgtgtcctataaagctaagagmatctggggcccctcccagaggcggtgctcagccagtattcctgtgcactcctagagcctttgctcatttcattccaggacccagcttgtaaggatcccattcaagtttcctcacacccccgtcaaagcccacccaagtctt

SEQ ID NO: 740758 - DNA, 564 bp, Homo sapiens
tatctattttgtacatttcattacatattattttacacatttactttttaatcatttaatagaagaaatgagaaaaatatgtattgataatgtcatctatattcataattaccctttattggtgcttatgttagtttgtttggattcagattatcttctcattttacttgctttcatcctgaagatcttttagtaattcttgcaagactggtctgctagaaaaaaattttttttgttgttatttgtggaaaagactttttaaaaatagatttcttggatctaagatttttggttgacagtgtggttgttggttttgttctgtatttttttctattgagtattttgaatgtgttattgcactgcctgttggtctgcattgtttytgctcataagttaactgttaatcttattttaatcttataagagaaatttttttttttttgcttttctttctgctgtcaatgttttctctgtctctttgactttcaggacttttactgtgatgtatttctatggatcttcttgcatttgttatttttgaatttttaagcactatggatccat

SEQ ID NO: 740759 - DNA, 560 bp, Homo sapiens
gaaaaaaaacaatgtgagaactctggaaacaaagacagagtttctccttgcttccagatggttgcagtagttccccagcaatgtttcttaaccaaattgaaatggctaaaatgacagaaataaaattcagaatctgaagggcaatgaagattacttagattcaggagaaagttgaaacccaatccaaggaatctaaggaattcaataaaataattcaaaagctgaaaaacaaagtagccatattaaggaagaaccaaactgatcttctagagcagagaaactcacaacaagaattttataatacaataggaagtattaatagcagaatagaacaagctgaggaaagaatctcagagctcaaagaccagtttttaaagcaatgcagtcagagaaaaataaataaaaaagactaaaatggaatgaacaaaccatctgagraatatggaattatgtaaagcgacaaaacctatgaattattggcatcccagaaaaagagagagagagaaagcaccttggaaaacatattagaggttattgcacacaaaaatttccccaacctt

SEQ ID NO: 740760 - DNA, 567 bp, Homo sapiens
attagaggttattgcacacaaaaatttccccaaccttgctagagaggtcaaaaagcaaattgaaaacattcagggaatgacctgtgacatactataaagaggataattctcaagacacatagttttcaggttatccaagatcaatgtgaaagaaaacatgttaaagacagctgtasagaaggggcaagtcacctgtgaaaggaatcctatcaggccaacagtcgaccttttaacaaaaactttccaaaatataagattggaggcctatttcaatatccttaaagaaaagaaattccaaccaggaattttatatctaggcaaactaagcttcataagcaaatgagaaataaaatccattcagacaaacaaatgctaaaataatttgttatcaccatatctgtcttttaagagggtcttaatggagtgttaaacatggaaacaaacaagcaaacaaagaaaaacattaccagccatcataaaaacaaacaagtatatagactattgacagtataaagcaactacacaatcaaatatatataaccatcagctaacaacacaatgacagga

SEQ ID NO: 740761 - DNA, 567 bp, Homo sapiens
attagaggttattgcacacaaaaatttccccaaccttgctagagaggtcaaaaagcaaattgaaaacattcagggaatgacctgtgacatactataaagaggataattctcaagacacatagttttcaggttatccaagatcaatgtgaaagaaaacatgttaaagacagctgtacagaaggggcaagtcacctgtgaaaggaatcctatcaggccaacagtcgaccttttaacaaaaactttccaaaatataagattggaggcctatttcaatatccttaaagaaaagaaattccaaccaggaattttatatctaggcaaactaagcttcataagcaaatgagaaataaaatccattcagacaaacaaatgctaaaataatttgttatcaccatatctgtcttttaagagggtcttaawggagtgttaaacatggaaacaaacaagcaaacaaagaaaaacattaccagccatcataaaaacaaacaagtatatagactattgacagtataaagcaactacacaatcaaatatatataaccatcagctaacaacacaatgacagga

SEQ ID NO: 740762 - DNA, 676 bp, Homo sapiens
tctgctgtgccaaggatcagagaaacctggctctcatggtttgtatgttggatgggctggtgggtggttttgtatataactcctggtagaaatgactaccccactgcatatcacccaagccaagttatgaagtacatatggccataaatkagccccacttataaccatcctgcccccaaaggtgaagaaaacacacttgccttcttacagctattttgtcaaccagtccagtctgttgccaacaccggataagtacaattacaggctaatgggggtagcaaccacatcagttaggaatcggtggcagtggaggtgtggttacgtctcaaaatatacagaggctcttttgtagagcactgcattttcagcaactgcccagaagatgccatcttctatggacatgtgaatggtgtggtgtcattcatttgttgtcagtcaagagcaaacatattttgggtctctgttctgctattgatacgcccaccaggtggatgcaatccccagtgaaccagggttgccttattggtactgttgaacaagttactgcaattccgtcaggaggaaggtagaatattccaaggcataacactaaaacttgacaagaggaagtatccacataccaaacagactgggtgctgactgctgctataattgcagcctagtataggaagacatt

SEQ ID NO: 740763 - DNA, 676 bp, Homo sapiens
tctgctgtgccaaggatcagagaaacctggctctcatggtttgtatgttggatgggctggtgggtggttttgtatataactcctggtagaaatgactaccccactgcatatcacccaagccaagttatgaagtacatatggccataaattagccccacttataaccatcctgcccccaaaggtgaagaaaacacacttgccttcttacagctattttgtcaaccagtccagtctgttgccaacaccggataagtacaattacaggctaatgggggtagcaaccacatcagttargaatcggtggcagtggaggtgtggttacgtctcaaaatatacagaggctcttttgtagagcactgcattttcagcaactgcccagaagatgccatcttctatggacatgtgaatggtgtggtgtcattcatttgttgtcagtcaagagcaaacatattttgggtctctgttctgctattgatacgcccaccaggtggatgcaatccccagtgaaccagggttgccttattggtactgttgaacaagttactgcaattccgtcaggaggaaggtagaatattccaaggcataacactaaaacttgacaagaggaagtatccacataccaaacagactgggtgctgactgctgctataattgcagcctagtataggaagacatt

SEQ ID NO: 740764 - DNA, 655 bp, Homo sapiens
cctgtccctcttgagctacatggtaagtggaacctccagtctatgttttattccattgcccagtgttagacatcatggcccatgtaatgggggccctgatcactacctatctttcttggcatagagtgcatgacagtgagtgaatggcatgttttaccgggaaggtctgtaagtagccccgttgttgtggctacacaggwtaaggcatagcttgtccctcctctgtggggcagggggccgacataatcgacttgccagtcctgcatagattgtacagttcaacatatgtaacctggtgaggagggaaattttctaggtcatagccatgaacgagtcttcccagttcagaaaagttgccagaatatctgcatatttgataaggatgcctgctgcctttgctatggcccatcccatggctgccccttagtggtcgctcttatgatgtaaccatatggtgggctcctccaataggcttgggcaaattgccagcacatgagtaagggcatctacctcctgatttactcaaggtgacttggagctgtgtgcatccatatggtacactgtaagataggcatccttcttgtgtaacttgatgtggatgtcctgccacatggacgttccacaaaggggcctgatgaaaacctgccaaatgtct

SEQ ID NO: 740765 - DNA, 616 bp, Homo sapiens
cactttccctataaggagggaatatccctgaaacttcatacaaactaataaaatccttctaagttagattgccatctgaaattgaagctattaaacttacgtaagaatattggcatatagtatcatgctataaatgcctattaagttgaattttggttttggatgcattattactgttgagctgtcttagctgtatcctagacattggtgaaatgaaaggatgagaatatttaggcttaaaagaattttgagagaagtggtgggcaggaaagtataraatggtgtaagagctcttttccttgattaaataggatatttcgggggaaaatttttgcttcataatctgtatataaatgtatacagttttcatcactatgactgtcatttctacatttacaaatcaacgagctatgtcagcatttgtcccctattcaactagatctttttttctctctaaataagggtgtaactggagattgacagaatctggtgggttgcatttgcattatggcgcagtggaaatctcaagctggttaattatatttccagcccacactgtgcactaactacccccctcctctcttctttctctgattcccattcactaccttagagc

SEQ ID NO: 740766 - DNA, 629 bp, Homo sapiens
gaaagaccgcaacaaacagaaacataatccttgagttaggagttgagcaggtgggcctcctcttggcctgacagcaggccttgataagtccctttattgctcctgacaaataggctttcagtatctcctgtgaagagaaacagggtggcccagttataaaaggccccttgaaagatttaaatacgctgccttgtgtaagatgaagggtgtcaggaccttgaagaccacagaggaaatagctgtatgctgccaagatttaatacatctagaggttatttagggggccatctataccttggtaaaaggaaataaagaatctgtcaattaaaagagttattaatttttytatactgtaacagaatattaaatctcagtgaacatatttatttacctggctgggtttctgtgcaattgctagccctgagctgtcagcagtcacttatctttagtgatccccttgcaaattttgtgagaattttcagggttgatagggaatcactattctctttcatgttattacagtaatctaataaaccacctgaataaaaaaattcatgaaacaacacttcagcaaaaggagatcatggcttttggggtataaattttcatttttatacaaacagtgtttt

SEQ ID NO: 740767 - DNA, 633 bp, Homo sapiens
gtggaagtagcagggcagtgaagtggactctgtgaggatccttggtggcatttttgtttgtttagtgcactggtttcatgttggttggcctccagccaggaggtggcactttgaagagcgcatcagctgtggtcctatatggagtaagccaacttgccctagggtcacctggttaagtattcaggtttcccaggcagagggcagggccatagagctcccaacagattattaccaatgtcattggctaccagggtgggtagagaaagaccaccaggtaggggcagggataggtgggtttgagctcagcctctccttgggcaaggcttgctatggctgttgtgggggtgggggtgtggttcccagtccagtggagttatgttcccaggggggattatggctgtctctgctaagtcacagaggtcaccagggaagtgggggaaagctggcagtcacaggcttcaccccactcccacacagcctgtagtcstaaaggccagtctcactcccaccatgccccacaaatagcaccaagtctatttccaggcagttggtgaccaggactgagaatgtgtcccagaccacaagacttcccactgagaaagcaagcagactcagtgttttggcatctcaggg

SEQ ID NO: 740768 - DNA, 638 bp, Homo sapiens
ctggaaatctgaaatacacgaaacctgaaattgtgaagagcctggctcagggtggcaggcaggtaagaaggcagacggccccttgctgccagccttgagaggagctgatatttataatgaatgtattatactttatgctcattataaataycagctccctatgaccttgagatggcagatggggaaacaggcaccagggagtctgagggctcatctagggccccacacttgggcagagacaaccctggggctcaacatggctatgtgcacccacctcttctcatgccccaggggtcactgaagccctgtactctctgggccagaggccttggaatgagtggcagcccagaggtgggaactgtatgatctgaggtctgtgaaggaacagcccaaatccatcacaccttggcaaagcgggcaggtggggagcattctggtagcgatggcctctctacacctaatgcagatgctctgttccaaggagtagaaagcaagaccatggcacatctgaatgcacagcgacacagaggaatgtgctctttctctcactgggactagcattctgggcctggaaaagctagatttgacctcatgagcagggaggcaaatataaagctgcttccctcccctcccggtgc

SEQ ID NO: 740769 - DNA, 638 bp, Homo sapiens
ctggaaatctgaaatacacgaaacctgaaattgtgaagagcctggctcagggtggcaggcaggtaagaaggcagacggccccttgctgccagccttgagaggagctgatatttataatgaatgtattatactttatgctcattataaataccagctccctatgaccttgagatggcagatggggaaacaggcaccagggagtctgagggctcatctagggccccacacttgggcagagacaaccctggggctcaacatggctatgtgcacccacctcttctcatgccccaggggtcactgaagccctgtactctctggrccagaggccttggaatgagtggcagcccagaggtgggaactgtatgatctgaggtctgtgaaggaacagcccaaatccatcacaccttggcaaagcgggcaggtggggagcattctggtagcgatggcctctctacacctaatgcagatgctctgttccaaggagtagaaagcaagaccatggcacatctgaatgcacagcgacacagaggaatgtgctctttctctcactgggactagcattctgggcctggaaaagctagatttgacctcatgagcagggaggcaaatataaagctgcttccctcccctcccggtgc

SEQ ID NO: 740770 - DNA, 638 bp, Homo sapiens
ctggaaatctgaaatacacgaaacctgaaattgtgaagagcctggctcagggtggcaggcaggtaagaaggcagacggccccttgctgccagccttgagaggagctgatatttataatgaatgtattatactttatgctcattataaataccagctccctatgaccttgagatggcagatggggaaacaggcaccagggagtctgagggctcatctagggccccacacttgggcagagacaaccctggggctcaacatggctatgtgcacccacctcttctcatgccccaggggtcactgaagccctgtactctctgggccagaggccttgsaatgagtggcagcccagaggtgggaactgtatgatctgaggtctgtgaaggaacagcccaaatccatcacaccttggcaaagcgggcaggtggggagcattctggtagcgatggcctctctacacctaatgcagatgctctgttccaaggagtagaaagcaagaccatggcacatctgaatgcacagcgacacagaggaatgtgctctttctctcactgggactagcattctgggcctggaaaagctagatttgacctcatgagcagggaggcaaatataaagctgcttccctcccctcccggtgc

SEQ ID NO: 740771 - DNA, 617 bp, Homo sapiens
cctcacgcaggcattgaggattctctgtcccaactaacctgcacgctctgcaaaacaggcaccaaccaggttttgttcatccacacggctcaggttatgcatagataccagtgctcaataaatgaagtctgagtgaataatgtctcagtcatccaccatatttcagtccctccttggctgcctctctaccccagccacagaggcttctgcccacgacatcaccaccccagttagtgtctagaaagagtgtcttatttaattccctttattattttgcattttacgaagtatttctcattatttgcaaaatgatgcaaagtgaatctgagctctcctaaatggaaagactaagggaagagctcatctcatactttgtggacttggtgtttcaatccacaygaggacatgattgcaaacactgcccggaaatcaggtggacctcatgctcaggccgctttattcaggttttccacggtggcactattcacatttagagctgtgtctatctttgttattgggggagccctgtgccccataggatgttcagtggcaacctggcctctaccagcttatgccactagcagcctcctctaggacaaatggcaaccaaaaatgtc

SEQ ID NO: 740772 - DNA, 617 bp, Homo sapiens
cctcacgcaggcattgaggattctctgtcccaactaacctgcacgctctgcaaaacaggcaccaaccaggttttgttcatccacacggctcaggttatgcatagataccagtgctcaataaatgaagtctgagtgaataatgtctcagtcatccaccatatttcagtccctccttggctgcctctctaccccagccacagaggcttctgcccacgacatcaccaccccagttagtgtctagaaagagtgtcttatttaattccctttattattttgcattttacgaagtatttctcattatttgcaaaatgatgcaaagtgaatctgagctctcctaaatggaaagactaagggaagagctcatctcatactttgtggacttggtgtttcaatccacacgaggacatgattgcaaacactgcccggaaatcaggtggacctcatgctcaggccgctttattcaggtttyccacggtggcactattcacatttagagctgtgtctatctttgttattgggggagccctgtgccccataggatgttcagtggcaacctggcctctaccagcttatgccactagcagcctcctctaggacaaatggcaaccaaaaatgtc

SEQ ID NO: 740773 - DNA, 619 bp, Homo sapiens
aaactagcctggccaacgtggtgaaactccatttctactaaaccaaaatacaaaaattagccaagcatggtggcacatgcctgtaatcccagcaacttaggaggctgaggcaggagaattgcttgaacccaggagatgraggttgcagtgacccgagattgcaccactgcactctagcctcggcaacagagtgagttaaattccatctcagaaaagaaagggacattattggtgtggagttctagcagctggacttagattgcagacctgaagttaaaattggcatgtccttgtttattggaggccggcaaaatttgacttacgaatgatttgtcggggcagcccttccagatgcctgaggcctttaccttttaatggggatttggctgtctaatgctagtaacagccattcatttgtaagagcaggttttatgactcagcttcagggattaatgtttatttttgtgtaactttgtgggggtgggggagcggatcttgagatttttattttcctttacatagcaaaacaaacaacaaaacgcttccataacgcgggctggatggaatgcctatatactgacttttggggtccctgtacagtccctaggtgggttccatg

SEQ ID NO: 740774 - DNA, 579 bp, Homo sapiens
ctgggagaagaccttctgaaatgaatactcaccccctcacctccccaaattagcctcctgcctctgctccggaagcttcctaatggtctgtgtgcaactgtgcaattacagcagcctgtgttaacaaagctgcgtgatcacyagctttgggcaaaggcttgtgattggagcggtgtgaggtgttgtctcacccctttcacaggcagtttctcgtttttcacatgcgcccacttataaatgtctgtcacagggtttcaggccattcaccacttacacatttgctaattgttccccattcttctgtgtttcttagcctcagacttttcgtatccatctgttctaactaaaatctctctcatcaaattgaaagcccctccaaatgatttcttaccattttctcctaattgccactctagagacctggctatccatttgaaatacctttttgaagtcttgattatctgtaggaaatatttttttctgacatgatagaagtaaccagttttggtgctatttgggttgcttaagtaactacaggctggaaataggagattctctttccttttttccttctatttt

SEQ ID NO: 740775 - DNA, 540 bp, Homo sapiens
gacatttactattggcaaaaggaccaaataagttgaaaagcataaggctctaaatctctatatggtcaacatcatagcacacactgatagaaataaagggaaaaacagaaaaatccacaattatattaagagactaaagcaactctctaartacttaagacaagcaaaaataaaatcaataaagttataaaaaacctgaaaaaccaatgagcaaaattgacttttttgacatacatagaaaactgtatcaataagaacagaagaaaattccttttcaaacaaaaatattacatttacaaaagagtctgaggcaggagaatggtgtgaacccgggagtggagcttgcactccagcttgggggacagagtgagactctgtctcaaaaaaaccaaaaagttgaccacttgaccatatggtgagtcaaagcaaatatcaacaaatttcaaaatactgaaagaattagaaatatgtaattttattttggtggaaataacctagatatcagtacaaaaaaataaactagaaaatcccaaactgctt

SEQ ID NO: 740776 - DNA, 585 bp, Homo sapiens
acttctattattttagacataattctaatagtctagttaattaatcttgggccctgagtaatcagaagaaacaataatatgaataagaagaccgattcttagaggcaggcatacatacatcagagagaagtgacccatcacagaagtgatatgggaaggatattaaaaacatcccaaaatccaatagtttgtgatctctttattgtatttaaaagatgtctaaaataggtagggacaaagaaatctacatgacccaagaatcccaaagagtctcctggaatacagtaaacattgagattaagtgcagccatagcctgaacttcaatcctgttcagtgccacctggtttcagttctcagtgttctcaactataaaggggggataatactattatstaactcataaaattactctgacagttataagacattataactatgaattcgtatatgacttaatgtgtacctggcacattgtattgtaagtactacgtaaagtattagctatgataattatgcatgtacatataaaccgaatagtctggatcacaataataattacaccataaccttgtatagtgcttcag

SEQ ID NO: 740777 - DNA, 602 bp, Homo sapiens
ctcatgaggtaagtggaagagattataaaagagagaatgcagtaagatcatctttgtgaaagtactataagagttgaaagccatgagcaaatttgagggaattttattttgaatttttaggatttttattgtttgaaatctatcccaaattttaaaagatccatgatccygcttatgataagtctgtgccaactctaaaacagctattcttatcttcagctgcaggaaaatggaaatcttcatttgtttcatcaaatattgtatgtgtttgatattagccaagttctgaacccagcgtaagaaaactaggaatcccttacttcatctctaaggctattcgagaaaagatgaatgaattcttcccttccaattttttcagatttatttatatttttcgaatttgtgtgtgaattgatgctaattccttcactttggcgattgtttagtaacaaggtttaaaatggatacatttgaatggcaggacttaggtaagtgggtgtcagtgaagtgagagacagcccaaggatcatagacaagtcgactcctagagcagaaagacactcaaagcatcacccaatcaaacccccacctgcatatgcgaa

SEQ ID NO: 740778 - DNA, 643 bp, Homo sapiens
ttttcaaatctgaaaatagggatagtagaaatatcggctgcatacggtcattgtgaagtgtaaatgattttcctctgtaaatgctccaagggccgctaagcagccagaactgatgctgtttctgataatgcgtgttggtgggtctctcctgtcatttttcatacatttgtggccttggcataacagtttcattttcacctgtatgggtccatctcataagctsttgggaaaccgggccacatggtgggcaattttaacatgaagaaacagaaacagggtgataacatctgcctcttgagcaaatgataaattatgtttcctttctgtacctccatttaaaaaaaaggatgttaaagaaagatcccaataataacagtaccaaagagctgttaacaggatcaaaatgtgataacaacaaaaataattccatacattctaaagcactttgctaatgcctcttactataactattgggcatgcaaacataattttagttgttggaatccatgattcctcactagaattccagttttccagagtaaaagtctcaacaaacccaaatagattttcctcctcttcctccacctcttcctcctcctctataatctgccccatccctgcaagggaatactcccacagaggc

SEQ ID NO: 740779 - DNA, 582 bp, Homo sapiens
ggtgacccagcaggcgatcgggatctgctggtgatcttggtcctctgggtgatccgtggtcctctgggtgctctgatctgccaggggatcctccagggcactttagggctataatcatgagcttcagaggtacacagtagaatggaatcttgctccaccactgcagcagccrcccgaccctacccaagccctttcacccctggagcctgggtctgttcgtttgtaaaatgggggagtctgatctctatctcacagggttgcaacgagcattaaatgaattactgttagtgaagtgctcatcaacgatagactggataaacaaaatgtggtacatctatagcatggaatactatgcagccataaaaaggaatgagaaagaaaagggacatggatggagctggaagccattatcctcagcaaactaacacaggaacagaaaaccaaacaccgcatgttctcacttataagtggaagttgaacaatgagatcacatggacacagggaggggaacaacacaccctggggcctgtcagcgggttgggtgcggggagggagagcattaggaaaaatagctaaggcatg

SEQ ID NO: 740780 - DNA, 568 bp, Homo sapiens
gttaaacaatgtattgtttataaagaagccatggctcctgttgcagaccaacttgcaaacagctgcgtgcatgttgcatgtcggtgggtgtgctcgtgccctttgcaaagtggtaggagattgtatgtctcatgtagaatattttcctaacctttttttttttttttttttttttttttttgagacggagtctcgctctgtcccccaggctggagtgcagtggcgcaaactcggctcactgcaagctccacctccccggttcacgccattctcctgcctcarcctcccgagtagctgggactacaggcgcccgccagcactcccggctcattttttgtatttttagtagagacggggtttcaccgtgatagccaggatggtctcgatctcctgacctcgtgatccgcccgcctcggcctcccaaagtgctgggattacaggcgttagccaccgtgcccggcctttcctaaccatttttttttaacaacctaaataatttcaggaagaaggtggtgtagggatcaagatatttacttggtgctatgtttataaaacatctatttaggtc

SEQ ID NO: 740781 - DNA, 621 bp, Homo sapiens
gtgtccaatattaatttctaacactctctttagaatatgagaacacttaacacattttgttttcaattatgggtcttagttgcacgagaaaagcttcatgcatcatcttactacaaatgaaaccagaacatacccgtagatggacttgttaacaatgctggtaaaagtgtggttaggagaggttgctgcaccttctcagagaaatgagctttggctttgggttttattgcaactctcacctttactgcaactgtaactgagtctcgttacaaatcctgcrcatttactcttcccaagggccttgtgtgtgacggatactcaaatattttttgatgtttgtaaagcaaccccatgttctttgacacatggattttaagcatgtgattagaggtcatagctgcaaaaccagctggcgccagaggtccttcctcctccatctgaagcagcaattcctcagagagtccatggagtttgggagaaatggacaagaaagagttgaaggaaaggggatccccacaacgtcagctacaccagccaaataaacagaggccatgggaggggtgacagatgttgctgtcaaaacacatcatcatgagcattgtgacactaagctgacagtgt

SEQ ID NO: 740782 - DNA, 647 bp, Homo sapiens
tggatggcaggtgtctacagaggctcgcctttgggtggaactctgacccacctaaggtttactttgctatttcaggaaggttgaagaggattgaagggtgagttgctaagtgacttagggtttattcacttcaggaatcayagctggggtggaccccaggagcagagtactgcatgcagctgtgcccatgcatggttgccccagcgtagtgagatgggacctgccgcagcatgcccactcctgagctgccaggctgagccatggaggactgaaaggaggtcgcccggcatcacctcccgaggtgagacctgctgcaaaagccaagccagcagcattgacgccctttgatatcttcgccatttttgctgctgaaagacttggcttttcagtctgaccctggccctctgtgaccatgtgtctgtaaagccagtgggtcaggcccttccatgcagggccagaggaaaagcgggcccagggctgcagtgagagcggggcaggggaccagcctaccagatgggttggaaacatggctcagaaggaccaactaccccttccctttgaggagcaagtctctgccgatcagcaaggcaaggccaggagccctcctggcgaaaggcaggccacaaatctgttctcccccaggagaa

SEQ ID NO: 740783 - DNA, 643 bp, Homo sapiens
aaggtagggagagtggcagcgaagagggaggctcatcagagtgagggagagagggaaggatttggagccagggcagacagagcagagtggtgcttgtgtcaaggagaacagagggagaaacacagcagggaggacacctggggatctggggtgccacagggtcgggacacgggagtgtatcagggaagagaraatttaacagggagaacagaggaggcacagagatgggagaagaggcagaaatagacagagattgaggatgattgaaatattggggagaaggagcaataagaggttaaataagttgtgaggatggagcagaagaggtggaagagaaggaatagagagggaagaaagggataaacggcagaagaggagaggggcacaaaatgaagagcagaatcccaggaagaaagaaaagaaaacaagagctagagagagaaggggagaatgagagagatatacagaattagggagggaagtgcagtaatgaagacagaggggctgggtgcagtggctcaagtctgtaatctccacacttcaggagaatgaggcaagtggattgcttgagtccaggatttcgagaccagcctgggcaacatagtgagaacaccatctctgccaaaaaaaaaataataataat

SEQ ID NO: 740784 - DNA, 632 bp, Homo sapiens
ttttttttttttaagatggagtattgctctgtcacccaggctggagtgcagtggtgcaatttcagcttagtgcaacctccacctcccaggtcaggcaatctcctacctcagccttctgagtagctgaaattacagatgttcaccaccatgcccggctaatacttgtttgtatttttttagtggagacagtgtttcaccatactgtcctggctggtcttgaactgctgatctcttgatccacctgcccattatgcctggcgcaagcctggctaatttttgtatttttagtagaggtggagtttctacttgtgattcatccacctgctttttaaaacaagtgaatattattagatggcttcatatattataagttttacaggacagactytaaacttcctttgtttaataagatttgtcggcctttggtgatgttgatgatgagatgccccttttcctatctcactcatttcatcgttctgttagaaatagcttagactggccagccgcagtggcttatgcctctatttccagcactttgaaaggctgaggtgggtagatggcttgaggtcaggagtttgagaccagtcgggcaaacataatgaaaccttgaatctactaaattaaaaaaaact

SEQ ID NO: 740785 - DNA, 632 bp, Homo sapiens
ttttttttttttaagatggagtattgctctgtcacccaggctggagtgcagtggtgcaatttcagcttagtgcaacctccacctcccaggtcaggcaatctcctacctcagccttctgagtagctgaaattacagatgttcaccaccatgcccggctaatacttgtttgtatttttttagtggagacagtgtttcaccatactgtcctggctggtcttgaactgctgatctcttgatccacctgcccattatgcctggcgcaagcctggctaatttttgtatttttagtagaggtggagtttctacttgtgattcatccacctgctttttaaaacaagtgaatattattagatggcttcatatattataagttttacaggacagactctaaacttcctttgtttaataagatttgtcggcctttggtgatgttgatgatgagatgccccttttcctrtctcactcatttcatcgttctgttagaaatagcttagactggccagccgcagtggcttatgcctctatttccagcactttgaaaggctgaggtgggtagatggcttgaggtcaggagtttgagaccagtcgggcaaacataatgaaaccttgaatctactaaattaaaaaaaact

SEQ ID NO: 740786 - DNA, 506 bp, Homo sapiens
  misc_feature 1, 2, 3, 4, 5, 6, 7, 8, 9, 10, 11, 12, 13, 14, 15, 16, 17,18, 19, 20, 21, 22, 23, 24, 25, 26, 27, 28, 29, 30, 31,32, 33, 34, 35, 36, 37, 38, 39: n = A,T,C or G
nnnnnnnnnnnnnnnnnnnnnnnnnnnnnnnnnnnnnnnacagttccagcttttttttttttttttttttttttttttgagacggagtctcgctctgtcgcccaggctggagtgcagtggcgcaatctcagctcactgcaagctctgcctcccgggttcacgccattctcctgcctcagcctcccgagtagctgggactacaggcgcccgccactgcgcccggctarttttttgtatttttagtagagacggggtttcaccttgttagccaggatggtctcgatctcctgacctcatgatccacctgcctcggcctcccaaagtgctgggattacaggcgtgagccaccgcgcccggcccacagttccagctttaaggctatagaaacagaaatagaaatactggtaagtaaaaacccaaaggattggtgacttatcacagctggagtgaatacgaaggagcatgaactcaaagaaaatatcaagatttaagcaagaataaatagg

SEQ ID NO: 740787 - DNA, 621 bp, Homo sapiens
gtgtgatctcggctcactgcaacctctgtctcccaggttcaagcagtcctcccacctcagcctcccaagtagctaggattacaggcatgcaccaccatgcccagctaatttttttttttttttaatatttttagtagagatggggtttcaccatgttggcctggctggtctcgaactcctgacctcaagtgatctgcccatctcgggctcccaaagtgctgggtttataggcgtgagccagcacgcccgaccctttttctttatatattacctagccttagggattcctttacagcaacagaaatggactaagacagtccgtatgcaggcctggggctgggggcagcagacacagctgtcctcccaggttggtggcctgggtcttacatccgcactccgcaygtagaacaccatacatttctgggaaatagtatttcttggtgctggtgactgagggcaagatgccctttccctgccaagccatgaccagtgttggccctgatgagtgacatttatttgaactaaattagaatcatcaacgttgaaacctggagccaaatgattctcagtcccacactcctggtgccaggcctgttgtcactgtccctcgccctgcccctg

SEQ ID NO: 740788 - DNA, 569 bp, Homo sapiens
tcactcccaaacaagctgcctgaacccatgtgcttgtctcttgcctccttttgggggaacaagccaaggtagacaccaagttgtgttccaatagcctggcctgattcaagcatctctcatgtagtgtaatgatatggtttggctctgtgttcccacccaaatctcatgtcgaattgtaatccccactgtcggaggatgggcctggtaggaggtgactggatcatgggggtggtttctaatggtttagtaccatccccctagtgctgttttgtgatagagttttcatgagatccggttgtttaaaagtgtgtaacacctccctcttctctctcttcctcctgctcccaccaagtaagatgtgcctgcttcttcttccaccgtaattgtcagtttcctgaggcctccccaraagcagaagcctgtacaccctgcagacctgtgagctgttaaacctcttttctttatgaattacccattctcaggtagttctttatagcaatgtgagaacagactaatacatgccatctggttatgattttcaaaaatggaataatgttagctttatatat

SEQ ID NO: 740789 - DNA, 625 bp, Homo sapiens
gtatgtcacacaggggacccgctttctgtgttagagcttgccttccttatctgtgtttcctgaaagggcaacgacttcttaggctgctttttgttagaagggaattctgccaaggacccttgccctaactatttgcctaattgatttctctctctcctctcacattgatgctggcctggctggagcaggtagagctggaagtagcatttttgcaaggacatctctttagcctctgtagattttcacctcaagtcattcggagcaggtcggaagctaggttttttttggggggggaagccagtagagctaaagtggttatgtatctgtttcctgccttccttctttccacttctacatgcattttcttgctgtgcaraaactgttttgagagtgcagacccaaaactgcagaaaacctgttttgggagtggtgtctgggtgctggcctggaagccagccttgcagaccaagcatggcagggctcagggtcttcacgcccggggaaagggaggttccttgcagcctccaaaggggccctcctgagacctgggcagtgcctctctttttccaatataattgacagatgaaaagctggatataaaccagaactaagctcaaaggtgatt

SEQ ID NO: 740790 - DNA, 625 bp, Homo sapiens
gtatgtcacacaggggacccgctttctgtgttagagcttgccttccttatctgtgtttcctgaaagggcaacgacttcttaggctgctttttgttagaagggaattctgccaaggacccttgccctaactatttgcctaattgatttctctctctcctctcacattgatgctggcctggctggagcaggtagagctggaagtagcatttttgcaaggacatctctttagcctctgtagattttcacctcaagtcattcggagcaggtcggaagctaggttttttttggggggggaagccagtagagctaaagtggttatgtatctgtttcctgccttccttctttccacttctacatgcattttcttgctgtgcagaaactgttttgagagtgcagacccaaaactgcaraaaacctgttttgggagtggtgtctgggtgctggcctggaagccagccttgcagaccaagcatggcagggctcagggtcttcacgcccggggaaagggaggttccttgcagcctccaaaggggccctcctgagacctgggcagtgcctctctttttccaatataattgacagatgaaaagctggatataaaccagaactaagctcaaaggtgatt

SEQ ID NO: 740791 - DNA, 571 bp, Homo sapiens
ttgagcccagcagttcgagaccggactgggcaacataatgagaccccgtctctacgaaaaataataaaaaaaaaattagccaggcatggtggttcatgcctgtaatcccagctacttaggaggccaaggtgggaggattgcttgagcctaagagtttgaggctgcagtgaggtatgatcacaccactgcactccaacctgggcaacagagtgagattctgtytaaggaaaaaaaaaaaaaaacctaagaaaccaacaccaacgaatacattactattaaccattctccagacttgatttgggtttcaccagtttctgcattaatggccttttttttttttttttttttttggtttcaggatccagtctaagacaccgcattgcattgaatcgcctgctttcttagtctcctctggcctttaacactttctcagacttgccttgttcacagccttgatagttttgaggagtactgggcaggtatttcgtagaacatctctcagtttgaatttgccagttgtgtttaggatgggactggagttaggagtctttgggaggcatgcctgggaggt

SEQ ID NO: 740792 - DNA, 608 bp, Homo sapiens
gacatcaaggctcaggtgagcttccctggttggcaatactccgtgcatattatcatacttcattgctgggaacagctaagtgttgtccacagaacttcactgggagagagcagctgtaggctcatgcttggtctctccgagacacttatgtactttttttttttttttaacctttgctctttttttttytttttttttttgagacagagttttgctgtattgcccaggctacatgtagtgacactatcttggctcactgcaacctccacctcctaggtttgagtgattctcctgcctcagcctcccaagtagctgggactacaggcacctgccaccatgcccagctaatttttgtatctttagtagagacaggatttccccatattggccaggctggtctcgaactcctgatctcaagtgatccgcccgcctcggcctctcacactgctgggattacaggtgtgagccacagcacccagcacctttgctgttttcaatctgtatctttgtattgtgataaactgtagctgtgagtacagcagcttttctaagttctgtgagtccttccagcaaatccttgaacagaagtcttggggacccctggatcc

SEQ ID NO: 740793 - DNA, 507 bp, Homo sapiens
tatttttagtagagatggggttttgccatgttggccgggctgctctccaactccccacctcaagtgatctactcacctcggcctcccaaagtgctgagattacaggggtgggccaccatgcctgaccaagccaagctcctttcacttagtcagccatcataaaatgcctactgtgtgcaggcactcttattactttgagatctcactgtgttctggccgttcgtccccctgctcccgactctctctgcccagtcccaaagccccagccgcagttcaggccccaccctcccttgcctggatcctctgcctggcctccttctccagcctctcctatcagcccatcccracacgcctccagagagtctttctacacccagagctgacccacccctcccctgctcacagccctccatggctccctagctcctctggacaaggccccactcagcctggtgtttgggccatcctttcctgccactctattctttcagcttttttttttttttt

SEQ ID NO: 740794 - DNA, 642 bp, Homo sapiens
ttctgtctagtatttatgtggagatattcgctttttcatcataggccttaaaccggacacaaatatccctctgcagatacttcaaaaagactcttttggaacttctccatcaaaagaaagtttcaactttgtgagatgaatgcacacatcaccaagaagtttctcagacagactcagtctagtttttatgcgaagatatttcctttttcaccatagtcctcaaagcgctccaaatatccatttgcagattctacaaaaagactgtttccaactgctcaatcaaaagaaagtttcaactctgtgagatgaaagcatacatcacaaagaaatttctcagaaatcttctgtcttctttttatgtgaagatatttcctatttcaccataggccataaagagctcaaaaatatccctgtgcagattcttygaaaacactgcttccaaatgctcaatcaaaagaaaggttcaactctgtgagatgaatgcacacatcacaaagaagtttctcagactccttctgtctagtttttatgtgaagacattctttattcaccataggcctcaaacagctcagaaatatccatttgcagattgtacaaaaagactgtttccaaactgcttaatcaaaagaaagtttcaactct

SEQ ID NO: 740795 - DNA, 601 bp, Homo sapiens
caggaacttctttgtggatgtgtgcattcaacttaccgatttggagcttccttttgataaagcagttttgaaacactctttttgtacagtctgcaaatttatgtttggagcgctttgaggccagtggtagaaaatgaaatatcttcatataaaaactagatagaagcattctcagaaactactttgtgatgtgtgccttcaactcacagagtttcacccttctcttgatagagcacttttcaaaacctctttttgtagaatctgctagtggagaattggagtgctttgaaggcttcattggaaacaggtatatcttcacatataaactagacrgaaacattctcagagaattctttgtgatgcgtgcattcaactcacagagttaagccttttttttaatagagcagttttgaaacacactttttgtagaatctgcaagtggaaatttggagcactttgagggctatggtgcaaacggaaacaccttcacaaaaaaactagacagaagcattctcagaaacttcttcacgatgtttgcattcaagtcacagcgttgaaactttcttttcatagagcagttttgaaacactcttgttgtaga

SEQ ID NO: 740796 - DNA, 632 bp, Homo sapiens
cctcgcagttccccagacaaaggcgagccctgcagggttggggtggcagcagcagaggaagcagaggcagtggtggcggtggcagcaggggcaccacacccgctgcccagcaggaggcaggagggccgggcggcgagcacagcagcggggaaggagggcaggcagggcagcgtcccagccgccagcccccaccagcccatccagccaagtcaaggcaaagagacaccagcatgatgctgtgtaccatggctcggggttgatggccacggcacgggggctgccgagaatacggatggccacacagggacaggcctgggttcacagccacgtgtggacctctggatgcgggcatgggaaggcctggacccccttctaagtgtcctgggcacctgcctctgtgtgcctgtgtgtccatggctgcaggcctacctgggcgccacgtgagcttgcaggtacaagcgtgcrtgcgtgtgcacgacgtaccagactctgatgaagcctgtgtctgcaagcacacgcgatctggtgctagttctgtcacacgcacacagccacctcgcctaaagcatgtctcagacggagcaccttgccgttctggaccctcctcccaaagaatcataaccagagcagcc

SEQ ID NO: 740797 - DNA, 656 bp, Homo sapiens
cctgcagggtgccggactttgggatatagcagggagagcttggcacgacttattactccaggctgtagaatcctgaaaaagagctaccatgcagcccatgcctggtcaactggaggactaccttagtggaaaggggacaatctgggcctctggcctgccatgtgcacaagcataacaattgcttttgtttaacgtgggatggaatatttgatccattccaaccaggcatttgcatgttggtatcctgtcttaattgccaaagttcgttttaagtctttaacttatatgatcctctagtaaaatgaatgcatgattttagggaattacaaaaaccatttggggcagtccacacttgctctttagtggtccacagaatgttggaccaactacagcataaaagctctacrttggggagcaagactcctggttgacactggagtctttatcaaaatttccccagattaaatagtcctaatttactaatgcccagtctgaggagagtcaggggggacagaggtacttttctgaagtggagagctgtctttcacttgagagtccccacagggtataacaaggcaagcattaaatgcaatagtttgaggcaaaattgacttggttatgttaataactagatggtcagcaatagaatgaggaaa

SEQ ID NO: 740798 - DNA, 614 bp, Homo sapiens
ttctctattaaccagggacacaatgcactgcggaaagctgcagggacctctgcctgagaaagcctgggtattgtccaaggtttcccccactgagacagcctgagatatggcctcatgggaaaggaaagaccttacatcccccagccggacacccttaaagggtctgtgctgaggaggaggagtgaaagagggaggcctctttgcagttgagataagagtaaggcttctgtctcctgctcattcctgggaatggaatgtcatggtgtaaagccaaccattcccattcgttgtattctgarataggagaaaactaccctgtggctagaagcgagatatgctggcagcaatactgctctgttgctctttgctacactgagatgtttgtttaaagtgaaacataaatctggcctatgtgcacatccacgcacagtacctttcattgaacttattcatgatacagattcctttgctcacgtgtttccctgctgaccttctccccaccatcaccctgttgccctgccacactcccctcaccaagagagtaaaaataatgatcaataaatactgagggaactcagagaccggcgccggtgaaggtcctcacatgctgaatg

SEQ ID NO: 740799 - DNA, 558 bp, Homo sapiens
cctccagccctgtctgcactcccaactctcagctatttttttttgctttttttttttttttgagaacagggtcccactctgttacccaggctggagtgcagtggcacaatcacagctcactgcagccttgacctcccaggctcaggtgatcctctcacctcagcctccccagtagctgggaccacaggtgtgcgccaccacrcccagctaattgttgtattatttaacatagggatctccctgtgttgctcagggtggtcttgaactcctgggctcaagcgatcctcccacctcagcctctcaaagtgctgggattacaggcttgagccactgtgcccggcccccaactctttcactccagtcctctctacttggcccccgtactgttactgccataaaaatgggcacaaacttggcaacttaaaacaacacaaatgcattatttcacatatcatcctggtcagaaatccaggatggctccgctggccctcagctctgggtttcacagggtgtcagccacccgagctctcattgggaggctctgggaagaagctgctt

SEQ ID NO: 740800 - DNA, 543 bp, Homo sapiens
ctctggccttgtttgcaatggttggataatttttcttcccattgtctaggccggaaggacttatgtgtttgagaggtttgtgttaggccattgatgacgcctcttttgaatgaaagggctgaccctctgaagtggctccagcccaggaaacaagccccttcctcttgtgtgtgtgtttccttgccagagtgctggaactccgtgggtcctggatcattgttgtctgccttgtatattgcttccttcaattgaatttcagccctcaggttcccacagacagatcagtgttaatgatgttgataattatgataattatagataccctctgtagttaatttctatcaagcctaaaaatgtctctatcaaagaatctgatgtgttacygacgtcatcctgtttatttcttgcaacagccttaagaaggaaggaagggactcttattaacaatcccccctccctttttttttttttttttttttttgagatagagtctcgctctgtcacctaggctggagttcagtggcacaatcttgactcactgca

SEQ ID NO: 740801 - DNA, 567 bp, Homo sapiens
agccagtgaagtctgaggatccagagggaaacttattcctttcttttgttgaaatcaacatgagcaggaaatggatctttcccccaatcagagaacttcacatgtttttctaatagaatagcagtgtctgaggtatatacayggggagtggccccccgggaaaacgaggccatgaggctcctggcatggagatgacacacgaagactctcgtaacttatagaggggaaaataaagcagtcattccaggctgggcatggtggctcacgtctgtaatcccagcactttgggaggccgaggcaggtggatcacctgaggtcaggagttcgagaccagcctggccaacatggtgaaaccccaactctactaaaaataaaaaattaaaaaaaaaaattagttgggcatggtgctgggcacctgtaatcccagctactcaggaggctgaggcaggagaattgcttgaacccgggaggcagagattgcagtgagccgggagcctgtaatcccagctactcaggaggctgaggcaggagaattgcttgaacccgggaggcagagattgcagtgag

SEQ ID NO: 740802 - DNA, 539 bp, Homo sapiens
catcctgtactttgcccttcatcaactctgaactgtttatagttctctgaacatagcccgagtgattcacacatttgcatgtactgttcctctcctgctgtgataaagsgacagtcacctaatccccgcccctccgttgcattttttttttcctacaagatttattatgcacctactgtgtgtatggctctgggatgctgtaataagcaagacagacacatctttcccttcacggggcgtatgtgtctcgtgcatactgggagggcagggacagggtctccattcatttctgcattccaatgccaagagggtgtcagatctgggtgggtcgaggtagggaacaggtaaacataactcacagtgtgatgccgtgttacagccaggctgggttcctcacgcctgtgatggcagcgctttggggagccaaagtgggaggattgcttgaagccaggagtttgagaccagcctaggcaacatagagagacccgctctcaaaaaaaaaaaaaaaaaaaaaagctgtcgcagtggcactctcctgt

SEQ ID NO: 740803 - DNA, 539 bp, Homo sapiens
catcctgtactttgcccttcatcaactctgaactgtttatagttctctgaacatagcccgagtgattcacacatttgcatgtactgttcctctcctgctgtgataaagggacagtcacctaatccccgcccctccgttgcattttttytttcctacaagatttattatgcacctactgtgtgtatggctctgggatgctgtaataagcaagacagacacatctttcccttcacggggcgtatgtgtctcgtgcatactgggagggcagggacagggtctccattcatttctgcattccaatgccaagagggtgtcagatctgggtgggtcgaggtagggaacaggtaaacataactcacagtgtgatgccgtgttacagccaggctgggttcctcacgcctgtgatggcagcgctttggggagccaaagtgggaggattgcttgaagccaggagtttgagaccagcctaggcaacatagagagacccgctctcaaaaaaaaaaaaaaaaaaaaaagctgtcgcagtggcactctcctgt

SEQ ID NO: 740804 - DNA, 539 bp, Homo sapiens
catcctgtactttgcccttcatcaactctgaactgtttatagttctctgaacatagcccgagtgattcacacatttgcatgtactgttcctctcctgctgtgataaagggacagtcacctaatccccgcccctccgttgcattttttttttcctacaagatttattatgcacctactgtgtgtatggctctgggatgctgtaataagcaagacagacacatctttcccttcacggggcgtatgtgtctcgtgcatactgggagggcagggacagggtctccatycatttctgcattccaatgccaagagggtgtcagatctgggtgggtcgaggtagggaacaggtaaacataactcacagtgtgatgccgtgttacagccaggctgggttcctcacgcctgtgatggcagcgctttggggagccaaagtgggaggattgcttgaagccaggagtttgagaccagcctaggcaacatagagagacccgctctcaaaaaaaaaaaaaaaaaaaaaagctgtcgcagtggcactctcctgt

SEQ ID NO: 740805 - DNA, 552 bp, Homo sapiens
tatagggagagccgcggggccctgtggtcaatgtaccagcaggcccatgacgcaactgttccgtttggaaatttctggaaagcagtaatttttggaatcataaatcttgagtattttttttttaaactttggaaaggtttttaaactttttttttttaagttttttttaaacttcggaaagttttaagctttggaaagaatgtaacaaaatgttattaacatatgtggagctatcgaatcatttaatggtggtttctgtattttctgttttgttttttatcacataccttcttaattaagaaaaacccaaactaatttgaactttaaaagggaggcaaacaaaaaagtgtcaragtgactggatttttgtgcgcaagtcatttaacaatgcagcgctgcgtctcctatttctctggcttttaaccttgctttggacaaattggtcgctttttgttttgatgtcgtttcaagcttacggaaaaattgcaagattatatctagatcaatcaattgtttacgttttattctacttgttttattacctttctaata

SEQ ID NO: 740806 - DNA, 593 bp, Homo sapiens
tgggcttaagtatttgttgaattcggtcttgaatacacatatcttatagaattacatgctttatttatttattttaaacaacagacatttatttttcacagttctagaggctgagaagtccaagatcaaggggctggcagattcagttcctggtaagggcttgttccctggcttgtagacaactgtaataatttttgtttcacaggcaagaagggacattattagtgatgtatgtgatgaagacagctttaacattgccctcaactcaactgtagacaagtttctttctgactttaagctcctgacctcccttttcatacagcatttactttataaaacttawtattgtaaattctgtctctgccccttgaggtgtaaatcttcatccagcctcttgccagttttacaatccagggatatctttctcaaggacctgggagccacccctttgaaatgtaatcatcaagaaagacaggacttccatcttccaggctctgtgggagggtaggagcctaacttacataagatccaattagcaaacacagatggccttatcacattggccaaatcccccccgcatccccaatgtcctc

SEQ ID NO: 740807 - DNA, 593 bp, Homo sapiens
tgggcttaagtatttgttgaattcggtcttgaatacacatatcttatagaattacatgctttatttatttattttaaacaacagacatttatttttcacagttctagaggctgagaagtccaagatcaaggggctggcagattcagttcctggtaagggcttgttccctggcttgtagacaactgtaataatttttgtttcacaggcaagaagggacattattagtgatgtatgtgatgaagacagctttaacattgccctcaactcaactgtagacaagtttctttctgactttaagctcctgacctcccttttcatacagcatttactttataaaacttaakattgtaaattctgtctctgccccttgaggtgtaaatcttcatccagcctcttgccagttttacaatccagggatatctttctcaaggacctgggagccacccctttgaaatgtaatcatcaagaaagacaggacttccatcttccaggctctgtgggagggtaggagcctaacttacataagatccaattagcaaacacagatggccttatcacattggccaaatcccccccgcatccccaatgtcctc

SEQ ID NO: 740808 - DNA, 593 bp, Homo sapiens
tgggcttaagtatttgttgaattcggtcttgaatacacatatcttatagaattacatgctttatttatttattttaaacaacagacatttatttttcacagttctagaggctgagaagtccaagatcaaggggctggcagattcagttcctggtaagggcttgttccctggcttgtagacaactgtaataatttttgtttcacaggcaagaagggacattattagtgatgtatgtgatgaagacagctttaacattgccctcaactcaactgtagacaagtttctttctgactttaagctcctgacctcccttttcatacagcatttactttataaaacttaatattgtaaattctgtctctgccccttgaggtgtaaatcttcatccagcctcttgccagttttacaatccagggatatctttctcaaggacckgggagccacccctttgaaatgtaatcatcaagaaagacaggacttccatcttccaggctctgtgggagggtaggagcctaacttacataagatccaattagcaaacacagatggccttatcacattggccaaatcccccccgcatccccaatgtcctc

SEQ ID NO: 740809 - DNA, 599 bp, Homo sapiens
cccaatactcttgacctctgtcacaatacttttgaatagccttccttgactgcttcactcaattcagtgcaatttttctttgacaggaaatcactgttttgtttttattaaaacaatgtgttttccatgattctgcctaatgaatcatactccccagtaacctaaccattcaacagtcagagcctaagagaagaagctgaagagcactgcctagaagtgaatgtgggtctggctgggagctagccagaggaattcttcctgataagtggcaatactcaaaggctattacacractgctgcatccattagccaaaagaaagtcacagccagcttcaggaactctgaatagccaacaagaagtatcatggggcccagtcagtaaaaggtgtctttgccaagagaccattcaaaggaatagatgggtcactaaatgtcatagtgtatatcaataaatatccagtgttaggatcaactcaatcagactcagatgtcactgtccttggcacagagatccaaccaacaatcttgtggtagtcactagcaaaataaccaacattagccaggggagcccccatctaaccgtgccatgacatcatatg

SEQ ID NO: 740810 - DNA, 364 bp, Homo sapiens
aagccatgcttcttccgagctgggtgagttgagccatcagggcccactatgcttctgggtgtcactccttctgggaacaagcctctgctcccctggcatgattgggcactctgtcagccggtgcctgactgaggctggtagggggaaraaaccaactgattgtcaccctgtagttcaagcctatagggtgcctccaggcagccctgcctggaaaagggctcatgacacaggagggtctctgaattagctggagcagctgttcagcaccagggctgtgggaagataggttgggtttgtgtacctggtgctgccttgcccctctctgcctttctcattctgttgtttctcgttccgagagacccct

SEQ ID NO: 740811 - DNA, 644 bp, Homo sapiens
gcctgcctacccctctccaagcctgctgtctcttctgtatgtgcacgtgtctgtctcccagagaagctgtgctcagccagacagacggaaagggatcccagacttgggatctatgaatgagagcctcagactctgaagttgctcccagcgagatgcaccaggccccayggcaagagcgaaaaggcagcagcaagatgctgatggcgtgagaggtgtcaacatcagaggtgccagcatgaggaggatggcctcctctcccagcagggggcatgctgcagccccctgaagaccaccagccagagccctggtcagaaaccagtgtgattccattgccattcccctgtgaggcctggaaggagaggagtctgtctgaagaggagccactcaggccgccaagctgcctgggtgcccatccccagatcatgttgccccagctggggccctaccctgcccccaggtccctggcaccatgtgccccgcaggagcagacctccacatttaccctcctgcctttgggctgagagtctcccctccatcttccccatattcttgaggactctctgacacttggcagaaaccaggatctgttgggctgggcagtcaggttctttctccagcctcctctcctgtgagcatttcaagct

SEQ ID NO: 740812 - DNA, 623 bp, Homo sapiens
atgcagagttagagttggggagaaagatcagcctaggagcaggaaatctgaagcatccacttaggtcaattacggcttgggtaaaagccctataggtgagtggacacagagagaaggaccaagtcaatgcctggacagggatcaaagactagtgaagacatcaggtacagtgttatctgaggcataacaggttagtgccaagaaaactaaagggagataatatttcagaaaggaaattstgaacaaaaatgtgtctaatgctacagtctgagacaaaaaaaaacaaaaacaaaaaactgcagaatgtccaagaagttaagagttatggtgatattgcaaggcctccattatatgtccaaagactcaaatgtcctcaaagttgaagagaaacaaccaggaaattaggaagggaagataaaagacccattagataaaaagtttggaggccttgcctgatggctcaagcctgtaatcccagcactttgggaggccaaggtgggcggatcaccagaggtcaggagttcaagattagcctggttaacatggtgaaacctgtctctatttatactaaatatacaaaattagctgggcatggtggcacacacctataatcccagctactt

SEQ ID NO: 740813 - DNA, 634 bp, Homo sapiens
atatacatataaaggtacacacacacacatatatggacacacacatatatatatacacacacacacatccagttttaacacaaacacataaaggaaaccttttctcttgagaatgtcctctgtgctagcttccgttctaggtgctggggataaagagatagacatgaccattgacttcatggagcttacaggttagtaggagaggctgttattacagagctgctaatscccctccaccccccagaaaaagacattacaggcttaaactcaaattttacaaaaagataggtgctaatccaattggagattttttgttttgtctaaaaagtggaatgagtttatttttattttcaaaattcaaatagcataattattttttctgattatggaagcaatgcatgctcattcataaatatttgatcataccacatatatgactctcaaattttacaaaaagataggtactaatccaatcagagattttgtttttgttttgtctaaaaagtggaatgagtttatttttattttcaaaattcaaatagcataattatttttttctgattatggaagcaatgcacgctcattcataaatatttgatcataccacatatatgactctctaacctgcttatgt

SEQ ID NO: 740814 - DNA, 632 bp, Homo sapiens
gaggccattgagcttaggattcacattttcaaattgattttccaaagaagaataccaatttacacttcggccatcaaaacattaacgtttgtttctctgagttcttgccagtactagtattataattttaactgttttgtttgtttttatcktggtttctttgaaatgtagcagttgaaacactaccttagtctagtatacatttatttcattactcatggttggtagagatataatttttctgggttgtttctagtctgttgcacttactcttttgtagtttgttcataatatttactcatttttctgttagtgccttattgatttatgtgagccatctggacgttaaagatatcatcccctttcttgctatatttcactcaaatattttcccttctctttattttgcctttccagttcagtttcctttgctcttggtattcccattgcttgaaatgttcttgcaccagatgtctgtgtgattagctgcttaacctcttcaggactttactcaaatatcaccttctcacagaggccccttttggccaggctgtataaaacacgagcaccttctccccaaactaaagatctctttccactcttttctctccttaatattcatcactatttaa

SEQ ID NO: 740815 - DNA, 486 bp, Homo sapiens
acaatggctggtggttgagacaacagacttggctttaagctatttagtcacaagcaaaccttttaggcctgtgatgactcttctcctcctagcagcgagttttcctctctttgttagctctaccttgtgttctatagttggggctataatatctcaggatctggctgaaggttgggacattctctgattatcccttcctctctaaagagcacactctgtacagtctttaagagtgagtaggctctgctgagcacaaatcaagatgaaaggcacaggaagttsatcttgtttgcacagctggaaaagggggcaagaagtttctagaaattggttaaatatgggaacagcacgttctgcaactctgggagtattgagaaaattgttgaaaaggttggtctgggccctttatttaagttaccatttgttaagcacatgtattttacttccttaattcttactgaattaagaatgatcacttgggcaagt

SEQ ID NO: 740816 - DNA, 646 bp, Homo sapiens
cgcctcggcctcccaaagtgctgggattacaggcgtgagccaccgtgcccggccgacttcattttttaagaatggctttattttttatattttagaaatagggtcttgcttgttgtgaaggctggtgtcaaagtactgggctcaagcaatcctcccacatgagcctcccacagtgttggggttacaggcatgagccactgcacctggccaggaatggctttagggactgattatgtaaggtgtaaatattcattctgaaaaaaatgaaaagaattaaaaggcaagtccattgtctattctccctaaactgaatttgtattttctgcatgttttctctgcacataaagttcattttttttttcttttttttttgagatgaagtcttgctctgttgcccgggctggagtgcagtggtgcgacctcagctcactgcaacttctgcctcccaggctcaagcrattctcctgcctcagcctcccaagtagctgggtttacaggcgcatgccaccacgtctggctaatttttatatttttagtacagacagggtttcaccatgttggtcaggctggtctcaaactcctgacctcatgatctacctccctcggcctcccaaagcactggaattagaggcgtgagccaccacgc

SEQ ID NO: 740817 - DNA, 646 bp, Homo sapiens
cgcctcggcctcccaaagtgctgggattacaggcgtgagccaccgtgcccggccgacttcattttttaagaatggctttattttttatattttagaaatagggtcttgcttgttgtgaaggctggtgtcaaagtactgggctcaagcaatcctcccacatgagcctcccacagtgttggggttacaggcatgagccactgcacctggccaggaatggctttagggactgattatgtaaggtgtaaatattcattctgaaaaaaatgaaaagaattaaaaggcaagtccattgtctattctccctaaactgaatttgtattttctgcatgttttctctgcacataaagttcattttttttttcttttttttttgagatgaagtcttgctctgttgcccgggctggagtgcagtggtgcgacctcagctcactgcaacttctgcctcccaggctcaagcgattctcctgcctcagcctcccaagtagctgggwttacaggcgcatgccaccacgtctggctaatttttatatttttagtacagacagggtttcaccatgttggtcaggctggtctcaaactcctgacctcatgatctacctccctcggcctcccaaagcactggaattagaggcgtgagccaccacgc

SEQ ID NO: 740818 - DNA, 646 bp, Homo sapiens
cgcctcggcctcccaaagtgctgggattacaggcgtgagccaccgtgcccggccgacttcattttttaagaatggctttattttttatattttagaaatagggtcttgcttgttgtgaaggctggtgtcaaagtactgggctcaagcaatcctcccacatgagcctcccacagtgttggggttacaggcatgagccactgcacctggccaggaatggctttagggactgattatgtaaggtgtaaatattcattctgaaaaaaatgaaaagaattaaaaggcaagtccattgtctattctccctaaactgaatttgtattttctgcatgttttctctgcacataaagttcattttttttttcttttttttttgagatgaagtcttgctctgttgcccgggctggagtgcagtggtgcgacctcagctcactgcaacttctgcctcccaggctcaagcgattctcctgcctcagcctcccaagtagctgggtttacaggcgcrtgccaccacgtctggctaatttttatatttttagtacagacagggtttcaccatgttggtcaggctggtctcaaactcctgacctcatgatctacctccctcggcctcccaaagcactggaattagaggcgtgagccaccacgc

SEQ ID NO: 740819 - DNA, 491 bp, Homo sapiens
tatggccgacctcgaggacagggcgattgctccaccagaatgttcccagatggcacagatgcttctggttctggcactgggacctgcagcaggattcccgggtggcttaaagaggttccttgaagtttgtgatcaggaattcaaagtagcgcagatygggacggctgggccttctcccctcagcacactccgcgaagggcagtgcaaacgcacgctggcaggaagtggctgggaagcaggcagagagcgaccaggaagcggccaggaagcaggcaggaagtgggcaggaagcaggcagaaagcggccaggaagtggtccaggaagcggacaggtaagtggccaggtaagcaggcaggaatgtgggcaggaagcggccgggaagcaggcagagagcggccaggaagcgggtaggaagcggtcaggttttaccgagcggcgtgacggctccagaggggatgatggagtctggcagagaatggggcgggaggct

SEQ ID NO: 740820 - DNA, 494 bp, Homo sapiens
gaaatgtccagaataagtgactccatagacacagaaggtggattcatggttgttgaggctgtgaaggaaagtggggagtgggtgctaatgggaatgggtttctatttggggcaatgacttttttttttttttttttgagacagagtcttgctctgtcgcccaggctggagtgcagtggcgcgatctcagctcgctgcaacctccacctcctggcttcacgccattctyctgcctcagcctcccgagtagctgggactacaggcgcccgccaccacgcccggctaattttttgtatttcttttttagtagagacggggtttcaccgtgttagccaggatggtctcgatctcctgacctcgtgatccgcccgcctcggcctcccagtgtgatacccaaccttgttttaacctaagtgaccttctcgtagcagagagagcgccggacagactccattttagtttcttcacctgcagcccccttcacctccctccctt

SEQ ID NO: 740821 - DNA, 511 bp, Homo sapiens
caggaaggactgagtgggaaccacaagccagttgaaagaaaatacatgacgtacttgagtgctcaggaccacgagctgattcaagttgtacagaatggacacttacagatgtgtggaaaatctgagacaggaaatgaagcctcaccagtaagctgaacaggggagatttaatgcaaacatttgtccctggctgggcactgtggctcatgcctgtaatcccagcactttgggggctgaggcagragggttgcttgaggccaggagtttgagaccagcctgggcaatacagcaagaccccatctcttaaaagaaaagaataaagagtattagccaggcatggtggtggagcacacctctggtctcagctactcaggaggctgcagcaggaggattgcttgaacctgggaggttgaagcaacagtgagccgtgatcgcaccactgccctccagcctgggcaacagagtgagaccctgtcactgacagaaaaaaagccttgtccctgaggcaaaa

SEQ ID NO: 740822 - DNA, 582 bp, Homo sapiens
aggcctgtgcgccagcagctcggccagtatgcagcccacagccctgcagagaacagtggacctcactgcggccagacgtctgctgaccccgccagcgcgaggaacagaggacctgactgcagccagacctttgctgaccctgccagtgtgaggcacgctgggtcagggacactgtgaaggacaggcagggaccactggctcccctcctgggccccgcaggcctcccggggtgacaagtgcaggggcaggcgtgcctcctccagacctctgtgctcccagcctgagaacagcaagctaagttctcacacctcctcctgggtttccaggctcaggcccacctccctgggagtgggaggctggcaaagaccccactgcactcctgcccctcccctgaggctgagctyaggaaccaggtgacccggctcctgtcccagcccttcctgaggccccaggagcggtaaccgtatctcctcaccacatgtcgatgctggtggtctgcgtggtggttcccaacagcagttcaggggctcggtacctacacacagaagcacccacctcaatacagccggctcctctccccca

SEQ ID NO: 740823 - DNA, 575 bp, Homo sapiens
ctcggcacctgggtgacttgccgcccacagtggtgcgtgctggtggtcccagctacttggaaggctgaagtgggaggatcatttgagcccaggaagttgaggcttcagtgagccatgatcatgccacagcatttcagcctgggccacagaccttcaagatcctgtctcaaaaagaaaaagggrtatcgctcagtgcttagtgcagctgtgggtcattcggcagctgacacagatgaggctatgtaacgcagcactgcaggcagagggggaggccaaggcctgaataccccgtctgactagccttaggcaggcgacttggcctctctgcctcccccatctggttagccttgggcagtcgagttggcctctgtgtctcccctgtttgactagccttgggcagatggcttggcttgtctgtacctcagttttgtctgaaatatgggttgtcagagacctatagcagaagctgctgtgtgtcattattcactgttctagggctcagaacaggcacgcgataaaagccagcaccgttggccgggcgcattggctcacgcctgtaatcccagcactttggg

SEQ ID NO: 740824 - DNA, 575 bp, Homo sapiens
ctcggcacctgggtgacttgccgcccacagtggtgcgtgctggtggtcccagctacttggaaggctgaagtgggaggatcatttgagcccaggaagttgaggcttcagtgagccatgatcatgccacagcatttcagcctgggccacagaccttcaagatcctgtctcaaaaagaaaaagggatatckctcagtgcttagtgcagctgtgggtcattcggcagctgacacagatgaggctatgtaacgcagcactgcaggcagagggggaggccaaggcctgaataccccgtctgactagccttaggcaggcgacttggcctctctgcctcccccatctggttagccttgggcagtcgagttggcctctgtgtctcccctgtttgactagccttgggcagatggcttggcttgtctgtacctcagttttgtctgaaatatgggttgtcagagacctatagcagaagctgctgtgtgtcattattcactgttctagggctcagaacaggcacgcgataaaagccagcaccgttggccgggcgcattggctcacgcctgtaatcccagcactttggg

SEQ ID NO: 740825 - DNA, 581 bp, Homo sapiens
gcttctctagctggaggcctctgtggccggtggtgcccctacccgggtctcctgggctccagggttggccctggagtaccccgcccacctagcccggccgtgggatccgccctcagcccatggctggactgcgcatgcgcacgccgcaacccgcttcagccttgagcactggagtcyggacaagaggagtgtggtggcgcacaaaacgcccaaagatgccaggaacggcagagccccaagggtgtcacagctcgattgttccccccgcctgcggtctggtgagtgggggtgtgttacagtgtcaccccccctttttttttttttgagacagagtctcactctgtcactaggccagagtgcagtggcacagtctcggctcactgcaacctccgcctcctgggttcaagcgattctcctacctcagcctcccaagtagctgggagtacaggtgcctgccaccacacctggctaatttttttttttttttttttttttttttttgagacagagtttctctcttgttgcccaggctggagtacaatggcacgatcgcagctcactgcaacctccacctcccaggt

SEQ ID NO: 740826 - DNA, 581 bp, Homo sapiens
gcttctctagctggaggcctctgtggccggtggtgcccctacccgggtctcctgggctccagggttggccctggagtaccccgcccacctagcccggccgtgggatccgccctcagcccatggctggactgcgcatgcgcacgccgcaacccgcttcagccttgagcactggagtctggacaagaggagtgtggtggcgcmcaaaacgcccaaagatgccaggaacggcagagccccaagggtgtcacagctcgattgttccccccgcctgcggtctggtgagtgggggtgtgttacagtgtcaccccccctttttttttttttgagacagagtctcactctgtcactaggccagagtgcagtggcacagtctcggctcactgcaacctccgcctcctgggttcaagcgattctcctacctcagcctcccaagtagctgggagtacaggtgcctgccaccacacctggctaatttttttttttttttttttttttttttttgagacagagtttctctcttgttgcccaggctggagtacaatggcacgatcgcagctcactgcaacctccacctcccaggt

SEQ ID NO: 740827 - DNA, 581 bp, Homo sapiens
gcttctctagctggaggcctctgtggccggtggtgcccctacccgggtctcctgggctccagggttggccctggagtaccccgcccacctagcccggccgtgggatccgccctcagcccatggctggactgcgcatgcgcacgccgcaacccgcttcagccttgagcactggagtctggacaagaggagtgtggtggcgcacaaaacgcccaaagatgccaggaacggcagagccccaagggtgtcacagctcgattgttccccccgcctgcggtytggtgagtgggggtgtgttacagtgtcaccccccctttttttttttttgagacagagtctcactctgtcactaggccagagtgcagtggcacagtctcggctcactgcaacctccgcctcctgggttcaagcgattctcctacctcagcctcccaagtagctgggagtacaggtgcctgccaccacacctggctaatttttttttttttttttttttttttttttgagacagagtttctctcttgttgcccaggctggagtacaatggcacgatcgcagctcactgcaacctccacctcccaggt

SEQ ID NO: 740828 - DNA, 536 bp, Homo sapiens
atttctcagtgtgtggcccagcagggtgaggcactttcacgttttcaggtagccaacctcaagaagtcttcagcctgcagagctggactccacccatgaaagagcctgtagatgtcgcctcctaagcctctctctcacaacccttgggrccaccaccatcccatatagaccaagtgggctccctgccacctgccttcccccctttggcttgtgcaccccacttccagtggcttgctatcacatggatcctccaggacgcggctcccccacagtctctgcttcggcctccccctgtcacgaagcagccatgtgggtctcatgggagagcctcacgtaatacatgctctcccccaactcaattctctgagcattttgggggtctctgtgcggaacaccccctccagctgccggcccagccagaacctcctcttcatgaatctctgaggcttccctgtggagcctgttccgaggggcccacaccatgtccctggctgacccatagtgctgtcctcaggtcccagggcagcctgcatatg

SEQ ID NO: 740829 - DNA, 544 bp, Homo sapiens
tccagttaggagtagcggtcctcttcctctctacatcactgggatctgctctggggctgggcagctccttgccgggggttgggtcttagtcagacttgcctttctttctaggcctctccagtgacttctggccatgccgatgtgagtcagatgcgttctttctctctggctcctagggcgctcagtagcttcctccaccttcaggctgtagcccaktcaggggcaggccggtcggcagctgggggttgaggcagggaaacttgagccctaggccacgaggtcctgggccactaattttagaaagcacatgtcactggaaactctccttctctgccaggaatcaatggcctggctcttctggtgatgccaggggcccctgggagcctctccccaaaccgggaacctcaggggtgtctcctggcctgggtgggtactttctgtcctgagtacatctcgaaaggggctcttccgaggccctggacagccatggcttgggccagggaggtagctcaccttgtctgctctctactttctccagcccttc

SEQ ID NO: 740830 - DNA, 567 bp, Homo sapiens
aaaagaaattacacatttgtgaggtgatggatatgttaaatagcttgattaacaattccatggccgggcgcggtggctcacgcctgtaatcccagcactttgggaggccgaggcgggcggatcacgaggtcaggagatcgagaccatcctggctaacacggtgaaaccccgtctctactaaaaatacaaaaaaaaaattagctgggtgtggtggcgggcgcctgtagtcccagctactagggaggctgaggcaggagaatggcgtgaacccgggaggcggagcttgcagtgagccgagatcgcgccactgcactccagcctgggcgacagagcgagactccgtctcaaaaaaaaaaaaaaaaaaaacaattccatgatgtatacatgtatcatagcatgtgtgaagygacctacctgtatgaaggtgaggtgacctggtcacgtgacagtgaggtgacctgggggatgtgtgaggtgacctgggggatgtgtaaggttacctgggggtatgtgtgaggtgaacttgggctcatgtgaggtgacccagggtgcatgtgtggtggcctg

SEQ ID NO: 740831 - DNA, 533 bp, Homo sapiens
tctctcaccactccaattcaacatagtattgagagatctggccagggtaatcaggcaagagaaagaaataaattgtataaaaataggaaaagaggaagtcagattgtctctgtgtgcagatgacacgattgtatatttagaaarccccatcgtctcagcccaaaatctccttaagctgataagcaacttcagcaaagtctcaggatacaaaatcaatgtgcaaaaatcacaagcatttctataacccaataacagaaaaacagagagccaaatcatgagtgaactcccactcaaaattgctacaaagaaaataaaatacctaggaatacaacttacaagggatgtgaaggatctcttcagggagaactacaaaccactgctcaaggaaataagagaggaccgaaacaaatggaaaaacattccatgctcatgaataagaagaataaatatcatgaaaatggccatactgcccaaagcaatttatagattgaatgctgtccccatcaaactaccaatgactttcttcacagaat

SEQ ID NO: 740832 - DNA, 562 bp, Homo sapiens
tgcgtgtgcattttctagaatggcttcagtcatccatcttctctggaggctgcagaccagccagatccactacagctacaacgaggagaaagatgaggaccactgcagctcccagtgggcacacctgccagcaaatcaccactgctcccacagatggggcccctgggggaccattctcaggcatttctgtaagtcattgcagacaataacattcaggatcacaacgtgaaggtgagctaggcctgtccccactgtcacctcagtgctctgtttatctgaggactttgacataggaatacttakgtgctctttggttaacatagcacagactttgtttcatgtattatttggagggttttgaggtgagaacctgattgtgttaacatgctagcaaggcttcggaagcattactgattgcaagtgcatcagaagctgtggcatgtttaagatttgtgaagactcactggccggccctgaagttacctccagctgtttctgttgcagggctttttgtgtcaaatagaaaggtactgtaggcagtgccatttgaccacaccgatca

SEQ ID NO: 740833 - DNA, 574 bp, Homo sapiens
cagaggttccaataagtaaaaatcacagcacaaatcattaagtatggggacttgttctgttgatagtattcatgtgtttaaatttcatctggcccactggctgcaaaaagcaaggaagttgtgtctcatgaatatccgtctatatttgcagcttgccctgatcagggtatccttcttatcatttaagaaattataagcatataatattttataccagcttaatgtgtacatccacatgtaacagccacaaaacataaagctatgtaaaataaaaaawttcccccagttttggttgcaaatttattcaagcccttagcaataaattcagtctttacagagttaacagtatagctgcccaggggatcctgggagatccacctggaatgcaactcctgtcccttccttggggccccttcctgggagccctaaagtagcggctaggctaaaggaaaggctgtttcccccgctagtttatctaaagttttgctccagccctggggattgaatatccttttttgttctcttggaagagagagaaacacaaactttttacattttttggctcacccaagcc

SEQ ID NO: 740834 - DNA, 613 bp, Homo sapiens
tgcaacactgcactccagcctgggcaatgaagcaagaccttatctcaaaaaatatatatataaaaataaaaatcagctctcattgatttctatgtaaatatgcccaggtgatgtccatatagacataaataataatatttctgacaatgggtccatatgatcttcaaaatgtaaaatgcctatctgtgtaattgacgtggttagtctcattaatgaatatagattcaattccactttcttkttctagataaattatataatctagcttttcatttcacttatttactgataacaacaggaagaatgacaagatatccattttgcaaaattactctggtaggagtaaagatgaaataatgacacaattgcacagaaacctagaaaaaagtatggtcttctgatattctatcacatcacatactaaaggcctcataaaactcagatactttatctaaaaatgttattttcatcataggaatgatcaaagcatgagtccacaattgcattaaaatgtgcttgtatcacaagcacaaaaggaggggaaaacatccttactgatattttcaacgtatgctttacttttcatcaatatgaacctcaacttgatatgatg

SEQ ID NO: 740835 - DNA, 548 bp, Homo sapiens
caacatgggtatgcccaggcaattaggatctttgagacagaatgaggcttgggcactgacagtaaaaaaaaaaaaaagaaacttctcaggtgcttttaatgtgcaactaaggttgatcaatttagcaaaatagcaacaactacaacaagcccagttaagtttgcattccaaataaacaacaaatcatgttttagtagaagtacaccacctgaattgtttggaacatcatcttcccattcccctcaccctccatyctatgcaaaaagccgtatctggaaagcagcaataagtttgtgggttttctttttttgagatcttttgcacagcgtggtggatatagttaataatagtgattgtgcacgttaaaatcgctaagaaaataaatttcaaatgtcctcactacagaaaataataaacatttgaagtgatacatatgttaattagcttgatttaattattccacattgtattcagaaatcataactcaccttggcacttgcataaatatatacaactataatttgtgagcttacaataaaaaatgtctg

SEQ ID NO: 740836 - DNA, 630 bp, Homo sapiens
cacaagaatcctcgtaagagggatgtaagagagtcggagtcagaggcgatatgatgagggaggcagaagcagggcaggggagacagagagagagattaaaagacactacgctgttggccttgagatgaaggaggaagctaggagccaaggaatgtgtgctgcttctagaaggtggaagaagacaaaggagacagattatcctcacacggcctccagaaggaactttcaaactttcccaacatcttgatgttagcmcaggaagagccgttttagacttttgacctccagaactgcaaggaagtacatttgtgttgctttaagccattacatttttggtaatttgttatagcatcaatgggaaaccaatacactaaccaagcctttgaatcaccaaggcttgggacttctttgctcctgggaagaactggcaagactttattttctgactctgactccctttgacttgacagaggtgggctttctaaaaggggaaaagcctccagaattggaagagatgggagtttactggggagtgttctagggctcagcacttgctgggagtgagggaagcaggacccggcagagggagcaggtgaactgttaacatcataagctacctggggctgggat

SEQ ID NO: 740837 - DNA, 615 bp, Homo sapiens
ccaagagttgagggacttgcttaatgccacccaagacagagccatgcttagaggctgggcacctcaactcaagtggggtcccttccctctaggcagggctgcagctcctaaagtagttccggagacttctgggaagttttgtgccctctcttgcactccccccccckcccccaccaagcccaaaagacacatccacagaagaactggtttatttggcagaatataatcttcttatcctctctgatagctctcctcccacctcattctccagagctcccacatacagaggtctgatccccctcctccaggtgagtgatctccatgggcaattggacaaagcagaatggcctacgctctggcacagctgatgggttaacatgtaacatttattgagcatctagtacgtgccaggcactttcccatccatttgaatgtcatatcaacattctgagaactacaaattattatttcaatttaccaaatgaacagacaggctcagagaagtgaagaaactcaatcaagatcacaaagctcagaattacagagattcaagcccaggtattttttttttttttttgagatggagtcttgctctgtcgcccaggctggagtgca

SEQ ID NO: 740838 - DNA, 621 bp, Homo sapiens
catcagggctcttggctcctaaacattcaaagaacatcagagacctgagtagcaagatctatagagaggggacaaaagatcacagggcttctggcagtcccaagtgagtcagaagcagagttcagagtgggcacagaggtgcagacctcatgcatgcgatgtgccttctgacctcagacctcgtggaggaaaagaactcttgtttcctgaccacttactctattctgtgcactgttctgggacacttacactttagacacttacttgatttgacttaccacgcgaccccatggggcaaggtatttttctctacaatttacagataagaaaactaagatttatttgtccccagtgccatactaataagtgaagctcaattaaaatttaggtctttttttctgtgagtcggttctcctgatctcttcaaagcatacctttgactagggcgtatcccctgttctaagaaaaaattctgattttstacaggggcatgaagaaggaggaaaaggatgcaggaaagaatttaagaggcaaagtggatgtgataaaggaacgagaagatcatgagaaaagatgaaaaagagaacagtgactgacccatgtcatgaagcatcagtttct

SEQ ID NO: 740839 - DNA, 566 bp, Homo sapiens
caaaagaaataaaaacatgcttaggaaaagacttgtacaggaatattcacagcagttttatttataattttcataaatcagaacctattcccagcacagtgtctatccatacaataatgtataagtaaactgtggtacatccgtacaatggaatgctacttagcaatgaaaagaataaactgttgcttsatggaaaagcatgaatgtatttcaaaaacattcagcaaaataagccttgcgtaaaagagtgtatagcacataattctatttttatgaagttcaagaatggacaaaacaaacctagagtataaaaattcagagtagtgtcttggttggaaattgcttgagcaagaacatgagagaacattctggagggtactaatgttttgtatattgacagatgtttgagtcacacaggtgaatgcatttgtcaaaacccagtgtattagtttgctatggctgccataacaaaatgctacagactgggtggcttaaacaagatggatttattttcataaaattctgggggctaaaagtcaacaatcaatcaagatatggacagggtt

SEQ ID NO: 740840 - DNA, 595 bp, Homo sapiens
ttctcccacagcatttttaatctttgctaactgtggagtaaaagcccgactttttaaaatttttggctaaagatattctaggcatgggcttttaggaaagatagtttttgaagtgggggtgctaagaggagactttccaggaacctttgaaatcatccctgcctcccgtgatccagcctctctcagctacaggaaaaggcctttcccagcagcatgcttggtctcagcccattcaatatttaaaattacgtgcacaacatttaacatatataggtactgaacttaaatggattcaattcaattcaaatggttatattgaggaactactgtgtgctgggtgttgtactggacccttttaaagaggggaggaagcaacatgaatcagacctcagtccaggacctcaccactgaattgcagaagacasaatgttataaagaaaacagtcatgcttcagtcagttgttaatctggacaaaggatctactgtgtgctgtgcccttaacatgggccatctcattctgagatagcaattgttttatttatgtatttatgtatttatttatttattttttatttgagttggagtctcactctg

SEQ ID NO: 740841 - DNA, 595 bp, Homo sapiens
ttctcccacagcatttttaatctttgctaactgtggagtaaaagcccgactttttaaaatttttggctaaagatattctaggcatgggcttttaggaaagatagtttttgaagtgggggtgctaagaggagactttccaggaacctttgaaatcatccctgcctcccgtgatccagcctctctcagctacaggaaaaggcctttcccagcagcatgcttggtctcagcccattcaatatttaaaattacgtgcacaacatttaacatatataggtactgaacttaaatggattcaattcaattcaaatggttatattgaggaactactgtgtgctgggtgttgtactggacccttttaaagaggggaggaagcaacatgaatcagacctcagtccaggacctcaccactgaattgcagaagacagaatgttataaagaaaacagtcatgcttcwgtcagttgttaatctggacaaaggatctactgtgtgctgtgcccttaacatgggccatctcattctgagatagcaattgttttatttatgtatttatgtatttatttatttattttttatttgagttggagtctcactctg

SEQ ID NO: 740842 - DNA, 538 bp, Homo sapiens
ttcacacatggtagatgttcaataaatgtaggctaaatggaacaagaatgatgtttattgaatccttaacaagtgttataagaacatttagcacacagaatactcaagtatgtctttctattaacagtgattaagaaggtcttctatagaggaataagctaagtaccatgaagagcactcaacaaagtaagaccacccaactattcaattagagatagagaatttttttctgaaatctttgatgtggctcagaatataccaccccaaaatatgccgtttttgcataaagattactttgagctgaaggcaaatgagaatcaacagatacagcgagatgccatctgaraaacaaagtttaccagaagtctctcctcccaggaaagttttgtggccataaaagctgaaagttggcactgagacgggtctgcaaacaaatcttattaaaataatctttatcttccgccaacttccttcatatatttcctactgacttctccacagttttctgttgttttgtctccacaattcattgaattta

SEQ ID NO: 740843 - DNA, 587 bp, Homo sapiens
ctgtctctttaaaagcatttaaatgcactactgaggtaatgcctttaaaaataaaattttcttctgaccaacgtgcataataaaaggaacattctaatgtacacgataatacatatttgaaactttgaaaacatttgcaacatttaataaatctgctactagaaaattcctaaaggtgataagaaatatacataaacaaattcagaatcaccaataattttcctctcaaaagaaaaatgattaaatacctattttctataatcaaatttaattatyaaattaccttactgtgcatttggcatattggtaaaataaacataaaactaattattttaataagtaactaattaattatcctgttatgatatagatgatatttttcctgttctttctctgtttgttttctttttcatgcccaatctagattatcaatgtatttaaaaatcaatgccagggcttcccataatgatccttgctttgtgtatccttgcatcattactaatttagttacgttcttttataacatattttagttcatgagaagaataaaatgagaacataatcatttagtaactaaatgtggtata

SEQ ID NO: 740844 - DNA, 583 bp, Homo sapiens
atgtttgtggttttaacttgcatttatctcgtgactaatgatatggaatatcgtttaataagtgcttattggccactcatatatcttctttggagagatgtttactcaggtattttgctcactgaaaaaactgcattaaattctgtccgtttattatttagttgtaatagttatttatatattctagataccagccccttatgagttaaggagatacaattgtttttccattcataagttatatttttacttcttaatatcttttgatgtacaaagatactaattttgatgatgattattttcttttgcctttcatgcttttagtgtcttatatgacaatttataatctacgatagctttagctcttacatttaggtatttgatctattttgcattaatttttatatatggtttaaaraaaatgtccactttattttttgcatgtagatatcaagttctcccagaaatacttattggaaagatgattttcttctcattgaattgttagcagcctcgcaatgtcatttactgtaaatgtaaggatttatttctggactctcgactttatttcattgatttatat

SEQ ID NO: 740845 - DNA, 614 bp, Homo sapiens
acatctctagccaattagagattagtacctcaagtaagttttccagactcacattgtcttcgccctcaggaacaccaattattcttagttttggccattttacttaatctcatatttcttggagactttatttctttgattcatttttctttatttttgtctgatttagttaattcaaaagccttgtcttcaactatgaattttttttttaacttcttctagtctattgttaaaactaggcagtagtcttattgaaagtgtcccttatatatgatgagtcagtatttttgttttgttgttgtttggtttttgcagcttttaatagtttctccttttctttaaatttcagcatttttactcaggatctctttgcacttatactacttagagttagttgagtgtyttgaatgtgtagatttatatttttcagcaatttggggaagtcttcactggtcatttcttcaatttattttttctgttatttttcttctcttctttttctggtgcttccattatgcatacattggtgtgcgtaaagtgccctacattcctctgagactgatgctttttctttatgctaaaatctctgttattgagattgcataatatctatt

SEQ ID NO: 740846 - DNA, 615 bp, Homo sapiens
tatgtgagtccagaatattacgtgaaatacttttatttgtattgatcatttgattttcaggttttccctgatgaatttcacctccagactttgaatccttttcttcgggcctgtgctgagttacaccagaatgtaaatgtgaagaacataatcattgctttaattgataggtaagaccttccaacactggcggataaatgctctgacttgggaataatgaattttaaacatttttttgaattatttgtttctgttacatctttatcataccaatgatcttaatttaattatactataaataatttagctttgtgagtatgagtactaggtactgtctaggttagacatgaaagaggcttaacttaaatgtgcaggagacgtgaagataatgaatatctttattctgtgtgcttaattgacatttaaagatgttgtacagacttattttttaaatcatacaaatccmaagatcatattgaagaacaaaatttgttttttaccatgatgtaagtatcttgcagtgggaactcatttgatttagagtagccgtaagatactgatgattgaaaatgttcaagtaatcactctatcatcacattttcttaaagaaaaaat

SEQ ID NO: 740847 - DNA, 542 bp, Homo sapiens
ctgtcatccacaaagtcatatgcactcaagccccctgtatctccctgacactgtatcctaccagtttaggtcttgctcactctggtttagccacactggctccctgatgctctgccaacactcaaattttgctcccaaagcgggtctttacactggctgttccacttcttcaactatctgcatctctctcttacctccttcaagtctttgcctaaatttcacctcctgtgacctcgatattaaaaaatttaatcagccaccaaccagtcagtcttccaattttccttatcttattccaaacttacttagcacttgtggcttcatttacaacatcaytgacttatttataacgtttattgtgttttgttttctcccccactagccacgagagtacagaactgtgttttctctctgatgtatcccaagcacccaaaacagtgcctggtacaaagtaggcttcagtaaatcaatatatgaataaaaatgacagactttgtattttaaaatagtcttcatttgtaataaagactctggaattttta

SEQ ID NO: 740848 - DNA, 574 bp, Homo sapiens
tggattaaagacttaagtaagagatatgaaactactagaagaaaacatagggaaaatacttcatgacataggtctgggcaaggattttttggagaaaaactcaaaagcacaggcaacaaaagcaaaaacagagaaatggaagtrtatcaatctaaaaagcctctgtacaagaaaggaaacaatcaatagactaaggagacaacccacagatggagaaaatatttgtaaactatgtacccgataagagttaatatccagaatatgtaaggaactcaaacaactcatcagcaaaaaataacaataataatctgatttttaagatggccaaaaaacctaaataaatacttctcaaaagacatatacatggccaacaggggtatatgaaaaaaatgctcaacatcactaattttcagggaaatgcaaatcaaaaccatatgagatattacctcaccccaattagaatgactattatcacaatgacaataaatgctagcatggatgtggagaaatgagaactgctacacattgtgggcaggaatgtaaattagtatagccattatggaaaatggtatga

SEQ ID NO: 740849 - DNA, 541 bp, Homo sapiens
taaacatttgtacttgtgttaatgcaatttcatactcactataacgatgtgacagataataatgtcaaatttgtagttaaggcaactgatgcacaaagaggtcaaatgacttacccagggtcatatagataagtgggaaagaaaakaattaattattaagaaagtgttagtaccattagtccagaaagaatttttttatccttaggctaattgttaataataacgaccagcacttattgagcatcctttaagtcacctcatttaatccacataatgaaatttggaggtaggcagtatgaagagtaagcaactttctcaatgtcacaacaattttatcaagtggcagagccagtatttgaactcaagattatctatcctcagactctgtgcttctaactcactacacatcccactatgatatgacatgaaaagatagaaaatcagagaatgggaggagagaaggtttagggaccaatgtagttaaaagtcaatagtaatagttccctgccctctgaatatctctgcccctctgcctggaata

SEQ ID NO: 740850 - DNA, 650 bp, Homo sapiens
ccccctttccctgctgtcagctagaggtcactcagctctctgacacccccttctcacccctagagccccatgtgccttgtgtcatggcctcttccatctccaaagtccacaatggagaatttctcatatgctaaacccctctagctatgaacctctctgacttcttctcctctctttgacctctggacccaatcaaatttaaagggatcacgtaattaggtcagacctacctggaaaatcttcctatcttaaagttaaccaatctgcagtcatggttacatctgcaaaaactccttcccagaaayagactgaatacttggagaaagtgtcggtacactgggagccagcaattttgggggctgtcttagaagctgacctcgccaggtgcggtgactcatgcctgtaatcccagcactttgacaggcaggtgaatcatgaggtcaggagttcgagaccagcctggccaacatggtgaaaccccgtctctactaaaaatagaaaaaattagctgggtatggtagtggcgcctgtaatcccagctacttgggaggccgaggcaggagaattgcttgaacccaggaggcggaggttgcagtaaaccgcatcacgccactgcactccagcccgggcaacagtgtgagactctgtcg

SEQ ID NO: 740851 - DNA, 569 bp, Homo sapiens
agccgatacatatatccacctcaaatacttatcatttttgtaatgagaacatttaaaatctacttagcaactttgaactatacattattatcaactgcagttaatatgctatgcagtagatttcaaaaaaccttatttctcctaactgaaactttgtaccttgaaccatctccccattccaccttcccccagcctctggtaaccattattctgttgtctatttctatgacttcactggttttagattctgcatatacgtragaccatgtagtttttgtctttctgtgtctctcacttaacttagcataatgtcctccaagtttattcatattgccacaaatgacagaatttccttcttttaatggctgaataatatttcattgtgtataataccatattttcttgtataatatcaaccattgatggatgcttaggttgattccaggtcttggctcattgtgaataatgctgcaatgacatgggtgtgtagatatctcttcaacatactgattttaatttcttcagatatatacccagaagtgggattgctggacttcatgatcattcta

SEQ ID NO: 740852 - DNA, 569 bp, Homo sapiens
agccgatacatatatccacctcaaatacttatcatttttgtaatgagaacatttaaaatctacttagcaactttgaactatacattattatcaactgcagttaatatgctatgcagtagatttcaaaaaaccttatttctcctaactgaaactttgtaccttgaaccatctccccattccaccttcccccagcctctggtaaccattattctgttgtctatttctatgacttcactggttttagattctgcatatacgtaagaccaygtagtttttgtctttctgtgtctctcacttaacttagcataatgtcctccaagtttattcatattgccacaaatgacagaatttccttcttttaatggctgaataatatttcattgtgtataataccatattttcttgtataatatcaaccattgatggatgcttaggttgattccaggtcttggctcattgtgaataatgctgcaatgacatgggtgtgtagatatctcttcaacatactgattttaatttcttcagatatatacccagaagtgggattgctggacttcatgatcattcta

SEQ ID NO: 740853 - DNA, 569 bp, Homo sapiens
agccgatacatatatccacctcaaatacttatcatttttgtaatgagaacatttaaaatctacttagcaactttgaactatacattattatcaactgcagttaatatgctatgcagtagatttcaaaaaaccttatttctcctaactgaaactttgtaccttgaaccatctccccattccaccttcccccagcctctggtaaccattattctgttgtctatttctatgacttcactggttttagattctgcatatacgtaagaccatgtagtttttgtctttctgtgtctctyacttaacttagcataatgtcctccaagtttattcatattgccacaaatgacagaatttccttcttttaatggctgaataatatttcattgtgtataataccatattttcttgtataatatcaaccattgatggatgcttaggttgattccaggtcttggctcattgtgaataatgctgcaatgacatgggtgtgtagatatctcttcaacatactgattttaatttcttcagatatatacccagaagtgggattgctggacttcatgatcattcta

SEQ ID NO: 740854 - DNA, 569 bp, Homo sapiens
agccgatacatatatccacctcaaatacttatcatttttgtaatgagaacatttaaaatctacttagcaactttgaactatacattattatcaactgcagttaatatgctatgcagtagatttcaaaaaaccttatttctcctaactgaaactttgtaccttgaaccatctccccattccaccttcccccagcctctggtaaccattattctgttgtctatttctatgacttcactggttttagattctgcatatacgtaagaccatgtagtttttgtctttctgtgtctctcacttaacttagcataatgtcctccaagtttattcatattgccacaaatgacagaatttccttcttttaatggctgaataatatttcattgtgtataataccatattttcttgtataatatcaaccrttgatggatgcttaggttgattccaggtcttggctcattgtgaataatgctgcaatgacatgggtgtgtagatatctcttcaacatactgattttaatttcttcagatatatacccagaagtgggattgctggacttcatgatcattcta

SEQ ID NO: 740855 - DNA, 505 bp, Homo sapiens
aatttttctctttctgtaagttatctctttattcttttttttttttttttttttttttttgagacagagtctcactgtgtcacctaggctggagtacagtggcttgatttcagcttactgcaacttccgcctcccaggttcaagcatttctcctgcctcagcctcccaagtagctgggatkacaggcacatgccactacacccagctaatttttgtatttttagtagagatggggtttcaccatgttggccagggtggtctcaaactcctgacctcatgtgatccacctcagcttcccaaagtgctgggattacagacatgagccaccatgcctggccatctctttactcttgattgttttctttgatgtgtagcgctttttagtttgatgtaatcacatttccctatttttacttttgttgccaaagcttttggggtcaatccaaaagatctttgcctagacaaatgtaatgtaactttctcccttttttcctctagtatgata

SEQ ID NO: 740856 - DNA, 505 bp, Homo sapiens
aatttttctctttctgtaagttatctctttattcttttttttttttttttttttttttttgagacagagtctcactgtgtcacctaggctggagtacagtggcttgatttcagcttactgcaacttccgcctcccaggttcaagcatttctcctgcctcagcctcccaagtagctgggatgayaggcacatgccactacacccagctaatttttgtatttttagtagagatggggtttcaccatgttggccagggtggtctcaaactcctgacctcatgtgatccacctcagcttcccaaagtgctgggattacagacatgagccaccatgcctggccatctctttactcttgattgttttctttgatgtgtagcgctttttagtttgatgtaatcacatttccctatttttacttttgttgccaaagcttttggggtcaatccaaaagatctttgcctagacaaatgtaatgtaactttctcccttttttcctctagtatgata

SEQ ID NO: 740857 - DNA, 617 bp, Homo sapiens
gccaccacgcccagtcttttcccccctttttttttaatagatgggggaggaaacctaatttctgagagattctgtgttttgttcaaggtcaaaaaacagctcaaataagtcaaaggaggcccacctggatccaaaatctatataccttccactatatcatatgagagtcctctgactgtctttaggggaatgacattttccatttgagtcaatggaagctatagctttacagagtaatgacctttaccttataccctattttaattccctttaagcctgagggcccttgaatagttggtttctacaaaaatgaagctgaaaaacaattaccaaaatatactaacgacctccatgctataaaattattcacgagctagaccacggcgagacttctctaacaaatccacatcatccatttcaaatttttaaattaaattgatggctctttagctctgatatgtcacttttkttttcttttctttgagacagaatttcactcttgttgctcaggctggagtgcagtggcacaatctcggctcaccgcaacctccacctcccaggttcaagcaattctcctgcctcagcctctggaatagctgggattacaggcttgtgcc

SEQ ID NO: 740858 - DNA, 622 bp, Homo sapiens
agtttttgtataaaataactttaggtgatagtgatgcagctagttacttagaaaccattgtcctgcatcttactctgcagccagcttggctttcaaaaggcatggggacaggggagagaagacctcctttctaggaagaggagactctcagctgctaggatatggagagtctgcaggaactgagggacacactgaagaacagtagagctaggccttctgccaagtgggcgctgcccgctccttcctgtagtccagccacatgaaagaagggataggaagagacaaagggggaactgggcctgggccttgtctccatgaggaacagcccatgtctctggttcatcttcagagatcatctccccaagtgctgtgactgttaatggaccactccttgtactgcacaccagttttaaaaagtctatttgccatcagaatggaggrttgaggaagaccacgtggtttgatctagaatagcattttccattgtgtggcatgggcattgcagtgcaacatgagacaatgtcaagcgatctcctaacctgtatggggcagagatggccttaatgggtaggccaaggctgtgtgaagaagagaagaacaggggttgaatgaaacaggggtg

SEQ ID NO: 740859 - DNA, 597 bp, Homo sapiens
tcataaccacaaagataatgggaaaatagagcaggaaaatactttgatatacttaatttctgtgaaaaaaacaggatgtttttctgatgtctgtttcttggagacaagtaattgttcatctcattatcgcctcagacgagaaacaaagsaaataagaaatgagatcgttctaatccttctatatttttgcccaaatcttaagccacagagtaaataagattctcgggtatggatgaaaatagggctactttgtcaaaagtggagtataaaaaagagatgctttctcacagatgagaaagagcttcctctgggttgggaagggagtgagggaggagagaagccctggacttggacgaggagtcccaggtttatgcggtgtttacaaagaagttgcaggactgaaagggacgtgcccagtggcatatttatacaaacatgggattggcaaagaggctccccccccagccccccccacccacatcctgcgcacaccatggaaatggccaaggacctcttgaaaggtccagaattcacagatctctcaaaaatcacctggtagaatagctggccaagaaccaaacgaacctccacactgta

SEQ ID NO: 740860 - DNA, 598 bp, Homo sapiens
gaaacctcgtctctacaaaaaaacacaaaaattagccgggcgtggtagcatgcacctgtagtcccagctactcggggcggggggtaggggtggggtggggtgctgaagtaggaggatcccttgagtctagaaggtggaggctgcggtgagccaagatcatgccactgcactccagcctggaggacagagcaagaccctgtcttgggggaaaaaaagagtatttagaaagctccctgagtgattctagtgtgcagccgcagtggagacccactggtctggagtatgccgtctcttggagaggctgggcaagcctttgcacctgcacctgcaccccttattttgtcctgaggatcccatgaccctccctccccagagagggacactaactccagagacttttcctaactttyccaaaggtacaaagctggtaactggtggcaccaggaatcaaacccaggtcactcctgtgacacccacagttttctcatctgtatagtaaggggatgagcaaaaggaggttaggcacgaggacctatgttcttcagctgcaaagatgatcttatggctcatttctgcactcccttggggagagttctgg

SEQ ID NO: 740861 - DNA, 554 bp, Homo sapiens
cactcccttggggagagttctggatcctcagccacctgccctgcctggttatttctgtagagcatcgccagctgtgatgtactctaggcccaacaatcacagcaacaatctcctctattttacagatgaggaaaccaagacacagagagagaacatgacttgcctaaggtcacacagtgagtatttagtggggctcagactccaactctggaacaaaaggaaagggtgactttggagtggtcctggactggagatttaactggtctgcgggtctgtgtgttccctggagagagagrgaccctcaggaaggcaggagggctgtgcacccttcttgggctctgcttctgcccccaaccctacccttcatggccaaagctaggcctgaggacctgtgatgcactctaggcacatccagagcttccaggaaagaccattcagtggctggtttggtaaagatcatctctcggccaggcgtggtggctcacgcctgcaatcccagcactttgggaggctgaggcgggcggatcacgaggtcaggagatcgagactatctc

SEQ ID NO: 740862 - DNA, 551 bp, Homo sapiens
aaactaaggacatctgaataaccatggatttcagtaatgtatccacactgattcattaattgtaacaaatataccgtatgaatgcaagatgttcataatgaggccggggcggtggctcatgcctgtaattccagcactttgggaggctgaggcggaaggatctcttgagctcaggagttcgagaccagcctgggtaacacagtgagatccccatctctacaaaaaattttttgaaattagccaggtgtggtggtggcacatgcctgtagccccagctactcagaagactgagacaggaggattgcttgagccgggaggttgaggctgcagtaagccaggatcacgccactacactgcagtctgagcaacagagcgacaccctgtctcaatkataataataacaataataataataatggaaactcagtatgggttgtatatgggaaacttgctcagtttctctgaaaatctaaaattcttctgaaaatcaaagtctgcttaaaaattcacatggggtttgcattctcctccatgacaaggttttgcaggtt

SEQ ID NO: 740863 - DNA, 558 bp, Homo sapiens
gcctagaagtccactctgcaaatagaagctggtgttgacccagcctctgcctgctgcctgcctttccagtccctgcatgtgggtgtacttggctgcctgccacctgtctgtggactggagttccccaaaggttctgggtaacccctcagcccagrtccccagaccccactcctccaccccttcctttgctttttcaggcctgaagcgcccacatcagagctgtgggtcctcaccccgccggaagcagtgcaagaagcagcagctaggtgggtaccagtgtggggaggaacataaacagagagatggggttgcctgggggccaagacccggaccctggaccttgtcccctgccaataagcctccagaggcccagtgactcttgtctcgcaagtttccaggagaaaaggactggaggtcttgcacaggcagaggagaggcctgggctggcagcgaaggggctccccacccatctggctgcatggggacttctctgaagagggctccgctgaaggagctggaagcaccatacaggtctcagcttcgctgtccaggcttttc

SEQ ID NO: 740864 - DNA, 484 bp, Homo sapiens
gggccgggcgcggtgtctcacacctgtaatcccaacactttgggaggccaaggcgggtggatcaaggtcaggagatcgagaccatcctggctaacacagtgaaaccccgtctctactaaaaatacaaaaaattagctgggcgcggtggcgggcgcctgtagttccagctactcgtgaggctgaggcaggagaatggcgtgaacccggaaagcggagcttgcagtgagcagagatcgcgccactgcactccagcctgggcgacaaagcgagacrccgtctcaaaaaaagaaaaattagccgggcgtggtggcacgcgcccgtaatcccagctagtctactcgggaggctgaggtaagagaatcgctggaacccgggaggcagagatggcagtgagccgagatcgcgccactgctctccagtctgggcgacagactgtgactccgtcacaaaaacaaaacaaaacaaaacaaaaaaaacttccccc

SEQ ID NO: 740865 - DNA, 479 bp, Homo sapiens
tagctttccaagaaaatacacttgttgccacttgacaaacctaagtaatttctacatcttgggcctgaaattcccactgtgtctccagaatttaactatagcccacccgggtgattcgtatttaagttggatactcaattacccaatttaaaataaaacttggctatataagcaaattaaaggttatctaagtttaaggaaaatattaaccaccacatactattaagaaatatttaaaaagaaaaaaacaaaaatatttagaaatattaagtgcctataattcatattttgaaagacagcaattctccctctaccagcaaactgacatagtagtttccatatakaatacacgacccaataactacctgcacaccctccacaaattcaagctgcataacatatatttgctgagtcatgtaccatacactaaccaccttatacttaataactattaaaatttcttcttgtattccacaaaa

SEQ ID NO: 740866 - DNA, 501 bp, Homo sapiens
tatttcttgtatgctcatgctttctttatgtggatccaagtttctgacctatattattctcattctctctacagaacttacatatatttaaaaatatttaatatttcactgcagccttgacctcccaggtggatgggactacaggcatgtgccaccaaggctaatttttttatttttttagagacggggtctcactatattgcccagcctggtctcaaacgcctgggctcaaacagtcctcttgcctcagcctcccaaagtgtcgggattataggtgtgagccactgtgcccagccttacaggttttttttttttttttttttgctaggctgacatgatrtactgggtaaaaggaattgctgtaattaggtctttagttgtgtggtggcaaggtgttcagaagcactctatagtcctgtgattaggtctcagtcttttattgagtctatggacttcacaaatgtttcgaagttgttttcttctttcttaggtgggacagaa

SEQ ID NO: 740867 - DNA, 661 bp, Homo sapiens
tgtatgctcatgctttctttatgtggatccaagtttctgacctatattattctcattctctctacagaacttacatatatttaaaaatatttaatatttcactgcagccttgacctcccaggtggatgggactacaggcatgtgccaccaaggctaatttttttatttttttagagacggggtctcactatattgcccagcctggtctcaaacgcctgggctcaaacagtcctcttgcctcagcctcccaaagtgtcgggattataggtgtgagccactgtgcccagccttacaggttttttttttttttttttttgctaggctgacatgatgtactgggtaaaaggaattgctgtaattaggtctttagttgtgtggtggyaaggtgttcagaagcactctatagtcctgtgattaggtctcagtcttttattgagtctatggacttcacaaatgtttcgaagttgttttcttctttcttaggtgggacagaatggctagagttggctgcatgttgggtatttcccttcccccaggtgagttaggctctgataagccccaacaggttaggcactggttaaatagtttctcctgaggggaggccttgttaagaacagagtgctctggtgtttttcaaaaatggttcttccccactccactt

SEQ ID NO: 740868 - DNA, 548 bp, Homo sapiens
ggtgataaaaaggagcatgtccctggggtgctgacagatacttctttgaggtggttaggacagacctcatcacagtaaaccatttctcacagccctgatcactgcagagcagttccttttctctgtaccctacaagtgggtggctgataattctgggttccagtataacatggcaacagccagaatctgcctctggggcgggayctgtcaggcttcaggaagggtacacaggacaaaacccctcacctccacccgtccagggcaatgagctcatccagaaaggcaccatgtaagaatgattcagtctggaggcagacacttaatctgaaccctggtcctcagtagtgaccttaggtgaaattgggcccgtgttcctcagttcctgtgtccgtaaaatggagtaatagcctaccgcatagggatgttgtgaggatcaattaagttaaagtaagtatcaagcttagaacagcacttagcacatggccagcactccatccatgtggactatgcccctgcaacaggatccagcctccccgtcccttgacccg

SEQ ID NO: 740869 - DNA, 548 bp, Homo sapiens
ggtgataaaaaggagcatgtccctggggtgctgacagatacttctttgaggtggttaggacagacctcatcacagtaaaccatttctcacagccctgatcactgcagagcagttccttttctctgtaccctacaagtgggtggctgataattctgggttccagtataacatggcaacagccagaatctgcctctggggcgggatctgtcaggcttcaggaagggtacacaggacaaaacccctcacctccacccstccagggcaatgagctcatccagaaaggcaccatgtaagaatgattcagtctggaggcagacacttaatctgaaccctggtcctcagtagtgaccttaggtgaaattgggcccgtgttcctcagttcctgtgtccgtaaaatggagtaatagcctaccgcatagggatgttgtgaggatcaattaagttaaagtaagtatcaagcttagaacagcacttagcacatggccagcactccatccatgtggactatgcccctgcaacaggatccagcctccccgtcccttgacccg

SEQ ID NO: 740870 - DNA, 627 bp, Homo sapiens
gttgctctaaaggaacacctgaggctgggtaatttataaagaaaagagatttatttggctcgtggttctgcagagtgtacaagaacaatggtgccagcatttgcttctagtgaggacctcagattgcttctccttatggtggaaagcaaacgggagcagatgtgagtagagatcatgtggtgagaatgaagaagccagttgggggagaggtgccatgctctttttaatagccagctcttttggaaactaatggagaacttattccttatcatgagtactgcaccaggccattcatgagggatcatgagggatcgatcattcatgagtgataccctcataacacaaacacctcctgctaggccccacctccaacattgggaatcagatttcagtgtgaggtttgggggatcaaaaatccaaactgtaacagcgtgtacaagtctgtctatggycatatattcatttctcttgaatatatttttaagagttaccataacaatattcctaggagtagccttactgggatgaaactttttttttaaaacgtgtctaaatttttaagaaactgccaaactgttttctaaagtgggtgtaccatttcacattcccatcagcaacgtctgaggg

SEQ ID NO: 740871 - DNA, 594 bp, Homo sapiens
cattcccatcagcaacgtctgagggttctagtttctctgcatcctcactaactctcatcttttgtcttttgattattgccattttagtgggtatgtagtagtatcttgtggctttaatttgcatttccctagttactgatgaagtttgagcacctttttatttgcttattagacgtgtgtcttttttggtgaaactgtttgttcaagtttattgtctattttaaaaattckgttgttgacttcttactattaagtttatttttaaaatatattttgttgtaagagttctgtattggagatataagttgttttgttttgttgtttaacagtttgcagatattttatcccagtgtgtggcttcttagtggtgccttaagaagcacaaaaacattcaattttaagagtctaatttaactatttttttggtcttgtctggttagtatcatgtctaagatccttttgcataacccatggccataaagattttctcttatattttctcctagaagtttgtggtttatctcttgtgtttaggtgtataatacattttgagttaatttttgttttttgtgtatgaaggttattggtctttat

SEQ ID NO: 740872 - DNA, 624 bp, Homo sapiens
gtgttgggacagggatatatggaaaatctctgtaccttcctttccatcttgctgtgaacctaaaactgcattagaaaaataaagttaaaaagttagtgaagcaggaaaccaaaaactgaccaggttcagttcagtttttgacatgttggatttgcaatttccaagacatccagatagacatgtttagtaagcagttgattgtatgaatctggtgttcatcagagaggtctgggctggaagatatacatgtgggaatcattggcccttagatggtatttaaaggtataagactggatttaatcatcaattgagtgaacatgtattgcagagaagcaagacctaaactcctggtgcactcgaatattggaggtggaagggcaggaggagaaaagaaataaaggagactgagaagaaacaacttagtgttctgaaagccaagtgaagaaagtgttwcaataatgagatagtgataaactatcaatgctgatgatagagcaaataaaattaagacagaaaatttatcattgaatttaacaatgtagaagtcattagctatcttgaatagtgtagttttggttgagtgttgggagcaaatgccttactaaagtatctttaagaagaaag

SEQ ID NO: 740873 - DNA, 627 bp, Homo sapiens
tctaaagtgacagtacagataaaaaggctgtgcaacttggtgataattgtgctccatttaagcaaccatcaactggtgcatttttttaaagataaattagattttatcaaaattgaaatattttttctttttgatactttatgttctgggatacatgtgcagarcatgcaggtttgttatgggtatacatgtgccatggtggtttgctgcacccatcaacccattatctacattaggtatttctcctaacgctatgcctccccttgccccccacccccaagttgtgtaattttttaaaaaaaattatagtacttggtgtcaaaaccttgtccctgatatcagcagtatgaattattaatagataccatctgaaaccctggagggaagtaataagcttttaaagatgttcatcctgatgattagcctgtcatctttcatggggccctgaaatcaagaatccaccctttttcacatggatataatggatttaatacagtatttagcattatgcactgtatatatatgtggtcttttccctctaggtggctctctgggtctatatagatacaaactattgagaaatgtggctattcctacctttattttgcttctgtgttctgtgggact

SEQ ID NO: 740874 - DNA, 599 bp, Homo sapiens
aagtaatttaatattacaattattgggatcactgagaatgaagagacaaaggaaggattagaaaacctatttaaggctggacgtggtggctcatgcctgtaattccagcattttgggaggtcaaggcaagccgatcacgaggtcaagagatcaagatcattctgttcagcatggtgaaaccccatctctaaaaatacaaaaattacctgggtgtgagatgctgcatgcctgtagtccctgctactcaggaggctgasgcaggagaataacttgaaccccaggaggtggaggttacagtgagctgagagtgtaccactgcactccagcctggcaacaaagcaaggctctgtctcagaaaaaaaaaaagaaaaaaaagaaaacctatttaataaaatgatagatgaaagcttcccaagtttgcaaaagatttagaaattcagatacaggagtctcagcaatcttcaggaatatgcagtgcaaaggccttctccatgacacatgatagtcacactgcctaaagccaaagataaatagtgtatcctaacaagggcaagagaaaaatgtctaatcacccataatgaaaacctatcaaactaaca

SEQ ID NO: 740875 - DNA, 612 bp, Homo sapiens
aataataaaagaatcaatctagtaagaggatctaattctaaatatatatgcacccaaaactgcagcatccagattcataaagcaaatattttatctaaaaagagaactaaactatgatacagtaatagcgggggattctaacaccccactgtcaacattagaaagatcatctagacagaaaataaacatagaaatatgggatttaaactggactttagaccaaatgttcctaacaaacatttacagaacatactatatacattcttttcatcaggacataaaatattctccaggataggccatatatttggccacaaaacaattctcaaaaaatttttaaaaaatcaaaatgatatcaaaaattgtctgagaccacaatggaatggaactagaaatcaataccaagaggaactttggaaactataaaaatacatagaatttaaataacatgatcctgaatgacstgggtcaacaaaaaatatgtaaatttaaaaaacttaaaacaaatgaaaattaaacacatacaaaaacccattgcatacagcaagagcagtactaagagggaagtttatagcaataaatgcctacatcaaaaaacaaaaagactacaaa

SEQ ID NO: 740876 - DNA, 564 bp, Homo sapiens
tgttagaaaggtatagggggatgctgagggcccaaaagctaaaaataaaactcacaatatatcacagcttacccagacagcattgccgaatagttctaattgttcttccttaagcggacccttacatattgctttgaaatattcttaatcatattaaaaaggtttgtagctatttatgggtaatgacaacatgtaggatttgaagttatactgctaatacatggataacatgatcagtacatttctgttggtgaggctacggatgattttattacatctttggttctctcactcaaccgaatttttctgcattaagawttttgttgtcttttacagaaaagcaaacctattaatgttaaaaaatatttggagaaaaaatataaacataaacattaaaaaatagactcaaagtcatatgccactttatttacaaagtctatctttggatggttgaaatatatacattttaaaattttatttacttatttattgttttactttgtatctattatccaacttttcatctcctggcatatattatttttaatcagagaaatatgagta

SEQ ID NO: 740877 - DNA, 623 bp, Homo sapiens
ggcgacacacacagcgaaccgaacgtcgcgcgaagatgacgtaccagagcacgctcatgagactcacgcagcccggcggcgcagaggcgggtcaggtgggcggggcgatctggagtaggaggtgtgaccggagggcgaaattggggcttcctctrctctggtgacccagaaccgtcaactgaaatgaccctgtctgtgtagtactccggcaggatgggcctcggagcgtaaaggcggcaaaaacaaaaatattaaaaaaaaggagagagggacaaaaaaaagaaaacccgaaagtttcagctgcattgctgcggaacgttttttagccagaaggcgaaagaagaaatcggaagtgacgtcgcggccaaaacaagcccgggcttggaggcctgtactgaagctggcctcagatgggaaggcccgactcgctgtctgctgtcgtcggtggtcgcgagaccttgcactctcaccgggtcggcctccagcccctgtgcccgggatccgctcgccgcggatgagcgagagtttcttcctgggacttttcgggcacagctggccggtggcgacagaacggactttctttcctgcaagagtctcccctccagcgggagacagcgggctcc

SEQ ID NO: 740878 - DNA, 623 bp, Homo sapiens
ggcgacacacacagcgaaccgaacgtcgcgcgaagatgacgtaccagagcacgctcatgagactcacgcagcccggcggcgcagaggcgggtcaggtgggcggggcgatctggagtaggaggtgtgaccggagggcgaaattggggcttcctctgctctggtgacccagaaccgtcaactgaaatgaccctgtctgtgtagtactccggcaggatgggcctcggagcgtaaaggcggcaaaaayaaaaatattaaaaaaaaggagagagggacaaaaaaaagaaaacccgaaagtttcagctgcattgctgcggaacgttttttagccagaaggcgaaagaagaaatcggaagtgacgtcgcggccaaaacaagcccgggcttggaggcctgtactgaagctggcctcagatgggaaggcccgactcgctgtctgctgtcgtcggtggtcgcgagaccttgcactctcaccgggtcggcctccagcccctgtgcccgggatccgctcgccgcggatgagcgagagtttcttcctgggacttttcgggcacagctggccggtggcgacagaacggactttctttcctgcaagagtctcccctccagcgggagacagcgggctcc

SEQ ID NO: 740879 - DNA, 585 bp, Homo sapiens
gattttgagtttgggaagacagtttagaagtcattttttaatatgattttctggaatctcatagaaaccaaaattaaaataatttcagattatataatatctaatttaaaggaagtacatgttgatttttttaaaaacttcttgtttaatatttrtttacaaattccctaatgaagttccctattattccttttaaaatcatagggccaggcacagtggctcatgcctgtaatcccagcactttgggaggccgaggtggacagatcacttgaggtcaggagttcaagaccagcctggccaacatgatgagacctcgtctctactaaaaatacaaaaattagccgggtatggtggcgtccacctgtaatcccagctacttgggaggctgaggtacaagaattgcttgaaccacagaggctgtggttgcagtgagctaagactgtgccactgtactccagcctgggtgacagagtgagactctgtctcaaaaaataaaatcataagaaaaaaaatcatgttccttttagagatgaattagcgtaatatccattcctgaatattcctgttctatgaatatttaatatg

SEQ ID NO: 740880 - DNA, 585 bp, Homo sapiens
gattttgagtttgggaagacagtttagaagtcattttttaatatgattttctggaatctcatagaaaccaaaattaaaataatttcagattatataatatctaatttaaaggaagtacatgttgatttttttaaaaacttcttgtttaatatttgtttacaaattccctaatgaagttccctattattccttttaaaatcatagggccaggcacagtggctcatgcctgtaatcccagcactttgggaggccgaggtggacagatcacttgaggtcaggagttcaagaccagcctggccaacatgatgagacctcgtctctactaaaaatacaaaaattagccgggyatggtggcgtccacctgtaatcccagctacttgggaggctgaggtacaagaattgcttgaaccacagaggctgtggttgcagtgagctaagactgtgccactgtactccagcctgggtgacagagtgagactctgtctcaaaaaataaaatcataagaaaaaaaatcatgttccttttagagatgaattagcgtaatatccattcctgaatattcctgttctatgaatatttaatatg

SEQ ID NO: 740881 - DNA, 585 bp, Homo sapiens
gattttgagtttgggaagacagtttagaagtcattttttaatatgattttctggaatctcatagaaaccaaaattaaaataatttcagattatataatatctaatttaaaggaagtacatgttgatttttttaaaaacttcttgtttaatatttgtttacaaattccctaatgaagttccctattattccttttaaaatcatagggccaggcacagtggctcatgcctgtaatcccagcactttgggaggccgaggtggacagatcacttgaggtcaggagttcaagaccagcctggccaacatgatgagacctcgtctctactaaaaatacaaaaattagccgggtatggtggcgtccrcctgtaatcccagctacttgggaggctgaggtacaagaattgcttgaaccacagaggctgtggttgcagtgagctaagactgtgccactgtactccagcctgggtgacagagtgagactctgtctcaaaaaataaaatcataagaaaaaaaatcatgttccttttagagatgaattagcgtaatatccattcctgaatattcctgttctatgaatatttaatatg

SEQ ID NO: 740882 - DNA, 567 bp, Homo sapiens
aataaaatcataagaaaaaaaatcatgttccttttagagatgaattagcgtaatatccattcctgaatattcctgttctatgaatatttaatatgcatttactttctgtgctttaatgcagtgaagtctgtcatcatgctctagattgcttttataatgataccctgaataataaaactattctcttaggataacatcacccaagattaatatattttcttccagaactttcactatggttatrtagacttttttttttctttgagccagagcctctctctgtcacccaggctggagtgcagtggcgagatcttggctcactgcaacctccgccttctgggttcaagcaattctcctgcctcagcctcccgagtagctgggattacaggcgtttgccaccaagcccggctaattttttgtatttttagtagagatggggtttcaccatgttggccaggctggtcttgaactcctgacctcaggtgatccacctgccttggcctcccaaagtgctggggttacaggcgtgagcaccatgcccagcctagactttttttttttttgact

SEQ ID NO: 740883 - DNA, 604 bp, Homo sapiens
aaattaagacactgtattttcatcttcttagagttcaaggcttcacattttacttataaaccagatcactgatcaataaatgattttgtagtaaaagctgagtgatttgcactgtaattttgaatttgaatataatatgaatatgaaatcacctattttaacaccttgaatccacaatttttttaaagtagaatcattgtagaggaagtttttctatttaaaatacaaaaatattctatatagtataagtatgttaaaaaaaagaaaaacagcaactgtatttgtgttagtatttaactgtatttctgttagtcactgtatttgagaatgtaagataaatatatctatattctaaagcatgacaaaatctgttttttctttggaaacactaaatccctcctgatttctgagtcacatactgtaccaactgagctaggaagaatcttcctgtaggactctcaycccacctgtaggccatttctggtttacttatataaatttgcataggacaccaattgcttttccttctgtagtaaggccatccaatcgtatcattgaagtcaatgatcaaatgctactaatttttaaggagaactctccctat

SEQ ID NO: 740884 - DNA, 603 bp, Homo sapiens
tgtgcacaacgatctaactgaaatgacacattttccttactaattaaattaggaaacacttttgtgttctacttacactctgtaacactgaaaacacaaacatgtttacacaaaggcgatgtttttagctcgtctcactgatgtgtctccaaccctcgtctcycccgctcctcgagatttgctagctccgtgaatttccctcgataggcaaagtttgtcaccgataatataagaagcgcaaaaggaatatgttttttaaaatacctaaaccttaaaaaaaaaacccacaaacccgaactattaaaacttactttcccaccaatgcgcacttgtgcctgcagtttggcgagtttttcctggttcatgattgtttctttcatctagaaaaagaggaaatcctcagcaaggataggtttagctcactctagcattccatgctcgttatttcccaagataccagcaggaaaataaacgtcctacacaggccgaaacctggatcccaaatccaccccgcaaagctccaaattgggtttccagggagcccaaagagcacccgcctccccaccactcccccacagctccccgctctggcaggcccggatg

SEQ ID NO: 740885 - DNA, 603 bp, Homo sapiens
tgtgcacaacgatctaactgaaatgacacattttccttactaattaaattaggaaacacttttgtgttctacttacactctgtaacactgaaaacacaaacatgtttacacaaaggcgatgtttttagctcgtctcactgatgtgtctccaaccctcgtctcccccgctcctcgagatttgctagctccgtgaatttccctcgataggcaaagtttgtcaccgataatataagaagcgcaaaaggaatatgttttttaaaatacctaaaccttaaaaaaaaaacccacaracccgaactattaaaacttactttcccaccaatgcgcacttgtgcctgcagtttggcgagtttttcctggttcatgattgtttctttcatctagaaaaagaggaaatcctcagcaaggataggtttagctcactctagcattccatgctcgttatttcccaagataccagcaggaaaataaacgtcctacacaggccgaaacctggatcccaaatccaccccgcaaagctccaaattgggtttccagggagcccaaagagcacccgcctccccaccactcccccacagctccccgctctggcaggcccggatg

SEQ ID NO: 740886 - DNA, 538 bp, Homo sapiens
tatttctgatttattttttctccttcctttccacacaacaatcattactcttcttcgtcagaatatattactatagaaaaatagaaaatgcttcagtttcatatatctactgattcttttgctgaataacgcatttgattacagttatagttactttatttagaataagaggcagtatgtgaattgtccaagtaattaacaccaatgaaatttaattttttttgtcgactttscttgctatgatagctctccgtatttcagtataagttatcagtgaaacagagtagtaaccaggcatttagtctatcttggaatcctgtcaattgaaacatatgtggtattagtataaattattggggaaagattaatttgatacccatattgccaaaataaagtctagagtagaaaaatagctcaataaacatttgagtgtatctgatgagtgcaataggacttgagatcctgattaaggacatgatgagacctctgaaaaaattatctgaattgggcgataacatcattcttccctcataattcc

SEQ ID NO: 740887 - DNA, 490 bp, Homo sapiens
gcaagtaaaaaaggttagcacagcacttggcttataataatcccacaatgcatgttgactgtaaaactggtgtagattatgagcaaatggaaacatttctctgagtaaagaggactctttcttcatattttattcctctctagatgctttttatgtttaaaatatttttggaagatcatttatccatccttctattcatttagtgaatagacgtttcctgagcaccaactagttgtaatgctctgagggcagagcatgagaatattgaaacagtgtgcttatattccaatgaaggaggcaggcatgaagaaataattacccaattcatcatttaactataattataatatatgctgtgaaggataattctagagccaccaccagaacatttaacaaagggactgatctagctttggcagggacatcatggggcsctccaaggaagtaagttttgagccaggtcacctcaatgcgatgctgtgatttgtag

SEQ ID NO: 740888 - DNA, 536 bp, Homo sapiens
cgtaggtgatgccccccaataacagaagcatttattgccacagaggatcgacattggaaaagaaaaactgctcatatcttttggttttgaaattttaaaagcctaggctgggcatatacaaaatagttagaagtctatgaaatgaataagagcaaagttttccctacacctggagactagtaaagattatctgaatgacatgaagatgagaatgataaaggraagctggggagcttaggtatgagtggtctccaaggctccccatattgtctctgtttcctcccccactcctacctcagcccaggcagaacctcagcagacagggctactagacacagagaggatggggggattcagaaatatggaagcagagattcccacagtccccactgatgctgaaggagtacagtgtcccattccccataccaacaagcaccccaaaaccacagcaacatgatccagtgagtcagtagccctgaagaggctttgtggtaggaacaaggtggaactcaagatcagaaggttcaaaatctcag

SEQ ID NO: 740889 - DNA, 536 bp, Homo sapiens
cgtaggtgatgccccccaataacagaagcatttattgccacagaggatcgacattggaaaagaaaaactgctcatatcttttggttttgaaattttaaaagcctaggctgggcatatacaaaatagttagaagtctatgaaatgaataagagcaaagttttccctacacctggagactagtaaagattatctgaatgacatgaagatgagaatgataaagggaagctggggagcttaggtatgagtggtctccaaggctccccatattgtctctgtttcctcccccactcctacctcagcccaggcagaacctcagcagacaggrctactagacacagagaggatggggggattcagaaatatggaagcagagattcccacagtccccactgatgctgaaggagtacagtgtcccattccccataccaacaagcaccccaaaaccacagcaacatgatccagtgagtcagtagccctgaagaggctttgtggtaggaacaaggtggaactcaagatcagaaggttcaaaatctcag

SEQ ID NO: 740890 - DNA, 635 bp, Homo sapiens
atggctgaatcccaatacagatgggtctctttctgccccgctgacctcaggttcatagccaaatcctctgaccttcagatttcttagggatcagtcagatgttggtccatgatttctccagctctccaggatactcataccaatctcttggatgcagctaggtgatacaggggaatagagaaaattaaaaaatactatagaataataatgaccttttcataaaaatacttttaccagtctcccacctttccagctgaatttttagccwcagcataaatagcttagggtcaagagatgggcaaagataactctcctctgaagccaggtctgatggtcagagttgctgttaaagtacaagtctcatggattgcaatgggagtgatagggcccagaaacaagagtatacaggtggatgcaattatcataatgagtggcagggtcagagtggcagcagagtgggcctgacccacagagttgagatgtgcttaatgaaacgcagagtgcctaggggtaaaggagatggctgccaataggtgtactatgctgtcagcaaggatatcatgaaaagaatccccaggagtctgaggacagttgctctaatatgaagtcttgattatttgtccagttttcagacc

SEQ ID NO: 740891 - DNA, 635 bp, Homo sapiens
atggctgaatcccaatacagatgggtctctttctgccccgctgacctcaggttcatagccaaatcctctgaccttcagatttcttagggatcagtcagatgttggtccatgatttctccagctctccaggatactcataccaatctcttggatgcagctaggtgatacaggggaatagagaaaattaaaaaatactatagaataataatgaccttttcataaaaatacttttaccagtctcccacctttccagctgaatttttagccacagcataaatagcttagggtcaagagatgggcaaagataactctcctctgaagccaggtctgatggtcagagttgctgttaaagtacaagtctcatggattgcaatgggagtgatagggcccagaaacaagagtatacaggtggatgcaattatcataatgagtggcagggtcagagtggcagcagagygggcctgacccacagagttgagatgtgcttaatgaaacgcagagtgcctaggggtaaaggagatggctgccaataggtgtactatgctgtcagcaaggatatcatgaaaagaatccccaggagtctgaggacagttgctctaatatgaagtcttgattatttgtccagttttcagacc

SEQ ID NO: 740892 - DNA, 476 bp, Homo sapiens
aattgtaaggaaccagctgtaggatcccatatgcactagttgctcatctctgaccctccccagccacattaattatctcttcctccaagtccccaccctatgtggtttgcccccctcccacagccctggctatgctgtgctctctgcagtctattttgttggctggtgtgtgagttcccagctgcaaggggggcaagcagtgcatctgagcacccaggacccagctagggggcctgacacrcagaacttgcttggtaaatgggaagccggtgaaaggtagaagaacttttgatctcttccactgccataaacaaacccctcatgactcacaatttcatttctcagtctgagggagtgatgccacactacctaggcagaagtgactgacagttttctctcagtcccagctttgttttccccatggtgaggctacccctctcccatacagtgtgaggattgccagtccctttgaaaac

SEQ ID NO: 740893 - DNA, 602 bp, Homo sapiens
aagttcacagtccagaggcagaggctcacgggaagactgagacctcatcagggaataccatgaacaattctacatccacaagattgataacctagaagaaatggaacaattttatgaaagacacagtctgccaaaactcacacaaaaagaaatagacaatttgaataggcttatctatttaaaaaattgaattgtaatgaataactttccaaaacagaaaacaccaggcccagatgaattcactggtgaattctaccaagcatttaaagaagaaattayactaaatctctgtaatctcttttagaatatagaggcagagggaatgcttcctaactcattctatgatgccagcattaccctaacaccaaaaccagatgagatcattataaggaaagaaaactaaaacccaatagttcatgaacataggtgcaaaaatcctcaatgaaatatcagcaaattggatataacaatgcgtaaaaagaattatacaccattatcaggtaggatttttttcccagatatgcaaggcttgttcagcattcaaaaatgaatttatataatcaattacatcaacaggctaaaaaaggaaaattccacaatta

SEQ ID NO: 740894 - DNA, 634 bp, Homo sapiens
agggctgtatagaaaagagcaaggtttggtgagagaatattgggaaggggaaacctcctttagattgggtggtcagggaggcttagagaggtaggttggctctgcctaagtgtgttaaccttgggctagtcaaaacttacgttaaatttggttggagaatggctgtgaaactcagaaggaaatgtgtctgaagtaggtacatatctcagtctaccaactcatatgtacaagaggtgtaacgttctctgctcttccataagtgaatttaccttattttgtgctgccattgttctaggagaccaaagctaagcgaatttactttgtgtttggtgactaggggcaaaaggcataaagtttaaccgcagtgtatctgggatctcctttccatgggaggggttaatactaagccagcatttttaccgacacagcccccagtatatcacccattgctttttgtacggtgaatcctcagtaaygttcaataagcgaacatgtgaaaacactcccattgtgacagaggacataatgacattatctctgacattttcccaatctgttcttccaaattttaggggcctttgtagacttccctcaagaggaagtttctctgccatgattccttgcctgtcagtca

SEQ ID NO: 740895 - DNA, 636 bp, Homo sapiens
taattgttaagctgatcctattagcctgcatatcattttctatatgcatgttaaaaagctgctttagtaatatacttcaaaaccaaagatttaacagttctgggttgatatagggttatcgtttaaaatattttttgtaggaagatagtacatcctcctttgaggtttacattccccaatatctaatgacagagaatgttagtaaagtgccaaaatattctgcaaaatatacaaaacaatggatatgtgttcttatcaaggagcaaaggttggagatcaattttgttattagccttactggacaatatagcctcactttgctgtgactcttttacaggcactatttaaggtcaagatatactgactaaaagcacaatttaacaatgaatttagtaatggtctggatatttctattatatgtgttatttctagayttggataacctaggttagcacaacctagttgggtgtgttttagtttctctagatccaagattctttatatatgcttgaatcttttaatcagagttaccaacatttgagacctggatgttcacccaaggttaaagtctttggaatcctgcctgatcctttcacatttatattttcatattatgaatttggctaaagttgctat

SEQ ID NO: 740896 - DNA, 581 bp, Homo sapiens
attttcttgtgaataaataattttctctgtatattttgcatgacatgttgctcactttaaaatgtttttgtcaggttttcggtgatttaaaaatagcattttgataattgaggcaactggacattataaccactctatatacttttgttacctactttcattcctttctctctctctctctcgttctatctttctctctttcttgtggccactacggtaagcaaaataaaatttgggaaagtcactttatattttccttcctgatgtatcaatgaatttgaaaarcttcaattctgatttattataagtgctactgtgtgtgagagcaagtttgagaaagagaaagtttgcacttgtgacagagaaagagggagagagagattagagagtggaaggaaaatgaaatgcattagaaaagtaattgatttatgacaaatgtaaatatatgttttactataggaaaatacaactcagttctttttattagagaaattctgtggtaagaaatgatccattttattagaaaatgttttttggtataatttagttctatttgaggaatgtacattcaaaaccagatc

SEQ ID NO: 740897 - DNA, 624 bp, Homo sapiens
tttcttgttaaagatgtttttcttttttacaatcctacctctttgcattgtcatattagttataaaattatctcataaatttcatttaaaaactgcttgaattttcatggaatcgtgttgcatataaaggtcatctgggggctgggcaccgtggatracactgtgatccctgcactttgggaggtcaaggcgggagggtgacctgaggtaaggagtttgagaccagcctgtccaacatggtgaaaccccgtcgctactaaaaacacaataattagccaggttggtggtgggcgcctctagttccagctactcaggaggctgaggcaggagaatcacttgaacctgggaggcagaggttgcagtgaggcaagatcatgccactgcacacagcagtctgggcgacagagactccatctcaaaaaaaggtcatttgtaagaacagatattttaataataataatatttgaacaatgttgagtcttccaatggtatgtttcttaatttctttgaatattttaaaatttctttcactactatttaccatttttaatttttcccctttttatttttataaattgtaggagtacatgtgcagtttttttaaacacaatgttgtagtcttgg

SEQ ID NO: 740898 - DNA, 624 bp, Homo sapiens
tttcttgttaaagatgtttttcttttttacaatcctacctctttgcattgtcatattagttataaaattatctcataaatttcatttaaaaactgcttgaattttcatggaatcgtgttgcatataaaggtcatctgggggctgggcaccgtggatgacactgtgatccctgcactttgggaggtcaaggcgggagggtgacctgaggtaaggagtttgagaccagcctgtccaacatggtgaaaccccgtcgctactaaaaacacaataattagccaggttggtggtgggcgcctctagttccagctactcaggaggctgaggcaggagaatcacttgaacctgggaggcagaggttgcagtgaggcaagatcatgccactgcacacagcagtctgggcgacagagactccatctcaaaaaaaggtcatttgtaagaacagatattttaataataataatattygaacaatgttgagtcttccaatggtatgtttcttaatttctttgaatattttaaaatttctttcactactatttaccatttttaatttttcccctttttatttttataaattgtaggagtacatgtgcagtttttttaaacacaatgttgtagtcttgg

SEQ ID NO: 740899 - DNA, 646 bp, Homo sapiens
ttatttttaaataaatgtcttattgccctggatattgaatgtgaatattaaagatgtaaccttcccttgtctccaatcttagatgaaaagtttcaatgtttctacattgtggttttagttaaaattttttgatggataaatatacctcataagattgaaaaagtgtttttattcctatttccaytgtttgagaagttatattattatcactaacagtagtataggtagtagtagcaccagtactagcagcagcagcagcagcagcagcagcaacagtgtgagtgagtttttaatttgtccagtgctttctctgtaacttttaaaatgatcatatgaacatctttctcctctggtaagtaaaaacaacaaagtcaatcatggttgtttattgaacacttttcagtgtaaaacacgtaactgcattattacttttaatattaaatttgcttcatgatgttccgttggaacttttcatagacacctttgtggtaagcagtttcaactgccaaaattttcctgctagtacatacgacataagactatacttccataagcctttggtcagtaaggaatgagctctgcagctatactttcctgaactaactcttaggatataaggatgttcatttatttttagtctatatat

SEQ ID NO: 740900 - DNA, 646 bp, Homo sapiens
ttatttttaaataaatgtcttattgccctggatattgaatgtgaatattaaagatgtaaccttcccttgtctccaatcttagatgaaaagtttcaatgtttctacattgtggttttagttaaaattttttgatggataaatatacctcataagattgaaaaagtgtttttattcctatttccattgtttgagaagttatattattatcactaacagtagtataggtagtagtagcaccagtactagcagcagcagcagcagcagcagcagcaacagtgtgagtgagtttttaatttgtccagtgctttctctgtaacttttaaaatgatcatatgaacatctttctcctctggtaagtaaaaacaacaaagtcaatcatggytgtttattgaacacttttcagtgtaaaacacgtaactgcattattacttttaatattaaatttgcttcatgatgttccgttggaacttttcatagacacctttgtggtaagcagtttcaactgccaaaattttcctgctagtacatacgacataagactatacttccataagcctttggtcagtaaggaatgagctctgcagctatactttcctgaactaactcttaggatataaggatgttcatttatttttagtctatatat

SEQ ID NO: 740901 - DNA, 604 bp, Homo sapiens
ttttgataacatttgtattggtttccttttgggcaagtataagtagtgtcacttttaaaatccctgtatataacattttgagaacatattacatatttacatgagaacataactggtagtaaaattattgagttacagtatatttatacactccttttaacatattctgcctatcagttttacatttctatcagctacatatgagaatttaagttgctccatatccttgccaatacttcttattttcctcattttcattttagcaatcctaacagctgtgtaatagtagaatattataggtttctctctctcagctttattgaggtataataattccaaataaaaactgtatctcatactggccaacatggtaaaacacsgcctctactaaaaatacaaaaaattaactgggcgtggtagtgcacgcctgtagtcccagctactcaggaggctgaggcaggagaatcgcttgaacccaggaggcggaggttgcagtgagcggagatcgcaccactgcactccagcctggcaacaaagcaagactccgtctcaaaaaaaaaaaaaaaaaaattatacctatttaaggtgtacaacacgatgtttt

SEQ ID NO: 740902 - DNA, 639 bp, Homo sapiens
ataatgtctgctatactagagagttggaagtactagagagggagagtttatctccagagggtgatattattttaatggttatatcaggaaatatcttcacatctcatcaaagtgacaaggtttcctgcttataaataaatgttttcccaaaatgaccagagcaaaagcataatttaaaatacatcaaaaaagccaaccctccccccacagtaaaaaaaaaaaaaaaaaaggcagggtcatgcatcatgtatactaaaatgggatggacagggaagaaaaaaaaaatcaaaatgagaaaagaagggagggaaaaaagggataggatgacaaaasaaataagagaaaagactcaatacagaaggcaggacagaggctaagaaaaacgaaaatgatcagtgtcagtacacagtaaagaaaccctagagctggccaagtcctgatgctaacagcaggacactgagatacctgcaatgggagtccataagccacagcaaagcacaaaagaacaagataagagggctaccaattcagcaagcacgatcaggggtgatgtactgggacatacaggaaaaggacaacaaagagactgaaaatgacacaagggtttagctaactctggtgactgaactcttgccaaaa

SEQ ID NO: 740903 - DNA, 655 bp, Homo sapiens
ccaaaatatgtatttaaaatcagcatgagattgccaatttattttccatagtaatgtgtttctgtatcatctaaaaacaatgacagtgaaatggaaaattggtccagctatcctcatattcattctatttaagcaaaaatatttggtggcataaattatcaaataattacttcaaattttcactttattttgcatgtgtgtaagcagaaccaaagatggatcttatcagcaaagaagaaataatcttattttcatggcattggattatttccagatggaggaatatttaaatagagtacttataattcatatttttattctttcrtttgctgatatctgaatctgaagcctaagttgttccaagcgcagatgttcttattgctggattcatctgtgccaataaggtaaaatacatgtatacaaatacagattttaatctttgactcatcctgttcactagtactatccatatactcaaagatttgctttacattggtaattcaaacacccaatttgtgtattataatgttttaccctaattatatgattttaaatatgtcatatcttttatgaagataatatgatatagtaatggtcctatttttcttataaaacttgaaaaatcctaccattacactatttcaaataatataaa

SEQ ID NO: 740904 - DNA, 655 bp, Homo sapiens
ccaaaatatgtatttaaaatcagcatgagattgccaatttattttccatagtaatgtgtttctgtatcatctaaaaacaatgacagtgaaatggaaaattggtccagctatcctcatattcattctatttaagcaaaaatatttggtggcataaattatcaaataattacttcaaattttcactttattttgcatgtgtgtaagcagaaccaaagatggatcttatcagcaaagaagaaataatcttattttcatggcattggattatttccagatggaggaatatttaaatagagtacttataattcatatttttattctttcgtttgctgatatctgaatctgaagcctaagttgttccaagcgcagatgttcttattgctggattcatctgtgccaataaggtaaaatacatgtatacaaatacagattttaatctttgactcatcctgttcactagtactatccatatactcwaagatttgctttacattggtaattcaaacacccaatttgtgtattataatgttttaccctaattatatgattttaaatatgtcatatcttttatgaagataatatgatatagtaatggtcctatttttcttataaaacttgaaaaatcctaccattacactatttcaaataatataaa

SEQ ID NO: 740905 - DNA, 636 bp, Homo sapiens
cactagtcattagataaatgcaaatcaaaaccacagtgagataccatctcatgccggttagaatggagatcattaaaaagtcaggaaacaacagatgctggagaagatgtggaggcttttacactgttggtgggagtgtaaattagttcaaccattatggaagacagtgtggcagtttctcaaggatctggaactagaaataccatttgacccagcaatmccattaatgggtatatacccaaagaattataaatcattccactaaaaagacacatgctgacatatatttattgaagcactattcacaatagcaaattcacaatatcaaagatttggaaccaacccaaatgcctatcaatgatagactggataaagaaaatgtggcacatatacaccatggaatactatgtagccgtaaaaaagaatgagttcatgtcctttgcttggacatggatgaactgggaaaccatcattctcagcaaactagcacaggaacagaaaaccaaacactgcatgttgtcactcgtaagtgggagttgaacaatgagaacacatggacacaggtaggggaacgtcacacactggggcctgttcgggggtggtgggtaagaggaggcatagcattaggagaaatac

SEQ ID NO: 740906 - DNA, 326 bp, Homo sapiens
caatatggtgctttttctcagaatgatcaaccagctacctggttgcaggttaaaggcgttggaccacttccatcacggaacaggcagccttttgtcttgtggaatagaccctggatatgaattttaattccctgaatacaatgtttctgcaaaaactgccagctgtggactagaatgtcttatgyaccacaatggtattccatacagcattacctctaatcaaggaactcacttcacagaaatgaagtgaagcaatgagctcatgatcatggaattcagtcactcaccatcttccccactgtcctgaagaagctggcttgataaaa

SEQ ID NO: 740907 - DNA, 608 bp, Homo sapiens
gacagtctactccagattacattctaacatgattttgacatggtttccatttccttaaatgactgctgtctgcagcttcttaaatccatgtggtagccatcctggagaagaatgcctgaaatgaaacagctgcaagggttcagatgcccctgtcaatctcatttgtcattttccatcaaagccatcttagtccgacaggcagttctgtggtattcttagttcaggtctacttagttgactgaatcactatgacctttctttttatggcaatctattcgaactgcttcacttgccagggacctcccattcacactgttgttctcctccctcttatctcaaatattgccttaggagagatattttctaatatctaatacatttctaataaatgtagttttcttctcttactttttaaaaaaatgaactataaaaatatatatcaccagtagtagctcctgatggcmagctatgttccaagctcatttagagaaaaatttgaaaggtcgatgcctggtacaagttagaattatgttatattgcttgtgaatacatagctccagcataagaagcttagaaactccctttacttggtgttttctaccatttct

SEQ ID NO: 740908 - DNA, 622 bp, Homo sapiens
tgttatacatgccatcatggaatgtagcaccaagaaaaaaggtgttaccaattaaattatgatattgcatctattgcaatactccacctaaactcagagaagttaattgtgaaaatgtatacttcttagattcagtttttcatgtgagaaaaccagaaggcaaataggtaaattttcttgcttgaggacactaggctggaaagtggcataatagtgagtttgagttcttaaacactgaactccactgcatatgataragaattgggtgtaacatattggattttccaggaaatacaaaggtgttggttgcaggcccaaacagcagggagcaaagttgcagaaaattaatatttgccacaaagaagtccttttcttcctgtgccttatgaattctttctgtacaagcacctgttattttaatcatatctggagttttcatacctcccttatattgcattataatcacgagttgagagagatcaagtgagagcaagagggcaagaccagtccataagtatgtgttaatttagaacacactgggaaaatattaataccacacagacagcacttctatatagcaaaagcatctgtgaatatatatgacactaaaactgaaaatatt

SEQ ID NO: 740909 - DNA, 618 bp, Homo sapiens
ctattttgtcccagagactatgctgtgttggagaacaactgtggcaaaggtacacagtcccttttctcaagaagcctttggtttcatggggagtacaaatgagcatggtaagtactaagagaggggaactttaaattgctatgtgagcacgtaacataatcacctcacccaagatgagtgatcaggaagactttctggaggaagagacacctaagctaagacctcaagggtggagctggaagttaatattgcttaaatgtttgtcctgtccaaatcgtatgatgaaatgtaatccccagtgttggaggtgggtcctgcttagaggtgtttgaatcacggggatggatcccaagaggatcttagtgccatccccttggtgatragtgagttcttgctctgagttctcatgagatctgattgtttaagagtgtatggcacctccctgccctctctcttgctccctctcccttgttccctctctcactatgtgatgcactggctccctctttgccttctgtcatgagagtaaatttcctgaggctctcaccagaggcagatgctagagccatgcttgtacaagctgcagaaccatcatccaattaaacctcttttctttat

SEQ ID NO: 740910 - DNA, 664 bp, Homo sapiens
acagatgcagcctaacagcagtgaaatcagcattaaaaaggagacaaatatagattttcttaaaacagcatgcactgaatttcaagggttttaaaattcatacttattttacaaactgtgttctgcaggttcaatggactgcattataataagtggatagattccttaaaaatgtatgcattaaatttattatccctccccgatagtagaaaattgaaagtgtaaattaaaatctttagtacgaattaaaattaatttactctttcctctgctcaatacctgcatactgattgcttattgtgtaacaagcctgggacaaattgtgtggccacctcatctaatcaataactgagtttggattattttaccttcctgtctctcccttcaatgtatctcccacatggtctgacaattcatacttttcatagtttggaccttcatgatttctcttctttattgccaccgttacttcctacctggatgttctgtatcaaatgctagaccrtgcctccccaagacatgcacatacacatgtacacacacatgtacccacccagaaacacacacttctttacacatgcacacactcattcacactgcattctccctatgaaaacaaatatgaagctgctaaacatctaaaatcagagcattgtctgagcat

SEQ ID NO: 740911 - DNA, 602 bp, Homo sapiens
atattttcttggaacacagccatgtcctttcatttacacatagctgtggctgcttgcctgccacctgcagagctgcagcagagaccacaccgcccttgaagctgaaaatctccatcatctggcccattacaggaaaatctgctgattgaggcctggtgcttattaaaggagtggaaggtgagccgcttgcagttcctaacgactgtctggtcccagtggaaggcttggactgttctgtcctgccctgtccttctgcctgaaggagcacctcaaggggaactcagcaggtgggttagaatggggtccarttggaatggggaagaaagccagggggtggagattgtattgcctgcgacgtgttcatgttgtataaaactacaatagcacttacctaccagaagtcaaggcagggaccctttccttatttccccagcatttgacacaattgccaataataatatcaaacttgcaaaccacagcattagaacttgttgagtcatggaatcaagaagaaggtttgtcatatacatcctgttaagacatagaattgtcccaacagagacctggactctgaggctaaaattgcaggtgccaggaatcag

SEQ ID NO: 740912 - DNA, 518 bp, Homo sapiens
acctgaatacacccattagaaagcagaggttatcatataagataaaaagtctaaactcaaatacatattgactaccagaaacacactttaattatcaatacacaggtaggttaaacaatttgttaaagtgctgtatcattctaaaacgaatccaaaaatactagaagtatatgttaatttgagcaaagtatatttcagtgcgaagaatattgccatgggtaaaaaaggtcatttcatcatgataaagttgtcaatttatcaagcggatgtagaatcttaagcatgtgtgtacacartgagatcttcaaactacacagagcagaaacaaatagaactgcaaaaagaaaaggataaatcagtagatatagctggagatttcaataccttcactcaaccattgagagattatgtggacagaaaatcaataaagatacagatttgaacaaaattatcaatcaactcgaaataattaacacttacagaacactccatccaacaatagcagaatgcacattctt

SEQ ID NO: 740913 - DNA, 645 bp, Homo sapiens
taagaaatgtcacccacaacacctccagagatgttaaataaatcaatggtgactttcttgacagggatgagatcaccaccagcttccagttcaagaatttctgaaagatctttggcacccagagctaatgagatgaaatgatcccggaactcttgctgatctcagaaacttgctgctgttttgcttcatctgggataaagttgaaacagcttttagacataaagctcttctttcaaatagctaggtggtgtcatgcaaatcaaaaacattagcygagggtgaaaggcttctaaataatgcagaggctgaaatcgacggttgtatgtatttataattttttaaatctctaattagaatgcatctgactttgtattctgtgtttaagaactattaaagattcttttgaaatttgaaagcttattattaagatgacaaagttcccctttgtttttgtaatccttttcttacaaccattccggtgagaatgttagacaatttaaccacagtaattcattcataaaattcttaaactcagtgcaaaatgcatcactttctaaaatgttgtaaaactaacacagttttacttgaagttgacaagtatgaaaaaaagatcaacatttttgcatggatcctttagtcaaaaaa

SEQ ID NO: 740914 - DNA, 561 bp, Homo sapiens
  misc_feature 1, 2, 3, 4, 5, 6, 7: n = A,T,C or G
nnnnnnntgctgtggcgtatcttctcactttcttgatgatttccactgaggcacaaacattttaaattttggtgaagtttaagttatctattttttattttgttgcttgggatttggagcatattcagaaaatcattgcctaagccaaaatcacaaagatttatgcctatgcgttcttctagcagttttatacttctagcttgtactttagctctgttatccatttgagtttttttatatgatacaagatgatgggagtccaaattcattctttctcatgtgaatatgtagttttctaagcatcatttgctgaaaagtttattcctttcactgaatagtcttaggaccctcatggaaaattaattgaccawaaatgtttgagtttatttctgtacttttaattatattaaaatttaatcgacttaaaatttaattttttctctcagtctcaaaattgtagaaattaaaatagaatatatataaatacatatatatatatatatatatatatatgtatttatatctggaggactttatcaccttatgccagtaccacacatt

SEQ ID NO: 740915 - DNA, 677 bp, Homo sapiens
cactactatgaacggacacatacaaaacatttatgagtccataaagacatattttttaaggttcttggttacctttggaggatactagagaaccaactcattatcttgaaagctagctcacaaagggaaagaatcaagcatttatcctgcccttcctaatcaaagcatacctcaggtaagtaagatggagagagaaactttgtcattatagaagtagtccaactaataaataatgaatgatagaattagaacatcaccatcttgcaatcactaatgaattaatgggtctaggcaataatcatcaatggctgctaacatcacaaaaaagagggataaccagacataatgtccccccgacggcatacccagaagcaaccatgaagtattcttgccaaaaaatcgagcctgaatttgatcaagcctcaagatctaactaccagtttataaaaaaacacagggaggaacatagtaaacaccacagaaatacaattrgaaaaaaaaaatcaagactgcaaaacactacagaacaaacaacctgtttcttcaacaaaaaattaccaggaaaaaaaaagagatggaggaatgagaatctgtaagattccaaaagtcttaagatatgttaactattttaatgtgtaaaccttattttggatcctgatataaacaaactataaaaa

SEQ ID NO: 740916 - DNA, 606 bp, Homo sapiens
agacacatagctgaatttccctattttacaaataaagaaactgaggaccacagaggtgaagaaatttttccaaggtcacacagaagcagaatttaggaggtgagctggaagcgactttacccagccttatttctgrtagatgttgtacattatttgaggaagcagggagaaaaaatcctcatattgccgagaaagaacagttacttcaacaaaaccaaatatcttctaatgtttaataactgtcaggataacattctgttagcataactgcatttataaaaatggaaattgttatcaaccaaaaattagaagttttttaagtgaaaaaaattctagaaagaaatcaagctgcttgaggagatggatctatctgggaagaaaggcctccccagtctacaggagctccttggaacttttttctgccactgatgaatttttaggtctttgttgatcagagaaaaagttgtatttttaactttttttaaaaaaaactaaacattggctccaaactgatagactctcatctcagaatctgttagcaaaggataactaatgtttgcagacaagaacaccattcagatgacacattattataatttattttac

SEQ ID NO: 740917 - DNA, 647 bp, Homo sapiens
ttttaaaatttacttttagcttttctagcagtttgaattaaccctttctctacttccactttctctgtgagagttcagctcttaatctgcagacgtggactgagggtgctgtcacggtgctcggtgatccactggtgaatgatgtcctcacctgaagcagtttcctacaagtgggctgccttgtgtacatgtctcctaagcttccttactatccatgtaaggcctagacaaacattaggaagcaagttcagcttgtatggattggaaaaggcctgycagtagagcaaaacaatacaaatcaatgtcacaataaaggtatatccagaccagaggttctccagagcagaatcacccccagagagactgtgtcaggtggccccagcatctgtagctgtaaacgatcctcaggtgattttaagtatatccctcattcaaagacacactaatctagactctctaaaaagccaatgacattttaatcttcgtttcagctcctagcaaatgaaagcaaaaaacaaaacaagcaaccaaaaaaaaaattgttccaggttaggtttatcttaatacttaactggctatgaaacttatttacagccttagtgaataccaattatatacaagaaaggtgagcatttaatgaatattcg

SEQ ID NO: 740918 - DNA, 541 bp, Homo sapiens
aaacacatagaatcaaagagtaggataccaggggctgaaggagatgaggaaatggggagtgactaatgaattgtcataaaatatcagttaaacaagatgaatgctttctaaagatatgctgtataacactgcacctgtagtcaataaaatgctgtactctataattaaaaatgtgttaagaaggtagatctcaggttgagtgttctaatcacaatgaaataaaatttagaaagaaaaggaaaaataatgatctgcaaagaaataacagtcagtctcagttgtcatgtccatcctccccttgggctcctggccatatttgctgccgwtggtccaggtgcacatttgtagccttatcagctacatccagagaggcaaaataaccaggctttagttaaagcccagtaatctctctatgagaaataatctagtgccgagtccctcggcaggggctgccaatggacactatatacacaaacacatacactatatatgtaaactatatatataactatatatatatataaactgtaaatatacataa

SEQ ID NO: 740919 - DNA, 609 bp, Homo sapiens
aattcacttttattttacatataagatttaaggtctgtacagaatccatgattttcctatcaaattctccattcattttttatttcactaccaccaccactataattttctttctagactttttcagcagcaagttaaaatttttatacatagttaaattgtctgttttctctttcatatgtaagaattggctaagaaaaagtataaggagcaattttttaaaatgtggaatcccaagtgtatatactatrtaactttatattgaaaaattagcccactttttgacttggccaaaacattacaactagcatttcactttatacaatatcttgtttttagaattacaatattaggtcttcttttccaaacacaaaatacctctaggctgctttcttttactctttggtgacaggtgcattaagaacatgttattactttagttttttcttataaaagtaaaatatgcttgatattttattaagccattcttccattgctgtaaagaaatacctgagactgggtaatttataaagaaaagagatttaattggctcatggttgtgcaggctgtatacgaagcatggcaccagcatctgctgcggaagcttcg

SEQ ID NO: 740920 - DNA, 626 bp, Homo sapiens
catacatgccaaagaaatctttcttctggcaagactggtagcatgtaggtgactgatgccaatttagctatttctttccatggttcaggatgtattttcatactccatgccaagaactagtctgtatttttggagtggccccaagaaattagtgagaacaaagataaagaataaacatttttatatttagagcctcttgtgtagttgcagtcagatatcagctagggttagaatcatctgaaggctcaactgggctagatgttgaggatgactcaatgacattactggcaagttgstactggctgttggaagttcagccaggactgcccactggggacctcaatcaatctccctatgagcctctccatggggccacttgggcatcctcaaagcatggtggctgacttccactgggaaatatcctgagagggcatgtccagagagcaagtttttccagaatcccaagcagaagctacaatacttttgtatgactcaggctcagaaattccagaacataacttccactggattctattcatcactaagtctagcctaatccactaaagattttaaagtcactaagtctagcctaatccaaaaaaggaaaattagacttcacctccttc

SEQ ID NO: 740921 - DNA, 602 bp, Homo sapiens
aaaagaatattaaactaagactatggctattgatgtaaagaaatgtacatgattttaggaactagaaaccaaactgcaattacccaaatgtccataactaggtgaacagataaacacactgtagtatatacataaattggaatttattaaggaataataatgttcaaataatataatgaatatttttattatattattacatacaattacaagtatacatattattttattcatatattctaattattatattaatacatacaataacatgtataaatgttaattatgcttrctgaaaaacagtagacaaaaagtacatactttatgattccatttatataaaaatctagagaaagaaagtaatctaaataataaagagtgaatctgtgatggctcgaggctggtgcaggagggagtttgacgaaggaatagaatggtaggattatagagatacacagaaaatttttggttctatgctggatatgtttggcttctcgattatggtgacagtttatcaggtgggagcatatgtccaatgtatgagactgaacattgaaactgcaataatcatataatgaaatattgaggcatacaaggactga

SEQ ID NO: 740922 - DNA, 602 bp, Homo sapiens
aaaagaatattaaactaagactatggctattgatgtaaagaaatgtacatgattttaggaactagaaaccaaactgcaattacccaaatgtccataactaggtgaacagataaacacactgtagtatatacataaattggaatttattaaggaataataatgttcaaataatataatgaatatttttattatattattacatacaattacaagtatacatattattttattcatatattctaattattatattaatacatacaataacatgtataaatgttaattatgcttactgaaaaacagtagacaaraagtacatactttatgattccatttatataaaaatctagagaaagaaagtaatctaaataataaagagtgaatctgtgatggctcgaggctggtgcaggagggagtttgacgaaggaatagaatggtaggattatagagatacacagaaaatttttggttctatgctggatatgtttggcttctcgattatggtgacagtttatcaggtgggagcatatgtccaatgtatgagactgaacattgaaactgcaataatcatataatgaaatattgaggcatacaaggactga

SEQ ID NO: 740923 - DNA, 602 bp, Homo sapiens
aaaagaatattaaactaagactatggctattgatgtaaagaaatgtacatgattttaggaactagaaaccaaactgcaattacccaaatgtccataactaggtgaacagataaacacactgtagtatatacataaattggaatttattaaggaataataatgttcaaataatataatgaatatttttattatattattacatacaattacaagtatacatattattttattcatatattctaattattatattaatacatacaataacatgtataaatgttaattatgcttactgaaaaacagtagacaaaaagtacatactttatgattccatttatataaaaatctagagaaagaaagtaatctaaataataaagagtgaatctgtgatggytcgaggctggtgcaggagggagtttgacgaaggaatagaatggtaggattatagagatacacagaaaatttttggttctatgctggatatgtttggcttctcgattatggtgacagtttatcaggtgggagcatatgtccaatgtatgagactgaacattgaaactgcaataatcatataatgaaatattgaggcatacaaggactga

SEQ ID NO: 740924 - DNA, 646 bp, Homo sapiens
tcagcttgggtctattgaatggttcaataaatattcactgagcacctactacacagtagacaccaagccgcagttttctcatccaactaaggataataaaacaggtaataaaaggggttttataggataatctttatagtctcaattttgttacaagtgtatgaaaraataagtcaaatataaactagaagaaataaagactcaaactccccatttctgagtctaggaaactattcaagtcatggtgtgtgtaactgacttatggtttatgaaataccaggaaagaatgtttccctgggtgagagcaagaatcacctgacaacaagacaatgtttcatgccttaatgaaagccagggtgtggcactgagccctggtctatcaaacaggaaactcaacttctgttaaagagaggaaacttcttgtgattgattgcctaaccaattaggctcacacacggtattgtttatttaccatctctcctcttcattgggagtacaaaatttagctcaattagttccaagacctacagacaaaactccccaattaggaggataccgacttagcacgtggcacaaaactgtagagtctagtaagtatatattctgaggtattcaatcaccaggtaaggcttattgatatgcccag

SEQ ID NO: 740925 - DNA, 646 bp, Homo sapiens
tcagcttgggtctattgaatggttcaataaatattcactgagcacctactacacagtagacaccaagccgcagttttctcatccaactaaggataataaaacaggtaataaaaggggttttataggataatctttatagtctcaattttgttacaagtgtatgaaagaataagtcaaatataaactagaagaaataaagactcaaactccccatttctgagtctaggaaactattcaagtcatggtgtgtgtaactgacttatggtttatgaaataccaggaaagaatgtttccctgggtgagagcaagaatcacctgacaacaagacaatgtttcatgccttaatgaaagccagggtgtrgcactgagccctggtctatcaaacaggaaactcaacttctgttaaagagaggaaacttcttgtgattgattgcctaaccaattaggctcacacacggtattgtttatttaccatctctcctcttcattgggagtacaaaatttagctcaattagttccaagacctacagacaaaactccccaattaggaggataccgacttagcacgtggcacaaaactgtagagtctagtaagtatatattctgaggtattcaatcaccaggtaaggcttattgatatgcccag

SEQ ID NO: 740926 - DNA, 670 bp, Homo sapiens
aacatggatggcagcaggcaaagagaagagggaagctcctgtttttaaaaccatcagatttcatgaagcttattcactatcacgagaatgcacgagaaaaacccgcccccatgattcaattacctcccactgggtccctcccatgacacatgggaattgtgggagttataattgaaaatgagatttgggtggggacacagccaaaccatatcataagtcattgaatactgcagcattactggcttatcatgtctaataaagtttcaaagacccctctgagcatstgatggctactatgtacctgtccccaacaagctgcatggtcaaacaacattatatataaaggatatgaatatgcttttccatgtatcacccaccacaaatggatattgaatattaaagaatattggttccttctttacatatacaatgatacaagctgagtatccctaatctgaaaatcaaaactctgaaatgctaaaaaacctgaaactttttgagcacaaatatgatgccacaagtggaaaattacacacctgacctcatgcaatgggtcgcagttgaaatgtagtcaaaatttggttttatgcacaaaattattagaagtagtatataaaattaccttcaggctatgtgtatatgtgtattatgaaacataaatgaattttgg

SEQ ID NO: 740927 - DNA, 670 bp, Homo sapiens
aacatggatggcagcaggcaaagagaagagggaagctcctgtttttaaaaccatcagatttcatgaagcttattcactatcacgagaatgcacgagaaaaacccgcccccatgattcaattacctcccactgggtccctcccatgacacatgggaattgtgggagttataattgaaaatgagatttgggtggggacacagccaaaccatatcataagtcattgaatactgcagcattactggcttatcatgtctaataaagtttcaaagacccctctgagcatctgatggstactatgtacctgtccccaacaagctgcatggtcaaacaacattatatataaaggatatgaatatgcttttccatgtatcacccaccacaaatggatattgaatattaaagaatattggttccttctttacatatacaatgatacaagctgagtatccctaatctgaaaatcaaaactctgaaatgctaaaaaacctgaaactttttgagcacaaatatgatgccacaagtggaaaattacacacctgacctcatgcaatgggtcgcagttgaaatgtagtcaaaatttggttttatgcacaaaattattagaagtagtatataaaattaccttcaggctatgtgtatatgtgtattatgaaacataaatgaattttgg

SEQ ID NO: 740928 - DNA, 589 bp, Homo sapiens
aaaaagagcccacatagccaaagcaatactaggcaaaaagaacaaatctggaggtatcacgttgcctaacttcaaactatactataaggctacggttaaccaaaacaacatggtactgatctaaaaacaagcacatagaccaatggaacagaagagagaacccagaaataaagccaaatgcaaccaactgatctttgacaaagcaaacaraaacataaagtggggaaaggacacccttttcaacaaatggtgatgagataattggcaagtcacatgtagaagaatgaaactagatccttatctctcacctcctacaaaaatcaactcaagatggatcaaagacttaaatctaagacccaaaaccataaaaattctagaacatgacattggaaaaactctttttagacattagcttaggcaaagagttcatgaccaagaacccaaaaaacaaatgcaacagaaacaaagataaatagatgacatttcattaaactaaaaggcttctgcacgggaaaaaaaaataatcaatagagtaaacagacaatccacagaatgggagaaaatatttgcaaactatgtatctgacaaa

SEQ ID NO: 740929 - DNA, 507 bp, Homo sapiens
ggcacaggaaaaaaaaatacagcataatttcacttttatgtggaatctaaaaaaaatgaatatgcaaagttagaaaataaaacagtagtgttaccaggggcaccaagactgggtgggagaaaatgggaaggaggagatttaggtaaatggagacgaagcatatatagcatgaataagtctagagacctaatgtacagcataaggactaaagttaataataatgtactgaactcaggagtttttctaagagtasattttacgctcttgccacacaaaaaataaaatattagtgaccgtgtaggataagatatatgttaatttgctttactgtagtaaccatttaactatccatatatatatatcaaaacatcatgttgtacaccttacatatgaataattaagtgtggaaaatagaaaaaagtgtttgtatcatcttatacatccattactggtagaagactggaaaagagtttcagcggtttcacatcttctctaacacttgggagt

SEQ ID NO: 740930 - DNA, 442 bp, Homo sapiens
ctcacctaggatcctcttagaaatgcagaatctcaggccgggagtgttggctcatgcttataatcccagcactttgggatgctgaggcaggaggatcacttcatcctaggagtttgagaccagcctgagtaacatagagagaccttgtctctataaaaaaaaaaaaaaaatttaaaaattagccaggaaaggtagcatatgcctgtggtcccagctactttgggaggctgaggtgggaggattgcttgagcccaggaggtcgaggctgcagtgagcyatgattgggccactgcacttcagtctgagtgacacagtgagaccctgtctcgaaaagaaaagaaaagaaaaaattataaatgcagaatttcaggctccaactcagacctactgaattagagtctaaattttattaagattcctaggtgattcaggggcacattac

SEQ ID NO: 740931 - DNA, 442 bp, Homo sapiens
ctcacctaggatcctcttagaaatgcagaatctcaggccgggagtgttggctcatgcttataatcccagcactttgggatgctgaggcaggaggatcacttcatcctaggagtttgagaccagcctgagtaacatagagagaccttgtctctataaaaaaaaaaaaaaaatttaaaaattagccaggaaaggtagcatatgcctgtggtcccagctactttgggaggctgaggtgggaggattgcttgagcccaggaggtcgaggctgcagtgagccrtgattgggccactgcacttcagtctgagtgacacagtgagaccctgtctcgaaaagaaaagaaaagaaaaaattataaatgcagaatttcaggctccaactcagacctactgaattagagtctaaattttattaagattcctaggtgattcaggggcacattac

SEQ ID NO: 740932 - DNA, 537 bp, Homo sapiens
ttagtgagatggttaaatgcttttctaaaaacccaagttgaatatgtaaacttctagagatgcagatgagaaagtcaaggtctagttaaatttatttgttcatataccaattttaattatgtgtatattggactttgtattgaattaaatgtttgtgtctactcaaaatttatatttatgtacattgtttgtttgtttgtttgtttgagacagggtctccctctgttgcccagactggagtgcagtggcatgatctcggctcactgcaacctccacctcccaggttcaagggatcctcctgcctcagcctcccgagtagctgggattacaggtacacwccactgtgcccggctaaattttgtatttttctagagataaggtttcaccatattggccaggctggtctcaaactcctaacctcaagtattctgcctgcctcagccccaacaaagtgctgggattacaggtatgagccactgtggccggcctaaagtttacatttttaaattctaacccccaatatgacggtattaggat

SEQ ID NO: 740933 - DNA, 558 bp, Homo sapiens
catcaggccctcggtcacccagaagagggattctagaagtgagcattactgtatgcttgcctttgtggcgggggcggggcacaattgtttcaaggttaactgcttctgggacagctgacatgtggacgtggctcaagtggctcattagccagttggctatggtgtgaattcagcaagggggagctggaaagaatatccaccccagtggaaggtacccaggaggtacccgctcctctgaattgtatgtagtgtattttaaaaggatcctttaaggaagttctctctggccagtacatttggccagatttctctccgttttggttacccagaggaagttcactcacatggtctgtgaagctcaaagctcttgacagctgcccctaaatyagcttctgaatgtctgctaaaaagacaaatgccaagggaagagcccagggctgtgccctaaacaatgttgttatgagctggggtggatatgactgtctcatacccactcatatcaccgcttatttataaatgggtttcaagatctcgggttacatcagagtagttcatact

SEQ ID NO: 740934 - DNA, 511 bp, Homo sapiens
aaaaaaatccctttttcatccttgatgggaagagagaaccaggtggtgaatggggttagagggatcccagagaccatgtctattgatgtggttggcattgcacctctaatcaggaaaaggatatctgttctggttggagaatcagaacaccttaggtttgggcatgtgaaacccagtwacctatgagttgcacttgatgttttatggagatcctcttctttcttcttttaatcctgtattagtctgttctgacgctgctaagaaagacatacctgaggctgggtaatttataaaggaaagaggtttaatggactcacagttccacatggctggggaggcctcacatcatggtagaagatgaaggaagagcaaagggatgtcttatatggcggcaggcaagacagtgtgtgcaggggaactgccctttataaaaccatcagatctcatgagacttattcactatcatgagaatagcatgggaaagacccacccccatgattcgaccacctcc

SEQ ID NO: 740935 - DNA, 543 bp, Homo sapiens
aaaaagacacatgcactcatacgttcatcgcagcagtattcacagtagcaaagatatggaatcaacctcgatgcccatcaacagcggattggataaagaaaatgcggcacatatataccatggaatactatgtagccataaaaacaactaaatcatgtcctttgcagcaacatggatgtagctggaggccattaccctgagcaaagtagcacaggaacagaaaaccagataccagatgttcttacttgtaagtgggggtgaaatattgggtattcatggacataaagctggcaataatagacactagggactactagagtggggaggaaaagagagggagacagtattaaaaaaaaaaactattgggtactatgctcagtactaggtgacagctgccccarttgtccaccaaacctcagcatcatgtaatatatatccaggtaacaaacctgaacatgtaccccttgaatctaaataaaataaaagttgtcagggcatggtggctcaggcctgtaatcccagtactttgggaggctgaggcag

SEQ ID NO: 740936 - DNA, 627 bp, Homo sapiens
ccttccctgcctggcagccgaggcagagagagagagggagagagagagacagtttacgccattatttctgcatatcggagacttttagtactttcactaattttgccactgctatctagaaggcagagccaggtgtacaggatggaacatgaaagaggaccaggagtgtgaccactgaagcacagcatcacagggagaccgttaggcctccagataactgcaggcgagcctgaytgatgtcaggccctccacaagaggtggaggagtagagtcttctctaaactcccctggggaaagggagactcccttgccccgtctgctaagtagcgggtgttcttccttgatactgacactaccgctagaccaaggtccgcttggcaacaggcgtcttcccagccgctggcgttaccgctagaccaaggaggcctctagtggccctgtccgggtataacagaaggctcgcactcgtcttctggtcacttcttactatgtcccctcagctcctatctctgtatggcctggtttttcctaggttatgattgtagagttaggattattataatattggaataaagagtaattgctacaaactaatgattaatgctattcacatataatcatatctat

SEQ ID NO: 740937 - DNA, 616 bp, Homo sapiens
taaaatggaaagtccccagccctccgtaactctctcacaatgctttatttttctgcacaacatgaatattgttgatttttctttttcgatggagtcttgctctgttgcccaggctggagtgcagtggcgcgatctcggctcattgcaacctccacctcccaggatgaagcgattctcctgcctcagcctcctgattagctgagcgcaccaccacacccrgctaatttttttgtatttttagtagagatggcgtttcaccatgttggtcaggccggtctcaaactcctgacctcatgatctgccccagcctcccaaagtattggaattacaggcgtgagtcacagcgcccggccatgttgttgatttttctataattcacccctccccgttaggatgtaagtgcctcaatggcaaaacttgagtttcattcactgctctagacatggcatctcaaacagtgcttagccacatggaatgtactcaatgaacaggctagtggttatgagaatcacctgtctggattccaatctgtgctctaccacttactagctggtgaactcaggcaagcaacctagacatttccatgccagttttcccatctgtaagttggagacag

SEQ ID NO: 740938 - DNA, 646 bp, Homo sapiens
tgttgcccaggctggagtgcagtggcgcgatctcggctcattgcaacctccacctcccaggatgaagcgattctcctgcctcagcctcctgattagctgagcgcaccaccacacccagctaatttttttgtatttttagtagagatggsgtttcaccatgttggtcaggccggtctcaaactcctgacctcatgatctgccccagcctcccaaagtattggaattacaggcgtgagtcacagcgcccggccatgttgttgatttttctataattcacccctccccgttaggatgtaagtgcctcaatggcaaaacttgagtttcattcactgctctagacatggcatctcaaacagtgcttagccacatggaatgtactcaatgaacaggctagtggttatgagaatcacctgtctggattccaatctgtgctctaccacttactagctggtgaactcaggcaagcaacctagacatttccatgccagttttcccatctgtaagttggagacagtaatagcacagtttgcaagcttatagtgaggacgcagttaatatttataaggcactttgaagagcgcctggtctataggatgggctagcgaaatgtttgatctctttttgttaatatattttcatattacaa

SEQ ID NO: 740939 - DNA, 646 bp, Homo sapiens
tgttgcccaggctggagtgcagtggcgcgatctcggctcattgcaacctccacctcccaggatgaagcgattctcctgcctcagcctcctgattagctgagcgcaccaccacacccagctaatttttttgtatttttagtagagatggcgtttcaccatgttggtcaggccggtctcaaactcctgacctcatgatctgccccagcctcccaaagtattggaattacaggcgtgagtcacagcgcccggccatgttgttgatttttctataattcacccctccccgttaggatgtaagtgcctcaatggcaaaacttgagtttcattcactgctctagacatggcatctcaaacagtgcttagccacatggaatgtactcaatgaacaggctagtggttatgagaatcacctgtctggattccartctgtgctctaccacttactagctggtgaactcaggcaagcaacctagacatttccatgccagttttcccatctgtaagttggagacagtaatagcacagtttgcaagcttatagtgaggacgcagttaatatttataaggcactttgaagagcgcctggtctataggatgggctagcgaaatgtttgatctctttttgttaatatattttcatattacaa

SEQ ID NO: 740940 - DNA, 496 bp, Homo sapiens
aaaccatgagaatgaattctcaccaaatagagaaaatcataaagagatggaaattataaaaaggagccaaataggaattttaaaattgaaaaatatatattatctgaaatgaaaaatgtactagaggggttcatcagaagacttgatcaggcagaagacacaattagtgaacttgatgacaggtcaattaagattgcctgatctgtagagcagaaattaaaaataaagggaaaaaaatgarcagagcctaagaaacccagaagataccatcaaacatctgaatacacataatgggagttgctactggagaggagacagagaaaggagcagaaggaatatatggaaaaattggcaaggtgcaatgggtcacgctctaattacagcactttgggaagccgaggtgggaggatcacctgaggtcaggagttcgagaccagcctagccaacatggtgaaaccctgtctctactaaaaatacaaaaattagctagctgtgg

SEQ ID NO: 740941 - DNA, 599 bp, Homo sapiens
cttcttgctcttcattttaagtaattatgaccctaaggcatttttcaggaacgtcttcaaaatccttactactccaatgtggttggtccagcaacataatatcaccaaggagcttgtgaaaaattcagcccgctctccagccccaccccaacctgcctgtcagaatctgcattttaacaagatccacaggtgattcgtatgcaccactctaaatcaaaggaaaattacactaatagttttgtaaactctttgtggattctaagaggtcacctttgggtaaaataaaaatttcgcagcaggcacggtgactcacacctgtaatcccagcactttgggtggccaaggcgggtgaatcatctgaggttgggagttggagaccagcccgaccaacatrgagaaagcccatctctactaaaaatacaaaattagccgggcatggtggcatgcgcctgtaatcccagctactcaggaggctgaggcaggagaatcacttgaacccaggtaggcggaggctgccagtaagcccgagatcgcgccattgcactccagcctggacaacaagagcaaaactcagtcacacacacacaaaaaaaattctc

SEQ ID NO: 740942 - DNA, 576 bp, Homo sapiens
catttacccaccatctgacctcaaacatggtatttcctctgttgtgtgtgtgtttacatatatgctaacataaaatgtttcagcttaagcatgttttagtgcacagtctagtggcatgaagtacaattacagtgttgtgcaaccatcaccakcatccatcttccaaacgtttcatcttccaaaactgaaacaatatccccattaaacagtaatgtccaaatctcccctcctctcagaaataccaatatcttaacataccaagctgggtcaaaattaaccaatttcctttaaagtaaccaaggacaggcttgatcaaggacaagaccatgctctaaacttttgactctgactccttcaagaatctatgcctggcccagcacagtggctcatgcctgtaatcccagcactttgggaggccaaggcaggcagatcgcttgagctcaggagctggagaccagtctgaacaacatggcaaaaccccatctctacaaaaaatgagtcaggagtggtggcatgtgcccgtggtcccagctactagggaagctgaggtgggaggatcacttgagcccaggaagt

SEQ ID NO: 740943 - DNA, 633 bp, Homo sapiens
gatgacatgggatctatttttaggtaagtcagcagatgagacaattatttaaagggcacctttgaagactatggtaggcagaattctaaaaatgcctcctcaccacccaatattccatgccgtaacccctgggaccaatgaatatgatgaagtaccattcatgtgattatgttctattttgttacatggcactgttatgggttgaattgggtccttcaaaaaggtatgttgaagtcctaacttccagtgcctgtgaataggactttatttggaaataaggtctttgcagatataatcaagtaaagatgaggccattggtgtgggccctaatccaacatgattactgtccttataagaagtgataagtttggacacagacaccacagagaggagaaygcagacacacagggaagagaccatgtgaagacagaggcagagatgggaatgatgctgccataaggcaagggacacctggggcttccagaagctggaaggggcaggaaggcctcctttcttagaggctttggagggagcacagccctgaggacactttgattttagaccactagcctccagaactgtgagagaataagtcattcccaatgctttaagccacccattttgtggtacttg

SEQ ID NO: 740944 - DNA, 566 bp, Homo sapiens
ttaacaggcagctcttctaccttctttgccttttcttggcaacagaatttggctcttatgcatttctctctaattggttaatcacattgtattgactgcaacattagaaccaatagttcaggccttcccaattgtcctgaccatgtcactggcatactgacacacgcccatgaacaaaggcttcatcacacaaggaagacacactatgacccgctgcggttttcttccacttcagttgtagccctgcatgctttctggggagcacactctagccaccgagatgaaggcacggggaggcccgaccgtaggtcgaacacgtcagtcagtggctgatccttcccatggtctctggatacaccagtgaaggcaggaggtgaagtctcccagrtcacctgggaacagccatggacacttgtctggggctgcatgaggtttgttctgggctctgatggaatattgccctcatgtatgctttttaacataccgagtcaaggattatgcaggatctgttgaaattccaataagtcagtcaagaaaattaagcgcacttaacctcatcatttacc

SEQ ID NO: 740945 - DNA, 583 bp, Homo sapiens
atgtttaaattatttattacaccctccaggaaccatccaataaatgatacaacttaacatccacctgtttaacatgatattccaatctgctacttttctttctgccaactgcaagcccaagatgaggtttagaataacctgtgcctagaaaattaaaagacaaaaaaggaagaaagtgtgccctccagtacagtcctcatgtctgagtctatttttcattctttgttttgcacagaattagggagtcacagatacagacggtctgacataaagatgcaaaatgtgccagagtcatggtggggccagcggtgattgatcaggctggagcctctgagaaggtgagcaagctgggaaagggccggctgggrgcaggactgggtgcaagtggcgtctgattgggataagctgaaaacacccaaagtggccagtgcttaaggtcaggcacaccctcttctccaaagggacacttgaagatcccttaatccaagacttccaaccagaaactgtcatctgacacagcaataggtcccctccccttggatcttcctgctagctagtgttccctctgtcctcctgagcatct

SEQ ID NO: 740946 - DNA, 502 bp, Homo sapiens
aacactacttatatatgaacgtgtgtgtgttggggggaggggcgttgagggattaaaatgccactggggggccaggcacagtggcttatgcctgtaatcccagcactttgggaggctgaggtaggaggatggttttaggtcaggagtttgagactagcctaggcaacatagtgagaccgtgtctctwcaacaaattagaaaaaaaaatgccattggggaggatctgatcttgcaggtctgtgactaggacctgacataaattcctaaagtgttctgatatgaactcttgctattagagtggaatgaaaaaaaagctctagtggccttatataaggtctttttaatcttgtgttaaaatatatctctgcacacctacttataatgaatattcttgaaagattgattcattgaagtgaaatatctggaaggatcacctttttaagcagcttttgaaatgactaatgcccaggtcccacactgcggagattctgatttcattttt

SEQ ID NO: 740947 - DNA, 581 bp, Homo sapiens
tctggccataaaaacacgagagatgacaaaaaagaaaaagggtacagcaacgtaaggggcaagcgacatggctcctctcgcaagagctccacccacagctccaccaaaaaggagtcgagaacaactcaggaactggggaagaaccaatctgcatctagcacaggagctttacaaaagaaagccagtaagatcagctcttttttaaggagcctcagggccactcctggttcaaaaacaagggtcacatcacatgacagagaggtagatatcgtggctaagatggtggagaagcaaaacatagaggccaaagtggagaaagcccagggtggccaggagctggagatgatcagtggcactatgacatccgagaagacggagatgatcrtctttgaaaccaaatccatttaaagaggagccagggctacaaccgcccagggatctggaagtatccctagaggagcccatcccagctttctttactgcagttcaaataataaaggaaatcgtacaactccaaaagaaatacaatctcctgcttgaatttttctgcccatagcctggtggtgacctcacagtggctt

SEQ ID NO: 740948 - DNA, 644 bp, Homo sapiens
cccaagcgagagagaatttttttcttaattcccgcaccctaaacaaacactttctcttcctctgggtagatagtggagaggaagggcagtcaacatgatggatttctgattatgattattattttgtgtagatgctgtgtatctctaacaataattcttagtgactttgccagtccctttactgtgttgaagctgtatatattttagtctcactggacatgtatttgatttcttacaagctgcctagagtgcttcargctcagctgtctaatttacctccgagctattattgtctgtcataatttttatgacaaagctttgcatagtataattttatatctttgtgttattccatgaaataattgtcagtcagcactcattattaccaggtgctggttaattctgtaattcttttatcagtttcactacataggtcttcctatgtttttcccactaagctttgtttattgagatatcatttatatacagtaaattatacattaaacttttaattgtggaattatgtatctgttatttgcttctggattgtgatactaccgacctttggtattgaaccacttgtgtttagaatactctagtgtaatgtattttatatttatatattttttaacttttagtttcat

SEQ ID NO: 740949 - DNA, 623 bp, Homo sapiens
tccctgcacatttcaacaagcctgagatctgacgtaacattctcccatttagttgtctgggtacagcaataaaacccaagatccctaagtctaccaaggaaggctgctaactttgggaagggttctaaaaagaattgtacagtgacgcccagtgtgttaatatagttaatgctcaccttaaatatgcagtcatgcagccagttgaaggcagcgcagtgattcaccttctcccagtgcggcaggacttccytgatgagtgatcaatgctctccattaaaggcttcctgtttccttctgaccctgaaaacttagtatgcaagagctacgcattctgtgcacagacaaagaacaacactccacggtgaattgcttttataacctttggctttattttccagtgaatcgtatcctgtaaacaggaacctcatgagaaaacataaatgagcaataatcttttcctatattggtaatcagataaaagtcctgattcactttccaattgttttaacatgcataaaactctccagtgcatctatatcagaaaggcgattcctggattcatttatatatgtgtgtacacacatacacatacataatgatactactacgacctattgaaaacg

SEQ ID NO: 740950 - DNA, 522 bp, Homo sapiens
caggagactgaaaaagtcaagcagagatggtcttaatggcggaaaggccaatgtgtagggcagaggaaagaagggtgccagctctctctgtccctgttcccaggcctcctggtcagacagctgctcatggtgctagcaacagatgcaactttacagagcacctctgaccagctccctcagggtacttttcaagcatctactaacattcccttactctgtgaagcaagcagctttttaatttcccactgcagtctgtgacatcctccacactcaagaagggccagaagstcagccagggcccactccacaaaaggccgtgaaacatccctggaaacgcaagataaaaaggaaccctctccagagctgtagaagctggaaggagtcatgttgatgagtttactggggtggggttaggagcctcgcgagggaagtgttcagaaacacaacagtaggcaatctgcacctgcaccccaaacttgtgaaaatgacagcttcatgaaaaacaagttctcattttataga

SEQ ID NO: 740951 - DNA, 526 bp, Homo sapiens
gtccttggaggtggcctgggcttcaggacctgagtgacagcagggtgcaagcatgtttgagaccatggctgtacacctttgggtgagctgctgaacctctcaaagcctcgctcttcattggaggacagaatggtgccagcagtcatgatgcatgatgtgtttctaagttacttctcttcctggtctcatcctacttaccctttccccccaagcaaaccttattattatcatttttctaaattgaaaaaagtacacactcctgatcrttgtaaatactgcaggcacactgaagtaggcagaataaaaatgttaatttcacctttttctctaaaccaattctattcccctccccccaaagctgctgttcttaatttggtgcttacacttccagatcatgctacatatttacatacacatgtgtacacactggatagaatatgtataggcagaaatgcatgtataagtagtaaacgacaatccaatatcacttaaattattatgtgcatgtgggagatttttaggtttt

SEQ ID NO: 740952 - DNA, 613 bp, Homo sapiens
ctgaaagccactctaagaacaaacgcactgcagggtcatggaagtgtaggaccactggctgagactgactctctcagagaatctctgtgcatgttacctgcacaaaggctctgaagatgcccatgatatttatccctgcttgctgcactttatttcatycagcatttctcatgcttacttacttgagcaagcttcccagggaattccacttagcactgcagttccacttcaggaatcaatcaaggaaatcgaggagaaggccagcaatctgcttaaagtctcatgagatctccatttccacaaaaataaacattctcatcactcagataataaaatgttggtgtcgtatataatacaaaagtgacattgacactgatgtaaaacatagatgctaactgttaaagtggagttaaaaaccatctctcactaagcatgattcagaatgcaccctgatggaagaaatcataaaagttctatactacaataaataaataaccatagaattaaaaagctctggagaaatattttcaataattatgacagtggatttacaacaggtaaaatgtaggtgagtgttaacaagaggcatattaatgccacagatgttacaaca

SEQ ID NO: 740953 - DNA, 613 bp, Homo sapiens
ctgaaagccactctaagaacaaacgcactgcagggtcatggaagtgtaggaccactggctgagactgactctctcagagaatctctgtgcatgttacctgcacaaaggctctgaagatgcccatgatatttatccctgcttgctgcactttatttcattcagcatttctcatgcttacttacttgagcaagcttcccagggaattccacttagcactgcagttccacttcagraatcaatcaaggaaatcgaggagaaggccagcaatctgcttaaagtctcatgagatctccatttccacaaaaataaacattctcatcactcagataataaaatgttggtgtcgtatataatacaaaagtgacattgacactgatgtaaaacatagatgctaactgttaaagtggagttaaaaaccatctctcactaagcatgattcagaatgcaccctgatggaagaaatcataaaagttctatactacaataaataaataaccatagaattaaaaagctctggagaaatattttcaataattatgacagtggatttacaacaggtaaaatgtaggtgagtgttaacaagaggcatattaatgccacagatgttacaaca

SEQ ID NO: 740954 - DNA, 634 bp, Homo sapiens
cacaaagaacattcacaaatgttgcaatggctgccagtattatgatttttattattccatcttttatagaataagcatttatcttgagaaccaaagaaggtagagactttggtcaggaatttctcagttctaacttgcctctctttccctctccagctatagttaattgggccgtgcatggctaaatctcaatatataaaatatgatacattaacatctagttaaagagccaactgaggaagtttttcagttgctaggaaggtcatagctgacagcaaaacttgtctctgaactccccatctgaggttctattacactacacatcttgttatactttctcattttaggatgatatcccaataaaaaacaaattttcacaagttgataaaatagcctaacatgyaacaaactagactctaaatatgtaacagctttaggaatttctgtttttgctactttttttttgttacataaccaaaggctcaagcggcccagactgtaatcagcaacccacgatatccttgatttcatcagttgtttgaaaccacaaggtcctctcacctgaattttctcagtaggaatcctatcgggaaagtcaatgacaggttgagatgattgggctctgcagatctaa

SEQ ID NO: 740955 - DNA, 481 bp, Homo sapiens
gcctcggcctcccaaagtgctgagattgcaggtgtgagacactgtgcccggcctccctcccagttttaagcaattctcctgtctcagcctcccgagtagctggaattacaggcacgcaccaccatgcccagctaatttgtgtatttttagtagagacggggtttcaccatgctggccaggctggcctygaattcgtggcctcaagtgatccaccgcctcggcctcccaaagtgctgggattacaggtgtgagccactgcacctggccttggtggttgcttttttaaggtagaagagacttaaacatgttttaaggtcaaagaggaagatctggttgaaagtggctgaggatataggagagagatgatctggttcttcttgtgaaggttctgaaaaggcttgaaggaggggatctaaaatgcttggtgggatcgggcctggtggctcacagtagtaatcccaacactttggaaggccaaggt

SEQ ID NO: 740956 - DNA, 560 bp, Homo sapiens
gcacgaacgctcttcatggtccgtgactcgctcggcgctaccgccaacgtccacggagcccgcccgggaccctcgacgtgcgcctctgcggacggggcgcgcagagggagccccgttagcggtcccccgctccctcgtccatcctccccaggcgcactccgagtcacacgtcgtgtctctgcaccgccctggcctccacggtggctccctgcgaagctgagggtgcggtccccatcctccgtgggtgccaactccggggcaagcaggctgcagagccgcgcgctccgccttaggcgctgccaagggcggccgggtagggtttcctaggacccgcccaccccgctcrtcccggccggagctgccaccccctggatcagtggtaggcggggctccacgcggggaggtcacgtgtgggtggcccatccctccctccccttcgccccatccgagttctggaatgttagcgctcgggagatccaacccgttctattttacggatggggaaactgaggcccaggtaaaaagcgggccaggctcccgcggagtttttgcctgtgatg

SEQ ID NO: 740957 - DNA, 569 bp, Homo sapiens
caaataaaaatctcataaaattcaccaaagacattcactgtcatctcttcatttcacagcaattattaaaagctgctgtatacaagatactttgcttgatggtgaggattcaccaagaaacagaaacacacatcactcttttttttttttttttgagataaggtcttgctttgtcccccagcctgggctagagtacagtgacatgaacacggctcactgcagcctcaaacctctagactcaagcagtccttctgcctcagcctcccaagtagctgggactacaagcatgtgccaccacacctggctggtttttattttttgtagagatgggggtctcactatgttgcccaggttgttcttgaactcctggcctcaagtgatcctcctgcttcagcctcccaaagtgctgggatwacaggcatgagctgtcacgcctggccctagatcaccatctttaccctcatggagcttaaattctagtgcgaaagatggtcattcactgagcgagtgcatactaattacggtggtggtgagtgtcgcagaggaaaagtacgggacgcaaggtgggc

SEQ ID NO: 740958 - DNA, 572 bp, Homo sapiens
taggctcccaaatagctgggattacaggcgtgtgccatcacgcccagctaattttgtatttttagtagagacggggtttcactatgttgtcaggctggtctcgaactcctgacctcaggtgatccacttgcctcagcctcccagactgttgggataacaggcatgagccacagcacccagccagaatttcagattaacaaccaaaacgtttctttttttwaaacagggtctcactctgtgttgcccaggctggagtgctcactgcaacctctgcctctgaggttcaagtgattttcctgcctcatcctcccaagaaaccatgtgccaccatgcccggctaatttttttattttggtagagatggggtttcgccatgttggccaggctgttctcaaactcctgacatcaggcgatcctcccaccttggcctcccaaagtgctgggattacaggcgtgagccaccgcgcccggtcaaaacatttttttagtaggagtcggagaatgtcctacattttgcacaagagagacatacttatactaaaatacagattagagacagaattcttcagaga

SEQ ID NO: 740959 - DNA, 572 bp, Homo sapiens
taggctcccaaatagctgggattacaggcgtgtgccatcacgcccagctaattttgtatttttagtagagacggggtttcactatgttgtcaggctggtctcgaactcctgacctcaggtgatccacttgcctcagcctcccagactgttgggataacaggcatgagccacagcacccagccagaatttcagattaacaaccaaaacgtttcttttttttaaacagggtctcactctrtgttgcccaggctggagtgctcactgcaacctctgcctctgaggttcaagtgattttcctgcctcatcctcccaagaaaccatgtgccaccatgcccggctaatttttttattttggtagagatggggtttcgccatgttggccaggctgttctcaaactcctgacatcaggcgatcctcccaccttggcctcccaaagtgctgggattacaggcgtgagccaccgcgcccggtcaaaacatttttttagtaggagtcggagaatgtcctacattttgcacaagagagacatacttatactaaaatacagattagagacagaattcttcagaga

SEQ ID NO: 740960 - DNA, 572 bp, Homo sapiens
taggctcccaaatagctgggattacaggcgtgtgccatcacgcccagctaattttgtatttttagtagagacggggtttcactatgttgtcaggctggtctcgaactcctgacctcaggtgatccacttgcctcagcctcccagactgttgggataacaggcatgagccacagcacccagccagaatttcagattaacaaccaaaacgtttcttttttttaaacagggtctcactctgtgttgcccaggctggagtgctcactgcaacctctgcctctgrggttcaagtgattttcctgcctcatcctcccaagaaaccatgtgccaccatgcccggctaatttttttattttggtagagatggggtttcgccatgttggccaggctgttctcaaactcctgacatcaggcgatcctcccaccttggcctcccaaagtgctgggattacaggcgtgagccaccgcgcccggtcaaaacatttttttagtaggagtcggagaatgtcctacattttgcacaagagagacatacttatactaaaatacagattagagacagaattcttcagaga

SEQ ID NO: 740961 - DNA, 668 bp, Homo sapiens
ctgggggatatgttccaagaccccaaatggatgcctgaaactgaccataatactgagccctaaatatgttttgtttcttttctttcttcctttctttcctttccttctttttctttcccttcctccctccctccctcccttcctttccttcatcctttcctccctttctaattttaatttaatttaattatttatttatttttgagatggagtcctgctgtctcccaggctggagtgcagtggcacgatctcggctcactgcaagctctgcctcccaggttcacgccattttcctgcctcagcctcccgagtagctgggactacaggtgcctgccaccacgcccggctaatttttttgtatttttagtagagatggggtttcaccgtgttagccaggatggtctcratctcctgacctcatgatccgccctcctcggcctcccaaagtgctgggattacaggcgtgagccaccgcacgtggcctaatttatttatttttaagacaaagtcttattctgttgcccaggccagagtacagtggcatgatcatagctcactgcagccttgacctcccacacacaagcaatcctccatcagcctcctgcgtggctgagactacagatatgcaccatcacgcccagctaattttttgatttgtttgcagagat

SEQ ID NO: 740962 - DNA, 628 bp, Homo sapiens
tgagtcctgacccaggggaatgggtaggtttgcatgctgccagtgtagactggtggggactgtggaggggtaagtcagtcagaccccaggagaggaggagagcaggtttgcccgcgagtgtataccatgtgcaggtgagtgaggccccatgtgcccggaaggggtgccagtgctacaagaggtggaccagctgctcaacgccgcagggggtggtggaatggccggggatggcagaatggcaggcagggtgaaccttcttcgtgaccctctcctcctcctctccagagccatgaacaccagccaggtggaggcgctggggatccagatgctgcckggctaccgggacccctaccacggccggcccctcaccaagggtgagctgggctgcttcctgagccactacaacatctggaaggaggtgtgtcctgagtgatgggcggggccagagttatgactctagatctcatcggagatttggacgggaaaggggttgaaagagttccccaaagccccggctaggcatccagcctcagccatgggacccatggcctctctttagtgaatgatgcgccacaccagctgtatcacccccaggtgtacctgccatccttccattgcgcaaatgtgg

SEQ ID NO: 740963 - DNA, 642 bp, Homo sapiens; identical to SEQ ID NO: 737673

SEQ ID NO: 740964 - DNA, 582 bp, Homo sapiens
tgaccaatcattacctcctcctccctgctctttctacccagtgaatttgggaggctgtggaaactcagggtggctgcccttgctcactagaagctgggagccctcttcttctccagaccctttccttaaaagatattgttttttctttggttctcatttctttgttcgtccttcgttcagtcccgcaataaccgtggcaatccgtgacagacaygcggccgggtgctgtggctcacgcctgtaatcccagcactttgggaggttgaggcgggtggatcacctgagatagagagtttgagactagcctgaccaacatggagaaaccccgtctctactaaaaatacaaaattagccaggtgtggtggcatatgcctgtaatcacagctactcaggagactgaggcaaaagaatcgcttgaacccaggaggcagaagttgtggtgacctgaaatcatgccatcgcactccagcctgggcaacaagagtgaaactccatctcaaaaacaaataaaaaacttaaacataaaaaaataacaaatcccttagaaaaaaatagaaaaaagagatgatataggtcttggca

SEQ ID NO: 740965 - DNA, 557 bp, Homo sapiens
atttctcctatttgactataattacttattatttgacagactttccaaacccccatttcttctaaataccttggcatctgatggtcaccattttactctatacatcaatgggattaagatttttggaatccatgtataggtgaaatcatgaaatattaatctttctgtgcctggcctatcccaactaatataatgtcctccagcttaatcyatgtaatttaaaataatataatttttttcttttttttttttttttttaaggccaggtgtggtgtcttacacctgtaatcccagcactgtgggaagccagggcaggtggattgcttgagcccaggagtttgagaccagcctggtcaacatggaaaatccccgtctctacaaaaaaaaaaaaaaaatctcagctgggcatgggcatggtagtgcatgcctgtaatcccagctactccagaggctgaggcatgagaatcccttgagccagggatgcagaggttgcagtgaactgagattgtgccactgcatccagcctgggtaacagagtgagactccgtctcaagaga

SEQ ID NO: 740966 - DNA, 621 bp, Homo sapiens
cacccttaccccactcaatgccagtatcccatcccacagcaggctttaaagggactgaagcctgttatcactcgcctgctacagcatgggcttctaaagcctacaaattctccttacaattcctctgaattacaattcagaggactatgctgagaactgccatcaataaaccaagtgtgatcagggtgaggaataggaaagatggaaatatggggaaatggagtgaatgccaggtggatcasagacatacagtcatgggggtcaggtgtggtatcaggaataatgtggaaggctggactgaagtccgggccaggaacaagggtaattatgggagactcagtaaagagcaagtatagccaaagaagccagggggcagaaagtatatgcatcaggtgtgaggaagaaaacaaattttgaatgttatgagacttgtggagagtgagttgagcatagtttgtgattttgaggacatcttgagcatagttagtgattttgaggacctctaaaagtattagagtggtggcagtcactgcacacagacatgagggccaggctaaaacagtaaggtcaaattgtttggacaaaaaggctacagggcatggtcccggtccttgtgtaaga

SEQ ID NO: 740967 - DNA, 621 bp, Homo sapiens
cacccttaccccactcaatgccagtatcccatcccacagcaggctttaaagggactgaagcctgttatcactcgcctgctacagcatgggcttctaaagcctacaaattctccttacaattcctctgaattacaattcagaggactatgctgagaactgccatcaataaaccaagtgtgatcagggtgaggaataggaaagatggaaatatggggaaatggagtgaatgccaggtggatcacagacatacagtcatgggggtcaggtgtggtatcaggaataatgtggaaggctggactgaagtccgggccaggaacaagggtaattatgggagactcartaaagagcaagtatagccaaagaagccagggggcagaaagtatatgcatcaggtgtgaggaagaaaacaaattttgaatgttatgagacttgtggagagtgagttgagcatagtttgtgattttgaggacatcttgagcatagttagtgattttgaggacctctaaaagtattagagtggtggcagtcactgcacacagacatgagggccaggctaaaacagtaaggtcaaattgtttggacaaaaaggctacagggcatggtcccggtccttgtgtaaga

SEQ ID NO: 740968 - DNA, 621 bp, Homo sapiens
cacccttaccccactcaatgccagtatcccatcccacagcaggctttaaagggactgaagcctgttatcactcgcctgctacagcatgggcttctaaagcctacaaattctccttacaattcctctgaattacaattcagaggactatgctgagaactgccatcaataaaccaagtgtgatcagggtgaggaataggaaagatggaaatatggggaaatggagtgaatgccaggtggatcacagacatacagtcatgggggtcaggtgtggtatcaggaataatgtggaaggctggactgaagtccgggccaggaacaagggtaattatgggagactcagtaaagagcaagtatagccaaagaagccagggggcagaaagtatatgcatcaggtgtgaggaagaaaacaaattttgaatgttwtgagacttgtggagagtgagttgagcatagtttgtgattttgaggacatcttgagcatagttagtgattttgaggacctctaaaagtattagagtggtggcagtcactgcacacagacatgagggccaggctaaaacagtaaggtcaaattgtttggacaaaaaggctacagggcatggtcccggtccttgtgtaaga

SEQ ID NO: 740969 - DNA, 621 bp, Homo sapiens
cacccttaccccactcaatgccagtatcccatcccacagcaggctttaaagggactgaagcctgttatcactcgcctgctacagcatgggcttctaaagcctacaaattctccttacaattcctctgaattacaattcagaggactatgctgagaactgccatcaataaaccaagtgtgatcagggtgaggaataggaaagatggaaatatggggaaatggagtgaatgccaggtggatcacagacatacagtcatgggggtcaggtgtggtatcaggaataatgtggaaggctggactgaagtccgggccaggaacaagggtaattatgggagactcagtaaagagcaagtatagccaaagaagccagggggcagaaagtatatgcatcaggtgtgaggaagaaaacaaattttgaatgttatgagacttgtggagagtgagttgagcatagtttgtgattttgaggacatcttgagcatagttwgtgattttgaggacctctaaaagtattagagtggtggcagtcactgcacacagacatgagggccaggctaaaacagtaaggtcaaattgtttggacaaaaaggctacagggcatggtcccggtccttgtgtaaga

SEQ ID NO: 740970 - DNA, 496 bp, Homo sapiens
taaatctatttaagtgcacatttcagggccagacatggtggtggctcacgtttgtaatccctggattttgggaagccaacacagcagtatcatttgagccccaaagtttgagactagcctgggcaacatatggagatttcctctctataaaaatttttaaaaatatctaggcatagtgttrtgcacctgtggaccccgctatatgggagatttagggaggattacttgagcctaggagtttgaggctgaagtgagacataattgtgccgctgcactttagcttgggtgacaaagtggaccctgtcttaaaaagaagctgtacatttcagggatgttaaatatattcacattgttctgcaaaagacttctagaaatttcacatgttgtgaaactaaaacccaatatccatttaagtgacaagatgccattttaccctctccccagtgcttgacaaacacccttccactttctgtttttatgagtgtgactacttaag

SEQ ID NO: 740971 - DNA, 605 bp, Homo sapiens
gagtagctgggactacaggcgcacaccaccacatccaactaatttttgtgtttttggtataaacggggtttcgccacgttggccaggctgatcttgaactcctgacctcaagtgatccacctgcctcagcctcccaaagtgctgggattataggcatgagccaccrtgcctggccaaagttttgtaatatgacagaacactgcaatgaactggaagataggactttaaatttgatccttttgcttgctttgtagttactaaataaccttgatagatgatgttttagtaaatctgtatttgactttcttatggttttattagcttggcaagtgttgaagaaaacagttcattctgaaagaacacttctgaaaatgtactaaaagtttagctagggaggggcaccccacaattgaaacctttatttttcagtctgtgctcccaaagattgggagcaaaaaaggacatttggggtgaggggatcatagagaagagagggtgaaaggaagagaactaatgcaagtaaagtgcttgttttacacttggtttgatggggaggttgggccacaagaggagtatacttaaaataaaaattaaattaaaagttt

SEQ ID NO: 740972 - DNA, 588 bp, Homo sapiens
tcagtgggggaaaaagtcaagtggtatactaaggagcaaacttaaattctatagatacaagataagaaaatcattaagtgaaggtgtgatagggtgcgaactgagaaccattataaaacctaatgacttttaaaactattattttcatattggaatttatcaataacaccaatacaagttgtaagaattgaaaactaattctttactggttcacatagtactaaatatattcatggaaagatgtatacagttttgttttctatattttaagaaagcagatcatgaaaatatttaaaggtaagtgaaacacactctcctttactttcttatacttgaggatrctataatcatacatccagtcccatatagaattttaatattctctgaaaaatgaaaaaacacactatgagaattcaactgttcatatacttacaggaaatagtgggggtggtttcaacactacatcaggtaacttttcacctttgctaaatccaacagcctcaatattaaaggtataagcagcacgtcctcttcctttattcccagccatcagaaccagttataccagatgagtgggcaaattctgaa

SEQ ID NO: 740973 - DNA, 582 bp, Homo sapiens
gcccccgcctcgctctacgcctcctccctggctgcaggcagaccgcttcacacagccgcagtgccctgtgtgtggacagcctgtgggagactcgcacgcccacactcaccccgcctggctgcacccctgcccagcatgtcggcgctcgagtggtacgcccacaagtctctaggcgatggtatcttctggattcaagaacgtttctacgagtcgggcaaccgtgccaacatctggctggtgcgcggytccgagcaggacgtggtgatcgatacaggcctggggctgcgcagcctcccggagtacctgtactcctccggcctcttgcaggaccgagaggccaaagaggacgcggcgcgccggccactgcttgccgtggccacccacgtgcacttcgaccactccggcggcctctaccagttcgaccgcgtggcagtgcaccacgccgaggccgaggcgctggctcgcggggacaactttgagaccgtgacctggctttccgatagcgaggtggtgcggacgcccagccccggctggagggccagacagttccgggtacaggcggtgcagcccaccctcatcctg

SEQ ID NO: 740974 - DNA, 623 bp, Homo sapiens
ggaacacttttaaagtggtatgtggtgttcctctccaatttgagtcaacctcccttttgcctgagttactgcaattgcctttttttttttttttttttttttgagacagagtcttgctctgtcacccaggctggagtgcagtagcacgatcttggctcactgcaagctcggcctctcgggttcatggcattctcctgcctcagcctcccgagtagctgggactacaggtgcctgccaccatgcstggctaatttttttttttctgcttttgtttcagtagagacggggtttcaccgtgttagccaggatggtctagatctcctgacctcatgatccgcccgcctcggcctcccaaagtgctgggattacaggcatgagccaccgcatctgcctgcaattgcctcttaactgatctctctgctgctgccctaaccttcctattaaattcttttaaaaggtaaatgatgacctcctctgctcagaaccctccagttgtttgccgtcttgctcagagtgaaagcccaagtccctgcagtggctaacaaagtcctatcccatttggctctctgtgggctcatctcccatggctgtacaagagtaacctgagtgcaagtgataaccca

SEQ ID NO: 740975 - DNA, 623 bp, Homo sapiens
ggaacacttttaaagtggtatgtggtgttcctctccaatttgagtcaacctcccttttgcctgagttactgcaattgcctttttttttttttttttttttttgagacagagtcttgctctgtcacccaggctggagtgcagtagcacgatcttggctcactgcaagctcggcctctcgggttcatggcattctcctgcctcagcctcccgagtagctgggactacaggtgcctgccaccatgcctggctaatttttttttttctgcttttgtttcagtagagacggggtttcaccgtgttagccaggatggtctagatctcctgacctcatgatccgcccgcctcggcctcccaaagtgctgggattacaggcatgagccaccgcatctgcctgcaattgcctcttaactgatctctctgctgctgccctaaccttcctattaaattcttttaaaaggtaaatgatgacctcctctgctcaraaccctccagttgtttgccgtcttgctcagagtgaaagcccaagtccctgcagtggctaacaaagtcctatcccatttggctctctgtgggctcatctcccatggctgtacaagagtaacctgagtgcaagtgataaccca

SEQ ID NO: 740976 - DNA, 636 bp, Homo sapiens
ctctggattttcctcttgggctcccaagataacagagcttcttggttttgagaagtccacatctggcccacaggaaatccacacatattctttccctgccatattctagaactgtactccattccccatacctttctctgtccttgatctgtatccagtgaggacagyttaggccatagccccttgtctttgggcctcccaagaaaggcactgaagcagcagtccatatgtaactgattatatgacatcatcataataaaaggaaaagcttagtgttttatttctttctgaccttcccacagtccttttcttcctttttcagtaataacatacttaatatcaatcatatttttaaaagtaaatatttagggaaaacagacagtgggcttttaaatcgaccaagactcttgagctttgtatttgagaaagctttaaaaataaaagttgggcaagaaatttgaacctcaaagagtgactctacttttagatgacaaacccaaatcatgtttaaagtccctgaaaaacagaaaatgaccaggaagttcattttaaatatactctctaaaccatttgagaattgcaggccataaactatggcagaaagatagctggcaataaatttttcctcaatttggt

SEQ ID NO: 740977 - DNA, 456 bp, Homo sapiens
gtggtacttggttttctagggaactacatttcttctatacctttgtcatgttgtaaatctgttttattatattgtgtgttacagttcttagagcaaatttcctctgaatgccgtgtgatgtggtttcttgccaaaagggaatgtttaaagtaaagttgmgtaaatctagtttatcgtcatgcatatcaaaacactgcctagctctgataacactcatctcacttctttcttttcttcctctaaagcgtcattttgatcccagtgttgcaaaaattaatgttctaaattcatattccctattgtgttttgtatatgctgtaattcatctagttttcaacacaatacaggttgtgcatccctaatctgataatcccaaatccaaaatgctccaaaataacaactttttgagtgctgatatgatgtggaaaattccacacctgatctcacatgatgggt

SEQ ID NO: 740978 - DNA, 656 bp, Homo sapiens
actgattggacaggaaatgtataatgaaacatgactttggaaaaattacagcatgcgcacccattgggcaatatgacatgaattacaaatattacaaagtgaattcattctgttgttttctttttcaatgattacttattctgtcatctgttaatactgatcataaattgtgtcacttccaggaaagtttctctaattacaaagtgaattcattctgttgttttcttttcaatgattacttattctgtcttctgttaatattgatcataaattgtgtcacttccaggaaaggttccctaataaatccagaggaacaaataacactctcccaatgaaagcttgttttactccacagtgagtcatcatggacatgacctttctttygccatcgtatgaaaagatgtgcagatattggctctgcacttccacatccagctaaatccctcctcagctctgaagtctggctacacaaatctgtaaccatcttcttgttccgggaactcttgtggcatggttgtctaaagtacatagttgatcaaaagcatatattaacttaccttgctttgcatctttctaaatataaattctgactacatctaggtgtgattctcttacatctgatacttctctgcaacttttgtctcagcatagtaacc

SEQ ID NO: 740979 - DNA, 656 bp, Homo sapiens
actgattggacaggaaatgtataatgaaacatgactttggaaaaattacagcatgcgcacccattgggcaatatgacatgaattacaaatattacaaagtgaattcattctgttgttttctttttcaatgattacttattctgtcatctgttaatactgatcataaattgtgtcacttccaggaaagtttctctaattacaaagtgaattcattctgttgttttcttttcaatgattacttattctgtcttctgttaatattgatcataaattgtgtcacttccaggaaaggttccctaataaatccagaggaacaaataacactctcccaatgaaagcttgttttactccacagtgagtcatcatggacatgacctttctttcgccatcgtatgaaaagatgtgcagatattggctctgcacttccacatccagctaaatccctcctcagctctgaagtctggctacacaaatctgtaaccatcttcttgttycgggaactcttgtggcatggttgtctaaagtacatagttgatcaaaagcatatattaacttaccttgctttgcatctttctaaatataaattctgactacatctaggtgtgattctcttacatctgatacttctctgcaacttttgtctcagcatagtaacc

SEQ ID NO: 740980 - DNA, 656 bp, Homo sapiens
actgattggacaggaaatgtataatgaaacatgactttggaaaaattacagcatgcgcacccattgggcaatatgacatgaattacaaatattacaaagtgaattcattctgttgttttctttttcaatgattacttattctgtcatctgttaatactgatcataaattgtgtcacttccaggaaagtttctctaattacaaagtgaattcattctgttgttttcttttcaatgattacttattctgtcttctgttaatattgatcataaattgtgtcacttccaggaaaggttccctaataaatccagaggaacaaataacactctcccaatgaaagcttgttttactccacagtgagtcatcatggacatgacctttctttcgccatcgtatgaaaagatgtgcagatattggctctgcacttccacatccagctaaatccctcctcagctctgaagtctggctacacaaatctgtaaccatcttcttgttccrggaactcttgtggcatggttgtctaaagtacatagttgatcaaaagcatatattaacttaccttgctttgcatctttctaaatataaattctgactacatctaggtgtgattctcttacatctgatacttctctgcaacttttgtctcagcatagtaacc

SEQ ID NO: 740981 - DNA, 617 bp, Homo sapiens
ctttcttatgggccttttctccagagatagttgtctgaattaaggatgaaaatgtcaggtcaaactcatttcttattacaatctagcaatctaaatggcagctgttgagatgagtccagagagggttacattcagatttctaatcaagggaacacctttattgactacttaataatcaattcttcttcgcatctctttaactttcaggrgaataatttttactagattaaagtggtcacctctttttaaagtaactttgaccctaggtatagccacccctcccgccgacacacacacacatacacactttggtattgagatctattttagtgatttatctatctacatagcaagctgttcctcccaaaaagaacagtatacataatggaaaagttataaatatatacatcaatcattttcctcttcagagcatagttagcatagttatgctttttaattctcctttacatttccttacctaactgaaaaggctacaaaagtaacttactaaagaatctcacatacacatacatataccaacagttcctactcttaggtagaataaagaaaaaaagttatatgcatctttcaaaagaagtaaaagtaagtcagagaga

SEQ ID NO: 740982 - DNA, 423 bp, Homo sapiens
cctacaaatactgcccaagcccatctagccttgcctataaaagtggtttgcagtgattatggagtaaagtatgggtcactaggatttacaggaagtatggttcctctgctctctggattggtgaggcactccccgtataaatataaatgcaccacatgtggtaccaatggatcatgcttagccaattaaaatgtgaatctataacagccgaacatagtaaactgagtcgccagggcattcttagtatcacacagtgcaraataattgccatgtgaaaacaaatactatctttctccttttttttttttgttcagtattccctattcttctattagtcaattactgacatctatttaacatagttttatttaaaggtgccatgggaatagacttaaactaactctgattcctactctcaagttg

SEQ ID NO: 740983 - DNA, 567 bp, Homo sapiens
gatacattgaagtaatttaaaaacacttaggaagatgtcatttcttcctatcaaggcgtcctccctttctgttttgttgttatattgggaacgataaaaaaatttttttttcaacccatgtggaccaggttggcctcgaactcgtgccctcgaaccctcgcctaccctgagggtccgagggcccgcgcaaccggccggagccacaatggctccgggtgtcggggctgtcctgtaggccctttgatcttacgcagggtgagggagccaatcaccagaggctcmcccctgtcgtcacccagtccccagggccagtgagggccctgcgttccatggcgccccctggagggaggaaggggaactgtagctgagagttcagtatctgacaataaggaaaaggcatagtagatcagatggtgcctagtgttctggagagaagaaacaacggggttggcgaattggcagttgcactttataatacaggcctcatgtataaggcagacctcatggggaaggtaacatctgtgcagagaaatggagatgagggctaggagccatgcaaatactgga

SEQ ID NO: 740984 - DNA, 567 bp, Homo sapiens
gatacattgaagtaatttaaaaacacttaggaagatgtcatttcttcctatcaaggcgtcctccctttctgttttgttgttatattgggaacgataaaaaaatttttttttcaacccatgtggaccaggttggcctcgaactcgtgccctcgaaccctcgcctaccctgagggtccgagggcccgcgcaaccggccggagccacaatggctccgggtgtcggggctgtcctgtaggccctttgatcttacgcagggtgagggagccaatcaccagaggctcccccctgwcgtcacccagtccccagggccagtgagggccctgcgttccatggcgccccctggagggaggaaggggaactgtagctgagagttcagtatctgacaataaggaaaaggcatagtagatcagatggtgcctagtgttctggagagaagaaacaacggggttggcgaattggcagttgcactttataatacaggcctcatgtataaggcagacctcatggggaaggtaacatctgtgcagagaaatggagatgagggctaggagccatgcaaatactgga

SEQ ID NO: 740985 - DNA, 587 bp, Homo sapiens
gcatcagagccagacttgggtggatccaactgtgggtttccaacaccctgggatgatggagaactgggcgcctgccccgcccacggtcttaatactccttgcaggtggggaccctggcccccggccgagctctcccagctgacagacgggctcagaagtcaaggatgtgtttgtgaaagtccctcccctccaagctgccccccacctgcagggtcacttaccagtttgagtgagaacttttgcttctgtggtcctgagtcacaggtgagggtggaggtgggtgcagctgtgggggaacaaacaagggagtgaggttataaccacgcggaaggtcagggtcatcatccccaaacttcccagcaatgagaagcggctctggtgccctggttccaacaaggtcaagcgcactcttggctctcacgacytgctgcttcctagttttaaataagcttcttcttcctctttctctctgtcactatccagccatgcaggaagggctaatgcagcaggcctgagacggctctcctggcaaggtctgggaccctggattccgggagggctcccagaatcccctaagtgagtggggc

SEQ ID NO: 740986 - DNA, 518 bp, Homo sapiens
ctacaatctattttcaacccagtagcttgacggatccacttaaaatctaagtcagaccctgtctgtgtccctgccctggcccatatggtgggtcggacacggtggctcacgcctgtgatcccagcactttgggaggccgaggtgggcggatcacgtgaggttaggagttccagaccagcctggacaacatggtgaaaccccgtctctactaaaaaagtacaaaaaaaaaaatcagccgggcgtggtggygggcacccgtaatcccagctacttgggaggctgaggcgcaagagtcgcttgaacctgggaggcagaggttgcaatgagccaagattgcaccgctgcactccagcctgggcaacagagcaagactcagtctcataaataaacaaataaataaataaaatgtaagtcagaccctgtccctcctctactcaaaaccgtatggtggatttcattttagacagaataaatgctgaaattcctaccatggcccaggagccccctgtatgatctgc

SEQ ID NO: 740987 - DNA, 403 bp, Homo sapiens
aaaaacacttaggaagatgtcatttcttcctatcaaggcgtcctccctttctgttttgttgttatattgggaacgataaaaaaatttttttttcaacccatgtggaccaggttggcctcgaactcgtgccctcgaaccctcgcctaccctgagggtccgagggcccgcgcaaccggccggagccacaatggctccgggtgtcggggctgwcctgtaggccctttgatcttacgcagggtgagggagccaatcaccagaggctcacccctgacgtcacccagtccccagggccagtgagggccctgcgttccatggcgccccctggagggaggaaggggaactgtatctgagagttcagtatctgacaataaggaaaaggcatagtagatcagatggtgcctag

SEQ ID NO: 740988 - DNA, 477 bp, Homo sapiens
atttgccacctcgaagacaggcaaaacatttcagggattttctgaggactctgtaccagtggcattcgtgactcccatgccagtatgtaagggggataaagtatctggatatgggacagggggtttactgggggatggagcagatggagaaggggtaggtgaagtggggacaggctgaaaagagtgtgacaggcaaaaggaaggatcatctaagacatcaaaatcagggacagaggaagttccctggaagcatgcatgacaattttcacataattttgggttttgggataaagccaaaaagacctgaacatatggaacctctgaatacaaaaraaaattatatgcttctttctgagagtttgtgagtcaaaatgggattaatttttaagaatatgatctaagggtaagtaggaatgaataaggaagtgcaagagccctagggcatccttttgtctcactctattcggggacatccca

SEQ ID NO: 740989 - DNA, 652 bp, Homo sapiens
tatattacaacccaataacaaaaaaaaaaaaatagactgcaaatatttggaaattaagcaagacacttctgagtagcctgtggatgaaaaacaaagtcactgtggaaattagaaaacattttaatctgaaaaataataaaaataatacgtatcagaacttttggaatacagctgaagcaatgcttagaggtaactttatgctttagatgtataaattagtaaagaacaaaggttwacaatcagtagtctaagctcctatctcaagggagcaatgaattaaacccaaggaagtagaaagaaggaaatagtataaaagtagaaatcaatgaaacaggaaagttttacagtcagttagttaagaaaacttttaaaaaatgaaaacctgtaatgacctgattaagaaaaatgagagaaaacacaaattactagtaacagggatgaaaaaaagagacttcactacagatcctctctatattaaattgttaatgaaagggaattatgtacaacttgataatacatttgacaacttgaatgaaaggtcataatccctgaaaaacacagtttagtcagctgacatataaagaaatagaaaatctgagttgttctgtgtctattaaggtagttgaatttatcaaaaacctttccacaaaga

SEQ ID NO: 740990 - DNA, 634 bp, Homo sapiens; identical to SEQ ID NO: 737476

SEQ ID NO: 740991 - DNA, 593 bp, Homo sapiens
aaaagctctgcattgcaaatactgaatgatgtaaaatacaaaatacacatctttttatttccaaagaagattagaaaacaataaaatattagaaactgaaatttttaattttttaatggcctttttaatgggtaaacaatttagtaataaaaaatattaatggttatgaagataataattttaaagtgactgctgatagcttgggttacaaatagccttatccttaagaccttatctctttataatttaagtgcttttacgtattttgcctcatttacttttaaagcttcatgatacagtgatttgtgtgggtggcacagttcttactacgtaagtagtgaaacawagccataggttaaatgatttactcttaattttatgctgactttttcaggcaatttctgaggctttatgttgcctgtattctgagcaacgaatgattgaaaacagcgaggaattctggagatagacatcggaacacctcttcttagaagatcacattattcagaatccttaatgattcttaccttttgaatgacagatttttagtggacataaaaactgctaatgaaagtaggatggttagaactgtt

SEQ ID NO: 740992 - DNA, 652 bp, Homo sapiens
tctaacttagaagtgtatgattacacaagacagtgtttgttttctaatgtttaaagctgtattgtaatgagaccttatgtaaccctgactctctatcatcccttttccatttcttttctttttttttttttttgagatggagtctcgctctaccacccaggctgcagtgcaatggggtgatctcagctcactgcaacctctgcctcycgggttcaagtgattctcctacttcagcatcctgagtagcagggattacaggtgtgtgccaccacacccaactaatttgtgttatctttagcagagacacggtttcaccatgttggccaggctggtctctaactctgaccttgtgatccacacaccttggcctccgaaagtgctgggattacaggcatgagccaccatacctggcattcttttcagtttcttttcctgcatttattgttcaaaaacagaggacatcctcactgccaaccatcagcattcccagatctcctggtcagaatgaatcactactttctctgtattctcagagaactatgtatcaaaataccatcctttatttcattttaataacaaacttctcaaaggcacacttgctgtgatctcctcctgctggatcctggcccagtgcgatggagaaggccatctc

SEQ ID NO: 740993 - DNA, 652 bp, Homo sapiens
tctaacttagaagtgtatgattacacaagacagtgtttgttttctaatgtttaaagctgtattgtaatgagaccttatgtaaccctgactctctatcatcccttttccatttcttttctttttttttttttttgagatggagtctcgctctaccacccaggctgcagtgcaatggggtgatctcagctcactgcaacctctgcctctcgggttcaagtgattctcctacttcagcatcctgagtagcagggattacaggtgtgtgccaccacacccaactaatttgtgttatctttagcagagacacggtttcaccatgttggccaggctggtctctaactctgaccttgtgatccacmcaccttggcctccgaaagtgctgggattacaggcatgagccaccatacctggcattcttttcagtttcttttcctgcatttattgttcaaaaacagaggacatcctcactgccaaccatcagcattcccagatctcctggtcagaatgaatcactactttctctgtattctcagagaactatgtatcaaaataccatcctttatttcattttaataacaaacttctcaaaggcacacttgctgtgatctcctcctgctggatcctggcccagtgcgatggagaaggccatctc

SEQ ID NO: 740994 - DNA, 564 bp, Homo sapiens
gaagtgtttgaacagtgaaattgtgtcaaatcatgtagtctcttcgatcctcacattctcctccatgtgactggggtaggcaggtcaacaagacaatctacaaacatctaactcaatgcgtgtggttcagtttcgttgtttttattactctcattcctcctcagatggctcagatttagttgccatttacctatcttgctcatatttaaatatcaaaagaactagcacaggatgcccacttctgccaaattccatacaaccagatgctgcttcttcargaagaaaaacaataattattgatatttaaagggcacagggtgaaaggcacacacttgacctctcaatgtccattatttcctttgctgtggcttaagaaagaacactgcgtaagaagtcagagcacacgtccgtgggagtcctgggattcagtatcacaaaagctgtaaacagtagtaaataacacttgtctttctgaagaaagcaagcacatcattctgagaaggtgcaaacaggagcccttaacattttggaaggctggaagatggatcttgagtccaaatgttt

SEQ ID NO: 740995 - DNA, 534 bp, Homo sapiens
gttaatcccatccaatgtatttttcatttcagatattgtatttttcacctctagaatttccatttggtttttaaatatcttcactatctctcctgattatattttaacgatatttaaacacatcgagcatatatgtaatagccatttcaaagtccttgcctactaattccattgtctgccattgttgggtcttttcctattgackgtttttttgttttttttttttactctaggttatgggtcacattttcctgcttcttggcatgtctagtaattttttattggctggtggacattgagttaagtatctgaactttgccatgttcccttaaagaatggcttcgttagaagacagttaagttactggaaaatcagatttgtttgatcctttcatggcttctttttaaacgtgtttagggtaggtttgaagtagcctctattctgggatagtttagctctactactaaggcatgggatgacccttctggttctcttgaaaagtcactttggaagccaattctcttgaaaggataa

SEQ ID NO: 740996 - DNA, 625 bp, Homo sapiens
tcacaccttgcccctaaccattccagccttgtcccacttaatttcttagcattgcctgtgaaatgtcaacttatcttagcctcacgccacttgcagcatttgttcaccttcacaatgggatgctgtaagtgtggcatctcacccatgccctggactggcatgtagcagggtggtccacacttctacagactctgctcatccaagaaaaagatcatactgtgtccagaattggcgggttcttggtttcactgacttcaagaatgaagccacggaccttcgcagtgactgttacagtttttaaagatggtgtgtctggaatttgttccttctgatgtttgacgcattcagagtttctttcttctggtgggttcgtggtccccctggtttcaggagtcaagctgcagatctttgtagcgattgttgcagctcttaaggcactgcrtccagagttatccatttcttctggggggttcttgatttcactggcctcaggagtgaggctacagaccttcccagtaactgttacaactcataaaagcagtgtggacctaaagagtgaacaacaagatttactgcaaaaagcaaaagaacaacacttccacactgctgaacacgacccaagcag

SEQ ID NO: 740997 - DNA, 601 bp, Homo sapiens
ggaggcagcagagggaggatttgaacccaggcaacttccatctagaatctgtgctctgaacagccttctcatgacattggcaggacatggcaaatactacatgatgggaytccacacactgacatttgggaagcaccgagcagggcatccttcctgcctcagccattacaagaccccaaaatgcaccagagtgatgaggcaggggcgtgacataggagctgtctggatccttccaaccacggagcctccccagagctcagaggcggaagcagtggctgggcctgccttgtgcaaacatgaagtgctcatgctgtctgcactgaatgccctcaatgactgctggtaagcagggaggaacgcggtgagcctgtcaccctggagtgctgcaggggagcaggagagaccaaggcagaggggccagtgaagagacaggtctttaggacggatgctgtggctgcaggacaacacttcagtcacagagccccaatgtcatcaggatcctctggatacatggctctcagctccttacacacaatgcaagcaatatatatcatcatttttttttgtaatcattattttgtgatcaatatttttgtaatca

SEQ ID NO: 740998 - DNA, 649 bp, Homo sapiens
agaggatcctggattctccaggtgggttcaacttcatagcacaggtgtccttgtaagagagggctgaggaagaaacggtatcacagaagaggaaaaggtgaggtgaccttgaaagtgatggaaatgatgcacccagcagccttaaaagtgggaaagatgaggaacagatcctcgctgaagcctccacaaggagccggccccgtcggcaccttgattttaggttagcgagacgctgctcagagttctttaaactactatgtttgtggcaatttgttacagcagccagagagcaacccctccctcccatccacccctaccctgttctaattggatgatagctggagtctttcaggagcccttgtgttttataacccagtggccacagtgaccctaggcraggccctggtccttcaggctgcatggtcagtatatgtgctgcaggcccggggtccacagagggcactaagtagggagcaagacattgtttgttttttatttcacttgcttcccaagcaggaatttcaatgctgaaatcctatcatcactatagagaagctgagtgtaagttctgttggcagcaaaaattagcaatcagtggctactccctactcagagggagcagacaagttcaaagtcagctgtgcagaaa

SEQ ID NO: 740999 - DNA, 606 bp, Homo sapiens
caaatacaaaaatagctgaattcaacaccccactttcagcataggacagctcttccagacagacagaaaatcaacaaagaatcatcagacttaatctgcaaatggatctataacatagatccattattaccctgacaccaaaacagacaaagacacatcaaaaaaaaaaaaaagaaagaaaagaaaattacaggccgatatctctgatgaaatactgatgcaaacatcctcaacagaatgytagcaaatagattacagaccaaatgaatctattaataatagatatttatagaatatttcatctgagaattgaggaatacacattctttttctcagcacatggatcattctcaaggatagatcatttgtttggtcacaaaataagtctcaaaacattaaaacaaattgaaataatatgaaattaaacaatttgctccccaatgaccagtgggtcaatgaagaaatattcttagtttttctttttgaaaaatttcttaaaataaattataatggaaacataacaaacaagaacctatgggataaagcaaaagcagtactcagagggaagcatataggtatagcacctacatcaaaaaaagaggaaaa

SEQ ID NO: 741000 - DNA, 606 bp, Homo sapiens
caaatacaaaaatagctgaattcaacaccccactttcagcataggacagctcttccagacagacagaaaatcaacaaagaatcatcagacttaatctgcaaatggatctataacatagatccattattaccctgacaccaaaacagacaaagacacatcaaaaaaaaaaaaaagaaagaaaagaaaattacaggccgatatctctgatgaaatactgatgcaaacatcctcaacagaatgttagcaaatagattacagaccaaatgaatctattaataatagatatttatagaatatttcatctgagaattgaggaatacacattctttttctcagcacatggatcattctcaaggatagatcatttgtttggtcacaaaataagtctyaaaacattaaaacaaattgaaataatatgaaattaaacaatttgctccccaatgaccagtgggtcaatgaagaaatattcttagtttttctttttgaaaaatttcttaaaataaattataatggaaacataacaaacaagaacctatgggataaagcaaaagcagtactcagagggaagcatataggtatagcacctacatcaaaaaaagaggaaaa

SEQ ID NO: 741001 - DNA, 623 bp, Homo sapiens
agaatcacaataaaataatacaggagctcatagacaaaataaccattataaaaaagaagcaaactaatctagtagagctgaaaaatatactataagaattgcataatgcaatcacaagtattaacaacagaacagactaagctggggaaasaatctcagagtttgaagactggctgtctcatataactcaatgagacaaaaataaagaaaaaagaatgaacaacacctctgagaaatacagaattatgtaaagaaaccaaatcgatgattcactggcatcctcaaaagagatgaggagaaggcaggcaatttggaaaacatatttcaggatagcatttattaaaacttcactacagaggccaacattcaaattcaggaaatgcagagaacccctgtgaggttatacaagaagagcatccagaagatacataatcagattccacaggctgaaatgaaagaagaatcattaagggtaactagagacaagggacaggtaacctacaaagggaatcccatcaagctaagagtggacctttcagcagaaatgctgcaagccagaagagactgggggtctatattcaggattcttaaagaaaaaatgtttaaccaataatttcatttcc

SEQ ID NO: 741002 - DNA, 660 bp, Homo sapiens
tgcagaggtcacgctgagccagttttgcagccccctgaagtcagcagagtctgagctaggcaaataaactcctgttcacctggaaccagattggtatttttgtgctcaactttatgaggtggggacaaatggagattttacaactgcatgtgagtaattcatccaaaaagcaactagatcaatattatagtatcaagtgccgcatgtgtgaagatgatgctaagtatcgtcagaaagtgcaatggttactaggcaagctccctgtcctcacargtggtcagaatgttggtgaaagaggccgagcacagaggctcatgcctgtaatcccagcactttgggaggccaagatgggtggatcacctgaggtcaggagttcaagaccagcctggccaacatggtgaaaccccgactctactaaaaatacaaaaattagccgggagtggtggtgggagactgtaatcccagctacttgggaggctgaggcaggagaatcgctggaacccaggaggccaaggttgcagtgggcagagatcatgccactgcactccagcctgggagacagaatgagactgtctcaaaaaaaaaaaaatgttggtgaaacagattgactcaaaccaaaagacagcatggagcaatagtataagataagggctaaggact

SEQ ID NO: 741003 - DNA, 485 bp, Homo sapiens
tctcccgtcactcacaccctgactacaccctctgccttgtcaccatcagatcctttatctctgctacatcagccaccataagaagcccaggactccaaagcatctgtgtgtcttttctgacccctatttcctacaactacccacccttagcttctgacattcttccaccacacctgctggatcacacaatgagtcctcaagaaaatcacccgttggccgggcacaatggctcwcacctgtactcccagaactttgggaggttgaggccggcagattgcctgaggtcaggagtttgagaccagcctggccaacatagtgaaaccccgtctctactaaacatacaaaaattggccagtgtggtggcgggtgcctatagtcccagctactcaggaggctgagacaggaaaatcactcgaacccgggaggcagaggttgcagtgagcccagattgcaccactacacttcagcctgggcaacaaagcaag

SEQ ID NO: 741004 - DNA, 584 bp, Homo sapiens
ttagcccacaatgtttgctggactatattatgtcaatgttcagatagatttcggtaaacattctgaacattgggcttaaaagtcatttaacaaatatggattaagctattatgatagtgaaggacattcaaacatcgaatctcaaaaactttacagtttgataagagaaataaggtatctagaagattgtcacatattttagaggggttttgtaagtaggctgttataagaatatttgtaagaatgcagcaactataaacaagcaatgctgaccaagccattctcgcatatagtattgcttgagtataaattaaagcagcatttttgaaaagcattttggtaatacayattaatagccttaaagaattttattccacgatctaaagagaaaaaagtgcacaggaaaaaactgagaaaaaatacgccaaaatgttaacaatgattctttctaaaagattaatcaccagataccagtgacaacccaacagttttatgtgacagtgaaacccagcggtcctagtcagcagggggcactcgtccatgcagtgattaagggatccagactccttccatctcctggttcc

SEQ ID NO: 741005 - DNA, 419 bp, Homo sapiens
ggcccaaaatctccttaagctgataagcaacttgagcaaagtctcagaatacaaaatcaatgtgcaaaaatgacaagaattcctatacaccaataatagagagccaaatcatgagtgaactcccattcacaattgctacaaagagaataaaatacctaggaatacaactcacaagggatgtgaaagacctcttcaaggagaactacaaaycactgctcaaggaaataagagaggacacaaacaaatggaaaaacattccatgctcatggataggaagaatcaatatccagaaaatgtccatactgcccaaggtaatttatagattcaatgctatccccatcaagcaaccactgactttcttcacagaattagaaaaactgcttaaatttcatatggaaccaaaaaagagcctgtatagc

SEQ ID NO: 741006 - DNA, 614 bp, Homo sapiens
ccaggatttgccagcatctccacctgcctctgactcaccattttacctccacattcttgccctcccaaccttgatgtccctcctccccacctgcctcaccctcctcccccagctgagcgaggatcaacagacctggttccccgccactgctccattgagcttgatctggaaaatgaggactcacagtcctgcttaggacacatagygggggaggttgggctcggtggagccagacagcatactcagtcattttaacaacttgttatttttgaggccccaagctccagaaatgaatttggaaagaaaatgaaaaaaataacaagacagatagcaggaattcaaactccactaacaaaggccatcagctgaaaccaatttggacagctcagctcagtctcggctcatgaacttcgctttacctcagaaaagcccttcagcacagcacacgtgcacacacatgctcactcactcttacaaaaggcaggactgggtttcagagctatgcagcaagacagaagcaaaagaagcttgcttccttttatttaagtgataatctctgtggttttgacttcagtaactgtgatattgtgatttataagaagaaataacatatt

SEQ ID NO: 741007 - DNA, 543 bp, Homo sapiens
aggaaatagccttgaaagggcaaatctaagagttattgaccataaagtggaggtagagtgagataggagtagaaagttcatccaaagggataataaaagagaacttcccaaacctaaagaaggatatcaacattcaagtacaagaaggttttagaacaccaagcagatttaacctaaaraagacctacctcggccaggtgcactggctcacacctgtaatcccagcattttgggaggccgaggcaggcacatcacgaggtcaggcgatcgagaccatcctggctaacacggtgaaaccccatctctactaaaaatacgaaaaattaccgggcgttgtggcaggtgcctgtagtcccagttacttgggaagctgaggcaggagaatggcgtgaacccaggaggtggagcttgcagtgagctgagattgtgccactgcactccagcctgggtgacagagcgagactccatctcgggaaaaaaaaaaaaaagacctacctcaaggtatttaataatcaaacttccaaaagtcaaggataaagaaag

SEQ ID NO: 741008 - DNA, 653 bp, Homo sapiens
ttatacaaaggatttatattatactgacttctaatttaatttcattgtaggatgcagccaaaatggtacttggagatgcaagtatagcagtagccacctatattagaaggaagaccgctattgaatcaatgatttcaacttgcaccttaagaaattctaaaagcagcaaattaaactgaggaagtaaagcagaaggaagtaatgataaatatcaaagccaaaatcaacaaatacacaacagaaaaacaatagaggaaagcaatgaaaccaaaagctgcttgcttgagaagattaataaacattgatgrataaataataaaactgatgaatctctacctagaaaggtcaggtaagaaagtagagaaaaaaaatcattcatattagaaatgaaagaggtgactgcacctccaaattctacagatatttttaaaataataaggaaatatcatgagcaattttattccaataaatgcaacaacttagataaaatggaccaagtctttgaaaaatacaaactaataaagctcatgcaaaatagattaatttcaaaataattatgctgagtgaaagaagccagacaaaaaacagtatatattgtataattccattcatataaacttctagaaaatgaaaactaatctgagaggaagcag

SEQ ID NO: 741009 - DNA, 648 bp, Homo sapiens
ggtttgttatacagatatacatgcgccatggtagtttgctgcacctaccaacccgtcaccctggttttaagccccacatgcattggctatttgtcctgatgttctctctcccttcaccccacccccaccccacagacctcagtgtgtgttgttccccttcctgtgtccatgtgttctcattgctcaactcccacttatgaatgagaagatgtggtgtttggttttctgttcctgtgttagtttgctgaggatgatggcttccagcttcatccatgtccctgcaaaggacatgatctctcattcctttttatggctgcatagtattccacrgtgtatatgtaccacattttctttgtccagtctataattgatgggcatttgtgttagttccaaatctttgctactgtgaatagtgctgcagtaaacatatgtgtgcatgtatctttataatagaataatttatattcctttaggtatatacccagtaatgggattgctgggtcaaatgatattctagttctagatccttgaggaatcgccacactgtcttccacaatggttgaactaatttacattcccaccaacaatgtaaaagcattcctatttctccacacccttgccagcatctgttgtttcttgactttttaa

SEQ ID NO: 741010 - DNA, 481 bp, Homo sapiens
atagaaaattatattgtattttggaaggtgataggaactattaaaacaaataaaaccagctaagggataggaaagttcaaggtagacctcattcagaaagtgacatttgagctaggtctttttttttttttaggcagggtctctctctgtcacctaggctggagtgcagtggtgcaatctcggctcactacaacctccacctcccaggttcaagcgattctcctgcctcagcctcctgagtagctgggacaayaggtgtgcaccaccacacctggctaatttttgtatttttagtagagagggggtttcaccatcttggcctggcaggtctccaactcctgacctcaggtgatccacccacctcggcctcccaaagtgctggagttacaggcgtgagccaccacgcctggccgaactaaatcttaaaggaggtaagtgttgtggatatgtgggaatgatgttttaggcagaaggaagagcc

SEQ ID NO: 741011 - DNA, 481 bp, Homo sapiens
atagaaaattatattgtattttggaaggtgataggaactattaaaacaaataaaaccagctaagggataggaaagttcaaggtagacctcattcagaaagtgacatttgagctaggtctttttttttttttaggcagggtctctctctgtcacctaggctggagtgcagtggtgcaatctcggctcactacaacctccacctcccaggttcaagcgattctcctgcctcagcctcctgagtagctgggacaacaggygtgcaccaccacacctggctaatttttgtatttttagtagagagggggtttcaccatcttggcctggcaggtctccaactcctgacctcaggtgatccacccacctcggcctcccaaagtgctggagttacaggcgtgagccaccacgcctggccgaactaaatcttaaaggaggtaagtgttgtggatatgtgggaatgatgttttaggcagaaggaagagcc

SEQ ID NO: 741012 - DNA, 552 bp, Homo sapiens
actttatctcaacataactaacaataaagaaactccacgtatggtaaaaaattatcaaagattttttgaaaaaccgatttgggtaaactattttattcatttactgcctccaccatgattagaagcattacatgcaatcaaatgaagtcattttattcccttttttatgggctttatatagggaagagtaacagcagccacagcagagattcattctcctcttgctttaattgcaaaagtgacacaaacatatcttaaggaggtaaaacctggcttccaagtcattttaaattcattagtttcccatgatttatggaagttttgtttcttttgtattttaaagaacrttctaaagatgagactttcaaaggtgggcaactttaaaaaccattgctagtagtggctcatttagtttctatacagttatttgtaggtgttagagtgtagtctatggtaaaaaaaaattaaaagcagacttcctggtaagttaatttcagtaattcaagagcaatagaattagctcagggtttctcaatcttggcactatccaca

SEQ ID NO: 741013 - DNA, 573 bp, Homo sapiens
cctaatacttggttattgtagtacagaacccacaacaacaaaaaaagctttgaagttttaaaagttgttgagaaacaaacttccaatctctcttagctgcaataaaccttctacagagaaacaaattctaccacctaaaagggaagaaaaacataaccacctaaaaggtggttactcaatccgtttttaaatgtgtaatcaataaaacctactaacttattgtttmtgggttacctttaaaatggtaccaaggaaagggcctatgtacattaatgtatgcaaataattcaggatttaacaacagcatgaagtttttctcaaaggaagaaacacaaacagatgctttctcatatgctctccaatttatcactgtattctcttaaactctggggtgttgcattttagggtcctattaaataaatcaaaagggaatattatctggaattaggaaccaggcaggaccacggctaaaattaattcaccatagtaatctcctcctaagaaactcccctgagggaaaacattatgcgcccatttctgtgggcagagatttaaatatatctcccctattag

SEQ ID NO: 741014 - DNA, 611 bp, Homo sapiens
gaaaaacataaccacctaaaaggtggttactcaatccgtttttaaatgtgtaatcaataaaacctactaacttattgtttctgggttacctttaaaatggtaccaaggaaagggcctatgtacattaatgtatgcaaataattcaggatttaacaacagcatgaagtttttctcaaaggaagaaacacaaacagatgctttctcatatgctctccaatttatcactgtattctcttaaactctggggtgttgcattttagggtcctattaaataaatcaaaagggaatattatctggaattaggaaccaggcaggaccacggctaaaattaattcaccatagtaatctcctcctaagaaactcccctgagggaaaacattatrcgcccatttctgtgggcagagatttaaatatatctcccctattagttttacatgcctaaatccccatgcattaaaataaaaatatatctgtcctctcagaagagaaacctggaagtctgtactgacctctaaatgaatccaattaaatttaatcaagttacacatctatgttttagagtcccattgaatatttgagagagaaaactggtctaaagagagatgtgccca

SEQ ID NO: 741015 - DNA, 448 bp, Homo sapiens
taaatttaaaaactcatgatagttctagactaaagaaaaggaaaatgcaaagtggaagctcatcagtatcagaaagaagttggaaaaaggaaaaatgtgtatctaaaatcaagattggctggttgtagtagctcacgccgawaccgccagcactttgggaggctgagacagctggattgcttgagctcaggagttcaagactagcctgggcaacatgaaaaaacctcatcttcaaaaaaaaaaaaaaaaaaattagccaggttggtggcatgtatctgtagccccagctactctggagacttaggtgagaggttcacctaagcttggggatgtcaaggctgcagtgagctgtgatcacaccactgcactccactccagcatgagtggcagagtgagaccttatctcaaaagaaaaatcaaacaaacaaaaaaatcaaccttaagatta

SEQ ID NO: 741016 - DNA, 610 bp, Homo sapiens
tagttttccttgaacatgtggtctctgcctgcaaacacatagacttttagttttaatttacatagagttaaatatacacatattactctgaagataaacctgaggtgtaagaaaattatgaattgagtgtttttgtgtgagtataggtttgtacatattttcagaataaaagcaattactgcaacaaaacaaattatgttatttaggtgattaacaaaactaaacacttttaaaatggtgaaagcaaatctatactttctgstttgtattgaatttattaatataaaatgttctggcctgtgattcggattctccccagagtctgcctattaaagcacaggcaactttgtctccagaaacaactctcttgagtacaataataaaagccctcttaaaacaggaaaaaaaaaatcatttttaacacttatttgaatgaacattcaaccaaaattgaataattggatatatttttattgttctatgtgtgtgtgaatgtataaatggtgcataaaaaataatttaagccagaaaaatagttatttgtaatgaataaaactaaaaagtagttaattattatatccagttgatatctttgtttatgtagataaca

SEQ ID NO: 741017 - DNA, 547 bp, Homo sapiens
ctttttgcagaaagcagttttgccacgagtacactgaacagaggagacagagtcatttataacttgacgtgtccaccctactgctgtgtctggttttcattggctggaatgggacctcacattctgtatgtcccamttgtttagcaacttagaactttttaaaagagacaaaggcagaggagaacaaaggaaggaggaagtaacttgtggaatgctgagaaaggtaaaaataccttcaaataaggaggaggaacaggctatgacctaatgcttgcttggattagtataagcatgccagggcaaatatttaggctaaattgtgggagctaagaacataaagtacattgattttttaattgtgcttagcagatatttaagaatgttagcacaggtctttgaataaactttgcttctaagagaagttactattcataattaggtagaaaagtctttgaagaggaacctctacttcactttttacactgtgaactgagaatgctgtgttcagagtgattactgaaaacatggttaatacacttcttccata

SEQ ID NO: 741018 - DNA, 552 bp, Homo sapiens
aggctctggtaacttctggtttatatgctcaaagaatgacttaaagactcagaattgctgctgggctgactgcttggtttgagtcctctttagaatatacaaagttattttagttttttgaccatagctttgtaatgcaatggagtaacctgtagtccatataggtagatctggctttaagatagtaagacttacaggattgcaagtgcttgtcttacaatccagttttgctggtactttgatgagcaagattggctttgacctcggtgatgatcagtcagygaactgcattgtacagttccagcaagctattgctagggccttggaaggacaaacagagggtgcacacacaattttgtactggcagtttgtatagtactctgtaggaccagagattgtgagatagtttgggttcatagatgttaactgacaaatatcaaagtatatgcatatagctccaggaagagaggcttgggtttgacctataaaacttctttcctttgactcagtatgaatctccaaccgagtcccaggtaaagactcagggtcaca

SEQ ID NO: 741019 - DNA, 435 bp, Homo sapiens
attaccttactcattctcctcaagacgcagtcaatgaactcagcccatgtgattctagtaggccagttagctcagcccaggtgattccaatcagccaattaaatgagcccaagtgataccaattagtcaattatatcagtaaaggtgaatccaattagctaattagattagcccaaggtgattccaattcaccagttaaatgagcccaagtgataccagttagccaattttatcagtaaagatgaatctaattagccaattagattagcgcaaggtgattccaatcagccaattttyttagcctaggtagatccaatcaaacaattatctaaatagtgactataggtttatcaaagcaggcccaaactagtgggtgtgaagggcacatacatacattgagaagaaatgcagggccctgaagtgccaacctgaaca

SEQ ID NO: 741020 - DNA, 652 bp, Homo sapiens
ttatactaaattttatttattttatgtgcacttgttccaagcacattttcttaaatgtctgttccttatctattgatttctatggaaatttttattttcctccaaaatggcatctgggagttcatatgtttggaccatttttatcctcattgctgtttgtcttcatttgtctttttctctgatcactattttatatatayacacacacacacacacacatacatacatatataaatatatatgtgcatatatatttcccagcatttaatacatttaatatcccttagtggatagggatgacaacttacaaatttaaatacttttttttataaaggagtcatttttttctattgaatttaagctaaaacatgatccctcagttctgtaggccattgcactttcaatatagcattattaaatccaaatcattacatagcaataagcaaataactacacccataagaagaatgcccatataattgagcaaaagaacactttgccctggagcctgtgctttcaagggctccactatggtcctctctctggccacattcctccccaaagtacaaggagtttaccaggtccaaggggatgaggttagttggaggtgatgctgctcacccccacctaccacctttgagatcatgctgta

SEQ ID NO: 741021 - DNA, 553 bp, Homo sapiens
aaaatgtttggattactagaaacaatatttttttttttacttgacaaactgcatcaactaaaacttaacatcgcttcagaaataaaatgatagaactaatctcattaagttaaagagtacaataaactgacctagaatcactatttctctctgcatcatctaggagatcctaggcacccaaaattaaaagaaattagcaagatctgattatccagtgatgtattrgagtctgttgaaatgggttaacattaataaatgaaaagaatatgtttatctgaagtaccgtcttatttctggtcagaaaatgagcaaatcacgtaggtgcttacacttgctaaactggacaccacagaccaaagctgggacataaatctagtagaacaaaatgtcaatattcattattggttatagcttaatatagaagtacagacacccgctgattttactctctgcaccagcacatcctcaacaaagaattcagggcacactgtcacaatggaggctatagccattgaagttgtgagcaatacctatgactcagcggagagttgaa

SEQ ID NO: 741022 - DNA, 610 bp, Homo sapiens
ttgcaaacataggcaaaacttaacttcagcaactttttgtaaatgcctatattaaagaaaaacacaatgtaagttaaatgactcagaagctttccaatgggagagaccaaataaggcaattgtacaactgtaaccaatcaactattttatttgctttatatctgtgtttgtcctgtagaagcctccccaccccttgtgctcccttggtagagctcctgaacctcttctggtttagactcatgcctgagtcatgaattgctgtttgctcaaactctttaaaactgtattgtgcctcagtttacttttgaatargtctttaaaggtgatcaacttaagatgaggtcattagggtgggccctgacccaaaatgactgtgtctttataaaaagggagaacttagacacagaggcagacatgcacacaggagaacactatgtgaaaatgaaagcagggatgagggtaatgcatttacaagccaaggaataccaaagattgccagcagaccaccagaaggtaggtgagaagcgtggaacagatgattctctcacaacccttaggaggaaccaaccctgctaacaccttgatctcagacgttgagactccaaaactg

SEQ ID NO: 741023 - DNA, 549 bp, Homo sapiens
taaaataaaatatgatagcaaagcataaattatacaagaaaaaaggtgtcttgagactgttggaaagctggaggaattgtaggctatttgaaagtgtatatttggatttctaaaatagacttattattcatgtaattgtttgtctgcattcaatttaaacctgtacatacattaaaaggtttcaaatttcaaaatatrtgtaattttaaacagaaaaaaagaatcagaaaactagttagcatgcaaaaatacagtggatccattatcttaagtttccataactgtgtcattatatcagccttttaaacaaaaaataccttctccatattttgttagatatggatatgcatggatgaaaaaatactcatgtttggtattctaaggaattatagctgaccctgtttagttctctggaataattagagttatatctagtctaccatcaaaactagtgtctaggaaataaagaggcaaatataattcacaagagttaaaaataaagatcctaccgggaaatactgcaatttatattttctggtcattcatgag

SEQ ID NO: 741024 - DNA, 578 bp, Homo sapiens
aagacatgggaaaaaatggatgctactcaaattttacatttataagtgtattcatctgcttctttaaacacagtctttgacatttaatttataacatatttaacattttataaaggatttgttccaatatatttaacctctctttagctgaaaattaatctccaaattatacttattaaacactttatcccatatcctgtgattttcagaatcttcagcttatgaaaccatataatttaaaaagtaatcttattaaatgtgtgaattgcattagttctcattgatctgaagggctgtatttttgtgaaattaactactttgttctgttatgatgactactgggtttttcaatgaagtttgtatatttcaggtatgaaagcaggattccagcaagtaacttattagatttatcagtttactcttgyttccagagtatttccccagaggtatggcagcagtaactctattaaagacaccaggtcccatttactttcatgtcacacttttctctcttgattttctcagaactagacttgttggttttcactgagcctcagacataaataaaaacaatatac

SEQ ID NO: 741025 - DNA, 623 bp, Homo sapiens
aagagttttctctaaaatgttctgaaatatttactgtaaaacatttagaggacataggtgagccaaaagtataaaactataatccctgtaatctcactacccagtaataatcactgtcaacatcttaatccatttccttccagttgtatggttcataagctttactcatagaattgcttttaggacatattaaaaggagtgtcataggatcgtaaagtcgcagggaactgtaggtcatctgtacaacctcttatccaagaaggagtatcttccataatactgccttaaccgaacatacccaatatctggactctcatatttctcctgtttcaagatacttcctatgtcagaacagacctcttttaagggtggaatgttttttaattcttcaaatattcttcactgagagaaaagccgttctcttgacatttcaacagttgaccatcagaaacaatatctracatgtttataattttcatatattacaagtcctaattatttggatatgcatttccagtttctacttggttccttcttcgagtaaatgtttccctttcctcttctttgttcctgtatcctctttctggttttgaagccccagaatgcatagcagacattggata

SEQ ID NO: 741026 - DNA, 599 bp, Homo sapiens
ccattgcttgtttttgtcaggtttgtcaaaggtcagaagattgtagatgtgtggcattatttctgaggcctctgttctgttccattggtctctatatctgttttgctaccagtgccttgttgttttggttactgtagtcttgtagtgtattttgaagtcaggtagcatgatgcctccagctttgttcaatttgctgaggattttctggctatatgggctctttattgcttccacgtgaaatttaaagtagttttctctaattctgtggagaaagtcagtggtacctcgggatagcattgaatctataaattactttgggcagtctggccattttcacaatattgattcttcctatctaacygcatggaattatattccatttgtttgtgtcctctcttagttccttgagcagtggtttgtagttctccttgaagaggtttttcacatcccttgtaattgtattcctaggtattttattctctttgtagcaattgtgaatgggagttcactcacgatttggctgtctgtgtattattagtgtataggaattcttgaatttttgcacatcaattttgtatcctgagtctttgctggagttc

SEQ ID NO: 741027 - DNA, 558 bp, Homo sapiens
aatgtgtaattatccaatcagggtatttaggatatccatcaccttgaacatttatcatttctttctgttggaaacattttaaattttgctttctagctatttggaaatatagaatatattgttgctaattatagtcaccttactttgctaccaatttttagaacttattccttctgcctaacaktatgtttataccttaacccacctctcttcacactctgccttactctccagcctctagtaaacatcattctactctctacctccatgagatcaactttttaagctctcagttaactaagcagaagtctcataaggaaataagagacttgaaaaacatttttaaccaactagatgtagcatatatctatggagtacttcaccaaactgtagctgcagaacatataatctgaagtgcacagggaatgttttgtgagatggaccatatgctgaaccgtaatacaagcctcaatacacttaaaatgattgaaatataaagtatgttctcttctccaatcacaatgaaataaaattagaaatcaattaaaaaaggaaatt

SEQ ID NO: 741028 - DNA, 579 bp, Homo sapiens
aggaagataaccttaaggtctgactgcctgtggggtccagcagaatgaagccatagttttcttcttgcagaaagcgagtaggagaagtatcgctgaatttttttcccagcaaggaataaccctggggaaggaatgcatttccaggggtaggtctatggatggccactctgggagtgtctgtcttacgtggttgaagctaagggatgaaataagccctggtctcctgcagtaccttcaggcttactaggattgggaaattccagcctggtgaattctagtcagactggttgtctgctctggaatcctgtttcctgttaagatgtttatcaagacaatacatgcccagtgggacatggaacctcatccagtaattcttatttcaccctgaccttgtgatcttgctctgctcttctgccctcrtgatgttttattgccctttgaagcatgtgatctttgtgacttactccgtgttcatacccccctccccttttggaatccctaataaaaacttgctggttttgcacgcttaagaggccatcatggaacctaccaatagtgatgtcacccctggaggcccag

SEQ ID NO: 741029 - DNA, 427 bp, Homo sapiens
gtgtgtttccctgcactgcctgaagtggggtctaccgcacttgctcactactttgtctgtcagtggtgctgcagggtgtgtctctccagctcaatagagagggaaagacaaatgaaaccaaaacaccaaaaaacctaaagaaccacttgtatcacagcctgaatacaaaccrattttaaaccagatatacctagacaaatgatcaaaatcaaaacaaataagcacacatgagactaaaatcaagaagccctttatggccttagccaagttttccaaagaaggagcaaaagctgtaaccattccaaaattcagataactcccaatggtagtataaaggaagaaaaattttgctagcaacaaatgggatacaacccacatctctgtgtggtctcattttccaggaccccagtgtctcagctgaccatct

SEQ ID NO: 741030 - DNA, 684 bp, Homo sapiens
aaatgttctgaatttcagtatgaagactacattatccattttaataatagctgttatttaatagatgccaacgctctggaagtttaataaatacctacagtgtaataacagtcaccattttaattaataggcattcaatacacattgtgtcagctccacctagtagtactgcttgtagataacaaaattacgactcagagatgcacaatcatctagctaattaatacagaatcattatttgcacctggatctgattctagatcttgggattttaccttataattcttatatataaataacattccattggaatgtttattttaaaacagtgtaaacatttctagaacattactaatctttgggaacttaaactgaatatatatatcaaatagtattagataggtgttttaaccaaaaatactggcttcgtagttgttcagttagaactttaacattgccacttacaaatgatgggatcttaggaatttaagmcaaagttttggtgagtctcagttttctacatctgaaaagtttcttctcccacttacaaatgatgggatcttaggaattcaagccaaagttttggtgagtctcagttttcttcatttgaaaatgggaaaaaaataagatcatacatttgccattaggttgctgttaaaataattaaatgaagtaatatatgca

SEQ ID NO: 741031 - DNA, 552 bp, Homo sapiens
gccctgtctgcactcccaactctcagctatttttttttgctttttttttttttttgagaacagggtcccactctgttacccaggctggagtgcagtggcacaatcacagctcactgcagccttgacctcccaggctcaggtgatcctctcacctcagcctccccagtagctgggaccacaggtgtgcgccaccacrcccagctaattgttgtattatttaacatagggatctccctgtgttgctcagggtggtcttgaactcctgggctcaagcgatcctcccacctcagcctctcaaagtgctgggattacaggcttgagccactgtgcccggcccccaactctttcactccagtcctctctacttggcccccgtactgttactgccataaaaatgggcacaaacttggcaacttaaaacaacacaaatgcattatttcacatatcatcctggtcagaaatccaggatggctccgctggccctcagctctgggtttcacagggtgtcagccacccgagctctcattgggaggctctgggaagaagctgctt

SEQ ID NO: 741032 - DNA, 567 bp, Homo sapiens
acctatatatttttttttcaacttattttagaatcagagggcacatgtgcaggtttgttacaaaggtatattgcacaatgctgagggttggggccatgaatgatcccaacacccagggagtgatcatatactcggtagtttttcagctctttcatcccaccctcctccctctagtgctcccccgagtctactgtttccagcctttttttttttttttttttttttgagatggagtctcactttgccgcccaggctggagtgcaatggcatgatctcagctcactgcaaactccacctcccaggttcaagcgagtcttctgcctcagcctcttgagtagctgggatttacaggtgcacgtcaccatgcctggctaatttttttgtatttttagtaragacagtggggtggggggtggggggaaagtttcaccatgttggccaggctggtctcgaactcctgacctcaggtgatccacctgcctcggcctctcaaagtgctgggattacaggcgtgagcccactgtgcctggccaatattattcccatctttatgtccatgtgtaccca

SEQ ID NO: 741033 - DNA, 567 bp, Homo sapiens
acctatatatttttttttcaacttattttagaatcagagggcacatgtgcaggtttgttacaaaggtatattgcacaatgctgagggttggggccatgaatgatcccaacacccagggagtgatcatatactcggtagtttttcagctctttcatcccaccctcctccctctagtgctcccccgagtctactgtttccagcctttttttttttttttttttttttgagatggagtctcactttgccgcccaggctggagtgcaatggcatgatctcagctcactgcaaactccacctcccaggttcaagcgagtcttctgcctcagcctcttgagtagctgggatttacaggtgcacgtcaccatgcctggctaatttttttgtatttttagtagaracagtggggtggggggtggggggaaagtttcaccatgttggccaggctggtctcgaactcctgacctcaggtgatccacctgcctcggcctctcaaagtgctgggattacaggcgtgagcccactgtgcctggccaatattattcccatctttatgtccatgtgtaccca

SEQ ID NO: 741034 - DNA, 625 bp, Homo sapiens
aataataatgaataacagcagttgaatattgacagagcacttaagtgtaagatatgttcatttttaaattttatttatacatatattcaagcattatgtatatatgtatgtgtgtatatatgcatatatacatacatatgtatgtatgtgtatttaaattttacttacgtatatatacatatgtatacatatgtatgtagggtacatgtatatacgtgtatctgtttatttttatatatatagatagatagagagagagagattgagagagagaaagagagtcttgctctgttgcccaggctggagtgcagtggtgcaatcatagtacactgcagcctcaaattcctggtttaaataatctctcgcctcagcctcccgagcagctgrtactataggcatgcaccatcatgcctggctaattttaaaaaaaaattttttttttgtagagatggggacttgctttgttgctcaggctggccttgaactcctgggctcaaataatccttctgtcttggcctcccaaagtgttgggattacaggtgtgagctactgcattcagccctcaaatatgttatagatagaaacctaattaatcccctcaaccttctttctgagttcccatttc

SEQ ID NO: 741035 - DNA, 526 bp, Homo sapiens
ctaaacccataaccctacacgtggatcctgccccatcactcgtgtgtgtgtgtgtgtgtgtgtgtgtgtgtgtgtgtgtgtgtgtgtccatctctctgctcaatggtcactctgcttgtccatctatctcaggatggcctggagagcccagagaggtgataatgagtattarcttcctgggaagatggcccgctcagaaaagccatgcccagaagtctcagtctacctaccccactccccaggcatcacctccagagcatggtggaactatgacccaactccctgagaccacatgaatccataaccctacacttgggtcccaccccatcactcttgtggccccagcctgtacctcccaccagttctgttcagcctcagccttcgtgagctccacaatgtctccagggttgagccgtagaaagggtccaatggctccagggggtggaggaagcccgtagtattcctgaaacacctccatcttgggcagacctggaggacagggtacaggagtacagggtggttggca

SEQ ID NO: 741036 - DNA, 349 bp, Homo sapiens
attacctaattttggaagtgatgtatcatcacttttgctctattctgttgcttagaagcaagtcactaggtgtagcccatgttcacggggaggggatgagtaccaggcaatggggatgactgacaaccattttagaaggtgtctgctacaatatatgaagattcccggtgggyagtagctataatgaacaaatgtgaaaacctttgaaaagcagagctcactacaaaaataaaaggaatctactgaattatgtattagggtcaagaaattttaacaatcatatgacactattaatcagagatcagggccgggcacagtggctcatgcctgtcatctcagcacttagggg

SEQ ID NO: 741037 - DNA, 632 bp, Homo sapiens
agagctcagccctaggtttgaactctggcttctgaataaggtaaattacttcccaaagctttagcctctttatatgcaccatgagaataatgatagtacctatcccataaaatgattgtgatgttcaattaagataatacattaaaatgctgattattatttgacattggaaggcttgtgagaatttgatacagtaaatatgttcttttttccaaaaggccttaaaataatgtgttcttacattttttaaaacaattatagaatactctctcccttgggagatctcatttatactcaggtttcaattatatgcctgtgattcttttaatttgcattccttgttcttattctgttctacttgacatctctaaacatagctyaaaattaacatgtccaaatatgaactcatgatcttcaaaccaccccctactttaaaaataaagaaaaaaatctgttcttttgtccccattccttactttttgtaaatgacttcactaattgcagagacattagaattatttttggtaattccctccccatgtctacttcatcacctaatgtccattttaccttacaaatatcttttgaattcagccacttatgtcattatccaccgcactgtcccagggcaa

SEQ ID NO: 741038 - DNA, 612 bp, Homo sapiens
atatagtttcttgattaatgtctataaactataggatctatatctagtttttctctcagttgaataacctatgctcacaaagctggctggaacataataaatattgtcaaataagaaagagaaagtcatctgacttcgtaaaataatggcaatgttctggatctttagatagccaagaaaccttagaaatcattaaattatatataattgttttatagattagaaagcaacaggccgggtgcggtggctcacgcctgtaatcccagcactttgggaggctgaggcgggcggatcatgaggtcaggagatctagaccatcctggctaacacggtgaaaccccgtctctactaaaaatacaaaaaaattagycgggtgtggtggcaggcgcctgtagtcccaactactcgggaggctgaggcaggagagtggcttgaacccgggaggcgcagcttgcagtgagtggagttcgcgccactgcactccagcctgggcgacagagcaagactccgtctcaaaaacaaaaaacaaaagaaagcaacatttttgctgttgctgtcatttgtattaacttcgttaaattatgcttgtcttattgtacatcatctatcagt

SEQ ID NO: 741039 - DNA, 632 bp, Homo sapiens
gatcagaaacacagccattcaactggcaggatatacagtacttggaaagcagtattaccaagagactttgagatgatagtggtagcaaattatataaggtcttgtaatgcaatgtggcagtaaaatcagtcaatgagattttagtctgtatatgcaaaagcttcacatcatgtggctgaaagataaaagttatttaaatggtactgctgagatcacaaagagaatacaagtttggggcatgtacatgccccaaataagcaaatcaagtagtgttcagactagaaaataaatgtataatgatcttcagactttaatccttaaaatattaaaataacaaaatgtatattttttgctcatctctgagtatagttatgataacattttacaaatatttgtaagatacaaacattatggaagtcaagatatttttaaaggtaggataagagagtttatagtcaagtattgggatgaaattaagtaacagaaatttaakactgaatctgggaaatgttttctgacagtgaaatctattagtctctggaatggaatctcgagagaggtggggagaatttctattcctctagtcattggactagatcaagacttggatagcgtattatttgaagtaaaaa

SEQ ID NO: 741040 - DNA, 603 bp, Homo sapiens
  misc_feature 594, 595, 600, 601: n = A,T,C or G
cgtgtgcctataatcccagctactcaggagcctgagccagagaatcgcttgaacctgggagacagaggcttcagtgagctgacatcccagcactgcacttcaggctgagcaatgaagcaagactccatccagaaaaaaaaaagaaagaaaagaaaaaagaaaaatgggtgaatctcagtaacaacagcaagcattgtggcgttctaagtggccctctttttatctcctttttccctcttcattgtagccttaaaaaccaacagtctgcaaacaactgaataatagctacygaagaggggtaagaagttgggcctcctgaacttacctgttcccagagaaccatcattgttcaacgagtctgccatatccccacacccatcttcaaagtagtctttattatgtatgacttgaagcttacctaatgagaataaacttttccaatggtgcattttcaagaacaatcaaaggaaatagtttaagactgtgagtgcccaaggaaggaaatgatggttggagacaacaagaggttaaaggaaacacttaaaataaaaatcaaaaatctggtgaaatgagatgtctgtagagaacttcagnnaatgnnct

SEQ ID NO: 741041 - DNA, 647 bp, Homo sapiens
tctgcagtggctagaagttgaatttactcaaagactgcagaattagctttctccatgagtgaatgtaaagttagctatgtccattttagagtaattttgcatttcaaggtaaacaaaatgttcaaagtaaatcacatactaatactacaatgatatttaagagtgattctctattccactctcacgctccctaggcaaacagaattacctattttaaatgcacagtaatatttaccaagataagaggatagaaggagggggcgtggcctgataccaaaacaacatccaaagatcccctgtgtttagctgactgttatgtcctgtgtcgacgctggcaaggtcataaaactcgtggcataattcagtccttctaatcataaaatggaatgtttgacacagctgagttcatatttttaaaaagttactttgaagtgtctcctcttaatgtagacaagattgagaaaagaaagaaaaaaagtaaaggaagaagaggaaagaaagaaaaagcytaatgtgaaatgatatctactaagtccaaagaaaacaaccaggaaacagcacaacaaaaaacagaggcaaaagcaaagcgggaggttaatgcccctgggttttaaacacagagctatggcttagttatgcatttccag

SEQ ID NO: 741042 - DNA, 672 bp, Homo sapiens
taacctcaagtaaacggacaaatgaaacaagcttcctttctagtcaattattatgggttttgatgcttcctaacacattatacccttgatgtcaaaatcgagcttgagaatcagacatttgtacacatattgtcttycaagtcagtatgacctaggaggaatatgtctcctaagtcaaagtttacatgcttctctgcagggttttgctgagtagtagccaacagttacatgaataacagctctagtttattgtttattatatactaactgaagtgcatttattatatcaaggttaatagcttccagcccacagtcatattgtactttgtgtgctcactttgttctcaaagaacaaaagaactctctctttcaagcaaaagtttctgcgtcgtttttaaaattaaagaaactagttttgatcaaattagagaaggcacagtccttcataaaaaaaagaagctaaaatataaaactcatattagatcaattgaactcatagcttaaaacaatccttatttaagtcaattgtatgtttcatagtgattaaacaaataggatcaggattcagacatacccatattctaatccaagccaatgccaggaagcatccttcataaactttaacttccctaagattcaatttccaaaattacaaaatgaaaataatacagc

SEQ ID NO: 741043 - DNA, 529 bp, Homo sapiens
aacacttaccagaacaccactgacgtgtatggtcttgatttaatagagaagactttgactcctctcaatatccatattctaaagccctggaatataccagcataaataaaaccccacaccctgtttaccgcagcgggaccacgccgccatgcacacccgttgcccagggcaacaggacacactcacttttgaagcagctgggtccactagtctctggcgatgtcgggctgagttgaaatggctcttcggaggytgcccttcctgacagtgaatggaagatggggagtgaacgagaggtgggaagggagaaggtggggtgtgggatgatggagaaatggtcagaaaagggagagggacagtgtttaacggcactgtattttgttttagctaaacatcaataacaaaaacacaagacacgttctcccccacaaaagcacatgtgatgtgcaagttattttattataaacaaacttgtatgtgcaagtgtgtaataaagtcacaaacacaacccagtattaagatatttccc

SEQ ID NO: 741044 - DNA, 623 bp, Homo sapiens
agcgagactccgtctccacaaaaaaaaaaaaaagtaaattcggtgacgtaccttgtctgacagtaggtgacaatactcccatttcagaaggggtctaccccataccctggaagaaggaatgtcgtctaacctactttgattgyaggtcacaataccccctacttcagaggagatcctgccatataccctggaagaaggggccacagaaagcatgaagaattggagccttgctctgtttctccacttcgtctgttagatcatggcctttgtgtccagtcatgtttctgtctggttgttcgtcacaactatccagtgcctaagagcacagggttcagggaacttccagagagctgaacacggggaggttcctggagggtggctgacccaagaaggtcagggaagctctgagcccctttccccacacctcaccctatgcatctcttcatctgtatccttggtaacatcttttttattttttttaattttttttagacagtcttgctctgtcgcccaggctggagtgcagtggtgtaatctcggctcactgcaacctctgcttcctaggttcaagtgattgtcctgactcaacctcccaagtagctgggattactgtgctatcacgc

SEQ ID NO: 741045 - DNA, 573 bp, Homo sapiens
caacctgggaggcagaggttgcagtgagccaagattatgtattgcactccagcctgggcaacaagagcaaaactctgtctcaaaaagcaaaaacaaaacaaaacaaaaaaagcagagtctctgctctcctgtagggttggaggccgaccacaaacaagcgcccaaatgcctgagacaggaacagcactgggtggtcacaggaggatggaaaaacccaaacagctgaaacaggaactaggcaaataaaccataggataacagaaaacccaagggagagaagatggccaaaactctggccagggtgtgacatgtccatgcttcttccagcaaacccagatataggaagaaaggrgacagtaattgaggtggaggtccctgaaatcccctccctttccagaatgcctaacgataattccatcctgtaactaaaagaaacacccataaaattaggaacccaaactccattgtgcaagactcattctcacgggcatgcctgcacttctctcttaaatgtgtatgttcactttgcaataaaagcttcttgcagctcggtgcagtgtcttacaactgtaa

SEQ ID NO: 741046 - DNA, 573 bp, Homo sapiens
caacctgggaggcagaggttgcagtgagccaagattatgtattgcactccagcctgggcaacaagagcaaaactctgtctcaaaaagcaaaaacaaaacaaaacaaaaaaagcagagtctctgctctcctgtagggttggaggccgaccacaaacaagcgcccaaatgcctgagacaggaacagcactgggtggtcacaggaggatggaaaaacccaaacagctgaaacaggaactaggcaaataaaccataggataacagaaaacccaagggagagaagatggccaaaactctggccagggtgtgacatgtccatgcttcttccagcaaacccagatataggaagaaaggagrcagtaattgaggtggaggtccctgaaatcccctccctttccagaatgcctaacgataattccatcctgtaactaaaagaaacacccataaaattaggaacccaaactccattgtgcaagactcattctcacgggcatgcctgcacttctctcttaaatgtgtatgttcactttgcaataaaagcttcttgcagctcggtgcagtgtcttacaactgtaa

SEQ ID NO: 741047 - DNA, 427 bp, Homo sapiens
ttttgcatgattttaaatggaatatgcactgcataaatataatcctgctatgtactcctcttaatactttagtactaacgttgtaattttcacaataaccataagatgtggaaaatattatccccactttacagataagaaaatgaaggccaatcaaggttggagaattgccaaggtcttactgttaggaaagaacagaagcaggtttgaaccaagtgagcctgacaccagaacatctgcatgastatgccacactatttcaaatgctgttatactatcagtattcttatgccatcttctttttccctcagcattatgttttcaagattcaccatgttgatacatgtaaccctaattcattattttcactgctgtatggtatactgttcaataaatagaccacaggtaatttgttcattcttctatt

SEQ ID NO: 741048 - DNA, 614 bp, Homo sapiens
gtgtgcacgcgcgcatgtatgcacatgtgtttcattgtgactatgcatctggaggggtttgtgaatgtgctcccatgtcaacgtgcatgtaaatgacaacagctcacgttcactgagcttgccacatgctctatgttctcacctgaatccttctatttaatctccaccttattaaaagagaatattgtcgtccccacttacagatgaggaaactgcatgttagattagtttccacagtgggatgtgagctagactcctatgggcagaatgactttttgctcctagaattctaaatcatgcatcaactcttagcaggaaagagattttcacctttcctcaaggtcatgtggcagagataagaacccacttctttcctgtaaagcccttcaaaacattggctctgaaataaaagtgtaacattttctaawgcagtctattatcagacgacggccacaaacattaggaagatgcacgcagtccactccagagaaagaaaagtactctggtgctgcacagcattaaatggcatgtctcctgactcctctgctttctaataaaggaagcgatgactctgatctctgaagacacctgttctaaacccaccatgtgactta

SEQ ID NO: 741049 - DNA, 614 bp, Homo sapiens
gtgtgcacgcgcgcatgtatgcacatgtgtttcattgtgactatgcatctggaggggtttgtgaatgtgctcccatgtcaacgtgcatgtaaatgacaacagctcacgttcactgagcttgccacatgctctatgttctcacctgaatccttctatttaatctccaccttattaaaagagaatattgtcgtccccacttacagatgaggaaactgcatgttagattagtttccacagtgggatgtgagctagactcctatgggcagaatgactttttgctcctagaattctaaatcatgcatcaactcttagcaggaaagagattttcacctttcctcaaggtcatgtggcagagataagaacccacttctttcctgtaaagcccttcaaaacattggctctgaaataaaagtgtaacattttctaaagcagtctattatcagacgackgccacaaacattaggaagatgcacgcagtccactccagagaaagaaaagtactctggtgctgcacagcattaaatggcatgtctcctgactcctctgctttctaataaaggaagcgatgactctgatctctgaagacacctgttctaaacccaccatgtgactta

SEQ ID NO: 741050 - DNA, 641 bp, Homo sapiens
cgtctaaaaaaaaaaaaaaaaaaaaaaaaacgaactggatcactgttattaagagtggaggagggaacctccactcttaataacttccacttgtgtttagtgagtggcgttaataactccacttgtgtttgtggctgcaaacacaagccaaagcagcgcacaattgacatctgaagcccaatgaatgtgatcaaaacaaagcacttaaattttgtttggatttgctgccactagtacacatcgtaaaggcagattttcacactcatacaattttctgcattcttcagtatctgtcagcgtgttcaaatacttttaatacacaacttttaatacacaagacacactttggaaaactttttccgaagaaaatgatccaaagagcagaatgygagtcaataaacggagaaaggcaagcagcggttttccatcttctgcgccagtgtgctgtaaacttttaagtccggaaaactatgttttaaccgatgagataatgcctttcaaagtgattagcacgaccgggcgcgcggtggctgacgccagtaatcccagcacttttgagtggctgaggtgagcggatcaccctgaggtcagggtcgagaccagcctggccaaaatggcgaaaccccgtctctactaaaata

SEQ ID NO: 741051 - DNA, 608 bp, Homo sapiens
aaaggcgtttccaaaacatataaacatctagcagtgaggtgctatgatctcaagtattcatatatatccttttattaaatacgttttggggcaaaatttttctatttcttttgaatttttacttgagattttaaagtcatttagtgaaaaataaaagaccctcaagacaggcagaaatgcatgatagtgacacaggagttagagaaaagcacctctcccgaggggcccctcagtcaagctctcttaagtgctagttctctaaccttgggagtcagcctggactcctgtctctcatagccyacatccatccatcagcaaatccccttggctgcccctttgaaatgctgtaatcacttgactctgtcagtagcctcctgccagactccatggttccatcctttatctgctataatttgttttccacatagtacccacagtgatatgttacagacttgaattagatctgatcttggcctaatcagaactctccaaaatgccccttcaccctgggaacaaaagcacaacatcctgagtatgaagttacccaaagccctttatgacctggcctctacctgcctctcaaatctcattttctacgaatcccttcc

SEQ ID NO: 741052 - DNA, 653 bp, Homo sapiens
gacacggatcctgtatgctttgttcaccactgtgtttccagtactttaactgatactggcatgtggccaatgctcagtgaatatttcctgagtgaacaaaggaatagtctttagagaagtgagaaagcatgatacttgcctgtatcttttttttttttccccatacaaagtcttgcactgccacccaggctggagtacagtggtgtgatcatggcccactgcagccttgacttaccaggctcaaacaattctaccaacccagcctcccaaagtgctaggattacaggcatgagccactgtgcctggctgcctrtatctttaaaaattctgaggttctgattttctttagattactgatactgtatattattttatgctttaggttttgttgaaaccaaggtagctgaatttaacaaactatcactgttcccagaaataataaggcctgaacaattcttatttactactgcattactgataggatattgaatccttatttgtatatttatttttatataatggtcttaagatacaaatagcatcattaaagaaaatatatttgaaaataacatttttgaaaggaagaaaagtcactcccatcaccctaacatatccacatgcagacattgtatgcaattataattagggtgtac

SEQ ID NO: 741053 - DNA, 653 bp, Homo sapiens
gacacggatcctgtatgctttgttcaccactgtgtttccagtactttaactgatactggcatgtggccaatgctcagtgaatatttcctgagtgaacaaaggaatagtctttagagaagtgagaaagcatgatacttgcctgtatcttttttttttttccccatacaaagtcttgcactgccacccaggctggagtacagtggtgtgatcatggcccactgcagccttgacttaccaggctcaaacaattctaccaacccagcctcccaaagtgctaggattacaggcatgagccactgtgcctggctgcctgtatctttaaaaattctgaggttctgattttctttagattactgatactgtatattattttatgctttaggttttgttgaaaccaaggtagctgaatttaasaaactatcactgttcccagaaataataaggcctgaacaattcttatttactactgcattactgataggatattgaatccttatttgtatatttatttttatataatggtcttaagatacaaatagcatcattaaagaaaatatatttgaaaataacatttttgaaaggaagaaaagtcactcccatcaccctaacatatccacatgcagacattgtatgcaattataattagggtgtac

SEQ ID NO: 741054 - DNA, 589 bp, Homo sapiens
aaagggtaaaagctcaacacaggatccaggcaattaattatgggatgatgaccaggaaggcggtgtcttttctgccccaggcagacttttaaggtgtgccattaccccaaaagtccttttctgtgtcactaggctagactgcagactagactgagaagcggactcaggctagaagcagactcaggtcggcttccctcttccctccttccttcccatgctttytgcagtttccagtgcccctggctgcttaacagtttccattgatgcctcctccccagccttctctctctggcttgccatttggggttgatggatatggcaacctgatatgcaggatactctgggatattctgaacaaagaaaattggtaaatgattcaacgtggagctagtgttaatttttatttttattttttggtaaaaatgaacagattagaaaagtacgtagtttgttagacctcgtgttctaacttttaggtcagcaaatctaattgcactatgtatacgctgtacctgcctggccttccctttttcttacaacacagtccccctgggacttgcattagctttccctggaagctgttgataga

SEQ ID NO: 741055 - DNA, 589 bp, Homo sapiens
aaagggtaaaagctcaacacaggatccaggcaattaattatgggatgatgaccaggaaggcggtgtcttttctgccccaggcagacttttaaggtgtgccattaccccaaaagtccttttctgtgtcactaggctagactgcagactagactgagaagcggactcaggctagaagcagactcaggtcggcttccctcttccctccttccttcccatgctttctgcagtttccagtgcccctggctgcttaasagtttccattgatgcctcctccccagccttctctctctggcttgccatttggggttgatggatatggcaacctgatatgcaggatactctgggatattctgaacaaagaaaattggtaaatgattcaacgtggagctagtgttaatttttatttttattttttggtaaaaatgaacagattagaaaagtacgtagtttgttagacctcgtgttctaacttttaggtcagcaaatctaattgcactatgtatacgctgtacctgcctggccttccctttttcttacaacacagtccccctgggacttgcattagctttccctggaagctgttgataga

SEQ ID NO: 741056 - DNA, 639 bp, Homo sapiens
attccataaagaagccagaactcccctctcaagccatgtgcattctcaccgggcacttaattaatgctttacctaggaggtgtgattcttaacggtggggattaagacactggggcggtcagtagggacgtatttttggcagagacagctctggttttcttaggaagtcacatctgagaggcaaccgtctatgccatctgaggcgcctgtctactgggagcagtttaagacttaacagttycttttacctcttcctgcaagtgcctcacccaccccccaactgcttttagttttaattcatttttgtgttttaatcagagctgagtggtgggaatgaacagtcactgatggttataacaggaagtacctatgtgggcactattacctggaatacattcacactagaaacccgcaaaatttggcttttacactacagttattgctttagcagtgttcccgattatgtatcatctatacattcatcacataaggacatttccatcaaccactgtggtcccttaagattataatggagctgaaaaattcctaatacctactgatgtggtagccaaccaacacattaccttttctgtgtttagatacacaagtatcacggtgcttacaattgcctacagtatt

SEQ ID NO: 741057 - DNA, 618 bp, Homo sapiens
gattagaaataaatacctagacaggcagaaccaagataaagcaacaaactcaggcttagcaagagccaaaacctgaccaaaaggtaaaacatttcttccattgttggaatttcagcagtccatctgttgaatcagagaaagtcacctggggtgggaagaaaggtttaattccacttccgggttgagacctgggctgacactgtgctggtgccatcttgagagcaaagtgtgacctcacccatgaaaatgttcacrtgatatacgccaaggaactggatttccagagaatccactcccttttctgaaagtgaagcactctagctcctacagatgggctcacactcagctgatgtttgaagtgagaaactcataatgcaagctgacttccatgtaggttagaggtcaaggaggcacaggcctcggtggttgacaaatgtgtgaagtgagggctgtgaagaagcaacttgggagacacacagaaccataaaaccagagggggcctgaggtagacagaatcatggaacctgcaaagatgtccaaatattaattccccaaacctgcaaatatgttactttacatagcaaaagggactttgcggttatgattgagttaaggatc

SEQ ID NO: 741058 - DNA, 544 bp, Homo sapiens
tgtggatgcatttcattccaaacctctctatagctggaaaccaatggatgattagcagcatatatggccgttgggagtatcttagtcctggggatggaaacagagaatagatgtccccaactacaatggactaaggatactagaagtttctaggagttatggaaaccccagggacacttgcataagatctgagccattggcctggccttgtgagccaactgcaaaaggcttaggctgtacccaaaggaagaatggctcaaaggactgcatactgtaaccaaggctgtcttaggccaactctgcaagaggactatggaaactggggtgcctagaaggagcagggctgggaaycctcctcctctgaccctttagcaatcccttaccaggggacttggtgagcagccgggtgagtaagcagagagtagcacaccctgaagcccatggcgaggacagagagagaactgtgatgtgagtagctgatgcctgtccagacgcctggggtctgcaagtgtgtttggcatgcaggaataaagaagtgtacatc

SEQ ID NO: 741059 - DNA, 509 bp, Homo sapiens
aatgctccaggaatgtatcagctgtaagcctttagctgctgcaccaaatatatgctggggataggtgtgcctgctggtaaagaaatcggacagggcatcctctccaacggcatctaccatgcctggttttcaggacgtatccctagtcccacacaggaaatatgctcagctagcactgatggttttctgaccagagtgggtccttyttttgaatagaaatttgctttataaaatttgttcaagtctttatccagttgctcataagcaagaacagcccttgggagggaagtgtagtgacaggaagtgtttctgctgagtgaggggctctgtgtgctttggcagagcctcacttttgggttttcccctcagcctgcacttagatccccaggtcttcatgagtcttagaggtgccaggtctgcgatttcaagtcaggagcttaggaattagtactgctgcagcactggaggtctgagcctatcagaatctctgtcaggagggcgaaggtggt

SEQ ID NO: 741060 - DNA, 553 bp, Homo sapiens
ttggcgtaactgcagggaccacctcccgggttgagggggctggatctccaggctgcggattaagcccctcccgtcggcgttaatttcaaactgcgcgaccgtttctcacctgccttgcgccaaggcagggggcgggaccctattccaagaggtagtaactagcaggactctagccttccgcaattcattgagcgcatttacggaagtaacgtcgggtactgtctctggccgcaagggtgggaggagtacgcatttggcgtaaggtggggcgtagagccttcccgccattggcggcggatagggcgtttacgcgacggcctgacgtagcggaagacgcgttagtgggggggaaggttytagaaaagcggcggcagcggctctagcggcagtagcagcagcgccgggtcccgtgcggaggtgctcctcgcagagttgtttctcgagcagcggcagttctcactacagcgccaggacgagtccggttcgtgttcgtccgcggagatctctctcatctcgctcggctgcgggaaatcgggctgaagcgactgagtcc

SEQ ID NO: 741061 - DNA, 553 bp, Homo sapiens
ttggcgtaactgcagggaccacctcccgggttgagggggctggatctccaggctgcggattaagcccctcccgtcggcgttaatttcaaactgcgcgaccgtttctcacctgccttgcgccaaggcagggggcgggaccctattccaagaggtagtaactagcaggactctagccttccgcaattcattgagcgcatttacggaagtaacgtcgggtactgtctctggccgcaagggtgggaggagtacgcatttggcgtaaggtggggcgtagagccttcccgccattggcggcggatagggcgtttacgcgacggcctgacgtagcggaagacgcgttagtgggggggaaggttctagaaaarcggcggcagcggctctagcggcagtagcagcagcgccgggtcccgtgcggaggtgctcctcgcagagttgtttctcgagcagcggcagttctcactacagcgccaggacgagtccggttcgtgttcgtccgcggagatctctctcatctcgctcggctgcgggaaatcgggctgaagcgactgagtcc

SEQ ID NO: 741062 - DNA, 633 bp, Homo sapiens
atgccattaagaacatttgtgggaggaagtaaaaatgacaacattcacaggagtttggaataagttgattccaatgctcatggatgacttggaagggctcaagaccagtgaggaagtcactgcagatgtggtggaaatagcaagagaactagaattagaaatggagtctggagatgtgattgaattgctgcaatctcatgatcaaacttgaatggatgtgcagttccttcttatggatgagcaaagaaagtggtgttttgagaaaccaggaatgtactcctggtgaaggtgctgtgaatattgctgaaatgacaacaaaggatttagaatattccatcaacatgataaagcagtggcaaggtttgaaagaactgactcctattaaraaaaaaaaattcttccttcttgaggatttctaactggtatgaaaaaaaattaaaagaaaaatatgaacaaaaagttattaaaatatagtaaaaaagaaaaaattctattgtggtaatatgctaacacacagcattgcatgctacagataaatctttcataaaagagtcaatgtggtgaacttcactgttgtcttattttaagaaatttccacagccacccagcctttagcaaccatcaccctgatca

SEQ ID NO: 741063 - DNA, 576 bp, Homo sapiens
tgtcacacacctttaaacaaccagatctcacaataactcactcactatcatgagaacagcactggggggatggtgccaaaccattcatcagaactatgcccacatgatccagtcacctcccaccaggccccacctctaatacgggggattacaattcgacatgagatttggtggggacacagatccaaactgtatcagcaaactattgtgggcatttcagtgaatattagaatacaggccagccacagtggctcatgcctataatcccagtactttgggagrccaaggcaggaggatcctttgagcccaggggtttgagaccagcttgggcaacatggtgaaattctgtctctacagaaaaatacaaaaattagccgtgtgtggtggcatgcatctgcagtcccagctgctcaggaggctgaggtgggagattgcttgagcccagaagatggaggttgcattgagccatgatcgtgtcactgcactccagcctgggtgacacagcaagattctgtctcaaaattagtaaataagtaaaaaataaaaaaagaatgcagccatatatatatatatata

SEQ ID NO: 741064 - DNA, 570 bp, Homo sapiens
catactgccaaaagcaatctacaaatttaacacaatccccaccaaaataccaccatcgttcttcacatagttagaaaaaacaattctaaaattcacatggaaccaaaaaagagcccgcatagccaaagcaagactaagcaaaaagaacaaatgaggcatcacactacctgatttcaaactatactataaggccatagtcaaccaaaacagcatggtactggtataaaaataggcacatagaccaayggaacagaatagagaatccagaaataaaccaaaacacttacagccaactgatctttgacaaagcaaacaaaaacataaagtagggaaaggacacccttttcaacaaatggtgctaggataattggcaagccacatgtaggataatgaaactggattgtcatctctcaccttatacacaaatcaactcaagatggattaaggacttaaactaagacctgaaactataaaaattctagaagataacattggaaaaacccttctagacattggcttaggcaaggatttcatgaccaagaacccaaaagcaaatgcaataaaaacaaa

SEQ ID NO: 741065 - DNA, 616 bp, Homo sapiens
tactgccaaaagcaatctacaaatttaacacaatccccaccaaaataccaccatcgttcttcacatagttagaaaaaacaattctaaaattcacatggaaccaaaaaagagcccgcatagccaaagcaagactaagcaaaaagaacaaatgaggcatcacactacctgatttcaaactatactataaggccatagtcaaccaaaacagcatggtactggtataaaaataggcacatagaccaacggaacagaatagagaatccagaaataaaccaaaacacttacagccaactgatctttgacaaagcaaacaaaaacataaagtagggaaaggacacccttttcaacaaatggtgctaggataattggcaagmcacatgtaggataatgaaactggattgtcatctctcaccttatacacaaatcaactcaagatggattaaggacttaaactaagacctgaaactataaaaattctagaagataacattggaaaaacccttctagacattggcttaggcaaggatttcatgaccaagaacccaaaagcaaatgcaataaaaacaaagataaacagctgggacctaattaaactaaagagcttttgcacgccaaa

SEQ ID NO: 741066 - DNA, 618 bp, Homo sapiens
aaacccttctagacattggcttaggcaaggatttcatgaccaagaacccaaaagcaaatgcaataaaaacaaagataaacagctgggacctaattaaactaaagagcttttgcacgccaaaatgaacagtcagcagagtaaacagagaacccacaaagtgggagaaaatcttcacaatctatacatctgacaaaggactaatattcagaatctataataaactcaaacaaatcagtaagaaaaaaataaacaatcccatcaataagtgggctaaggacatgaaaagacaattctcaaaagaagatatacaaatggccaacaaacatgaaaaaatgttcaacatcactaatratcagggaaatgcaaatcaaaaccataatgcaataccaccttactcctgcaagaatgaacataatcaaaaaatcagaaaacagtggatgcttgcatggatgcggtgaaaagggaacaattctacattgctgatgggaatgtaaactagtacagctgctatggaaaagagtgtggagattccttaaagaactaaaagtagaactaccatttgatccagcaatcccattactgggtatctacccagaggaaaataagtcataattcaaa

SEQ ID NO: 741067 - DNA, 605 bp, Homo sapiens
cataaggtgcgcgaaacctggatccctcccataagcagttcacaatagggtttgccctcgtatgagaatctaatgctgcagctgatctgacaggaagtagagctcaggctgtaaacaaacttgcccgctgctcacctcctcttgtgtggcctggttcctaacaggccacggactggtaccgtccgcggccctcgggttggggacccctgctttgagacagcttcatcttttccattacaactactttactcatttgtgttgataagtctgcctttacaaagttcctctggttatatatccagggtctttcacatggcaacaatgtcaacattccctcagtctactatttctcctataactccatttatgttcaatttgcatttcatttccagcattaccacttttcatttctttgctgcacttcatctttttggccaattttttcttwcaaatatctgtttttttcagaatgtcacatgggattgttactgggagccaaggagttaacactaactgtggtaggagttaataagaaattattttaggcagatagagaggaaaaaagggttattggaaggttttttcgcagctcttgtctagcatga

SEQ ID NO: 741068 - DNA, 604 bp, Homo sapiens
ttcagcaatacacttctagaacaagcagtactcatgctgctgaaggatgaggctggacatcatcctgaaatcaaatagactcatctaaatagcctactcctattggcaaaccggcccaattccatatttcttaaactaaaatgaaaatcatttaacttccttttmcaacttgaaatgctgagaccaagtacatgtggatgagtaagaagacagaaaaaaaaaatactggaatcacaacttgaatgaaaacttgttttaagaattgcctattttgtaccagatgttctgtcaggtactttgaatttctttttaaatttattatcttagcaagccagtgaagtgagtattatttttcccattttacagataaagacatagtctgagagaaagttggtggcttcctaaaagtcacacacctagtaaatgtcagaatcagaactcaggtcattctgaaggttctttccactacatcaccctcctctcacattttagatactgagtaataaacatttaatattaaatcacagaagaataccacagacatttgagtaagaagagcattatttcatataaatatggcccttctcctcagtacacctagatg

SEQ ID NO: 741069 - DNA, 604 bp, Homo sapiens
ttcagcaatacacttctagaacaagcagtactcatgctgctgaaggatgaggctggacatcatcctgaaatcaaatagactcatctaaatagcctactcctattggcaaaccggcccaattccatatttcttaaactaaaatgaaaatcatttaacttccttttccaacttgaaatgctgagaccaagtacatgtggatgartaagaagacagaaaaaaaaaatactggaatcacaacttgaatgaaaacttgttttaagaattgcctattttgtaccagatgttctgtcaggtactttgaatttctttttaaatttattatcttagcaagccagtgaagtgagtattatttttcccattttacagataaagacatagtctgagagaaagttggtggcttcctaaaagtcacacacctagtaaatgtcagaatcagaactcaggtcattctgaaggttctttccactacatcaccctcctctcacattttagatactgagtaataaacatttaatattaaatcacagaagaataccacagacatttgagtaagaagagcattatttcatataaatatggcccttctcctcagtacacctagatg

SEQ ID NO: 741070 - DNA, 506 bp, Homo sapiens
ttgtttatttactgagtagataaacaaaaatattaatattaattactcctgaataaaggaattatgagtgatttttagttttggctttgtgttttctatattttataaattttctgtgatgaatatgtattactttgtaatcatattatttcaagtattaaaaactattttagaaaccaagaattttaagcacatttatattttctgtgtttataattagaatcctaaaattctgtagttgaaagggatcacagggatattctggtacaaactcaagatcgaaagtttggcctctagaaatttaagacataatttacacaatcaattaggctttgtaatcaataaagtarattacatggcctcttcagttcttaaaatggttctatttgggctacttgtgtgtgtgtgtgtttaacaaaagaggataaactactaatttgatacaaataagttctcttctactttaagaaacataggaaacagttctttactttcaaaagtaggtc

SEQ ID NO: 741071 - DNA, 579 bp, Homo sapiens
aaagtattggtggttccattattattcctaatgacctactcacataacttttgtttccaacctcacaatgttgtgctcttagtttccatggaaggaatactttttccaggaaacactagaagggttcctttgaatggaagctgagactgccacatcagccactttgaggtcttcaaggcactgaaccaacaaggaaagaaagggattactgtattcrctgggacaattaatcctaatcataaagtgggaaaagtggtggtactacaaaacagagggaagaccatgtctcaaaggcaagacattctctgagcaactcctttcatatccatatctgagcaattccttccatatccatggtaaaatttacaagattagagcaaaccaagccaagcaagaaccacaatggttcagatatttcaggaatgaaggttcaggtcactctgactgataaataataacacctagctaaaatgataactgagcaaagggagcatgggaagggaagtggaagagggagttacaaatacctactatggcctcataaattgtgtagactgcaaccatcgtgcatattttcta

SEQ ID NO: 741072 - DNA, 303 bp, Homo sapiens
catttgactctaatgtatgcccaaggttcagaagctctggtataatatattataaagaaaataggcttcggagtctcaaacctaggcttgaagtcaagatccgtaacttgctcgctgtgtgacttcaacaagcaaggtacttaattgttttaagagtgagaaaraaaagaaaccttctctgaggaatgtaagcctcctctaaattatcaggcccaaagaggcatgggagtaaggcagcagtgacatcccactttccctgcttgagctcatcacctcttgaagcttcttgctatgtggactcta

SEQ ID NO: 741073 - DNA, 658 bp, Homo sapiens
ggaagttcctcctctaaaacctgaaacaccacctattatgggaacttgttaccactgatctcagctcaggagaaaaaaatagctcttttgttcttgaaaatgtctttgtatctatctagtaatctctgtattttctgagtgtaaaaatactaatatctttcaagtgcacgaagctcccaaagagattatccctgaaaagaargtgtcggtggtgcctcctaaaaagcctgaagtcccacctgttaaaggtatttgtcactgactttaggcttcagaagacctaattcttctgctcttgacaatatttttttctagcggtcttcataacacctaaatgtaatttcactaatatctttcaagtgccagaagcttccaaagaggttatccgcgaagagaaagtgcccttggctcctcctaaagagcctgaagtcccacctgttaaaggtagttgccactgaccttaggcttcagatctcattcttttgctcttgaagatattttttccagtggtcttcataacttctgaatgtaattttgctaatatcttttaagtaccagagcctcccaaagaagtagttcctgaaaagaaagcgccagtggctcctcctaaagagcctgaagtcccacctgttaaaggtatttgtcactgattttaggc

SEQ ID NO: 741074 - DNA, 570 bp, Homo sapiens
tccaaatcaccttttcacaatttaaataaattagtctcttctgtgtaaaataaacataggcttcttctgcttcttaccatgatgatacacatgcactttgttcctaattcagagtgaaaggtctcactaataagaaaaaatacagattccgtgtgttggctgaaaatcttgctggacctggaaaaccaagcaaatcaactgaaccaatcttaataaaggatcccataggtattatttatataatttttgtggttatttcgaagttcatatgaactcctttttgacaaacctaaacaatgatttcattggcttgcagatcctccatggccccctggaaaaccaactgtaaaagatgtaggcaaaacatcagtaaggttgaattggacaaaaccagaacaygatggaggtgcaaagattgagtcttatgtcattgaaatgctgaagactggaacagatgagtgggtcagagtggcggaaggggttcccaccactcagcacttgctcccagggctcatggaaggacaggaatactcattccgagttagagctgtgaataaggctggggaaagt

SEQ ID NO: 741075 - DNA, 534 bp, Homo sapiens
tggcaaagaagttaaagcaagtgatagattaacaatgaagaatgatcacatctctgcacaccttgaagttcccaagagtgtccgtgcagatgccggaatttataccattacactggagaataagctcggctcagcaacagcctcaatcaatgtcaaagtcataggtaatcattctttgaagaaaaaccagacattcttcacatgtagaggaaattagttaactttgcagtgctattaataatataattggcttcatgaactggccacttgtaaactaaatgtcacttctgattatgtctttccataggagaagtraaacaattctaaagagatgaaatcgctaaacgcttattagactaatttatactagttttagttaattgcatgtgaaatactaatttaaataacagatattagcatacccaaagagcattgaaatgaccacaattttttaattgcacagcttcacattttcccatagtgttcttaaccagggatagtaacattttctgcattccccccagccctgcaaat

SEQ ID NO: 741076 - DNA, 605 bp, Homo sapiens
ttcattctcatgcttgttatgctctctcctacttttgacaacactgactgtaatgtttgcttagatgtgatccttgcttggtttccaaatactgtattacaatgacatcctaatgaccttttccccagttaaatcttcccactcattccatcctgaaggccacccagtgagaaccatattcactaaatcattttttcccactaggtccactccacaacagatttcttctaaatccctccactgctaaaagcttagactccccaggttgtttcttttcagcagtgatttccaatctcactggatattgtayacagtcatttttattcagctgtctaacttgccaatgaattccctttctctgcaactctggccagtaagcctgtagaaacccatgcctcaaagaactggtgggccatgaagtgtcttaagacgaattgagtcttccctactcctgggatgttacttaagcagcagtcaccatcccacataatttaaaaacagcacaatgtatgtaattacttcctctcagactggggagactctatggaactaaactttcctctctccaagttcattattaagtctttccattttctgtaatcaag

SEQ ID NO: 741077 - DNA, 646 bp, Homo sapiens
ctccatgagctttcagaatgggatgcctaatatcaacactaacattgctctgggacaaggggacagtagagaatatttgtctctctattttccccaaactcccctctcccaaatcctgcccaagatactgaaaactggaaatgcttcttattgatcatgtgaccacttagaaaatttggaaacgtaaatgagatcttgttaaatacctaggcatctcaaaaaaaaaaagtgctactggtgcagggagggtattcattaaaagagtccttctaggcttttaaaaccaattagaattttctctgggtttgttatatagaaggagaaggaaatgtgttcaccttctagaaaaataataattctttcagactcttgcytttatggtttatgaaggagatattttctccagctttcttgaggcataaatggcaaataaaaatatatatatttaatgtatgcactgtgattttttgatgcacattgcaaaataattgccacaatcaagttaattaacacatctagcatttcatgtagttaccattttctgtgtgtctttgcgatgagaatgcttagggtctattttcagagaaccaactttcagttaacaaaacgaataaatcctggggatctaatgtacagcatggtaatt

SEQ ID NO: 741078 - DNA, 561 bp, Homo sapiens
aaccatcttttactattttagttgcttcctaaagtatttgcctctatatttctaaattgtgtttctttttttctattttatataatatctatttttttctactataggcaatgcaaatttagctccctaaactatgcttcatacaggtattttccttcctcatcttggaacacagttttattacttctgaataaatcagtatatcatgtttttattatgactgtaactatgattcatcattgagtcaaatagtgtattatgattgcatttccctgtcttagttcatttgcgctgctataacaaaatatcataaactgggtaatttataaacaacagaaatktatttctcacagttctggaggatcagaagtccaagatcaaggtgctggcagattggatgtctggtgaaggcctgcctgcctcctggttcgtagacagctcttttcactataacctcatattgtgcaagagacaaggggtctctcttgagcctcttttataagggcactcatctcattcatgagggctctgcccccatgccattttcattcccaaagaccc

SEQ ID NO: 741079 - DNA, 626 bp, Homo sapiens
accaagcaagcaatcaattctgcagcagacaccagctgggtgtcctccaattcaaacctgacactacctacctggagataacatcagatcctgcaggtggatggctccatccccaaggttccctccccttcagacaccagtcgcaagtctgtgcctccagaacttctgactgactggcttcaagttggggctcccaggacttcctctctgggttttattaatttgctagagtggcttayagaactcagggaaacacgtagatttgctggcttattataaaggatattacaaaggatacagataaagagatgtgtaagccgacgtatgaggaaagggcgtggagcttccatgccctccctgggtgcaccactctccacaaacctccacgtgttcagctatccagaatttctccaaaccctatcctcttgagcctttaatggagtcttaattggatacgcataattgaagcatggacaatggtgccaaaatgtgactggaaaaaaggatgtgatctggtgttagtttgagtgaggaaacccagcaaggcttgtctgtttagattcttcttggcttctttgcagcattttttccaccagggtagggggcaggatcccttctggaatgag

SEQ ID NO: 741080 - DNA, 500 bp, Homo sapiens
aaggatccacttccaagttcactcatgtggtgattggcaggattagttcctcaagggctgttagattcagaacctcagttcccagctccctgtggacaggagaccaaccttagttccttgacatgtagacagttccatagcaccttccttcatcaaagtacacaaagccaagaagttacagagggagtgccaataagatagaggtcacaccttcttttctaacaatctaggaggcgacattccatcatttttgccatgttctgttaygaacaagttactaggtccaacccaccagcatgaatatcaggcggcaaagattattggagccacgtcagaatctgcctatcttgtcattaaagtacaataaactgtgatatgaattgggggctccaacatttttttcttgcacatcctgaaacagcctgtgtcttatttgctatctttatcataaggaaagtaaatggttttctgggagtctagctcaataaacatttattgaa

SEQ ID NO: 741081 - DNA, 319 bp, Homo sapiens
catatcaatgggctctcaaaactggttgcatcttaaaatcacctaacagctttaaaatcaggtttttgggatccaatcctagaaattctaattcaatagatgctaggaaatatctttttgaaaagatcgttaggtaattctgggaaacagcctgctttgggaaccactgctatatatatmaattaagttttggactcttactaaaatcccctgccaccctttaatttttatcacccagacggtatccatacactgtattacagagacagagcctagactaggatgatggtctcaaggacaagttattttttattccaac

SEQ ID NO: 741082 - DNA, 654 bp, Homo sapiens
ctcagtttgttggcaaaatgcacatctgctacaggacagggacaactgctgattaaaggagacttcagtggccctagtctttaagagcaagttgactgatggcaaagttttcgaagattatatctaaagtccagtgtcccttttatcaccacctcccgtgggtaatgattgaacataattagcattattttatatgctcgaatccttctcccattactgttaactgtctttctatcgcagtttattggattgccactgawctcaatttcactttgggcattcaagtgaggctgaaatttctccctctttctagttaaaatatgtgacatcatcagaagttggaggaaatcaggcatttataatgaatatgagattgtagagctcccaatgtaattaagattcttttgtcaaaatttatctaaattcaccagatatgaaagactaccacacacacttcctttagtttaccaatataatcctagtacaggtgagttgttgtttaggcttatagtagcatatgctgttttaggaaactttttgcaaagaaatgggggagagggagtacatttcaaaattgttttgaacattaggtagtacaaaatatttctaaaaataaagagaagctttttggattttagaaatgttgcttaatga

SEQ ID NO: 741083 - DNA, 654 bp, Homo sapiens
ctcagtttgttggcaaaatgcacatctgctacaggacagggacaactgctgattaaaggagacttcagtggccctagtctttaagagcaagttgactgatggcaaagttttcgaagattatatctaaagtccagtgtcccttttatcaccacctcccgtgggtaatgattgaacataattagcattattttatatgctcgaatccttctcccattactgttaactgtctttctatcgcagtttattggattgccactgaactcaatttcacyttgggcattcaagtgaggctgaaatttctccctctttctagttaaaatatgtgacatcatcagaagttggaggaaatcaggcatttataatgaatatgagattgtagagctcccaatgtaattaagattcttttgtcaaaatttatctaaattcaccagatatgaaagactaccacacacacttcctttagtttaccaatataatcctagtacaggtgagttgttgtttaggcttatagtagcatatgctgttttaggaaactttttgcaaagaaatgggggagagggagtacatttcaaaattgttttgaacattaggtagtacaaaatatttctaaaaataaagagaagctttttggattttagaaatgttgcttaatga

SEQ ID NO: 741084 - DNA, 654 bp, Homo sapiens
ctcagtttgttggcaaaatgcacatctgctacaggacagggacaactgctgattaaaggagacttcagtggccctagtctttaagagcaagttgactgatggcaaagttttcgaagattatatctaaagtccagtgtcccttttatcaccacctcccgtgggtaatgattgaacataattagcattattttatatgctcgaatccttctcccattactgttaactgtctttctatcgcagtttattggattgccactgaactcaatttcactttgggcattcaagtgaggctgaaatttctccctctttctagttaaaatatgtgacatcatcagaagttggaggaaatcaggcatttataatgaatatgagattgtagagctcccaatgtaattaagattcttttgtcaaaatttatctaaattcaccakatatgaaagactaccacacacacttcctttagtttaccaatataatcctagtacaggtgagttgttgtttaggcttatagtagcatatgctgttttaggaaactttttgcaaagaaatgggggagagggagtacatttcaaaattgttttgaacattaggtagtacaaaatatttctaaaaataaagagaagctttttggattttagaaatgttgcttaatga

SEQ ID NO: 741085 - DNA, 601 bp, Homo sapiens
aatcccttgaaggggttccaggtttgtgatccaatgacctaagccaactagcataacctattggttcagcgatgggcacattacccaactcaagccaaaagagaggcagtgaaatccatgaagcttctggagcaatcaggaatggtgttttctcttctcctgcacaatgtgatatgaaggtgcaaaatctggaaatgctctcatcactttgactagcctgagaagagccagattaagcaataagtaacagagaacaaagttgaaagaatcacagagatatagagcctatggatatcctgagactctgggtcaattctcatctgaagtcagacctacttcaggaactctgttgtcttagccaattccatttgggtttaaacaactggagttctttttctggcccttgcattggaaacactcatgttgtaaagcccactcattgagtatataaaggacaatayagataccacacaaaatattagtttcatattttcccacccttgcctccaggaaaaattttcagtgcatagatttatctagcagggaatagatagggcttacagtggatgcagtgttaatggctctgcccagatcccaatct

SEQ ID NO: 741086 - DNA, 417 bp, Homo sapiens
cttctggtataatccatgggttttagtaatcgaatggtgcaatagcatcagggccaaaagcaggtggatacaaaaccaacaccaaaaccagtcactccatgactcagttgacacagggtgagtaatgatcagcaaacatagaccggagtgtctactcgaggcaggaagccaataacygcttgggaactttgtctttgaccaaagaggttccactgacgctctttctaaactcactggagagcctggagtaatgtttctagtcatgcaggtttctgggtcacaccgacctgagctgggatcccaatgctcccagtcacttcctccaacactttgtaccagtgacaaagtctctaatcatctgagtcaaaatgcctctttcatagggttaccgtgaggattcagtatttgtctggagaa

SEQ ID NO: 741087 - DNA, 646 bp, Homo sapiens
ttgagaaatgttgattaaaacgatcatgaacttttaataatgccactcacctccttttttcgtcctctttcagctgctgaaaactttgtagctctagtggaggagctgtttgttgcagatgaactggaagtaaaattctaacagcctgtattgcttcggtatagaaatgaagagttgctatgctacccrgtttctctttctcagttttcttactgctgccagataggaactcagaaatatagaccattctgcttccagacaataagttccatatttgaaaccctttgatggcacttactggatacctaattcatgacaaaagtgctttagtcctctagagttttctggtttaaaagtagcttttgtgggtgtgtatcaaataagtgcagcagcatattttgtgactcttaagtttttttaggttatcatgccccaggcattgaaactgggatgtgcattttactgttctcaaaggaattttgtggtttattagcacgttttttttttcaaataatctaattttacttcagaaatctcttagtgcattgtgttgtttgtaaactagtgaaaaataatcttttcttttcatgtgttgcctgagatataaccacatttagaaatcatctataacttccctgataggaat

SEQ ID NO: 741088 - DNA, 607 bp, Homo sapiens
acactgctgccagtctagaaactacagaaagccaaaagatcttactgaaggcaaacttaacatcatgaggaaagtgcctgtgacaaagaagatgaagatatcccagaggaagtgatgcccacaaaaaacttcagattaaagacacttttggggccaggcatggtggctcacttctgtaatcccagcactttgggaggtcgaggtgggcggatcacaaggtcagcagttcgagaccagcttgaccaacatggcaaaaccccttttctactaaaaatacaaaaattagccaggtgtggtggtgggygcctgtaatcccagctactccggaggctgaggcaggaaaattgcttgaacccaggaggcagaggttgtagtgagctgagatcgtgccattgcaccccagcctgggtgacaagagcaagactctgtcaaaaaaaaaaaaaaaaaagaaacttttggaaatatttcatgacattgaaagtataaaggataaaatgttggaagctgatcgaaacatagaaaggagtacaataatttaacaaggtacagaaaaaaatgcttgctctatatcataaggtatacaatgagaaggcaagcactaatcgaa

SEQ ID NO: 741089 - DNA, 614 bp, Homo sapiens
aagtgatttgtctaagatcacattaaatagtgatggtaatatgggatcctaagttgttgctgtctttgtttttttttttaaataggtaaatttgttttaaaatttaaaaacgttaaaatgcaataaaatttactgtttttggtgtacaggtctatgagtttggacaaatatgtaatcktgtaaccaccatcacaatgaacatactaaagggttccattgtctctgaaaatgccttcagtctgctcttttgtagtcagccttttccctagctctaatccttggcaacctctgatcttttctctgtccctgtttttttgctttttccagaatgtcatataaatggaattatatggtatatagtgttttacatctgtcatctttgactttacatagtgcatttgtgattcacccatgttgttgtgtgtatcaatagttcatttttactggagagtggtattctgttgtatgaatgtgccacaattagttttgttccatccattcaccagtttaaggacatatgcattttttatttatgaataaagctactgtaaatattcatgtacaggtgcttttgtgaaacaaatactcattccttttaggcaaataactaagag

SEQ ID NO: 741090 - DNA, 649 bp, Homo sapiens
gtagaatgtgggttctatcaaagtgagattgttagagcctatgtttcctagatttggaggcttcctatttcttggtttacaccatagacagaaggaattcctaggacaggccaaggggtgagtacaggggcagatttctagggggcataatcatggggaaaaatagattatctgataggtttgactataagaaaaatggtatttagaaatggctttagagccattggaatgtgggggaagattaaaccagagagtagaagagaacaatcaagtacatgcaaatcaacattagaaaaaggaaaaggtatcacagagaggaaatatagtcagagtataataccttaatcagcaagcaatatytacttagtcattataactacaattatggatatcaccccacattatgtttcaaccatattggggactggggtgggggggtgaagtgggtatgaggtgaaagttcttatactgtgtaggataccagtatatcagtatagacacacgtgatttagaagcatggcgctaaatgccagaagcagcagctaaaccaatttaacatggttgcatctgggactgagagaaccttgatggtagtgtaaccagcagaagggtggccacaggactgctgtgtttcgagtctttttgcacc

SEQ ID NO: 741091 - DNA, 661 bp, Homo sapiens
ctccttaattaccttaataattgaccttctgaattctttttctgacaattcagagatttcttcttggtttggatccattgctggtgagctagtgtgaacttttgggggtgttaaagaactttgttttgccatattaccaggattgtttttctgggtaagctacgtcagagggaggatctgggacactaaggggctgctgttcagatttttttgtaccacagggtgctcccttgatgtggtgctctcccccttcccctagtgatggggattcctgagagccaaactgcagtgagggttatttctcttctgaatctagtcwcctagcagagctaccaggctctgggctggtactggggagtgtctacgaagagtcctgtgatgtgatctgttttcaagtctctcagctgtgaataccagcacctgctcttgtgggtgtagcaggggagcaaagcggactctatgggggtccttggttgtatttttaagtgccctggttttgtgttggttgccctccaaaaaccaggaggtggcactttcaagagcgcatcagctccagtagtataggtaggatacaagcttgccctagggtctgggagtgggtggggccatagcgctcctaagagattgtccttttttttagctaccagtgtgggtagagaaa

SEQ ID NO: 741092 - DNA, 579 bp, Homo sapiens
ccacttggtcatgataaatgatctttttgatgtgttgttagatttggcttgctagtgttttgttgaggatttctgcatcaatgttcatcagtaatactggcctgtagttttctttttttgatgtatctttgtctggttttggtatcaaggtaatactgaccttgcagaatgaacctggaaggagaaactacttccatttttcagaatagtttgagtagagctggtattaatttttctttaaatgtttggtaaaatttagcagtgaagtcattggatcctsggcttctctttgctgggagactttttattacagctcagtcttgtcagttgttattggtctgttcaagttttggatttcttcatggttaaatcttggtagggtatgtgattaggaatttatccatttcttctaactattccaatttttttggtatatagctgctcacactagtctctaatgatcttttgaatttctgcagtatacatcataatgtctgttttttcatctctgattttactggatcttctctttttcttagtctggctaaaggtttcccaattttgtttatctttcgaaaa

SEQ ID NO: 741093 - DNA, 596 bp, Homo sapiens
ggccccttgtctgatgtcaggaatcatcatcatccctctcctcataggttgagtttcagctcagcgggggccccttctccaatctgttcatggtaaagaagggcacaccagtataatacaatacaaaagtctcagtaatgtgaccatgatagagaccccaagaaagggttttttgttgttgttgcgttgttttgttgtkttgttttgttttgttttgttttgttttgagacggagtctcgctctgtcacccaggctggagtgcagtggcatgatcatggctcactgcaacctctgcctcccgggttcaagtgattctcctgccttggtctcccaagtagctgggactccaggtgcatgtcaccatacctagctaatttttgtattttgagtagagacggggtttcactatgttggtcaggctggtctcgaactcctgacctcaggtgatctgcccgccttggtctcccagagtgctaggattataggcgtgagccactgcacctggcctaagggtctttcttgagatataggagagttagagaggatttgctgatggggaggttctctgtctgctgaggctggggtggaagagatg

SEQ ID NO: 741094 - DNA, 537 bp, Homo sapiens
aggattaattgcaagatggagaagaaaagacatgtgaagtagaagacacagtaattgaaattattaacctgagccatagagacaaaagcataaaaacaaggagaaattaactgtggaaagatatcatgcagcctaatacaagttctattgtaattccagaagtagawaatagtgaaatgggacagaaaattatttggaaaataatgattgacattttcccacatatgaaaataattataaaattaagattggataaggctaacaaactccaaattgaataaatgtaataaaatcacatcaagacaaatctttagcaaattgactaaacgtagcaatacagtgaaaaatctcaaagtgagttagaagaaaaaagcacatttaatgcagatgaataaagataacagtcacttcagataacttctcagaaaccacgccagtcagaagacaatggattagcatgtttgaaacaataaaagaaaaaaaaacttggacttttttatctagcacataaattattgtaaaataaatgtaaatata

SEQ ID NO: 741095 - DNA, 614 bp, Homo sapiens
agttttgttaagataaatagaatgtatttggtcacaagcatactacatagcatctgaactttctccgtacttttgtgagattatgcctaccattttatatagcctcacaatattctaattaatatagccgtttatgtgttcaggaagacatactgtagactaaccttttctgtgctaataaattgcactgtgtgcacttacataatattataataatttttaaaaawtattataaggtgatttaatatagtagcctataatatgcctgagttaaacttcaaaaaaaaaaagctttgttagaggtttttggcttgtaatttgtatgtttccaaggtgtaattttagcctatataccctgtacaactgttccaggtactataaagtacaaactcttcagtataatatctgctaaatattttagactgctcttttctgagacccaggaggcatcatataacagaggtgtcatctggagtagttaatagctatctatcttgtggcagtgaaagtctttgtcacctcattgggtgggaggatctcaattgtgagaattacacagaattatccaacattttataaacccttccataatgaaatttacaaagcaattatcc

SEQ ID NO: 741096 - DNA, 657 bp, Homo sapiens
atacaatggttttgctttgataactgttttaaatatcctgttggttgttgaaacttctgtgacggtgaagccttttttgcctttatttttcaatcggaagatctttcttccccacttgaaaagatggagtctggggtcaatccctgaccccgcttccttcctaaatctcttagtgtatagcatacagctgggcatatggtaatctcaggcacgggattgtactcatagagctatgcttgacacctaggtctttagatggcttctatatttttgatgacaacttttaattttattctcatttattccatttctgtttcagtgtcctgggtcatgaaacttaatccacaacaagctcccttatatgcgagtaaatcatacgatttcttttcattttgtatttatttgttctgtttacttgttataataagccacactctcacatgatrgatcctcaaggaaaattttaaccatatgtgcatgaatatattggtgtaagacacttcagaaattgagtttgatttagtaagtactaaatggctaatctgtgcatggaactgaaaacaaataatacctgtaagacttgcgagttaatttagtcagggcgatagtatgcacgtatgaaacaaattgtcctgccaaacagtactgtagcttctt

SEQ ID NO: 741097 - DNA, 607 bp, Homo sapiens
ggacatcctttgaagataattgttggggtggaatgggggcatagagtactgttttattgtgttcatttttattaatgaaactgaatttagaccaagcaagtgatttcaaagtggaagatggaacaggatgtttagtaggttttgtagactgtttttgtaaaaggctttggtgcagaacctttcataaaatgaaatattttttcagcatgtctgttatttacttttagaattcagagcaagggttcttgtttgaagaactacaaacctttattgactccagatttgactcagctcttttatattttctttctcactgataagggaaggtactttataaagtagatttgtcattaaaaaagaaaaaaagactacatttacctggtcagaagttcttttgggtttaaagaaaaagattgcagcccaggttgcaacaaatggtctgacagttataatatgttccayctttctttttttttttttttttgttttttgttttgagacagagtctcactcttttgtccaggctgaagtgcagtggcacaatcacagcttagtgcagccttgacctcccaggctcaagtgatccttctacctcagcctcacaagt

SEQ ID NO: 741098 - DNA, 504 bp, Homo sapiens
ctcctcttgccttcctgccatctctttattcatcctccaaacactcaccaaaggaaactctgggccaggcctggatgggctctggggaccctggtgtgaatcagatgtggtccttgcccacaaggaactgacatatagcaagatgctcttctagaaacccaacctgtatttttaaattctcctcctctttccttgagtgagaagcaccagaaatattgtcttggaatctagatttcacccctggaataatgggtaactgagaatccgttgatcagtccccctaagtttggcaaagtttctcgaggtcactgaaggaagccaggctaactgttcagggacagggagcccaggcagatgctctgtgttytggaaaaaaaaaaaaaaaaaaaaagctgcctgacctgtggtggaggaatatctcaaggagagatgaaggacatagttctgtcaccatgacattgacacaagaaatggctctggtatggtgctcccagatgctagaat

SEQ ID NO: 741099 - DNA, 547 bp, Homo sapiens
ttagttttccagtttagtttgcaaatgtcaaataactaaaagttataggaaccaaaaaatgataaacttctctcaaaacttattgtatataaatcttattttttttctagcatttaaataaacaacaatggccaataattctataatatgttcctttttcaacttttttctataacatgatgatattgactagatataagtgatggcttatttaagcaagtgaattctgcacatggactagaatttttaagaaaaattttaagaaaattttgaatgtagagttgagttttatttgtaattttcatttatttacttattattattattattttaraaacacagggtctcactctgtcacccaggctgagtgcagtggcacgatcacagctcactgtagccttgaactcctgagcttaagcagtgccccaccttagtctccaagtagctgggataaaggcacacgctgctattcctggctcatttttaaatttttaaagtagagactcccgcttcagcctcccaaagtgctaggatttgtaattttcaa

SEQ ID NO: 741100 - DNA, 596 bp, Homo sapiens
gaaatttattaatttcatttccattgtaaaatttataggcataaagtttttaaaatgatactccctttttatccttttaatatctgtagatattattctgtcattcctaatatgaaaaattttgatctctcttttttcctaatcagtctatctcgagttttatccattttctttttcttttcctttttttttttctgagatggagtttcactctcgttgcccaggctggtgtgcaatggggcgatctcggctcaatggggcaacctccgcctcccgggttcaggcgattctcctgctttagcctcctgagtagctgggattacagrtgtgcaccaccaagcccagctgatttttgcatttttcagtagagatggggtttcaccatattggtcaggctcgtctcaaactcctgacctcaggtgatccaactgtcccgccttccaaagtgctgggattacaggcgtgagccaccatgcctggctccattttatttttcttgtcaagggaccagctttgtttttgttgattttctctactgtttttctgtcttctattttatcaatttctgttttgatcttcattatttcctgttgtct

SEQ ID NO: 741101 - DNA, 627 bp, Homo sapiens
ggactggaaaggagggaggatggagggagattgaggctgaggactccaagctgcacagcagatgtgattatgctctttgagccacttgtgtggtgtaaaatggttaatgtgggaaaagctggagataggaattagatggatgagggggaggcagattccaggaaagcgttggtagctgttgcratggcagattggtttggagaataaagtggaggaatggatagcatccaccagctctggatgggccaatgtcagggtgaggatggtggcgggagcaggctgatactggggttttgggcctggatgttgggagggcagtggtaccacccagagacgagaaatgcaggaggaagagcaagcttgttgggcaaggtgctgcattctgtggggcatattcttccagaagtgctgagaaagtctcaggtgaagagagaaagttccaggtggagatgttgaaacagttcttggagatgtctgcctggagctggagagaagacaggcaggctgggaagggaactggggagctcttgcctggagcaggtcaagttagggcaagagagggagtgtgagtgctaagggagagacaatagcatgtaagtaacttttttgagcatacataatactatg

SEQ ID NO: 741102 - DNA, 627 bp, Homo sapiens
ggactggaaaggagggaggatggagggagattgaggctgaggactccaagctgcacagcagatgtgattatgctctttgagccacttgtgtggtgtaaaatggttaatgtgggaaaagctggagataggaattagatggatgagggggaggcagattccaggaaagcgttggtagctgttgcgatggcagattggtttggagaataaagtggaggaatggatagcatccaccagctctggatgggccaatgtcagggtgaggatggtggcgggagcaggctgatactggggttttgggcctggatgttgggagggcagtggtaccacccagagaygagaaatgcaggaggaagagcaagcttgttgggcaaggtgctgcattctgtggggcatattcttccagaagtgctgagaaagtctcaggtgaagagagaaagttccaggtggagatgttgaaacagttcttggagatgtctgcctggagctggagagaagacaggcaggctgggaagggaactggggagctcttgcctggagcaggtcaagttagggcaagagagggagtgtgagtgctaagggagagacaatagcatgtaagtaacttttttgagcatacataatactatg

SEQ ID NO: 741103 - DNA, 617 bp, Homo sapiens
aggatcagtccctaaccagtgcacacttgattcttaaccttcttatctcagcttaaatgttacctcctcagagaggccttcctgacctaccagtctaaaggcgttacccagtcaataggaatgcgtatcctatttgtattaactgcagagcagctattgctactggacatttttctggtttatttatatggtttgtcttttcactttttctcttagccccactacatttttcgtttattagaacatactttttatccagcattttcrtcgctccatccccagcatctaggacacagtcaggcataaaataactgttgcatagacatttgctgaatgactaaatgtaggatggattttgggtggtggatgaaatggatggatggatggaaggatggagggatgggaggataggtggataaatttgggaaaagctaccttgggacaggtcagccatgtgtcatctcaaagcaggtctactgagctgaagtttcctgtgcaagtaactaccactttttagttgtgattagttggatactataagtatacattttagtttttattgtcaagaatggaattgctgtccaaattcaagtattaattaagtttgaaacaaatat

SEQ ID NO: 741104 - DNA, 617 bp, Homo sapiens
aggatcagtccctaaccagtgcacacttgattcttaaccttcttatctcagcttaaatgttacctcctcagagaggccttcctgacctaccagtctaaaggcgttacccagtcaataggaatgcgtatcctatttgtattaactgcagagcagctattgctactggacatttttctggtttatttatatggtttgtcttttcactttttctcttagccccactacatttttcgtttattagaacatactttttatccagcattttcgtcgctccatccccagcatctaggacacagtcaggcataaaataactgttgcatagacatttgctgaatgactaaatgtaggatggattttgggtggtggatgaaatggatggatggatggaaggatggagggatgggaggataggtggataaatttgggaaaagctaccttgggacaggtcagccakgtgtcatctcaaagcaggtctactgagctgaagtttcctgtgcaagtaactaccactttttagttgtgattagttggatactataagtatacattttagtttttattgtcaagaatggaattgctgtccaaattcaagtattaattaagtttgaaacaaatat

SEQ ID NO: 741105 - DNA, 636 bp, Homo sapiens
tggtatatacgtgcagtggaacattatttagccttaaaaagaggcaaatgtaacagtgcttctgccttgagatgaatgctgtttatctgcactgtccgtaaagtatccacgtagggctgttgaggacatcaaatgtggccagtgtgactgaacaactgaattttgaattgtattgagttttaagtcatctcagtataagtagctatatacagctagtagcacagctttagactataatgctatataatcaggacattgattatataaatgaagtctgatgctacaggctttcaaatggaaataaactatcatcattgagttgctcattagcaacaaagacgtcctcaatcttgattttgtggcaagaacctgaaccatcccactttgactgaaggacaygtgacagtaatcctttctttattacaatgtttgtgtgctgaaattcacttgaaacaaaaaggtaggctatgtttagattcttatagcattttctactaatttttttaccatcctactcttcttctgtaaattctcccttctgatttcaatatacatatatatgttttaaaagttctattggctcagatggcaaatagtaatggctgcttttcctggtttctggaggatttaatacca

SEQ ID NO: 741106 - DNA, 543 bp, Homo sapiens
ctctgtgagtgggaggatttttggcaaccagggcctgggggacatggggaagtcaaggagggaggcgtgtgggggtcaagagaccctgcagtgggcacagatccggacagatcccagcatgcatccctccctccgacagggccttcatgcagctctgtttgtttatcttgggaatagcaatgcctgttctcttagaaaagcctctcctagaatttgttttataactcaatttaacaaataaccatttaggtggaaaatgtgcaaaaaaagagaaagttttgcargaaactttattctttagaaaacatgtgagtgaatatgactgagtcagtaactgtgataatgaaaagaaaaaagttctgtttgtctttccctatttcacgtcagcttcacttggaccaatgtgttctccacatcttcccagagaaggaaatgtaggcatctactctcaaccaggaagtcagaaggggactggagatcactggaggtcacaagctctccccacagttgtacgcacctgagctactctgacctataccctta

SEQ ID NO: 741107 - DNA, 703 bp, Homo sapiens
aagtatatttcagatagaagaataagtgaaaatggtgttattgagaaaagtcatttgctcatttcttctaggaagtgacacagaatcaaaacttgaatcacacaatctccttgcaaactaggatctcatcatttcacctgattgtgcaacactgaggtcattcagtaaagggaataagatgggtgttagttatgaggggtgggatccagtaaaatgttgtattttgaaacctagcatcatattttttttaatataaaagcaccagtgtgagcaaaggaaagtaaatttgagcaaaatttaaagaaacaaacatctggttatctttatcaattcttaattactaataactttttattttaagcctaattttcttttttggggggtytagtgtttttcatacacagtaaaaaaatgtatattgttaaatattaaattgcctttataccatctcttaagattttctgtcaatggaattgttattactcagattcccctgaggagtacatcatttttatcctctaattgccggatatccatgatggagacctcgatttccatcagacggcaaacctcctctctcatttttaggcttggcatagaaaaagatggtttggacaggaccgtggtaagtccatcactacattcatacccctgttttttttttttttttttttaaatcagccaggaaagcttttctatggca

SEQ ID NO: 741108 - DNA, 703 bp, Homo sapiens
aagtatatttcagatagaagaataagtgaaaatggtgttattgagaaaagtcatttgctcatttcttctaggaagtgacacagaatcaaaacttgaatcacacaatctccttgcaaactaggatctcatcatttcacctgattgtgcaacactgaggtcattcagtaaagggaataagatgggtgttagttatgaggggtgggatccagtaaaatgttgtattttgaaacctagcatcatattttttttaatataaaagcaccagtgtgagcaaaggaaagtaaatttgagcaaaatttaaagaaacaaacatctggttatctttatcaattcttaattactaataactttttattttaagcctaattttcttttttggggggtctagtgtttttcatacacagtaaaaaaatgtatattgttaaatattaaattgcctttataccatctcttaagattttctgtcaatggaattgttattactcagattcccctgaggagtacatcatttttatcctctaattgccggakatccatgatggagacctcgatttccatcagacggcaaacctcctctctcatttttaggcttggcatagaaaaagatggtttggacaggaccgtggtaagtccatcactacattcatacccctgttttttttttttttttttttaaatcagccaggaaagcttttctatggca

SEQ ID NO: 741109 - DNA, 624 bp, Homo sapiens
gaaatagggatgctatcaccttctatgttcagatttcagagatggttcccagattcttgaggatgacattttctgaattataaaactagcaaaatatttacatacatttcaaagggacagagaaaaatttacatttgttaagtattctaaagtaaatgttctaagaaaagagagtttggcagcctattgtcaggaagaaacctgtktaatgtaggcaagcttaggctttttgggtcaattacattcaaaaattgcctaggaaatgtaaaatgaacaaacctaccaaaaaacaaaacaaacaaacacataaattccaggtcctactgtggaccgattaaatctgaaaattagaatctctagtgacctgggcatcaatattttgaaaagctactcaggtgactggaatatggactgagcatcatatgtctatatgcctgtcccataacattatactccaacacctctcccctaactgagccataatggtctttagccccatgatcggcttattggctaggattattttagatgtatttttagatgtagtgacggtttgtaggggcaaaggggaagttttatctctgaaggcctctgaaaatcaactgacgaaaggcagattaatac

SEQ ID NO: 741110 - DNA, 638 bp, Homo sapiens
ttccacttaaatatatttatctttctatgattttgaaaacattttcttttttcgagctttattatagcagtatataatacatatgacatgcaaagtgtgtgttaatcaaccgtttatgttcattggtaaggcttccagtcaasagtaggctattaataaagttttggggagtaaagttacatgcgaattttcaactgtgcagggggccagcacccctaatccctgcattgttcaagaatcaactgtgtatgtgtgtctataaatagttcctgacttatgatggattgacttactattttttaaattttatgatggtgcaaaagtgatatgtgtttagtaggaaataatacttcaaattttgaattttgttcatttcccaggctagcaatatgtggtatcttgtgaagtagggcagcagcagtgagccacagctcccagtcagccacataatcacaagggtaaatgatcagtagtctactccacagtgtattatatttaatgacttacatgatatattcaacactttattataaagtaggctttgtgtttgatgattttgcccaattataggctaatgtaagtgttctgagcacatttaaggtaggtcggttaagctataatgtttggtaggttaggta

SEQ ID NO: 741111 - DNA, 638 bp, Homo sapiens
ttccacttaaatatatttatctttctatgattttgaaaacattttcttttttcgagctttattatagcagtatataatacatatgacatgcaaagtgtgtgttaatcaaccgtttatgttcattggtaaggcttccagtcaacagtaggctattaataaagttttggggagtaaagttacatgcgarttttcaactgtgcagggggccagcacccctaatccctgcattgttcaagaatcaactgtgtatgtgtgtctataaatagttcctgacttatgatggattgacttactattttttaaattttatgatggtgcaaaagtgatatgtgtttagtaggaaataatacttcaaattttgaattttgttcatttcccaggctagcaatatgtggtatcttgtgaagtagggcagcagcagtgagccacagctcccagtcagccacataatcacaagggtaaatgatcagtagtctactccacagtgtattatatttaatgacttacatgatatattcaacactttattataaagtaggctttgtgtttgatgattttgcccaattataggctaatgtaagtgttctgagcacatttaaggtaggtcggttaagctataatgtttggtaggttaggta

SEQ ID NO: 741112 - DNA, 653 bp, Homo sapiens
ctaacaatattttcaacttacattgcatttatcagatgtaaccccattgtaaactgagaaggatctctctctacatatgtaaagataacaaaataccctaatgagaaataagacaatggcactccaaaacagaagcagtaactacagtaaagaaggatcttatctaaagccttcagaatttagcaatgaatcatagcttatgcagaagataataatgataatactacttataacatrgaaactgcaatcaattctcttctagaaagagagttacaatattatcaccatttttaaatggtgacataggctgcccagttatatatgatttagggatactgataataataacaatattttgcaataacaaaataataaagcatttactgaatgctcactatatgccaggttctatactaaagtcttacatggtttatcacctttaatactcacaacagacctgtgaattaggtaatcctaaaaatcaagttcagagatgctactgataaccaatagattcagagcactgctacatactagatgaactggagctgttgggctgttataaaatcaagtttttaaaaaggcagcttgaatccttggccatcacgatgtctatggattgtgaaaaccttacctgatggcgtttctagatt

SEQ ID NO: 741113 - DNA, 653 bp, Homo sapiens
ctaacaatattttcaacttacattgcatttatcagatgtaaccccattgtaaactgagaaggatctctctctacatatgtaaagataacaaaataccctaatgagaaataagacaatggcactccaaaacagaagcagtaactacagtaaagaaggatcttatctaaagccttcagaatttagcaatgaatcatagcttatgcagaagataataatgataatactacttataacatagaaactgcaatcaattctcttctagaaagagagttacaatattatcaccatttttaaatggtgacataggctgcccagttatatatgatttagggatactgataataataacaatattttgcaataacaaaataataaagcatttactgaatgctcactatatgccrggttctatactaaagtcttacatggtttatcacctttaatactcacaacagacctgtgaattaggtaatcctaaaaatcaagttcagagatgctactgataaccaatagattcagagcactgctacatactagatgaactggagctgttgggctgttataaaatcaagtttttaaaaaggcagcttgaatccttggccatcacgatgtctatggattgtgaaaaccttacctgatggcgtttctagatt

SEQ ID NO: 741114 - DNA, 689 bp, Homo sapiens
ctactgataaccaatagattcagagcactgctacatactagatgaactggagctgttgggctgttataaaatcaagtttttaaaaaggcagcttgaatccttggccatcacgatgtctatggattgtgaaaaccttacctgatggcgtttctagattgaaggcatccataagttttgacaatagttcttgcagttcctcttcctccagctcatcctttctctccttgatgttacctgcctctttcttttccacggctgccagagcaggactgctcatttcagcaggaaccattttggggatgtcctgcttcagtccctcctgataactgggtagggcactaatgactttctktggcatcttttgtgtttggctttgtgccctggtgctgtgcaaagtggtctctggtgattctggatttcgcagagcatgctctgcatttgtgtgacttctgtgacttctgtcaacctcatcaagcttaggaagaggttcccctgttgaagcatcttcagtggcattcttgatctgcaaataatcccctccctttggaaccttttcagttgaagaatggtcaaccttgttccccacattttgaaaggaagaagatgaaggaccgggtggctgcaaccttgcctggggaaacaaaactttatttatgaagaaattaatgtttatcttactttttcataaa

SEQ ID NO: 741115 - DNA, 609 bp, Homo sapiens
acaagacggtctttgcaacagcttctatctgaaatctgcttagaaacaaacctgcagtgtttctgccgggaggaatgtttcagacttgaaggtgtagcaatttctcagacggaaccccctgagtcagtgagacagccctgcgtccagaacatggggtccttgccagccccccgtccacagcctggggtccttgccagcctggccctttgttgctctttggtggcttttggatcagtgatgtgacaactcagaatctcagtttccccaggtgtaaaccagtcatgacccatgcatcccactgtcccacagggggtgaaaatgcggtgcagcaggggcacaaaaaactactccttttacgtagaaagtgcagatatgcgtacaatacagtgtatctaccatattaaatttcatggggagggagtggggtgattagggaagaaatgcctaaaccatctccttagtkgggttgaattgtaccccacaaaagatatgttgaagtcctaacctcggaacctctgaatgtgacctgatttggaatagggcctttgcagatatcgtcaatttgaggctattagggttggccctaagccaacatgactggatataaga

SEQ ID NO: 741116 - DNA, 630 bp, Homo sapiens
taatgcagttttgaatattgtttttttcctgctagtttccaaaatttgggtattcgatgtgtgaagaaaaaagaagtaaaagaagctattattacaagaataaaggcaggaatcaatccattcaatggtaagtatgtttgataaaatcatttctatttatttgggtgttgatttctgtttcttttttctttcyctttttttttttttttttttttttgagacggagttttgctcttgtcgccaggctggagtgcaatggcgcgatctcagctcactgcaacctccgcctcccaggttcaagcaattctcctgcctcagcctcagcctccggagtagctgggattataggcgcccaccatcacacccagctaatttttgtattttaagtagagacggggtttcaccatgttagccaggctggtctcgaactcctgacatcaggtgatctacccgctttggcatcccaaagtgctgggattacaggcgtgagccattgtgcccagctatttatatcttcaacctgtgttttaagttctgtgtttacttttctacttgttgacatgtacctgtatctgaggaatgacgtatactatttaaaatagtttcttcacagttgttgaaaaaaatctt

SEQ ID NO: 741117 - DNA, 617 bp, Homo sapiens
tacttcagggatatattgtatatttgcaaagatcagactatgaaaattcatgaataatattaacttattcagaagtgcaaccatccagaacacaggcataagcaaagaagaactctgaatcatatgtgtctgccctaaaccagggaggattctgggctactggtaattatctatgtcttgatgtaagtgatgattacatgggtatttactttgtraaagttcatggagctttgcacctatgatttgtccatttgactctgtattatacatcatttctttaaaaaatttgcagaaaagctcctgccctgaacgacaattataggaaacccccgacatatcctccttcagagcctatttactcttgctttacataaaatttaagcaaagtgagttattataatttcttggccgttaacagttgtcaatggaagttactggaggtaaagagggagcagtggtagattttatcagtctcatgtacatggacaacgtgaaaagtctggcataaacaggagggtagagagaatagaaagaaaaaaaacataaaaatcagacacaagatgacacaaaacagaaccacatcaggcttctcagcatagaagcaaatggttctataa

SEQ ID NO: 741118 - DNA, 634 bp, Homo sapiens
tattagtcttccttatgaattccgaggatagtataaagattgcccaagaacatataataatgcattaaattcagagtccaaataattgataaatacgcatttttaaaacttattccttagccaaagagagaagcagagcctaagcctccaagcattcttctgaacactttaaggatttatgatctgggcccgactggctactggaagacctaggataaaggtagaatcctggctgtatctccaactagcgattcctttccctagcctcactgttctcatctataaaatcawggaatctattctagttctaagttttaatgacataagaggttagttgctaagtgtgaccagacaggtagctggctttacctacgaggtccgattccaccacccccaccatcacccctttttggaggatctatacagctgtaagattttcatttatcttctgggcacaagcctgcacacacacacacacacacacacacacacacactagcataagttgtttcataagttgtttctctttctgttgcatccagttgatgagaataaagtccattgttttaatattaaatctatgttataatgaatcttctctaggaacagcttgtttcaacatcatctgtcaaga

SEQ ID NO: 741119 - DNA, 633 bp, Homo sapiens
ttccatctcagtgggttcctgagtggcagagaacaaacccactcaaattccaaatcattgattcagatggaccagcacactcattcttggctctcaaatggactttcatcagaatcaattataaaggtcttcttggcattataaacaacacccaggaacgattaaatttttgttcttcccttgcgggccacaaatcaggatgactcccaaagtttaatcagcatggacccagtggactggactttggaagtgactcagcctttgtagattcaggtatatgaataattttttaaaaaaggaaatggaaatatatacattctattaattctagtcactttgtggtaggtttatgaacattgccatgtaggattgaccatrgggctatatattctgtactagactaatataataatgaaatgctatttatgccagcactggctatggagttatatctcaaatgtcccaggggcttcaaaggcaatgacgacactggctgctctctggagcaataagtcacctggacaacttacctcatggcaaagaaatgaaaggaaacaccagaaatgggcagaagaaagctttcttaacactttgaatcaaaagataattattttccctggaagctcaaaaatg

SEQ ID NO: 741120 - DNA, 627 bp, Homo sapiens
aattgtatttttatatactagcaatgaacaaatggatatggaaattaaatagcagtaccatttacaatagtttcaaaagtatgacaaatgtaacaaaagatgttaaaaactatacactgaaaactataagatattgttgagaaacattaaacaagactgaaatagatataccctatcatgggctgggagagttaatatttgtaagatgtcaactgtccctaaattaatttataaaattaatgtaatcacaatcaaaatttcagcaggctttcttgcagaaattgacaagctaattctaaaattcactggaaatgcaaaaaaaaaaaaaaatctagaatagccaaaacaacttaaaaaaaggaacaaagctgagagaaaacattacctgatttcaagactaataaaakgtacaggagtcaagacactgtggtattgatataaagacagacaaaagtatcagtggaaaatagtagagtccagagacctgcagatacacggaaaacaggtttttgacaaagatgtaaaagcaattcagtggagaaaggatggtcttttcaacaaatggtactaaacaattggatattcttatgccaacaaaacaaagcaaaagaactttcaatttgcata

SEQ ID NO: 741121 - DNA, 561 bp, Homo sapiens
ggttttcaagtaatttttagcatacaggatattcatatggtgacatagtatcacttcatgtggacttgcaaacagcaacgggagctatgtacctttgcaacagagagacttgtcagtcactttctgaaactagtaaccaggtattagtggtatggcttgacacagtgtatctcctgacctgatgcaatctgaagaacacagtgttacctatgacattttcttgctaaaaatgtgtaacccaaatccaattaatcaagtcctcaaatgtaagtgccaatatatacagaaatacacagaactaactatttaaatacaccacraagaaataataagacacctaccattcaatgagactggtgtcctgaaaaattaaatcataaaaagggcacggtatggtttttatattaaaaagaaataatcaaatgcaacatcagaaccttgaaaacctgactataaaacatactctttgagaaaattagaaaatttcatatttggactaaatggtaggtgttactagggaattcctgctaattttctttgatgtggccatgatgttgtaga

SEQ ID NO: 741122 - DNA, 577 bp, Homo sapiens
catatacttgttgcattgatacaaatatattttataaagtaatgaaatattaaaataataagcaaataatcatcaataagactaaaataaaccaaaccaaagccaaagggctaatcaaaaatttgaatgtttgtgtgctaaatattgtaccaacagcagcttagtaaaccaccctgaactctcctctgtacctgctgaccttaaaattcatgtgaaactaggttctggctgttactaaaccaatctaaatgccatcaaaagttctccaaaatcttgtagtggcgctatctcggctcgctgcaacccccacctcctgggctcaagcaattctcctgcctcagcctccggagtagctgggactatargcgccccccaccacgcccggctaatttttgtatttttagtagaaacagggtttcaccatgttggtcaggctggtctcgaactcctgacctcacgatctgcctgcctcggcctcccaaagtgctgggattacaggcgtgagccaccgcacccagcgaatccttctttaaagtaaccagagctcactgaggcaagacagatggtgccttcagtg

SEQ ID NO: 741123 - DNA, 630 bp, Homo sapiens
ttagaaaatcatatatagggaaaagatctattcaaacttcaagacagatcaacagattttaatgttacagaacgtggtcaggttcactgatatggtttcaggttccaccttggaactaatcttaagcaaccaccacatgccaaattagtagtgcaaagagggatatccacgattacctgaaaaagctactaaaacaatccctcttacccttcccaagtacatacctgtatgaggccaaactgaccttcaatcaaaatgatatagctctaggagttaacacagaagcaaatatgggaatcagatttttttaattaagccaaacattaaaagttttgcaaaaaaattgccattcatctcattttgtttgaaaactacattaatttytcataaacttatctatgtgaacacatattgtgcttactgatatttaaaatgaattattgataaattatgttatgaatgttaatgaattatattaattttttttaattcttagttttaatttccaatatggtaaatattgatagctataacccacataaaccaaaactctttgaggtcctcaataattttcaagagtctaaatgggttttatgatcaaaagtttgagaaccactagttcagagtatg

SEQ ID NO: 741124 - DNA, 623 bp, Homo sapiens
ctgcgacctccaaggctgcccaccttagtatacaacactgtcatctctcatttgacttttcctgaggtctcttgcttccacccttgttccctgacaagcctcttctccctatagcagccagagggatcatttaaaacacaaaacagatcatgtcagtcttctgctgaaaaacttccagtggcttcttatcttatggagaatgaaacccaaggttcttggatctggccctggttccctccatgactcagtactcatcattctccccttacttactctactttagttacaatgattttctccaaacaaaccaaacaggttcctgcctcaggacctttgcacctactgttcycttggcctgtccacccttctccatgtcagcaatgccactccctcccttacttgatagatctctgctcaaccacgacttcagcagagagggcttccccgtctgccctatcttaaataacaccagcccagtcattctctattccctcaccttgccttatttttcttcttagcacttatcactgcctaccatttatatatttattggtttatctgtttattatctccccttgctaacatgtaaacatcatgagaataggaaaccttctctgtttgtt

SEQ ID NO: 741125 - DNA, 528 bp, Homo sapiens
aaatatttagaggattcgggctggctttagtgatggattcaatgtgccgtggagttttgtcctttcccaaactttagctgcaatggctgaattcccaccacaccatctgttcctgacacttggtctcattagtacgagtatttttattgatacacrcagtaatgcttctcataccatcttagctaagcattatttattgtatctatatatacaacaatattaacacagtcaagcaccaggatcggtacttgagggcatcattaaaatcagccagtgttcagtgagagacttaatgatggatttaatagtattaaatgggcaaaaatgcccttggcctttacatgctcatttaaaaacatataaaagagcagtaattcaggcagttatacttctctcaaagattttgctctaaatcacagatggcagcgggaggccacggctgtgtgctggctcacaccccactcactccaaccgaagccagaagtgctcgttgggtcataattagcaaaccacccgcaaactcgactc

SEQ ID NO: 741126 - DNA, 570 bp, Homo sapiens
gtaagtttggaaagttctctgttattatccctttcaataaactttctacccatcggtttctttcttttctttttttttaatggcttaaatagtcctttattccttaatcaggtctttttttttctgaactcggtatattacataagacttttttagtgttttgtttttgttttactayacacacacacacacacacacacacacacacatatatatactttttataggtttttggaaagcagatggtgtttgactacatgagtaaattctttggtggtgatttgtgagattttgctgcacctatcacctgagcagtatacacaacacaatttgtagtatattatgcctcaccctcctcccaccctttccctcaagtccctaaagtccattgtatcattcttatgactttgtatccccacaggttagcttccacttataagtgagaacatacaatgtttggttttccatttctgagttactttacttagaataataatctccagttccatgcaggttgttgtaaatgccattaatccattcttttttatgacttgagtattactccatcat

SEQ ID NO: 741127 - DNA, 570 bp, Homo sapiens
gtaagtttggaaagttctctgttattatccctttcaataaactttctacccatcggtttctttcttttctttttttttaatggcttaaatagtcctttattccttaatcaggtctttttttttctgaactcggtatattacataagacttttttagtgttttgtttttgttttactacacacacacacacacacacacacacacacacatatatatactttttataggtytttggaaagcagatggtgtttgactacatgagtaaattctttggtggtgatttgtgagattttgctgcacctatcacctgagcagtatacacaacacaatttgtagtatattatgcctcaccctcctcccaccctttccctcaagtccctaaagtccattgtatcattcttatgactttgtatccccacaggttagcttccacttataagtgagaacatacaatgtttggttttccatttctgagttactttacttagaataataatctccagttccatgcaggttgttgtaaatgccattaatccattcttttttatgacttgagtattactccatcat

SEQ ID NO: 741128 - DNA, 630 bp, Homo sapiens
cacctttatttgtgtcttctggaattagaagtatgttcaagttctaacaggtcctaaagagtgaggtccaaagtgtggagcactaggagaagcactacacttcaaaacaactgcaagatttttttcaatgaatacacagaaatctcaagaaattgtatagaaaaggtgtagaaatataatattgtaaattaaatctgcaaaattataatttttaaattataaactaagtratacatctatgtattatataaatggttaaattatattaattttaaattatatataattttacatattaatataaatttataaattataaattcaattaaatttataaaattgcggcaggaatataaaattggttcaggttgaatttattaatattagcccataatagagattctatactcaatgttgtagcccaagggcttagaaagggctctagtaatttaccaacttattggtctatgtttcagctgaccaaccaaataaccctcttactagggtgattgtgtattggaaaaaataagtaaacagactttttggtgactactggacactggctctacagtcacactaattccacaagatgcaaattgtcactgtgctccaccagtcagagtaagggct

SEQ ID NO: 741129 - DNA, 586 bp, Homo sapiens
gtgttttcctctgggactgtggtgctttcgccatctacttaataagtgaattttgcttcttcacaaactatctcaaactcagttaagaaaaagtacattgaaactgctaataaaaatgagaaacaaaatattttatatgtaaaaaaatcatgaaatacttttatttatgaataaataaaaatatcatgaaatatcatgatatttcatgaaataccaagacctaagctaaatgctgtttttgttgttatttcattttgttattaagctatttttcttgtatatacttaagacatacaacatgatttttttttaacttccatgttgggttcaggggtacatgtgcaggttgttagctaggtaaactaytgtcatggaggtttgatgtacagattgcttcatcagcaggttcctaagcctagtacccaataattagtttttctgctcttctctatgctcccaccctcaaccttctggtaggccatggtgtccgttctcctctttgtatccatgtgttccgaccacttagctcccacgtatgagtgagaacatcagtattttggttgtctgttcttgtatgagtttgcta

SEQ ID NO: 741130 - DNA, 609 bp, Homo sapiens
gttcttgcctgtcttttggatataagccattttaactggggtcagatgatatctcattgtagttttgatttgcacttctctgatgatcagtgatgttgaacaactattcatttgcctgtttgccatttgtatgtcttcttttgagcaacatctatttaaatcttttatccaatctttgatcagattattagatttygtttttccttcacagttgtttgaactccttacatagtctggttattaatcccttgtcagattcgtagtttgcaaatattttctcccattttatgagttgtcatttcactttgtggattgtatcctttgctttgcagaagcttattaacttgatgtaatcctatttgtccattactgttttggttgtctgtgcttgtggggtattactaaaaaaacgtttgcccagaccaatgtcctggaggttttccccagtgttttcttgtggtagtttcatagtttgaaaacttaggtttaagtctttcatgcattttgatttaatttttgtatatggtgagacataaggatctagtttcattcttccgtatatgaatatccagtttttcctgcaacatttattgaagagactgtcttttc

SEQ ID NO: 741131 - DNA, 619 bp, Homo sapiens
tgttttacgcttaggcctaagatccattttgaattaagttttgtggaagatataaggtctgtgtctagatttttttttttggcttgtggatttccaattgttttagaaccatgtcttgaaaaggttatctttgtttcattgtattaactttgttsctttgtcaactatcagtgactgtatttatgtaggtttttctctgggctctctattctcctccatttttttttcccattcttcaccaatatcacactatctcaactactgtagctttatcataagtgttgaaatttggtagtcttactctttcaactttgttcttcaataatgcgttcactattccaggtctttggtttctccatataacctgtaaaatcaatttgttgatatctacaaaataacttcctggtattttgagtggcattgcattgaatctacagatcaagttgtgaagaattgacaacttatcaatattgagtcttcctattcatgaatatgaaatacttctccatttatttagtttttaaatttatttcatcagagttttatagttttttatatataatttgtacatattttgctagatttatacctaattatttcatttttgtggtgctaatat

SEQ ID NO: 741132 - DNA, 619 bp, Homo sapiens
tgttttacgcttaggcctaagatccattttgaattaagttttgtggaagatataaggtctgtgtctagatttttttttttggcttgtggatttccaattgttttagaaccatgtcttgaaaaggttatctttgtttcattgtattaactttgttcctttgtcaactatcagtgactgtatttatgtaggtttttctctgggctctctattctcctccatttttttttcccattcttcaccaatatcacactatctcaactactgtagctttatcataagtgttgaaatttggtagtcttactctttcaactttgttcttcaataatgygttcactattccaggtctttggtttctccatataacctgtaaaatcaatttgttgatatctacaaaataacttcctggtattttgagtggcattgcattgaatctacagatcaagttgtgaagaattgacaacttatcaatattgagtcttcctattcatgaatatgaaatacttctccatttatttagtttttaaatttatttcatcagagttttatagttttttatatataatttgtacatattttgctagatttatacctaattatttcatttttgtggtgctaatat

SEQ ID NO: 741133 - DNA, 589 bp, Homo sapiens
ataggcaaaaggtacttgccttgtatgagatgagattttgaatttagacttttcagtgaatgctggaatgggttaagactttggggaactgttggaagagcatgactatgttttaaaatatgaggatatgagatttggaggggccagggaagraatgatatgctttgactgtgtccccacccaaatctcatcctgaattgtagttcccataatccccatgtgttttgggaggaacccagagggaggtcattaatcaaggaggtggtttcccacatgctattcttgtgatagtaagttctcacgagatctgatggttttattaggggcttcaccattctcttggctctcattcttctccttcctgctgccctgtgaaaaaggacttgtttgctttcctttctgccatgattgttaagtttcctgggccctcaccaacaatgttgaactatgagaattgactaatgcactgtgccagcctttaggctttggggagcccaaaccaactggggactgaagtggttttccagcacagcacagatgtcctatgaaaatgtaacaggctgctttttaaagtgggtccccaatccca

SEQ ID NO: 741134 - DNA, 589 bp, Homo sapiens
ataggcaaaaggtacttgccttgtatgagatgagattttgaatttagacttttcagtgaatgctggaatgggttaagactttggggaactgttggaagagcatgactatgttttaaaatatgaggatatgagatttggaggggccagggaagaaatgatatgctttgactgtgtccccacccaaatctcatcctgaattgtasttcccataatccccatgtgttttgggaggaacccagagggaggtcattaatcaaggaggtggtttcccacatgctattcttgtgatagtaagttctcacgagatctgatggttttattaggggcttcaccattctcttggctctcattcttctccttcctgctgccctgtgaaaaaggacttgtttgctttcctttctgccatgattgttaagtttcctgggccctcaccaacaatgttgaactatgagaattgactaatgcactgtgccagcctttaggctttggggagcccaaaccaactggggactgaagtggttttccagcacagcacagatgtcctatgaaaatgtaacaggctgctttttaaagtgggtccccaatccca

SEQ ID NO: 741135 - DNA, 589 bp, Homo sapiens
ataggcaaaaggtacttgccttgtatgagatgagattttgaatttagacttttcagtgaatgctggaatgggttaagactttggggaactgttggaagagcatgactatgttttaaaatatgaggatatgagatttggaggggccagggaagaaatgatatgctttgactgtgtccccacccaaatctcatcctgaattgtagttcccataatccccatgtgttttgggaggaacccagagggaggtcattaatcaaggaggtggtttcccacatgctattcttgtgatagtaagttctcacgagatctgatggttttattaggggcttcaccattctcttgkctctcattcttctccttcctgctgccctgtgaaaaaggacttgtttgctttcctttctgccatgattgttaagtttcctgggccctcaccaacaatgttgaactatgagaattgactaatgcactgtgccagcctttaggctttggggagcccaaaccaactggggactgaagtggttttccagcacagcacagatgtcctatgaaaatgtaacaggctgctttttaaagtgggtccccaatccca

SEQ ID NO: 741136 - DNA, 644 bp, Homo sapiens
agtatttgtatatctaaacatatctaaatgtaagttatcccagcaagaaagagatggaacatttaaattaggataatctgagaaggaattaaaaaggaactatttctgaaagcaagggcagaatgtcggaaaccataagagaagcacagggcctcagagctgttatcactagtaggtctactagcgtaagaggtatgaccatacctggaaggaaagaattgcttayggagggccaacttgagtgcagcactgagctatgcttaagggacacagcctgccccaggtgaacctgaggggagtgaggcagggacacagggatcttatttttactcactttgttccttccctgccatcactttctgggatctgcttttggcccattgatgtaatccatacaggtcaacctcctgagacaaggggcagagtggaaagcaatgatgacaaacaaaaagaggacaaacaaaaatatttggcacagagccaaatatgaattcaaattctagccccactacttatcagatctttatctttgaaccagacctaacttctttaatattgttttctacctctcaggatttctgggagaattaaatgtgcaatgcaaatggtaaaatgtctgctgtatcactggacacatgaatgcc

SEQ ID NO: 741137 - DNA, 511 bp, Homo sapiens
aaattttctcatattttgaacttctgaaatcagtgtacattttgtaatttgtatgtacttttaatgagcagcgtttttttttttttctccaacaactggatgcttccactgtcgctcctaccaaaaaaagagaaccaagcaccaagctctttcttcctattgcttatgaccgaagcaaaggcccccatgggcatttgaytggtgaaggccagatgcatcctaggtgcaaggaaggtggctggcagctggagtcctgacttatataatagtaaagctatgccgtttacttggggatttctccaaatatagaaagagtaaacaaaatacatttagcacaattatgacaaataatcagtacatagtgatagggcaggaatcactgtactcattgttcagagaggttatttgaggtaactacaatcacactcaggatatggcagacttcccaggacattcttttctttattaaatgtcaaagtatccaaaatgaatacttcttaagaaaatctct

SEQ ID NO: 741138 - DNA, 511 bp, Homo sapiens
aaattttctcatattttgaacttctgaaatcagtgtacattttgtaatttgtatgtacttttaatgagcagcgtttttttttttttctccaacaactggatgcttccactgtcgctcctaccaaaaaaagagaaccaagcaccaagctctttcttcctattgcttatgaccgaagcaaaggcccccatgggcatttgactggtgaaggcyagatgcatcctaggtgcaaggaaggtggctggcagctggagtcctgacttatataatagtaaagctatgccgtttacttggggatttctccaaatatagaaagagtaaacaaaatacatttagcacaattatgacaaataatcagtacatagtgatagggcaggaatcactgtactcattgttcagagaggttatttgaggtaactacaatcacactcaggatatggcagacttcccaggacattcttttctttattaaatgtcaaagtatccaaaatgaatacttcttaagaaaatctct

SEQ ID NO: 741139 - DNA, 577 bp, Homo sapiens
aggctttcagggttcctggcttgagatatcttaaggggcctgtttacaagtagattggggaaatctgctaatcccctggctacttctccttgagccctctaaccaactggctgcacagttttggacaactcacctaagctctgtgtctcastggcctcatcaatgaaatgaagaggatggaatgcaagctccacgaggatccatctgttttaaagatctatgtgtttctgcaagtgtggtcttgaggcacttgcatcaaatttgcagggagcatttagataaattatcctcctaccttaggttaacttctaagcagtcttacatacatggttcaaagcctacaatataagcaattttaaatgtccataaggggacctaaatggaagtaatttccaacaaaaaaccaattttaagctctttattctatgtgggcctatcagaagaaattgcaaaggcagggctggatttctgctctcctgaagcctacagtgtaatggattcactgaagtaaatctactatttggagaatatgctatgagggaaaaaagattctgagaccctgtctttggtttgttct

SEQ ID NO: 741140 - DNA, 639 bp, Homo sapiens
atttccagtctgacaagcgaatatcctcaaatcattctctacatgcagttagagtgaatttccaaatgtgaatttgatccctttactcattgattagtttactgtttgaaattcatcaatggctttagttattatgataaagccgatatccttaaaatgacctatgagatcctgcatgatcttgacttctcacctcatcttgtccactcagtttggtctgcgtgtcttttacttccttgaaggagatactactttcagcctcaagaccttcgaatactctgttctttctccttagatcactttctttgaatccttttatttaaataattctctgattggaatgtcagctctgtgagggggagaggtcatctctgtattttccatattctgatgcagtaagcattcgcasatatttcttgagtgataggaatcattcaagagtaaatgcccactgaatgagttcctgttcttatttttcacacttgctgcccctcctgtgttccttgcttttttttgaatagtctcatggatccagtctttcaggctagaaattgaatatcctctctctctttcttttctttttttttttttgagatggagtcttgctctttcatttctactgttaatcaagcaccttcc

SEQ ID NO: 741141 - DNA, 564 bp, Homo sapiens
tttgataaatacagtagttgactagaaataaaaactgctatttagtcctagaataaagccctggacacatagaactctaaggcttatacagctatattttatcaactttattgggctattagctttatttttcagagcatattgatttatgtaaaagaatcagcaattttacctatttcttgggagaaatgaacaattattatatattaaaacttaacaagaaagtacacagttcatttaaattcayggcacctgcctcggtaattttcattatactaatttgcaaatataataactcatccctgaaatctcctcgtctgacattttcttcttcttagcaaaatctaatagagcggaatttcactgcatttcatgttataatgataatcttttttctttccttagttgaggaaaatttttttcttaacctacgttaagtcaggaaaacgagggattaaagcacatctagtggtgcactgtccttagttttgtagcgtaagttgctttctaaagttatgtgcaaaatattcactgcaaatttattgtgaggagagttatgagtca

SEQ ID NO: 741142 - DNA, 624 bp, Homo sapiens
aacttgatcgtgtatatggaaaattctaaggagtctcataaatgaatttagtaagggtgcaggataaagtcagtatacaaaaatcaaatgtatttctatatactagtaacaagcaattgaaaatgagattttttaaagtaccatttaaaatagcatacaaaacacaaaatacttaggaataaatttaagaaaatatgttgaaaatttgtatcctgaaagctatgaaacatttctgaaaaaaaatttaaaagacctaaataaatggagagctattccatgttttggattggaagactcaatatttttttactcaatatttttaagatgttaattttccctaaattgatctatagattcaatataatcccaacccaaattccagatggctttctttttggtaaacttcacaagctgattctaaaatgtatatgaatatgcaaaagatctagaatagccaaaacaatgttgaargagaagaacaaagttgtaggacttatattacctgtttgcaagactcactataaagttacagtaatcaagacagtgtagaaacacatataaatcaatagaacaaaattaagagtccagaattagacctacacataagtggtcaattgatttttc

SEQ ID NO: 741143 - DNA, 603 bp, Homo sapiens
tgcattttggtaacattagggaagaagaccttctcggggctagagcacagacaagatactcagaggccaaagaatgagggagagagaggcaagcagagaggcatctgtgagctagctgccaactctctgcagtagtggagattggcacagaatgagaaaggggagttgagttctaggtgagatttgaggtcatcaccacacttctatttctgtctttaatcaaatatatcctaaaatttacgttgctctctttacagagagaaggaacaggaatgtgttttcctgcttttatcaggatataagatgtacgcagcctttgattctaatatattatatatataggtttaacagccagtcctgattcactgtgaggtgacatatactgacaccttgtggcaaaccacaatttttttttcataaagggcatctccygcattccccccactccccacccacacacagtgagttctacatgtaagctgcaaatctgttacctacttgaatttaccttattggtacacagggacttagggaaggtgacatgggtaccagcccttggacaagagtgagaatctttgcaaattttaatgtggtgcagagaga

SEQ ID NO: 741144 - DNA, 508 bp, Homo sapiens
catttgtccaaagccaaattgttctatttttcaaacttaggagataatatgaggctgtattttatcaaactattttagaggcaaaatgaaaaatttaatttaattctctaatatggtttgtgactaaatgaagagtctgtttttttatgagtaacatcatgggctgaattgtgtctccccaaaattcatatgttgaatctctacccactcgtgtgactatattaaatataaggccttttakgaaataactatggttaaatgaggttacaggtgtagggacagaatctaatagaattggtgtcctgataaggccaccagtctttgtgtatggagagctctctgtctccatgcacatgaaccaaagaaagaccctgtgaaaacacagagaggaggaggccatctgcaagccagaaaggcagtactcaccagaatcagcccatgctggcaccctgatcttggattttagcctccagaactgtgagaaaatgaatttcaatgatttaagaca

SEQ ID NO: 741145 - DNA, 623 bp, Homo sapiens
gcagggaattccaggtcacacagttagaaatagagaggatttcaaaattgattattgaatacctacattactcggtctgtgtcatgtgccaaccctgaccttatgctccagtcttatatctagggatgagctctgttctttagaagcaatctctctgggtgttgaaattaaaaccaaaatgatcacttgtaaaattcacaatatccttaaagaataaacaagtaagatcttcagcaggaacaagaaatagcccaatttttgacatttagaaaaaagagaaaatttccacaagggttttggtaaaagtgtatatgatttaactgagtgaaaattatcttcagtaaacaaggcaaaaaatatttatagagctgcttctctaagacatcatgccaaagtaaaattcagtttaagtaattatagttggagccagaattaagtgatwggtgtagttttctgttgcaattttctcatgatgtagactaatccatggttgggtattagaattaaaagaatctcaaatagcagccttcctgtttttttcatgtctttttaaaatattattgaggagaggggagtagatgagagacaagggcagtgagagttcttggatattttagaattta

SEQ ID NO: 741146 - DNA, 652 bp, Homo sapiens
aggaaagaaaaataatagtctgaagaaacacagcaagcatcaaaaccagatttatatataatacagatcactgattttagaataatcagacaggaaatttaaagcaactactattaatatgttaaggcttctaatagaaaaatgaaacagtgyagaaaaacacacggataattagggaaaaaaatgaaacctcaaagaataaaaaaaatgccaaaagtcaaaatactattaacagaaatttaaaaattcctttaatggtctcaatagcagataggccaaataaagaatcagtgagtttgaatatgtcaacagaaacttcccataatacaatgtaaagagaaagaagtatataaaaacagaacaaatcatccaagcaatgtggaagaatttcaaaggtggcaatatgcgtatacttgaaataccccaaaaaagaattaagagagaatagagcaaatgaaatatttaaaataacaatagctgaggattttctaaaaaatattgataattaccatatcatagatctagaaagtacagagaacaccaaacaaaataaatactaaaatatcttaatctgaacccaaagtataccttgccatgtgtacataaaataagccagggaaaaaggttgcatgcagtataatttcaattctat

SEQ ID NO: 741147 - DNA, 641 bp, Homo sapiens
tcagtatttcctaggaacagcagaagcaaaataatggtgacgctggacatccaggcactccattaggcactgaatgcctaggtaaggtagtaagtggagtgacctggtaaagaagagtgggaacaggacggtaaacacaaataatgctcaaagaaatattaagattgcaaattcttatcagccctacttctgatttgaaggagcctattgatttgtcaatcacagaacttggttattacatcaaccaagagtagaaaacctattcgaattgggcctaatggtctacttatctaaatctttataagatggcgagtgctatgcttcattttttattcccttttaaaaagagaccaccaatatcatatggtatttaaaamgcaataaacttactgagatggataaggttacatcctgttctgtttagcaaacagagttgggagtacaattgtaaaaatacaaaaaaaacacataaaggcaaaaaataagagagagacagtgagagcacaataacttgaaagtcagcataatggttgtcattaggaaggagcaggtgggaggattggaaaggatggacctcttttttttttttttagatggagtctcgctctttcgcccaggctggagtgcagtggcacaatctc

SEQ ID NO: 741148 - DNA, 544 bp, Homo sapiens
tcctgcaagtttactgaatttatttatcagacctaagagttgtttggtggagtctttagtttttttctagctataggatcatatcgtcaacaaagaggtacaatttgattgcttttccagtttggatgccttgccttttatttctttctcttgcctgattgctctggctaggacttccagtactatgttgactaggagtcacaaaagtgggccatacagtatgatgttttgttagctttggatttgccatatatggcctttttgttttgaggtatttaccttctatgccccatttgtttacrgtttttatcacaaagcgatgttgaattttatcaaatactttttctacatcttttgagagggtcatatggtttttgtccttcattctgttgatgtgatgtatcacatttatttccctatgttgaaccatccttgcaaccctggagaaaattccacttgatcatggcatatatatgtatatatatatatatattttttgatgtgctgttggattcagtgtgctcaattcttgagaattgttgca

SEQ ID NO: 741149 - DNA, 551 bp, Homo sapiens
cctgaggttgaaggatctcaatggcttctgcacatagtaggcaaactacaaatgtcaaatgaatgcatacaagaaacaccgataatcttcgttaaaatttattaggtgctacaaactagctactatcagtatgttacatgggttgtaaagtagaccaccattatcctcaattaatcatggaggaagcagaagtcctggaggatgaaattgcttgcctatggctacrcgagctagcaggtggtgaatcagagtgggagcccagcagtccagcatctgtacccttcatgacccccataaacagcccactgtgagtgacgtgttgcagcagcacagatgtacatgacagactcctcctcagggatcatttctctgactgcataataggagccaggctggatgttgaatgagggtgcagcattatcagcaagttgtaatgacagggagcactcagcgagcattcctggcacaggtgtgggtagaggcacagaaacccatgaatgaatagttgagtattggatgtgaagggatgggagtcagtttccccccaccct

SEQ ID NO: 741150 - DNA, 596 bp, Homo sapiens
agtatcatgttactagacttcaaacgatactgtaagggcttcagtaaccaaacaacatggtactggtacaaaaacaaacacatagacaaatggaaccgaagagcaaacccaggaataaagctgcacacctgcagtcatctgacctttgacaaagttgacaaaaataaacaatggggaaaggactccctattcaattaatagtgctgagatagctggctagctatatgcagaagaatgaatctggacccctaactctcaccaaatacaaaaattaattcaagatttattaaagatgtaagacttcaaactrtaagaatcgtagaagaaaacctggtaaacaccattctggacattgatgttgggaaagaatttatgactaagtcctcaaaaataatttcaataaaaacaaaaattgacaagtggacctaattaaaataaagagcttctgcacatcaaaagaaactatcaacaaaagtaagcagagaacctgcagaatgggagaaaatatttacaaattatacatctgataaaggtctaatatcatgaatctattaggaacttgaacacctgaacaagcaaaaagcaaataatcttat

SEQ ID NO: 741151 - DNA, 596 bp, Homo sapiens
agtatcatgttactagacttcaaacgatactgtaagggcttcagtaaccaaacaacatggtactggtacaaaaacaaacacatagacaaatggaaccgaagagcaaacccaggaataaagctgcacacctgcagtcatctgacctttgacaaagttgacaaaaataaacaatggggaaaggactccctattcaattaatagtgctgagatagctggctagctatatgcagaagaatgaatctggacccctaactctcaccaaatacaaaaattaattcaagatttattaaagatgtaagacttcaaactataagaatygtagaagaaaacctggtaaacaccattctggacattgatgttgggaaagaatttatgactaagtcctcaaaaataatttcaataaaaacaaaaattgacaagtggacctaattaaaataaagagcttctgcacatcaaaagaaactatcaacaaaagtaagcagagaacctgcagaatgggagaaaatatttacaaattatacatctgataaaggtctaatatcatgaatctattaggaacttgaacacctgaacaagcaaaaagcaaataatcttat

SEQ ID NO: 741152 - DNA, 626 bp, Homo sapiens
atttcttccagatacattcattcctctctctcaagctcagccttccacaaagcccttgtgcacagacacagttcagccatgctctttgccaatttgtaacaagggtagcctttactccaatttccaataccttgttcttcagttccatctgaaaccctgtaagaatggtctttactgtccatatttatttccctagtgttaacagcaaaagcaaactaaaatattttaaagaggcttattctgagccaatatgagaaatcatggctcagagaacatggtgtcaagaggtcctgagaaagtgcacctgcaatggtcaggttatagtgtggttttatacatgttagggagacaggaattgtgcgtaaaacaataaaacaatacatggaaggtacttattggtttgacctaaaaaggcagaacatctcatagtggtgacttwcaagtcataggtgggttttataaattttcagttggcaattggttgaaagagttaagctttgtctgaagacttgaagtcagtaaaaaggaatgcttgagttaagatggggggtctgctatctgccatgtgatgctataccaaattcaggttggaaagtaggtcacattatacccagttaacttcttat

SEQ ID NO: 741153 - DNA, 644 bp, Homo sapiens
tcttaacatgtgactcctataacctctgagagctaacttactgagttctagcaaatctcaaggcagcacgccatgtgttagttacactgcatagcctcttcaaaataaaccacaaaatactcatgttgatcctgtgagattaagacaaattaaaaatctaatacatagttttgctgtcaggtcctaaagatcaaaggtcaacatagtatattgcagtaaggctataggttacccatgscccaatattttatcataataacccaaatggggatgaaacacccagcagtagcccataaatctattagcagtgaactgtcagtgtcccatatactagggtaatttgttaattcagacctgggtctctcttttcactagaccttgtaaactcctgtttgaaatatcaataaaccatctgctttgacttgttaatcaaatgactttattcagtccaaagcagttttttcctaataaaaacagagtatttatctccatggctataaaagaggattgttttcaactgttcacttatagttaagaagcacatttcatttggattgatttccaatgctttggtcatatcttgtcactttctatttcttacacacagcatctcagtttagccatttaagaagggaaaaacagtc

SEQ ID NO: 741154 - DNA, 628 bp, Homo sapiens
gtctattatgctttttttcttcaaaattaatctcaaatcttacttctactaaatcttactaactctggacttgatcgatcccctgctactcaacacttatgctgttgcatactttttgctacttaattcatattactgaacctggtacataaattaaaggcttgtatctccaattagattgtaagtttactcagagcagggattgtgtcatatacatttatagtatctcactgtttttatcttcccctaccccaactataatcatactttttttaaacacctgaacattccttyttccttggcaataagggtatgttagcaaagctctataacctttttttgttttttcctctgacactcacattctcaggtgagagttctataacttgagcaaaatcaaagacagtggtatattttgtaacattagagatactacacggggcaaagcttagctgttactgcaagaagcctatctacaataatagattcaggctaatttgaatgcctcagtctatatcttatttcatccccaatttatttattttttaatttcaacttttattttagattcagggggtacatttgcaggtttattacatgagtatattgtatgatgctgaggtttggg

SEQ ID NO: 741155 - DNA, 628 bp, Homo sapiens
gtctattatgctttttttcttcaaaattaatctcaaatcttacttctactaaatcttactaactctggacttgatcgatcccctgctactcaacacttatgctgttgcatactttttgctacttaattcatattactgaacctggtacataaattaaaggcttgtatctccaattagattgtaagtttactcagagcagggattgtgtcatatacatttatagtatctcactgtttttatcttcccctaccccaactataatcatactttttttaaacacctgaacattcctttttccttggcaataagggtatgttagcaaagctctataacctttttttgttttttcctctgacactsacattctcaggtgagagttctataacttgagcaaaatcaaagacagtggtatattttgtaacattagagatactacacggggcaaagcttagctgttactgcaagaagcctatctacaataatagattcaggctaatttgaatgcctcagtctatatcttatttcatccccaatttatttattttttaatttcaacttttattttagattcagggggtacatttgcaggtttattacatgagtatattgtatgatgctgaggtttggg

SEQ ID NO: 741156 - DNA, 614 bp, Homo sapiens
taggctccaatacaatattagtaagacttattaacttagcagatcaatgtggcaatattatttatcccaggaatgttcaggtgttcgtgtgtggtgtgtctatatgattggaaacccatcgactggctgtgaaagcagcagtttaggattgcccaaaagacaaagatttggaaaagctttaaaaagttttgaccacaaaggtcataaattttagtctagtgatgcagatttactggatcctgatgagcaacaggagtgaaaagcattttctagaagaaaaacctgtggtgatttctaggtaaaggacttcagatgagatcctgaagtaataacatattggcagctttagtagactcacaaacatgaggttaggcagcgatctaaggtgatagacagatgacatcagaaacaaaataagtactaggcaaggccatagccttgaatttttattagagttaggaattgaggatattctgaaccccgaggatttcaaccaagagaaagagtagcraggcaatttagtttaaaaaataattctgatgtatattgggaaggattttattcaacttaaaatcagaaaaacaaccactaatagtttatgtgatgcttcttct

SEQ ID NO: 741157 - DNA, 536 bp, Homo sapiens
ccccaaggtcaggagttcgagaccagcctggccaatgtggtgaaaccatgtctctactaaaaatacaaaaattagctgggcatggtggcgtgcgcctgtaatcctagctactcgygagacttaggtgggagaactgcttgaacccaggaggaggaggctgcagtgagctgagatcgcaccactgcactccagcctgggcaacagagtgagactgcatctcaaaaaaaaaaaaaaaaaaaaaagggcaaaacatttttatagatgcttcacaaaagacgttcagataacaagtggatgaatgactgactactctatttcattaagcatcagagaaatataacttaaaattacaatgagacatcagtacagacccagagcaatagtttaaaaaatttaaactactaactactataaaccccaagggctgatatgactgttgaataactggaactgccatatgcagctgatgggaatgcaaaatgggacagccacttttgaaaaaggttttaaagtattttatgaaattaaggctgagc

SEQ ID NO: 741158 - DNA, 536 bp, Homo sapiens
ccccaaggtcaggagttcgagaccagcctggccaatgtggtgaaaccatgtctctactaaaaatacaaaaattagctgggcatggtggcgtgcgcctgtaatcctagctactcgtgagacttaggtgggagaactgcttgaacccaggaggaggaggctgcagtgagctgagatcrcaccactgcactccagcctgggcaacagagtgagactgcatctcaaaaaaaaaaaaaaaaaaaaaagggcaaaacatttttatagatgcttcacaaaagacgttcagataacaagtggatgaatgactgactactctatttcattaagcatcagagaaatataacttaaaattacaatgagacatcagtacagacccagagcaatagtttaaaaaatttaaactactaactactataaaccccaagggctgatatgactgttgaataactggaactgccatatgcagctgatgggaatgcaaaatgggacagccacttttgaaaaaggttttaaagtattttatgaaattaaggctgagc

SEQ ID NO: 741159 - DNA, 673 bp, Homo sapiens
taaaattttagggtaatatatcattggttgttctgttttgattttgctcagttggcatgcagtaaagcattgatttcaacttacttgtgaataaaattaaaaagtcggttaggcatcactttgttttgatttgaactatgctgctacctggttttaattgttcaactacctttctgttcagtagtgatgtgtgtatttgtggctcctgtccattcagtagatccctctgaaggaccctcttttattgacagcacattttgctctatgaaacatactctatttctgtgccaaaagatctatttgaaacagagccagtgtctcattccaggaagaggaaaggatatcaagagtttccatggcaatcagttgayggaactaaattaagcaggaaacctcttcagaatgcaaagtagtcttgcaaaacaaagtggtttgaaatattcaggaagtgtgtcacagcacaacgaaagaaatggagatatgaatacctccataatgtaaactccctaactgtaaaataaacaattaaatgctagcttttgtcctacaaaaataaaccctcaaacaactgtcatttctaatcaaatcttttgttccagttagttttggttttttttagttcttatctcttatgatcaacatcatgtaagaatataactacaattgtttatgt

SEQ ID NO: 741160 - DNA, 741 bp, Homo sapiens
aggatccaaccgattaacctgtggtcttcaaggctatttaactgagattgtgcagttgccacactgtgaacttctttcagtttctggtcattttcattgaaaaagacaggaaagggaagtggctgacacagctgctcttcccatgggtagtcacgttaattaggggccaaggaaggagaacaagggaagttttctgatttttcctgagraaaaaaacttactgtcagcagctgtctttctaatctcattcttttagcaaacccctccttctctttctgtcctctttgggattttattgacgaaaaaaatttgtaatccctgccctaaaattgaaataacttacctgcaatgcaaataacaggtattggttttcacaaaagcaatttaaaattgtacctcgaccaacgtctcaaaaaattataattcaccaggctaatgttataagaagaaacattcggagtggaggagaacaagagatggcagaattagatagaatacaaggtgtagagcaaatgctctcagattcctagaagtgcagaaaaagcattaggtattcagaacttctgctacaaggtgatcaatgtctactcttggagggaaaagtcattggaagcctcatccatgagaaatcttggaatctttgaaaattcttccagcaggctggtgtttgcccttgtgcagggatagaagctgtatgctcatctctcttcttaatcagaaaagccagggaagccagacagc

SEQ ID NO: 741161 - DNA, 591 bp, Homo sapiens
acgtcattgaaaggagtcctgtaaacagctgaaaagattaaagattactaagctggtagcagcctgtgggatggtttggtgtaggaaagttctagagccaaggagtcagattggcaagctaccgtaatcatctaggcaaaagagtcggggctggctgggcaaggtgggtcacacctgtaatcccagcactttgggaggccraggcaggcaaatcacctgaggtcaggagttcaagaccagcctggccaacatggtgaaaccccgtctctacttaaaatacaaaaattagcccggcttggtggtaggcacctgtaatcccagccactggggaggctgaggcaggagaatcacttgaacccgggaggtggaggttgcagtgagctgagatcgcgccactgcactgcagcccgggcaacagagtgagactccttctcaaaagcaaaaaaaaaaaaaaaaaaaaaaaaaaagagggctgactttcagggcataggcactagaaatgaaaaggaaggagtggaaacaaaatatgtcacacagaagaagagtaggacatgagaactgaatgcctgaatgcatgatagaggccaggga

SEQ ID NO: 741162 - DNA, 416 bp, Homo sapiens
cccctactggaccagggcacttcaaggacagaaatggtaccttatttacctttccatctgaaaggcagtatagcatagtcaaggtaggactctgcagccaagatgcctgggtaaaaatccagattttgtcacttagtagtgctaactgtgcctctgtttcctcctctgtaaacaggagataattaatagtacctacctaataggatgtaatgattattaaaagtattaatatattgaaagtacttagactggtacccaccacatagtatcatgtgttmgttattattgttgttattagttgaattctcagtacctacctagcagagattcagtaaatggacacgttgtgtatcagtcacagatgggcaaagtataaaggtacaaatcctcctttccctgaaattctgcctatttca

SEQ ID NO: 741163 - DNA, 634 bp, Homo sapiens
atggcaccattaaattttattgaataatgaaaaccaatactacacaaactcattcagaaaagacaatatatgagaaaacttcccaactcttctaagttagtgacatcaccttaagtttaaaacctcaattaagatattacaggacaagaaaataagaagccaatcactcttatcatcataaatgcaaaatattagcaaatttaagtcagatctatatttaaaaatatgttatgacaaattttaacatatttacttcagtgtttattattttaaattgaatcattataactttttgagttagagtaaatgaggaaataaatttcactttctgtaacaccaaaactgcacagaaaacaaaatctcagaaacatttatgtgacaaatactataaaaactgtaaaaactataaaacaaayctgtatagattctagggaaaatattttattcaatgataaaatattacaatttcctttaactcagggagaagataaaaatatcccctatctccacatctacctaaggtattactacaagtttcagctactctaataaggaaaaagacaaaggatgcaaactggaaaggaagaaatagaatgctattatgtataagtgacattatgttcaggtgacatta

SEQ ID NO: 741164 - DNA, 685 bp, Homo sapiens
atagcaggtactgcatcaaatgaacaaatgcaagatagaataagtctcacgtatgttatacaataattatttaccctggacttcaaaacccttactgagaggctaaataacttgaaattactataaaactacaaaagaagaacatttctgggagttcagagaatgtcaaaagctcatccatcatttgacctacagctatgtggggaaagaaagaaagcccacttcttgtgcacacacaatcaggagccaaggtagctttaagtagattgtccataaagttgcataagacaaatatctatgccttagtacatatatatacacatatgctgcattgtatatattttcctgacagccataggctgtaagaaaaatacatatgattgctcttgcaggtsttgactatgacactaaaatagagaagccaactgacccagagaggagctaagtcaattgcagaaaagaaaactaatacacaaataacaataatacaacaataaagcgatgaaaaaaatgtgtgaactcattgcaacatctgggggttattttcctcacccgagttgatcaaataaagatcatattccatttggatagcatgagatcttgccagataactatttgagacagcctttctcctgagatggtggacaggctttcgtggcactggatccaatttttattctgagga

SEQ ID NO: 741165 - DNA, 588 bp, Homo sapiens
acagagtgggactttgtctctaactaactaaataagtaaaattttctggaacctttttgcaacagcattctactcttttttgccaattcagttacagtagatacctaccttaaagcctcttcttatggtctccctatgccctttgccttgctaaaggaacaacctcaagattttaaatataagtaaacattctaattaagaacagtattccacagttgcttataaaagcaactgtggacccaatccagagttggtgctctgtagagcataaaagaatcatgtgagatgaacttcgccctccaggatttcccccactgaaagcaattagagaacaatttgctttcagaccagaagtgtcttaagggggcttttctttctgagggtggtggttattggcacacaggtcaccctctgagatggctgggattacctctagggaacattmtctagtacccaaaatgtactgaatggccatttgggaggagagaggtggtggccatgaagtattctgatctttcattacttgtctccccttgacgctgcttcctaagtgctgtgccctttaggagaagctggcctcctatccac

SEQ ID NO: 741166 - DNA, 637 bp, Homo sapiens
ggaagaaaaagaaagaggaggaaagtacagtgggggacctgggggagggagagaggtcaggggagagaaaggcatttttcaagcaggaagggtgctgcccccgagagggagctgctgctccagaaaagatggaaaggagcgtgctagagtgcagctgcctctgctcagagctttaaaaatcctctggaggccgcgtgggcagaacctcccatggttccaaggcactggccaactccatcctttcctgaccataaatttcatttgtccctctctttcaggattgggagatttcttcttctttgggtctggacttcttccctgggaaggagagggggagagttagctttctaattcagagaggaaaatgacaagttccacctgcatgttggtcaagaagtgagctgggacagaggacccctcccccagctctgctgctcctggaccaaccrccctgccctctctaggcctcgcccttacattgttagtcaggtcaggagaaaccctgaactaatggaggcacctggtcttcagaaggtgggagacctgcctgtgccctgctggctgggccacagctaggctcagggctgtcacccaggcaggggagctccccatttactgcctctgagggggagctgaa

SEQ ID NO: 741167 - DNA, 661 bp, Homo sapiens
aatatttccaagctctcagatgattgcattatgcagcacaagttgagaatcactgggcagtccctctattccaattgctaacttttggggagagtgattctgttttctccaaatgggatgagtgacccctgcctggctcagcttgtccccgtcaacatgggcatgccctggaggcattgctggggcagacatttgaagactttggaaatagcagagggaaaagrtgtccaccaggcctgaccatttgttagggtcagagaaaagtggttaattcaccctgcagaacactaaccaaatacgagcgcgatttatgcccccacctaaagcccatatggaagcaggggaaccccaggcctgggagagacctctgcaaagctccatcctgagtttccctcaagagaatcaaccttaagagatcagagtttcagagatgaagtctccttcattctgtgccagagttaacctaaattccttccactccccagaccccatcatgggccttgaccatgtaccagaggcctgtgctgaagataaaacctgattgcatttctgcctcctagagtctgaagaaacgggaggcatggggaagtgactcagatgaaagaggctgcatattattttctgtacagtggattccaaagaaaaacaaataacagaatcc

SEQ ID NO: 741168 - DNA, 611 bp, Homo sapiens
taacactctccaccccctgtcccatagagaagccaccctgtgatccactctctccccttgtgtctgaatccaagtctaagctcccccaattccacagtggtggcatcccacatcgtggttcactgccttctcttaggtgggggaaagttctgtggggctaacttctgctggcacagttggcccacttttatgttggtggtgaccaccacaagtaccatttggctacagactgtgtcctggtattccaaggcttttgtgtctggaaggcatcctttagccagcctgctaaaggttgttctggatgtggagtggccctctgtcacatcctccacttgtaaggcatgacatgtagtgcrgttgttactcctaaacagtatatctcacttcagcttccttctgtctttgagaccagggtcttagggacacacacttatgtccttgcctttaacacagtccccacctaaacccctcagggtaactgactacatccaattcacagggctgtccctgcactagaactcccaaggtttgtattcatttcactgtgactttagcttcttcagagccctcatcctcccttttggaacagtcgcagtggggcaccttcttga

SEQ ID NO: 741169 - DNA, 599 bp, Homo sapiens
caaatcagtggtccctttcccaagarcatcagccctagtttgatgaaagataagtgacaaaatgaatagaagtctggctagaccaaatatagagaaatgacagtaagatgataaaagatttagaaacgtaactcatcattttatcatattatatatatatatcttttgtactctatattttttcatgctgtgttacaaaatgttagagaagtctactgctttattcacttccaggtgatgagaagtcaagtcaaaaatcaggacttataacgtcaatctgtgcctttgggttcctagaagagaagcaacatagcattgaagatcgaagaaggtcaccataaggaaaaattcccaaagcaaaaaacaagctttgtgtaccaccattccatcctgtgcatctgagatacactgggtctggcacaaattacctcctcaattaataaataatatatctgtaaataaatagtaactctaggaatagttataccatttgtttctatatattcattcccaatgttgacaaggatctaattcacttaaaatttagtccatattacattatcaaatttaaaaaagaagactaaagattaatataccca

SEQ ID NO: 741170 - DNA, 616 bp, Homo sapiens
aatatgtgcatttcttttgcatatgtaaataatgttaagtaatatgtttagctgaaatgtaaatggtcaaaactttccttgctgagtctattgcactataagttgggtttgcagtaagaaactaacacatttgtgccttctcaaagtactaactttgggttgtatgctatccagaaactatattaaatcatttctgtcccaaaataatgaccttacaaaaggaatttaactttacctagttctatcacgattgcatattaaggagagatttagaagctggcagaagtttttgttcaatcagctacctactaagcccaaaactcatatactgtatagccaagaaaaagtaaactatattctcttcctaattattcttttgaaaaatgacttcatgttcattgtcttctcttcattcttaaaaaaggaactcattttgtaaaasagtcctgactgataatgtgtctcttgaccttgcaggtcactggcccaatgaatgtctctgagccaaattccagctttgctttagtaaatgaatttatactccaagatttatcttttgagtggacaattcagatcttcctcttctcactcttcactacaacatatgcactgacca

SEQ ID NO: 741171 - DNA, 657 bp, Homo sapiens
agggattcccgacttttctattagcaggttttatatgcacagaaagactgataaatattaaggtcaataaatggccaagtgccaaaaaaaaaaaaaaagaaaagaagaagggtatcatatgtaaaattttatgcttctgttttggttaggatacgtgtgtttgcgtgtatttatttgtgtctgtgtgatgtacatacatgtgatgtaagatacttttttytgtttgagacagagtcttgctctgtcacccaggctggagtgcagtggtacaatatggactcactgcaacctccacctcccaggttcaagcgactctcatgcttcagcctctgaagtagctgggactacaggctcctgccaccacgcccagctaatttttatatttttagtagagtcagggttttgccaggctggtctcgaactcttggcctcaagtgatccacctgctttggcctccaaaaagggtgggattacaggtgtgggccacagtgcctggcctaggtacttctttcataattcccaattctgaccatacctgaaaacctctgctattaattaatatattaggattagatatattttgaaaagcatatcttttgatgttttaaatagatgtgccattataaatattttctttgatttcttaattcgggactt

SEQ ID NO: 741172 - DNA, 617 bp, Homo sapiens
ctctacctcctgggttcaagagattctcctgcctcagcttccccaatagctgggattacaggcacctgccaccatgcctggctaatttttgttatttttagtagagatggggtttcaccatgttggccaagctggtctcgaactcctgacctcaggtgatccacccgccttggcttcccaaagtgctgggattaccggcgtgagctactgcgcccagccttgactactctttttttttttttttttttttttgatggagtctcactctgtcaccaggctggagggcagtggtgcgggcycggctcactgcaacctttgcctcctgggttcaagcaattttcctgcctcagcgtcccgagtagctgggactacaggcgtgcatttgcaaatactttaacctattctataggttgtctgtttactctgttgataatttattttgctgtgcagaagctttttaggttaattaggtcacatttattaatttttgcttttgtcatctttgtcatgaaatctttgtcaggggctatgctgagaatggaatttcctaggttgtcttccagggtttttatagtttggggtttcacatttaagtctttaatccagttggattgatt

SEQ ID NO: 741173 - DNA, 688 bp, Homo sapiens
ctgcctcagcgtcccgagtagctgggactacaggcgtgcatttgcaaatactttaacctattctataggttgtctgtttactctgttgataatttattttgctgtgcagaagctttttaggttaattaggtcacatttattaatttttgcttttgtcatctttgtcatgaaatctttgtcaggggctatgctgagaatggaatttcctaggttgtcttccagggtttttatagtttggggtttcacatttaagtctttaatccagttggattgattttcatatatggtataagggaggggttcagtttccattttttgcatatggctacctagttatctcagcaccatttattgaatagggagtgcttttcccattgcttgtttttgtcagccttgttgaagattagatggtttttgtttttagttctgtttatgtggtgaatcacatttactaatttgcrtatgctgaaccaaccttgtgttccagggataaagcctacttgattgtgttggagtagagttttaatgtgctgctggattcagtttgctagtattttctttttttctttttttttttgctagttttctttttttgttgtatctctgccaggttttggtatcagaatgatgttggcttcatagaataaattagggaggagtccttcctcctcaaattttcagaatagtt

SEQ ID NO: 741174 - DNA, 621 bp, Homo sapiens
aaaagtctgaaactccatctaatactaggatatactggaaaatgccaataaccctggtcatgtaagagctttcttgatatagggacaaaaaatgtatttttatttttgtgttgggagttaatgacttcatatttaagaagccatatgtacgtatgtgtatatgtatatattgctacagaaggactcctcacagactaggaactaggctgccatttgggagatttctaaatagtatgggtgagggtgagaatggcatacctggaacatcatgttcttcttttttgctttactctgctctacacttttagagttttttgcatacgttgaatatcctgaagagcagtatgatatcctgaaggtaatattttgaatatcctgaagtrcaggaaactgcccgagagtagtgtgtgagttaccagaaagatttgagtggtgctagggattaccaggcatgtttcaagaacatagagctccaggctttctcttagtataagccggctgcaacatcccctttttctgatgctctctttcatagcaaaatgtatagtcttggcaaatcattttaaatgtcctgttgatagctggaattggtagcgttattttaagaaaagcaagagcgtt

SEQ ID NO: 741175 - DNA, 474 bp, Homo sapiens
aagttctgtatatattttggatattaactccttattggatgtgtggtatacaaatattttctccctttctgtagatttctctttcatcaagcaaataaagatgagaccaatgtccaggaacttttccccatgtttcctcctaggagtttatggggycaggtcttatgttaagtctataatccactttgaattaacttttgtgattggaataagagaagcacggattctttgcatgtggatatccaatttcccaacatcatttatagacgagtctgtcctttacattgtatattcttggtaccttagttgaaaaaattagctgactgtaggtatgtgagtttagttctgagctttctattctgttttattggtatacatgtttttatgccagcaacatctgttttgattattacagttttgtaatggagttgaaatcaggaagtttaatacctctagctttgtacttatactcaa

SEQ ID NO: 741176 - DNA, 474 bp, Homo sapiens
aagttctgtatatattttggatattaactccttattggatgtgtggtatacaaatattttctccctttctgtagatttctctttcatcaagcaaataaagatgagaccaatgtccaggaacttttccccatgtttcctcctaggagtttatggggccaggtcttatgttaagtctataatccactttgaattaayttttgtgattggaataagagaagcacggattctttgcatgtggatatccaatttcccaacatcatttatagacgagtctgtcctttacattgtatattcttggtaccttagttgaaaaaattagctgactgtaggtatgtgagtttagttctgagctttctattctgttttattggtatacatgtttttatgccagcaacatctgttttgattattacagttttgtaatggagttgaaatcaggaagtttaatacctctagctttgtacttatactcaa

SEQ ID NO: 741177 - DNA, 474 bp, Homo sapiens
aagttctgtatatattttggatattaactccttattggatgtgtggtatacaaatattttctccctttctgtagatttctctttcatcaagcaaataaagatgagaccaatgtccaggaacttttccccatgtttcctcctaggagtttatggggccaggtcttatgttaagtctataatccactttgaattaacttttgtgattggaataagagaagcacggattctttgcatgtggrtatccaatttcccaacatcatttatagacgagtctgtcctttacattgtatattcttggtaccttagttgaaaaaattagctgactgtaggtatgtgagtttagttctgagctttctattctgttttattggtatacatgtttttatgccagcaacatctgttttgattattacagttttgtaatggagttgaaatcaggaagtttaatacctctagctttgtacttatactcaa

SEQ ID NO: 741178 - DNA, 515 bp, Homo sapiens
tacattcttctcatcaccccatggcacatattctgaaactgtttcatggaggaaactgtttcatggagaggaagccacagggctgacaggaaaccagaccttaacctccctctgcacctgccctgaggctggctcttgtgctcagtgggtcctgagtgyccccaggtggtcctgttccctcttcagggaggcttgtttctgggctcatactgacattttttctaattgtgttccccaaaatggagacagagtaaaccgtgaatccatgcatctcagagaacacagaacagcagaattacacccactgatccccccacacacatttaggtaaatcttattaaaactgctgaaaaggaaagacaaatagaaatatatgcaggcaagtggaggtgagcagagggggcattccttccaaaagaacagaaaagatgatgacagcattcttctggttaaaaccttacaagcaagaggaaagttgatggtatctgtaaagtgttggatgaaaagtcaaccca

SEQ ID NO: 741179 - DNA, 515 bp, Homo sapiens
tacattcttctcatcaccccatggcacatattctgaaactgtttcatggaggaaactgtttcatggagaggaagccacagggctgacaggaaaccagaccttaacctccctctgcacctgccctgaggctggctcttgtgctcagtgggtcctgagtgtccccaggtggtcctgttccctcttcagggaggcttgtttctgggctcatactgacattttttctaattgtgttccccaaaatggagacagagtaaaccgtgaatccatgcatctcagagaacacagaacagcagaattacacccmctgatccccccacacacatttaggtaaatcttattaaaactgctgaaaaggaaagacaaatagaaatatatgcaggcaagtggaggtgagcagagggggcattccttccaaaagaacagaaaagatgatgacagcattcttctggttaaaaccttacaagcaagaggaaagttgatggtatctgtaaagtgttggatgaaaagtcaaccca

SEQ ID NO: 741180 - DNA, 568 bp, Homo sapiens
ttcagcagacttaaatgttcctgcctgccatctctgaagggagcagcagatctcccagcaaagcgcttgaactctgctaagggacagactgcctcctcaagtggctccctgatgcctgtgcctcctgactgggagacacctcctagcaggagttgacagacacctcatacgggagatctccagctggcatctggctggtgcccctctgggacaaagcttccagaagaaggaacaggcagtagtctttgctgttctgcagcatctgcgatgacacccaggtaaacagggtctggagtggaccygcagcaaactccagcagacctgcagcagaagggcctgactgttagaaggaaaactaacaaacagaaagaaatagcatcaacatcaacaaaaaggatgtccacccaaaaacaccaactgaaggtcaccaacatcaaagaacaaagttagataggtccaagaagatgaggaaaaaccagagcaaaaaggctgaaaattccaaaaaccagaacacctcttctcctccaaagtatcacaactccttgccagcaagggagcaaaactggat

SEQ ID NO: 741181 - DNA, 716 bp, Homo sapiens
ctagtatccaagggacaaaagcaaggcatgtccaatgccttattgtttcattgagagacttcccaggccatgactggtgttaaggtttagggcacaactgtctccagctcgccggggaaaagccaaagccacctccagctttgagccctgggccaggccgatgtgctctaggatggggtactagggtgtcctttccaggtgggcatgtgctcaagcggactgactggctatcagcacttgccgtgtttggttgaagtgatggcctatttggaggtttctgccctttggattataacaaataagtccacratacaagcagccacatggacaatggtgagaccagcagtcaacagaggggtgcttggctgcagttggcaggtgttgatgttgttttcatttgttttttgagtttgtttttgtggaactttacgttcaaatgggctcatatcagatgagcagccgactgacccacgggaccctctatggctaatcatccgaggagagtttttaccctcaataggttctccagcccttatgagataagagcaacatcaaacatttgtaaagatatggaaataatattttaaatagcctcaataatgcaatgaatataagcctataagtatctcaaagggtgatggagaagtcctgaaagctgggatgagggcgactcagctaagagccttgaatttagggagagttagttctacagaagt

SEQ ID NO: 741182 - DNA, 615 bp, Homo sapiens
tggaaataatattttaaatagcctcaataatgcaatgaatataagcctataagtatctcaaagggtgatggagaagtcctgaaagctgggatgagggcgactcagctaagagccttgaatttagggagagttagttctacagaagttggagatccattgggtgtccatttactggagtggaatttgaaggaattgtttgaggagatcagtatgtctctgagttaaaccagcccataattaagttctwttgaatggggcctaagaggcatgaagttctatcaagtggctttttctgtatccagcattgtgtgttttgaaaagtaaaatgtgtgacttggttactgtcagcaaagtatgcaattttgaaggacattagtgtcccaccaaagcctcgtattgtgaacttattatgtgcagagatatgagccacttgatttatattttcagtgtctgggaggcaagagactttcagatttccttaccctgaagacagctcttaaacaacgtctgagctgtttataataaatgtggaaatggagccattggttcgatagggcacccaatgctggtgtgactgcctgatgtctgcctaattttggggatccccagccccat

SEQ ID NO: 741183 - DNA, 686 bp, Homo sapiens
ggagagtttttaccctcaataggttctccagcccttatgagataagagcaacatcaaacatttgtaaagatatggaaataatattttaaatagcctcaataatgcaatgaatataagcctataagtatctcaaagggtgatggagaagtcctgaaagctgggatgagggcgactcagctaagagccttgaatttagggagagttagttctacagaagttggagatccattgggtgtccatttactggagtggaatttgaaggaattgtttgaggagatcagtatgtctctgagttaaaccagcccataattaagttctattgaatggggcctaagaggcatgaagttctatcaagtggctttttctgtatccagcattgtgtgttttgaaaagtaaaatgtgtgacttggttactrtcagcaaagtatgcaattttgaaggacattagtgtcccaccaaagcctcgtattgtgaacttattatgtgcagagatatgagccacttgatttatattttcagtgtctgggaggcaagagactttcagatttccttaccctgaagacagctcttaaacaacgtctgagctgtttataataaatgtggaaatggagccattggttcgatagggcacccaatgctggtgtgactgcctgatgtctgcctaattttggggatccccagcccca

SEQ ID NO: 741184 - DNA, 598 bp, Homo sapiens
ttcatattgccatttacaattatgagaattatgtgttttaaccattctaataggtgagtaatggtatctaatttttagttaaatgcacatttccttaataaaaatttacatttaacaattttcatatagtttttgctgagatgcctcttctcatatttggttcatttttaactgtattgttttcttttgattagttgtaagtttacttgcatattgattataaaagtcatttaacaaattaaaagaattcatttaacaaatatgtgacttggaagtattttctccaagtctgtggctgtcttttactcccttatcagtgtgtattgcagaaaagtgtgtgtgtgtgtgtttatacaaatttagatttaaaaaataaaattttattcatctacagatcatgtctttggtattatatctgaaatctcattataaaatatactaatatgattactttttccrtgtctctagtctcaggctacaatcaactcatgagtgtttaagcttcacctacttgattggaggactatcaacctaacatagttggaatacttctgtaaaaagatgtgttcttcttcctattatttctttatttgatcac

SEQ ID NO: 741185 - DNA, 606 bp, Homo sapiens
ggaggggaggaggtaagataaagagactggagattaaggcaagaatcctgactggtggagaagaagtggatgggcccagggcagtttctatagggtgctccttgatttggggttgtgagtgggtgggcatctatacacttccaagacaaggcaaagaaatgggcctccaggtagtattgggatccttaaattctcttttccaagcacctctgcccrggtactctcctggtgccccctcccaaggggagagccccggtctccttccttctcctctagggcgtcatctttcctctgttctcagcctccggaggagcctttggtcttgcccctgacacccaccgggcccaatggggtggcctctcacatgctctcccagattcactgatgtctttcctctaggtagagtcccagagaagctcagataccaaaggggcagctactgacctgtgtccaggggcactggatgggagctgggggcttctccttccccagcagggcagggaatgcagtggaaagcccagaagctggagcctgactctgggctgggtaatccggagctcaggttactgactccgatatatatagtatcttatctgacctcgcaga

SEQ ID NO: 741186 - DNA, 599 bp, Homo sapiens
ggtaatctcacctactacactcgggctggttttatgatgcaatgagataatgttgactaggtctggcacaaagtaggtggtcagttcacattggtgaccttgtcccctattctgaggggctgggttggtatgctttggaagtcctgcctatctatgacctgcaggacatggggctgagtgtgggcagtatctgatttccttcagcctgtcgctgctccgtagcacctcttcttgtgacatggcatctggcaatattgaagggaaagaggagattgtctggccagggctgggaggaaatcagactctgtgcactgcttgcccaagtgcccctcacctgtgtcccactctacctctgagggctccagagatgaggggaagatgcgaggagggagagragagtcatgtttgaggagctccctgatttctctatgagaaagaaaaatcagagaaataagttatgccatgcaaagtggagtgaatctggtagtcaagggttgaatttgaagaactttgatttttaggaaaatggtcatcttgtaaaggcccaaaccagagctttctcaactagaatccgattttaggcccaggggatatagggt

SEQ ID NO: 741187 - DNA, 689 bp, Homo sapiens
tgtcaaataatgatgacagcagcaatgatcacattagcaacaaatacttagtgagcccttagtaagcactctgggttctaagctagacctgaggatttttttttttttttttttttcatgtttaccgatttattttattacaaaggatacagatgaagagatgctcagggtgaggtatgggggaaggggcacagaactcccatgccctccctgggcgagctgccctccaggaacttgcatgtgttcagctatccaraagctctctaaatccagtcattctggcttttatttatttatttatttatttatttatttattttattttttattttttattttttttaattaatttttttattgataattcttgggtgtttctcacagaggggtatttggcagggtcatgggacaatagtggagggaaggtcagcagataaacaagtgaacaaaggtctctggttttcctaggcagaggaccctgcggccttccgcagtgtttgtgtccctgattacttgagattagggattggtgatgactcttaacgagcatgctgccttcaagcatttgtttaacaaagcacatcttgcaccgcccttaatccatttaaccctgagtggacacagcacatgtttcagagagcacagggttgggggtaaggtcacagatcaacaggatcccaaggcagagg

SEQ ID NO: 741188 - DNA, 689 bp, Homo sapiens
tgtcaaataatgatgacagcagcaatgatcacattagcaacaaatacttagtgagcccttagtaagcactctgggttctaagctagacctgaggatttttttttttttttttttttcatgtttaccgatttattttattacaaaggatacagatgaagagatgctcagggtgaggtatgggggaaggggcacagaactcccatgccctccctgggcgagctgccctccaggaacttgcatgtgttcagctatccaaaagctctctaaatccagtcattctggcttttatttatttatttatttatttatttatttattttattttttattttttattttttttaattwatttttttattgataattcttgggtgtttctcacagaggggtatttggcagggtcatgggacaatagtggagggaaggtcagcagataaacaagtgaacaaaggtctctggttttcctaggcagaggaccctgcggccttccgcagtgtttgtgtccctgattacttgagattagggattggtgatgactcttaacgagcatgctgccttcaagcatttgtttaacaaagcacatcttgcaccgcccttaatccatttaaccctgagtggacacagcacatgtttcagagagcacagggttgggggtaaggtcacagatcaacaggatcccaaggcagagg

SEQ ID NO: 741189 - DNA, 503 bp, Homo sapiens
ctggaggtctcaccaggaaactgtgcccacgacctctgcattttttctcatcccctagatgtagcggctttcacaggctcttggcagttttgtttcccagaagttacactaggactttgcgggcagggtggtgaygtccgtcatcatgctccccatcttcagagtccagcagaagtgtcctaactgacccctgttcccaggggaggacctcccatcccagtggtacgagctcccccatccccaccccaaccaatgctcagtgggtccaggtgcccttggctcagggcaccttcccgctctgcgatgtccatgcacagcaccatccctggaaccttctctggtcaagggccaggtcagattccagggggcctcggctggtgccagccccagtcccagtcccaggcaggcggcagacaccctccagcccacccttcctttcaaaagcctgaaccctggatcacagtcaggagcagcctctggaaaccagcccaagaccaggccat

SEQ ID NO: 741190 - DNA, 503 bp, Homo sapiens
ctggaggtctcaccaggaaactgtgcccacgacctctgcattttttctcatcccctagatgtagcggctttcacaggctcttggcagttttgtttcccagaagttacactaggactttgcgggcagggtggtgacgtccgtcatcatgctccccatcttcagagtccagcagaagtgtcctaactgacccctgttcccaggggaggacctcccatcccrgtggtacgagctcccccatccccaccccaaccaatgctcagtgggtccaggtgcccttggctcagggcaccttcccgctctgcgatgtccatgcacagcaccatccctggaaccttctctggtcaagggccaggtcagattccagggggcctcggctggtgccagccccagtcccagtcccaggcaggcggcagacaccctccagcccacccttcctttcaaaagcctgaaccctggatcacagtcaggagcagcctctggaaaccagcccaagaccaggccat

SEQ ID NO: 741191 - DNA, 503 bp, Homo sapiens
ctggaggtctcaccaggaaactgtgcccacgacctctgcattttttctcatcccctagatgtagcggctttcacaggctcttggcagttttgtttcccagaagttacactaggactttgcgggcagggtggtgacgtccgtcatcatgctccccatcttcagagtccagcagaagtgtcctaactgacccctgttcccaggggaggacctcccatcccagtggyacgagctcccccatccccaccccaaccaatgctcagtgggtccaggtgcccttggctcagggcaccttcccgctctgcgatgtccatgcacagcaccatccctggaaccttctctggtcaagggccaggtcagattccagggggcctcggctggtgccagccccagtcccagtcccaggcaggcggcagacaccctccagcccacccttcctttcaaaagcctgaaccctggatcacagtcaggagcagcctctggaaaccagcccaagaccaggccat

SEQ ID NO: 741192 - DNA, 489 bp, Homo sapiens
cacaggttgattggacatggtgctggaggtctcaccaggaaactgtgcccacgacctctgcattttttctcatcccctagatgtagcggctttcacaggctcttggcagttttgtttcccagaagttacactaggactttgcgggcagggtggtgacgtccgtcatcatgctccccatcttcagagtccagcagaagtgtcctaactgacccctgttcccaggggaggacctcccatcccagtggtacgagctcccccatccccaccccaaccaatgctcagtgggtccaggtgcccttggctcagggcaccttcccgctctgcgatgtccatgsacagcaccatccctggaaccttctctggtcaagggccaggtcagattccagggggcctcggctggtgccagccccagtcccagtcccaggcaggcggcagacaccctccagcccacccttcctttcaaaagcctgaaccctggatcacagtcag

SEQ ID NO: 741193 - DNA, 457 bp, Homo sapiens
cctccagcccacccttcctttcaaaagcctgaaccctggatcacagtcaggagcagcctctggaaaccagcccaagaccaggccatggggagaggacatcagtgggggaaagaggcgcagcgggcctcattgcaggctggttacctccacagccacggccatgacctctgcctgcctcctggccccaagcctggcagtracctccctggaccacacagcccactgcttctctggcggggctggaagcacttcctatctgtcctgctcgctgggcatttatcaccggcagcctgcccacacctcttgtgctttgtctcatctttgttatttaactttgtttcacgtaggattattcctgtctctcccattagttctcagcttctggaatgcaggggcaaagtctttttcatccctatggttcccccaatcccctacacagcaccaggcccttgagagc

SEQ ID NO: 741194 - DNA, 457 bp, Homo sapiens
cctccagcccacccttcctttcaaaagcctgaaccctggatcacagtcaggagcagcctctggaaaccagcccaagaccaggccatggggagaggacatcagtgggggaaagaggcgcagcgggcctcattgcaggctggttacctccacagccacggccatgacctctgcctgcctcctggccccaagcctggcagtgacctccctggaccacacagcccactgcttctctggyggggctggaagcacttcctatctgtcctgctcgctgggcatttatcaccggcagcctgcccacacctcttgtgctttgtctcatctttgttatttaactttgtttcacgtaggattattcctgtctctcccattagttctcagcttctggaatgcaggggcaaagtctttttcatccctatggttcccccaatcccctacacagcaccaggcccttgagagc

SEQ ID NO: 741195 - DNA, 457 bp, Homo sapiens
cctccagcccacccttcctttcaaaagcctgaaccctggatcacagtcaggagcagcctctggaaaccagcccaagaccaggccatggggagaggacatcagtgggggaaagaggcgcagcgggcctcattgcaggctggttacctccacagccacggccatgacctctgcctgcctcctggccccaagcctggcagtgacctccctggaccacacagcccactgcttctctggcggggctggaagcacttcctatctgtcctgctcgctgggcatttatcaccrgcagcctgcccacacctcttgtgctttgtctcatctttgttatttaactttgtttcacgtaggattattcctgtctctcccattagttctcagcttctggaatgcaggggcaaagtctttttcatccctatggttcccccaatcccctacacagcaccaggcccttgagagc

SEQ ID NO: 741196 - DNA, 574 bp, Homo sapiens
taacccctagtaaccttaatttctagtgacaattcctttctagtggaaaggaagcacgtgattttgtaattttgatttttacaattttattcctttttatattttattttttgcctttattattagttttaattgacaaataataatcatatatatttatgggatacagtgtactattttgatacatgtttacaatgtaatcagggtaattagcatatccattacctcaagcatttatcatttctttgtgttgagaacattcaaaatctgctcctctagctattttaataatamaatcaattgttgttggttatagtcattctattgtgcaataaagcactaaaacttatttctcctgtctaactgtacttctgaatccattaacaaacctttggctattgccctatttccgctaccctccccagcctctagtaacaagtattctaatctctacttctacaggatcaatgtttttagcttccacatatgaatgataacagtgttacttatctttctgtgcctggcttattttacctaacataatgtcctccaagctcatctatgttgccacaaa

SEQ ID NO: 741197 - DNA, 586 bp, Homo sapiens
caactttatttatttatgtatttttatttttgagatgggatcttgctgtgtcacccaggctggagtgcaatggcgcaatcctggttcactgcaacctccgcctcctgggttcaagcgattctccttcttcagcctcccaaatagctgggattacaggcatgtgccaccatgcctggctaatttttgtatttttagtagagacagggttttgccatgttggccagrctgctcgaacccctgacctcaggtgatctgcctgcctctgcctcccaaagtgctaggattacaggtgtgagccaccgtgcccagccagctcccccaagtttaataccattaggtcatactcatttgtcctctgcatgatcgtccataaatatacatagttttccctgggtttttgagtcctcatttctgatggctcttgtgtcatgtaaaatttatattaaataaattttttataggtttttctcttgttaatctgtcttttatgagggatgtcagtcatgaaccttgcaatgagtgaggaaaatacattacaattttcccctacaatcttgtctttaaaacaacagggtccatggccact

SEQ ID NO: 741198 - DNA, 633 bp, Homo sapiens
aaactaatacactagatcacagaggtgaccaaggcaccaaaatggctagctattcttatatgaggaaataatacaattactaatcaatctctttgatataagccctcaatcctgctcaacttcatgcatcaaaatatgttcagtccatatcagttgtatcaaaggaacattttcataattgctgtgaagtaagctccctttggcaatatagtcaacaaggacaaacaaaggattcttataattgttcgatttgttatcaatccagtagaggagtatatttctgaagggaaattatgaatcacttcctggtcatgaattagagtggcctcaaagagctgtttccatgttactcaagtataaaacctaccaattaggtcaatttgttaggggttgtaaagaaattaaattgaaatttaattagtagttccgccttatccataggggatacattccaaggctcccagtggatacttgaaatggtatagtactgagctccakacatattatgttcttttctatatgtatctatgatgaatgaagtttaatttataaattaggcacacaaagagatcaacaacaatgactaataataaaatagaacaattatgacaatatactatcaaggtatatgaa

SEQ ID NO: 741199 - DNA, 610 bp, Homo sapiens
ggcaacatctagtagtaaatgaacatttagtagtcatcaaaagagatacaaggagaaaatatgaaataactccagagatgtgaaaaagcctgcaggcaccaggtttcatttggaaaggagatatgggtaaatggcctgcagataatcaaaaggatgaaatgcaaacttgaaataccataatatcattttacccctacacagaaaaccatgcacgaatggagagaacatatcttcccaaaatagactcgctgacctgtttggagttagaagtaatatttgctctttgttctaacctgcagcctaaaaggaacagtaatattcctttacaatctcagaagattccacctctactattctgcaatgtattttcctgtttacacttttctattacttttggtctcctgaaataattgatctaagcaataaaataaaaacacttcatawcaaaagcaagggctagtaagagttggttgtatgatttataaagattcttacacaaatcctccagttgtacattgaacttattcccttttttccagactggtctcaacccaactcctccccattctgtctgggatctcttttcctgtgcttaaaaaccatggttatg

SEQ ID NO: 741200 - DNA, 509 bp, Homo sapiens
tgaattctactactttctagctgtgagatattgggcaggttattaaatctctttagatcttcttccctcctctgtataatcagggcaattataaataatcattgaagataattcaatgagacaatgtatataaagtgttttgcacagttcttgacatatggtaagtgcttaacaaatgttttctcttatctataaatgctgggatcaaagtgggtagatagtatcccatagtgaaacagtataagttctggagtaacacaggaacaggtcaaatcttggcatggtttttctacttacaaattttgtgatttcctgcaagtaacaaactacgagccttagtgtmttcatttgtaattattcaaacccagatctgtttgactcaaaagcttatgctttcaattactacgctacaggggtgaacatgatacctgcagggttgatatttgtataaccctttgtagtgaaattgacatctagaataaactcaagtagtagtagaaatagcagta

SEQ ID NO: 741201 - DNA, 617 bp, Homo sapiens
ttgtggctgggatctgtgtatctttcatagagtcagagatgtaatatgtccagagatctaaacagttaccttgtccagtggtcctgagttattgcactgggacacattggtgggtcatgattgggtgtgcacaaaatgccaaagtttttgcacatcagaagagattacaaactatccctatattaatgtaaccttcatttccattgcattctgacatgttttcttgactagtaggcaaagagaatgtgccagggatagcacctacagcctgtgtatgtctgtattcacaacctgagattgwgaacaacatctatcgtgtgatatggaggaatgaaggctgagaaccacgatcaccatcaatggatggctgccatgtgtccataggttggctggcagtggtctaaactctgctgcagcagttgtgattctccttccactgaagggcatgttcccagagatctaacccacagcctacaatttggaacttttacagagtggtgggtagtagcagaggctgtcttccctctgtccttcagtccttagacaagaaagaggactacattgtttattaagcagattataaactgtatatctcaaccctgtctttaggagaaggt

SEQ ID NO: 741202 - DNA, 619 bp, Homo sapiens
cctccttctagggagaaagagacctggtcagggccaacggtgggtacccagtgagcttagattgccggtgagctggaggttggtgaggagggtgctggcgccagagggtgacgaggcgtgaagagggggaggtaacacggggtgagtttgggaggcaccgcggggagcccggactagagttgccggggggcgcgggaggagagcctgcctccgacctccgaacgtccctgccctttcctatgccgcccccgcttccctgcctgggttctacgtttatgcggtgctccctgagccctattttaaagctgctttttcagaacttcctttctgctcgcctcccccaactcctggcagcggtgaccgtgaactcgcaggaccttcgcccccgcggagrcccagggaagaacgcttttttcctctctattcgccctcaacctgacccgctgggccaccagggcttggggagagacctcagaggcctagagccaggagaggcgagaaagggttgtggtttttttgagtgattgagatgggggacagagagagcacttaaaattaggcaactttaattaggctcccaggagaatttctggatccacagaccaagaaaacagccaag

SEQ ID NO: 741203 - DNA, 558 bp, Homo sapiens
actgccactttaagtttcagctccctttctagcctcatgcatttcaaagaaatcacttctcttctaactacaggcagccagaaagagcagacagtaaaacacagataagacagctcgggcacagagggaggtgaggggaaattcttttgggtaaccgccaaacttcaccatcatacaatgggccccagtaaaacgatgggccttaataagcacctttctttcccttcaggtgcactaaratagggaagctgaatgggagtatgcctgcagctacagaaagattatgggaacagacacaaaactctccctcccagataagcacaacaaagagacacagaagcagtccaagcctctgataaactctcccaccctgaatccttaaaaactcctagtctgtaagagagtgtgcctctgacctagcttggccagaagttcctctcaggtttgttttctcctcccaggtttgttttctctctaaaatgaacctgtcttgactagcaagccacctttcatgtttctttcctctttctttaattcttatacctttagccatgcaaa

SEQ ID NO: 741204 - DNA, 601 bp, Homo sapiens
gctgggactacaggcacatgccaccacacccgggtaatttttgtatttttagtagagacagggttttgccatggtggcctggctagtcttgaactcctggcctcaagtgatctgcctctcctcggcctcccaaagtgctaggattactggtgttagccaccatccccagccaaccttattgttctccagcataccccgacagtctttattctcagcaagcattasactctttacttacaatttctctcctgtgggtcccgcaggtccagacaggaaaatatctggagcttttttctaggataaagcagttctgtgatctttctccctgaggattcattcagtctcccctccctccagcttctatagaaattgcttgttgtcggtaaagtcattcgacttttgcttcatattcattatgtaccagatgctgctgtacttggagatttagagatagaagacattgtcactaccctcatgtagctcactgcccactaagaatgacagaaaaattaagatgtgtgacaggtagaatgttgcagggaagtataggataccaaagggaaacagaaaagggaccaaactgaaaatcagagagacaggc

SEQ ID NO: 741205 - DNA, 589 bp, Homo sapiens
atgtaaaagaatgaaactggatccttttctctcaccttatacaaaaatcaactcaagatggatcgaagacaaatctaatacctgaaatcacaaaaattcaaggagataatctaggaaaaattcttctagacattgccttaggcaaagaattcatgactaagaccccaaaagcaaatgcaaccaaaataaaaataaataagtgggacctaattacaactaaaaatctcctgcatagcaaaagaaataatcatcagagtataacagacagagtaaacaaaaaaacctacagaatgggagaaaatatttgcaaataatacatctaataaaggacttatatccagaatctacaaggaactcaaacaaatcagcaagaaaaagtcttaataaaaagcgggcaaaggacatgaatagacatttctgaaaagaagatayacaaatggacaacaaacatattaaaaaatgctcgatgccactaatcgttagggaaatgcaagttaacacaacagtgagatactaccttacctcatctagactggccattatcaaaaagtcaaaaaacaatagatgttggcatggatatagtgaaaag

SEQ ID NO: 741206 - DNA, 601 bp, Homo sapiens
aacgtccttgggtaacttatgaatttcctgggggtgctaccttcatgcatcctcacaggtcctttgagttcttcctgctgctccttgtccaggtgtcatgtccataactgtcctgtcagaggatatcttgagcctgttcccacaggagctgctgcttccggcatcacccatcgcctctgtttcaggtgacaggtccctgctgcttcccctgggacttttatatctcaagaaaattacagctagagaagaggaataagctctagtgttctatatgatggtaggatggctatagttaatacactatacaytttcaaatagctattaaaaagtcaaaaaataacagatgctgaggaggttgcagagaaaaggagaacacttacgcactgttgatggaagtgtaaattagttcaaccattgtgagaagcagcgtggtgattcctcaaagagttaaaaacagaactgccattcaacccagcaatcccattactgagtatttacccagatgaatataaatcattctaccataaaaacacatgcagctaggcgcagtggttcatgtctgtaatcccagcactttgggaggtcaaggcgggcagatcac

SEQ ID NO: 741207 - DNA, 601 bp, Homo sapiens
aacgtccttgggtaacttatgaatttcctgggggtgctaccttcatgcatcctcacaggtcctttgagttcttcctgctgctccttgtccaggtgtcatgtccataactgtcctgtcagaggatatcttgagcctgttcccacaggagctgctgcttccggcatcacccatcgcctctgtttcaggtgacaggtccctgctgcttcccctgggacttttatatctcaagaaaattacagctagagaagaggaataagctctagtgttctatatgatggtaggatggctatagttaatacactatacattttcaaatagctattaaaaagtcaaaaaataacagatgctgaggaggttgcagagaaaaggagaacacttacgcactgttgatggaagtgtaaattagttcaaccattgtgagaagcagcgtggtgwttcctcaaagagttaaaaacagaactgccattcaacccagcaatcccattactgagtatttacccagatgaatataaatcattctaccataaaaacacatgcagctaggcgcagtggttcatgtctgtaatcccagcactttgggaggtcaaggcgggcagatcac

SEQ ID NO: 741208 - DNA, 511 bp, Homo sapiens
agtagagtagtctaagcagtctcctcttgttcaaatttagttcagatttgaataacttctttcctacagtagatttccagctctggctgagagtcatgtcagcctcagagcctaactatttaaactctgggagagttttctttaatgtgtaagaaaaagtaaatgctgcctacttcaaattgagtactcatatcatccctcaccagaagagamaacaaagacccagaatagctagctctttttgggccaggagcatcctttaaagaggcttagttaagaccaaacccttccacttctctgaaggaagcggaagctctgggttccagatacagtccaacaaatgtttcttgcacatgttagaaaaataactgagaagtgggcctgacgcagtggctcacacctatcccaacacgttgggaggtcaagtcaggtggatcacttgaggccaggagtttgaggccagcctggtcaacatggtgaaacccggtctctactaaaataaaatcacaaa

SEQ ID NO: 741209 - DNA, 572 bp, Homo sapiens
cttgaggccaggagtttgaggccagcctggtcaacatggtgaaacccggtctctactaaaataaaatcacaaaacttagccagatgtggtggtgcacacctgtaatcccagctattcagggtgctgaggtgggaggatcacctgaacctgggaggcggaggttacagtgagccaagatcacactactgcactccactctgggtgatagtgtgagactctgtctcaaaaaaaaaaaaaaagaaaaaagraaaaaagaaagaaaagaaaaataactgagaagtgaatgtgtgttatatcccttagctgaaagaaaacattagagggcatgagatgggatgataaaggagatggacccaatttaaaaagggccaaagaagggagagtcaggtaggagaaggaagctgaggatggacagaggatggaaggatacagaggtttgtgaaagacaccaacaggggttgtttagcctaaaaggagtacccttcttgtctctaacattccctctgctttcccaaaataaagtgtattaaatatctcttaagcaacaattatgaagaaacaagtccctggcc

SEQ ID NO: 741210 - DNA, 515 bp, Homo sapiens
acaggaaggggatgttctcatgcagtcctcccaggaaagcaaattgatgcgtttgctgtctttgaggagagcaatgtgagctaagccccgttctagtttccaggccctctgcacatttggctgctttgcctccttgttgacactcccctctcctcttaaaccttctttaggtaagagacttgcctcagtcaactctggccgaggtggtctttgaggaggcgtcctcactggaggcttgaacaggtcctgaggtttgtctcacacagggtcaaagggcacrgtcacaacggctggccaagcttccgggctctgctgctatgcatgtgttcccctcgtcctccccagctcaggctgttccaggaaccccatgttctctgtgagaatgtgggctgagctgtctgacctgtcatgttaaatgtcccttcggagatctctcctgggtacaggaaacagatgcctgttagaggaggaatatgaggtgggaggcagggttgggaagataaacccttgaccct

SEQ ID NO: 741211 - DNA, 608 bp, Homo sapiens
attttgctagtgaatcactagaggtgatggtgaatggtgccacttccacttccaccccttgaatcctggacctgtaaatcctggctatgggagaaacagtaccatatatcggaagctgattcaaacatacagggccttctggagaactttgccccagccctgcaaagtattgtcacctagttggcattgtaattgtgacttcaaaaggacattccaccattctatcaatcaagatgcttaaggataatggggaacatggtaagaccagtgaaatccatgagcataagcccactgccacactgctttagccataaagtgattgccttggtcaaaggcaatgctgtgtggaataccatgacagtgaataaggcattctgtgagaccacagatggcagtcttggcagaagcattgcatgcagaataggcaaatccacatcgggagtaagtgtctatcccagtraggacaaacttttgccctttccatgatggaagaggttcaatataatcaacctgccaccaggtagctggctgatcaccccgaggaatggtgccatatcgagggctcagtgttggcctctgctgctagcaaattgggcactcagcagtga

SEQ ID NO: 741212 - DNA, 634 bp, Homo sapiens
ttggccatagactgatggctgcactatcagcttccctacttttgggattttggggacttgaactggcttcctggctcctcatcttgctgacagcttactatgagacttcaccttgtgatcatgtgagttaattctaataaactgcccttcatacatacgtgtatcctattagttctgtccctctagagaactctcactaatacacagtgtttttacgttttgggctcagaatacacagatcatcaggtttactgcattctcttagcatgtaggagtctactataacatttattatacagaataaaaagttaattttattggtaaaaaagtatttctgatactaattatattaattcccaaagcttcttttggaactgatatgtcaatagttaaagcacttatagtagtcatacctgaaatgtacctttcttaatcaraatgctagatgacccgtcctggcctgttaatttatgattagcttaacaagtgttttttgccttatgtatagcttagaataacacatagataatatcacactctctatgttaaagtatcttaaaagtaaattacaacatcataattctaatcaagaaaaatgagagtaagcaaaatcacacaaaattgaaaacaaatc

SEQ ID NO: 741213 - DNA, 445 bp, Homo sapiens
ttgatatgattccatttgtccatttttgctttgattgcctatttttatatggtaatactcaaatccttgcccactctaatatcctggagagtttcctcagtgttttcttgtatttttatagtttgaggtcttagatttaaggcttcagttcatttttatttgacttttatatatggtgagatataagggtcaagttttatttttttggtatatggatattccattttcccagcaccatttattgaagagactmtcttttccctaggttatgttcttggcttctttgtggaaagagagtttactgtaggtgtgtggatttgtttctgggttctctattctgttctattagtctatgtttctttttttataccagtaccatgctgttttggttactatagctctgtagcacaattggaaatcaggtaatgtgattcctccagggttg

SEQ ID NO: 741214 - DNA, 595 bp, Homo sapiens
ttaggcagcaggcagctgcagtgatgacagtcacacctcccctggggaactcagtagtcttaagctgtctccaacccttgtcagcatacgatttccaaatattttctcccattccatgttgcttttttactctggttgtgtcttaatgtgcagattatttttaagtttaatttattccaatttatctattttttctttrgttgcccgtgcttttgctgttatatccagaaattgttgccaaatccaatgtcatgaagatttatttgtttcattctaagactttttagttttagtttttgcccagaccaatgtcctagagggtttccccagtgctttcttgaaggagcttcataatttaaagcctaggatttaagtttttaatccattttgatttgattttgtatatggtgagagataggggtcaagtttcattcttctgcatatgaatagcctgttttgccagcaccattgatggaaaagactgtcttttcctcaatacatgttcttggcatctttattaaaaatttgtattgaatctataggtctttgattaattttgagacaattttataagtggcgtaaggtagaaatttaa

SEQ ID NO: 741215 - DNA, 572 bp, Homo sapiens
ggactgagattgctgacctgtgtgttgaactattatgctggctcataataacatgcctttgaatgcattgtttcctcttaccagaatgccccttcttcccttgaccaacataaaaaaaacacctgtttttcctttcaaatacttttcaagtgatcctttttatgagaatctcttcttaattccaagatccagcactctcagcctgcctcccaatagagtgaatcaataaatcactgttgagctaccttcaaatctggtgcataattttactactaaccttatacaaatctcatatgtgcctgtctcctctacttcccaaaggttgagatcatrcctggtctattcatatttttaacaccagcatctaaccgagatcctgatgtgtaatggcccctcaatacatttttaaccaaattaaattctgacctaatcaaacatattatttgaaaagttagattcatgaataagataaattaagtggcaattactaattacccaaaaatactttttatttaacaaaaatatttgcttccttccttttttcctagcaaggtagtacagtatatcaggac

SEQ ID NO: 741216 - DNA, 666 bp, Homo sapiens
aatcccctcttggcacacataatcccaagtagatcaaaaccccacactactcagctggctcctcagcttgccaagaggaacccagagagcaaagtccccggggctacccattcagtccctctgtaggtctgatgaccccagcctgatggtcagatgtggctggattagccayggggctgtggcagagccagaaaggaggctgggcagcctaccagaatgggcaaggcaccatggcaccccctttttctctgtgaaccaagactggagctgtggggcaggccccatgttaatcactcccccagcccttccccaatccccagatgggacccatcaggagccaggaccctcagagcagtgagcgtccttccccagcatagccacagcaccagtgcctctgcattcctttggacctgagaaaagtggcaatgcgctggggagtctggagtccagagggagtacaggcaaagacatacaggtgcacatgcacgcaggcgcgagcacacatagcagccacggggatttttccaaaccacaaatccaaccacgaaacccctcccaatgtgcataaaacaaagaggcaggctggccgggtctatgcctggggaggtgcactctgcctccaccggctgcccctgctgccaggatccccctctccaaagccacacc

SEQ ID NO: 741217 - DNA, 666 bp, Homo sapiens
aatcccctcttggcacacataatcccaagtagatcaaaaccccacactactcagctggctcctcagcttgccaagaggaacccagagagcaaagtccccggggctacccattcagtccctctgtaggtctgatgaccccagcctgatggtcagatgtggctggattagccacggggctgtggcagagccagaaaggaggctgggcagcctaccagaatgggcaaggcaccatggcaccccctttttctctgtgaaccaagactggagctgtggggcaggccccatgttaatcactcccccagcccttccccaatccccagatgggacccatcaggagccaggaccctcagagcagtgagcgtccttccccagcatagccacagcaccagtgcctctgcattcctttggacctgagaaaagtggcaatgcgctggggagtctggagtccrgagggagtacaggcaaagacatacaggtgcacatgcacgcaggcgcgagcacacatagcagccacggggatttttccaaaccacaaatccaaccacgaaacccctcccaatgtgcataaaacaaagaggcaggctggccgggtctatgcctggggaggtgcactctgcctccaccggctgcccctgctgccaggatccccctctccaaagccacacc

SEQ ID NO: 741218 - DNA, 353 bp, Homo sapiens
gaactatggattaaaagatggcccactgtgagtgagctggaaatgcctatctcccttggcttaatgtagaggaagggatccaaaggcttggggagacggggatggtggagtggtttagtcacttcagacctactcatcccagctgggaaggtctagaagatatacccttgaccaatgccttgtgaagtaratttgtaagggcagcacctgcatctctggagagccctgtaattgctcttctctgtatttcagatctaatggtgggaactgcagtcactcaactataaaatttaaatgcaatgagaataagtggatcctgaggtggcaggggccaagtggcagcactcaacttc

SEQ ID NO: 741219 - DNA, 627 bp, Homo sapiens
catctgatttacagtgggtccagtgggtccccggactcatcctgtggtcatttccccagtgccagcatgcataattggcatagacatacttagcagctggcagtacccccacattgactccctgactggtagggtaagggctattatggtggtaaaggccaaatggaagcccttagagctgcctctacctagaaaaatagtaaataaaaaacaatatcacatccctggagggattgtggagattagtgccaccatcaaggatytgaaagatgcaggggtggtgattcccaccacatccccattcaactctcccatttggcctgtgcagaagacagacggatcttggagaatgacagtgggttatcgtaaacttaaccaagtggtgactccagttgcagctgctataccagatgtggtttcattgcttgagcaaattaacacatctcctggtacctgggatgcagctactgacttggcaaacccctttttctctattcctgtccataaggcccaccagaagcaatttgccttcaactggcaaggccagcaatataccttcactgtcctacgtcaggggtatatcaactctttggctttgtgtcataaccttattcggagagacctcga

SEQ ID NO: 741220 - DNA, 567 bp, Homo sapiens
gagtgggtaggtgactttccaatttcacagagctaatggacatcagaattcaggtgaaaacctaacccaaggtaggctggcgatgttagggctggctagatgcagggcagaggacaatttgaagaggcccaagaagaacctcacggagaaagatgccaccatgtttgaaatcccattagatgcacactcctctgggccttgaaaacttttgatttcccagagtcccctcttaatatgttaatttttctggggtggaagcgtcctatgttattgcagtgggcacattacaacaactggcttcatgtgccttcctgcagggatggggcactgttcacatgccaggcattaggggctctggatggggccaggctctctggaaagggctgcaggtgcaccctaraagcagtccttacctgcttaaccatcttagaagaaaacgtcctggcagagaagcatggtgttttagagtcagcctagcctgggtttgagtccaggatctgccactcccagtcctgtggccttcagcaatctagtcactccattgctctgtgtcctcacttatatcct

SEQ ID NO: 741221 - DNA, 492 bp, Homo sapiens
ggctggcctgggatcttcgctgttggccaagaacccatggggaggcaagatagggtagtccaggctgtctctgtttctgactcctgcccaggccttgcacgtgaggtccttggtgctgtggggaaggaggggttcagcccaggttttcctcccagctcggctgcttgcttctcctgggaactgtgcttgtcctctaaaatgtatcatgcagaattttccagactctcacacatgggtgcctgggccctgcagtttcacctgaatgccatcacttcctcctgtcttcctcattcttctacacctggctccagccaccttcttccctcakggaagacttgctcctctggccaagccgactcaactctctcgggttctgtgcagtgggtgaactggctgaccgggttggttaactccccagtgaggcatgagagcagggcctgtggctggtgtgggtccaagcccctgcagggtctggcagggcatgcagctgag

SEQ ID NO: 741222 - DNA, 711 bp, Homo sapiens
tctttttattcctgtatcattaaccattccatgcccttatgctttaggtatttatattagaaatggaatgtagctgggttttattttttatcaatctatcacttttttttttttttttttttgagacggagtcttgctctgtcgccaggctggagtgcagtggcgcgatctcggctcactgcaacctccgactccstggttcactccctggttcaagcgattctcctgcctcagcctccggagtagctgggattacaggcacacgccaccacacccagctaatttttgtatttttagtagagacggggttttaccatgttggccaggatggtcttggtcttctgactttgtgatccgcccacctcagcctcccaaagtgttgggattatacgtgtgagccaccgcacgcggccaaatctgtcaattctaattgtctttttttcaggttttttttgctttgttttttgagacagagtctctcactctttcactcaggctggagtgcagtggcctgatcatggctgactgcatcctcagcctcctcggcttaggcgatcctcctgcctcagacttccaagtagctgggactacaggagcacatcaccatacctggctaattttttagcttttggtagagatggcgtttcaccatgttttccagggtagccttgaattctgtctaaaaggatcctctcaccttggctcccaaaa

SEQ ID NO: 741223 - DNA, 590 bp, Homo sapiens
ttccctttcacctatacaattactccaggactttgctccctcaatgatctacttggttgccttcatcttcccttgctgtggatctttcccttgagccagcatgtcactcaaaaagccccaatgaagagacaaaaaggatcaccttctaacaactgacatctctttccagattgtctaatccaggcttgtcttcctctcctttattctttaatcaactaaaatgtgctctatgcccactctattagtgaaaatgctcttcctaaaatcaccaatgaccgtctggtcttcagaagcaaaaggtaatttttaatgccttcaatttttttttaaatttaatttctggaatacatgtgcaggatgtgcaggtttgttacataggtaaaagtgtgccatggtggtttgctgcacctatcaacccaccacctrggtattaagcccagcacacattagctgtttttcctgatactctccctctctttatccccaccccccacaacaggccccagtgtgtgttttacccctctctgagtctatgagttcacattgttcagctcccacttataagtgagaacatgcagcgtttggttttc

SEQ ID NO: 741224 - DNA, 633 bp, Homo sapiens
tattttctgtgcaatttcctatttagttttaaaagttgtatatagaaatatatttgcaaaagttttcattaacttttatttgcttgtagttgatatatggcctctcctcatattaaaggacatttctgcgagatattgacccattcatttcattgagagtttactgtcccttttacatttcatttattcatttcacttcccaygtgctaccagtttcctgatattggtaacaacaggaaaaccctatctaattcacaagactatttcacataagatttggagggaaaattataaagaaatagaaaaacttgcagaatcctaagttaactcatttatattgtgaaataaagaaaatgaaaaataatattgtttaataaaacaaaacccattgtcagaagttttacattttagtcaatgttctgtttattctttattttaattttaattactagggcgtatattcgataggatggcatttgatctcagatatagagtctttctaagatgagcattaagaaaaatgtgaatgggtttaattcatttattgttcaaatgttttcctcttcattctctcacatctataactagatcccctgaactttggaatacatggatgctttgcctattatttat

SEQ ID NO: 741225 - DNA, 598 bp, Homo sapiens
taccatatgatccagtaaccctattgctgggtatgtaccaagaagaaaggaaatcagtatattgaggagatatctgcactgtcatttttgttgctgttctgttcattgtagtcaagatttggaagcaacctaagagtccataaagagatgaatggaagaaaatgtggtatttatacacaatggagtactattgagccataaaaaagaattakattcagtgatttgcaacaacacgtgtggaaccggagctccttttgttaggtaaaataagccaggcgtagaaagaaaaacgttgcatgtttttacttacttgtgggatctaaaagtcaaaacaattaaactcagagagatagatagcagaataatggttaccagaggctggaagtatagtgggggattgggtgggaggcgaagatttttaatgggtacaaaaaaatagaaagaatgaataagacctaatatttgatatcaaaacagggtgactgtagtcaagtataatttaattatacattttaaagtagctcaaaggatataattgtgttgttagtaacacaaaggataaatgctttaggggatgaatagcccattattcacgctg

SEQ ID NO: 741226 - DNA, 628 bp, Homo sapiens
tttttcctggaaattcgtggaatattcagaaagcagaatagcactcatagtacatgctaatattaatgggctttataaacatacaatcaaatgattaaaagttgttttattacatcatcactaagaatgccagattaacctcaaactccaagaacccttcttcttactcatggaaattcctcctttattttgttctaggtttggatgaaatactgagttacaatggcttcttcagtttagctctctgagctctacttgctgaytttgtattttgtagatttaatcctagtaactgctgttagtataagttgcttagccttagtgatcatcatacgtaactagttggccagaaaaatgaacgagcaaaaaaccaaaacaggatacaacaaacagaatacgctcttatatccacagcaatggaatagaaacacttttctgtttcagacaaaaagctatctaccaaaatcctttctccctctgcataatacagaattgtagcttgaggttgaatagttaggcaagagctaaattcctcagtttcctttcagttatgggtgatcatatcattagttcttcccaataaggaataaatggaagtggtgtttgctgcttctggaccacagctttt

SEQ ID NO: 741227 - DNA, 590 bp, Homo sapiens
taagttctagggtacatgcgcacaacgtgcaggtttgttacatatgtatatatgtgccatgtggtgtgcggcacccattattcatcatttacattagatatatctcctaatgctctccctcccccctccccccattccacaaaagtccccggtgtgtgatgttccccaccctgtgtccaagtgttctcattgttcaattcccacctatgagtgagaacatgcggtgtttggttttctgtccttgcgatagtgtgctgagaatgatggtttccagcttcatccatgtccctacaaaggacatgaactcaaggatagattttttwaaatcactattatcgaagaccttaagatctaatttttttaaaagcaagaagaaacacataaggaaaagttacataataatgtaaagcaataatatacgattacttgccaaatgcttcaacctttcctgatgtcattagcaagatgacttctaaaagggctgcgttaattctggcttgctctactgttgacccaaaaaaggagcacatttcactcctagggactgactgctattatactcagaagtgggagggtgaatttctggctga

SEQ ID NO: 741228 - DNA, 624 bp, Homo sapiens
agttggaacctcagactcctcccttgcacaggcctggccagtatctactgttttttgctttttttttttttttcttgacaaggacctatccttcccccagacattttgtaagctttcacaacatttgggctcacctcygtgggtcccagtgtcggacagatcagattttgatcccacctctggccttcgataacaggcaagttactaacctttcttactttgcctcagtttcctcatctgagaaatggaaataatggtaataccaaccctgtgtccctatcaagattaactataataaatccaagaaaactgcttggtactgagactgctcattgtaaattcaataaatgttccccttttaccatcaccattacctgagtccctctaaaagccagatcaagttccttcaactgaaagtatctttcccattttcttggccatgttgccttaaattcctacaatgaatgactattatcagctctcaaattttatcaaataactttaaaaggtaaacatgtatgaatatagtgttaattatctgcaaacatttaactattttccatgcctcagtgtaactgaatatatcagttctttggcaggcagagcaaaggtactgtaaagatt

SEQ ID NO: 741229 - DNA, 604 bp, Homo sapiens
attttttaaaaccacatctagcaatatcctcaacttataagctaaaaatttaaataatgaaattactcttttatttatggyagaaaaaataaaacatagttcgttaaattcacaaattcaaaatttgataataacaatcagattagcctctctttctgatgtagtaaagacttaaggaaatgctttcagtagatctaccaagatagaaatccatcacattatttatttgtagttttacctctgacacattattttatctcgatatctcagtttctttgactcatagttcatattaaaacatttgttccaaaggcttaatgtgataatcaatgccatataattattatatggcaaatcctgaactatgtcctgaattaataaatgataactatgattggaaagcagtatagtattgggcatctatatttaaaattgtgaataataaaaattaataggtaacacaacacactagaatctgtttttaagtctgcaaatattttttcttactttttcctcacagcaactccaaaatggaagtactattgttatctccgtttacaaattaggaaactgaggcacagatatgctcttgggtacttgtcag

SEQ ID NO: 741230 - DNA, 639 bp, Homo sapiens
ctattgaatgtctatcactttttcaccatcctagaaaaacccaggttgaatcatcataagttggggatcatctgcataagccacatagtatttgctgagaacttggtatgtataatttattctgacttccgtggagagaagagagagtatgcagatcatttggatatattaatgcactrctcctaaaagcaaataaaaaacagcaaggtgctcaccttttttttctaaagcatgtggatttttgtcttgttttatgttgttttgttttgttttatcctaaacccactgactcagaatctctggaagtggagtttagactctggcattttcagtaagcttcccaaatgattcttatatttggggaaatcttttgaaagccaaacacgtgttgaactacttgaaactttttaaaagctggttagaatgaccatctaatctgtggtactttaaaagagaaagaagacactattaaaaaattattgcagaacaacctgtgtgtatatatatatatatgccaagaacttcccagaaaatcaagaaatactttcattttagtgagaatggaatactaggatacatgtcttaaacataaaatccagaacagactaaatgttttggatgtatactagactgttagct

SEQ ID NO: 741231 - DNA, 616 bp, Homo sapiens
tgcataaattgaagtttgctgctattattaatagggacatttacaaattcataaacaatttaaaaattgtttttaaattgttaaaagaaggattggtgtgtttcgaaatattaaaaattagtgactaaaatgacacaatatgtacatgagaatatacatamctatagattattagtcatttcagcacccagaactctgcataacgtatggaatatatatttgcatattttacaatcattgtcaatggaaaggtgaattgaaggtaaactgccccaaatatttcacaggcttcctaatagaaagaataatagattatatccataacatgtttcaattttcaaagaaaatggataacctataatgaaatctttccatcatagactttaatcagtcaccaccatgagcaaatactagtagctaagtaagcagcccttaaaagacctggagagaaacagaggacatttgcataaagaaaacctggaaaacctgtccaagaacaggagaacgtagagacattgatactgtgaacatagatgaaaactggcaagaagacatttcagcctctatgtgggatgatacgtggtaacaggattttaattttgaaagacaaggtcct

SEQ ID NO: 741232 - DNA, 652 bp, Homo sapiens
gttttctgtgtctcaatctcattcagtccagctctgattttggttatttcttgtcttctactagcttggtgtttggtttgctcttcatcctgtggttcttttggttgtcatgttaggttgttaaattgagagctttctaactttttgatgtggacatttagtgttataaatatccctcctaatacttccttggggtttgtcccagagattctagtatgctgtgtctttgttctcattattttcaaagaacttcttgatttgtgccttaatttcattattcatccaagagtaattcaagagcaggttgtttaatttccatgtaattgcatcttgtttggtgatttttcttagtcttgatttctatttttattgtactgtggtctaagagtctttggtataattttgattgttttgtatttgctgaggattgttttrtgtattattgtgtggtgaattttagagtatgtgcattatggtgatgagaaaaatgtatattctgttgtttttgggtgcggtgttttttaaaggttcagcagattcatttggtccaatgttgagttcaggtcctgaatattgtcattaattttctgcctcaattatctgtctaatactgtctgtggggtgttaacgtctcccaccattattgtgtgga

SEQ ID NO: 741233 - DNA, 652 bp, Homo sapiens
gttttctgtgtctcaatctcattcagtccagctctgattttggttatttcttgtcttctactagcttggtgtttggtttgctcttcatcctgtggttcttttggttgtcatgttaggttgttaaattgagagctttctaactttttgatgtggacatttagtgttataaatatccctcctaatacttccttggggtttgtcccagagattctagtatgctgtgtctttgttctcattattttcaaagaacttcttgatttgtgccttaatttcattattcatccaagagtaattcaagagcaggttgtttaatttccatgtaattgcatcttgtttggtgatttttcttagtcttgatttctatttttattgtactgtggtctaagagtctttggtataattttgattgttttgtatttgctgaggattgttttgtgtattattgtgtggtgaattttagagtatgtgcattatggtgatgagaaaaatgtatattctgttgtttttgggtgcrgtgttttttaaaggttcagcagattcatttggtccaatgttgagttcaggtcctgaatattgtcattaattttctgcctcaattatctgtctaatactgtctgtggggtgttaacgtctcccaccattattgtgtgga

SEQ ID NO: 741234 - DNA, 514 bp, Homo sapiens
tatggagaggattgtattcttgtttttgttttaaagctggttaaaaaaactcaattatacagagtttttaaatttggaaggcataattggaagtcaaatattcaggcattcagtgttaagccattacactttttgttaattctcttttctggtttacaatcaagaaatcccccttccttcaggatatgtgtcagctgttgtgagtaaaagcccacttcccagggcacagtccctgaaagactggtatctccgatrtgaaagcaatggcttacatatgaaaacaaatggaattggaaataacgttggccatcttattactattaaaatataattagaatatttcacatgcttatcaatatttagactagcatcattaataaatatcctaggtatggctgctttgctatcataaataatcacatattattgtcttattttgctttttagatatattacctatggactacccatcatgtgtaaactggcaccagaagagataaaaacacttaaaaac

SEQ ID NO: 741235 - DNA, 506 bp, Homo sapiens
gcattttcatcatactaaaagaaaacttcctgcccattaagtagtcactcccccttccccactctcagagcccctgacaagcagcattctgctctctatctctatggatttacctattctggatatttcatataaatggactaatacaatatgtgacctttggtgtctggcttctgagattcatccatgttgtagcatgtatcagtattttgatcacttttatagcttaacaatatttcattgtatggatacaaccaattttgtttattcatttatcagttgatggacacttgggttgttcccatcttttggsttttctgaataatgctgctacaaacttttctgtacaaggatatatttaaatgtctgagcgcttttaagaaaaggagcttctgagttgtatgttagctctatctttaacatttaatgaagcataaaacttttccaaagtggctgcactattttacatccataccaggaaagtataagggttctaatttctctat

SEQ ID NO: 741236 - DNA, 637 bp, Homo sapiens
ctgctactgaaaaggattggttaaaagagacaactcccactccactgccgtggctttccatcagggccatgcttggcagaacctgggagttgaaagggaagagatgatgatccatgtcttgagttcctgcagactggaagcaagtggagctgggcttggggagcagaaggaactgttctgcttcatggagaascaagtggtagtgacggaagtacctgtttcagtgactgcactttgaaattggatggagacccaaatccttaattcagggcttccttctgggctggtgcaatctgtaattttggcaggaatgagaagggcaggctggagtgaaaaaaagtcaaaagtgggagtgtagtggctcaccctgcttccagccctccctgacctgtcgtttgcagacccctacacatttagagcctgtgtatcagtcaggatctctcaggaccacagagaccctctcacagcgttaccttcagcagttgggatttatcgtaaggatatttctgaaattaggagaccaacaaacctcagggttccataaacactgagggcagattggcctccagagcctggagtagcactccgggtgtccagtggttctggggatctggtcatttcgccagctccaaatatt

SEQ ID NO: 741237 - DNA, 569 bp, Homo sapiens
ataagataagcctagaacacattgtcactctagatggcaaggactctatcaaagattgttagaatgatatcaacaagtctcaagaggaaatttaaagggactcattctgaccaaatataggatattttatacattgataaggataataattggaatggatagaaatacrtcaaatatgcttaaatttctgcattcataataattattttttaaaaataaaagtcatcgcaatcgtaggatataaatgagacaagacatcattttgaaaaaaatattgaaaagaaaaattcaactatctggtcttttctatataaattgtacaactgggtaaaacaataatttataaaaagcagtatctacagtatgacagccaataaataaagaaggaatgatataataatgccattatttttcaattcataattgatcaatggatgctaacatcaccaaaagaagacagttagacattacatttctcctgatggaagagcctagcacagttttttttgccctgctcttcaaatccaacctgaatttgatcaaatctttggatcaaactattaatttat

SEQ ID NO: 741238 - DNA, 569 bp, Homo sapiens
ataagataagcctagaacacattgtcactctagatggcaaggactctatcaaagattgttagaatgatatcaacaagtctcaagaggaaatttaaagggactcattctgaccaaatataggatattttatacattgataaggataataattggaatggatagaaatacgtcaaatatgcttaaatttctgcattcataataattattttttaaaaataaaagtcatcgcaatcgtaggatataaatgagacaagacatcattttgaaaaaaatattgaaaagaaaaattcaactrtctggtcttttctatataaattgtacaactgggtaaaacaataatttataaaaagcagtatctacagtatgacagccaataaataaagaaggaatgatataataatgccattatttttcaattcataattgatcaatggatgctaacatcaccaaaagaagacagttagacattacatttctcctgatggaagagcctagcacagttttttttgccctgctcttcaaatccaacctgaatttgatcaaatctttggatcaaactattaatttat

SEQ ID NO: 741239 - DNA, 462 bp, Homo sapiens
gggggattaagcagcagtggcacaaacctctattgaaagtaacatgcccttccccaataaggatgcaagttatggaatgaataggcccaaccaaccacagccatatagaataaaaggatttgtaatgaaagaagcaraaaaaccctttgtctctgagcaggaacattctcacataaaacaaagaagtgctgctctttctgtcgcagagcattagtttttcatagatactattataggcatatttctaagataagaaaatgctttagctttctgctatttattaggtgaaaagcaaagccatgaatatctttttgcacataaataattctgaattttttagatattcttaataaaaatgagtacttgaatttaaagagtcatacaatttcattaagcgccagttgatggatgccgcttctcctacagggttttctttccttttcttttctgttaggaagcctc

SEQ ID NO: 741240 - DNA, 609 bp, Homo sapiens
tttgatgaaatgttttgtaaatatatattaggcccatttgttctatagtgcagattaagtccagtatttcttttttgattttctgtctgggagacatgtccagtgctgatggttgggagttgaagtctctctctagctattattttactggggtctctctctctctttagctcaaccaatatctgctttatatatctggatgctccagttgggtgcatatgtgtttacaattgttatatcctcttgctgagttgacccctttatcattatatagtgactttctttgcctcttcatgtagtttttgtcttgaaatctattttgtcttatataggtatagctactcctactcttttttggtttagttggcatgaaatacctttttccatctcattattttcagtctatgtgtatctttacaggcgaagtgtttttcttgtaggcaacatattgttkggtcttttttttaatccattcagccactttatgtattttattgaagagtttagtccatttacatccaatgttattattgataagtaaggacctactcttgtcattcattatgctatttgttttctgtttttttatgtgtgtgtgtgtgtgtgtgt

SEQ ID NO: 741241 - DNA, 601 bp, Homo sapiens
aaatgtcctattaactaattattgtactaagttatagggctttaacccctggatctaaaaaaggcactgactcttattgcattgacaccagtcatcttcagacctgtcagaaggtggcaatcgaaatgaaatgcttttgtgagacaaagggccagaaatttaaactattcaatccctctatgctaagacactattacagaaraagtagacatgtgagagatagtaagggttgatgttgaaagataagattgtcactgggacgtatggggtccttagtacttgtcttctcggaagaaggaattcagccaagggacatgcagcaagggctaagtagtagcagagtttatataaagtgacagtacactctgaaagacaaggcagaacaagctgcttgggagaatgagctagcattggctaaaacagggaaatcccctttgtggggatcttacatgattattcactaagaagatgtaaaggggtgccactagcaaacatatttttggcagctctctgggtgcacttgtattatggccgtacatgctagtacatatgttgtgtgtctcactgtcatcttcaatttcctcccaggggtgtatttttt

SEQ ID NO: 741242 - DNA, 625 bp, Homo sapiens
gttggttcacttacctcttgtaatgggcagagcctggaggaagagccagggggtagctgtttctccctctttggcctctggaggaggaggctgaggggagtgtgcatgagagtttccaagtcttctccatgggctctggatcaggtgtctaagcatagttaagacagtggcatctactttacaagctttacaaaggtgagggtcttcccttaagaccatgaaggtttgtaaatakgggacctctgactatttgtcctgatggtggcagaaaaggtccatctgaaggatagtattaaaatttgtacttccattctttggccaggattttcatagttatgtaaaggaaaattagttttatctttttagttttagggtttgaaagtcaaatttatttcaatttttaagggtacatttgagtgggggaaatcctggggtatggagatctggattcctggtgacctggtctattaagagtcccattcatcgtgccactgttaccaaaacaccaggagtttggtttaggtcctgctactcaccacacagaaagccaaccactgagacaacaacaatttccaaggaagaaggctttaataacatgctgcagccaaaacaggagatcagtctc

SEQ ID NO: 741243 - DNA, 571 bp, Homo sapiens
tggtcttactttggtcctctttaaaagatggttttataatcagctataaaatttaacaggtgctcttaaatgcaggattctgattcataatgctggagattgtgacagtagagtagagaaaaatctttcaaatagaagagtgaatggtgtttggtttactttggactatatttgtataaatatgttattagtatgtgttccaaaattatgggaaacttctataatgttgatataatattgtgtacattatcaataattataattgttatgtaaaattgttacatgccactgaagtaaacaaaatttctagtcaattgtagctttaatagtkgctatagacttttgtcatccacagatattttgtcttgctttcaaaaggcagtttataatcagatataggactctaagtgtaggtctcagataactttaaaaattgtgctattggaatagaggaaaaatcccaaaattctaagactctcatggagagctaatgtgttaaacatggctaaaccttttgttttcagagtcaagagaacttatttctttagagctatttgcaacttttaacaag

SEQ ID NO: 741244 - DNA, 656 bp, Homo sapiens
tcttccacttaccttattatccagtggatccaatgattttctaagtgtctgtggaaaataatgtgtttacagcctctggcaagcacccatagaataatcacaatgcagacatctcagatttttaaaatacatctatgccctcttctgcagataatcattctcttttttgagaaatactttctggcttgctactggctctcggaaaagattaaacatctaatcatagtgttatgggatctttggggtgtcgattttcttcccagaaacctctgtggccagtggtgcctttgcmtgagttcttgtcctgcatccaggaagaatgaagtagcagacaagtgaagggtgaagaagatgaagaggagctttatttagtgttagaacagctcggaggatacctgtagtgggtatctttttgctgtaggcaggttgtcccatcaagtgttcagctctcagcagagaggacgccttggggagggtggctgctctctgcaggtaggtcattcagaggtctctgcaggtatctgaagctctcagcagagacagcagctcctctatacagctggtcatcccatcatctctcagtcttctgccctctgcctcactctggatgagcctggggcttttatggacctcagaggggaggaagtgcatggtcc

SEQ ID NO: 741245 - DNA, 656 bp, Homo sapiens
tcttccacttaccttattatccagtggatccaatgattttctaagtgtctgtggaaaataatgtgtttacagcctctggcaagcacccatagaataatcacaatgcagacatctcagatttttaaaatacatctatgccctcttctgcagataatcattctcttttttgagaaatactttctggcttgctactggctctcggaaaagattaaacatctaatcatagtgttatgggatctttggggtgtcgattttcttcccagaaacctctgtggccagtggtgcctttgcatgagttcttgtcctgcatccaggaagaatgaagtagcagacaagtgaagggtgaagaagatgaagaggagctttatttagtgttagaacagctcggaggatacctgtagtgggtatctttttgctgtaggcaggttgtcccatcaagtgttcagctctcagcagagaggacgccytggggagggtggctgctctctgcaggtaggtcattcagaggtctctgcaggtatctgaagctctcagcagagacagcagctcctctatacagctggtcatcccatcatctctcagtcttctgccctctgcctcactctggatgagcctggggcttttatggacctcagaggggaggaagtgcatggtcc

SEQ ID NO: 741246 - DNA, 621 bp, Homo sapiens
ttaggtatgccctatgcgataagctacttttattcttggcagagagcagaacagatcatttactttacaggagggtgagtggttctgtgaaaaaggtaagcaggagatgttatgcaaagttgattgtttcaaactcacccatctaaataagtcaatgtttccctcagaagcagagagactagatgagtcaactttacaatacacctctttttctctgtaggtagatatatcatgggtgatagatgcaagattacaggtaaaagacttgcttttcctcagcagtacaatctacaactcaatgcacaactgcctgaaaatagagtgttgaagatgwtaagacacatgctgtatttcagtgagtctaaaaggcatattttatcacattttaaaatctctataattgtggcagtggcttaccactgatggagaacacagattatttgggctgatttttccctttctgaatggtatgtaaggtaatgatttgtattatgatccatagtatcttaggctagataagtagcaaatgatgaaattagcgtttgttacctgggttatgacaacttctaaaatgattccagactattttctggccaacaatttttacctcaactatacaag

SEQ ID NO: 741247 - DNA, 621 bp, Homo sapiens
ttaggtatgccctatgcgataagctacttttattcttggcagagagcagaacagatcatttactttacaggagggtgagtggttctgtgaaaaaggtaagcaggagatgttatgcaaagttgattgtttcaaactcacccatctaaataagtcaatgtttccctcagaagcagagagactagatgagtcaactttacaatacacctctttttctctgtaggtagatatatcatgggtgatagatgcaagattacaggtaaaagacttgcttttcctcagcagtacaatctacaactcaatgcacaactgcctgaaaatagagtgttgaagatgttaagacacatgctgtatttcagtgagtctaaaaggcayattttatcacattttaaaatctctataattgtggcagtggcttaccactgatggagaacacagattatttgggctgatttttccctttctgaatggtatgtaaggtaatgatttgtattatgatccatagtatcttaggctagataagtagcaaatgatgaaattagcgtttgttacctgggttatgacaacttctaaaatgattccagactattttctggccaacaatttttacctcaactatacaag

SEQ ID NO: 741248 - DNA, 621 bp, Homo sapiens
ttaggtatgccctatgcgataagctacttttattcttggcagagagcagaacagatcatttactttacaggagggtgagtggttctgtgaaaaaggtaagcaggagatgttatgcaaagttgattgtttcaaactcacccatctaaataagtcaatgtttccctcagaagcagagagactagatgagtcaactttacaatacacctctttttctctgtaggtagatatatcatgggtgatagatgcaagattacaggtaaaagacttgcttttcctcagcagtacaatctacaactcaatgcacaactgcctgaaaatagagtgttgaagatgttaagacacatgctgtatttcagtgagtctaaaaggcatattttatcacattttaaaatctctataattgtggcagtggcttaccactgatggagaacacagattayttgggctgatttttccctttctgaatggtatgtaaggtaatgatttgtattatgatccatagtatcttaggctagataagtagcaaatgatgaaattagcgtttgttacctgggttatgacaacttctaaaatgattccagactattttctggccaacaatttttacctcaactatacaag

SEQ ID NO: 741249 - DNA, 634 bp, Homo sapiens
atccccagtacttcagaatgtgaccttatttggaagtagggtccttaaagaggtaattcagttaaagtgaagtaattagagtgaacccctaattcagtatgattggtgccctaataaaaaggggaaatttttagatagacatgcagacaaagagaacaccatgtaaacataaagatgaacacccgctaagcaagtaaagatgtctggaacaactccttctctcacagtcctgagaaagaaacaaccccattaaacctasattttgggcttccagggtccagaattgaaatatgaaaacatttctgttgtttaagcaacccagtctgtggtactttggtatgatagccctaggaaactaatacaaatgttttggtctttgatttgttaatacaaaaaaaaatgtggtcactatgatataatcaaagtcacttataaaactgcttaagaaataaaattaaagctcatagttcactattagataattaaccttgaagccaatggaaactgctgccttcaaacaataagtaaagtgttgtttgcagttctttttaaaaattatgtatttattacttttctttaatgccatgaaaaagataacagaccagattatctttatactttaaataattaaaac

SEQ ID NO: 741250 - DNA, 581 bp, Homo sapiens
gttataggttgaattatatccccctcaaatttatatattgaggtcctaatccccagtacttcagaatgtgaccttatttggaagtagggtccttaaagaggtaattcagttaaagtgaagtaattagagtgaacccctaattcagtatgattggtgccctaataaaaaggggaaatttttagatagacatgcagacaaagagaacaccatgtaaacataaagatgaacacccgctaagcaagtaaagatgtctggaacaactccttctctcacagtcctgagaaagaaacaaccccattaaacctagattttgggcttccagggtccagaattgaaatatgaaaacatttctgttgtttaagcaacccagtctgtggtactttggtatgatagccctaggaaactaayacaaatgttttggtctttgatttgttaatacaaaaaaaaatgtggtcactatgatataatcaaagtcacttataaaactgcttaagaaataaaattaaagctcatagttcactattagataattaaccttgaagccaatggaaactgctgccttcaaacaataagtaaagtgt

SEQ ID NO: 741251 - DNA, 606 bp, Homo sapiens
atctcaattactattttggatcatttataaaaattaattcaatatggcttatatatatgaatataaaaggtaaacaaaaacttttgaaaacttacaaaagaatatctttcaaccatggaggtagacaataatttctcagagaggacaaacataaaataggattaatcatttaaaaattggtaagtttgactttatcagaattcaaactttctcctcctcaaagacattcttaagaaaataaaaagtcaagctatagactaaaaaatcacaagggctgggggcrgtggctcacgcctgtaatcccagcactttgggcggctgaggcgggcggatcacgaggtcaggagatggagaccatcctggctaacacggtgaaaccctgtctctactaaaaatacaaacaattagctgggcgtggtggcggaggcctgtagtcccagctaatcaggaggctgaggcaggagaatggtgtgaacccgggaggcggagcttgaagtgagccgagactgcgccactgcactccagcctgggcgacagagctagactccgtctcaaaaaaaaaaaaaaaaaaaaaaaaaaaagcgcaatacatttatctatcaatca

SEQ ID NO: 741252 - DNA, 679 bp, Homo sapiens
tttttatttacttcaagatatttttattttccttcttttcattcttttacccatttattattcaaggctttgttgcttaatttttacatacttgtgaatttttaaaatcttcttcacgttactgatttctagtttcattccactatggtcagaaaatagacttaatagtatttcaatatttttaaacttgttaaaactttgtgtgtgtgtgtgttttataatgctctggtctgctggatagtgcccataagtcccatagtctttcttattatttatttatttgtttgtttgtttgtttattgttcttttggctgggtaatttcaaatgatctgtttttgagttaacygattctttcttctgctttatacagtctgctattgaaactctctatgatacttttcactttagtcatacttcagctccagagtttctgtttggctctttgtggggggttctttctccttgttgagcttctaattttgttcaaatattgctttcctgattatttttagttgtctgtctgtgttttattggaactcattgagctagtataagatggttattttgaattctttgttagacaatttatagatctccatattttagaaccagttacttgtttttctattttgttcctttgatgctgttgtgtttccctgattctagcacaaggggcct

SEQ ID NO: 741253 - DNA, 639 bp, Homo sapiens
gggagcaagaaagagagcaagtgagaagataccacacacttttaaacagcaaaatctcaggacaactcactcacttttgtgagaaaagcaccaagccatgaagaatctaccccaatgacccaaactactactcccaccaggccccacctccaacactggggattgcatttcaacatgagatctggggggacaagtatccaaactattaacatatcagtgtcctaaagctggcttcataaatcttgattgattgagatatttgcctcagtcactcattttggttatcagtacctgtcagaataagtaattatttttgagaagggagatacaaggtagttctaacggagtatttaatgtgatttaaaaatttgtattgtccttagagcagctggaagattatggttatgcagtaagttatttgaaacaaacctgagaatctgataatcttggaatttaaagagtctagaattmattacaaataaaatctattaaatctattatcaatctggtattgggtcaacattcttaaaatagatacctgtatttgaaaacctaatcacaatctttttgacaaattcaacaataactgccattaactcctaaatcagcctgtggatgccgccaaagaagcagcattaa

SEQ ID NO: 741254 - DNA, 639 bp, Homo sapiens
gggagcaagaaagagagcaagtgagaagataccacacacttttaaacagcaaaatctcaggacaactcactcacttttgtgagaaaagcaccaagccatgaagaatctaccccaatgacccaaactactactcccaccaggccccacctccaacactggggattgcatttcaacatgagatctggggggacaagtatccaaactattaacatatcagtgtcctaaagctggcttcataaatcttgattgattgagatatttgcctcagtcactcattttggttatcagtacctgtcagaataagtaattatttttgagaagggagatacaaggtagttctaacggagtatttaatgtgatttaaaaatttgtattgtccttagagcagctggaagattatggttatgcagtaagttatttgaaacaaacctgagaatctgataatcttggaatttaaagagtctagaattcattacaaatwaaatctattaaatctattatcaatctggtattgggtcaacattcttaaaatagatacctgtatttgaaaacctaatcacaatctttttgacaaattcaacaataactgccattaactcctaaatcagcctgtggatgccgccaaagaagcagcattaa

SEQ ID NO: 741255 - DNA, 641 bp, Homo sapiens
agaatgtggtgttttgcttaacattttaaaaaattcctccagattatttaaatatgagagcaatattttagtaaggcggtgacaaagttaagtggctagatttctaatgtccggaacggggcttaggctcctagtaaataattaccgaatgamttaatgaatgtgaaagatcttatggaggaaatcgtgatatttcaatgagagacattaaaaaatatttgtctaacatcatcatttcctaacttaattccttcaaaattgtacaatccactaaccctatcgtcaaaatcttctcccatttctatcactccttaagatttcagcaccagggctactctctctctcgtgacacttttatttgttgatgactcttctaataatttgacttcttaataatttggtctcctctcctcatatccagtcattgacttcaattacccagccctatcacactctaaaacttgtcattacacagaaattcaccttctctataataaaaatttcaaggatttcaatctccaactattacatcttacttctcagttcaattcccctcgttcactgactcctggaattttttacactgctagatgtaatttccattcatactatcttcttatcactgtctctcattgcttcat

SEQ ID NO: 741256 - DNA, 598 bp, Homo sapiens
gtatatattaaccaagatttggtgatcttttggtgcagattttgttcttctggaatagaagtacttgccaatcaggccataccaagtcttaatcttactcctcagaagcaatgagcagagatgggagcagatcttgaggaagataagcattgatcacctgccttagatgatgaatttgcatagtctgcaggcattcttttagaggggaatgggaccacttttactagccgaggcaatctggtttcctgactttatcataggagccttgttagagctgccaattttgctttctttggaactctgttcttgtcacagttagatcctggactcgattttcagcacatttcgtttccaactgctggaaatgaaagaccctctgggtactgacatggaagcttccgggctttcatacatgcgctgagttgacagttgactaccacgattctgccrttttcttcagtaaatgtttcattggtagttaacagctgatttcataattcttacatatttaccattttacctatgtctttcatgcaataggttgcattggtcagtccatccctttttatacgaccttcatcccaattcccttcaggta

SEQ ID NO: 741257 - DNA, 603 bp, Homo sapiens
catgcttataatctgattggagaaatgatttgcacagatatgtaacaaattcccccggttcatcctgcatactcagctagcatgccacctcctccagtaagccttcctggacctcccagacagagccaacatctccctctgtgggtggcccatcacaggatttacactcaggtgctgtaattacagactcatttgctatccctttcctgattggacccagagctatgtccaaccatttagcatgaggaagtgtaatgtacgaatttagtaaaatgggtgaagtagaaagtacatctattctccttccaacctcaaacagaggactaagaattaaaatgctctctgaagctaacatctggtggtcagatactcagtagtccacattgtgtctacttcrttagaagcaatcgaacctgagacatctgctttaactagtactctcagcagcacccatcgtatgacctccttctttcactccttcatacgtaatctattcctgagtacaatttatttcattctaaagctctctccaatattcaatttatcctatcagctgtaccattctagatcaaactattatctgggattgggacaaaagaaatc

SEQ ID NO: 741258 - DNA, 528 bp, Homo sapiens
acagctgttaaacttaactgacctattctcaggactaagactgattcaggaagatatggggcaatatatttaaatttgttattttctatttatcccaatttgtttttctcttcctttgcctatctcttacctaacaacctctaatctraatctctacaaagccatcaagttgacttttaatatgtgaaacttcctaaaagtaaagtttcaaaggaagggacttaaggaaatgagaatattcaccccaaaatatatttccttgacatagttcaaggtggctatatagaaggactggaaatacaaatacaagaatagctaaaaagctgtctttcgttgccggggatttgtaagtgtagagaaaatcttcattgatgtagccaggttttctctgtggccctttgcttgttctatctaggaaagtttgacagagagtatgacatctttaaaggtctgaaagaaaactttgccatctattctctctgaggacctctatgtgtaaggtttcatctgcattacaagaccaccttt

SEQ ID NO: 741259 - DNA, 627 bp, Homo sapiens
cataaagtggttcaagtggttttctagggctgccataacaaattactacaaatttggtttaaaacaacagaaatgtattgtcctacagttacggagaccagaatctaacatgaaggtgtctatactctaaagaagaatctgtaccttgacttttacagctctggtcactgcaggtatttcttggtgttccttggcttgtgaccacattacttcagtctctacctctgtcttcacttcacttgtatgtgtgtgtcttgtttgtgtgtgtktcaccctttgcctctctctcctaaggacactactatggcatttagggtccagaatgatccaaaatattatcttcatctcaagattcttaacttaatcatatttgtaatgagcctttttccaaataagataacattactattttgacacataagattatattcaggggtttcagggattagaaggtgactatatatttgggaggccatttttttcagactaccacaatggttgccatgagtttaaacagaagtatttcctaaaataaattctttaaaaaaattgctgggagtacaacataaattatttgaaaagagacagaaacaagagacaagattatcttagagataagagatgcct

SEQ ID NO: 741260 - DNA, 624 bp, Homo sapiens
ttcacaagaattcaagacatgcaaagtttatccactgaccacactgaaattaaattcataacagaaagattcctgaaaaaagttctaaaactatttggaaactaaataacactcttcagaataactcatgtgttaaggaagaaatcaaaaggaaaattacaaggtagtttgagctgaatgaaaatgagaataccacatatcaaatttgttgtttccctctctgtgtccatgtgcagagggtgagaggaggaaaaggagaataaaaataattattgggtactagtcttaatacctgggtgatgaaataatttattcaacaaaccctgtgacctgagattacctatataacaaacctgcacatgtgcccctgaacctaaagtaaaagtaaaaaaaaaaaaaaaaatcaaaaaattgtgggatgctgataaagcagaaaacagggagaaatttayggaataaatatctttataaaaaagaataacatctcaaatcaatgacttcagctttcaccttaagaaactagattaaagaagagcaaattaaactcaaaataagcagaaaaaactaaagtataaattctaaagtataaatttcagaccaaaatctagaaaatagaaaacagaa

SEQ ID NO: 741261 - DNA, 582 bp, Homo sapiens
aacacagcacgagaactctgtgaagcatacataagtatcaatagctaaatcaatcaagcagaagaaaggatatcagagattgaagatcaacttgatgaaataaagtgagaagacaagattagagaaaaaagaatgaaaagaaatgaacaaaacctccaagaaatacgggactatgtgtaaagaccaatctatgtttgattggtgtgcctgaaagtgacagggagaagagaaccaagttggaaaacactcttcaggatattatccaggagaactgccccaacctaacaaggtaagccaacattcaaatccaggaaatacagagaacaccacaaagatattctttgagaagagcaaccccaagacacataatcgtcagaytcaccaaggttgaaatgaaggaaaaaatgttaagggcagccagagagaaagattgggttacccacaaagggaagcccctcagactaacagcggatctctcggcaaaacccctacaagacagaagagagtggggagcaatgttcaacattcttaaagaaaagaattttcaacccagaatttcatatctaaccaaaattatcttca

SEQ ID NO: 741262 - DNA, 593 bp, Homo sapiens
aagaaaaaaaaagcttttgaattaactcatgaagtatgtaatttatccaatggtaaagatgcctctctggactttcctgatgtataagcatgtttttcaatggaagcattaccaggttgatagcccaaacgtgtctgttggaaatacagatgctttaagcattatctcacatgcatgtggttaagagacttctacacatggaaagcacagtcttaattagttacctctcaaacaggggcacattgccctcttgtagttgtaccagctgagcacacagastggctttcagccattttccattgccctggtgttctgagacgattttaagtggaaccatgagagttaccactcagagaccagcataagcagtcagagaatctcatcacattcctatgagtatgtatttggttaagtctctcctgcattgttttgctgcgtttcataatgtttttccaattgaaagtggctataattgtggtactatgaaaataatttaggtttcactatgagcataaaacttcagctaaactgcccactcaataatttgtatgcaaataaaaagattaatcagcaattatttgcaatgcacttac

SEQ ID NO: 741263 - DNA, 657 bp, Homo sapiens
ggatcccttttagttatgcaaatttctgtagcaaatgggtgttctgctgcctgctacaattcctctcccagaaaagctttttctttctctgctacatggccaaccttcaaatttcccaaacttttatgctctgcttcctgtctaaatataaactccaaacttaagtcttttcttttctctcaaatctgagtgtaggttgttcaaagcagccaggccacatcttgaacactttgctgcttagaaatttcttctgccaaataccctaaatcaagtttgtccaacctgcagcctgctggccgcatgtgacccagaatgactttgagtgaagcccaatacaaattcataaactttcttaaaacattgtgagttttttgtgattttttttttctagctcatcagctatcgttagtgttagtgtatttyatgtatggtccaagaacaattcttcttccactgtggcccagggaagccaaaagattggatacccttgccctaaatcatcactctttagtttaaacttccacagatccttaggacatggacaaaatggagacaagttttttgctaaggcataacacacatgacctttgctccagttcccaatacgtttctcatttccatctgagacctcataagcctggacttcatcatccatat

SEQ ID NO: 741264 - DNA, 646 bp, Homo sapiens
ctgtcagggatcccagggaagacacttctgattgggatcagttcaaccagatcacctccaagattccgtgtaagaggtgaatttgacgtttagaaatgagccgtaaagaaccagggcggccagctttccatgctgaatgctgggggaggggaggaagagggttgatttgtatgtgtgtctgcaggatgagtctttttctgagttgccaagtgagaatgctggaaacatattcctattytgttctgtatttgtacaaacaaatgtgtttccactgaaacttatgtaaatatgtgcttactaatgaatgcagtcaccccaagcactgactaaccaaactgacttcctttttcagctcaaatatctaagcccagttgttttaaacgttaatcaactaaaagaaaaaaactgaagtccacatttgtctcaattcttaactatagaaactaatgataacaaagtcatgtaccttccaggtaagcagggcgagagatgtggtgggaaaggtaacagtgcatcatgagagcactgtacgacagagcccactgtttaatggaaaacacccagtggcactctcccatagtgtacacacgcaccttgacacttgttcctctaagaatcacaagaatacgcatagggctaggtcatt

SEQ ID NO: 741265 - DNA, 646 bp, Homo sapiens
ctgtcagggatcccagggaagacacttctgattgggatcagttcaaccagatcacctccaagattccgtgtaagaggtgaatttgacgtttagaaatgagccgtaaagaaccagggcggccagctttccatgctgaatgctgggggaggggaggaagagggttgatttgtatgtgtgtctgcaggatgagtctttttctgagttgccaagtgagaatgctggaaacatattcctattttgttcygtatttgtacaaacaaatgtgtttccactgaaacttatgtaaatatgtgcttactaatgaatgcagtcaccccaagcactgactaaccaaactgacttcctttttcagctcaaatatctaagcccagttgttttaaacgttaatcaactaaaagaaaaaaactgaagtccacatttgtctcaattcttaactatagaaactaatgataacaaagtcatgtaccttccaggtaagcagggcgagagatgtggtgggaaaggtaacagtgcatcatgagagcactgtacgacagagcccactgtttaatggaaaacacccagtggcactctcccatagtgtacacacgcaccttgacacttgttcctctaagaatcacaagaatacgcatagggctaggtcatt

SEQ ID NO: 741266 - DNA, 587 bp, Homo sapiens
agtgcatcatgagagcactgtacgacagagcccactgtttaatggaaaacacccagtggcactctcccatagtgtacacacgcaccttgacacttgttcctctaagaatcacaagaatacgcatagggctaggtcattgtgaattcaataggcacatcrgccactggaaggtgaagggtagccatgagggccattttcaccagatgaactccagtttccaaaagtaaatagagtagaaaaccatttatccaacagtctaaacactagaaacatccacacacagggatcgttatatagggacttaaaaatgagcagtgactttaaatttttcacctctatggtaatggaagaattatatacaatggtttgtgggtgatagagatgtcataatctgtggattgcaaatgacctgttaccaggagttacccaggtaacattgtctaagtatagacacatgtctaagtatagagacatggtgaagtgcctcctaacagagcagaagtgactccatcgaagactacttcttggggaggatttcacacagttcatcatcaagcaaagatcattgccttctgagcagaagagac

SEQ ID NO: 741267 - DNA, 587 bp, Homo sapiens
agtgcatcatgagagcactgtacgacagagcccactgtttaatggaaaacacccagtggcactctcccatagtgtacacacgcaccttgacacttgttcctctaagaatcacaagaatacgcatagggctaggtcattgtgaattcaataggcacatcagccactggaaggtgaagggtagccatgagggccattttcaccagatgaactccagtytccaaaagtaaatagagtagaaaaccatttatccaacagtctaaacactagaaacatccacacacagggatcgttatatagggacttaaaaatgagcagtgactttaaatttttcacctctatggtaatggaagaattatatacaatggtttgtgggtgatagagatgtcataatctgtggattgcaaatgacctgttaccaggagttacccaggtaacattgtctaagtatagacacatgtctaagtatagagacatggtgaagtgcctcctaacagagcagaagtgactccatcgaagactacttcttggggaggatttcacacagttcatcatcaagcaaagatcattgccttctgagcagaagagac

SEQ ID NO: 741268 - DNA, 463 bp, Homo sapiens
agagtagaaaaccatttatccaacagtctaaacactagaaacatccacacacagggatcgttatatagggacttaaaaatgagcagtgactttaaatttttcacctctatggtaatggaagaatyatatacaatggtttgtgggtgatagagatgtcataatctgtggattgcaaatgacctgttaccaggagttacccaggtaacattgtctaagtatagacacatgtctaagtatagagacatggtgaagtgcctcctaacagagcagaagtgactccatcgaagactacttcttggggaggatttcacacagttcatcatcaagcaaagatcattgccttctgagcagaagagactctaaataaatatagaagaatagaaatctgaagtggaaagttgtagccagagcatgcatatgatactggcagatcttttctaaagagaaattcattttccataaa

SEQ ID NO: 741269 - DNA, 552 bp, Homo sapiens
atagagacatggtgaagtgcctcctaacagagcagaagtgactccatcgaagactacttcttggggaggatttcacacagttcatcatcaagcaaagatcattgccttctgagcagaagagactctaaataaatatagaagaatagaaatctgaagtggaaagttgtagccagagcatgcatatgatactggcagatcttttctaaagagaaattcattttccataaatgctttacaatggatcctgaygataagacatcttgccaaatgatttgctgctcatcataaagatttcccagtaaataaaatttccaggctcatctcctgttattgcatgaatgttttggaactacatctcaggaaataagtgaggattgcaaattatgactttcaggttggaaatccagcaatgaactttgttgacttggtctggccatactggccatggcttagcatttgacagaactttagggtctacagtttctccgcaaaggaagttctgagcaatggaagcaaggctgggctgagcaaaaaacttcctaaagtgatttt

SEQ ID NO: 741270 - DNA, 628 bp, Homo sapiens
cagagatgcagcatccaaatacgtagagcaattttaggagctactggatatcttctgaaagttgacctctgtccctttgtggaaaatattatcagaatgagtatattaaccacaaaagaaaatctgtttagtacttcatacttctttcatttcttttgccccaaaatgttattgcccaggttgttcacctacttttatcactaggttcagctcaaaatgattttattttataccacaaatttcagcaccattcacaggctggccatggcttagcatttgacagaacctactttagggtctatagtttctccacaaaggaagttttgagccatggaagcaaagctgggctgagcataaaacttcctaaagtgattttggtttcaaaaatcgaattcattctcttagaatcacacataacattctcagcctggggcctcctattttccctacatggygctttcagtgaccacacctctgggacaaaccatctgctcttcctttccatgtgtggctcttggcatgagtcattgcaaaccttgaaatcagtttgtttttttttctttagcagattggattttttttaaaggtatatatttaaggtatacaatatgatgtttggatatacaca

SEQ ID NO: 741271 - DNA, 628 bp, Homo sapiens
cagagatgcagcatccaaatacgtagagcaattttaggagctactggatatcttctgaaagttgacctctgtccctttgtggaaaatattatcagaatgagtatattaaccacaaaagaaaatctgtttagtacttcatacttctttcatttcttttgccccaaaatgttattgcccaggttgttcacctacttttatcactaggttcagctcaaaatgattttattttataccacaaatttcagcaccattcacaggctggccatggcttagcatttgacagaacctactttagggtctatagtttctccacaaaggaagttttgagccatggaagcaaagctgggctgagcataaaacttcctaaagtgattttggtttcaaaaatcgaattcattctcttagaatcacacataacattctcagcctggggcctcctattttccctacatggtgctttcagygaccacacctctgggacaaaccatctgctcttcctttccatgtgtggctcttggcatgagtcattgcaaaccttgaaatcagtttgtttttttttctttagcagattggattttttttaaaggtatatatttaaggtatacaatatgatgtttggatatacaca

SEQ ID NO: 741272 - DNA, 659 bp, Homo sapiens
ggttcccttttcttcacatgcttgccaatactcatctattgtctttttggtaaaagccatcctaacaggtgtgaggcaagatgtccttgtggttttgatgtgcctttccctgataatgagtgatgctgagcacctttccacatagccactggacatttgtacatcttctttagagaaatgcccattccagtccttctcccatactttaacggggttatttgtgtttatacttctgagttgtttgagctgcttttattttttagatattaacccctcatctgatacatggttttcaaataattcctcctaatccattggctgccgtttcattttgttgattatttcctttgctgtgcagagactttttggtttgatgcaacttcacttgtctatttttgcttttgttgcctgtgctttgggtgagatatatatatwaaaaaaatgcttgccaaggaaaatagcaaggggctttccccctgtgtttcctcctaagagttttatcgtcttaagttttgatttttgtgtatggtgttagataaggcgccttcattcttttgcatgtggatattcatttttcccaacaccatttattgaagagactatccttccccattgtgtcttcttggtagccttgttgaaaattaggtaaccatatatgc

SEQ ID NO: 741273 - DNA, 561 bp, Homo sapiens
gggcccagcctcacctctgatcttgtccttgctgacgttagtgagccctgggcgtggggtttgctaaggttcactgtgaccctaggctcaggcctcagcctctggtcatgagggcctcgggctctgtcccacccaggctgtctcagcaccctcagggccgccycctggcccaaacctagggtcctgagcagggggtgaactgtggccacatggaacaaaggccactaggctgggaatgtttgtctgcattgtttcggaggcgtctgctatactccttctggggcatcaggcatcaaaagattccctggctcctctcttgaaagctagccatgtatcccttgccttccattaaatatactcataaatataaattaaatgaaccagtcttaatttaaatgaacatgttagtactgttcatttcagtgtgaatacaggtaattaaatattgctaatgttattatttaggagggtgattgtgcctttttctcttatttattgggtgtttttaaaacttttgctttaaataaatgcaaccctactttaatgtttggcagaatatta

SEQ ID NO: 741274 - DNA, 586 bp, Homo sapiens
tctgtctcaaaaaaaaaaaaaaaagatgtgatggaaggaagcagtggcaactgaaaaggtgatggcacaaaatttttaaatccgcaaggagctcaagttcaaggtgaagcttgaacatatgtttgcctttccttccagcccaaattccatggcaataagtgaggtttataagagcagaataaatccatagcaaaaaagcataatgagtgagtatggtactactgggagaatttttgagaggcagtttcaagacagaagttgaactgatggagaaaccagactytgcagaggcctccaccttccagctcaggggaaagagggaccagcaagagaactgccgatgtttccgacggacagcagcattggtaaaagtaatttaaactgacattactcattttcaaccactgagatgtactctccccaccccccgaccccatcccataagcctccagttcatctggccccagggggcttcagagaccaaacctcaagttcaggagagagaagactgttcatcttatgatactgagggctgagtctgaagctggggtgagtcatccatccagtgagtactcttggaaggcca

SEQ ID NO: 741275 - DNA, 586 bp, Homo sapiens
tgcacacccagcaaagaccctcacctgcttctcagttgtaaactggtctgccctagccgaaaggtaacagtttgcccagcccctgtttgcacagcagtagaatggaaattgcgctgagtcctgtgaagctggctgactcacgctgaaactcgagatttatttccaattagtgcgatgtgtagtaraaggtgctcctcaagcagccttgcaacactcccattgtgtccacagagttctcaaagattgtgtttggcagcaccacgacacagtgggccaaaaagggagaagggattaatatcaagcaatagaaattcatttaaaagccaatattagtcactcaagtgtacatccgaagactacaaaagccaagtatgcatactgcttcactaatgtgaaacttggaacaaagatgagaaaaaccaggcatgcacagggtcagactaggaataaagagccacctgtgaaatgtaataagtggtggtctccttctgaaaaagaggcacgatgcttccattaaaggaagtcgaggactaaagagatgctctgagcacagcttgtcatcaccacttgtaaagaccactggaca

SEQ ID NO: 741276 - DNA, 612 bp, Homo sapiens
tagatgggtccggaaaggacacctggaagcagttagggcaagacttcccaatattcagtaggaagcaaatcctatgccagggccttggctttccgaaggactcagaaaacaggttcaaaactaggtaaatggtttgtaaggttataacttggaagattcacttttaaagttgtcttaaagccattarcaacaaagtttgggtttttgactggaattcattcaatcgagtagcttagctgtcccatttttgctgaatggacacaaaataagcccacgtgcaatcatgcaattaactacaatatagttaatccaggaaatgttgtatctttatgatggaacagctgagcattttaatttattcattaatttatttgttcattactgaaataatgattgggtccattagatgctctacaaattaaatctttttgcacttgttcagtaactattgtgaattcctaacagatagcatattttattatattgcctttttaacttaagtttgtgcccaagagttgaacagaccaaatattttaggattatatattcatggagccataaagtgaaaggcgtagatagatgttggagtggtgattaacgagaaactagatg

SEQ ID NO: 741277 - DNA, 612 bp, Homo sapiens
tagatgggtccggaaaggacacctggaagcagttagggcaagacttcccaatattcagtaggaagcaaatcctatgccagggccttggctttccgaaggactcagaaaacaggttcaaaactaggtaaatggtttgtaaggttataacttggaagattcacttttaaagttgtcttaaagccattaacaacaaagtttgggtttttgactggaattcattcaatcgagtagcttagctgtcccatttttgctgaatggacacaaaataagcccacgtgcaatcatgcaattaactacaatatagttaatccaggaaatgttgtatctttatgatggaacagctgagcattttaatttattcattaatttatttgttcawtactgaaataatgattgggtccattagatgctctacaaattaaatctttttgcacttgttcagtaactattgtgaattcctaacagatagcatattttattatattgcctttttaacttaagtttgtgcccaagagttgaacagaccaaatattttaggattatatattcatggagccataaagtgaaaggcgtagatagatgttggagtggtgattaacgagaaactagatg

SEQ ID NO: 741278 - DNA, 612 bp, Homo sapiens
tagatgggtccggaaaggacacctggaagcagttagggcaagacttcccaatattcagtaggaagcaaatcctatgccagggccttggctttccgaaggactcagaaaacaggttcaaaactaggtaaatggtttgtaaggttataacttggaagattcacttttaaagttgtcttaaagccattaacaacaaagtttgggtttttgactggaattcattcaatcgagtagcttagctgtcccatttttgctgaatggacacaaaataagcccacgtgcaatcatgcaattaactacaatatagttaatccaggaaatgttgtatctttatgatggaacagctgagcattttaatttattcattaatttatttgttcattactgaaataatgattgggtccattagatgctctacaaattaaatctttttgcacttgttcagtaactattgtgaattcctaacagawagcatattttattatattgcctttttaacttaagtttgtgcccaagagttgaacagaccaaatattttaggattatatattcatggagccataaagtgaaaggcgtagatagatgttggagtggtgattaacgagaaactagatg

SEQ ID NO: 741279 - DNA, 625 bp, Homo sapiens
agaatcagaggtaaattagtcccatttcacattccctggaaatggcaaataaaaatgacttgagattggacggatttaaagaaactcaatcgttaatgatttacagcaactaatttaaaaattgtttaaatgtgcagtccaaacatatgttcgaacacctttaggycaagaattaacataatgtggtcccagaatggtggtgcctttagtagaatcacaaaaaattcaaattctctttagcaaattttctacttactaatccacaaaagtgcacaaaaataattttcagagaaaagtaaatatttgtcattcaaaggcatctaagcatgcaaggaaatgatattccaccatttgaaaggaaagcagaaaaagagtacaaacagatccacaaaggttcattagtagaaatatcactgttagattataaagcacatttgctttcaaaaaattttttaaaaaatgaatatattgttaggagactaaaaaattcatgtagcaaatttgaaaagtagtttgtataaaaatatagttattttaaattaaaaactcaaaaatgaactcatcagattagacatggccaaggtaacagttcataaatatttcagaatgcattacagaaaatttt

SEQ ID NO: 741280 - DNA, 573 bp, Homo sapiens
tagtgttttattttattttattttttaatgattgattgatttttgagattgggatctcactacgttgcccaggctggtttcacattcccaagtttaagcaatacccctgcctcagtctcccaagtagctgggatgacaggtgtgtgtcaccatacccagctccattagtagcgtttttaacaattgtgggccactgagtaagaataattttttttaaattaaaggttattttttaaaaagcacatttgtagaaaattactagcataatctgcctaaaataaatatacatattgaaaaaatctttgctctgaacaaaaagaagtatattcaccacacatacatacatacacacacacacacgcacacacgcacacaygcacacacacacacacattatggaagatttcaagaccaggcaataatttccactcaatccaaaaacaatgcaatcccagagctgaatatttaggtgaaaaatatatcaggaatgggaggcattcaggtttaattttcatgttttggtagagttaggatgtgagttttcatttaaaaatattctttattttttttgct

SEQ ID NO: 741281 - DNA, 604 bp, Homo sapiens
  misc_feature 1, 2, 3, 4, 5, 6, 7, 8, 9, 10, 11, 12, 13, 14, 15, 16, 17,18, 19, 20, 21, 22, 23, 24, 25, 26, 27, 28, 29, 30, 31,32, 33, 34, 35, 36, 37, 38, 39, 40, 41, 42, 43, 44, 45,46, 47, 48, 49, 50, 51, 52, 53, 54, 55, 56, 57, 58, 59,60: n = A,T,C or G
  misc_feature 61, 62: n = A,T,C or G
nnnnnnnnnnnnnnnnnnnnnnnnnnnnnnnnnnnnnnnnnnnnnnnnnnnnnnnnnnnnnngactccattggagtccattcaatgattccattatattccattcgatgatgattccattcgtgtccactcaataattcaatgcgatttcattcgatgacaaatacattcgattctattcaatgattccattcgattccatttgatgatgattccatttgagtccattcgatgattgcattcaattctattcratgatgattccatttgatatttccattcgattccattcgatgaccattccattcgagtccattcgatgattccatttcattgcattctatgatgattccatttgagtccatttgatgactccatttgagtccttttgatgattccattcgaatccatttgatgattgttttcagtaatattcgatgatgattccattctagtccatttgatgattcaattcgattccatttgatgatgattccattagtgtctattagacgattccattagattccattcgatggtgattccattcgagtacatttgatgattccattcgattccatttgatgatgattccattcgattgc

SEQ ID NO: 741282 - DNA, 624 bp, Homo sapiens
attcgtggacacagggagggacaggagcaccatcagtttgtctcacacaaccactgtcatcctcactgaaggctgttgcctgatcaaaaacagtattgggccaggcacggtggctcacacctgtaataccaccactttgggaggctgaggtgagtggatcacttgaggtcaggagttcgagatcaacctggccaacatggtgaaaccttgtctctactaaaagttcaaaaattagccaggcgtggtgggtgcctgtagtcccagctacttgggaggctgaggcaggagaattgcttgaacccgagaggtagaggttgcagtgagccgagatggcaccaccacactccagcctgggcgaccgagggggactctgtcttaaaaaaaaaaaaaaaaaaaaaawatatatatatatatatatgtcaaaaatggggtagtttttagatctatagtagttctaaaaacaaaggccatccaagcatgacagatttacaagcactattggctattccagtagttacaatggaggagagaagcttttagttaaaacaaacaaacaacacaacaaacccagaaaccttaggtcaaaaccaaaattgtcctctcagacacaatctgggaattttc

SEQ ID NO: 741283 - DNA, 630 bp, Homo sapiens
cactcttgccacttctgttcaacatagtactggaagtcttagccacagcaattaagagagaaaagtaagtaaaaggaacccaaattggaaagaaagacattaaattatctcggtttgaagatgacatgatcttaaatattgaaaactctaaagactccatgaaaaaactgttagaactaataactaaattcagtaaagtttcaggatacaaaatcaacatacaaaagtcagtgggttttctatacatcaasaaccaactatccaaaaaattaagaaaacagtcccatttacaatagcatcaaaaacgataaaatagttagaaatgcatttaatcatgcatgtgaaatatctagatatgtatgctgaaatgtataaaacactgatgaaagaaattaaaggagacacacataactggaaagatagctcatgttcactaattgaaagaattaacatcgcaaatagatccatactacccaaagtgatatacagatttgatgtaatccctatcaaaaatccaatgacatttttcacagaaatagaagaaacaatcttaaaatttgtacagaatcacaaaagactctgaataggcaaagcaattttgagaaagagcaacaaagctgttaagaatta

SEQ ID NO: 741284 - DNA, 597 bp, Homo sapiens
atatatatgatgcatatatacacacatatatacaatgaaatattatccagccataataaaagaagaaaatcctgccatttgtgacaacataagtgaatctggaagacattatgctatgtggaataagccagatacagaaaggcaaatactgtatgatctgacatatatgaatctaaaaagtgcaactcatagaagcaaggagtggaacagtgcatgccagtgtctgaggggtgggaaaaatggggagatgttgatttaagggtacacactttcagttataagataaataattgctgagtatctaatrtaccacatgataattatagttaataatattatttactagaaatttgctaagaaaaagtatcttaagtgttatcacaacacacacacacacaaagggtaactctgtggtgatggataggttgattaatttgatggtggtaaccattacacaatgaacgtgtatagtatatgcacatcacattgtacatcttgaatgtatattatttttatttgtcagttatagttcaatatagctgaaagaaagaaaaaaagtaactcaaaatgaatcataaacctaaatgtaaatagcaa

SEQ ID NO: 741285 - DNA, 535 bp, Homo sapiens
atatacatgagtgtataaatatgtgtgtatatacacatatgtgtatacattcatatacatatacacaaacaaatcaacaacaaaaaatatatatgcacatgtgtgcatatatatacattttttatatatatatatacacacacatacctagtaatacatatatatttgtgggttttgagagatgagattaaggaaaatcatctttttttttttttttttttttttttttgagacagagtctcgctgtcgcccaggctggagtgcagtggcgcaatctcggctcactgcagtctccgccccctggggttcacgccattctcctgcctcagcctcccaagtagctgggactacaggcgcctgccacctcgcccggctaattttttgtatttttagtaragacggggtttcaccgtgttagccaggatggtctcgatctcctgacctcgtgatccgcccgcctcggcctcccaaagtgctgggattacaggcgtgagccaccgcgcccggccggaaaatcatctttaaacagaaatca

SEQ ID NO: 741286 - DNA, 533 bp, Homo sapiens
acattctggatccaacaccctttcattttgcaatcagggatgggtcagagtgtgtttccttggtcatctccatgtttacctccccaccaccacctgtgcttagactcaactgtgcagaactggtagaaagatgaacttatcctcagtgagaaatcccggagctcacaccttaaagctgcactcttgccaaccccacacctaccaccagaacctggagaccttccttcaagtgcaacagtgatttattactcaaatgtttactgaagatgcacaagacaggttctaaacgatgctcctgcttcgaggctattcttcccaataaaaatgcagggttttctcttgaccttccygagtgattggatcaaaagacattttatatcattgccagaaaatctggattcaaaaactgttgagtgtgtgggttggggtcagtgcctttcctttcttttttaaaaattatttttaagttgtgaatacacataaacactcatcatcttagtcatttctaagtatatagtccagtggcattaaat

SEQ ID NO: 741287 - DNA, 620 bp, Homo sapiens
attcctttcaagaacacagttttaaaattgcactgtatgttctaagaaataactgtggtccttgaaagtgtacacctccaaattttggttaatggcgaggagtaacttggagagctgctgcttcttcagtctgatgacacattctattacaaagataagtgacttccttcttaagtcgtgatttttcctgtaaggcaatttcttctgttagctatttctgtgagtgacacttttttttttttttttgaggcggagtctcactctatcgctcargctggagtggtgtggtgcgatctcggctcactgcaagctccgcctcccgcgttcacaccattctcctgcctcagcctcccgagtagctgggactacaggcgcccgccaccatgcccagctacttttttgtatttttagtagagacggggtttcaccgtgttagccaggatggtctcgatctcctgacctcgtgatccgcccgcctcagcctcccaaagtgctgggattacaggcgtgagccaccgcgcccggcgtgagtgacacttttaaaaacttgactattccgatgatccaattagacagagtaacacttcgggtgctgctaaagtctgcagtaatttcttgtt

SEQ ID NO: 741288 - DNA, 620 bp, Homo sapiens
attcctttcaagaacacagttttaaaattgcactgtatgttctaagaaataactgtggtccttgaaagtgtacacctccaaattttggttaatggcgaggagtaacttggagagctgctgcttcttcagtctgatgacacattctattacaaagataagtgacttccttcttaagtcgtgatttttcctgtaaggcaatttcttctgttagctatttctgtgagtgacacttttttttttttttttgaggcggagtctcactctatcgctcaggctggagtggtgtggtgcgatctcggctcactgcaagctccgcctcccgcgttcacaccattctcctgcctcagcctcccgagtagctgggactacaggcgcccgccaccatgcccagctacttttttgtatttttagtagagacggggtttcaccgtgttagccaggatggtctcgatctcctgacctygtgatccgcccgcctcagcctcccaaagtgctgggattacaggcgtgagccaccgcgcccggcgtgagtgacacttttaaaaacttgactattccgatgatccaattagacagagtaacacttcgggtgctgctaaagtctgcagtaatttcttgtt

SEQ ID NO: 741289 - DNA, 645 bp, Homo sapiens
actgagggacatttgagctgtttccagttttcaattattataaacaaaactgctgtgaatattcacatactggttttttgtgaacataagttttcatttctctgggataaatgcccaagagtgtaattcctgggttgtataataagtatactgtaagtgttttgtaagaagtgtttctgctgaacctttcccagagaggctgtacatactattgtcccattttatatttccaccaaaaatctatgagttatccagttatgtggcatttytgccaggatttggtgtcatcactgttagtttgcctgtttgttttagccattttgacaggtgtatagtgatatttcactgggattttaatgtgcatttctctaacggctaatgatattgcatgtcttttcatatgttcatcatctgtctgtcctacttagtgaaatatattttgctaatttctcattggattgatttttaactgttgagtgttaagtgttctatatacattatagatacaagtcattgtttagatacgtggtttataaatattttctcccaggtttttattcttttcacataggctttcacagagcaaaagttttggtgaagtcctattatcaattttttcttcccctttctagatcatgatttctg

SEQ ID NO: 741290 - DNA, 645 bp, Homo sapiens
actgagggacatttgagctgtttccagttttcaattattataaacaaaactgctgtgaatattcacatactggttttttgtgaacataagttttcatttctctgggataaatgcccaagagtgtaattcctgggttgtataataagtatactgtaagtgttttgtaagaagtgtttctgctgaacctttcccagagaggctgtacatactattgtcccattttatatttccaccaaaaatctatgagttatccagttatgtggcatttctgccaggatttggtgtcatcactgttagtttgcctgtttgttttagccattttgacaggtgtatagtgatatttcactgsgattttaatgtgcatttctctaacggctaatgatattgcatgtcttttcatatgttcatcatctgtctgtcctacttagtgaaatatattttgctaatttctcattggattgatttttaactgttgagtgttaagtgttctatatacattatagatacaagtcattgtttagatacgtggtttataaatattttctcccaggtttttattcttttcacataggctttcacagagcaaaagttttggtgaagtcctattatcaattttttcttcccctttctagatcatgatttctg

SEQ ID NO: 741291 - DNA, 645 bp, Homo sapiens
actgagggacatttgagctgtttccagttttcaattattataaacaaaactgctgtgaatattcacatactggttttttgtgaacataagttttcatttctctgggataaatgcccaagagtgtaattcctgggttgtataataagtatactgtaagtgttttgtaagaagtgtttctgctgaacctttcccagagaggctgtacatactattgtcccattttatatttccaccaaaaatctatgagttatccagttatgtggcatttctgccaggatttggtgtcatcactgttagtttgcctgtttgttttagccattttgacaggtgtatagtgatatttcactgggattttaatgtgcatttctctaacggctaatgatattgcaygtcttttcatatgttcatcatctgtctgtcctacttagtgaaatatattttgctaatttctcattggattgatttttaactgttgagtgttaagtgttctatatacattatagatacaagtcattgtttagatacgtggtttataaatattttctcccaggtttttattcttttcacataggctttcacagagcaaaagttttggtgaagtcctattatcaattttttcttcccctttctagatcatgatttctg

SEQ ID NO: 741292 - DNA, 577 bp, Homo sapiens
aaatctatttatatgtggattttcttctgccaccccgagacagcaagaccaaacccttcccttcctcttcctcctcagctcactcaacatggagacaatgagaatgaaggcctttatgatgactcacttccacttaatgaatagtaaatatattttatcttmcttacgattttcctaataacattttcttttctctagcttattttattgtaagaatacagtacataatacatataacatacaaagattttttcactcacctgtttgtgtgatcagtaggtcttccactcaacagggtattagtagttaagctttggggagtcaaaagtcatatgtggatttttgactgcacaaaaatccacatatatgtcggggaggggagctcctgatgctcacattgttcaagcgtcaacttcatgtacagttatccctcgatatcaatggggcagagttccagaacctcccactgacaatcagaatccccaggtgttcaagtctctgatataaaatggcatagtattagcatataacttatgcgcctcctcccatatactttaaatcatctctattattagtt

SEQ ID NO: 741293 - DNA, 615 bp, Homo sapiens
ggtttgaactgtgcaaatctatttatatgtggattttcttctgccaccccgagacagcaagaccaaacccttcccttcctcttcctcctcagctcactcaacatggagacaatgagaatgaaggcctttatgatgactcacttccacttaatgaatagtaaatatattttatcttccttacgattttcctaataacattttcttttctctagcttattttattgtaagaatacagtacataatacatataacatacaaagattttttcactcacctgtttgtgtgatcagtaggtcttccactcaacagggtattagtagttaagctttggggagtmaaaagtcatatgtggatttttgactgcacaaaaatccacatatatgtcggggaggggagctcctgatgctcacattgttcaagcgtcaacttcatgtacagttatccctcgatatcaatggggcagagttccagaacctcccactgacaatcagaatccccaggtgttcaagtctctgatataaaatggcatagtattagcatataacttatgcgcctcctcccatatactttaaatcatctctattattagttatattgcctagtaccatgtaaaca

SEQ ID NO: 741294 - DNA, 549 bp, Homo sapiens
tcaacttcatgtacagttatccctcgatatcaatggggcagagttccagaacctcccactgacaatcagaatccccaggtgttcaagtctctgatataaaatggcatagtattagcatataacttatgcgcctcctcccatatactttaaatcatctctattattagttatattgcctagtaccatgtaaacactatgtaaataattattatacttatacagtattatttgcaataatgataaaagtctgtatatgttcaatacgaactccatttttttwaaatatttttgattcatgataggttggatccacagatgcagaacctatggatacacaagatgaaatatatttggtttttgtccctggttcctggcacagaactgcaatttcccaagtgataggcgtgtcttttgaatgagtgttggattgtgtcatatttttctgaggatatctatatgattatatgatttttctttagcctattgatataattattatattaattgattttcagatattgaaccagatatatatctctggaatatatc

SEQ ID NO: 741295 - DNA, 572 bp, Homo sapiens
attgttcaagcgtcaacttcatgtacagttatccctcgatatcaatggggcagagttccagaacctcccactgacaatcagaatccccaggtgttcaagtctctgatataaaatggcatagtattagcatataacttatgcgcctcctcccatatactttaaatcatctctattattagttatattgcctagtaccatgtaaacactatgtaaataattattatacttatacagtattatttgcaataatgataaaagtctgtatatgttcaatacgaactccatttttttaaaatatttttgattcatgatagrttggatccacagatgcagaacctatggatacacaagatgaaatatatttggtttttgtccctggttcctggcacagaactgcaatttcccaagtgataggcgtgtcttttgaatgagtgttggattgtgtcatatttttctgaggatatctatatgattatatgatttttctttagcctattgatataattattatattaattgattttcagatattgaaccagatatatatctctggaatatatcccacttggtca

SEQ ID NO: 741296 - DNA, 572 bp, Homo sapiens
attgttcaagcgtcaacttcatgtacagttatccctcgatatcaatggggcagagttccagaacctcccactgacaatcagaatccccaggtgttcaagtctctgatataaaatggcatagtattagcatataacttatgcgcctcctcccatatactttaaatcatctctattattagttatattgcctagtaccatgtaaacactatgtaaataattattatacttatacagtattatttgcaataatgataaaagtctgtatatgttcaatacgaactccatttttttaaaatatttttgattcatgataggttggatccacagatgcagaacctatggatacacaagatgaaatatatttggtttttgtccctggttcctggcacagaactgcaatttcccragtgataggcgtgtcttttgaatgagtgttggattgtgtcatatttttctgaggatatctatatgattatatgatttttctttagcctattgatataattattatattaattgattttcagatattgaaccagatatatatctctggaatatatcccacttggtca

SEQ ID NO: 741297 - DNA, 560 bp, Homo sapiens
ttagaacaacttggtggtctcctccagtttctagggacatctctatgcctctcaactcctgattccatttggacccatctctgtatgacctctcacaatgcgagcttgggtatctttcccttcttattgtgactcaccactaatagcagtacaaaatcctgtttcataaagtgggttcctcagaacattagttatgttggatataaatagatttcgtgtaggataccaagaatgtttgagaaatgttgcatgacagaaaacaaagtttctttcatgcaaaacttcctatatgtccacaggtgggaaagtgggaagayagaccttgcgtgatttccaaatgtttttgtttccaaatgttttatttgggttggggtgtgaactgtgaacttcccaatgacccaaaggacttgcccacatgcagtgctgagatccttggccacacttcagcctggcttctacctgcactagtcatgtgcctaaaagtgacacagctcttgtgtgagtctctgctcaagaaaatgcaatgctcctgaactgccagatgtaaattgtcccaaccc

SEQ ID NO: 741298 - DNA, 620 bp, Homo sapiens
tagagctccttttagcagttcttgtagtgccagcttggtagtggtagattctctcagcatttgttcgtctgaaaaagactttatcttttcttcatttctgaagcttagtttcgccggatacaaaattcttggctgataattgttttgttcaaggaggctaaaaataggactcctatcccttctagcttgcagggtttttgctgagaaatctgctgttaatctgayaggttttcctttataggttacctaatgcttttgcctcacagctcttgagattctttcctttatcttgacttttgataacctgatgactatgcgtctaggtgatgatatttttgtgatgaattgcccaggtgttctttgagcttcttgtatttggatgtctagatctctagcaaggccatgaaagtttttctcaattattccctcaaatatattttacagacttttagatttctcttcttcctcgggtacaccaattattcttaggtttggacacttaacatagtcccaaacttcctggcagctttgttcattttttaaaattctttattctttgtctttggtggatggggttaattcgaaaacctcgtcttcgagctctgaagttctttcttctg

SEQ ID NO: 741299 - DNA, 622 bp, Homo sapiens
acctcttccgtaaacccggtgtcaactatatcaagtaaagtgcttgctgtattctctaaactactatttacaaaaaaaattctttctgtccagggttttgtctgtagttatgtcctgcctcttttgaattgtgaaatattttcttgtttatcaaatgtttgtctcatcttcccaaccagaaagtcagctcgctgaaaataggattgtgtcttttatatctttgtatcccccttagcacttgacatagagccttaccttggcaggtaagcaatagatatttgttgaaagactgaatttctaattagacgtaaattacctaaaaagtaagccaggatggggtgaattttttctttgaagctttattttattacagatatcaattgaaatgattttaaaaaataaattattatctatatatgtatgttttaatctgaaaaggcatcgttctttttgtttttggtaacaaattttacacattctttttytgtcctcattgatttattatctgatataagggacatataaggagacagatatccatctttaaaattgcctcaaaagtttttttttttttaaccacagataatgaaacaaccaccatcggttaaatttgatgcaaaaa

SEQ ID NO: 741300 - DNA, 615 bp, Homo sapiens
atttttttttatttttagtagagtagaggtttcaccatgttggccaggctggtcttgaactcctgacctcaggtgatctgcaagcctcagcctcccaaagtgctgagattacaggtgtgagccaccatgcctggcctggtacagcaatgttaaaaagtcattatccaacagctaaatgtaaggtgtcttagacttgatgctggacctgaaaatggacattagtgagacaagcagcaaatttaattgagatctgaagatgagtcatagaattaaatcaatgtgaattccctgattttgataattgtactaggcttaagtaagatgttaacatctggaaaagctaggtaaagggtatatgagaattctttgtaccatttttgcaacagttgtataagtctaaaattatttcaaacttcaaaatgaaaagstaaaatttaaaaaaaattaaatcacagacaaagccatagatattttaagtgatcacattagacattgcataatttagaccactcaatccagaactgctcacctcagggaggttaaccacagctgaataaattcattaatgttttttcccttaatctgccacatcctacttcctgagtctgaagtatt

SEQ ID NO: 741301 - DNA, 590 bp, Homo sapiens
aggaagaaggcagaaactcagagtgcatacatgggatgcccaatgcttaataattgaaagattgtgaactgaacaaaaacccttggggagctttggaaatatacattagaagtaacttttttaaaaagagaaagagaagaatgctataatgtttgagaaatgttttctcaaaatttaaaaactaaatcttccccttattctgctgttctctctctttctctttttattattcctattttgcakgtgagaaaactgaaattctgcaggcaaagtagcttaattaagatcacagagctacctggtggtggagcaggaattcaggaaggagtctgtttctgaaacctttgatttttaaaaactgaaatagaaaggcagttttcttcaaaagagcaatcaatgcttgggaaggaccccagcaggaatggtgagaaggcaatagtctaagatggtgggagctcttctctacccattacctacagcatctatgaagaacttttatttcaaaatgtattggttttacctttaggaaaggagcacgaagtactctttttatagtaccctgttgagggcagggaggtaggatttgaggg

SEQ ID NO: 741302 - DNA, 649 bp, Homo sapiens
tttttggtaatgttgtcaagaacacacaatagggaaaggacattctcttcaattaatggtgctggggaaacagaacatccacatgcagaagaataaaattaaacccttatctcacaccatatacaaaagtcaactcaaaatggattaaatacctgaatgtatgaactgaaactgtaaaactctagaagaaaacataggggaagagctccatgacattggcctgggccaagatatttttcattgcataaaactaaaatgctgctgtactgcaaaggaaatacttaacagaatgaagagacaacctaaaagtttggggaaagtatttgcaaatcatacattggataaggagctagcatattaaatatttaagaaactcratctatctaataacagaaaagataactcgattaacaaatgaacaaacacctgaatatacaagtctcaaaagaagacataaaaatggccaacagatacattaaaaaaatttcaacattactagtcaacagggaaatgcaaatcaaaccataatgatctaacacctcaaacctgttggaattattatcatcaaaatgatgaaagataaccagtgttgtcatggatgtgaagaaaagaaaaccgttttacactgttgatgggaatatgtattagt

SEQ ID NO: 741303 - DNA, 649 bp, Homo sapiens
tttttggtaatgttgtcaagaacacacaatagggaaaggacattctcttcaattaatggtgctggggaaacagaacatccacatgcagaagaataaaattaaacccttatctcacaccatatacaaaagtcaactcaaaatggattaaatacctgaatgtatgaactgaaactgtaaaactctagaagaaaacataggggaagagctccatgacattggcctgggccaagatatttttcattgcataaaactaaaatgctgctgtactgcaaaggaaatacttaacagaatgaagagacaacctaaaagtttggggaaagtatttgcaaatcatacattggataaggagctagcatattaaatatttaagaaactcaatctatctaataacagaaaagataactcgattaacaaatgaacaaacacctgaatayacaagtctcaaaagaagacataaaaatggccaacagatacattaaaaaaatttcaacattactagtcaacagggaaatgcaaatcaaaccataatgatctaacacctcaaacctgttggaattattatcatcaaaatgatgaaagataaccagtgttgtcatggatgtgaagaaaagaaaaccgttttacactgttgatgggaatatgtattagt

SEQ ID NO: 741304 - DNA, 611 bp, Homo sapiens
taattccaaaacatttggagaataaacaacatccttttaaatagcacttagttcaaagaagccatcttaagagaaattaaaaaagtattttgaactaaataaggatgaaaacaatttattaaaacttgtggaatgtagagaaaacagtrcttagagatacatttataatattaaatgcttatataagaaaaggagaaagatctaaaatcaataatctaatattctaccttaggaaactagaaaaagaggagcaaattaaatccaaaatgagaagaaaagaagtataaaaattagagcataaataaattaaagcaaaaacaggaaaccagtagagaaaatcaataaaaccaacagtggtttttgaaaaatcaagaacaacaaaaaaccctgataagcctctctcaagccaaactaagaaaacagagaatgttaaatgataaacgttaaaatgataataagagaatactatgaaaaacagcatctccacaaattttgtaacatagatgaaatggaccaattccttgaaagataatcttccaaaactcacacaagaagaaataagcaatctgaataggtctgtatctattaaagaaattaaattattaattaat

SEQ ID NO: 741305 - DNA, 611 bp, Homo sapiens
taattccaaaacatttggagaataaacaacatccttttaaatagcacttagttcaaagaagccatcttaagagaaattaaaaaagtattttgaactaaataaggatgaaaacaatttattaaaacttgtggaatgtagagaaaacagtacttagagatacatttataatattaaatgcttatataagaaaaggagaaagatctaaaatcaataatctaatattctaccttaggaaactagaaaaagaggagcaaattaaatccaaaatgagaagaaaagaagtataaaaattagagcataaataaattaaagcaaaaacaggaaaccagtagagaaaatcaataaaaccaacagtggtttttgaaaaatcaagaacaacaaaraaccctgataagcctctctcaagccaaactaagaaaacagagaatgttaaatgataaacgttaaaatgataataagagaatactatgaaaaacagcatctccacaaattttgtaacatagatgaaatggaccaattccttgaaagataatcttccaaaactcacacaagaagaaataagcaatctgaataggtctgtatctattaaagaaattaaattattaattaat

SEQ ID NO: 741306 - DNA, 575 bp, Homo sapiens
tggtaattaagcatatgaaaagatgctcctcattacagatcatcagggaaatacaaattaaaacaacagtgagatgcctttgcatacttattacaatggccaaaactcagaacactaaacactaaatgctgactaggctgtggaacaacagaaactytcattcattgctggtgggaatgcaaaatgctatggcgactttggaagacaatttggaggtcttaaaaaactagaaatactcctaccatatgatccagcaatagtgctccttgctatttacccaaaggagttgaaaacttatgtccacacaaaaacctgcacacagatgttgatagcatgctttttttttttttttttttttttttgtatttgctaaaccttggaagcaaccaagatatccttcagtaggtaagtagataaactgtggtacctccaggcaatggaatactttttagcgataaaaagtatcagtagttgaaaaaagaaatctgaaaagactacatgctgtatgactctaactatatgacattctgaaaaaggaaaaagtatggctacagtaaaaagattagtggttgcca

SEQ ID NO: 741307 - DNA, 621 bp, Homo sapiens
aactcaaacaacccaatttatgaaatggttcaaagaccctgacagacaactctccaaagatttacagatggtaattaagcatatgaaaagatgctcctcattacagatcatcagggaaatacaaattaaaacaacagtgagatgcctttgcatacttattacaatggccaaaactcagaacactaaacactaaatgctgactaggctgtggaacaacagaaactctcattcattgctggtgggaatgcaaaatgctatggcgactttggaagacaatttggaggtcttaaaaaactagaaatactcctaccatatgatccagcaatagtgctccttgctatttacccaaaggagttgaaaacttatgtccacacaaaaacctgcacacagatgttgatagcatgctttttttttttttttttttttttttgkatttgctaaaccttggaagcaaccaagatatccttcagtaggtaagtagataaactgtggtacctccaggcaatggaatactttttagcgataaaaagtatcagtagttgaaaaaagaaatctgaaaagactacatgctgtatgactctaactatatgacattctgaaaaaggaaaaagtatggctaca

SEQ ID NO: 741308 - DNA, 540 bp, Homo sapiens
gctgatgatcctaaaaactcctgatgaccctaaaaactatcttttttcagaatagaaggctagttttgatacagaaatcaagagcatgggaaggaaacttctgtttgtttgtcacctgctctgctggcttctcatatggttcaatatttctcctccattaggaatactgtaagatgacgccttgggagcagatggaraatgtctttgtctgcaacactgaagccacagagcagtaagccaacactaacactggggacaaccatccacatctgtgtcactcccacagatgctgagaagacaactcccaatatggggcaaatgcatggacttgggaaatgtcctttcttgtgggagaagaaaaagagaaagtacacttctgacacattcagcaaacagggagttaagcatactgggccgccttccctaatgtgtgtgtagtgacacagtcaaggaggtcaccatggatacatctggctgcatctgcctgagttatttgtattgaacagattgctacagggtgttttttttctggtcccatta

SEQ ID NO: 741309 - DNA, 626 bp, Homo sapiens
aatcacaagcattcttatacgccaataacagacaaacagccaaatcatgagtgagctcccattcactgttgcttcaaagagaataaaatacctaggaatccaacttacaagggatatgaaggacctcttcaaggagaactacaaaccactgctcaatgaaataaaagaggatacaaacaaatggaagaacattccrtgctcatgggtaggaagaatcaatatcgtgaaaatggacatactgcctaaggtaatttatagattcaatgccatctccatcaagctacaaatgactttcttcacagaattggaaaaaactactttgaagttcatatggaaccaagaaagagcctgcattgccaagtcaatcctaagccaaaagatcaaagctggaggcatcacgctacctgacttcaaactatactacaaggctacagtaaccaaaacagcacggtactggtaccaaaacagagatatagaccaatggaacagaacagagccctcagaaataatgctgcatatcaacaactatctgatctttgacaaacctgacaaaaacaagcaatggggaaaggattccctatttaataaatggtgctgggaaaactggctagccatatgtagaaagc

SEQ ID NO: 741310 - DNA, 654 bp, Homo sapiens
ctgccagacattctctctctcacagccccttgttccccaacacgctccactttaggttctgtgcacaaaggtgtcactcttacaaccctaaacactacccttctgtcctcttcttgtctccttttgtccccatgtttttcacttgttatttctatgtagtagagggcttggcccaatgaatagcattgagaaagggggatgacaaatggcaataagaaaataaaagccttaaaattttatgaagctgaagaatttttatcttcaaaagatactccttaaatgtagatcaagtagtagttttatgttgctctacttttggtgccacttggggatataatgatgatttcaggmtaaagggggtgtagaaaattcaaatagggcagaaacagaacaatgtcaaacacagcctaagaaaacagtgattacacagtattgcatcctccactgggcatgaaactctagtattctgctatggagctctcatttaaaatggaagaaaaacacagatccttgagctctctgagctttcacttgcccctttaacgctgaagcaaaattatagaattgaagcattgttaagaggagggaaggccaggcagggctggtggaaggcagaaaggaagaccttatctcagtgctgctatagggaaggga

SEQ ID NO: 741311 - DNA, 623 bp, Homo sapiens
aatgaaagctctaaatatatataataaacgagcaaatgattttggaattttcatagactcgtgtccaaatatattcctttgtatagaattttcacttgaaaaacagagatgaaccaacagcttctttcagcagtgcagccccatgagacacgagactgttaagttcatttaaaataaacttaatgattagacagggacaacacatttaattttaaaataaaaagaaactcaccagtacttgtctttgtatcttgtatctgtttttctctacctcaactcatccccctctcaaattaatattacatttatctcttctgagygcacacatgcaactcttacaattgtcttcttcacccacaagcagttacaacaattctttagtaacatcacaggaatgtacaatccacttaaatggcacatacctcaccgttgactccctgaagtactttcatcaaatcttttgctatataagatgggcaactatacacacaactaagtaagtttttcaaagtttcagacaacttctgatgagatttcagtttcttttctctctgtagttcctcaaataaagtagccaaatcctaagataccaaaaagaaaattggataaaaaagggttaagaa

SEQ ID NO: 741312 - DNA, 570 bp, Homo sapiens
agggcagaggtatttagtgaaagatgtttgcttatcgtatgtcacattttgaaaggtatttatcaaaatctggattctctagattcttagtaactttactggttcgatttggtttctgagccactatgatacgcttctgtcattgctttacaataacactaagaacagaaatagactaggaaactgcacaacttataccactattcccaccatctagcgttgtacatggtatgtaatagatgctccataaatactgattaaataaatgaaaggagaattttaagtgaactttagtaggtgagtggagtttggctacctgsaataagagtgcctagggagcagcaagatccaaggtagattagaggaagaataattttgatgctatgggcagagtgaatgttgggaagagcagttaatgagctttatcaaaggctggccttctccaacattctttagttcaagtgctttacgttcagattcttaaattctccttctaattaaaaagtcctcattactcctatcttactaattctgaacactgaccccactaccatcatcagcctaatgtgc

SEQ ID NO: 741313 - DNA, 570 bp, Homo sapiens
agggcagaggtatttagtgaaagatgtttgcttatcgtatgtcacattttgaaaggtatttatcaaaatctggattctctagattcttagtaactttactggttcgatttggtttctgagccactatgatacgcttctgtcattgctttacaataacactaagaacagaaatagactaggaaactgcacaacttataccactattcccaccatctagcgttgtacatggtatgtaatagatgctccataaatactgattaaataaatgaaaggagaattttaagtgaactttagtaggtgagtggagtttggctacctgcaataagagtgcctagggagcagcaagatccarggtagattagaggaagaataattttgatgctatgggcagagtgaatgttgggaagagcagttaatgagctttatcaaaggctggccttctccaacattctttagttcaagtgctttacgttcagattcttaaattctccttctaattaaaaagtcctcattactcctatcttactaattctgaacactgaccccactaccatcatcagcctaatgtgc

SEQ ID NO: 741314 - DNA, 512 bp, Homo sapiens
tttttttttttttttttttttgagatggagccttgcttggtctcccaggctggagcgcagtggtgcgatcttggcacaatgcaacctctgcctttcaggttcaagcaattctcctgcctcagcctcccaagtagctgggattacaggtgcctgtcaccatgcccagatgatttttgtattttcagtagagacagggtttcaccatgttgaccaggctggtctccaactcccaactttcagtgatctgcccgtctcggtctcccaaagtgttgggattacagatgtgagccaccgtgcccagcctctcctcttaagggtaagattaygtagcagcccagtctgagagacaggccaggcagacaattctgtacacactataattcaaagggtgaagtcctccaccctcaaaaaatcatgtatatttatacaacaagattgctttctccctggaggtattcttcttttgaaaggcaggtgttcctgctagcaatcctggagaggctcatgcctgt

SEQ ID NO: 741315 - DNA, 667 bp, Homo sapiens
ttgagagtcttcttcctttttaaaggcataaaccttttatttttaaaaagtgtaattgaaacataacattattgtaaacacaattcatggttcccacaaaagaatcaatagttaagtgccatcatatttcactttccttaacagatgtactgcttaaatttttatttaaatctaattctattyttgtgctggtataatttcaggaggttttttttctattttttttcttttggacatacttgacaataaattctaatcttttctccccaaaactccttgctaataagtttgtaatctataaatgtgtgcccaaattaagttatgtagctactattttaaaagttgttccgcaaggttaaaacaaattttttaatgtaaagagtgacaacctcacgtagtcactaagccatttcaatttatttcattgtatttttaagccattttccttcttaagtcattttactttatttttttattgctgtatttggatgttctaaaatatattatgtaagcacattttctctaagttacagatttattttgtcttcacatttttaaaataatcctaaatgacataaaatataatgaagctattacataattctggtcctattgtctaaagacaccacaatatagctgatggcaaggatcctttgtgtcttttatt

SEQ ID NO: 741316 - DNA, 541 bp, Homo sapiens
cagaagcttcccttcagcagttgccattcacaggaagtattgagggtgatttattgcactggtcctgattcaccctgagtggaagcagagaataaaggattcttattattttcctagcttagttttattttttgctttccaataattatctaagcaccaaccaatttcctgttatttatttccaatcttttcaagtaaactgatgtatctagcacacacaaaactatctatccactcaacgcctatgagagccctagtttgagtaaataacactccatattaataaatgtcttagctaatytttttggaccaatcttttgtacaaaaaaaaaaagaagaagaagaagagagagagaacaagagaggaaggcagaccttatcttctctgaactaagtatctattatatactatgtactataacttatatagttatataacttatatagctagtatataatagtatatctattatacagtatctactatagatgtattatatactataactagtatctattaaaaacactttcataagctaaa

SEQ ID NO: 741317 - DNA, 644 bp, Homo sapiens
ggaataatttgagcaacaaaataaatgatggaattttggattataactcaacatataataaatatatatgagtccatactgatagaaaaattaatacatgaataaataaataagggagaatagaaaaaaaaaactttcctgtacagaaggatatcaaataacttatgtggattctttaccctgaaaaagactgagcacagccctccaacccttaactgtcagctgtgaatagtgacttttttccaaagggtacggtatggaaggcaggcaaagaaaataacttcacaatgcataaacctgacaaacactacctcagccaggagatcaagattcgcatcaacagtaataagtcatgttgacagtgtgtgcccttgatatgatgtgaagaagatattatttcrcctctgtagtctccctccacacaatatttaactccattctactagtaatcagacaataacaaattgatagatagtctacaaaatacctgatcaattctccttcaaactttttaggtcatcaaaaacaaagaaagtctgtaccagccaatttatctacagaaaaaaaaaaaaaaagtctgagaaacagtcacatccaagagtagcttaagacatgacaagtatactgtggtttaacagacggga

SEQ ID NO: 741318 - DNA, 551 bp, Homo sapiens
ttgtcttggtgattaacattaggatcctcattacttatgcaaatttctgcagccagcttgaatttctcctcagaaaatggaatttactttacttttttttttcttttaatggagtcttactctatcacccggggtggagggcagtggcgtgatcttggttcactgcaacctccacttcccagctacaagcaattctcctgccccagcctcctgagtggcygggactaaaggcacccatcatcacgcctggctaatttatgtatttttagtagagacagagttttaccatattggccaggctggtctcaaactcctgaccttgtgaactgcccatctcggcctcccaaagtgatgggattacaggtgtgagccatggtgcccgactgggattttcttttctattgcattgtcaggctgcaaaatttctgaacttttatgatctgtttccattttaaaactgaatacctttaaacagcacccaagtcacctcttgaatgctctggtgcttagaaatttcttccaccagatatcctaaaccatctccctcaagt

SEQ ID NO: 741319 - DNA, 553 bp, Homo sapiens
agggagagggtataatgagacatgcctgaccccctcttcccataatggaatgaattagtttttcacgtgtctttggaatcacctcggctgagaggaggggtctattccgttacttggggagcttagaatcttatttttggtttacagaactttcttgtaatgtttgctgtttcaattctttcccacttagaacttcaagagagaagagcaaaattttgtgattcagaatgaaattaataatttggcatttttaactggagacagcaaaagcaagatgtcaaaagtaagtccttagaaatcaattccaaaaactcttcaaccytaacctcagccatgacttggatctgtttcatactttctggggattaacaccgtactgcatttaggtcaaactacatgaccaacagtctctgctgctgtttctttgagaacgagccagaagaaactgctctcaaataagcatggtcatcacattttatgaataaatagctgcttgtatgtcaaaaagcttaagtttcaagacttgcctaaggcatttgagaggtctccaaaa

SEQ ID NO: 741320 - DNA, 520 bp, Homo sapiens
tgtgattcagaatgaaattaataatttggcatttttaactggagacagcaaaagcaagatgtcaaaagtaagtccttagaaatcaattccaaaaactcttcaaccctaacctcagccatgacttggatctgtttcatactttctggggattaacaccgtactgcatttaggtcaaactacatgaccaacagtctctgctgctgtttctttgagaacgagccagaagaaactgctctcaaataagcatggtcatcacattttatgaataaatagctgcttgtatgtcaaaaagcttaagtttcaagacttgcctaaggcatttgagaggtctccaaaacaaaagctgctgttagtgrttttaaaatagaacttcttcctgtgtagtgaggatacagcaatacacatgcctagaaccaccttttgatagctaggaaaaaattaccttgctttgtagattttgacagcacgtactcttacatcatgcttgttttcctcctatctgtaatatccaatacctgtt

SEQ ID NO: 741321 - DNA, 597 bp, Homo sapiens
catgggtgtgggatccgctgagcaagtctacttggcttcctggcttcagcctcctttccaggggtgtgaacagttctgtctcgctggtattccaggtgccactggggtaggaaaaaaaacttctgcagctagctcagtgtctgcccgaacggccacccagttttgtgcttgaaacccagggccctggtggggtaggcacctgagggaatctcctggtctgcaggttgtgaagaccatgggaagagcayagtatctgggccagaatgcaccgtttctcacagcacagtccctcatgacttcccttggctaggggagggagttccccaacccctgcacttcctgggtgaggcaacaccccaccctgctttggctcgccctccttgggctgcacccactgtctaaccagccccaatgagatgaactgggtacctcagttggaaatgcagacaccactctccttctgcgttggtctcgctgggagctacagaccagagctgttcctattcggccatcttaatctctgtcccgatgttgatttaattatatacatctttcccaagccccacgggtactcccacacagtatacctcaattggt

SEQ ID NO: 741322 - DNA, 560 bp, Homo sapiens
atgtgtgaccaacaggatggaggtggccaggtctctgaggactttgtgaagcagagctacataccttcccttgattccctgtctctggaccctcaagagacacaaataaattctgtcttatttggatcattgctattttgggtctctgggtttttgttgttgttgttgttgttgttgttgttcttttttttttttttagatgaagtctcactttgtcacccaggctggagtgcagtggtgtgatctcggctcactgcaacctctgcctcctgggttcaaatgattctcctgcctcagcctcccaagtagctgggattacaggtgccygccaccacacccggctaatttttatatttttattagatacaggggttttcaccatgttggcaggctgatctcaaacttctgacctcaggtgatccgcccacttcagcccccaaagtgccgggattacaggcgtgagccaccacaccaggccttgggtctctgttttttaatagccagatctaattctaattgatacagatggatcctggctaagcatttcccaggtgtaggtt

SEQ ID NO: 741323 - DNA, 653 bp, Homo sapiens
gaatccttcaccagcaaccaaggtatccagattctcttatcaaaattgactaggaggctggcatgacccacaaagaggaggaagaacaatgtggtgcggtggaccacctgagagccacacagcgcgggggagcccactcgcccagcaaagggaggcagtgagtgagcatgctacccagccagggaaactgtgctttttccacaaaactgtgcaacccatggatcggaagatcccactcatgaaaccatacccctgggcctagcatcccaaccccagaacatgtagactcttaacaccctctcagctggaatccgcttaagtctaccaaactcccaggggaaggggcaaccaccaccgcagctgctgctacctgctgtctaagccatttgaggtccttggggaaggggcaaccaccaccgcagctgctgctacctgctgtctaagccayttgaggtccttggggaaggggcagtagccagcactgggacttgcaactgcctaacacactaagctccctggcaggggaagaggagcacccatctctatagcccaggctgtgctttttccctgctggagccagggagggtggacagcttggtcccaagacttctccccaacaacccaatacactggctgtggcagtctgtggccgg

SEQ ID NO: 741324 - DNA, 622 bp, Homo sapiens
caaccccagaacatgtagactcttaacaccctctcagctggaatccgcttaagtctaccaaactcccaggggaaggggcaaccaccaccgcagctgctgctacctgctgtctaagccatttgaggtccttggggaaggggcaaccaccaccgcagctgctgctacctgctgtctaagccatttgaggtccttggggaaggggcagtagccagcactgggacttgcaactgcctaacacactaagctccctggcaggggaagaggagcacccatctctayagcccaggctgtgctttttccctgctggagccagggagggtggacagcttggtcccaagacttctccccaacaacccaatacactggctgtggcagtctgtggccgggtgcctcttcaggcctgaccctgacccatccttcctcactgggtggggcttccctgcaggaactccaataactccagccagaggctcagggacagaaccggatctccctggtactgagcccctatgggggaagggtggccacaacctctgcagaccagcagacttagcctttcctcctggcagttctgaggaatccgagcagcccagacgagtgggtttcccttcagtgaggcaca

SEQ ID NO: 741325 - DNA, 594 bp, Homo sapiens
attgaaaaaacaaaaacaaaaacaaaacaaagaattccaaacagtgcattagttttccagatagatcagggatgctgatgtcgttgaaaagaacggattttctatactactgtaacaagattcatctatctccttggaaactttaattaaactaatgttataaataatagcagccagagctgttggacacaagaaaacagatttatagctgcatctgctcagctattcctcttttagtggtatattggggttaggatgtgaggatgaaraagcttgcacggaaaatgtttctgtgcactctttttcctgcacaaaccccaattagtgactttttctctccaaattatcctttttagtttgttgtgagtgtttctgccagcaagggttgtagagttgcagagccagccagctaatgtgcctggacccacacctgagggttttcattggcaattagagtggaaataatttctcttctctttaaagggcttgtgtaatggtgtctctaactctccctcaagaatgccatgtcgcatccctactcattagagtggattaatctgagggtgtcacttttctgacagcaaatttcacaca

SEQ ID NO: 741326 - DNA, 569 bp, Homo sapiens
aaaattcagcagtgaagccattggatcctggacttttctctgctgggagatttttcattacatcttgtatctcattacatatcattggtctgttcatattttgggtttcttcatggttcaatcttgggaggttgtatctgtctaggaatttatccatttcttctaggtkttcaaatttattggcatatagcagcctctaatgatcctttgaatttctgtagtatcagttgtaatgtctcctatttcgtctctgattttatttgttatctcttttttctcaattaatctggctaaagatttgtcagttttgtttatcctttcaaaaacgaacttcttctttcattgatcttttgtattgtttcttcgtttcaatttcattggtttctgctctgacctttattatttctttacatctactaactttgagtttggtttggtcttgcttttctagttctttaagatgcatcattaagttgtttatttgaaatttttctatttttttcttttgatgttggttttgatggttaataccgagtgtcaacttgattggattgaaagattcaaagtat

SEQ ID NO: 741327 - DNA, 635 bp, Homo sapiens
gtatcttatgttcctacaactatatgtgaaatggtaaagcagttcccgcttacccacagggaatgcctagttccaagacccccagtggatgccgaaaacttaggatagtacttcctgcactgaagtcttaaatccctcaaagtcatccatgagggttaaaatcagtttttcccaaactcccattaatgttgacattttgacctcctcccataaaccacaaatgttcttaatggcgtctagaatggggagttatttccaaaaggttttcaatttactttgcccasagccatcagaagaatcactatctatggcagctacagccttacaaaatgtttcttaaataatgagacaggaaactcaaaattactcattgatttctaggctatggaatagatactaaatcaggaactaaatcagtaatttaaaaaaacctaccaatcagaaagagcccgggccagaaggattcacagtcaaattctaccagatgtataaacaagaggtggtaccaatcctactgaaactatttcaaataattaggaagagggactcctccctatctcattccataaggccagcatcgttctgataccaaaacctggcagaacacatggtctaatatccagaacttataatga

SEQ ID NO: 741328 - DNA, 635 bp, Homo sapiens
gtatcttatgttcctacaactatatgtgaaatggtaaagcagttcccgcttacccacagggaatgcctagttccaagacccccagtggatgccgaaaacttaggatagtacttcctgcactgaagtcttaaatccctcaaagtcatccatgagggttaaaatcagtttttcccaaactcccattaatgttgacattttgacctcctcccataaaccacaaatgttcttaatggcgtctagaatggggagttatttccaaaaggttttcaatttactttgcccacagccatcagaagaatcactatctatggcagctacagccttacaaaatgtttcttaaataatgagacakgaaactcaaaattactcattgatttctaggctatggaatagatactaaatcaggaactaaatcagtaatttaaaaaaacctaccaatcagaaagagcccgggccagaaggattcacagtcaaattctaccagatgtataaacaagaggtggtaccaatcctactgaaactatttcaaataattaggaagagggactcctccctatctcattccataaggccagcatcgttctgataccaaaacctggcagaacacatggtctaatatccagaacttataatga

SEQ ID NO: 741329 - DNA, 635 bp, Homo sapiens
gtatcttatgttcctacaactatatgtgaaatggtaaagcagttcccgcttacccacagggaatgcctagttccaagacccccagtggatgccgaaaacttaggatagtacttcctgcactgaagtcttaaatccctcaaagtcatccatgagggttaaaatcagtttttcccaaactcccattaatgttgacattttgacctcctcccataaaccacaaatgttcttaatggcgtctagaatggggagttatttccaaaaggttttcaatttactttgcccacagccatcagaagaatcactatctatggcagctacagccttacaaaatgtttcttaaataatgagacaggaaactcaaaattactcattgatttctaggctatggaatagatactaaatcaggaactaamtcagtaatttaaaaaaacctaccaatcagaaagagcccgggccagaaggattcacagtcaaattctaccagatgtataaacaagaggtggtaccaatcctactgaaactatttcaaataattaggaagagggactcctccctatctcattccataaggccagcatcgttctgataccaaaacctggcagaacacatggtctaatatccagaacttataatga

SEQ ID NO: 741330 - DNA, 601 bp, Homo sapiens
ctccaaagaactacttatctactgggtgcagctgaaccatttccataactgagatcatgtaagtcaggaatgtatacacattacacatgtgtgcagacaaaagttcatgacttcacctaccaggtccaagacgagtctccttaggaatgcctgcatacaagcctggcccttggctggtgtctgggaacttggctggtaaaatcattgcctacactaatataaattttttctaaatgagaaaagtagctcacttctcctaaaacatctgytttccttctaggtatctggaatttcagtgactgctatcagtcacactgacagtctgtgctcatgactaacccctgataaaaaccctaaactcttaagctcagacaagcttccctgatagacaacacttcacacaagtttccataccttgttattcagaaaattaagtgcatcctatgtgactccacaaggagaatattctggggagtttgtatctgatttcccttgttgattttgctttctaccttttcagtctaccatatcttagccatgaatgtgactacctgctgaaccccatgaatccttctatccaatcgttgaacctgggagagct

SEQ ID NO: 741331 - DNA, 518 bp, Homo sapiens
gagcttttcactttaaaattatttcaaaatggtaaaaggaaatctgaaaagtccagtgaaggaaaaccacttgggaaacagaaatcccaaagatcaggattgataaatgtctctatcttcgagttatagacagagagsgctccaaggacaaaatttgaggaaagatggttgataatctcttgtgtaagaaagttttcatttgcaagaaacaggcagagcaacttaagctggcttaagcatgcatagactgattgccacaggagctccaagtcccgctgcatgacagggttcagttggttgattcagttataacaactgggaccccagttctcgccattcttcctgctctggcatccagagtgttgatttcgcttggcttcctttgaagacagatcccttttaaggtcatggaaaggctgtcagaagctatacagtggggtagataaataattgcttctggaaattttccctaaagatgtgtgggcacttttctaaaagtccctatgaaatatttgtgt

SEQ ID NO: 741332 - DNA, 649 bp, Homo sapiens
cgtgccatcaggctgcccttggagatttgacctggggctcaactgtggacatagggaaagggtgaatagggaataaagaggcaccagaagcctgtatgcctatttcacggaaagggcaagacttggaaatttggagaatttcattaagatagagacattctttcacagcaagcctcatgttttgcatgtggacatgatgggtaaagaggtggagttcttcacccagggttcaaggccggccagctcatggctaatgtagcaggactttcagcaagaccctgatgctgtcggagtacacggggctctctgctcaccccctgattctgtgtaatgatctcagcttcttcctgccctcactctctgcccaccaagctgtccaacagaaggaggcttttatagacagatgataactagaggagaatctggagatttcacktgggcttcctggccagccatgtctcccatacaaaccagcaggaccccagaaccagggtccccaccaagtcctgaaactcttcagtgggtatttttaagaggaatcccagttcagctctgaagtcagtgaaaccattctgaaggctctgcttgctacagaatgtttactgagaaaagacactgtgcccaacttttctggacagctgtcctttaa

SEQ ID NO: 741333 - DNA, 466 bp, Homo sapiens
ctcccatgccacataaaacatttattatgcttttctcctgttgatctttcttatgttagtttatttctcagacacagctggagcctgtgaggataaaggatggaagtagaagttttccttccttacagtttctggcaatgaggatgggaccctaagaggctggacaccccactcactccagcctatggatgagatgctgaraggcctgacaaaagcctgcaaaaggtggggggattctttccaaagccagctttcccaaatatctatggatagtgcctagctaagagaagaaggtaaaaattttttcttgtcccttcttttctaaatttgaattggcaggagaaaaacatttgtaaggttgttctctgaattgtgactcttgtgaatttggttctaggttctaacagaaatcgctctttttttttgttttttaatctctgtcttctgtgtgatttaccacaaggat

SEQ ID NO: 741334 - DNA, 611 bp, Homo sapiens
aatgcctcccgagggtagcagcattttcacatctgcacttttctcatgaaagggcgaggaagaagaaacagaactctctgcggaaacacccaccatgccccatccagtgttgtgtggctgccttgcaccattctctcctttgagagaattaaaattctctttgaaattaaaaatgatgtttackggaaacttctgctgttcagaagcaaaacatgtccattgttgaaaaaccaaaaacctccactgatgttgccatccagaaacaatcaccgcagacactttggtgtatgtatttttagaacttcctctctctctctctttcatcctctctaaccaaacttggataatattatgtgcacatatattgaatttcttttcaatacattaaataagcttctacagcctcattttaatggtgttttgtctcatgtcctctcccactcactatttagcttgttttcaatttatcactaacgtcagcaatacaacaatcagcattgctgcagctaaatttatctttacttgtgccttagaataaattcctagttgaggacgtgttgggtcattttgaggtgtcttgctacatactgccaatggtaacaatgtgccag

SEQ ID NO: 741335 - DNA, 607 bp, Homo sapiens
tgaaaagctaactggcaaaggtgcaccagaaaggtagaaaatttaagggagaaagtagtacatgacagtttcaaatcctgaagattattcaagtaatgcagaggttgaaatataagaatatttttagatgaagtgatttgggaattgttgctaactatatccaaataattttcagtgaaatatgagagaggaaggcacatgagagtgggttaattcatttaaacaggaacaatttattgagaacataatttagaggcactccagagtagaaactggactaaaataagttagtatttaagaacatggaatttggttataggctgcatgggtctgaatcatggctctaacacttcttattacacttgtgattttagggtaattgtataaactatactctcagtttcctcatctgtaaaatggagacaataaaaacagtacatttgcatagytgctgtagaattacatcagtttatataggcagaatgcttagaacagtgactggcacgttatctgaagtataggtagaagggagactggcaaaaagtttgcagctacgaagaggtgtgtttcagaaagaataacaagtataaatattttttaaagccac

SEQ ID NO: 741336 - DNA, 667 bp, Homo sapiens
atgaaaaaatgggttacatagttatttccttggtgggttagcatctttaaaactcatcaggattttagagccaaaaataaaattatttaaaaggattgaaacctactattcatgtttttattagtaaatttgcatgtatttaatattttttgagtttgtattatttaagataatttgtctatttgaacaccagatctactttgtaattataatttaagatttgtaattgaaaaattaacttggacttttaaaaattaacttcattcgggttaaatttaatagtcaataaaaattrcccagttaatcaagatagtaagcttactattttaggttgaaatcttacttcattgatcacagtattgaaacatttaaaaggatttaagatttgctttagttataattttctttttagattaaaaagattattttaaaagcctgatgaggctttattaagtcagcaaattgagatgcttaaaaatgaaatacatagatcatatttaaacatatttaaagagaattaaatgccaagtttatgaatcaaaccaaatatttgtgtaacacctttaaaaatgaataaaatatattaggtttattaatagaatactaaggtttttaagcgggaattgaaagaattaaagacctacttttttaatgtttacctcaaata

SEQ ID NO: 741337 - DNA, 603 bp, Homo sapiens
aaaggaacaaaataatgttatttgcagcaagttggatggagcttgagaccattattctagtaacttgggaatggaaaactaaatatcatatgttctcacttgtaagtgggaactaagctatgtggatgcaaaggcataagaatgacacaatggactttggggactcaggggggaaaaggtgaggaggatgagaaataaaagcctacatattgggtatggtgcacactgctcaggtgacaggtgcaccaaaatctcagaaatcaccagtaaagaaattatcaatgtaacagaaaaccacctgtactccaaatactattgatttttttttatctcatgttgaactgtaatgagtttggatgttgtcctctctaaatctcatgttggatgtgaggcctgggagaggtgtttgagtcatgttcggtcatgggggtgaattcctcatggcttggtgckattctccatagtgtgtttttgtgagatcttgttgcttaaaagtgtgtggcatctcctccccctcttgctctcgctctaccacgtgacatgttggctcctcttttgcctcctgtcatgattgaaatcttcctgaaggctcaccagaagctg

SEQ ID NO: 741338 - DNA, 606 bp, Homo sapiens
cttaataatcaaccttttgaatgtcttaactggtatttcaaagatttcatcttggtttgaatccactgcaggagggttagtgttatcttttgtgagtttcatagaaatctgtttttttatattgccataattattatttctgggttccttcacattttgctagactatttcttctaattatttttcaacttagttttgattctgagttttttaaatttatattttcccctttaggatgtgacttcaatgtttatagtttgttggtacttggctttggctatgtgtattttcaatggcaaagactctatgaatttcttggttatagagaatctttgtacartaactttctcagatgctggttgtagtagctatgtgctgggtgtgtaagcaggttcactgtctcctgtggggctggaatgtcagaggtctcatgaaacttattttattcctcagtggtgtgcactttttaaattttttttcctagtattttattcactgggttgaacagtttaggcttcaggccagtaggaggtgcccatgggtaagatccagctgcagctaaagcaggtgggtaaatgcaatacctcaatggtgagcagaggtccc

SEQ ID NO: 741339 - DNA, 607 bp, Homo sapiens
tgaaaagctaactggcaaaggtgcaccagaaaggtagaaaatttaagggagaaagtagtacatgacagtttcaaatcctgaagattattcaagtaatgcagaggttgaaatataagaatatttttagatgaagtgatttgggaattgttgctaactatatccaaataattttcagtgaaatatgagagaggaaggcacatgagagtgggttaattcatttaaacaggaacaatttattgagaacataatttagaggcactccrgagtagaaactggactaaaataagttagtatttaagaacatggaatttggttataggctgcatgggtctgaatcatggctctaacacttcttattacacttgtgattttagggtaattgtataaactatactctcagtttcctcatctgtaaaatggagacaataaaaacagtacatttgcatagctgctgtagaattacatcagtttatataggcagaatgcttagaacagtgactggcacgttatctgaagtataggtagaagggagactggcaaaaagtttgcagctacgaagaggtgtgtttcagaaagaataacaagtataaatattttttaaagccac

SEQ ID NO: 741340 - DNA, 586 bp, Homo sapiens
caccacacacatgcactctgtcccacacccagggctcagccagtcctccttcccaccctgcttctaggctcctcagcctgcctgggtttttcatttattggcatcgatttattgaatgctattcaggtgcagaccactgttacaggtagtggggatacaggatgaactagaaaaagtctctaccctcawcaaattacattctagtgggggaacagagcttaacactcaaataacaaataaaaaataccagacactgataacactgtgtagagaattaaaataggtaattataattaatacagtcagccctccatatccatatattccacatctgtggattcaaccaatctcttgagtcaaaaatattgtgggaaaaaaatgccacaaagttctgcaaagcaaaacttgaatttgctgagtactaagacaaatccatgggaatgaagtatgtgtaagcattgtattaagtattatagagtaatttagagatgatttaaaagataatgggaggatatatgtaggttaaaagcaaataaaagcattttatataagggacttcagcatacttggattctggtgtttaggg

SEQ ID NO: 741341 - DNA, 574 bp, Homo sapiens
cacatggaaaggaaagcagccatcacaaatgtctcagtcaagctgagctcccaacagaccatctagctgaatgaatctgcatgagacagcccaggataacattgcggagccacccacctaactcaaggaattgcaagaaataatgtgattttttgttgttgytgctttaggtcagcaatagacaattgatttgtaaaatggtaccagaattggatggttgctaaaacactctcctaaaatttgtggtattggttttgagactgggcagtgagttgagaggagttgagaggaacctgctattagaggctagaaagatgttttgtagtattgaagcaatgacaaactgttctctacagtctttggagatagagaataagcctaatggttcagtaatgaatctgtggatctagctaaggagaattctaggcagagttaaaaatgtcaattttcttccttggctgtatatgatagaataaagagaaagaggcactaaaagggagattttactttataaggggaatgtaaagaatatgtaaagaagctaagagttgcttggttgaaaaatcaaaacatt

SEQ ID NO: 741342 - DNA, 608 bp, Homo sapiens
gttcaccaagcccatttaggggtggaggatgttttacctctcctggactttgtagttaatagtggagaatagaagaaaagactaatagctctttttccccttctctcttctccccactactcctcaatctggaatattctttgtattgtcagtggggcaagggaaaaacctggctcttatttatcttgtatttttctaaatattttgtacaatatttggaccatgatgtttgtaactcatttttyaaaaaactgattgtctgttttctgcggtaacaaaactgccttgatccattggatgccttgtggtctaactgctggaaatgagggcagatcacaaggcaacttggacacactagaggagagagaggaatgcataatttactattagaactatcattctgctaaacgtgtatatatcacaggaaatagtcgtccatccttctatacttgtggctcttactagaaacatagctgatattcttagaaatgttataaaattgagaggaaatattatcatattagaaagttttcacacaaatacagattatctttccattcaggacagcttagttatacaacacaagtatactcatgctgggtaaagct

SEQ ID NO: 741343 - DNA, 627 bp, Homo sapiens
ctcttggaaaacactcagacaaatccaaatgacaaagctaacaaacaaaacttatatcccagaacactgtctcaaacaagactggtatcttttttgtagaacaaatgtttatttaacaactacaaagcagtgatttattttcatcagagtatttaccgtctcacgtatagctttgcacgtataaatctattgttttgtagcctgacagctctcagtgattctcaatggatgtgtgtatctgtgtgtgtgcatgtttggtggcatgtacacaccaagttgttgtgactctaggaactctccgtgcatctcttctacctaattctggcccaccaggttgtcgttcattgtccagtgaggtgtttttttttttctttaatggccaaaatgataattatctaagaaacgaaacattatgatttatatatattaaattaaccagtatgaaaaacaaaaaaagtttmagtatcctaagccttatttttttaagaaaaacccaactctaaattgtatgtaagactaaaattaggccaggcgcggtggctcacgcctgtaatcccagcactttgggaggccaaggggggcggatcatgaggtcaggagatcaagaccatcctggctaacacggtg

SEQ ID NO: 741344 - DNA, 621 bp, Homo sapiens
ttccactgatcatcactcatgagttaatgatattctgcatgctacagctattaaattgcattttaggtagcctgtaccagagatgtccgacttgttcacccttcacatccaactccctcatctaattggcccactgagaaaacacttcttttaacccttatcttttttttccattccctgcataatgctaatggatataaatctgcctgacagcagttctgtaaaagtatacaacttgtccctaaagtgtacagccttttattggttgtctccctttgtgccagaatgacacaaattgccttctgacaaaagcwggatcaattaaactgataacagtagacttattatgtgagaacagtgagaggtaccttcaccataatgccagagttcattatacacatcctgtgactccacaaaggaacaaagacacatatcccctattaaaagcacttgctgctagtagttggctatgtagagaaagaacttaggggaatgcaccatatattctctttgaaagcaaaaatgctgatacctcactgagctgaggccaatgacagcagcctgagtaaggatagagaaaaggcagaataatacagactacagagagacagtcaaaacaca

SEQ ID NO: 741345 - DNA, 650 bp, Homo sapiens
atatttgtttcttttctctttccacttttaggatcctttcatcattcttgaactttgggagttcaattattaaacatcttgaggtactcttctttgagtcaattgtttggtgttctattaccttcttgtacttggatgttgatatcttcttctaggtttgtaaacttctctattattattcctttgagtaaactttctatctctatttctttctctacctcctctttaaagccaatagctcttagatttgcccttttgaggctattttctagatattctaggcatgctttattgtttctaattcttttttctcttgtctgctctgacagtatattttcaaatagcctgtctccaagctcactgattcttccttctgcttgatccattcttctattaaaagatcctgatgcaggggattgctggcaagatggccgaataggaacagctccagtctgcagctcccagmgaggtcaacgcagaaggcaggtgatttctgcatttccaactgagcctccactggtgatacccaggcaaacagtgtcaggagtggacctccagcaaactccagcagacgggcagcagaagggctgactgtcagaaggaaaattaacaagcagaaaggaacagcacatccaatcaaagaccccatc

SEQ ID NO: 741346 - DNA, 619 bp, Homo sapiens
caaagccacacctcttaacaacccaaaacctaatgattagaatttcagatattctgctttaggcaaggtatgagagtattttgcttgggaatgagggagtaagtcaaatatttaggggccaaaagaatgaactgtgagaatcagtctactcactcaccaagaatttctaatttcacccatcaagcacatagtagcatgtgtatcttgccaataatttggaagttgaaggaatctattttatgcggtgctggagcatttaattggtggtaatatttttccttttgacactctgattgtcgacttttaagatggtaccttctcaggcagcttggattmtgaaatcagaagaaatagaccagtgctcacaactgacttgtattgaatacacaaaatatgagataaatagatatttttgtttgtttgtttgcttacttgcttgcattagcccctaaaatttaggttgctaattatctcttcatagcctagtctttttggactgatagtgtgtttcttgatattatatgaataaaactgaacaaatataaaaagaaaaaacagaaatgatgaagcataagtaacagttatgtaggagagcagcctcttctatctcgttaggggg

SEQ ID NO: 741347 - DNA, 624 bp, Homo sapiens
acacaacatagggaaacctcacccttgtgaagcttatttttgatgcagcaaagcctgcagcttgccttggtgaagaggccagtgggcatcatacacagaagcaactgctagaatcagtaatgtgtcataagtgtgacttgtcaaaaccttccctgaagaagcaaaacttaaagatctaacagatcctcaagtgtctagaaaggtgacttttagtttcaatttcaaaataattcctcaacttctttggaaaatatgtatgtgttccccttgaaggtctattctgcagaacagcccaaagtttaagacatatatattagctagatagggttcctctataccttttgttgacatttaagttcttcattgacttcatagttatgttgagtcatgtataattaagctaatattgatatattgatgaacaaaggctgttactgatgaaacattgtgaaaagcataaaactgatgtatcatcyaatatataatccaatagagtttttggaaaacaaacgtttctgggtcatcctgcaataaacacataatatattgtctgcatcttttcatttgcaagactttggtttagaattgcatttataaagtttaggaagtgatgtctaaaacttt

SEQ ID NO: 741348 - DNA, 567 bp, Homo sapiens
atgaacaactgattcaagtttgttaaaattattattttctgcatcctacttagctgaactatttttgggttcatcctgatggtagagctgattgaatacatgaacagagtctacttcttataaaatctgggagtttggaaaaaggagtattagttttaggcaagacaaaatgaaaggaagtaattctaaaataaaattatacttttgtattttatggttattttaataaagtataattttaattgtatcattattttgaattataaagtgatrtttaaaaattttaaattatatcactctatagaaggtccttgaataacattgtttccttcaacatcagtttgttttaatatcaatgagaaaaattgtttctctgctgaggccactgtctatgtggagttttcatgttctattcacatatgcgtgggttttctccaggtactcttgttacttcccacattccaaagatgtgaccattcagttaactagcctgtctaaatggtccagactgaatgagtatgggtgtgtgtgagtgctctgcaatgggatggaatcctgtccagggtg

SEQ ID NO: 741349 - DNA, 618 bp, Homo sapiens
ttatgtaagtgagcatatgcccccacttaggggtgctaaggtttgaatgtttgcttcctccataactcatgttgaaatttaattgctattttaacagtattgggatgtaagactgagatggaagaactcctttgaccctttcacagcactcctcatgaagggggtggcttgattactcagtcactgcatacttaaaccccttatggaagagggagcacgkaggtgagccggggcaagtgcttttgggctccagccgcacggcagtgtctagagatgttacaatgctcttttagctttgccttcttcagacagctaactgttacccagctcagtgaagagtcagggtgacagccttttacatcctgccctcttggtacccaggtccttgaccagcatccaggaagaataggtcacacagacttgaagaatggtgaatacagggattttattgagtgatagaggtggctctcaggaggcggtggatggggagctggagtgggaagatgatcttcccctggagtttgaccaccctgtggctgatctcccctcgaccttcagatgctccttctcttctctccttctgtgctgtgctgctctgccactctgccagtggagctt

SEQ ID NO: 741350 - DNA, 618 bp, Homo sapiens
ttatgtaagtgagcatatgcccccacttaggggtgctaaggtttgaatgtttgcttcctccataactcatgttgaaatttaattgctattttaacagtattgggatgtaagactgagatggaagaactcctttgaccctttcacagcactcctcatgaagggggtggcttgattactcagtcactgcatacttaaaccccttatggaagagggagcacgtaggtgagccggggcaagtgcttttgggctccagccgcacggcagtgtctagagatgttacaatgctcttttagctttgccttcttcagacagctaactgytacccagctcagtgaagagtcagggtgacagccttttacatcctgccctcttggtacccaggtccttgaccagcatccaggaagaataggtcacacagacttgaagaatggtgaatacagggattttattgagtgatagaggtggctctcaggaggcggtggatggggagctggagtgggaagatgatcttcccctggagtttgaccaccctgtggctgatctcccctcgaccttcagatgctccttctcttctctccttctgtgctgtgctgctctgccactctgccagtggagctt

SEQ ID NO: 741351 - DNA, 535 bp, Homo sapiens
ggatgtggcttctttcctttaacctcacgaaccaacctccctgctggcttcaaactttttttcggcagcttcttcaccgctcttagccttcgttgaattaaagagagttagggcctcgttctggattaggctttggcttaagcgaatactgtggctggttttatcttttatccagaccactaaaactttcccaatatcagcaataaaactgtttcactttcttatcatttgggtgttcactggagtagcaatttaatttcctttaagaacttttcttttgcatttacaacttggctaactggtacaagaggcctagctttcatcctgtcttgactttcaacatgcytttttcactaagcttacttgtttctagcttttgatttaaagtgagagatgtgcaacccttccttttacttgaacactttagaggccattgtagggttattgattgacctattgtcaatattgtcatgcctcaggaaagggggaggccagagaagaagaagagagataggagaatggctagtcagtggag

SEQ ID NO: 741352 - DNA, 594 bp, Homo sapiens
caaacatctttgagccattttgatgggtgtttagtagtatattatgcttttaattaatatattcctgattaattatattaagcgcattttcatatgtttattgtccattgggatattctcttttggccatttttggtcctttttcgtattgtaagtttaatayatattacatgtgcagttctttgtctattatgtattttccccagtctgatgcttacatttttactttcttaatggtatcttttgatgataaaatgtacaagttgggtaaattacaatttaccaggttattttttcttttcgtagctagggattttgttgctttgtataagaaatctttgtcaatctaattccatgaagatattcttttatgttttatgggaaaattatacttttaactactacagttaagtcaacttaatttccctgtgtaatgtaaaggagcatatagggtttatttatttatttataattttttatgaatatcccatggctccaataccatttattttgaagatatttattttccctttgaagtgcattggtgcttctggtgtaaatcaagaggttgtgtatgtgaggtccatttctgca

SEQ ID NO: 741353 - DNA, 574 bp, Homo sapiens
accaacattgttcttggccaaaacgccaaaaggtttgtgttcctcttctctgtaattgaacttgtactgagcacacaaagattaagaaaagactttggaaacaaacacacattttaaataaaatttaccttaaaaaaactattttgagaatcccaattcattaagagaagcctcattataaatataatcaatgataatatagacttcattgaacacggcttctttcctaatatatttaattattgaaactattaaaagtatgttatggtaataaagtctaattgcaatatcattatataaaataattctaagtataatattatagtaagtttacatagttctattgttactactgagawccttcaagatacatattgaaagaaacaatggagtgtctacattctgcttaactaatttttttttctttttttaaatgggggtgttcaaactgaggagaaatgctacaacgagaaagagaaggaattatagtctggtggaagaagaaaataatgagaggtatactactattggctgacagtaggaatcttgagagagtggggatggtaggagaaga

SEQ ID NO: 741354 - DNA, 616 bp, Homo sapiens
ccaaatttttaacctgcctgtaaattctatgtacttttcccagtgcagaaaccaggattaagtgatttgcacaaggtcacaatgcaatgtagcagcatgttgaagactgtaattcagcactcctcatttgtacagtttgatcagcataatcagctctactacctccctgaattagataaggttatctcttgctgtaaaaatgctatagtcagagatcactttgattccctttccaaggtcaaaaataatcccattaggataggttaggaatawtaagataatccttttgatctcaatttgtagtgttatatagtgtaattctttctccaactcatccattactttattcaatgaatatttaaatactgcacttggctctagttaggtttgtagaactatagtttaaacattattaaaacgttaaatcacttatatatgaagtttttaattgaacgtattacaaaaaggaaaaatcacatttttgccttacagtcttcaaatcagtttttgggtttttttggttttgttttgtttcgtttttgtttttgttggcttaagaattgggggattttaggattccctctcctactttattgtctttgtctatgtaatggct

SEQ ID NO: 741355 - DNA, 608 bp, Homo sapiens
gtcagtgtcatatttgtgcagagctggataactggacactcgaagaggatagagaactcagaaacagcaagtatatatgaatgaaacagccacagaataaaagatactaaagcatattggctttcctcttaggaaacaaaaatgcatccatatttcacactaagcatgaacattgattccaggtatattaaatacttaaatgtaaaaaacaagtcttttaaaactttagaagaatgtttagaaaaatataggaggtattttcttaagcatgatgtaaaaagcacaaaccmtaaagaagaaacctcttctctttactaaaaatcactatgaagagagtacaaagacaagtcacaaactgagagaatgaatatctataacatgtataactaaaaatccatcacctcttgaatcagtaaaaaccataataactctatagaaaatgaacaaaaagataagtaaatatttcatagaagctcaaatcactaataaacataaaaggtgctcaaactcataactaaccagagaaatacaaacaaactaaaaccacagtcagatgctattttacatacacgagaaagacaagaatgaaaatgtttgacaatcctaaa

SEQ ID NO: 741356 - DNA, 586 bp, Homo sapiens
tttcagcaacatgcaaatgaagcagccttcacctcaacacttagcagcctcagctggtagcagggtttcagctgtttctagggcttagtttggtacacattcaactcagctattggcagaaaaagtaccagcaaggccacatttggatttggaaaaataaataaaccttcagaaatcttagtgcaagctttggcagctcaaataacatctgcatttaacttcagcaattctggcatcacagtacccgttggttggacatacaggatgtctaatcctgtctctgtaggttttggaacaggagggcagctctttcagttgaagaaacctccaactggaaacaaaacaagaaaaatggtaaatacttgagtygatgtattatgagaatccgatgtaactgttcattctgcgagtctgtttttcttttttcgtttttttttgtttttttttttgagaaggagtctcgctggctcgcccaggctggagtgcagcggcgtgatctccgctcactgcaagctccgcctcgcctcctgggttctacggattctctttcctgagtagctgggactactggcgcgtgccaccacac

SEQ ID NO: 741357 - DNA, 643 bp, Homo sapiens
tggaaaaccctaacaaatacagatagcaaacaaacacctgaaacaatcacatcattagtcaaatgcaaattaaagccaccatgaaatataactatacacttattagaatgatttaaataaaaaatagtggcaaggcacggtggctcatgcctgtaatcttagcactttgggaggccgaggcaggcgggtcacgaggtcaggagttcgaaaccagcctggccaacatgatgaaacctcacctctactaaaaatacaaaaattagctaggcgtggtggtgcacacctgtaatcccagctactcgggaggctgaggcaggagaattgcttgaacctggaaggcagaggttgcagtgagccaagattgtgccactacactccagcctgggcgacagagcgagactcagtctcaaaaaaagaaaaaaaaatagtgataattccaaattctgtcaatggtgcagacaaaatggatcactcacacaytgctgatggaaataaagaatgatacagctactttagaaaacaatttgacactttcttataaaactaaacaggcagctaccatgcaacttgcatgtacacttgagattggttcctaaaaacatgaaaacttattttcacagaaaaatttgtccatgaatggcta

SEQ ID NO: 741358 - DNA, 680 bp, Homo sapiens
tatctgtagcccaaaacagaatacaaaagaataaagtattgtttataatacaaagggtaagtgtttgaggatggacacctctattttacattacgtgattattacacattctatgtctgtatcaaaacatctcacataccccataaatacatacacctctatgtagccacaaaaattaaaataaaaaaaatttttttaataataaattaaaatgttaaagtgattttgatttctgctttatatcgtgtatttctgtgactaggccaaacaggtcatgggtaaatctgctcagttaattagactttgatattgagctcttggtaatcagtcttaatggaacaaaaactactccttcctcagtatgtttccttaaactaaccaataatttcataaaagcagatcatctttcagaaggaaaaactamgggaaatcataggtgggttagcacactccacaatgtaaaggaaacaataaatatacattcccatgcaaaattcaattctctctcttcaaaactaccacagcattttgtgggaccctctagaagagcatttcacctggagtgattcaggcctacctgctcctcagggtctgggccccaccttcatctttctctatgattttacactgtgcctgacagtggtgagcttgcaacttctgtctgaatgaaactgatcagg

SEQ ID NO: 741359 - DNA, 622 bp, Homo sapiens
tcatttcctagagctttgctaggaaaccagggtcatagaggtgactgagaggggctcctgccctcagggagtctatagaatgtaggaaggagaggtctattttgccaaaagacagggagggccctgcagaaaagacacactaggtggtgagaatgacaggagccaaggtgggcccagcctgactcaaagcagctggagggcgaaacctgggaggtagggtgcagcagaagatgacagggtgatgagggtgaggttggcaaagggaatccaaaatgatagcttggggtcagtgtataaaagcccacaaatacagaattaaggagcctggactttttgcaaacattaaagagtcattttggccyggcacggtggctcacgcctgtaatcccagcactgtgggaggccaaggtgggcggatcatctgaggtaaggaattcgagaccagcctggctagcacagtgaaaccccatctctactaaaaatacaaaaattagctgggcgtggtggcaggcgcctgttatcccagctactcgggaggcagaggttgcagtgagcccagatagcaccattgcactccagcttgggcgacaagagcgaaactctgtctcaaaaaaaaaaaaaa

SEQ ID NO: 741360 - DNA, 613 bp, Homo sapiens
ggtttggttttcattcaccccttcaacactaacactgaagttaccgtaacaaaattcccttcaaggagatacactcctagtcctgctctttccactctaacagtgcctcatttcacatgtttccaattatatttttaagttattcaatgttagaagtagctttcaaataaaaacatygtattttcaaagctaaattgaaatagactttttcatccatagggaaagaagaggatagactcaaagcagttctactctaaagctataaatttaactatctgaggtgaaaaccacatctagactactattttaaaactatgggttgtgacctactaggctgggaatcaatttagagggtaatggcatggcatttttgaaaaacaaaatagaagagagagtagaaagcatcagcgtgtcctacgcataactggggtacttcctgccttgtgaactcatgtctcagtcacacacacctaagtgcgtcctaggtcacagtgctccgtgtcgtttttactgtgaaagctggtctgggccagcagtttccaaagccctagaatcagaattgcctagagctgtgtaataaacagattccctggctcaagccttctaagattct

SEQ ID NO: 741361 - DNA, 613 bp, Homo sapiens
ggtttggttttcattcaccccttcaacactaacactgaagttaccgtaacaaaattcccttcaaggagatacactcctagtcctgctctttccactctaacagtgcctcatttcacatgtttccaattatatttttaagttattcaatgttagaagtagctttcaaataaaaacattrtattttcaaagctaaattgaaatagactttttcatccatagggaaagaagaggatagactcaaagcagttctactctaaagctataaatttaactatctgaggtgaaaaccacatctagactactattttaaaactatgggttgtgacctactaggctgggaatcaatttagagggtaatggcatggcatttttgaaaaacaaaatagaagagagagtagaaagcatcagcgtgtcctacgcataactggggtacttcctgccttgtgaactcatgtctcagtcacacacacctaagtgcgtcctaggtcacagtgctccgtgtcgtttttactgtgaaagctggtctgggccagcagtttccaaagccctagaatcagaattgcctagagctgtgtaataaacagattccctggctcaagccttctaagattct

SEQ ID NO: 741362 - DNA, 553 bp, Homo sapiens
gctgcaaaacagacatgcttcctgccatcaacacgttgatagacagaaggggaatacagaagagtaaacagataattccagtacaatatgacaaacgatgtaatagaagtgattccaatgggcacccagggaaagaaacttaatgcttatttctgaagaggacaagtgcaatattcactcagtttgaaactctccaaactacacataccaagagcaatrtgaacacccaaagccttgctactctaagtgtagtgcacaggccagcagcactgtatcacctggaagcatgttagaatgcagagcttcaagccccatttggctcatgtctgtaattccagcactttgggaggacgaggcaggtggattacttgaacccaggagttcaagactagcctgggcaacaaagtgggaccccatatctgcaaaagatacaaaaattagcctaacgtggtggtgcacacctgtagtcccagctactcaagagattgatgtgggaggatcacctgagcctgggaggttgatgctgcagtgaaccgtgatcatgtcactgcac

SEQ ID NO: 741363 - DNA, 594 bp, Homo sapiens
cgttaaatgcccacatcaaaaagttagaaagatctcaaattaacatcataacattacacttaaaggaactagaaaaacaagagcaaaccaactccaatgctaacagaggacaagaaataaacaaaatcagaactgaactaaatgaaattaaggcatgaaaaaccataaaaagaaaaacaaaaccagaattgcttatttgagaaagaataattaaggttgatagactgctaactagactaaaaagaaaaaaagagagagaagatccaactaaatacaatcagaaataacaagggggccattacaaaaataaagggggagtccacagaaatttaaaaaaaccctcagagactattatgaacacctctatgtagatcaattagaaaacctrcaagaaatggataaattcctaaaaacatacaacctccttcatgactaaaacaccaaaagcaatggcaacaaaagccaaaattgacaaatgggatctaattaaactaaagaccttctgcacagcaaaagaaactaccatcagagtgaacagacaaactgcagaatgggagaaaatttttacaatctacccatctgacaaagggctaa

SEQ ID NO: 741364 - DNA, 596 bp, Homo sapiens
tacaaattttccttcccagttcaatttctcctggtccttcagagcaattgtactgtggaaccagacttgcaaactggcttcagtacaatattagaaagtgtgtgtgtgtgtgtgtatgtgtgtgtgtgtgtgtgtgtgtgtgtgtgygcgcgcgcgcgttttaggacatacaggaagactaaaatgcttatccaaagcaaacataagacggatagtattcataagccagagaaggaacatacatacgttttcttctgataaaaataaatcaagccaattaatcacatataagtttctacatgtgaatatatttatggtaagctgaccatctattttcaaacacacaggcagccaggatgaagaaaaaaagccccagttttggcagagtactataggaaagggaaaaagaaaaatgaatttactgctatctgttgggtttgcttttggactattcaagctagtagcttttattagcattagatttttcagccaacaaggaacaaacggtaaaatattacccccaaaataaaagagaaaaatgtctttcataactacatgaaaaaaagtactcctgctatctttaagaacatgcatat

SEQ ID NO: 741365 - DNA, 596 bp, Homo sapiens
tacaaattttccttcccagttcaatttctcctggtccttcagagcaattgtactgtggaaccagacttgcaaactggcttcagtacaatattagaaagtgtgtgtgtgtgtgtgtatgtgtgtgtgtgtgtgtgtgtgtgtgtgtgcgygcgcgcgcgttttaggacatacaggaagactaaaatgcttatccaaagcaaacataagacggatagtattcataagccagagaaggaacatacatacgttttcttctgataaaaataaatcaagccaattaatcacatataagtttctacatgtgaatatatttatggtaagctgaccatctattttcaaacacacaggcagccaggatgaagaaaaaaagccccagttttggcagagtactataggaaagggaaaaagaaaaatgaatttactgctatctgttgggtttgcttttggactattcaagctagtagcttttattagcattagatttttcagccaacaaggaacaaacggtaaaatattacccccaaaataaaagagaaaaatgtctttcataactacatgaaaaaaagtactcctgctatctttaagaacatgcatat

SEQ ID NO: 741366 - DNA, 563 bp, Homo sapiens
atcagcaggatgtgggtgggggccaaataagggaataaaagctatccaccagagctggtaaaataaagctggctgctgctagggttttgtgtccaggctaacttatgagctgtaaccctcaccacgtggggctgcgaagtcagtgagaccaggatgccaccagggaggaacaaacagctctgcacatgccacctttaagagttgtaacactcattgtcaaggtctgcctcttcactcctgaagtcagtgagaccaggaacccgccagaaggaagaaactctggagacatctgaatattagaaggaacagactccggatacactatctttaagaactgtaacactcaccgtgagagtccatggcttcattmtttaagtcagcgagaccaagagcccaccagaaagaaaaaattccggacacagcaccactacactccagcctggagacagagtgagagtctgtatcaaaaacaataacaaaaattgatttctaaatgtttatagttttatgctttatatttagacagcttgagtaatttttttgtataaggtatgagattcagg

SEQ ID NO: 741367 - DNA, 619 bp, Homo sapiens
tattgtacagtctgaaggtccaggaaaggttcaggtccatgccagcacttcataccagttaatgcattgctccaacaagaccagccagtattcttggaagcttaacatccatgttacatattaaaatctgctttggagagtgttggtcaatccaattacatgtttgtatttatcatcatcatcatcatcatcawcaacaaccacaacaacatcacaatacattcatctacatgttcacagggctgttgggtgtttaataagctagacatgagaccatcttttatgaatatgaaacattgaaggacatagttatttaaaggcatatgtactatagaactgtagaagggacaaacaatgaagtggcaagagttctcttagcatttatatatctgcatttgtctattttaagcataatagcttcaagagaatgaaaagacaagccataaactgggagaaaatatttgtaaaacacatatctgataaagaactattattcaaaatatacaaaggactcttaaaactcaacaaaaagaaagaacaaactgattcaaaattgggccaaagacctgaacaaccaaagatatacatatggcaaataagtatatagaaagatcctcca

SEQ ID NO: 741368 - DNA, 640 bp, Homo sapiens
ctagtttgctgtctgacttcagagctctttcttctttaccttgctacctcaccccaagtaaaatgtcagttcctagggagaagatcctgccgatactttatcagcagactctcttgcaagttgctttacaaatagtaagaattcaaatattaattaacttagaaatcctgtttgactgtactgttctttaacagggataatgaaggagaggattattgggtagaataaaagcactaggctgggcacagtggctcacacctgtaatcccaagatttcgggaggcagaagcaggaggattgcttgagcccaaacaggagtttgagactagcctaagcaatatggtgaaactctatctctacaaaaaatacagaaattagccaggagtggtggcacatgcctatattcccagctactcargaggctgaggctggaggatcacctgagcctgggagttgaggctgcagtgagctgtgattgcaccattgcactccagcctggatgacagagtgagaccttgtctcaaaagaaaaaaaaaaggcactcaactttttttttttaaatggcagaaagtgcacagtagcatggaggatgatgcaaaagtcagcagacctgctaaacgtacatgaatgaccattgactt

SEQ ID NO: 741369 - DNA, 640 bp, Homo sapiens
ctagtttgctgtctgacttcagagctctttcttctttaccttgctacctcaccccaagtaaaatgtcagttcctagggagaagatcctgccgatactttatcagcagactctcttgcaagttgctttacaaatagtaagaattcaaatattaattaacttagaaatcctgtttgactgtactgttctttaacagggataatgaaggagaggattattgggtagaataaaagcactaggctgggcacagtggctcacacctgtaatcccaagatttcgggaggcagaagcaggaggattgcttgagcccaaacaggagtttgagactagcctaagcaatatggtgaaactctatctctacaaaaaatacagaaattagccaggagtggtggcacatgcctatattcccagctactcaggaggctgargctggaggatcacctgagcctgggagttgaggctgcagtgagctgtgattgcaccattgcactccagcctggatgacagagtgagaccttgtctcaaaagaaaaaaaaaaggcactcaactttttttttttaaatggcagaaagtgcacagtagcatggaggatgatgcaaaagtcagcagacctgctaaacgtacatgaatgaccattgactt

SEQ ID NO: 741370 - DNA, 640 bp, Homo sapiens
ctagtttgctgtctgacttcagagctctttcttctttaccttgctacctcaccccaagtaaaatgtcagttcctagggagaagatcctgccgatactttatcagcagactctcttgcaagttgctttacaaatagtaagaattcaaatattaattaacttagaaatcctgtttgactgtactgttctttaacagggataatgaaggagaggattattgggtagaataaaagcactaggctgggcacagtggctcacacctgtaatcccaagatttcgggaggcagaagcaggaggattgcttgagcccaaacaggagtttgagactagcctaagcaatatggtgaaactctatctctacaaaaaatacagaaattagccaggagtggtggcacatgcctatattcccagctactcaggaggctgaggctggargatcacctgagcctgggagttgaggctgcagtgagctgtgattgcaccattgcactccagcctggatgacagagtgagaccttgtctcaaaagaaaaaaaaaaggcactcaactttttttttttaaatggcagaaagtgcacagtagcatggaggatgatgcaaaagtcagcagacctgctaaacgtacatgaatgaccattgactt

SEQ ID NO: 741371 - DNA, 581 bp, Homo sapiens
gttggacttccagcttatacaaaacagtaaagtgatgcagaagggttagccaggtctctgagcctcatcttcctcatcagagaaaaggacatcacaaaatcattcagctcttttggttgatgtaaagattgaatgcatacacaatatttagctatccataaccaaactgacataccattgtcattaatattatcttgaagctgcaacactgtctttacgtgtagcccatttagagaaattctgtgatcatgaaaaaaagtcactttcttttcttttytttttttttttttgagacggagtcccgctctttagcccaggccggattgcagtggcacaatctcggctcactgcaagctccgcctcccaggttcatgccattctcctgcctcagcctcccgagtagctgggactacaggcgcccgccaccgcgcccggctaattttttgtatttttagtagagacggggtttcaccgtgttagccaagatggtctcgatctcctgaccttgtgatccgcccgcctcggcctcccaaagtgctgggattacaggcgtgagccaccgaagtcactttctttctatg

SEQ ID NO: 741372 - DNA, 591 bp, Homo sapiens
attcttgaatgtttattttctgctgtataccccagcatctagcacagactctggcttgtagtagaaatggaatatagatttactaaatgaaagggcaatgggggaaacaaggcatttctgtaacagataaaagtatggcactttgggaagccaaggtgggtggatcacctgaggtcaggagttcaagaccagcctgaccaatatgrtgaaaccctgtctctactaaaaatataaaaattagccaggcatggtggcatgcgcctgtagtcccagctactcaggaggctgaggcaggagaattgcttgaacctgggaggtggaggttgcagtgagccaagattgtgccactgctctccagcctgggtgacagagcgagattctgtctaaaaaaaaaaaaaaagtttgtacataattaggccattcaaagcatctgtggagggggtcacctcccagagccctgctgccagtcacttttgtccctcattgttctggcagcagtagacacacagcatgttcccagttcttcctgggtgtaaaggggaagttgtatctgtggaactagcaattgtctacagagagcggcctcaggga

SEQ ID NO: 741373 - DNA, 579 bp, Homo sapiens
acagcaattcttatcctgtcatggatttatcttattattgacagcaaatttggctggcatttaccagaattgatgctttacccagccccataccagagctggaacataaaataggcttataccacacttaatgtcactcacgtatttcctctgttcaaagtcacatcccttttctgatctgaatgatgaaggaggacgtttaaaacatagacatctctatgctttattatagagtagtttgtaagtactgtttacagtgccaacacatgaggaggcagcagcaactactttaatatgattaaaggtagcagtattygctacaacaaatgagttctaacattggccaccagagttgttttttttttttcttggtgtctggcttactttctacttaatttgttcaggaaaacaccaggtcaatttgtattataagaatttgcctagctcacaaatgatcccataaggagtgggcattctattttttctagttctgatgtttctgtaatctttttaagacatgttgtatcataaagcttaatgtgcatctcatttctttaaagtcgcttgagggatgagcta

SEQ ID NO: 741374 - DNA, 635 bp, Homo sapiens
gctttgctttccacctcacagggtttctctgtaaattgcttatgaatctaactctggtagcacatagttgggttaataaaagttcttttttttcttcattcttttaccaaaaagaaaaaaattccctgcagggcactttgcagatgttttcatactagacctctcagtagcttctgacagaaaatatactgcctttgacttaatagtcatttatgaaaataggtcatttaaaacaagcctgagtaggagtcaggggagggagaggaggtatagagagtgattatgactttaattttgaaaggagaagttttaccagggtgaccctgaagaaaggtctttttcctcttatgtgtttatggttcaagagactcatctcttgcttcagaaattgtcagaactgtttcttctgcyttatccaatttaaaagatgaaaacttaaaattacttgagccaagtgatgggaaaaattgtggtgtcaagaccaatttactcatacaaaatggatttatgggcaagtcattaagtaacagggagtagcaaggaagcctaatgaagactaatgtaaaagatacggctttcctaaagtgatggataaaatgtgtttgaggcaacccatatactcttttccaaataac

SEQ ID NO: 741375 - DNA, 444 bp, Homo sapiens
gagttcagagcagggaatgaatagactctatatagtcaaatcctgatatcctgactccacaggaaagaatagtttctaaaatataagggcacaatcataacaatgacatttttaacttttttggctttctaaacccttattatctaaaacaggaaatctgattatgacatccaattcccagtactgactccccacaacatttaattagttttgactcagtgaggttttttttaatgtttaacatagtatataacaatagtagaatayagtaattaagaacacaggcctgggaactagactctgtttgaatcctggctctgtcacttactaccatgggccctgagtacattatacacttctgtgtgcctcagttttctcatctgtaaataggaacattacatcacttgccttttggggttgttgcttttacatgtaaagacatta

SEQ ID NO: 741376 - DNA, 640 bp, Homo sapiens
caaaggctgggatatgtgtctgactacacttaagatttatttcagctgggggaggtggctcacgcctgtaatcccagcactttgggaggccgagacaggcaggtcccgaggtcgggagatcgagaccatcctgactaacatggtgaaaacctgtctctactaaaatacaaaaaattagccaggcgtggtggtgggtgcctgtagtcccagcgacttrggaggctgaggcaggagaatggtgtgaacccgagaggcagagcttgcagtgagccgagatcacgccactgcactccagcctgggcgacagagtgagactctgtctcaaaaacaaaacaaaaaacaacaacaacaaaagatttatttcactccctggcatactcgccaagatgacagccaccttttttcccaaattcccatcaattccccgttcaatgagcattctctccttatgagtccagtgtgttgtttcttctgatttctaagcagtaaaactgtcagcccaacaaaccaaaaatgcatcagatggtcagcttgcagcagaatgaacttccagcagatggtagaaaattaaggaccttattactgcactgcaacttgcctctttgccagtgttttcaaattttcaaataataataatgag

SEQ ID NO: 741377 - DNA, 640 bp, Homo sapiens
caaaggctgggatatgtgtctgactacacttaagatttatttcagctgggggaggtggctcacgcctgtaatcccagcactttgggaggccgagacaggcaggtcccgaggtcgggagatcgagaccatcctgactaacatggtgaaaacctgtctctactaaaatacaaaaaattagccaggcgtggtggtgggtgcctgtagtcccagcgacttgggaggctgaggcaggagaatggtgtgaacccgagaggcagagcttgcagtgagccgagatcacgccactgcactccagcctgggcgacagagtgagactctgtctcaaaaacaaaacaaaaaacaacaacaacaaaagatttatttcactccctggcatactcgccaagatgacagccaccttttttcccaaattcccatcaattccccgttcaatgagcattcyctccttatgagtccagtgtgttgtttcttctgatttctaagcagtaaaactgtcagcccaacaaaccaaaaatgcatcagatggtcagcttgcagcagaatgaacttccagcagatggtagaaaattaaggaccttattactgcactgcaacttgcctctttgccagtgttttcaaattttcaaataataataatgag

SEQ ID NO: 741378 - DNA, 652 bp, Homo sapiens
ttcatgttataaattagccatgaaggatttcatagtataaaagaaaaataataaaaccattgtctccccttatactttggaagtgctaccgcacttttctcttgaacaaacaataggagactgtagtacacatttgaatgattgacgtttgtttctcgggaacagcctattactgattgtgggaaaaggaggttgcccatacttacctattttcattcagttccacttgctaaatgagcaccattatgtaactgttgttatcagacaatagccctttttctagattttgggtaaagtttgctgggactgtacctatcattagaaagaggaaatctctttytaaggtactgtaataccagtattagtttaattttatactaagtcttttaacttcctgtaactcttttgagtagtaaggataaactctcctacctttggtctttcattagtgtattctgagtctacatcaagatctgtaaaatgcaaatgataagatgcacatcagagttgtaggtatataaataacattgaaaaaaccatacaggcaaatatatccaaatgaatcagaacctgtaattcctaatttatatgcagaattctagtatttaataggaaatcaacaaaatagcacctcactcttctggtgtccccc

SEQ ID NO: 741379 - DNA, 645 bp, Homo sapiens
cttagtggccaaaaaaacagcctttctgaaaccttaggcttcaagtatttgtggagggaggaagtcaaagaaacaaccccaaacttcaaaccctgagaaaaacaaagacccaaagaaagtactcaggattccttcattgttctggtcatgccaagtcaggaaatgagcattcagtttggtttattaaaatcatttttaaaggagcattttcccttgaaaagtggaaacagtgaaatggatcagaaaaaaaagcaaagcatatgaaaataataacaacaataagaattttaaaaataacagctcaaattcgtggagaatgtgatcatggaagagaactctactgtctgggagtggaagaagcagtttccaacttcacctccatactttaatgtttgcscttgaagacctatgaccaccatacttagtagagcactattgcccacataatagtaaagaataatttttatctaattggaaatgctatcctatagcagaatctggttttatcattaaagccagaggtcagaaatgtgttaaaatgaaccataaggaattcctgattttgcaatcaggatttgaaaacaggtaggaaacaactatttcctgtggcagctcagttaaaagtgagcataggaaaccgttttt

SEQ ID NO: 741380 - DNA, 632 bp, Homo sapiens
taaaaataccaaaatacataggtataacttagaataattcatcacatttgaatcaaccatagaattcttttaaactacacctatatatttaaaaatcacacaggctgggcatggtggctcatgcctataatcccagcactttgggaggccaagacaggtggatcacctgaggtcaggagttcgagaccagcctgaccaacatggtgaaaccatgtgtctactaaaactacaaaagtagacaggtgtagtggttccttttacattatgttttcttcatttttctgcagagttttcttttcttattatatcagtatatcttaaatattggcttccaaaaaaagatctgacaacatagcttattctgaagaaaaaccttcattttgcatgtctgtaataccagctactcaggaggctgaggcaggagaattgcttgaacctgggaggcggaggttgcagtgagctgagattgcgccattgcactccmgcctgggcgacaaaagtgaaactccgtctcaaaaaaaaaaaaaaaatcacgtagtatacatctactaagatggacaacacaaaatgctggtgagaatgttaagtaaaaggaactctcaggcactgttggaaggagtgtaaagtgttgt

SEQ ID NO: 741381 - DNA, 641 bp, Homo sapiens
agtaatcacaggacacaaggatggtttaacatacacagatcaatcaatgtgatagaccatatcaacagaatgaagaataaaaccatatgatcatttcaattgatgctaaaaatcatttgataaaattcaacatcccttcatgataaaaaaaaaaatcctaagattagaaggaacatacctcaataccataaaagccataaacaagagacccacagctagtattacactgaatgaggaaaatgtgaaaacctttcctctaagatctggaacatgacaaggatgtcaactttcaccactgttattcaacacatagtagcagatgtcctacctagagccatctgaaaaaagaaagaaagaaaaagcaccccaattggaaaggaagaaggcaaattattcctgtttgtagataatatgatcttctatttrgaaaaacccaaagactccaccaaaaagctgttatactgataaacaaattcagtaagtttgcaggatacaaatttaacatacaaaaatcagcagcatttctatatgccaacagtggacaatgtgaaaaagaaataaaaaatgtaatcccatttacaataactgcaaataaaataagatacataggaataaacttcatcaaagaagtgaaagatctc

SEQ ID NO: 741382 - DNA, 599 bp, Homo sapiens
caagaatatccttattaaagtcactgtaggagtgcaagggttgagcttgggttgcttgttgtattttattttcctgtgacagagtaaaaatggcaagggctagaagaggttgagacccagttgaaatctattcaccaccagctctttggttttacacgaattacccaatctctccaattgtctgtttcttcatcaatataacgaagatagtgcccatttcatgggtacttgggaagattaacgttataaaataaatttatgtttctctatatgttgactctcaacaaatattagttttctctttctcacaaaggattcctgmgattttttcacatagcacttggtatgccataacaaagcacaagagactgggtgacttaaaaaaaaaaacagatatttatcttatcacagttctggaggcttgaagtctgaggtcaacgggtcagcaagattgcctctttctgagggctatgagggaaagatctattccaggactgcctccttggtttgtaaatggctgtcttctccccatgtcttttcacatcatcttccctctgtatatacctgtgtcccaatgtctttttcttataagcacaaca

SEQ ID NO: 741383 - DNA, 583 bp, Homo sapiens
accgttttgtactcccaccatcaatgaatgagagctcattgccagcatttggtgttgaaagcgtcttgaatttttgccattctaatagatgtgtagtggtatctcgttgttttaatttgtaattctctaatgacataatgttgagcatctcttctcatgtacttatttaccactgtatgccttctttggtgaggtatctgttcaggttgttttgtccatttttcaattgggctgtttgctttcttattgagttttaggagttatttgtatattttgaataacagtccttactaayatgtcttttgcaaatactttctcccagtctgtgtcttgtcttctcgttcttgaggtcttcaatttttcacaatcacaatagtgttacagtgggtgttcttatatgggtctccaggtttatatgcatttagagtttctctaaggcaggcatctataagtgaaatttctgggaggagggttagcttcaacttactacgtactgcaaagttgtttttcaagtagttttgaaacgattgtaccaaattatggttgtaagtggtggagtacattagtattcctattgcttcac

SEQ ID NO: 741384 - DNA, 610 bp, Homo sapiens
actggcacttaatcagcatttatggtgtgttgggtacaatattaggcaaaaatcagcatcatttaataccgtcaacttcaaggcaggtactgtgatctccatctaagcaagaggaaactgagattcccaagggccaacttacytgtgcagggctggggtgagctgtctggtcccaaagccagttcttccctctcgtcgactgttctctacaaactcatatcaattattttagagaagaagattgtactacagtcagctctgccacccatttagaagacctgttttccacttccatgctttccataggtatggctccaaaattaactttgtagctttaaaataacccagtaggcccagtgcagtggctcacgcctgtaatcccagcactttgggaggctgaggtgggtagattgcttgagcccaggagttcgagaccagcctaggccacacagcgagaacctctctacaaaaaataaaataattagccgggcatggtggcatgcgcctggggtctcagctactcaggatgctgaggtgggaggatggcttgagcctgagaggtcgaggctgcagtgagtcataactatgctactgcactccagcctgggca

SEQ ID NO: 741385 - DNA, 595 bp, Homo sapiens
aagtattgaataaatgttagctaggatcatgcatacgattactgtataatgatcatgattgagattgagaaggtatgagcctaaatgtaggactaaattgaattagccttggcctaaggttctcaggtagttgagctataattaaacgcctttggccaatcctttttcaagtatcagagcatcttgggagggttagccctgggcaaaacatctgcttcaccacgccccatgaaggcctagaggctgggatgccctgagaggccacatgagaatgcacaggagggagacgtttactgtagtcctagcctaatcccaagttctattaattcagcaagtgatyttttcaaagggcactctaatattcaaaattctctgcatcttcttatatataccttctgctaaatactatacattttaggagataagaataataatacatcaataaaatgtaaaagtatttttcctctttctaattaaaaatgacatacaagtagttcttgaattagaactactaattccctaatgataataatattattattttctgttacagaatgttttatagacatctagcaagtggcatcacatttccatt

SEQ ID NO: 741386 - DNA, 595 bp, Homo sapiens
aagtattgaataaatgttagctaggatcatgcatacgattactgtataatgatcatgattgagattgagaaggtatgagcctaaatgtaggactaaattgaattagccttggcctaaggttctcaggtagttgagctataattaaacgcctttggccaatcctttttcaagtatcagagcatcttgggagggttagccctgggcaaaacatctgcttcaccacgccccatgaaggcctagaggctgggatgccctgagaggccacatgagaatgcacaggagggagacgtttactgtagtcctagcctaatcccaagttctattaattcagcaagtgattttttcaaagggcactctaatattcaaaattctctgcatcttcttatatataccttctgctaaayactatacattttaggagataagaataataatacatcaataaaatgtaaaagtatttttcctctttctaattaaaaatgacatacaagtagttcttgaattagaactactaattccctaatgataataatattattattttctgttacagaatgttttatagacatctagcaagtggcatcacatttccatt

SEQ ID NO: 741387 - DNA, 545 bp, Homo sapiens
tctctgattttctttaaataccgggcatatcatctataacgctgctttcccaacttcagattaagatgaccatgggaacagtccctgtgtgcataagcagttgacagaggtggatgctaattcaattaatagtatccataggccagtgagcaaccaatgaggggacctggagcaaaagacactgtccaagtgggtagagagtaactagctaaatcaatgtgtccatctcycttttgggctgtagactggaaaatatggagagtggccagttattacggggtaggaggagagagagagagagatgaagagagaagaggaggcacaaaagtagcagaataggagtctgagagggcatctgagtcaagataaggtgaagctgggggctatgacgtaagtgacactccttttccaggaagcagcatatacctgcccccaaccctgcccaacatgccaatgcctactagtccaaagccacctgagtcctgggagcagcattgccatgtgcgagagtagtaggggcactggcaggaatgcactccattcgt

SEQ ID NO: 741388 - DNA, 605 bp, Homo sapiens
tggccaagaggatccttgatgtggaagatagaaaaagcctttggggtcaggcagacttggattctaataccagccagttctgcttgctgtgtctgagcctcagtttactcatctgtgaagaggaggtagcaagaatgaaaatgcctgccttgtggtttgttgtaaggacagacactgccaacgtagagggcccagcagctcacagaccagttgctctgagagcagaccactcttgccttgatggtagggaactatttttgtgcgtggcaagtgggaccttaggaaggaaggcaactgtgaggcttctgagaaggaccctacacaagggagtttcctcccagggcaggtgaatggagagggtggcagaagcctacgggaagggrtcacagggatcagctagagagtgccaccacccttcctggggaatgcagggcaaggtccctggtgggagttttcctgggaagccaaagaagcgcccaacaaagacagaatcaacatttgggtacctttggtacccagaggcagcaatgccaactacaaccacactggaagaagaagaccttctccgcatagattctctgatctcttcctccttcatggcacca

SEQ ID NO: 741389 - DNA, 635 bp, Homo sapiens
ttgagactcaccagtagttccgaaacctagctgcccatcagaattgctcagatttgttaaaaatacacctttaacttactaaagtagaaccccaaggagtggagctctaggtttttccgatggagtatgagggtctttggggaatacctaccttgaaaaacttcatctggcaaagaagcctcagggagtcaccccattgcatagtgtttctccagttgtgggttgcggtttcaacagctgcacaggactcaccagaggagcttggtttgaatgcaggttcctgggcatttgagagccagaccttgatggccagcacccagcttgtgcagctctgtttgttaatgcagatgaaaaactgttttggggacagggaagcgaggtcctctcctgagttgataaagttcttgttaaagggaaagttacttgccctggatccctttttgtytcctgggatccatttccctctgaaaagtagaccaggctaagtgactccctcattgcttcctggcagttgacccatttagggaagtcactcttaaccttccttcactggccctagtcaggttggtcatactcacccatatctctttggtcttccacattcccaaattcagttgctgctgtttttggtcttc

SEQ ID NO: 741390 - DNA, 618 bp, Homo sapiens
gtgtggtcaaaaagattgggaaatgtttggttaaacaattctgaacagattcttttgcaataagacttctcagaaccttaaataggctgatatgcctggtaaatcactaagaagggccacagaggtgatattttcttaaataaacaatttcttatttgcctaaaaaaccctccttttaaaccactagatctctggccaatcatttagggaactttttcccctaaactctgacagcagagaaaaaaggattgaattaaaaaaaaaaaaaaaaacctggccaatgggagatgggttaggaggctgtggtcatactgcaaaaggaaaatgatgaggacctggactaagagaatggtgttgggaatagagataaatcaacrtaattgagtacatctaaggagacagagtcaatagaatttgatgattaactagatatagggagggaaagaaaggaaggagaaaaggatgactcaagcttttgcttgggcgactaaatgggtgttggtactattcattgagatccagacagagaaagggagggcattctgagatttcagctttacatgtgttgtgtttaaagtgtttatgaaacacccccacggaggagcgtgggtctggagc

SEQ ID NO: 741391 - DNA, 544 bp, Homo sapiens
cgagcatgctgccttcaagcatctgtttaacaaagcacatcttgcactgcccttaatccatttaaccctgagtggacacagcgcatgtttcagagagcacaggggttgggggtaaggttatagattaacagcatcccaaggcagaaaaatttttcctagtacagaacaaaatggagtctcccatgtctacttctttctacacggacacagcaataatctgatttatcyttcttttctccacatttcccccttttctatttgacaaaaccgccatcgtcatcatggcccgttctcaatgagctgttaggtacacctcccaggcggggtggcggccgggcagaggggcccctcacttcctagacggggaggccgggcagaggcgccccccacctcccggacagggcagctgccaggcagagacactcctcacttcccagacggggcggctgccaggcagagggactcctcacttctcagacggggcggccgggcagagacgctcctcacctcccagacggggtggcggtcgggcagagacactcct

SEQ ID NO: 741392 - DNA, 460 bp, Homo sapiens
gttatttctacaggattgcccaaccctggaccctaaaaggccaagattttcattgctgatgccagcttcctctttctgccttctctccccctgtcaatgacactctatatttcagtctcgggccacccccctctaaactcacagataagattttagtatttgtcatttgcacatctcactgtgcaattatccctgcctgcaaagtagacaaaagtaaagttttcctctgtggaaaaaatgttgacagttacctagcaggtgtgtataggggagaasatatcactttgagaaaaggaagcaatttattgaaatcacatcataaggcagggccactgttgcagcctgttccactgtctcatgggaatggagaaattactcacattagtagagtacattttggaatgatattcatgatattcattgattttagtcattcaaattatgtgttggcttcaaccct

SEQ ID NO: 741393 - DNA, 705 bp, Homo sapiens
aactaatatagcctctgtcaattgtgggatcccagcaccttggaaaaaaatgaaatcagagttcctattctcatgtggtcataatccaaactggaaaaaccccctaattttctctgtgttagaccatggaaattatacctctaggtcagtgaaactgaaaccgtgtttttgataaaataaagagttaggggatcaagccaccaggctctttcaatttcaagcaagctagttcaagcacaaaccctcctatgtctgtccatctcttgtgtgcttggattcagcctctaaatacttctgttgcccggtaggcctagagggcccatccacagcctgctttgtttcagaggtcatgcaccgtgtaacttgtttcctagtttcttctcaacatgggcttttagaatattcactctcagagcagaggaccagttcagggcagggcttccatcctgtgactttacctaggtccgccctatggatgggtaacataacaacataaasaagcaattacttctggagtatgaagctccactcaatactggtataagctaggattaggttaatctgtatgtaacagaaaaggaacatggtttccataaaacatatttatttttgtctctcctaaaagaaaatactaacttcattaattgaagactaatatgtgggtatggttaggagagacccagtctccttctatcttcctgcttc

SEQ ID NO: 741394 - DNA, 452 bp, Homo sapiens
ttgcccgagatctcaaggccaatgaatggcagaatcatattctaaatataggttttcaaactcctgtaccatttcctctataagaacattctttgaaactttatattcaataattaattacttaatatgtaaatatatgataaacataatataatgatccttttactacttgttataaactggataactagagtttagcacagaaatgggttttattattggtttttcccttttaggggtacccatctcarttctcagagaaagttggctaaagaagataatttcaaaagaaaaaggatatatttgcctcaaatcgcagcaataagtcagagagtatcagtcatttcctacaagtgggggctgtattccttcttgcactgcacatctacagagaagagaccctaaagtaacgaagatgtgttactaagtataaatggagaaagactgagtca

SEQ ID NO: 741395 - DNA, 604 bp, Homo sapiens
tactacttgttataaactggataactagagtttagcacagaaatgggttttattattggtttttcccttttaggggtacccatctcaattctcagagaaagttggctaaagaagataatttcaaaagaaaaaggatatatttgcctcaaatcgcagcaataagtcagagagtatcagtcatttcctacaagtgggggctgtattccttcttgcactgcacatytacagagaagagaccctaaagtaacgaagatgtgttactaagtataaatggagaaagactgagtcaattccacataaagaaagcttcgccatgcataaggaagatgggcagtttttgaactcacgagtgactagaaaaataaaagctcaagcacttagttcatttacaattcaacactatcaaagaaataaatggttgatacaaatccccagggggaacatcattttattacacacccccataggtggcttttaaagggtacttgattaggtttcatcacaattaaactctctacacctaaaggacaccaaaacatggtagcttatataaagatgtaggagatgggcttgtaattggccttcaattaagtggtaaagaagg

SEQ ID NO: 741396 - DNA, 604 bp, Homo sapiens
tactacttgttataaactggataactagagtttagcacagaaatgggttttattattggtttttcccttttaggggtacccatctcaattctcagagaaagttggctaaagaagataatttcaaaagaaaaaggatatatttgcctcaaatcgcagcaataagtcagagagtatcagtcatttcctacaagtgggggctgtattccttcttgcactgcacatctacagagaagagaccctaaagtaacgaagatgtgttactaagtataaatggagaaagactgagtcaattccacataaagaaagcttcgccatgcataaggaagatgggcagtttttgaacycacgagtgactagaaaaataaaagctcaagcacttagttcatttacaattcaacactatcaaagaaataaatggttgatacaaatccccagggggaacatcattttattacacacccccataggtggcttttaaagggtacttgattaggtttcatcacaattaaactctctacacctaaaggacaccaaaacatggtagcttatataaagatgtaggagatgggcttgtaattggccttcaattaagtggtaaagaagg

SEQ ID NO: 741397 - DNA, 619 bp, Homo sapiens
ccatcaccgaagtaatgtacattgtacttattaagtcatttctcacccctcacccatctcccaccctctagagtctccagtatctatcattccacactctatgtccatgtgtatacattaatcagcacccacttataagtgagatcatgtaatatttgtctttctgtttctgagttgtttcacttgagataattgcctccagttccattcatgttgctgcaaagtacataatttcactcttccttatggctgaatagtgttccwgtgtgtataggtaccatattttctttatccaatcacccactgatggatgtttcagttaattccatatatttgctattgtgaatagtgctatgataaatatacacaggcagatatctttttgatacaaatgttttattttcctttggctacataccagtagtgaggttgctggatgaaatgctagttctatctgcagttttgttacaaaatctccatattgttttccaaaggagttgtattcatttatattcctacaacagtgcataagcatttctctttctatgggccctaatatgtttttaaagaaatgagatcccagatctgtgcaggacagaaaaatgtgggatgctcagtg

SEQ ID NO: 741398 - DNA, 613 bp, Homo sapiens
ttcactcagctatttttctgacactgtgaatgtatatgaaaaagatagtaactaatatttggagggtgagttactgttgttgttgttgatgatgattgtgattattcaatcttatatttgaagagctctttattatctttcaagtactttcacacatattatagaccaagggaagacattaaaagaggtttacagctatgttacattgaccagatatttgaaagttgtagttcttcaccagtgaagactttggtcatatgccttttagaaacagaaatataacttaccaacagattttrtattcctaacaattcatcataatatgcaaatatatatagacatatgtgtgtatgtacatattttgcatgtgtaaatatgtatatgtgaatatgtaagtgtatatgtgcgtacttatacatacgtgtgtgtgtgtgtgtgtgtgtaatcagtgagaacaactaaggacagtgaaagtaaattagctgggaaaagtggtatttaagagagcaagggtttaatatacacttcttaaatttcacccaggaccatttacttgtccattctttctacaatcaacataaaatttttgagccttcgtcatgcatcaggcact

SEQ ID NO: 741399 - DNA, 448 bp, Homo sapiens
tttcttaaagttgaagaattttttttctcttgggaaattccatagttcttaattatacttgttttaagaaatttatctcttttacatttaaattacatgtatttatttaaatatttaaactcccaaatagacattacactctctgagagtgagcttcatattggattcctctttgatgaatggatggatgaaggcmtatatgtctgtactggattactgtttaaaaggcaaaccacactgcttatttttatccccactttttgtttaaggagattcttctaggaaattcatgcaatccagctatgtgacaaatttaatattttctttataatatacatagctatttagaggctaatttgaaaatactttttattccctaattaattttgtttctcctattacagaaatcaaaaaacaattttgtcccttttgtcttccctccccttcc

SEQ ID NO: 741400 - DNA, 482 bp, Homo sapiens
acataagcttttgttgtattgctccgctgaaaacttgggattatttatcgccacgtgcaatctagccagacttaactgatgacaccatttttaacaagtggctctgcagccttgtggcagacccactctattccacatggtgtctttaattagtttttctgtgagtctacagggaatcagaactggatttacattcttgatggcaagtatgacaagttaagctatgagatggaaccattaggcagaaaygactgatgggacttagtgaggaaaggtggctggacatttgatatcattcagcctcttttcatcctctggactcccactctcctcccatgtcatcggtgatgtgtttccaccctcatctgcagtcctgatgccctgaagatcctctgtgggattttctagtactgagaaattaatcactttctttgtaatgttgttgcaaacagtggaagtttctggggagacatgactattct

SEQ ID NO: 741401 - DNA, 629 bp, Homo sapiens
gactcattgatccaacttgagttaattgggcaaaattccctctgctcagggtaatgggctttgttgattggttttggccaatgagtgatcactgtgcacttatagaatagagctaatcccatcccaaatacctgggtaaaaatatggtagcagtgatgcctggaaggtaagtcttgaagctgttgataagtggaaagctggagaatggacattgccgtcagcaaacacttgacctcaatgaccttgcttttctctttatagctacactaaggccacttcctctgatgctcctcacttctccttttgctaacttaaggccttgctgttgcatgagattttgagggggtgaaaacaagtcaccttttctgtataagtcaggtaaatgaaaaggaaacagtttggtaagtctcccttagaattcagtaggaatgtctgcttttaacaaacaaacaaccaaatgagaaagcataatgactrcataaaacacacatatcttcagtggcccgcaggactttaaagtcagttaggtgtttcttttgtgatgtgcgtcttcctgtttcaaaatgacagcagctatttttatgatgtaccagctcccaacggggatggctgatcactcagttctatgc

SEQ ID NO: 741402 - DNA, 595 bp, Homo sapiens
gaattatcaatacctttattttatagtctcaatttttcatatcaaccatgattaaaatctttaagtgctggccgtagaatggcgtatgtctacaaaacaagctgaaatattagcatgtgtctaaccgtatgaccttaacctttaaaagttatttctaggaggataggggtgtgattgactcttttcagatggttcatatagttctagattttccataraaccctagaatttgcttactaggtacaattcatttttcttaaataatcagatgaaaatgagacagtacaaaaggataaagtttccatctattctatattaggacaaaaacaaagtggtagcatttaaacccaaataagcagtgtatattagctacagaagtataaccatctaccagtatacaatttgctgaacagaaattgatgacctttgttctaacatacttattctatccagagaagttttttttttgaaggttaataaactctccagttatattaacgaaagaactgagtacttagtttgttatttaaaggtcaaccagtagcattttacgtgcagtttaaattcttcaaaatctgataataaagatatctca

SEQ ID NO: 741403 - DNA, 566 bp, Homo sapiens
gctcccccctctgccagggagctgaagtggagggagtatgtttatacccaaatgcaaagatactgcccagcacagacttctgtcccagggggccggagagggatgtcattaaggccagatcagccaccacccctggctctccctgccgggaattccctggacagcaggagtaagtggcccttccttccttctctgcaaaagccccaaggtcacaggcacctctgaaacatgccccacrctccccctgcttaccaggcctcatttcaggacctcctacccggactacactccaggcccagtggcgagacagagacacctgcagggctcccggattgggggcggtgaaaacctgcacggtgcacgccccagcagaccatagtcctcatgccagctggccagcagctgcacagaggctggtgggaagcaacttcctgacacagtcacccctccccagaagtgccctgtgaggccagggaggtgaggacaggcaacccctcctcagaagtgccctgtgagggctgagggagaagcacagtctcagctgggcctggccatggagacggatc

SEQ ID NO: 741404 - DNA, 568 bp, Homo sapiens
ggatagcaaacgccatttagtttgtctgtaaatatctttattatctctcatttaataaatagttttaaaaagtagagaattctaaattggctatcattcttctttttagcacaatgaagttactattccactgtctcttggcttcagttatttctgctgtgaatcatcagcgtaacagccatcatccattgaaagcagtccactctcttcttttctgttctgtgtcactatgatacatctgcatgtgggtttgttttttttctggtcctgcttgagattcttcgggttccttggattgttactctgaaaaattctcagctgttttattttcaaaaatgattyctgcctcattgtctctttgcttctctaactctgataacatgttaaaaccgttgtgtcctccatgcctcaacctgtttcttgttttccaatgctttattctgtgttagattctgttaatttcttcagaattatgatcagatttggaaaataaccaaatagagcatctagaaatgaaaactacaataattgaattttttaaatccagcagatgggttgaacaaaatta

SEQ ID NO: 741405 - DNA, 604 bp, Homo sapiens
agattctgttaatttcttcagaattatgatcagatttggaaaataaccaaatagagcatctagaaatgaaaactacaataattgaattttttaaatccagcagatgggttgaacaaaattagacacagctaaggaggttttttttttttttttttgaggaggagtctcgctctgtcgcccaggctggagtgcagtggcgccatctctgctcactgcaagytccgcctcccgagttcacgccattctcctgcctcagcctcccgaatagctgggactacaggcacccgccaccacgtccggctaattttttgtatttttagtagagacggggtttcaccatgttagccaggatggtcttgatctcctgaactcatgatccgcccgcctcggcctcccaaatcctcccaaaggattacaggcgtgagccaccgcgccaggccctaaggaggtatttttttaaaaactggaatataagtcagaatgtttgtttctactggatgtttaggggcagtaccagttcagggccagttcaaagaattcttagcttgaagtttgttggaccagtgttgatttgtgctgcaaaattttgtgaagctcactgact

SEQ ID NO: 741406 - DNA, 474 bp, Homo sapiens
tccacccaggtatgtatgaaaacacgtggcaggagtggggcatggtggcgcacgcctgtagccccagctacttgggaggctgacgtgggaagatggattgagcctgggttagtttgaggcagcagtgaaccatgatcatgccactgcactccagcctaggaaacagagcaagactctgtctcaaaaaaaaaaaaaaaggtagatgaatgaaagctctaaactcaaaggggaaattataaaagtattagacaaaattacgggggaagtatttgtgtaacactgggatggaaagggtyttcttaagcaaaggaggaaacccaaaagttatagatgtaaacaatacatagttaataaaataaagaactaaaatctcctgtggcaaaagcaacagaagacaaataataaatgctatacatatgtaacaaacggatactatcctgatatagaaagagctcctttagattaataattgaa

SEQ ID NO: 741407 - DNA, 729 bp, Homo sapiens
catctcacaaataagtccagtgtgtttgctacttcttgctcactggatccgatcagcataatgtcatcaatgtaatggaccagtgtgatatcttgcagaagcaaaaagtggtcaagatctctccaaataagattatgatgcaaagccagagtttatatactcttgaggtaggagagtaaagatatattgctagtcttgccagctgaaggcaaattgcttctagtgggccttatgaataggaatggagaaaaaggcatttgccaagtcaatggctgcataccaggtaccaggaaatgtgttaatttgctcaagcaatgaaamcgtatctggtacagcagctgcaattggagtcaccacttagttaagcttatgataatccactgtcattctccaagatccatctgtcttatgcacatgccaaatgggagagttgaatgggggtgtgatgaaaatcaccacccttgcgcctttcaagtccttgatcatggcactaatctctgcaatccctccagggatgtgatattgtttttgatttaccatttttctaggtagaggcagctctaatgccttccatttggcctttcccaccataataggcctcaccctaccagtcagggagccaatgtgggtgttcttccagctgctaagtatgtctatgccaattatgcattctggcactggggaaatgaacacaggatgagcctggggacccattggacccactgtaag

SEQ ID NO: 741408 - DNA, 585 bp, Homo sapiens
ataaaatgaccagtttcctcaattcgacatggacacgtgctgtgtgtctttcaagactccagtcaaatcattccctttctgaatctctggtcataaaataatctttcccctctaaaatcccatggaactactaatatatactaatcctttctatgagacactaagtaagccttttgaatatgtcttgaacctaatagtggtcgatmaatttgttgaataatactgttgtaacagaatgttaaaatgggttacttcttatttctgtttcgtccgagtactctaagctagtgcttctcaaaagtgactgtgaatataaatcgcctgggcaccaggtaaaaacgcagattcccattcagtaggtctgggatgagacctaagattcagcatttcttcaagctaccaggtgaagctgctgctggtactaagaccacaaactgaatatcaatctactgaataggtgccaactattttcatgctgcaaagtgggaccacaaaagtagagaaggttgcttaacattagtttggtgacatggacatggaacagaaaattcaactccagcttttgtaaggttggagtaaccaaga

SEQ ID NO: 741409 - DNA, 523 bp, Homo sapiens
ttgctgcaaaagcaattgcagttttggacactcctttttttttttttttttttttttttttgagacagagtctcgctctgtcgcccgggctggagtgcagtggcgccatctcggctcactgcaagctccggctcactgcaagctccggctcactgcaagctccggctcactgcaagctccggctcactgcaagctccgccttcaggttcacgccattctcctgactcagcctcccgagtggctggaactacaggcacctgcygccaggcctggctaattttttgtatttttagtagagacggtgtttcgccgtgttagccagggtggtctccatctcctgacctcgtgatccgcccgcctcggcctctcaaagtgctgggattacagggcatgagccacccgcgcccggccttggatgtgacttttgatagtaaaaactgcaattacattggcaccaactgaatcattgacatacaccctttcctttgactgtgttattattctttgagtgatagaagatatt

SEQ ID NO: 741410 - DNA, 655 bp, Homo sapiens
tattttactcaaaaataccaataatagaaaatagtaacaatacccattacttctacagattttactatgctctaggcactgttttttacatatagtattaaatatttaatgaagtaggaactgctatctgcatttatagataaaaatcctgagcaacagacacaagaatattgatatttayagctatccacaatttatctgcaattctgaaatcctacaagtttacaaattttttttaaaaaaaggaaatttgatataaaaatctgatctgaattggtggctatgcctagtctatatttctgccacttggggtgaacattcatacatttcacgttaaaaatattaattatcagatgctacaccagactctgctagactctttcataaaagttcatataggaatagtattatctttataaagttaaaaaaactgcctttccaaacacatcaggccctatagatgttgaataataaattatatatcttctaccaaaaagtatgaaccaaatcccatgaatgatagtgtggtctattaaaataaaactggactaatagtttgaaatttttgggtcaaatccagcttgtaagtaatgagttgggatcttaataaactttacttcactctctggatttcactttccttatcttgatcaaa

SEQ ID NO: 741411 - DNA, 507 bp, Homo sapiens
gaaatgcatattttactcaaaaataccaataatagaaaatagtaacaatacccattacttctacagattttactatgctctaggcactgttttttacatatagtattaaatatttaatgaagtaggaactgctatctgcatttatagataaaaatcctgagcaacagacacaagaatattgatatttatagctatccacaatttatctgcaattctgaaatcctacaagtttacaaatttttttyaaaaaaaggaaatttgatataaaaatctgatctgaattggtggctatgcctagtctatatttctgccacttggggtgaacattcatacatttcacgttaaaaatattaattatcagatgctacaccagactctgctagactctttcataaaagttcatataggaatagtattatctttataaagttaaaaaaactgcctttccaaacacatcaggccctatagatgttgaataataaattatatatcttctaccaaaaagta

SEQ ID NO: 741412 - DNA, 614 bp, Homo sapiens
agcactttttccctttcctcaattttcagtgcccaaatactgtagccactggcctcatctctggtctccactactcaaaatagggaaatagcctatcactgcctagaaacttcatgaactgcctagaaatcatcttctgaaggcataacacgtgacctctgaggctcacaaatctcacttcagtgggtctccatttcctyaacggaggagtgctctctagagccctgtggccaccttgcagtggggttgagagctgaatgaaatccttggcctatagcacctctctgtgttttcacataagtgcacagatgatattgaatttgaccatggatttccaagtctgaaaaaacaaaatgtttgaaaacagcgaagacacaaaatggactaactctaacaaacataagcttcaacttcctaacaagggatttcaaagaccattctcaggttcaccagagaaattactcatcagagaagggaaaaagaaatcagcttgtatttcttagctcttattatgtgctaggctgctggccatcatgctagaagacaggaaaagcattagctatcatcttaatcaatctataactctttacttattaattcagatgatccatgca

SEQ ID NO: 741413 - DNA, 630 bp, Homo sapiens
agatcaatattaatctctacaactgaaaagggcactggaattggctgcaaaatacaaaacacatgttgatacggttgttgcttactgtcaaaagaaaagtttttggagacatttggtaaagaggaaacataaacaatacttgcagtatgcagaaggtctccaaatagattgagagaaaaatcaaagccaaaattgagattgaaattacaaaagraggagaacaatcatcaagcagccaatccagtaagagtatgggtctaaagccctacatgccatgcttatatttaagaagttttgtattttgaaatgaattctgattaactaaggataagcatgttttggctgataaaaaaaggattacctttaaataagtataagcacttgctgtgtatttaacgtaaaagtacattcagaaagatgaaaaacaaagtaatttatgtacttcttggttttatatttttctaaaccaataattagcaaaatattacggtatacttacgatatgcctgtgtagtgttaattatatttcagttttttgcccattatttcatccctgaatcttcagcctgaaaaaatatgaatgctgataataaaacattgaactatttaaaaatgtatgttattattaat

SEQ ID NO: 741414 - DNA, 614 bp, Homo sapiens
tccattttcccgaaatatctacataattgcttcagctgtctctttcatctgcctctgcagacacagctccacactctaatatgctccaagtttcctaagaacttctattgaagtagttattacttgtggagctcattttcctaatagctataaaagattcagcaggcaactggtgtcatgacgctgttgtttttcttggaagaactattaaaataaattgaatttwaaaaaaatcgtaccatcagagggcccactttataagaaaagaaattctgagtagaatatgtgcaggcaaacttaacacccatatcctccaattcatttctcccttttgcccagggaatatttatctgggagacagaattttatgaaccacttttacacattttaattttattccagacgctgacctgtgggacaaagaaaatgagcttttcatctagtctcatatgaatacagatgtctagtactcataataggcaatgagttatccttgctattttattatttttggtgcataaatctctgaattatctaccagtagttgacttttgtaggagaatatcattcacctaaaaaccagcattcaaagcaacaacagtccttatttttaa

SEQ ID NO: 741415 - DNA, 548 bp, Homo sapiens
tcctgttttttttttttctttttttttctcaattcctcaaacacatcataccatttcctgcctatagaacgtggctcatgctatttcctctgcctgaggggatcttttcctttctcttagcctggctcaatgtattcattcttcaaatctcagatcaaataccatttccttagggaagccttctgtaacctctaagctgtaatgtgctctcttaacactttggattttcttctacagccattatcaaagttggaaacaatatatttgtgtaatttttaaaattaaattcctctcacccacttcactgaagacaaagaccaaatatgatttgtcactgctrtatcccagacgcccagccaggaaattaaagatttattgaagaatgaaccaatgcatgaattaatgactgaaagaataaatatatataacagtctaggtttgacagaggaaaattagaccaaagacactgatttggaatcatcaggatacagatgataactgtagccaatggaactaatcaaatcactcaaaaaagagtgaaaggagta

SEQ ID NO: 741416 - DNA, 622 bp, Homo sapiens
gggaattaaggagttgagaaagataaaggcgcaggttattctgcttctcactaccactgggatagcatgcttaggcgagtgcaaggagaaacatgtggggtcaataggcttgagctcagcaaaaggatttacaaaagcaaaatttaatctcatgtgaggttccttccgaytgagtttaaattcaaagattgtgaactttggataactggcatcttaattaaattgaaatcaagaggagtatctccattcttacctgctttaatcagtacatgacccaaattgttcacagctggaaaaggaaacgagggcttttgaaatgattattataaaatgctgttactttagaggaaataactgattctgaagtgtgtggggatggggctgttggagttattatatggtccaggcttcgttttgctttgcttgtttaacaatttatgattaagatagaatcatatttaattatactgttcaaagaacttggtatgttctaagggtaagctggttttaatcaacttgtttttaatttcttgatgctacattaagttatagttgagaatacagtgattaaatcatacctaaactaaaccatttgccaaattttatgaataggagttaaaac

SEQ ID NO: 741417 - DNA, 503 bp, Homo sapiens
aacttggtatgttctaagggtaagctggttttaatcaacttgtttttaatttcttgatgctacattaagttatagttgagaatacagtgattaaatcatacctaaactaaaccatttgccaaattttatgaataggagttaaaacagcacaattatcattaaaaattaaaaacaagatttgctatgaaaaatctctccacaaataaatgaaagttgatcacgcaaataagccagctcactactggaagaaaacccrtattcctgaagaagatgtaatttgtataaaagaaaactatttttgttttgcaatcacttaacaagaaaataatctcacttaaggagaaaacaatgtttcagaaaaatagaggaagaaagaatacctctttatttatttaatgaggacagcaggacctttatactaaacccaaacaaagatactaatagaaaagagaactagcgaccaattgccctcatgagcataaaaacaaaaatatccttcacag

SEQ ID NO: 741418 - DNA, 608 bp, Homo sapiens
gagaggttgagatttggttttggttcctttttttttttttttttttttcctatttggatactcattctttcactcatttcactcattctagcaccatctgttcaagagtatcttctcttatttttcttttctttttttttttttttttttgagacgagtgtcgctctgtcacccaggctggagtgcagtggcgcgatctcggctcactgcaagctccgcctcccgggttcacgccattctcctgcctcagcctcccgagtagctgggactacaggcgcccaccatcacgcccggctaattttttgtattttcagtagagacggggtttcaccatgtcagccaggatggtctcgatctcctgacctcgtgatccgcctgcctcggcctcccaacgtgctgggattacaggcatgagccatcgcaccyggccccgtctcttttcctattgggttgctttatcatttatgtcaaaaatcaaatgcccacatttatgtgggtgtatttctattgctttcatatctttcactctcataccagtttaccactgtttgattattgtagctttataatatatcttggagtcaggtagtatatatcctcaaactttg

SEQ ID NO: 741419 - DNA, 629 bp, Homo sapiens
caaaataccacaggtacccctaaaatatgtacctctattatataccaatttttagaaatctatgtaaaggcaattcctgaggcatttcaataagagccacccctgagtacaatatcaatcatgaattatcacaccttgggtccagtcattcaacctattactagtttatctaggccatatttttctaggatatatcctgaaattcctttgcaaatatacttttgaaatctagaaatatatctacatttatttggtacatatacttagaaatcttttcagaccaatacataatgtaatgttaaatttaaaatataatgtaagtgtacagtacaatatttaatagaacagatccagaaatgagcattattgatktgtaaaattgtatcaatttcgcataaaagcaaagcaatcaaattctggagtcagctagatctagttcaaatctcagctctgatactgtcactgatcttgatatttgcttagtgtctggatttctgaattatctcatctgtaaaatatgaataataattatcatacctacctccaaaagttgctacaagaattaaaggaagtaatgctaaagaatgctcagatatgggtctgttatattacaatatttcaaaaagtat

SEQ ID NO: 741420 - DNA, 629 bp, Homo sapiens
caaaataccacaggtacccctaaaatatgtacctctattatataccaatttttagaaatctatgtaaaggcaattcctgaggcatttcaataagagccacccctgagtacaatatcaatcatgaattatcacaccttgggtccagtcattcaacctattactagtttatctaggccatatttttctaggatatatcctgaaattcctttgcaaatatacttttgaaatctagaaatatatctacatttatttggtacatatacttagaaatcttttcagaccaatacataatgtaatgttaaatttaaaatataatgtaagtgtacagtacaatatttaatagaacagatccagaaatgagcattattgatgtgtaaaattgtatcaatttygcataaaagcaaagcaatcaaattctggagtcagctagatctagttcaaatctcagctctgatactgtcactgatcttgatatttgcttagtgtctggatttctgaattatctcatctgtaaaatatgaataataattatcatacctacctccaaaagttgctacaagaattaaaggaagtaatgctaaagaatgctcagatatgggtctgttatattacaatatttcaaaaagtat

SEQ ID NO: 741421 - DNA, 648 bp, Homo sapiens
aataaaaaagcaatgtcagtactgtgacagaaaattaaaaatatgttaaaccagctttattcctttgttgaacctaactgacattgagttctacaacggtaacaaaaatgggtattttaattaaggtaaatttaagaaaaacaatggaattgtgcaggactttggatgaaaaytggcttgttcacatttaccaagatagttgttcctggtgataattgaacaaccttggaaatctcagcatacgtttcttattaatattttttggtaaatgtacctgtttgaaaatgaggtcaaaatagaagcttctgttttaatttaacaatatctcagtgccctttccttcaacagtgtctcttcatttttctctgtctctgcattatttcacttctgcaaccactgcctctttcctgataaggttcaatcattctggtagaggttgaacagaagttaccagcctagttcagaatcatggacagaggaatttcacatcggctcaaggaacttagtgctatgagaactgtactgcagagaagaacttcaatgactagtgaagaaagaaaataaagatgataatatcctcctcaaactgtttttccctaatcccaccattgctttatagacttgcccaaattgtggtgcatgcaagtc

SEQ ID NO: 741422 - DNA, 565 bp, Homo sapiens
tgcctttcatttcctcctcttgcctgactgctctggctaggacttctagtacatgttgaacaggagtgatgagagtgagtattcttgtcttgtcccagctccagttcccaaggaggaaggttcaagcttttaaaaatatatatatattaaatattatatattatattaaatatattattttatattatacatawatatatatgaaatatatatttaatatatattttatatatatatatacacacacacacacttgaagttctgggatacatgtgcagaatgtgcaggtttgttacataggtatacatgtgtcatggtggtttgctgtacccattaacccgtcatgtacattagctatttctcttaatgctatcccttccctagtcccccactccccaacaactccccagtgtgtgatgttcccctctctgtgtccatgtgttctcattgttcaactcccatttatgagtgagaacatgcggtgtttggttttctgttcctgtgttagtttgctgagaatgatggtttccaacttcatccatgtccctgcaaaggtcatgaactc

SEQ ID NO: 741423 - DNA, 565 bp, Homo sapiens
tgcctttcatttcctcctcttgcctgactgctctggctaggacttctagtacatgttgaacaggagtgatgagagtgagtattcttgtcttgtcccagctccagttcccaaggaggaaggttcaagcttttaaaaatatatatatattaaatattatatattatattaaatatattattttatattatacataaatatatatgaaatatatatttaatatatatttyatatatatatatacacacacacacacttgaagttctgggatacatgtgcagaatgtgcaggtttgttacataggtatacatgtgtcatggtggtttgctgtacccattaacccgtcatgtacattagctatttctcttaatgctatcccttccctagtcccccactccccaacaactccccagtgtgtgatgttcccctctctgtgtccatgtgttctcattgttcaactcccatttatgagtgagaacatgcggtgtttggttttctgttcctgtgttagtttgctgagaatgatggtttccaacttcatccatgtccctgcaaaggtcatgaactc

SEQ ID NO: 741424 - DNA, 565 bp, Homo sapiens
tgcctttcatttcctcctcttgcctgactgctctggctaggacttctagtacatgttgaacaggagtgatgagagtgagtattcttgtcttgtcccagctccagttcccaaggaggaaggttcaagcttttaaaaatatatatatattaaatattatatattatattaaatatattattttatattatacataaatatatatgaaatatatatttaatatatattttatatatatatatacacacacacacacttgaagttctgggatacatgtgcagaatgtgcaggtttgttacataggtatacatgtgtcatggtggtttgctgtacccattaacccgtcatgtacattagctatttctcttaatgytatcccttccctagtcccccactccccaacaactccccagtgtgtgatgttcccctctctgtgtccatgtgttctcattgttcaactcccatttatgagtgagaacatgcggtgtttggttttctgttcctgtgttagtttgctgagaatgatggtttccaacttcatccatgtccctgcaaaggtcatgaactc

SEQ ID NO: 741425 - DNA, 586 bp, Homo sapiens
tgtgtcatggtggtttgctgtacccattaacccgtcatgtacattagctatttctcttaatgctatcccttccctagtcccccactccccaacaactccccagtgtgtgatgttcccctctctgtgtccatgtgttctcaytgttcaactcccatttatgagtgagaacatgcggtgtttggttttctgttcctgtgttagtttgctgagaatgatggtttccaacttcatccatgtccctgcaaaggtcatgaactcatccttttttatggctacatagtattccatcgtgtatatgtgtcacattttctttatccagtctatcattgttgggcatgtgggttggttccaagtctttggtatcatgaacagtgctacaataaacatatgtgtgcatgtgtctttatcgtagaatgatttataatcctttgggtatatacccagtaatgggattgctgggtcaaatggtatttctggttctagatcactgaggaatcgccgcactgttttccacaatgaccgaattaatttactttcccaccaacagtgtaaaagcactcctatttctctacagcttctccaccac

SEQ ID NO: 741426 - DNA, 613 bp, Homo sapiens
gaaataagacctagataaagtcaataaaagataaaatgattttcaaccaaggtgccagcaattcgacaaatgatgctgtaacagctggatagccatacgcttaaaagagggaaaaaaactgaccatatgcaaaaatttattctaaatggaatataaacycacatataagaactaaatgtataaaacttctcagaaaaaaacagaaaatcataggtaccttgacgtggcaaagacatcttaaataggacacaaaaaattcaaactgctaaagagggacaaaatcaatacatcaaagtttatcaaaattaaaatattttgctcctccaaagacacaataaaaagactaaaggcaagcctgagagagtgagaaaatacttacaaaacatatagcctagaacctgtctctaaaatatataaagaacttttacaactcaataataaaaaaaaaatccaatttaaaaataggtaaaagatttagcagccactttaccaaagaagatttattgatggaaaattcgcatttgaaaaagatgcttaatatcattgttatcaagaaaatgcaaattaaatcgcactaagataatacttcacatccactagaatggctgaaatt

SEQ ID NO: 741427 - DNA, 602 bp, Homo sapiens
tactataaaggcaatgaatgagttacattataagaggttaaaataacaataccctctttgtttttctatttgcccaagaggctattttggttttgaacattaaaatgcaaacaatttttaaatcagattggttatctaaagtctgtagaaaacaatgacagaaaataaatgatactatagttttttacaaaaccaaaactggaaggttacagaaacaaaattgaaaggttcatcaaaaaaatttgctaattgctctctcrgtaacaataattctcagtaaataattctttcactgaagaccttgggaaataggatccccgatctcaaggaactcaaaacctatgtaagatcaaaatcaataaaattaaatacaacataaggtgaaaagtgatttaataccgtagtcccccttatcttcaggggatagttccaagaccttcagtggattccataaaaccatgggtcataccaaaacagaaatatacagtcatccctcagtacatctgggggattggctctagcacccccatgaataccaaaatctgcaaatgctcaagtcctggatataaaatggtgtagtatttgcatatagcctatgcata

SEQ ID NO: 741428 - DNA, 602 bp, Homo sapiens
tactataaaggcaatgaatgagttacattataagaggttaaaataacaataccctctttgtttttctatttgcccaagaggctattttggttttgaacattaaaatgcaaacaatttttaaatcagattggttatctaaagtctgtagaaaacaatgacagaaaataaatgatactatagttttttacaaaaccaaaactggaaggttacagaaacaaaattgaaaggttcatcaaaaaaatttgctaattgctctctcggtaacaataattctcagtaaataattctttcactgaagaccttgggaaataggatccccratctcaaggaactcaaaacctatgtaagatcaaaatcaataaaattaaatacaacataaggtgaaaagtgatttaataccgtagtcccccttatcttcaggggatagttccaagaccttcagtggattccataaaaccatgggtcataccaaaacagaaatatacagtcatccctcagtacatctgggggattggctctagcacccccatgaataccaaaatctgcaaatgctcaagtcctggatataaaatggtgtagtatttgcatatagcctatgcata

SEQ ID NO: 741429 - DNA, 504 bp, Homo sapiens
tcttttatctgcaatctttacctcttagtatatttgacttgtacaatattcaaattcaaattagaagtacagattaccaaaagagaaatacagttccttaaaagtcagactataagccttattaataaagggaatattggttaattaatcccttartaaatagggaacctatagtccctatttactaagatatccgtagtgttttcacattatttttaaaagctcatgaaatacgccctttgaagagatgataaaattttaaattcaattaatcaatatatatttatctcatgtattatgtataaaatatggaggcaaactgaaagaatcattacatttattgagtttttaaccaagtaggagagaacaaaatgcaaattaagcagaatgttataaataaaccagtgcaaagtaatatacagtgacacatccactatctagaaactcagatacagtcacatgacttagtatcccaaaaccaagtaaataaacaaggaagcttgc

SEQ ID NO: 741430 - DNA, 649 bp, Homo sapiens
aaactggtgttggaggaattaagtgtggatcccagttttacattggagtagattcgagaaaacaattcatgatttttttttttttttttttgagatggagtctcgctctgtcgcccaggctggagtgcagcggcgtgatctcggcgcactacaagctctgcctcccgggttcacgccattctcctgcctcagcctcccgagtagctgaattcatgatttttttgaggagttgaggatggtatcttaggaggccagggcagtagaatgagagaactcaaaggagacagcgatgcgagtagagggagtgcgttgatggtggtgcaggccttggtcttcttctctatccattctcacactaacttgtcctcatccaatatcacactgttttagctaatgtctcccaaatttatgtcaccagcccaaggctktcctctaaactccaggcttgtgtacagtttcctatgtgctatttctccttggatgaataataagcattttggtctcagtatccagaactgaactcctgatattcttcctattctaaatctgttcctcttactgcacagccttcccctatctgttagtagcaattttattctttcaattgcttgtgtctaacatgttggagtcatccttgattcttctttct

SEQ ID NO: 741431 - DNA, 491 bp, Homo sapiens
tttcaaataacactccattcttgtgcaaggagggatgatacaggataaaagtaaattctatcaaatctcctgaatctaatggcaaattactaatggtcaatgcctagacataataaataaaaacttgtaaagataatggaagagactgctagaaaattttataggmttataaacttattattttaatgtcaactgtagatacatttttcaataaatttctttgcaacaatagatgcataattaatcaagagaatgcaaagctatatttacagtttaactggataattcttttgacattaaatatttagaatcttacatcgcagaaaatgttaatgagtaattaagtatttttttaatctcaaagttcaacagcatttgagaagaggatgttttcttgttcacacattccagttatcttgaattcttataaagctccttagagtaaccgttaaatgtcagcctacataaaatctctctttctcgacaacatt

SEQ ID NO: 741432 - DNA, 616 bp, Homo sapiens
tcttttcacaggttccagagccgctgacgttgggccagtctcccaggtgcttttgtatccaatgacagttcaggaatcctggccttctaacacatcactgcagacattgccacaatattttcttcatctgtcctttctcctgtgactgagaaccctcttctgaatcattgactttacctcctatttttctcatgactttctactgtttagattgtaaaatgtggaatgtataccacgaaggtccaccctccactcccttatggcaggctctggacccctatcctcggcrcatgtggaagaagaaagtgaaccacacttagaatgcaaaggggaggacagactcagagggcgcatggcccagttccatctctgctgctccaacctgtcttcctgccgtcatttttctcacttgttaatgaagaggccaggtttgctgagctgaagatctcctccagcttgaaaactctataaaaacattggcttaaatatatgtttcataacgatccaaacaatgacaatgacctttgaaactattaaaacataaattgtacttttcgctaatctccggtgtcagttctgacatcaaagttcagactgctaatttagtcatcctaaa

SEQ ID NO: 741433 - DNA, 667 bp, Homo sapiens
tatgggtataaaagtcagcttgctgaagagtctaatctactcctgacatgcatgaggcaaaagatgttacaatcagagcctcctcacaactaaaaaatataatgaattcacattctatatcatgatactttgcatcatcaatattgctaatttaaaagtttgtcaacactccataacatctcctatgaggcaagctaatgttaataaccttatttcaataactaaraaaaaatggcttagcagtcatgagagagttacacctggactcaattaaagagctcaaatatcatcctacttttcactcactttatggtatgaaaacacaacaaatttagtcttcttttttcaatttaaagaggtgttcttgttatgttttgttgtatgacctgtcagttttctgtaactttaaaagtccgttacttaaaatattaagctttgtatagaaatagagtcctgataattagaagatgccccagtatcagagtaggtgtgatcagagttgcgtgttggctctggaggcaaatctaagtctcagctttggctccactattcaaaataatatggctgctatcaagccaattcgtctttgtaaaatacacagtaggacctctctcactggttttatgagggaaaaaaagacaatggggacatttgaacatttacatcc

SEQ ID NO: 741434 - DNA, 538 bp, Homo sapiens
gaacttaaaacaattaagttaaaaaataaatatgaacccggaatggaaatggtcgaaatgcctgacttaaatcgcatagagtgaaaagctggattaaaagacaagacttaactgtctgttatctttatgaaacccatctcacakgtaatgacaccaacaggctcaaagaaaagaaatgaagaaagatcttctatgcaaattaaaaacaaagaagagcaggagtcactattgctatgtcagataaagcagactttaaatcaacaacaattaagaacaacaaagacattacttaattacaaaggttttaattcaacaagaatacttaactatcttaaatatatctgtactcagccttggagcacccagactcataaaagaattttttttttatttacaaaaagcctaaacacacacacacagtaatagtgggagacttcaacacccccctgacagcattagacagatcatcaaggtggaaattctgaaattaaactttacacttgaccaactggacctaataaacatctacagaactcca

SEQ ID NO: 741435 - DNA, 584 bp, Homo sapiens
agctcttgtaaggcaggtctggtggtaactacttttttcagcatttgttcatgtgaaatggatcttatttatcctttggccagatataaaattctgagttgaaatttattttctttaagaagatttaatataggcccccaatctgttttggcttgtagggtttctgctgagaggtctgctattaatctgatgggcttctttttgtaagtgatctgtcacttctctctgattcccttaattttttttgttcttgttgtttcggccttagacaatctgatgtttatgtgccttgrggataatcttttgaaatattttgtgggagttctctgcatttcctcaattttaaggttggcctctctatctaggttaggaaagttctcatgtatgctaacctaaaatatattttccatgttgcttacacttgcctcatctctttcagggatgccaatgagttgtagattcaatctctttacacaatcctgtatttctcagatgttttgttcatttctttttattctttttttaaaaaactattttctgactgtcttatttctgaaagccagtcttcaagctcacagattctt

SEQ ID NO: 741436 - DNA, 586 bp, Homo sapiens
aggatgtggagaaataggaatgcttttacaatgttggtgggagtgtgaattagttcaatcattgtggaagagagtgtggtgattcctccaagatctagaaccagaaataccatttgacccaccaatcccattactgggtatatactcaaaggattataaatcattctactataaagacacatacacacgtatgtttaytgtggcactgatcacaatagcaaagacttggaatcacccaaatgtccataaacgatagtctggattaagaaaatgtggcacatatacaccacagaatactatgcagccataaatggatgagttcatgtccctttcagggacatagatgaagctggaaaccatcattctcaggaaactaacacaagaatagaaaaccaaataccacatgttctcactcataagtgagagtagaaaaatgagaacatttgaacacaaggaggggaacatcacacactgggacctgtcgggaggtaggggattaagggagaaatagcattaggagaaataccaaatgtagatgacagggtgatgggtgcaggaaaccatcatggcacatgtatacctatgt

SEQ ID NO: 741437 - DNA, 624 bp, Homo sapiens
tgaaggtccttgcatttggatggagctttttccttttatgttctctgagggccttgaggctctgactgtgttgtaagttggatttagtcagttggcttcatttgtggatgatttcagaaggccaaggcttggcccagcactgccgtgctgcatgctctagtccttggtggctgggcccacacctgcagtttttttctctggtccctcaaagttaagaacctgctgtgttgtaggggctgagttgcttccagtgtgctgataacaatactcctactgggtggggctggggtggggagtgccatcataagcacttcagcagggtggtggtgccagcagccagttggtggtgagtacttctgatcatccaaaagtgcyaatattcattcaattgacagagatataagttaaagtattcaaagtcatttttcataagaattcaatattttaaattaaaggaatgtttttaacaaataaaactattaatatcaccatctagcctacaaacaaaagaaataaagagacgttagcagtacctattataaatgtttctcaagataggaaatctaagaatttcacctctaaaacctgtaactattacatgattatgaataaaaagatctgtat

SEQ ID NO: 741438 - DNA, 598 bp, Homo sapiens
ctttgcagctatccccaccttccctccagtttcataatcctcacgcctggaaggtccaagctaccccgaaagcttgaaacatgtgtgcacgtttgggcacacacacaaagactgcatgggcttctcaagtgggcttacactcatactgctaataatatatatttcctttccttttgaaataacttaatcttttttgagaggaaatagatcacttttattttcagctctatgtatatggatctacacacacacgcacgcgcgcgcgcrcacacacacacacacacactcacattttggtctgtcagattttcctctccgtgccagggaacatgtgttcccacagaatggagagaagccacctccacccaccttgcatattctctcctggatccaagcttctaggaaatgagttccccaacgagaaaaatcactctcctagagccacaggcccacatggctatccatggagctcctctgctcctgtttatagaatttctactgctgaaatgtttctaacagaattaaatttgaattgtgtgtaatgaggttggcttagattgtatcatctatgccctttagcctttgcacttaggttcta

SEQ ID NO: 741439 - DNA, 617 bp, Homo sapiens
agatatggttttgccatgttgcccaggctggtctcaaatgccagggctcaagcaattctcctgcctcagcttcccaaagtgctgggattacaggcgtaagccaccacaccaggttggaaatgtaaggtttgacatttatattagacattmaagtggagaagtgaagtgggcaactgaatgaagtctggagttcaagagaaagatcagtttggattcctgaattggaaaattcttagtggagagatggtgtttaaagagagagagagaactggctggagacatatctgagttgatgagagaagggatccactgaccctgtggagaggttggcaccaggcaaaagcccagttaattcattttaactagggggcaggccaattagggaagtgaagatatagttggtagacctgtgaaagtgttcttctgttaacttctatttctcagtgaattgaacagaaagctcatcagctgagagagaggtggatgaatgaaagactgggaggttgaggacagagaagagttgtgaactaattgccaaggagaatgatggcctagagaaatgaattaggacctctggacaccttgcacactgcctggctcagagtcaggctcaataa

SEQ ID NO: 741440 - DNA, 586 bp, Homo sapiens
ttgttaacgcgtcaatgaacattagggcttaaagagggaaagacaattttataccccagtacttactgataaatataagttcatgtacacatatttttatcttatattattgtattcttaagcagcctatagggagaatacaatgaacttaatatataatyatttatgtaattcttaagagcactaactttggaagaggataaaaatggggtgaatttcagctaaaccacttaatagctacgtgatttctcttaccctcagtcttttcatctgcaaaatatgaacaattatacttagaaggttgttttcttgattaaatgacatatgtaaaatttaccccaaagctagcagatcaaggcagctattgttatacgacatttatggagcacacgctggatatcagcctctgctgggggcttgcttcacagcaatcctgtgagctggagaggctctgagctagcaagtactgtgtccaagattacacaactaaatgagaagcatttttaagtccaattttccatctgatttcaaagttgttatcgtttctgctatctcacagagcatggctatgaatccccttctgata

SEQ ID NO: 741441 - DNA, 613 bp, Homo sapiens
gccagtacaaatgcatgtgactcaatcaacatcatgaaaccactttttggaatgcctgatgttgacaaaatgtgatcttgtgacaatgtgatacatttatttaagccaccttgtggtatcaaattggcaccattgacaacatacttcttagacgctaagtgcaataatttgttgcctctcattttcctacactgctttacttcattaaatctgcatcattaaaaatatttatagcattgctgaagtcacttcccaggagctaaggaatgtctccatctgtatgctgatccagttcctgctggcatttgcttggatgcagaggccatccatctcttgccattgatatttgtcaattgatgctttttttccttctttcctggtgacttargaaaggttctgatgctatatctgctacagatgccaccatggccagctaattttttaatttttgtttttgtagagacggagtattgctgtgttgcccaggatagtcatccactcctggcctcaagtgatcctcctggctagtcctcccaaagtgccaggattggaagtgtgagacacctctcccagccccagtgcttgatatttaagagcttcaggcatggaaaga

SEQ ID NO: 741442 - DNA, 632 bp, Homo sapiens
agcagccagtgtagacagaagtgtgatcagttacctaattcgatcatgcatgatggatatatattagttgctcaggaaaaatgtgtattcttagacttgggacatggagaaattgttactacggggttccgtagacacaatttgctgtgttgttctgaaccaagttcttaataacattctgataataagtgtaacagagagactataaaacctcttggtgtctgccatgcttataatgccaaagtgtccctcatgggattgatgaggaatgattgtccaggaacgcagctttctatggccagatgcaacaagagttttcatggaatagacattctatctgacatcaaatcttgtttatttatttttcataaatgagctgtcactaagtcttagagaacagaactggtgacatgccagtccctgatttaaagactcycagggcataatagctgtttgcgacatgtttctcacttttccttccttcccatgcttgagtccccagtttctagagatttctttcttttttccccctcaccaatgcccactcttgaaaaagcaccgattagtgagagccaatctctggattctttgctccaccttaggagggcagtcattgtttttgatatcattta

SEQ ID NO: 741443 - DNA, 647 bp, Homo sapiens
aactttagcctgtcgactgttttctttcagtgttggcaaagccagcactgaaatgtatggaagagatagaaaagtgagagaatagactgctaagcagaacttccaactatggggaagaggctattaaaatatcaattcattaactcattcatttcttatttatccatccattcctttgctcacaaatatgtattaaatacctagtgtgtgtgtgcctagcagggtgctgggctatgaggacctaacagtgaagaaagattagagctttgtaccaaggaaactcacagtttagtgaaactataaaattaaacaacgaattgcacagttagctgtgtgatccaggagacatgcargtagccatgaagaacttggctgagtggaggggacaggcaggagagacgcctcaggaataaatgcagagcctaactctgaaatgaatgcagaaatcatcatggtgataggagatggtttaggaagagcttgctgggtgggaggaacagcatgagcaaaaacctgaggaaagcaagttccaaattctggaccggccagtcagtaataacaatgattggtccttccttctgaaatactgtacagaagggtgcatttacttttccccctgctaaaacaggcatgtaataagggtcacc

SEQ ID NO: 741444 - DNA, 542 bp, Homo sapiens
tgcaacaattctcaagaattgagcacactgaatccaacagcacatcaaaaaatatatatatatatatacatatatatgccatgatcaagtggaattttctccagggttgcaaggatggttcaacatagggaaataaatgtgatacatcacatcaacagaatgaaggacaaaaaccatatgaccctctcaaaagatgtagaaaaagtatttgataaaattcaacatcgctttgtgataaaaacygtaaacaaatggggcatagaaggtaaatacctcaaaacaaaaaggccatatatggcaaatccaaagctaacaaaacatcatactgtatggcccacttttgtgactcctagtcaacatagtactggaagtcctagccagagcaatcaggcaagagaaagaaataaaaggcaaggcatccaaactggaaaagcaatcaaattgtacctctttgttgacgatatgatcctatagctagaaaaaaactaaagactccaccaaacaactcttaggtctgataaataaattcagtaaacttgcag

SEQ ID NO: 741445 - DNA, 638 bp, Homo sapiens
tgggcacacactgatatcagttacttgatctacttcgttttgctttgggtaaattatttgaatgagctttgtgattttgtgtgacaaattgcttgtttttgtttgttctgtttgttgttttctcattcttgttcttagaggcaggcaggcattcatgtgtgcatgtgtgtgttttaatggacagttttgtgtgctgtaattttttgtacttctttataccaaatatttcaaatacaaacatacrcacacatatatgtactgaatacctgtatttgtggtgtctgtttacattttctgtcatgtagtcactaagcacacaacgtacacttaaaggatgtcaaaactgacagcctcagcatgattgatgacgctctggtagattgattcttaccaggtgtggtgtgatgggaattcaaatgctgttcagagctcttatttgtgttagtaaagttttgcttttctgtaagtttttgggtggaaagaaggcaggggaagcttctgaaccggtaattgtaaacccttgtttaagatatattgaatatgtcaagaaaaaatacacggaattttttcccaacatgggtatctgatgcatgttatccatttttatatatttacttttcaactcacacctatgtagt

SEQ ID NO: 741446 - DNA, 638 bp, Homo sapiens
tgggcacacactgatatcagttacttgatctacttcgttttgctttgggtaaattatttgaatgagctttgtgattttgtgtgacaaattgcttgtttttgtttgttctgtttgttgttttctcattcttgttcttagaggcaggcaggcattcatgtgtgcatgtgtgtgttttaatggacagttttgtgtgctgtaattttttgtacttctttataccaaatatttcaaatacaaacatacacacacatatatgtactgaatacctgtatttgtggtgtctgtttacattttctgtcatgtagtcactaagcacacaaygtacacttaaaggatgtcaaaactgacagcctcagcatgattgatgacgctctggtagattgattcttaccaggtgtggtgtgatgggaattcaaatgctgttcagagctcttatttgtgttagtaaagttttgcttttctgtaagtttttgggtggaaagaaggcaggggaagcttctgaaccggtaattgtaaacccttgtttaagatatattgaatatgtcaagaaaaaatacacggaattttttcccaacatgggtatctgatgcatgttatccatttttatatatttacttttcaactcacacctatgtagt

SEQ ID NO: 741447 - DNA, 638 bp, Homo sapiens
tgggcacacactgatatcagttacttgatctacttcgttttgctttgggtaaattatttgaatgagctttgtgattttgtgtgacaaattgcttgtttttgtttgttctgtttgttgttttctcattcttgttcttagaggcaggcaggcattcatgtgtgcatgtgtgtgttttaatggacagttttgtgtgctgtaattttttgtacttctttataccaaatatttcaaatacaaacatacacacacatatatgtactgaatacctgtatttgtggtgtctgtttacattttctgtcatgtagtcactaagcacacaacgtacacttaaaggatgtcaaaaytgacagcctcagcatgattgatgacgctctggtagattgattcttaccaggtgtggtgtgatgggaattcaaatgctgttcagagctcttatttgtgttagtaaagttttgcttttctgtaagtttttgggtggaaagaaggcaggggaagcttctgaaccggtaattgtaaacccttgtttaagatatattgaatatgtcaagaaaaaatacacggaattttttcccaacatgggtatctgatgcatgttatccatttttatatatttacttttcaactcacacctatgtagt

SEQ ID NO: 741448 - DNA, 634 bp, Homo sapiens
ccatgaagctctgtagtagtaagctccttcccaatccctaaaccctaacaaccactgaaagggtaatcgtctctatagtttccctttcccagtatgacttataaatggaattatgcaacatgtagcctctggatctggcttccttcacttgataaaatatgttgaacatttatccgtgcagttgcatatgtcaatagcttatgcctttatattgctgagaagaattacatcatatagatgggtcacagtgtgtttatccatatgcctcttaaagaacatctgggcgattttccattttgagatatcacgaacaaagttactataaacatccatgtacacattttggtgtgaatataagtttttaattcttttraataactaggagtaaaagtacttggtcctagagtatgtctaactttatgagaaaaagtgctaaactattttccaaagtggttgtatccttttgtatttccttcaaaactgaataagagttcctattgcctggatcattggtattgtcaggtttttattgctgctatcattgtttagtttagctttgacattctagtaggtgtgaaatggtgtcaaattatagttttaatttaattttcctaatgacttatgatgttgaaca

SEQ ID NO: 741449 - DNA, 589 bp, Homo sapiens
atgatgcatagcactttggggccagaccattaacgtgcagatgaaattctctcccgaattatctgccagttgagatggtggttgcttcaacactcagggtcctggagcgaggcagcctggggcagagtcccagccatattgtggtgctgcatatgcacgatgagcaagaaataaaacttctttctttctttctttctttctttctttctttctttctttctttctttctttctttctttmagcagagagatacactggttgtttgccaccatggaataacctggtttattctagcttattagtaagagctcagtactgaaaagagaaatgataatgatgaaagttgtaatgagcaataatactaatacatatatgtgtgtatatatgtatatatgtgtatatatgtgtatgtgtatatatatatatgtatgagacaggatctcactttgtcactcaggttggagtgcagtggcacaatcttggctcaatgtaacatctgcctcccaggttcaagcgattctcccacctcagcctccagagtagctgagattacaggtgtgcaccaccacacctggctaatttttgtatt

SEQ ID NO: 741450 - DNA, 538 bp, Homo sapiens
gctctaaggaacattgttcaagaaaggattccttcttctccctgataccatccatggttttagtaattacctccctgacttaatagaattcaattacttagaaataatatcagatagacattaaagattttaatattccatcaagttggctgtaccataaacatttcattgtcatttacaataattagcaaactcccagtgggcagacatgtcaccctaactgtraaaagcattacatagtcaacgtgtaatgacttaaacaaaattctcaggtcgctatggaaaggaacattaagtagaagcacagctgcacaacactgcaagtcttggcacaggccataccctccaaattttgttgtttttctggatgatgaaataagagacaaagaaaatgctgtcacacagcaaatcatcagaggagccaatgttagcaatctgttaccaaccctggttccaagatatgcctacttgttctgccaactatccctatgtacagtccagaactaatcccagttttgattcactaaaccaacagata

SEQ ID NO: 741451 - DNA, 538 bp, Homo sapiens
gctctaaggaacattgttcaagaaaggattccttcttctccctgataccatccatggttttagtaattacctccctgacttaatagaattcaattacttagaaataatatcagatagacattaaagattttaatattccatcaagttggctgtaccataaacatttcattgtcatttacaataattagcaaactcccagtgggcagacatgtcaccctaactgtaaaaagcattacatagtcaacgtgtaatgacttaaacaraattctcaggtcgctatggaaaggaacattaagtagaagcacagctgcacaacactgcaagtcttggcacaggccataccctccaaattttgttgtttttctggatgatgaaataagagacaaagaaaatgctgtcacacagcaaatcatcagaggagccaatgttagcaatctgttaccaaccctggttccaagatatgcctacttgttctgccaactatccctatgtacagtccagaactaatcccagttttgattcactaaaccaacagata

SEQ ID NO: 741452 - DNA, 587 bp, Homo sapiens
cttttacttaccacacactccagctaaagtgattattcaaactactacctagatcttctaaatacacgccgtacaactttcttttctttgaaacatcagacataaagtaaacaccaataaatactgtgatgttcttaaaagaatcattctgtatatatttcttagaagttgatgtcrtggatacatgtcacagttttcttatgattctttcttttattgagacagagtctcactctgtcacccaggctggagtgcagtcatatgatctcggctcactgcaacctccgcctcccgggctcaaccgattctcctgcctcagcctcccagagtagctgggattataggcacgcaccaccacacccggccaatttttatatttttagtagagacggggtttctccatgttggccaggctgatctcgaactcttggcctcaagtgatcctcttgcctcagcctcccaaagtgctgggataacaggtgtgagccactgagcccagcctctttttttttttttgagactgagtctcactctgttgcttaggctggagtgcagtggcacgatctcggctcactgcaatttccacg

SEQ ID NO: 741453 - DNA, 633 bp, Homo sapiens
gcagggcctctgagcattctctgatctagaaatgccacatgtacacgcatgtgtgtgcacacacacacaaacacccacacactcacacccagccgctctatgacctgatgaaacagtctgggtgcagggctgaggcaggccagggaggagagttagactgagcaaaagcaggatgtgtgtggagcagcctcctggcctctctcccgcagaggcacttcctggtactggagggcaaagcggcccggggttgggaaagagaccggtgctgcttgctccctctccagaacaggcattaattctggctgccccttggtattggcctccaactttatagttctctccctttctttctctctctctctcctacacacacccctctagactcctcccctgcacctcctcaaaatttctcacccaccctcaccccacagaaggagcatcaaagccccacayagcctctggcctctctcaacacctaggagttgagatcaggcccttgtggccagtcttggggacttcccctaccagggttggccctcttgggtccacgcctctttggctagacttctgatcgctctggcggccactccgcagtttcaccacgcctgctcctgcctgcaacacacagaagtt

SEQ ID NO: 741454 - DNA, 625 bp, Homo sapiens
aaagaacttagtttcaacttcttcacagcttctctggaatcgttgtactttgggactccttgtttttgcaggataatatattttcatcttttctgcggccttgttttagttacttgtttatgtcctgtgatgcaaaatgaccacatttctaagaataaatawccaaagaataataataagtagccaaagttctttaaaaattagcatatacaatcaagcagcatactttaaaatgttgtaaaataactaaattggatgccttcttgcattaataaggtgcttcagcattcaaaaactggaaacatagtatgttacatcgataaatcaaaaataaaagccaaatggctggtggtgattgagttttttcaatagatacaaaatatttaatagaattctgtatccattataaaaatgtttggtaaaataaaaataaaagaatatttcttaaatattttaaacactatttatcagaaattagtagtaaactttgtgttaaattctaaaatttaaaagcgttctgactaaagccaggaacaagataagtatgcttactgtctgtattactaagtactattttgtacaggctacagaatggaggaaatataacaaataaatgaggaaaaaa

SEQ ID NO: 741455 - DNA, 604 bp, Homo sapiens
gtaaaggcatgatcagtgaaatctggtaagagataactcccttcttgctctcccagatcccatctcaacctttactctactctgcgcccctagagggtgatgtctcagggatgcacaaacaaaccaaactcccttctctctagcttctttgggttctataatattattgggaggcaacagtaggaaattggtgggcaggaagagcaagaggtctggagatttattctccagttcctgtccttcctgtccaagcattttacaacctgaggacatagctgctctccagaggcccttctctgatagctaccgtctctctgaatcaggcaattggcctctcttctggtatcttcaggaccaggcatagtagctgcttcttaccygtagccctaggtgtgctccaacatccttctttggtttccgttaactgcccacaccaacgtaaacagactcttcattaaactccccttacaccctttgggagtatgccatctggagcaggcactgctggttctctgtgagcagaccctaggcatgcatcatccctgctggtcttcttgcagcaagcacctgtggctctgcctatgtgctctctccagccccaggg

SEQ ID NO: 741456 - DNA, 565 bp, Homo sapiens
ctcacttcatgtctctgtgtcacactttggtaattctcacagtatttcaaactttattgtcattatatctgttacggtgatctgcgatcagtgatctttgatgttactattgtaattgttttgagccaccactaattgtgcccatttaagaaggtgaacttaatcaataaacgttgcatatgttctgttaataatcaataaacttaatcaataaatatttgcatatgcaataagcatttgtatatgcaaatgttgcatattgctccactgactggccgatcccccacctctctccctctcccagggcctcctgtttcttgagacaccatgatattgaaatcaggacagtgaataacccaacaatggcctctaagtgttcaaatgcaaggaatagtcaaggtctctcactttaaatcaaaagstacaagtgataacgtttagtgaggaaggcaatgtccaaagcccagataggctaaaagctaggcttcttatgccaaacagttaagatacacatgcaaaagaaaagttcttgaaggaaattaaaagtgctacttcactgagcaca

SEQ ID NO: 741457 - DNA, 507 bp, Homo sapiens
atatcgcagactaaggtactcttaaaacttccagaccaaaaataattttcaaatattggaaaaattccaataaatattattttgaatgcataactgaacctatataaaatgaagtccaaaatgaacagggacaaaaaaattagaattgtaaggacatttatcaaacatagtaatctacagccttgtattataatcagtatataggaaacagaaaataagggtttgggtctgtacagtatgaagacttgaaaccaaggtcctcccagaaagatagaaaccataaaaggctacccatgtagtcaatttgtggacaagaaagcgttaagtgwggccaagagatacctgaaaaaatgttctctctcagcttagtctctaggagaggaaaaacaaaataaaagcattctttgatagattttaacaatggaactgccatctatgagtttgattaaacttaaactaccagctttgtctgagaaacagcaaaacttaaaatgatcttgggttagt

SEQ ID NO: 741458 - DNA, 631 bp, Homo sapiens
gtgaatgatgatttctacaactagatgggaggtagtgtagagtgggctgcaggctcgtcagatctcaacttgcttgatcccaccttctaaggtatactaaaggtgaaggcttattcattgaaaatcagagacacaaatcctccaaggcaatgcatcacagattgtgtggtacactgatggacatgctgtgttaatgactgcatttgttacagtttgcacagtgcatcctgctaggcagtgctcataagggacagcacattaaacttatcatgttatgtcactgaacatatcatgcaatgtgatgtagtatcagcatactattcattgcatatgtttcccagggtttccagattaatagctatcttgaagaatataaaaaaaattcataggtttaatatacacatatacatgaaggtaagaaacatgttagtagcaaaaaatgacaaatasattacctacaaaaagaaacacatgtatctgcacatgtttaaaaaaaaaaagaataaaacctgtgctcagagcagaggattatcacagaggccagtagtataaggcaaatataaaagggcaaaaattaaaaaaaaattctactcttcaaaaaattttattttttatgtctaaaactgagatg

SEQ ID NO: 741459 - DNA, 527 bp, Homo sapiens
ttaacccacatctcttacctgttgaattacattgttttatagtaaggtacctgaccctttttggaatgttagaggtttcacatttactaaatatatttggctaatttgggccttttccttttttgaaataaatttaggactcgctggtaagttgagtgtataaatctgctgagattttggttgataatgtttcacatttaaagattaagccagaagattgagtcttccaatccatcacttttatatgttttactatttactccattcttttaagcccttcaacaaagtgttctctataaaggtgtttcacatctttaagtttattcrtatcttctaaatttttttttgttcttactatttttaagtgggatctcctaaaaagtatacacttctaataatttggtacatatcttaagaacactatccattttggtatattgttcttttatctagtaaacaaactgctctcttactatatctgatttgcctctgggttctcttccattttctgtggagatgctgataat

SEQ ID NO: 741460 - DNA, 641 bp, Homo sapiens
taaaagtaaaaatagccgggcacggtggctcacacctgtaatcccagcactttgagaggccgaggtggttggaccttgaggtaaggagttcgagaccagcctggccaacatggtaaaactccatctctactaaaaatacaaaaattagctgggcatggtggcgggtgcctgtaatcccagctactcagaaggctgaggcaggagaatcatttgaaaccgggaggcagaggtttgcgttgagccgagatcacactgttgcactccagcctgggcaacaagagcgaaactctgtctcaaaaaaaaaaaaaaaaaaaaaagcaaaaatgaccaaggcaaaatagctccattctgaattacacatccaccttctgaaggtaaccaatgctgtcagaatccagcttggtaaatactctgtttttcttttcttttcttttyttttttttttaactgagagaacatatacaaaatcaactttatcttatcctggaatcacattctactataatgaaagacagatagccttgtctcaagaaaagtaaaagcaagaaagtagctctagcatggaggtgatacccaaatataaacagggctggtttcagaatttctaagcaggcttccaagaaacaatctgattggaagca

SEQ ID NO: 741461 - DNA, 479 bp, Homo sapiens
taagatctgcttctgtttgtttgtatgtctatatgtgttatgtgtatgtgatatctggtaaataaagatagtttttaatttattggtaaaatagaaatgtcttcaaaattatcagttgaatataattagatacccacttgatttgactgtgagcttatgtctttggtttagagtctctggattcaggggtctggataggtggccatgatgacatctggagacacgttcttagagtctagaccaccagctacaagcccaatatggcctcttcctcctctgctttccctgttttgcctmctggctattgtgggagcggttggatcctccaagtatagtcttcacagctctggcttctgtcctgatggactcaggccccgatgttcatagtcctcatggggggcacatggcttcttgggacttagaatgactgggaagagacattagggaggctgcctgtgtcatagcttcaaaattctttt

SEQ ID NO: 741462 - DNA, 646 bp, Homo sapiens
aagagtggggtctgatggagagggcagctatctcctccccagaagcagtctgctcagaagcccttttccttttttgttgcaaatccatattaagtaagcagtttccttaccaaaaagaaggcaacctaccacactgagggacatcacagtagtcgtaaagttttcttggatttgtcgtgtagcaccagggaccacctacatcaccatcagggttacggcagtactgaaaacaagaaggcatgtaagctccagctcacgtggggcaggagagggagaaggtgttccaaggctcacrcatttcatgtctatccttagaagacataaaggagtgtttctttttccttccttcttttttttttttttttttttttctgaggtggagttttgctcttgtcgcccaggctgagtgcagtggcatgatctcagctcactgcaacctccatctcctgggttcaagcgattctcctgcttcagcctcctgagtagctgcaactgcaggtgcacgccaccacacctggctaatttttttttctattttcagtagagatgaggtttcaccattttggccaggctagtctcgaactcctgacctcaggtgatctgcttgtctcagcctcccaaagtgtagggattacaggtgtgagcc

SEQ ID NO: 741463 - DNA, 600 bp, Homo sapiens
gtaaataaaaattgttttgtatagctgacataggatcacatcaattgcacgaaaaaggtcagtctgtgcaaggaacttacaacgtcgaatggggcatgttaagaaggcgtaacccatcacactggcttttctgctgttcgaatttttttctggtcaaaaatacaggtgctaggactccctgagcccagcaggtgttagaacagaggaaggcagagggcggcctcctgcaaaacatctcctacwcctgccagtttctaatccagggtccaggggctggagcatccgggctcccggtgcttgcgcttggaaacagaaatgccctcccacaagccccacttctctcaggggctccgacccacctacctgaggatcagtccgggagccagcgtctggacagagcggggtcgcgccctggaacacagggcaggagaggaaggagaaaagcccagctgacagcgcaggggcgagcgtcctgcctttcccagcggccttggcctgacatcctggcctgcgggagggggtccgcccacccgcgccctgtccatgtctccgccccgttccagcgccccgtgtccgcgccctcctcctgtcccttgccac

SEQ ID NO: 741464 - DNA, 578 bp, Homo sapiens
aagattatcactgaaaagaagttcacaatttcatgcacacacataaaaaagttataggcccaaagcaatataaacatgagagcctaggggaggttaacagcatccagtctggagccagagaacttgagggttattctgagtttctcatttctctgtgatcttgagcaagttatgggattctctttgcctcaagtctttatgttgttaaatcaagtttagactaaagctgrctttttacatattttaagttcagcctaaacgtttctctgtacatagtgaactataacctcaatgaagatgtaaacagactgaagcctatttttatgccaatcaccaagttttagccaatcaagggctaactgttcaaaccatgttcaagttcaaataaggcaaatgcccgcttagctgcaaccaatttggttgtttctgtacctcacacctgttttctgcatgtcattttcctttttctgtccataaatcttctaccaggtggctgtgctggagtctctgagcctactctggctcaggaggctgcctgattcacaaatcattctttgctaaattaaactcttatattt

SEQ ID NO: 741465 - DNA, 578 bp, Homo sapiens
aagattatcactgaaaagaagttcacaatttcatgcacacacataaaaaagttataggcccaaagcaatataaacatgagagcctaggggaggttaacagcatccagtctggagccagagaacttgagggttattctgagtttctcatttctctgtgatcttgagcaagttatgggattctctttgcctcaagtctttatgttgttaaatcaagtttagactaaagctggctttttacatattttaagttcagcctaaacgtttctctgtacatagtgaactataacctcaatgaagatgtaaacagactgaagcctatttttatgccartcaccaagttttagccaatcaagggctaactgttcaaaccatgttcaagttcaaataaggcaaatgcccgcttagctgcaaccaatttggttgtttctgtacctcacacctgttttctgcatgtcattttcctttttctgtccataaatcttctaccaggtggctgtgctggagtctctgagcctactctggctcaggaggctgcctgattcacaaatcattctttgctaaattaaactcttatattt

SEQ ID NO: 741466 - DNA, 578 bp, Homo sapiens
aagattatcactgaaaagaagttcacaatttcatgcacacacataaaaaagttataggcccaaagcaatataaacatgagagcctaggggaggttaacagcatccagtctggagccagagaacttgagggttattctgagtttctcatttctctgtgatcttgagcaagttatgggattctctttgcctcaagtctttatgttgttaaatcaagtttagactaaagctggctttttacatattttaagttcagcctaaacgtttctctgtacatagtgaactataacctcaatgaagatgtaaacagactgaagcctatttttatgccaatcaccaagttttagycaatcaagggctaactgttcaaaccatgttcaagttcaaataaggcaaatgcccgcttagctgcaaccaatttggttgtttctgtacctcacacctgttttctgcatgtcattttcctttttctgtccataaatcttctaccaggtggctgtgctggagtctctgagcctactctggctcaggaggctgcctgattcacaaatcattctttgctaaattaaactcttatattt

SEQ ID NO: 741467 - DNA, 447 bp, Homo sapiens
gactgaatgaattgcttcagggtgttttagggagtgatttaatttctctgagtctatcaaatgagcacagcgatgctggcttccgctgtcttaggagtcagagaccacgcaaggatagagccctggatccagcagattctccatacatgagagctgctgttgctgctgtggaatttaaaattttcattttctagaccgcccactttgaatgggactcttccraactgtcttaattcttgtttcccggcggctgtgacaagtccagcagtgtcttttttagcttctccagtccatttctgttcacagaaagcaagccatttagcattatctcaatagaaagtatttgtttaggtttcagttttccacattaacttgtagtggttgaactaaatgaatattttaaattctaagaaattgttttttgcaattaagggactattgggagtt

SEQ ID NO: 741468 - DNA, 433 bp, Homo sapiens
gaattaaaatgcaaggcataaaataaatatccattcagccatactggtataaataaatgattgaatacattaataaatatgtagaagagacatcttccatgcagaaggattccaaataatttatatagacactctaccctgaaggactttcttcsaaagagtatgatatggaaaggtggggagaagcagggagcaactttacagtggagaaaactgacatgcactgcctcagccaggtgatcaagggcaacaccagcagtattaaatcatgtagatagtacatatatctgatacgatgtgactaaaatggcactttatctgtgtgatcctcctccaaataacccataaccccagtcttaccaagagaaaaacacccatttgtgtgcccaattgtggtacattctacaaaataccagaccagtatttctcaaaa

SEQ ID NO: 741469 - DNA, 650 bp, Homo sapiens
agctctgtggccttggtcaaataacttaacttgtctgttcatcagcatcagcagcacccagatgtatcttacagggttgtgagaattgaatgagttgataatacttataaaagcacctagaacactccttagcacataatcagagctcagtacatgctcattgttactgttgttattactgttagtattaatattattagaattattgggactaggatgtggttcaggtacctgaaaagccacagtgcaccctcagtyccaggagatggcagatctcccctcctctcttaagtccactgattgactggctcagctgtccatttttgcctgctcttgtttccctagtgctaactgcctgcccctccttgatcctcagttcatacttctgagacaaggaaggacatgagttgcctcgtgcattaccttttccttgtctgtgccgagcttttcaggacagaccagctcacagcctgctctccagcctgaggcctggctggcctggtccagttgaccatggttggggtgagcccagctctagttgatctcagaaggggaatgtgggcacaaaggaaggtcttttaattatgggattttcaattattctggaaagaggacttgaagagtataaaagaaaggttaaaataaccctg

SEQ ID NO: 741470 - DNA, 614 bp, Homo sapiens
tggctctggagcacttgaagtgctgccagtagtaaagtaaacaccagtttctgaagacttcttgtgaaaaaaagagtataaaatacctaattcatagttcttttcaaatgtttagtacatgttataatgatactatttggggggattttcattggtttttttgatactatttttgaagtagtgtgttaaaagaaaatattacaatctcacctatttacttttactatttctaacatagctcgtagaaaatatagaattgcacacgtaactcaaattatatttctaytgaacagtgctgatctagaaaaaagggtctgttcttttgttggttggacttttatttttacttttttattgccactaataatgggtgttcagattttgagagtttactccttttctgggaagaaccacttgttctttgaccattgtaggggagccctcattctatccagtttctccaagagcaaaagaaattattttgagaagtaaaaggtaacttctgtaactctgtaagttacctctacaagtctgagcatttttacactagattaagcaaacctctttaacagcctctagtggataaggaagggaatgagccacaagtctttttt

SEQ ID NO: 741471 - DNA, 619 bp, Homo sapiens
acacaacccacggagaacaaagacgagtaagacaggagagcctcccaccaggagtggtacggagccaggagaggcccccaacatggggaaatggtgagtgagtcagagtgcctggggacccacacttctgccaggggacttttgcaacactgggctcaggagaacacccatgacctctcccaaccggggcctgcagactgacagggagagctaggtggagtctgggtggagccgccactcaggcacatgcagagtgctggtggccttggatcccagggcaacccaacaccagcggctgcagttccggcaacagggaaggtcaggctccttcccacaccaccaagatagagaccacacccacgggrctgtgcagtggacaaactgcagggctcacctgcactgcacctcctcagacaaggtccactggcctgggaccttagcgtagccacccagcgccagctgatctctcaggccactagctgctctgcgcttccctgggacggagctcccagaggtagcaggcaggccgccattttcgctgctccccagcagtccctcctgttgccctcaggctctggagggagcaccgtgattacgcactcacagggacccccagtac

SEQ ID NO: 741472 - DNA, 619 bp, Homo sapiens
acacaacccacggagaacaaagacgagtaagacaggagagcctcccaccaggagtggtacggagccaggagaggcccccaacatggggaaatggtgagtgagtcagagtgcctggggacccacacttctgccaggggacttttgcaacactgggctcaggagaacacccatgacctctcccaaccggggcctgcagactgacagggagagctaggtggagtctgggtggagccgccactcaggcacatgcagagtgctggtggccttggatcccagggcaacccaacaccagcggctgcagttccggcaacagggaaggtcaggctccttcccacaccaccaagatagagaccacacccacggggctgtgcagtggacaaactgcagggctcacctgcactgcacctcctcagacaaggtccactggcctgggaccttagcgtagccacccagcgccagctgatctctcaggccactagctgctctgcgcttccctgggacggagctcccagaggtagcaggcaggccgccattttcgctgctccmcagcagtccctcctgttgccctcaggctctggagggagcaccgtgattacgcactcacagggacccccagtac

SEQ ID NO: 741473 - DNA, 643 bp, Homo sapiens
aggcacatgcagagtgctggtggccttggatcccagggcaacccaacaccagcggctgcagttccggcaacagggaaggtcaggctccttcccacaccaccaagatagagaccacacccacggggctgtgcagtggacaaactgcagggctcacctgcactgcacctcctcagacaaggtccactggcctgggaccttagcgtagccacccagcgccagctgatctctcaggccactagctgctctgcgcttccctgggacggagctcccagaggtagcaggcaggccgccattttcgctgctccccagcagtccctcctgttgccctcaggctctggagggagcaccgtgattacgcactcacagggacccccagtacagcacagctgccttacagtaaagcggccagattgttttccacatsggtccccagcccagcgccttctcactgggcagggcctcttgacctggaatcccagccaccccttgcttggaccattgggctggtaacagttctgcacttccctgagatggagctcccagaagtagcaggtgggtcgccattttcgctactccacagcccttgctcctgttgccctcaggctgaggagtgcagtgattagggactcacgcggggctccag

SEQ ID NO: 741474 - DNA, 485 bp, Homo sapiens
tgtgtgagcaaaaactcagttacatgtaaaaaacccaattccccctgaagaagagaaagagctggagtcctttaaaatcaactgcctgtttttctgtggctagtgagccttctctctccctttcccaggcattgtgaagactgtttctctagctrtgcagctgtaaggtcactagacagataatctcaagtcataaaacatgttgttccttaaaaagtaaaaagtaatataatgcatgtctcagttaaataactgtctttgcttctcgtttctataataggcttccccctgcacagatctcccctcgccccacaaaatgcttaaaaggtagcttgactctttgttcaaggctcagtcctttaaatgttaatccgactcggtcggtgcatctaaataattgaataattcctcctcaacccctcggtctctctgattctttaattatcccactgcatttctggtggcccgtacaggaactggagacg

SEQ ID NO: 741475 - DNA, 485 bp, Homo sapiens
tgtgtgagcaaaaactcagttacatgtaaaaaacccaattccccctgaagaagagaaagagctggagtcctttaaaatcaactgcctgtttttctgtggctagtgagccttctctctccctttcccaggcattgtgaagactgtttctctagctatgcagctgtaaggtcactagacagataatctcaagtcataaaacatgttgttccttaaaaagtaaaaagtaatataatgcatgtctcagttaaataactgtctttgcttctygtttctataataggcttccccctgcacagatctcccctcgccccacaaaatgcttaaaaggtagcttgactctttgttcaaggctcagtcctttaaatgttaatccgactcggtcggtgcatctaaataattgaataattcctcctcaacccctcggtctctctgattctttaattatcccactgcatttctggtggcccgtacaggaactggagacg

SEQ ID NO: 741476 - DNA, 622 bp, Homo sapiens
ttatataaaatggcacagtatttgtctataacctacacacatcctcccatatactttttgagacggagtctcactctgtctcccaggctggagtgcagtggcgcgatcttggctcactgcaagctccgcctcccaggttcatgccattctcctgcttcagcctcctgagtagctaggactataggcgcccaccaccrcgcccagctaattttttgtatttttagtagagacggagtttcaccgtgttagccaggatggtctcgatctcctgacctcgtgacccacccaccttggcctcccaaagtgctgggattacaggcgtaagccaccgtgccggccaggatggtctacagtttacaaagcctttccataatagatatcactccattggagcctgtgcagaatgaaagagttctgaactgacaggactgcctgaatttaagtcttcagacctgaggaccaggaaccaatatgaacccctacaggctgccaatgacaagataggagggccctacactcctttacttcacaaaagtctgcacccagaaccacgaaatatagccagcggggcaaataaaatgaaaaatcactcctttcaagtccaccatccatcttaaagcac

SEQ ID NO: 741477 - DNA, 622 bp, Homo sapiens
ttatataaaatggcacagtatttgtctataacctacacacatcctcccatatactttttgagacggagtctcactctgtctcccaggctggagtgcagtggcgcgatcttggctcactgcaagctccgcctcccaggttcatgccattctcctgcttcagcctcctgagtagctaggactataggcgcccaccaccacgcscagctaattttttgtatttttagtagagacggagtttcaccgtgttagccaggatggtctcgatctcctgacctcgtgacccacccaccttggcctcccaaagtgctgggattacaggcgtaagccaccgtgccggccaggatggtctacagtttacaaagcctttccataatagatatcactccattggagcctgtgcagaatgaaagagttctgaactgacaggactgcctgaatttaagtcttcagacctgaggaccaggaaccaatatgaacccctacaggctgccaatgacaagataggagggccctacactcctttacttcacaaaagtctgcacccagaaccacgaaatatagccagcggggcaaataaaatgaaaaatcactcctttcaagtccaccatccatcttaaagcac

SEQ ID NO: 741478 - DNA, 622 bp, Homo sapiens
ttatataaaatggcacagtatttgtctataacctacacacatcctcccatatactttttgagacggagtctcactctgtctcccaggctggagtgcagtggcgcgatcttggctcactgcaagctccgcctcccaggttcatgccattctcctgcttcagcctcctgagtagctaggactataggcgcccaccaccacgcccagctaattttttgtatttttagtagagacggagtttcaccgtgttagccaggatggtctcgatctcctgacctcgtgacccacccaccttggcctcccaaagtgctgggattacaggcgtragccaccgtgccggccaggatggtctacagtttacaaagcctttccataatagatatcactccattggagcctgtgcagaatgaaagagttctgaactgacaggactgcctgaatttaagtcttcagacctgaggaccaggaaccaatatgaacccctacaggctgccaatgacaagataggagggccctacactcctttacttcacaaaagtctgcacccagaaccacgaaatatagccagcggggcaaataaaatgaaaaatcactcctttcaagtccaccatccatcttaaagcac

SEQ ID NO: 741479 - DNA, 613 bp, Homo sapiens
gtggcttagaaatccctgaaagagcagtaaactgattattgaaaagctcagaacactggcaaggcttaagtgcaaactatttaatagaaggccacaagaactgttttcctaagaggagctaggaactacaaatgtcatttagtaatgcattgaaatggcattgcctagtgtgagtgttgcacagaaacttcaggtcacttcttctggatctattattttggataagcttccactatcatagcatggccctgtaaagaaaacaaagtccaattagagcaatgaatggtgatgaatccacctmgtacagggacagcagagaacaaggagaaaagtacaggctttggagtgggatcctggctctgccaatcaatcactgtgatcttgggaaagtttgtagtcagtctaaactggaatttcctctacaaaatggggctcatagtgtctacttcatagagtttttgtgggcatcacataacatacagtatatttgtatatgtgtgtatatatatacacacacatatatatttatatacattcatatatacatgtatacatatatgcatcaggctctgtctagtacagaatctaattcctagtgatgctctacaaatgg

SEQ ID NO: 741480 - DNA, 571 bp, Homo sapiens
gcacctgcctggatatgttagacagtctggaaacattgggaagttgatatttagtggagcagacttcaacaaaagggagacatgaactgttagataattttttctctattttaaatgaccttgttgaagacatctcacaagaccaatctgctacacttactgaaaagctgagactagctaattaatgcataccctgttatttcttccccttcttttcctttcttactttatttttccctcactactgtgttcctgggattgcaccataaaaaatrtatgtaaaacataaacttctgctttgaacccagttttctagggaccccaaacaaggatattgtgatttttctgcacatacctataaaatgatttttcttttcaactgagtacatgaataatgttgataaaaataaaatatgggttttttaaaaaaagatggaaaggagtaaaaaaagatactaaagaatgtcctacatctaaatgagaaagtatgctgagaaagaggaaatctaatccaaaaaaacataggattcatcagaagggtgacaaagttttggaatgatacctaaggcat

SEQ ID NO: 741481 - DNA, 589 bp, Homo sapiens
accacagagaatttgtacatggtgtttcttctgccttgaaatctcttctgtttcctctttgtctagtttaaggctgcctatctttcatatctagtgcatatgtgagtccctcagcaaaactttccctaatctccctgattgattctcatagcatcatacatccctcctttgtgtgccaggaacattgcaattttacatttgtttgtgtaactatttgattaatgttcatgttgactgctagtacattctatgaaagtaggtaccatatctgatatcactcactcatgtatgccttggggtctaccacggtgctgaaaatgtggtgcatatttgataaatatttgacgaatatatgaataactgattgactaatttaatgagttcaggtggctactaatgtcgcttcagartgagagtgcctagtttcaaattttggcagttcctaactgcaatgttagggacgattttatctcatttttccttcgatttgttctctgtaaattgggaataataattaccttatagagttttgaaaggattaaatgagctagtatacattaaagacttaaagcagtccttaacacagcaa

SEQ ID NO: 741482 - DNA, 609 bp, Homo sapiens
tttttaaaaaaattctattatctcctcttctaattctgtaagcaaaaggcagagccctggaatattgcaaatcaggattcaagacatttgggttaggcattgtttaccaaagtgtggaaacataccaatggtggcatcagagatgattttagggaacacaccgatgagatattatgtaatattgaattgccctgtgtacagtatagttcattttcaattctttctcagtaattctgagtactccaaggtcagaatctcaagcgggtgcccatatatcctttgtttctctagcactggctaatctccatttttaayaatccttggagaagtaagagtgtccagcaaacattgataacattgttttatttacatgcaatgttcatttaatttcaagtaattatagggtttcattgataccagtaaatgggaaatttctttcaaatacaactgttgaagttaaagatactgcatttattaaagaaaatattacttaaatcatcttacaagctgcagagggatgtggcagcaaatgtgtggcatggaagtctgatgcttgggaaacactgcggtagggggaaaattgcaaaatgtcattggcaaatgcctcat

SEQ ID NO: 741483 - DNA, 474 bp, Homo sapiens
catctgaagcttgaaacactttcttaatgaaatcttgccgttgaatctgtacttactggtaatatgtcattggttaaaatatatttataaaatgtataattgaccagcaggttaatacatttttatcattaatttgaaatttatcaaaatgagaatatacagtacctgacagtagagtttgatcttaatttgatttgaaaattatgatcaggaaaataacctgaatatatgcttaataatataagactttsagtttgcaaaacagaaatcctgacttgactaaaatacacttttcatttgacggagacctttagttaaggaaagattagttttagcattcaacataactaaatacccagcattatgttttacggtttttttcaacaatgatttatgtgtcgtgtttggtgttgcctccaaacagtacctaggatagctgatgcttttactttgagtctttttctttagttggaa

SEQ ID NO: 741484 - DNA, 633 bp, Homo sapiens
gttagggaaatatgtgttaaggattgttatgtcttcttggagaaatgacccctttatcattatgtaatggtcctctttatcactgataactttccttgttctgaagtctgctctgtctgaaattaatatgtttacttcctctttcttttgattagtattaacgtggtatgtttttctttacccatttacttttaatctatatgtgtttttatatttaaagtgggtttcttgtagataatatataattgggtcttgttttttgatccattatgtcttttaaatgacatatttagaccattaacatataaagtgattattgacatagttggattgatgtataccatattcattactgtttcctatacattgtacttattctttgttcctatttttgtctttcactctttttctgccttttacatatatatatatwttttttttaaatttttttttttgagacagggtctttgttgcataggctggaatgcagtggcatgatcatggctcactgcaatctcaaactccttggctcgagtgatctgcccacctccacctcccaggtatttggcactgcaggcacactccaccatgcccagttaacttttgtattttttgtagagacagggtcttgct

SEQ ID NO: 741485 - DNA, 653 bp, Homo sapiens
ggcttagaggtagagtagcttgcccaagtctcattgtggtggagacaatattgcagcccatctgcttttccttcacccttccttctcactgcttcgcctctgccgagacacatacattctgctgcccaccagcgaatcttgtgaagctccaattcaggcttaatatcccactaaagtatcagagcttcatgtagtggcagtcttttacaaactatatatatttataactcagtaaaatacataataaaattctcttgaycttatcctatgacaaatgctggggtaaaatagtcttccaacaattaaattcacccaagaaacacagaatcttatagaggaagcaaacatgcccattgataaagcaaaggaacaaacaaagttggaatcggggaagggaatctatatataaatatatgagatttctgctctaaaaatacacattcttttataatgaaggtcaaatatgtacacacatagttataatacaaaatagaaagaatcaagtaccatgagagatggagaaataatgtgccatagcagttcagaggaaacagaaagcatgcctcccaagaagcaacagtgttgagcagagagaaagttagtttgcacaggggaacagacctgggttcacatcccgagtccactgcaggcaa

SEQ ID NO: 741486 - DNA, 612 bp, Homo sapiens
agaaacaagtgtgagcttagatactgcagcttcttcagggagctcattttgtttaaaagcataccatgttttaaaacttttcactgtggtattttgtactgaagtatttgaggatatatttttctccaaagcagaaatacattatatctagaatgcttggatttcgtatttcctgtgggcaagtagatttcccttcagtgtttcaaggtgaaagctgcagcagagtcatgccctttggccctctggttacctttgtttaatcatctggagaaactgcctgctgaaaagctgctgttgtccctcaggccaaacctgttctaagtccttgcagcctgcagagcaatggaggaaggcaagggaatgaaaaagttcctggccctactttgcttaaatcttccatcttcagcataaactaacctcttycatgtggcctgccagtgcttctatccctgccactcgcctgtggtccagccccactgctgtcccctctacaggaggcattgcagacctgatgaccttcctccatcgtaccaaggattcttacgctcttcttcctcccagcctgctctattctctgctccatgcctagaactacactcctctcctatcttc

SEQ ID NO: 741487 - DNA, 460 bp, Homo sapiens
gaaagtgcttaagaaatgtattttatacaagctgtatccataaaaaacgattacagtattctttcttttttattaagctagatctaacagtatttccatgtggcaagacattgttaacatttaattaactcactataatactcacaagcaattcaattaaaatagtgtatataaaaacattttataagtataagaatattatgcatatattatttatgtttttccgcctctaaaagtrtaccataaaccttgtttttttttgtaccaaaacaagcctcaatttccaaataagtaaagatttactgcagaagtatttattaattctatttgtgacttgtctcagttacaactatttcatctagacaattcagtcttttcagttgcactgtatttaagtacaaacttgaatacagaatacattatcttcaataatataaactaatccattttggcatgaaag

SEQ ID NO: 741488 - DNA, 460 bp, Homo sapiens
gaaagtgcttaagaaatgtattttatacaagctgtatccataaaaaacgattacagtattctttcttttttattaagctagatctaacagtatttccatgtggcaagacattgttaacatttaattaactcactataatactcacaagcaattcaattaaaatagtgtatataaaaacattttataagtataagaatattatgcatatattatttatgtttttccgcctctaaaagtataccataaaccttgtttttttttgtrccaaaacaagcctcaatttccaaataagtaaagatttactgcagaagtatttattaattctatttgtgacttgtctcagttacaactatttcatctagacaattcagtcttttcagttgcactgtatttaagtacaaacttgaatacagaatacattatcttcaataatataaactaatccattttggcatgaaag

SEQ ID NO: 741489 - DNA, 635 bp, Homo sapiens
ccgattagatgggactacaggcatgtgccaccaggctgagaggtgacagagtgctggcagccctcgcagcccttgctcactctcggtgcctcctcagtctcagcgcccattccggccgcgcttgaggagccgttcagcctgccgctgcactgtgggagcccttctctgggctggccaaggccagagccagctccctcggcttgtgggtaggtgtggagggagaggcacgggtgggaactggggctgcgtgccacgtttgcgggccagcgcgagttctgggagggggtggagttggcgggccccacacttggagcagccagccggyctgcaagccccgggaagtgaggggcttagcacctgggccagcagctgctgtgctcaatttctcgcctggctgtagctgcttccccacagggcagggcttgggacctgcagcctgccatgcctgagcctccctccaccgccatgggctcctgcgcagcccgagcctccccgatgagtgccgcttcctgctccacggtgcctggtcccatcgaccgcccaagggctgaggagtgcaggcgcacggcgtggggctggcaggcagctccacctgcggccccggtgcgggatccactgggtgaagccagctgggc

SEQ ID NO: 741490 - DNA, 428 bp, Homo sapiens
tgtatattaagtgggaatattttgttaatttggtggcacagatgtgacttggctactgagtgggactcttctcatctctgctcttagacacacccagccctacatggcttagtggatgcggggtcctcggggttccaaaggggacaaatgcccgggtccctcttcttttcacctcatttctgactgagccacaatctgctacttcctttcttttccatcaattttccaggamggtgaatgcatgcctgggtcaccctcatgtcctcacggagcacagctcttgtctctgtgctctggaatacctctgggggaagctcataggaggggcccacccagcagcacagcttgaggtatatcttctgatgcagaacttcatcctgagccatcgcgtgccctgattctcctcatctctctgggtatttcctggt

SEQ ID NO: 741491 - DNA, 507 bp, Homo sapiens
gaaaagatggaaaggaccctgaaagcactcttgaatataggtttctaataactctaaaatcattatcatttggactgagtaagaattcctgaaactttaatgaaaagaacattgtcaggaggctttcatgcttctagatggatatcatttgttaggtcctttttctatgatttggattcagagaagcaataattagaaatgtatctcccatgatgggatctattgcagatcctactggaaaggctawggttacacaaaaaattttaaattctcttgggaacttctgctaaataatagaattcttctagattactttctggctaaacagaagtatctgtgcagctgctggcccttgtggacaatggaaaaatatattacatcaggtattacagcgatccagttgtaggggattagcgaagatactctttagttaagagagtagagtccatccggctcattcttttgtctgtttgattttaggtggtttaatttatggggaccctgggt

SEQ ID NO: 741492 - DNA, 507 bp, Homo sapiens
gaaaagatggaaaggaccctgaaagcactcttgaatataggtttctaataactctaaaatcattatcatttggactgagtaagaattcctgaaactttaatgaaaagaacattgtcaggaggctttcatgcttctagatggatatcatttgttaggtcctttttctatgatttggattcagagaagcaataattagaaatgtatctcccatgatgggatctattgcagatcctactggaaaggctaaggttacacaamaaattttaaattctcttgggaacttctgctaaataatagaattcttctagattactttctggctaaacagaagtatctgtgcagctgctggcccttgtggacaatggaaaaatatattacatcaggtattacagcgatccagttgtaggggattagcgaagatactctttagttaagagagtagagtccatccggctcattcttttgtctgtttgattttaggtggtttaatttatggggaccctgggt

SEQ ID NO: 741493 - DNA, 507 bp, Homo sapiens
gaaaagatggaaaggaccctgaaagcactcttgaatataggtttctaataactctaaaatcattatcatttggactgagtaagaattcctgaaactttaatgaaaagaacattgtcaggaggctttcatgcttctagatggatatcatttgttaggtcctttttctatgatttggattcagagaagcaataattagaaatgtatctcccatgatgggatctattgcagatcctactggaaaggctaaggttacacaaaaaaytttaaattctcttgggaacttctgctaaataatagaattcttctagattactttctggctaaacagaagtatctgtgcagctgctggcccttgtggacaatggaaaaatatattacatcaggtattacagcgatccagttgtaggggattagcgaagatactctttagttaagagagtagagtccatccggctcattcttttgtctgtttgattttaggtggtttaatttatggggaccctgggt

SEQ ID NO: 741494 - DNA, 538 bp, Homo sapiens
gccacagtgtccactgcgctgattccagcaggggatggcagcatggtgacaggaagtcacacttaataatgcagacaagagggaaaggagacccacagacacagggagaaaaagctgcaatatgcctcttcaactcatgagaacaggaggcgatgggccacagaggctgctgaaggagtttgttcctgcctctgtttttctctctccttctccaactagaatgytatgtgccacttgctcccctcagtagcacttccaggacaggtggactacatatttgtggaacccagtgtttttattgagaagccttctttttgctttttaggctggccttcctggaaaggttctgcttttaactctttgcgtgccttcccaggccatgcgtcctggtgcgaggctctgagaacgcgatttatgtcaccgcgttggcgacttacatgtgctccctgatcattgaagacacggttttgtctctgcctgggatcatggtggtcataccactccctgcttcaaaaccgaacatttcgtgttttcggag

SEQ ID NO: 741495 - DNA, 634 bp, Homo sapiens
gtatagacctaaaaatgatatttcaagatttttaatgtcactgatctgtgaagtccaaagcgggaaagcctggtcttttccgtgctccctcgttttgtctgtaggcattgagcacagtgaggctacatgttgttttcagagttgcccagcagcctggagactgctggagctgcatcccagggagacagtggctggagtaacaccaaccagacaatgagatgggacatctggggctttcaagagctcagggcaaatggcctaagcaggtggctctgcaggtgtggattgtgtccagctcagggaagtgcctgggcctggtggggcctggagtaaggggagaggtggggtctgatgagcttactccaggtgggaggcccaggaaggaggttgggttttcctcccggggttctctctgggtgtaggcagggaggaaagggagaaaygctgtgaattagtcgactgcttctctggcaagcacgacctatttctaaagcatgagtcactacaaaatgtagctttttaaatttaaaaatctatttacaacctaggtgagaaatctttattttaattgtgaaggaaaacacaaccccacttgacacgtggtggaattgctgctgtcctttcctgtcagagc

SEQ ID NO: 741496 - DNA, 634 bp, Homo sapiens
gtatagacctaaaaatgatatttcaagatttttaatgtcactgatctgtgaagtccaaagcgggaaagcctggtcttttccgtgctccctcgttttgtctgtaggcattgagcacagtgaggctacatgttgttttcagagttgcccagcagcctggagactgctggagctgcatcccagggagacagtggctggagtaacaccaaccagacaatgagatgggacatctggggctttcaagagctcagggcaaatggcctaagcaggtggctctgcaggtgtggattgtgtccagctcagggaagtgcctgggcctggtggggcctggagtaaggggagaggtggggtctgatgagcttactccaggtgggaggcccaggaaggaggttgggttttcctcccggggttctctctgggtgtaggcagggaggaaagggagaaatgctgtgaattagtcgactgcttctctggcaascacgacctatttctaaagcatgagtcactacaaaatgtagctttttaaatttaaaaatctatttacaacctaggtgagaaatctttattttaattgtgaaggaaaacacaaccccacttgacacgtggtggaattgctgctgtcctttcctgtcagagc

SEQ ID NO: 741497 - DNA, 610 bp, Homo sapiens
catttctgtaaggccctgctggttgcactgggtggtcctgctcagcatggaagggatttaccaacgtatgagtgccaggaggtgaggattgctggggccgtctaggaggctgcccaagcttgctccttagggttgtgctttttctagatgaaagctagttcatctgacccacacattcaggttatcatctgatggaagctgaagagctcaagacacactccctgagcacttgtcacgagccagacactgccagaagctctgggatgacacagtcagtgcgtgtgactctcagtgaaccctcaggtgygcaggaaacgtgactgtcttttctgcgtgtttcccttcagctgagtggaagaaacgtattctcagtcagttctggacttcatgccccatttccctggggtcgtgtcacagacagggcatttgcaactctgcctggaaggcgcagaaagaggaccgcatgactgttttcaggcgaaggttgccatggataaagaagcgctttgcattggctgtgtaatgcggcacagcaagttagcacgaattagaggcttaaagcagcatccgtgacctccctgtgtctgtggtcagtgcctgagccgctccc

SEQ ID NO: 741498 - DNA, 392 bp, Homo sapiens
gaaaagaatgagtattcccagagaaacagaccagtgctggggctgttccctggaattcaggttaagtgtcctgggcttgtgaactgggcacaaaagatgctgcaagtctttgctttgggaagctgtcaagggtcattgcccctctcagcctaaacctcttagcacctctccgacsatgcttttcactttggtggtgactgataactcttcttggttgttgagaagtttggatgaaaagctctaggtgtgtattatagtttcatgttgctgttattacaggtccttagtgtcttacagaatgcagatttctgatctcatggtctgtttggcagacctccaggtaggctcattggatccctctgctctgggtttcatgaggctgaaatcaaaat

SEQ ID NO: 741499 - DNA, 599 bp, Homo sapiens
cttgggaaagagactaatttccatgggtagcctttgggggaaatgggactgagaggcaagaagacaggaggtcatagaaaaacttctgcttctgaggatttcatttttggatattattttctgagccccaacattgcaatgtcaatattctatctctggaagataaggaacaggaggtctctattaatcacttacaccccagttaagttatctgctctttttcagagtcagcttttctttgggggtgaggaaagggaacaaaaagaaaactgttcctaacttttcaaggaataattcaagtgtgtccttggcagaggttagctttctcctggaatgaaaacagcacgttaaattttcataggttgtttttattgtcaaagcacaattttttgtgttgtcttcagaatattcttataagttaaccayggacagcaatgatcacacccttactcaacaatctaaaaaacaaaaactatgaagggtcacgtttaagagaatcggatgttttttactttgatttttagctgaaaagcatacgagaattttaagtttataaatagttgtggtactgttaagcaaacttgatttactataattac

SEQ ID NO: 741500 - DNA, 611 bp, Homo sapiens
acttgtgtttatttgaatatttcatgcaggcaacatgagttacagtgtaaactgtaattagtaataagttttgttaaactttttaacattattgcatttaattgtaatatcattaagttggttttctagttaagtatagataaaaatttaaattaaaaatgaagacatactactgtcatggaatctagtggagatgcagaagctaatattgtgactrgaacagtaaaaaaaagattggagcaaattttagatttcagggcagtctcagtttgctatggcagagcaaaatgcaaaagctattattgtataaaacatttaaaaataataaagtgagtaatattaagagaaatttgcaggaaatgcacagtgaatttgataagaactttcctctgaatagccaaaaaagaatcaatgaactcagacacctgaaataagaagtaaatgtccaataaaattttaaaaaaattttcagcattatctgagtgtgtgcctttggttatctttaaaatggcttggattcttgaacgaaaatggaaatcacttttaggtggacaaagagtaaaataaattatctcagttatgaaaatttgttggaaatgataatggaaaag

SEQ ID NO: 741501 - DNA, 611 bp, Homo sapiens
acttgtgtttatttgaatatttcatgcaggcaacatgagttacagtgtaaactgtaattagtaataagttttgttaaactttttaacattattgcatttaattgtaatatcattaagttggttttctagttaagtatagataaaaatttaaattaaaaatgaagacatactactgtcatggaatctagtggagatgcagaagctaatattgtgactagaacagtaaaaaaaagattggagcaaattttagatttcagggcagtctcagtttgctatggcagagcaaaatgcaaaagctattattgtataaaacatttaaaaataataaagtgagtaatattaagagaaatttgcaggaaatgcacagtgaatttgataagaactttcctytgaatagccaaaaaagaatcaatgaactcagacacctgaaataagaagtaaatgtccaataaaattttaaaaaaattttcagcattatctgagtgtgtgcctttggttatctttaaaatggcttggattcttgaacgaaaatggaaatcacttttaggtggacaaagagtaaaataaattatctcagttatgaaaatttgttggaaatgataatggaaaag

SEQ ID NO: 741502 - DNA, 611 bp, Homo sapiens
acttgtgtttatttgaatatttcatgcaggcaacatgagttacagtgtaaactgtaattagtaataagttttgttaaactttttaacattattgcatttaattgtaatatcattaagttggttttctagttaagtatagataaaaatttaaattaaaaatgaagacatactactgtcatggaatctagtggagatgcagaagctaatattgtgactagaacagtaaaaaaaagattggagcaaattttagatttcagggcagtctcagtttgctatggcagagcaaaatgcaaaagctattattgtataaaacatttaaaaataataaagtgagtaatattaagagaaatttgcaggaaatgcacagtgaatttgataagaactttcctctgaatagccaaaaaagaatcaatgaactcagacacctgaaataagaagtaaatgtccaataaaattttwaaaaaattttcagcattatctgagtgtgtgcctttggttatctttaaaatggcttggattcttgaacgaaaatggaaatcacttttaggtggacaaagagtaaaataaattatctcagttatgaaaatttgttggaaatgataatggaaaag

SEQ ID NO: 741503 - DNA, 554 bp, Homo sapiens
cctagcacgatgcctggcacagagctccttcgatatatgtttgctgaaggaataaaatgagaggcctgtctgggctggaccttgcaggactatacaccatggaaagagctccagtagcacgatgttcattgcctgtgttggggactgaagggcaagggacctctgtggatcagtggagctccctggttgaggaagtggcacctctggggctctgtgaccaggaacagagagtcttttcttggttagcacagacctgctgctctagctccttgctaagcttcaaagtggagaggaaaagagcctctgaggctatccagattgatgtctcctcaatattgtggtggttatggtctcagaactgtatgagccagctatacttctagaccattgtcaggtgtacagattgcctargggcggggatggagtgtgtttaaaatgcagattcctaggcctttccactgcgaatccagcttcagctaacctggggtggagcaatcgaaagaatctgcccacaggttgtactgatgccactggccagaggattgtactttgag

SEQ ID NO: 741504 - DNA, 687 bp, Homo sapiens
ctagtgcggtatgcctccctctgcatccttacagatcaaagggatgctaatgtaggggaatatgcagatttttcagactctagctcgctgggtgggtgatttcttttatgtcatgaaataacatgaaagaaggaaacccttggctttggattggcctcctgcggtggaaagtcccagagatgtgaagtctcatactaaggcctcccatgcatgatgtgaggtgagagtaagattggatgggaggtgctggcccttcctgggaggacatctgatactgaaggtgactaaggtacgttgggccctgttacccacaaaagacctctgcacttcggggctgatcacaggctaaagggccccataaagagcaggcctgttgatgctttgggaagcctggaagctttggtttcttgtcacaaaaaagtgctgaggtggtgtagagtctccgtgaatgaggtattaccagccagcctgggacagacgcctgtggaacaagcctcaagctcaccctggctaagttaacwagcttgacttcctgctctgcgaatgttctcaaagcaatagagtgatgttaggtgactgaggctcactgcagaatgtgtgtggttgtgtgtgtgtgtgtgcatgcaggtgaggggtagtgcagtgggggcaagagaaagggtcctggccctggatcctgggacttaa

SEQ ID NO: 741505 - DNA, 645 bp, Homo sapiens
cttgagcactaacaacccccaagttttgggttctgccacaggcgcttaacttcctccagctttatatttcttgtctgtaaaatggagcgaacacctgcttcctttccccactgaatgatgttgagtcagagggatgatggatgtgaaagcacatgcaaataggaaggcgcctttgaaagcactagctctcatcattattattattttccacttaagtgtttttactcaatggatttgccactgcagcttgtgctgacccttttcactctgcagtccctctaaaaataccacttcttttgggyggggagcaggcagggctccgcatgctccgcatgaccagggctgtgaattcacagagcaggagctgagttatatatagggcgtcctgggaattgcctggaccctctttcaagtgcaggcaggtgtggggatctcagggctgcaggtagaaagaggatctgtaggaaagagctgtgagaggaagcccccggggagagcaaagctgggggctgggcactgcctagtggcgggtgggagtgcttggaagacattagatgtggggacctgggcttcactcttgaacaggtaggggtctccagaggttgctaagctcaggggaggatccttgaaggcagatggggagtg

SEQ ID NO: 741506 - DNA, 624 bp, Homo sapiens
agatggtgaaagttctagtccaaaaaccagcaggcttgagacccaaaaacagccaatgttttagtctgagccaaaaggcagaaaagaccagtgtcccagctcaagcagtcaggcagaaggaacttcctcctacttggccttttttttctattcaggtcttcaactgattggatgaggcccagccccattagagagagcaatctgttttactcagtctgtctatcaatttaaatgttagtcccatcaaaaaacatcctctcagatacaccagaataacgtttagccaaaagtctagacacccaaggccccgtcaggttgacacataaaattaaccatcacaaccaccaatttgcatcaataacattggacaaaatggtttaggacatctaacaagtgaaatagaggagttgctctgccccgaccaagcctgagccttggctccactccagctggttcctgtgcttggagaataggaaatctttggaaayattagtcagttccctagaatatttagaaatccttgtcctataatcagccatttctccataaatactccatcagttctcacctggattccagactatatccacacagaccatgtatgggtgaattcaataattcttt

SEQ ID NO: 741507 - DNA, 518 bp, Homo sapiens
acggtgaaaccccatgtctactaaaaatacaaaaaaattagccaggcgtggtggtgggcgcctgtagtcccagctactcaggaggctgagacaggataatggcgtgaacccaggaggcggagcttgcagtgagccggaatcacaccactgcactccagcctgggaagcagagtgagactctgcctctaaaaaaaaaaaaaaaaaaaaaaaaaaaaaaaggagcmcaggctttcagcatgtaaatctgaattcaaatattatcgccattaaattttttttaacactcagggattcagtttcttcgtttggtaaaataattatacctgcatttagagatgttgttaaagatcaaaggagagaatgtatgtgttgtgttcaatctagcacctgatatatggtaaatgttaactaaatggtggttgatttatatttttagattataatattttcttccactcttcttttgacaagcacttagaatgcagtcagattccttttccaatccagttattaatatg

SEQ ID NO: 741508 - DNA, 518 bp, Homo sapiens
acggtgaaaccccatgtctactaaaaatacaaaaaaattagccaggcgtggtggtgggcgcctgtagtcccagctactcaggaggctgagacaggataatggcgtgaacccaggaggcggagcttgcagtgagccggaatcacaccactgcactccagcctgggaagcagagtgagactctgcctctaaaaaaaaaaaaaaaaaaaaaaaaaaaaaaaggagcccaggctttcagcatgtaratctgaattcaaatattatcgccattaaattttttttaacactcagggattcagtttcttcgtttggtaaaataattatacctgcatttagagatgttgttaaagatcaaaggagagaatgtatgtgttgtgttcaatctagcacctgatatatggtaaatgttaactaaatggtggttgatttatatttttagattataatattttcttccactcttcttttgacaagcacttagaatgcagtcagattccttttccaatccagttattaatatg

SEQ ID NO: 741509 - DNA, 569 bp, Homo sapiens
ctgtttgaggcagaatctcactctgccacccaggctggagtgcagtgtgcagtggcacgatcatggctcactgcagcctccacctcccatgctcaggtgactctcccacctcagcctcccaagtaactgggactacaaacacatgccactatgtcagctaatttttgtaatttttgtagaggtgggattttgcatgttgtctaggctgatctgaaactcctggacttggcatccacccatcttggcctcccaaagtgctgggattacaggtgtgagccactgcacctggccaagaagtggagtttytgatacaatggccttggtggaattcagaatttagaatagcagtgagagtctggtgagagtccagtgatggcaaggggcctgataaaagtggccaatgaaaggcagaagaagatggaagaagaagcaattggctctcacaagactaaaatcctagggccttcagtcatcaacttctagtcaattttctgaagcttctgggcatacagcagcgtgtgccctaaaaagcttccatacagtcactgcagctgggtgctggtcactcc

SEQ ID NO: 741510 - DNA, 468 bp, Homo sapiens
actttcttacttcaactcctataaaaccactttgttgaattgtttgctcctgcccctggataaactatgggtcaatctaatagcatagatttccagttatgttatttactgtccctcagaactctaagcttcaagataaagtttacatttcctgttttggataattcttaaagaattactgggaaaaaaaatacatgggatgatgagctatgtttcttggatagaattstcattctgactgttcagccaaagacactgccatacttatatcttgtaagtaataggtatagtgcacatgccagaggaaataagagttgttatttccaaccaataaggttttcaatggcccaccagctcttccactatagtgagctaagctggaatatttagtaccatacccagaggcttcttttgtacttacctctcaaaaagcctcccctttcatgctttccttcccctggctcttcc

SEQ ID NO: 741511 - DNA, 605 bp, Homo sapiens
gccctggggtcctatataaatttgaaaggcagtctaggcaggttctggtgccatgctgagctcagagccagtggacatggcttacatatgacctactgaaacaccagctgaggtggccaagggcgtgcaacctcccacaacactaggcaccaggagagactccttccctctgcttgaggataggggagggaagagtaaagaagactttgccttgcaacatggataccagctcaactacagtagaataggacactggggagagtcctgatgccccccttccaggccctagatcccaaatgacatttctatacacaccttaagcataaaggaattcatcaccttgaagagaaggactcagttctggcaggattcatcacctgctgactaaagagmcattgggtcctgaatgatcagcaccaatacccaggcagtactcaccatggaccttggcgaggctctgagatatgctcgcttcaggtgtaacccagcacattaccagctgtagttgctatggggaaagcctccttctgcttgagaacagaagaggaaagatgaatttgtcctgcagcttagatgccagctcagccacagttgggaagagcaca

SEQ ID NO: 741512 - DNA, 618 bp, Homo sapiens
caccttcatcatgctggggaagatgctcctggagctttctctcccaaccactccaggctgatggcactccaggctgccttctgggatctccctcgcccatgaccctggagatgccctttccctctaatgagaacatctcctttctggtttactctcttgttttcactgaacwcctcctccagtagttacctaagatggtaaaatttttgagacatttcatacctacaattatcttcacacttccctcaatcttgactgcttctttggctggtaacagacttttggttaaggaacttttcctttcagaattctgaaggtgttgctccagtatatcctagcttcccatgttgccatttggaagtctgaggcccttctgaatcccaattctgtatgtttgccatgtttttccagctcctagtattcttaaatttcacagccatgtgaggtggtgtgagtctattttaatggtagacatttagtggaatctttcaatctggaaccttttgcccctctgttctaaaacaatttcctgaaataattcccagttatcatttcttccttttactctagaacttcaattatgttggacctctgagactgctccttttttctcccctc

SEQ ID NO: 741513 - DNA, 617 bp, Homo sapiens
gaacttcaattatgttggacctctgagactgctccttttttctcccctctctcatttccatatctttgccttctcttactctgctttctaagaaaattgcctcctgtacatttttcatttcatgtgttgaatttttaagggcttttttcttattctgtacatattgytcgtatgatatggtattctgttcttgtttcagtgctatgctatctcgttttatctctccaaggatattaatactaggttttttgtgttttcttctcccagcatagtccctgattcctccaagtttcttcctttctttcttgtttattctgatctctgtcattcatgctagaggtttctcataaacatcaagcaatccttaaatttctgcccacatttaagaatagagaactattctctattcttggctggaatggaaagggcttgtcatctggagtttcacaataaggtgatctagccagaccaactagtcgtgaagttcaggggaagtactttcaattctccttttggtctggtcaatgtcttctcaacccctgcttcagggataaaggcttggctaccacagtcgtaacagccaaggaggcaaagagcattgggtgaagaatgtccca

SEQ ID NO: 741514 - DNA, 617 bp, Homo sapiens
gaacttcaattatgttggacctctgagactgctccttttttctcccctctctcatttccatatctttgccttctcttactctgctttctaagaaaattgcctcctgtacatttttcatttcatgtgttgaatttttaagggcttttttcttattctgtacatattgctcgtatgatatggtattctgttcttgtttcagtgctatgctatctcgttttatctctccaaggatattaatactaggttttttgtgttttcttctcccagcatagtccctgattcctccaagtttcttcctttctttcttgtttattctgatctctgtcattcatgctagaggtttctcataaacatcaagcaatccttaaatttctgcccacatttaagaatagagaactattctctattcttggctggaatggaaagggcttgtcatctggagtttcacaataaggtgatctagccagrccaactagtcgtgaagttcaggggaagtactttcaattctccttttggtctggtcaatgtcttctcaacccctgcttcagggataaaggcttggctaccacagtcgtaacagccaaggaggcaaagagcattgggtgaagaatgtccca

SEQ ID NO: 741515 - DNA, 589 bp, Homo sapiens
caaggtcagggccagaggagcctggagggatgagaggtgcccccccccttctgccacttactagctgcgtgacctggactagttgtgttacccctgtttctgagccttgtgttccttataaagattggtgatttttcggcggggtcggtggctcctgcccgtaatcgtagcacgttggaaagccgaggagggctgactgcttgagcccaggagtttgagaacagcctgggcaacatggcgaaaccctgtctttccaaaaaaaaaaaaaaaaaaaaamcaattagcccggcatggtgatgcgtcttgtagtcacaggtactagggaggctgaggtgggagaatcgcttgggaggctaagggagtatggcttgactaggaggtcaaggctgcagtgagccatgtgatcacactactgcactccagcctgggttgacagtgagactctgtctcaaaaaaaaaaaaaaaaaagggggggggggtgttgtgattttcataggttgtggagaggattaagggctacaattttgcaatatctagcatatagcagatgctccattagcggtctctgaagcagcccttacctccttca

SEQ ID NO: 741516 - DNA, 641 bp, Homo sapiens
agaatgcatgttaggcaggaagtcagacttacattgtactttccatactgccattagaggctgttactagatgaacttggtaacctctgtggatattatttgtcagcagagtagaaaattggactgtatgattttcagaatctcaggttctctgtgtcagtgggtggtggaggggtagtaggactagctcaaatcatcaatgacctcccaattaatacatctgagagggatttttcagttcactgcttactcctaagtgatactgttaagcttgcccttctttcattcatttatcttgaatagatgatacatatttcaaactgtgaaggggcctaaagttaaaagtgtttcatgcactacccctgccccatatacagccactattagtttgtgtgtatccttgcagaattactttgtgcatatatgaacatgtatgtaaatactgttttttaaagacaaaagattgcttatatagtgttctgtagcttgcttttgtccattyaacaacatattttagaaattgatccacattagcgtgtgtagctcttaactcagcaccctccagtagagctttctgtagggtggtgggactgttacatatctgcgctgtccaatatgatagccccatccacacttggcta

SEQ ID NO: 741517 - DNA, 659 bp, Homo sapiens
gaagcatcttgagttggctctggaatccttttgatgcaatcctggtggtctttagtggctttccttcaatatggcatctgggaagcaggaaagaagcaatgctctctgcagcttgtaggtggcagtgcttctttcccttgaaaaaaaacaaaaaacaaaaaaaaaccccactaagtttctggttagggccttcagagattcaccaagagagggaataaaggagaaggagcaggtggtgatagggaagatgatgagttcaacttccattttttttttktgtggggggtgaggacggagtcttgctctgttgcccaggctggagtgcagtggcacaatctcagctcactgcaagctccgcctcctgggttcacgccattctcctgcctcagcctccggagtagctgggaccataggcacctgccaccatgcccggctaattttttgtattttttttttagtagaaacggggtttcaccgtgttagctaggatggtcttgatctcctgacctcatgatcagcctgccttggcctcccaaagtgctggattagaggcttgagccaccgtgcctggcctcaacttataattttgttatgggctgaattgtgtgccctcaaaattcatatattgaaatcctaaccccagtgtcccagaatgtgac

SEQ ID NO: 741518 - DNA, 659 bp, Homo sapiens
gaagcatcttgagttggctctggaatccttttgatgcaatcctggtggtctttagtggctttccttcaatatggcatctgggaagcaggaaagaagcaatgctctctgcagcttgtaggtggcagtgcttctttcccttgaaaaaaaacaaaaaacaaaaaaaaaccccactaagtttctggttagggccttcagagattcaccaagagagggaataaaggagaaggagcaggtggtgatagggaagatgatgagttcaacttccattttttttttttgkggggggtgaggacggagtcttgctctgttgcccaggctggagtgcagtggcacaatctcagctcactgcaagctccgcctcctgggttcacgccattctcctgcctcagcctccggagtagctgggaccataggcacctgccaccatgcccggctaattttttgtattttttttttagtagaaacggggtttcaccgtgttagctaggatggtcttgatctcctgacctcatgatcagcctgccttggcctcccaaagtgctggattagaggcttgagccaccgtgcctggcctcaacttataattttgttatgggctgaattgtgtgccctcaaaattcatatattgaaatcctaaccccagtgtcccagaatgtgac

SEQ ID NO: 741519 - DNA, 622 bp, Homo sapiens
gacattgactggtgcccattccccaacttcatcctcaatccagactccagcacagtagttcgctagtccagcaggcttcatccgggacaagtgcatcccaggggaactagacacctcaccaaggatctgcagccatggataatgttagggaaatcaaattccagatttcccacgaacatccccactctccctaacacagaccctcctgtggcctcctcgatggtagaggcttcttgctggtctgcgggtaccccctcccattccctacttccaccgacccctgggctcgctttacaataaatgcctatcctcccaccctgcctgtctcttgccacggggctttatccaagggtcatgggtccaggtatttccagaccaggggaaaatgggaatgtcagtgtctcrgccaggcactcgttgaggctgcttgtctttcttggtgttaaacatattctgttaaagacaaattgtggggttaaagacaaggtatttcagtcatgtttgaaagttctgaattcaaatactcagaacttcgactttgtgtcctcttatctagccccaacttgcatcagataaattagggctgcagagacctgagcaaagccaaaaaagtggcccaggc

SEQ ID NO: 741520 - DNA, 555 bp, Homo sapiens
acaccaggtgctacactaaatggattacatggattgtctgacagggctctgaggaaaccccagcttggaaatgttaaatgactcgtccagggtgacctagctagcaagtggcaaggcatacattcaaagtcactctgtttgatttctctctcttaaccactgttatttagagatgatgaaaaaaggtaaggtaagcaaaatgttcggcatagtgttagttcatttcggaagctcagaggattgcaataatcatcatygtcgtcatcatcatcgtcatggcaacagtaactaacccttacatagctcttattatgtgccaggcactgttttaagaacttcacatatatttatttgcaaaataacactatgaggtagtactcttattacggatttcatagatgaggaagctaagggacaaaaagatgaagtaattccaagttataaagctagtaaatggcagagctgggatttgtactgggaagtctggctccaaacttcgtaccattaaccagtatactctcctgctttcccacatggtaaatggtaaattttaat

SEQ ID NO: 741521 - DNA, 589 bp, Homo sapiens
cttaaatcattgttatcattaatttctcttacatataagcatatatttatatataagcatgtcattgaatatattgttgctattcttattcagaactgttacctgttaaatcaattaaatattagaaaaaatacttaatgataccttcatttattcttttcccaatgctttctttctttacggatatctgagtttctgacatatatcattttctttctctctaaaaraaaaacaaaacttcttttaatatttcttgttcaaggcaggtctactagcaacaaattccctcaaaatttttttttttttgtctaagaaagtctttacttcttcactttttaaaatctttgattttaatttaaaaattagcttaatgataagtataatttaatgtctatatgtaataccatgtgtacatctacatgaacactgtatgttttaccttggttttatatcaaagtttttacttaaatctttaccaagagaagaatcaccatctgttagtgacatattgcaattaaactatgaaacgattctgaattttttttttctattttgaagatacttttatttttaaggaggaattagtttc

SEQ ID NO: 741522 - DNA, 599 bp, Homo sapiens
cgacaaaggactaatatccagaatctaccaaaaaactcaaataaatcagaaaaaaaaaaacagtcccatcaaaaagtgggctaaggacatgaatagatagttctcaaaagaagatctacaaatggccaacaagcatatgaaaacatatttggccgggcgcggtggctcatgcctgtaatccyagcactttaggaggctgaggcaggcagatcacgaggtcaggagattgagaccatcctggctaacacagtgaaaccccatctctactaaaaataacaaaaaaaaattagccgggcatggtggcaggcacctgtagtcccagctactcgggaggctgaggcaggagaatggtgtgaacccaggaggcagagcttgcagtgagccaagatcgcgccactgcactccagcctgggtgacagagcaagactccgtctcaaaaaaaaaagaaaacatgtttaacatcactaatgatcagggagatgcaagtcagaaccacaaggcaataccaccttactcttgcaagaatggccacaatcataaaatcgaaaaataatcaatgttggcatagatattggtgaaaaggggacacttttacactg

SEQ ID NO: 741523 - DNA, 492 bp, Homo sapiens
ctcatacgtttatcacagcactattcacagtagcaaagacatggaatcaatccatcagtggtggctcatgcctgtaatcccagcactttgggaagccaaggcaggtgaatcacgaggtcaggagttcaagaccagtctggccaagatggtgaaaccccatctctactaaaaatacaaaaattagccaggcatggtggcatgsacctgtaatcccagctacccgggaggctgaggcagagaattgcttaaacccgggaggcagaggttgcagtgagccgacatcacataattgcactccagcctggacaacagagtgagactccatctcaaaaataataataataataaaagaaaatatggtacgtatacaccatggaatactattcagccataaaaaagattgaaatcatgtcctttgcagcaacatggttgcagctgaaggccattatcccaagcaaattaatgcagaaacagaaaaacaaataccacatg

SEQ ID NO: 741524 - DNA, 562 bp, Homo sapiens
taattctaaatcaaactaaattcacttggggaactttaaaataatgctgatgcccgagccattctgtagaactattaagttagaatttccagagcaggggagagataccagcaccagaattttttaacactacttcccaagtgatttcagtatgcagtctaagaacttctgtcttagagaaacatcaacatttgtgtgcaactatataagaatatttataggagyataaatggaaattgtgtaaatatatgtaagtatagcattatccacacaccatctacagagaatgaaataaataatactgatatgttcatctcatatagataaaattaatcaattgtaattccaagtatccactgaataaatctaatgcaaaataagtatacattcacagtttcctgcatttgtttctaagtggttttctttttgtgtgtgtgtgtgctatgggaattataaacaacaaattctagagagtgaaaaaggaaggatgacggatgctgagaagctcatagtcagtatcaactaaataggaaatattttatttcttagaaaaagaaagaga

SEQ ID NO: 741525 - DNA, 548 bp, Homo sapiens
agtgctcttgatccagaagggaaataagtgatctgcaacaaagtcaactgctctgtattcaaaggacagcctgtgttactgctgtactgaggattatactggctgaagtgcatgtccaaagaaggttagagtctttctgttcagataattgtaagaaatatagataataacttakaaaaggtcaatactgagccactctgtccatagccatcggcattttcactgcaaaattgaattattgtaaacatatttttaaaaaagaaagaaaaagaaaaaccagaggaaaccaaaaactatttttcaatatctttttttaccctcttttcctttgaaatagttcaagcctaattaaaaaaaaattgaggtttgcattttaaaatgcagaaatgtatctagcttcatccttctaaaccaaaactctttaagaatttgaggttaataaatcttagtattgttcatttgccaattaaagtgcaagagtaactgccaaagagtattaaggtatgaaaagttgaaaacttcagttcttaacaccttttcatttgtaa

SEQ ID NO: 741526 - DNA, 710 bp, Homo sapiens
aaatgtaatattcagaacatcttggatccaattattactggacatcctaggaaacagaaaaatataactcaggccgggcgtggtggctcatgcctgtaataccagcactttgggaggcccaggtgggtagatcacaaggtcaggagttcaagaccagcctgaccaacatggtgacaccccatctctactaaaaatacaaaaattagctgggtgtggtggcacgcctgtagtcccagctactcaggaggctgaggcaggagaatcgcttgaacccgggaggcggaggttgcagtgagctgagatcacaccactgcactccagccagggtgaaagagcaagactccgtctcaaaaaaataaataaataaaataaataaatataaataaataaaaaatatataaataaatatttttaaaatatatattgkatatattatattctctctctctctatatatatatacacacacacacacacaacccaaagctgaaagaaaaacaggtcaatagaaatagacccagaaatgaaagatatgcatatgtgtctattaagggagctatttaagtaattcaagtattttaagaaaagagtgaatgatgatgacaatggcagtggctgctgccatcatgacagctgcaacaggaaagcgcggctggggctgcacactccatggagccattgggagccctgccccttctgagttgggacag

SEQ ID NO: 741527 - DNA, 636 bp, Homo sapiens
tctaatttctgtttccttaactcacaaagaccacagggccctgtttcagttttctcaccctgctgtagcttggaaactgcctcaagacgttttgtttttatcgctggtgtcacagtcttgtctgtctgttgtccagtgtccaaaaagattgttttatatattttgactaatattccagttgtgtataggaaaggcaacttctgcagcagtcatctcttcatttgctgaagcagatatttttcatagtttcattttgaccgtaaaaaaaaaatctcagaattcttgggcacttgaagtgtccaaaaaatgtgatcttatttttcttctgttgaacccctaggggattcaataattaggatctagtttttatattaatctctcaatttggcagctttaccaccactcaaacagtgcaaacttgcagtttcattcatgaatgatgtggttccaaattgctttttgtaatwttttttttcttcttcgtcaaagaaaaggaacagcttgctttcttgtttcttctctgggaagatggatggtgtttttctaatccctttatcacatagaaagcagctttttatggcaccatgctttattctatagattcaatccaatcgtttctaactccagtgggaaaag

SEQ ID NO: 741528 - DNA, 618 bp, Homo sapiens
ctggtctcggctggaggcacacttcccagcctgtgggttggtcaccttgcaggctgcaacactttataagaaataaattcttctctcctttcttaaatttataaattgtataatttttaagttaacagtacttaacattttagtgatcatagatccctccaaaaattaaatgacatctatggactctgtccccagaaaatacatatgtgcatacagtagtttttctaaccatctacttaatattcttgattccctttctgaaatatgccaactgattctcataaaatactgaagactcatagctagtagccttcactttagtttactcctccacatctgcttccactagctgagtggaatactccccaagagtcagttatgtttgttcccaaacttcatttccattgtatgcctcatacgtatataatttaattgaattgcatgaactgataaaatytgagtctgcaaagaaataattttctatgaaaatcaagaaaatgagtgctaataaaaatagccattgtcagacacttaggtggtttccatatcttggttactatgaatatgctgcaataaacatggaagcacagagtatcttttcagcatactgatttcatt

SEQ ID NO: 741529 - DNA, 596 bp, Homo sapiens
catacacagtttgtcagtttgtcaacattctgcatttatgaaaaacagtttgctgctcactcatttagcctccagtggtatactgagttgatcacaaccctcattctttcggcctgctatatctcctgctttttgtttttaaattaattgagcaacgcaattgcaggctgtgcagccctcaattgcaggttggtgatctggcttcatttttcttascccttattcataatggagttgctctggtttgaatgttccttacatatttccctcttcctttttacaagaggaccttaatcctaagggttgcagaaggatgaaggtccatcttctgcaacttcttcatgcttaataggggtgtgcctaactattcctgcctaactattagggtctcttgtattcagggtagagagctcagtcagaaagcattcgtccattaagcatcaattgtacctctgagttccagtaaaaggtgaaatcctggccctccagcagtttctcagcttcttgtgtggttttctagatcggtccctatattatgggggttaatgtaagcgtgactctggtcggtcctcgttccatctttgcattcagattca

SEQ ID NO: 741530 - DNA, 552 bp, Homo sapiens
tttttacctagtgcagtgcttagcacctatcagggatttattaaacatatatggaagagaatgacatttctgccattttattaataaattcaacaaagtatttattgaactttaaccatggcttgggcatttgttaaggatgagyggtttaatacaatgatgattcagacacggtctctacttccaaggaatctggcatctcaaataggtaagacacacataaaagtaataggtgatagcagtaagtgctgaaataagactgtcattcaagtgttgtgaatttgaagaagttgggaagatcaggaatgcaaatttcttcccccttgtcttagtccatttgtactgccttaacaaagtatcttcaactgggtaatctataaataatagaaatttattttcttacagctctggaggctgggaagtcacggttaagcaccagttggtttggtgtctgctgagtccccagttgctgctttcaagatggtaccttgttgctgggtcctcacgttagaagggacagaaggggctgggcatggtggctcacacctataa

SEQ ID NO: 741531 - DNA, 589 bp, Homo sapiens
ttcaaactatagtcatgcatccataacaatggcgataagttctgagaaatgtgtcattaggtgattttgtcattgtgtaaacatcatagaatgttcttaaacctagatggtgtatcctgtctaggctataaggtataacccattgctccaaggctacaaacctgtacaccatatacacagtatcgaatactggaggcaactgtaacacaatggtatttgtgtgtctaaacatatctaaactagaatacgtagagtaaaaatacagtataaatgattaaaaaaaaaaaagatacatctctaccactgtctagggcacttaccacgaatgaagtttgcaaaactggaagttgctctgagtgagtcagtgagtgagcrgtgagtgaatgtgaaggcctaggatattactgtacaccactgtagtctttataaacactgtgtacttaggctacactaaatttttaaaaattttatttctccaataataaattaactttagcttattgtaacatttttacttcacaaactttcaatttttttaactttttttttcaaatagctcctgtcaacttaaaaaaaatttccataagtt

SEQ ID NO: 741532 - DNA, 533 bp, Homo sapiens
ccacctgtgaatggttattcatcattttcagtcaaaagatcatcttctgagacagaattcagaaactacatagatgctgaggagttctgctttctttatgtcacccatcagcatccagcaacagattttgaagttctagcttaaattacctttgatggtatcacctcacctctacaggattgatggaagtgggagccactgctgttctttcttccccatccagaaaaatgcaagggattctgatttctctacaggcctcttagcaattgtctaattgccttcctagagagttcaaatgcctccgtttccaagcctccatgccctttargcctctgctgtccatactagcaatagtttcaggattgctaaaactgatgcgtcggctcaccttagctcacccaagacccaccacttctaagagtatttgttctcagagaaacagcttatgggatgacagccaggataatgagaaaatcgaataattctaaggcttacggtttccaagagatgagcatatttctttgttttgttct

SEQ ID NO: 741533 - DNA, 596 bp, Homo sapiens
cccttttccatgtaaagtaacatatttgcagcttccagggtttaggacacgagcatttgggggtggggggcgcttttcagcctacttcggctatcaagataaaaactcaatttcccagcctcacttgcagctgcgtttagaacacatgaccaagccctggcaatggatatgagccaaagggaagtgttgtccttctaagtcttgctcttcgaggaaagtacctgctatttgctgaaacatgaatgagtgagccctttggacttggcagatgaggccagtacctgggtgtggcccagccacaagggcctacgcccctgcagatttcttggagcaaggccaccatagcagcttggacttttacatgataaaaagacaaacttctgtcktgtttaagatacgtagacagaattatatcctgcttaatacattactcagggaagaccagggaactgtaattgacagaatgttttgggacttcaacagtgtttattaaaatctcttataggtatccttgtgctcaagatagagaaagatgagttaaagccaagaataattaggtgggtttataactgcttgagtgaccataagggtgcaga

SEQ ID NO: 741534 - DNA, 553 bp, Homo sapiens
atttcacattttggtcttatttcccaatccacctgctatcatttacttttcagcatcctcaaataacttccatgcattcttttctgtttttttatttttattttttatttttatgagacaggtcttactctgtcacccaggctggagtgcagtggtgtgaccgcggctcactgcagcctcaaacacccaggctcgagcaatcctccctagtagctgggaccaaaagcgtgcaccaccacatctggctatttttttttgttttgtagttgtggggtctccctatgttgcccaggctrgtgtcaaactcctggcctcaagcaatccttgtgcctcagcctcccaaagtgatgggattacaggcaggagccattaagcccagcccttttcagtttttgtagctgcattcactggaggaggcagggtggcgtctggttacttcatcttctatgcttctatcttgctttctgaggattctatctctgccaaacagattgtaaactgatgtagggcagaaagggggtgatccctttcctccccatcataaagtgttatg

SEQ ID NO: 741535 - DNA, 553 bp, Homo sapiens
atttcacattttggtcttatttcccaatccacctgctatcatttacttttcagcatcctcaaataacttccatgcattcttttctgtttttttatttttattttttatttttatgagacaggtcttactctgtcacccaggctggagtgcagtggtgtgaccgcggctcactgcagcctcaaacacccaggctcgagcaatcctccctagtagctgggaccaaaagcgtgcaccaccacatctggctatttttttttgttttgtagttgtggggtctccctatgttgcccaggctagtgtcaaactcctggcctcaagcaatccttgtgcctcagcctcccaaagtgatgggattacaggcaggagccattragcccagcccttttcagtttttgtagctgcattcactggaggaggcagggtggcgtctggttacttcatcttctatgcttctatcttgctttctgaggattctatctctgccaaacagattgtaaactgatgtagggcagaaagggggtgatccctttcctccccatcataaagtgttatg

SEQ ID NO: 741536 - DNA, 640 bp, Homo sapiens
aaaaaaaacaaaaaaaacccttttcttttgagctatttatagcttacaagaaattgggtaaagtatacttcgtgagcaaaatttgaagcatttatctttctttctacctgatatctccagaatttggaaacttttttgattattcttaatttargacaagacagctatttgcgtacattcaatatgaatctgtattcttttggaggatttgactggaatggaatattttcagatatgaccagattgctttgaggaattgaagttgactttatagagctaataaaaaacccagtttctttgcaagtttcctgacctgtgtaccttgactgaaaaggtacctttacaaggtacacagtttcttcacaaggttcctgacctgtggtaagtgacgagtgttactttctgacgtgcccaggaacctcaagttattttgggacctcaagaagagaagaatttacccaattcatacaggcattgcagacagtcaatgattaatgacaaatccttgccttggttttatagcctcaaggcttttaaaagtctaatctgagatttcttatgaaaatgtttccacaaagccaatttgagaaaagcctgtatggtcaatcactattcttgctgcactttatgcaaataacca

SEQ ID NO: 741537 - DNA, 599 bp, Homo sapiens
gatcataaacaagagacatacaccttaatgcacacaataaagtctagggagagcattacaatgatcaatttagtctctgaggtcacgatgggagattgtatgaaagctcagatgaaagggtatggaatggggaaggaagaaagcagaaaaggctttccaaaggaggtaagccatgagctgatccatgaacaatgaatacaaatttggaagggaagaatattaaggaggataaaagtggtacaggataattttgtcagatgccacatttttgatcctgagattaccaccaagctgagaatatccttaggttttcccagcaccacatgtgtcaacaaatcttacgggattgcattcttctcatacatcatttgtgcattaacagraaaaaagtctcacttgtgatgctgggtccagcttataaccacacaatggaaacccctgcctccttcctccttgtgggtatcccaggactgcaatcttcacatctttggctggctatctcactgagtgccatgtacatcatagccctgttaggaaacaccatcatcgtgactgcaatctggatggattccactcggcatgagcccatgtattgcttt

SEQ ID NO: 741538 - DNA, 579 bp, Homo sapiens
ccaaactttcctttccccactacctctagaggattggctgcaaacctttttcccttaagggaagttcctctaggaggagggggcattggctttgtgaatgtccccttaaccagttcagaagtccaaagcctgaaaagggaactaaaaccactcytagatgatccctatggagtagcagatcaaattgatcaattcttaggcccccacttgtatacttgggccgagttaatgtacatcctaggcatcctcttttcggaagaggaaagaagcattatctgtagggctgctatgaccttttgggagcgtgagaaccccccggtcaaaacatccctgcagctgaacagaaattccctcctcaagatccccaatggaataacaatatagcctattgaagaaatatgagagacctaagggaaataattaaaggaattagagaattggtgccctgcacccagaatattactaaagcctttaatacacaacagggaaaagatgaagggcccatggaattcctcaacagacttaaggaacagatgaagaaatatgcaggtttagatgtggagggcccacctggacaag

SEQ ID NO: 741539 - DNA, 579 bp, Homo sapiens
ccaaactttcctttccccactacctctagaggattggctgcaaacctttttcccttaagggaagttcctctaggaggagggggcattggctttgtgaatgtccccttaaccagttcagaagtccaaagcctgaaaagggaactaaaaccactcttagatgatccctatggagtagcagatcaaattgatcaattcttaggcccccacttgtatacttgggccgagttaatgtacatcctaggcatcctcttttcggaagaggaaagaagcattatctgtagggctgctatgaccttttgggagcgtgagaaccccccggtcaaaacatccctgcagctgaacagaaattccctcctyaagatccccaatggaataacaatatagcctattgaagaaatatgagagacctaagggaaataattaaaggaattagagaattggtgccctgcacccagaatattactaaagcctttaatacacaacagggaaaagatgaagggcccatggaattcctcaacagacttaaggaacagatgaagaaatatgcaggtttagatgtggagggcccacctggacaag

SEQ ID NO: 741540 - DNA, 461 bp, Homo sapiens
gctttttagaatttaacccaagtatttaggctcttctgaaaaaaatgttactttgaaatcaaaccctgatgaacactgagaagcaagctgctctgcatgtggcagaaaaatttggggataagctttgtatcacatatagcatcagggagggaggaaaactctatccaactggaagaaaggcagtatcagcaaaagaccctcgatgggattccaatgacgagatgggagtctggaagaggagacactttcaggtgcatataatraggggcttatgtagaactaggaccaagcctcaattatagaaagctatccatgatagaccagggatttaatagaagtctcaactgccttcttggaaaggctaaaagggcccttggtaaagcacacctctctatctcctcatccagtcaaggaacaactaattatgaaggataagtttattactcaggcagcccctgata

SEQ ID NO: 741541 - DNA, 460 bp, Homo sapiens
gggtgtgaccacaggtgtctcttgccatctgaactcctataaatttcaaggacccatactggaagtatgtgcagataacccagagccagctgaggaccacattttcattattgctgcttccctcattattggcttttattatgagctaacattgaarttctatctagaacaatgtatatgcatgacatactcacgacatccagttacgatccactttttagtgtacacacttcatttgattgtcaaataatttaacttttgtatagcattggtgtcatcatttatgcttatatctggcacttgttgctacaaaggtcctttgggatcgcatgctaaatgcaaagatagtaacatggtacataattgctacaattttgtttttagaaaatcatttactgtatttacttaacctaacattttaaataccccaatccagtatcaaaacaagattaaaccagca

SEQ ID NO: 741542 - DNA, 531 bp, Homo sapiens
tcatccacatctttctgtctccttggccactgccctggcctggactctagtgccctgtcccgccctgtggggacagccccccctctcgtctccttggctctgtcgtgccaccatccagtttgttctctgctggagagacagaggacactttttgaagcatgcatttgataaggccacttttgtctcttgtcctcagataagatcaaaactcttttgcgtggcttataaggtgcctgcctaccccctggcctgttgcagccctctctgccacactgactcactctgacctgagtctccacgtcagccacacctctggtccctcgggcaggcccaycttctcctgcccgggctcagcacaggcgtcctcccacttgcacagcaacatcttcttgctaactctcctctctgtgcctggctgaccagagctcaacccaaaagggacgctgcttcctccaggttgggcatctttcccgtgtgctcccatgtgagctggactttgccgttgtgtcactcacctccctgtaccaccgg

SEQ ID NO: 741543 - DNA, 608 bp, Homo sapiens
tgcttttgcctttttttttttttttaaatggagtctcgctctgtctcccaggccagagtgcagtggcgtgatctctgctcactgaaagctccacctcccaggttcacaccattctcctgcctcagcctcccaagtagctggractacaggcacccgccactgcgcctggctaattttttgtattttttagtagagacggggtttcaccgtggtcttgatctcctgacctcgtgatccacccgccttggcctcccaaagtgctgggattacaggcgtgagccaccatacccggctgcttttgcctcctttaaaggtcattatgtaacagaacttgaaggaaagtcactggcttggcaatttgaattttcagtggggagggacactaatatttgttgggtgcttgcactgagacactttataggaattttaatatctgatttcggttaatgcccttgatcatcccataatgtaattattttaatttcccttctgcagataaagagtggattcctcggagaagtgaaggattttgtctcaggcacatagcccgtaaatatcatacttgagattctaatccggctccactgcatctcaatgttttgctttcg

SEQ ID NO: 741544 - DNA, 633 bp, Homo sapiens
ctgctcctgtaacctttcaccaacccattcagaacatggcccacttttccagcccaagctccctgttcccacttcaagcagatgctgctgctactgttgctagttgcttggcaccaggggctcatgcatactgagagaagcaaagctgtgctcacctgactgctcctgctgtggtactccatctcatcacctagtctttgacccagagctccctcctcctctccatctttggtgagccaactaccttatttctgggtggccttctctgatgtcccttttcttcctcttcctgctagagaggattctttttgttttttttcctagcatccagtatctataattcattgtttacatatytgtcatttgtaataactgaactcttgtagagaagcagcagatattattcacatgtgaatttctatcaccctgagtaacacagaatacttgaatgagacatttttatttagagaatgggagttttaatagaaaagacaatagagcttgagactccctgggagagcaggccagacatggagagatactggtctatttcttttactggtaggttaatcttaggcaggttatttaatcttgtttaatcttttatattacaataattttaattatataaaa

SEQ ID NO: 741545 - DNA, 605 bp, Homo sapiens
accacggctgctgctatttttgtaaataaaatgctagccatgcccgttagttctatggccaatttcaagctacagtaatggagttaggtagttgcaacaaacaccgtgtggtcagcaaagccaacaataacgtggtcctttgaatcttgctgcctcccattctaaagcatttatataggtaggctttgtttgtaatttcaaagttacatttgaaactatctcatacaatgtcttttttcttttttttgaggtatggtctcactcggtcaaccaggctggagtgcagtggcacaatcatggctcactgcagccttgacctcccaggctcaagtgattgtccarcctcaacctcctgagtagctggaaccaaagatgtgtgctaacacagccagctaattttttaaaattattttttgtagagatggggtctccttatgtcatcgaggctggtattgaattcctggcctaaagtagtcctcccatcttggcctcccaaagtgctgggctaaaaggcatgagccatcacatctggctgaacttttttcttttatagaggaaacaaggctaagagatcttgagttatctaagctttaacagagatgtgg

SEQ ID NO: 741546 - DNA, 605 bp, Homo sapiens
accacggctgctgctatttttgtaaataaaatgctagccatgcccgttagttctatggccaatttcaagctacagtaatggagttaggtagttgcaacaaacaccgtgtggtcagcaaagccaacaataacgtggtcctttgaatcttgctgcctcccattctaaagcatttatataggtaggctttgtttgtaatttcaaagttacatttgaaactatctcatacaatgtcttttttcttttttttgaggtatggtctcactcggtcaaccaggctggagtgcagtggcacaatcatggctcactgcagccttgacctcccaggctcaagtgattgtccagcctcaacctcctgagtagctggaaccaaagatgtgtgctamcacagccagctaattttttaaaattattttttgtagagatggggtctccttatgtcatcgaggctggtattgaattcctggcctaaagtagtcctcccatcttggcctcccaaagtgctgggctaaaaggcatgagccatcacatctggctgaacttttttcttttatagaggaaacaaggctaagagatcttgagttatctaagctttaacagagatgtgg

SEQ ID NO: 741547 - DNA, 629 bp, Homo sapiens
aatggcaactatttattgctgacttatacttacttttcagcttgaaaaccagtgctaagtacacttggatcacccaactagttggctttacgttactgtgaaaatcacatgaagtaacttatgtgtatataagcattttgaaactgctgtaaccacctgtaagatattagccaaatacacagtaaagcggccactcaaaatctttacgtagctgttttaaataaggcaatgcaatgtaacttgcaacattttcactttatccaaaatgtaaatagcaaaactaccttttaaatatgtgtgctttttaatgtatccaatgcacttggagaggawccttagatcaaaatgagacaaacatactaaagacttaaatgtgtaaaaataaaaccaggaaacatcttaaatgaatgataaaatcctgggggtagacacaccaggagtcctagcaactttacaaggtcaaaaaagatgtgattttttttccttccaccccctacaacaaatacataatctttttctcccaccacctacataaaatttgattaaaaaaagtcaaaaagacaactagaaaaaaaatttgcaaaatgacaaaaggctgtttttcttaaaaaaaaaaaaaaaaaaaaaaa

SEQ ID NO: 741548 - DNA, 549 bp, Homo sapiens
atcagctatgtcctttgttattttacagagtttttgagaaatgcaattttttttgaaattaaatacttaggtaatttctgagtactctttataatagaaaatggaaagacagagaagaaagtgttcagactataggctttgacaacactggtggtaagtctgccctcagtcatgaacccaagacttccattcactttggtgtcccagacatggcccaacttgggtgtggaatcttttagctattgctgttaatccatgtaaactatctcagtgaaatgtgttctctttaaaagttaatcaatcattgcaaaagaacaatgagtttttttaaattagatatagtgggcccaaaccatgccaaatattttgkggttttctgggaatacagaaaaggtagttattggtattgaaataattgcagatctcagtaagtcccagctgttgaacatatgatcactatttgggagaacaaatagcaatattttttccatccctggagtacattctgctcttgatatgcatgcataactacaataaacaattaatggg

SEQ ID NO: 741549 - DNA, 545 bp, Homo sapiens
atgtgattagaaattttggtgagatcttatctttgaagttgagatagaaaatcctgacaacagatttatatattattccagtgaatatgtaataatattcaacaatggtgacgttttagtggttagattaattggaggtaaatataaattaaycaatgtaacttagaattcatttatataaaatctgtaaaagcagtttgtattaagtatcacatacctaatccttataagatactaaaatgatttaagatttgtttatctattatatttaagtgaatgctactaagatatataagatgcttaggaggttttctttcggtttatttttttaaatttaaataatattttccccactctttttagaggctggaaagagagtatggctgtccttgtatcacaggaaagccaaaagttgcctttcgagagaccattactgcccctgtcccgtaagtatgcaacgtaattaaacattatgaggctgaaattgaagctttttattttggatatacataccactattactgttttaaagacatttttatgta

SEQ ID NO: 741550 - DNA, 644 bp, Homo sapiens
gtacaaaaatgaaatcctatatatcatttattttttaaatatttatctttatacacttgatctttttcattttcaaccacatacagttttcaccttgaaggtgaccttgctgagtggaaaacataatatctttaatacatgagttaaatctaagatgatgttcaaatggactgcaggtaactgtttatgtcaataataaatacagcagattacttttaaaacccatactttggactttttattacagatgcagttgctgacttaccataaatcaatgtgcttaaagtgccatatgatgtcaaatatttagcttaacagcataaaattgaacagaaactgtaaaacatgttttataggtgctataaaaccctggggcttgaggtcctgcttttttgcattactctgatccatcaagttccttggaaattctagayagccaatacacttgggaatcgaaaattggctttcagaattttactcacttaggttattatgacctcccggacaacatcctctgtttcttaatatgaggagagcacaaggagagaggcataggctagtataggacagacagagagttaaaatactttatatcctttataattctcttctgtcaataacccatcctgctgcatctggccttc

SEQ ID NO: 741551 - DNA, 600 bp, Homo sapiens
agatcatgccattgcactccagcctaggcaatagggtgagactccgtctcaaaataaaataaaaaaaaatacaaaaattcaaaataaataaataaataaataatgtttatggaatttgaaccatcctatatatcagatggtccccctaccatttcttggcaaaattactaactattcttaattaaaggctctgctcaccttggtgcttgctacacagagaaaaatctccactgcaaccaatgcctgcagtcttgaagttcctccttagtgactttggattttaggggaggggaaactcctatttaaactatacttggttttctctggcccaagtattttagtacatgggacttacatgtcctgatgatagttccaagggcttcttgtgcttcagtttcagctgctgcagagtaagaccacctgtatgtctgagaaacamcatcctcaaatgaggtttgtttatgccatagaagcttatgtcttaattgaggccatcctgaatgtggtctcaaaattttgcgaatatctataaatatctgttttttatgatgcagaaacacacgtataaactttttgtagatttgtagttcattttcctgt

SEQ ID NO: 741552 - DNA, 643 bp, Homo sapiens
agcaaaattatatgcaacaagcactataaagaagttgtgacaatttataaattaattttaatttaaaatctcagtgtgtacagatcaatagtacacacggagcagctcatgttttagcacactagaaggcagaaagggagtcgttttttgttttccaaaatcagattatgaagaacaaaattactttaaaattagtaattcaaaatttggcatacgtatcactctactttttttttccacctcacaaaatctttcttttttttttttaagttccggggtacatgtgcaggatgtgcaggtttgttacataggtgaacatgtgccatggtggtttgctacacgtatcaacccatcacctaggtattaagtccagtatgcattagccatttttcctaatgctctccctmcttccaccccactctactttttatttgaaggtacagagtttcaagtagttctaaaatgcacaaatgagttacccatggaacattttctaactcctacctcaaaaaccagattattccaaagtattcgttatacctttgcagtatgtttgaaatatttcataataaatgtaactgcatgaggttaaaggatttcataccatttgatgttttaaaacaggcatttcaaaaggaggtcc

SEQ ID NO: 741553 - DNA, 631 bp, Homo sapiens
agtataaatcaaagacacctaacagatatctattcagtactttacccaacaacagcagaatacccattcttctcaagcacacacggaacattctgtaggacagaccatatggtaggccacaaggaaagcttcaatgaattgaaaaggatttaaataatataaagtatgtcttctgatcagaaataacagaagaaaatttaggaaattcataaatatatggaaattaaagaacacatttctaaataactaatgggtcaaataataaatcacaagggaaattaggaaatgttttgaaatgaataaacacaaaatacagaatactaacatttatatgatacaactaaagtaatgtttacaggaaaatttataactaaatgcctatgtttaaaaagaaaaaaataytatatcaataacctaatgttatacctcaggaaattagaaaaaagaaaaagaaactagacacaaagcaagcaagaaggagagaagtaataaaagttagcatgaaaataaatggaatagggaacagaaaaaccatagagaaaatctacaaaaccaaaagttggttcttgaatcaacaaaattgacaaagttttatccagattgaccaccaccaccaacaacaaagagaaga

SEQ ID NO: 741554 - DNA, 622 bp, Homo sapiens
ctggggactgaccctctcagacttccaaattcctaactgggaaaactgggaaaattaacagaacatagctcatggggttgttgtaaagatcaaattaaataattacattagcacaatgactagcaatggaaagcccttggtaaatgtgagctgttacttttaggcaatgcttcatatactgctcacagtccctataatataggtgcttgttagagttgacttaagttttctaacattaagtagctagtaaatggcagagctagaatttgaatccatattaaaaatttatgtacccaactaataattattttgtctccaactmttcctctccactgtcttccctttctttaatacatattagcctgtccccttctccattctaccttcatcaatttctctttctctttcctgtccctaacctgcacacactggaggccacaaacacacactctaagcataaagctgagtgtgagattaaaacagaagaggatacaaatcagaacctattggcagtgtcttctaaagccaaacaaatgaaagaaaggagtgtttatgtctaccaaaacactcagagaataaatagagcagctttattgaaaatagccccaaactacaagctacc

SEQ ID NO: 741555 - DNA, 638 bp, Homo sapiens
aaacgcttctgaacattggtcaaggcaacaattttatcactaagacttcaaaagcacaggaaacaaaaacaaacacagataaacagaactataccaaactaaaaagtttctccacagcaaaggaaacaatcaacggagtgaagagaaaacccgcagaatgagagcaaatatttgcaaaccattcatctgactaggaactaatatccagaatatgcaaggaactcaactcaacaataacaacaaaaattccattaaaaagtggacatatgttccaaatagacttatcaaaagaagacatacaaatggcccacaggtatatggcaaaaatgcccaacatcaataatcatcaaggaaatgcaaatcaaaaccacagtgaggtgtcatcttaccccagttagaatggctagtatcaaaaaggcaaaaataacaaatgctggcaatgatgcagagaaaagggaactcatacactgttgctgggaatgtaaattagaagagccattakagaaaacagtatggaggtctctcaaaaaactaaaaatagaactaccatataatctagcaatcccactattaggtatttattcaaaggaaaagaaataagtatataaaagggatccctgcacccccatgtttgttgc

SEQ ID NO: 741556 - DNA, 634 bp, Homo sapiens
actagttatgagactgggcaagttatctgccctctagaaaacctggtttactcttctgtaaaatggagaataatatcatctccatgcagcattgtgttgaagtggattagaaaacaacaggtactcactgattgatagctattattggtaacttcatcattattagtaagtttttgtacttgattgaagttgattttctaattacagattttgaatgcttttctcacaatatcacaatgtatttacttttaggatgggcaaggctacttagaagatctagtaaaggatattgttcagtggctcaatgcttcatctggaatgaaacccgaaagaagtcttcaaaataatggtttattgaccacccttagtcaacactactttttatttattggaacactttcttgccaccctcatggagttaaaatgctggaaaaatgcagtgtatttcagtggtgagcattcccagattttgttgcaatatatacatgaactttatttttaatgtagttagatatggtatgctttttattctgtgtacrtgtgtttggttaagttttattttaaattagcattatctttgctttaatattctttttaaaattgttgttattaaatgctttctttccaaaaagct

SEQ ID NO: 741557 - DNA, 629 bp, Homo sapiens
aaagcatctctttgggccttggtttgtaataaacacttctgtaagatcttcgcaatttttagatttttaagtttttttttcatttatactaaatagataaatattttctttggaactacttattagattaatatttwagactggattgttcctgccaatataagtgtattatctctatgttgaagaatagatggttgaactattggtttcatgacttttgttttgttgctaagacaactagaattaattcatgcctaatgttttgtacttgaggaggcttttacattttttctctctcagagatgaggttaaatttgtttcttggtagctttccaaatcttttgaaagagtgactcttatatttgatgtaagtgatttcttttctttcagggaaatatcggctcatcaaattggggtctcaatttgctacaggaagaaaacgtgattccagatatactaaaacttgcaaaacagtgtgaagttctttccatcagagggtaggtcatttaactcagaaatctttctaatgtagacgttgttattcacaaatggatgttaggggaaagtattttatgattaagtgcaatgcataactgttaatccactgaaagttctaatgatacaagatt

SEQ ID NO: 741558 - DNA, 629 bp, Homo sapiens
aaagcatctctttgggccttggtttgtaataaacacttctgtaagatcttcgcaatttttagatttttaagtttttttttcatttatactaaatagataaatattttctttggaactacttattagattaatatttaagactggattgttcctgccratataagtgtattatctctatgttgaagaatagatggttgaactattggtttcatgacttttgttttgttgctaagacaactagaattaattcatgcctaatgttttgtacttgaggaggcttttacattttttctctctcagagatgaggttaaatttgtttcttggtagctttccaaatcttttgaaagagtgactcttatatttgatgtaagtgatttcttttctttcagggaaatatcggctcatcaaattggggtctcaatttgctacaggaagaaaacgtgattccagatatactaaaacttgcaaaacagtgtgaagttctttccatcagagggtaggtcatttaactcagaaatctttctaatgtagacgttgttattcacaaatggatgttaggggaaagtattttatgattaagtgcaatgcataactgttaatccactgaaagttctaatgatacaagatt

SEQ ID NO: 741559 - DNA, 644 bp, Homo sapiens
catttcttacaaggtgaatttctcctgcttatagtaatttaaagaagaaccactaggaatctgtagtaattgagtaagcatccatggccaagtctcctttttccctttaatttcatcctgaatatttggagaatcaaaagaaacttcatgtaacctgtgccatagtgggtcttataataatttttctttggaaataacaggagattctcataaattacataattttacattttattcaagtccaaactctgggtttcaagaaagatattttcaagtagctgaatggtttaaccgtttatttttaaattttttcctctagatgactaaaaaaaaatttcctgaaatgtgatgtcactaatagttatcatgaatttgtcattttatatgtgtttttattaattgatccttcaatcataggtatgttcatattggaggatgaccggtttggcagcagctctactagyacatttttccttgatatcaatgaagatacagagccaacattttatgaccgatctggacccataaaggataaaaattcattccctttctttgcttctagtaaacttgtgaagaatcgtatcttaaattcgcttactttgcctaacaaaaaacatcgtagtagcagtgatccaaaaggaggg

SEQ ID NO: 741560 - DNA, 637 bp, Homo sapiens
taagtactttaaggtttggctgagtgcaaacagctcacacgtttgaggagaccaattattaggcaattttcttaactctgcttctataagagtttcattttctcttagtgaatacccattgtgtctttttttccttaatcgcctgggaggaaccatctatcatcctgtcctgwagggagttcctcctagatctggtcggacctttgtatggtaattaagatttagatgtcctgttaggaaacctgctgggttaagaatttttgataggaaggctacggattgtcagtggcctcagtgctttcgggctatgcccttgtttacactgacaacaaggtggtattggattgttatagggttacagggaagaccttcaattatcaattgtgggttttaaatttaccctggcttttaaaggaatagggtacactgttttttctttactacttccatctctctttctttctctttgacttctcctttgtctctctctttctctctttctgactccctctttgtctgtctcttcctctctttgtacttctttctttgactttttgtctctctggttctctccttgattagagtatagaggggcctggctatctcgctgtgtccggggatccatagtcagcaaacg

SEQ ID NO: 741561 - DNA, 637 bp, Homo sapiens
taagtactttaaggtttggctgagtgcaaacagctcacacgtttgaggagaccaattattaggcaattttcttaactctgcttctataagagtttcattttctcttagtgaatacccattgtgtctttttttccttaatcgcctgggaggaaccatctatcatcctgtcctgtagggagttcctcctagatctggtcggacctttgtatggtaattaagatttagatgtcctgttaggaaacctgctgggttaagaatttttgataggaaggctacggattgtcagtggcctcagtgctttcgggctatgcccttgtttacactgacaacaaggtggtattggaktgttatagggttacagggaagaccttcaattatcaattgtgggttttaaatttaccctggcttttaaaggaatagggtacactgttttttctttactacttccatctctctttctttctctttgacttctcctttgtctctctctttctctctttctgactccctctttgtctgtctcttcctctctttgtacttctttctttgactttttgtctctctggttctctccttgattagagtatagaggggcctggctatctcgctgtgtccggggatccatagtcagcaaacg

SEQ ID NO: 741562 - DNA, 637 bp, Homo sapiens
taagtactttaaggtttggctgagtgcaaacagctcacacgtttgaggagaccaattattaggcaattttcttaactctgcttctataagagtttcattttctcttagtgaatacccattgtgtctttttttccttaatcgcctgggaggaaccatctatcatcctgtcctgtagggagttcctcctagatctggtcggacctttgtatggtaattaagatttagatgtcctgttaggaaacctgctgggttaagaatttttgataggaaggctacggattgtcagtggcctcagtgctttcgggctatgcccttgtttacactgacaacaaggtggtattggattgttatagggttacagggaagaccttcaattatcaattgtgggttttaaatttaccctggcttttaaaggaatagggtacactgttttttctttactacttccatctctctttctttctcttygacttctcctttgtctctctctttctctctttctgactccctctttgtctgtctcttcctctctttgtacttctttctttgactttttgtctctctggttctctccttgattagagtatagaggggcctggctatctcgctgtgtccggggatccatagtcagcaaacg

SEQ ID NO: 741563 - DNA, 534 bp, Homo sapiens
atttcaaattttttccagtaggagtaatcaatcactgtattaacctaatttggaatagcttataaaatatatttagatgtgtagcactccaataaagaaaaatataaagctacaatacacttttactaaaggtcttaagaaaattttaagaaaatctttagaaaaaaatacttgtatttgggaagattcaaggtcctaaagggacaggagtatagctgtcatagaagtggctttctgaagccccctaagagtatctacagacactgttcagtggttaaggtattagagcacttgaaggacattactgckttagactagcatactgcatgctagggatgatctgaagaactatcccaaccaagtttattcctcagttccacctacctgccatctgtggtcacatcctaattttgagccttagggtccctcgggtggaaatgggctggtaaatggaagaagtggggtaataggtaaaggagagcacaaggaaattaatagttattgagagcctattataaggctgacattagatat

SEQ ID NO: 741564 - DNA, 623 bp, Homo sapiens
gagggtttcagtctctgtctttggacaggagattcaggtaaagagctctgcagagaaatgcctttgcttccacctgtctcagtactgggggtttaggtccaagtttttccaaccctgtttcacaacagagtttcaggtcaaaggactggtagttaagcaccagmggttttcttctaaatggcatacttttaaggcagtgaaatgttccaaacaatgctgcactttaagaaaatacatttcaaaatgagagctcttgcattagtctcatccaaggatgcttactgatgtgcagaagcttctaaaaagatttcaacattttgttgcctattttaaaaaactcttcacaaaaggctaaaagagagctatcctggataaagtgtttattaaagccttaggtaaagtaggcttacttcttcttcagagctatctaagatgagaatattttctttgccctattgcttgataggctcctgccaaactcaggaattttagctaagaaacagaagctaagttaaaaacaccacccattgaaaagatgggtctccaaaatacatctttgttgtctagccaacaactgcttagggcaatgaaacaggtaattggaagactgatagtctaaaagg

SEQ ID NO: 741565 - DNA, 656 bp, Homo sapiens
atgaagctacaagtaaggtatttgatgtccttcaaaaactactcatcctaagcttttctttcctaatcaattttataggtgctatcacatgttaaaagctattctagttcagttaagtaagaaagttcctgaatatgatttcaacttcccaaatgattsagcagtactatacttgcctcaaggcctatccacaatactcaagttacaacatagttagaaaagatttttaaaagatactttcaccttatattttaaaaaccaaagctctctgaagaacctgcaaatttgtccttttcccaaaaacctagctatagcaacaattcaatttcatcctgggtaattaaagaatgattaactaaactttctgatatgtttctgttgaaaaattatttataaaactgatccccaaaaaacttagtacaatgtaaaggcacctaggaaaacatcaaattcatataggtaataatttgtctcacttagctcatgtacatacatgtacactcataatccatgctttgttagattctttgatgaacacagaaactatatatccaaaatcagtgctatcccatacacaaggattctgaatgcagtattatttttaataatgaaaactaggatcaaatatcagtgttgcttaataagataatgattaa

SEQ ID NO: 741566 - DNA, 656 bp, Homo sapiens
atgaagctacaagtaaggtatttgatgtccttcaaaaactactcatcctaagcttttctttcctaatcaattttataggtgctatcacatgttaaaagctattctagttcagttaagtaagaaagttcctgaatatgatttcaacttcccaaatgattgagcagtactatacttgcctcaaggcctatccacaatactcaagttacaayatagttagaaaagatttttaaaagatactttcaccttatattttaaaaaccaaagctctctgaagaacctgcaaatttgtccttttcccaaaaacctagctatagcaacaattcaatttcatcctgggtaattaaagaatgattaactaaactttctgatatgtttctgttgaaaaattatttataaaactgatccccaaaaaacttagtacaatgtaaaggcacctaggaaaacatcaaattcatataggtaataatttgtctcacttagctcatgtacatacatgtacactcataatccatgctttgttagattctttgatgaacacagaaactatatatccaaaatcagtgctatcccatacacaaggattctgaatgcagtattatttttaataatgaaaactaggatcaaatatcagtgttgcttaataagataatgattaa

SEQ ID NO: 741567 - DNA, 613 bp, Homo sapiens
ggaattcatgtttttgggtgagctgaacaccctcaactctcatcttacagaatgagaagttaagcattcacttatgtgcaaatagaatggctattatcctgactttggagtgatcttaatagacaattggcactgttatctaatttctgccagaaagaaggattatagattacttaagtcaatgtcataatttttggtagataacctyctaactttttgctgatttatattttaaaatcccctataacaagtaaccttatttagttatctgggtaggcattacttgtgtctagtttgtcttagagggcataatacaaagtaacactgctcaaattaggtgctttagagagagttttcggtgtgaggcaggcatttggttatcactgttttaaaaattttccaacctaaagttcacgacatagaacactggccctaaactacttgctgattacaattataaacctgctagtgaaaaacccttggaccacctggaaggtaagcatacaggcaccttccttataagcctcctcgattttcacgagaacatgtcaatccaacccagagttcctcagcttgccaatacccacagcactgtgctaactggcaagggaga

SEQ ID NO: 741568 - DNA, 565 bp, Homo sapiens
cttccacaatggttgaactaatttacactcccaccaacagtgtaaaagcattcctatttctccacaacctctccagcatctgttgtttcctgactctttaatgattgccattctaactggcataagatggtatctcattgtggttttgatttgcatttctctaatgaccagtgatgttgagctttttttcatatgtttgttggctgtataaatgtcttcttttgagaagtgtctgttcatatcttttgcccactttttgatgcagttgtttgtttttttcttgtaaatttgtttaagttccttgtacattctggatattaacccatgtcagatggatagattgcaaaaattttctcccattctrtaggttggctgtttactatgatgataatttcttttgctgtgcagaatctctttagtttaactccatcccatttgtcaatattggcttttttttttgccattgcttttggtgttttaatcatgaagtctttgcccatgcctatatcctgaatggtattccctaggttttcttctagggttttcatggttttaggtcttacac

SEQ ID NO: 741569 - DNA, 590 bp, Homo sapiens
aattcagaggtcatgggataagctatgccagtgggagggcacagatgggcttgtctctatgcttttttttttttttttttttgagacagggtcttactctgttgcccaggctggagtgcaatagtgtgatctcggctcactgcaacctctgtctcccgggctcaagcaattcttgtgcctcagcctccagaatggctgggactacaggcatgcaccactatgcccggctaattttttgtatttttagtagagatggggtttcgtcatgttgcccaggctggtctygaacgcttgagctcaggcaatccacctgcctcagcctcccaaagtgctagggttacaggctggagccaccacacccggcctctatccttttttaaagatcactttcatgaaactgaaagtatgactgatttgacactttgaggaagtaggggaaattttactgatctttaatagataattacgggaggaatattgttctatttattttggtgccttttggtttcctcccgcttacatggacacatttatagagtacacaatgttttacaatttatatttctcaagaaaaacagaattctaacaat

SEQ ID NO: 741570 - DNA, 492 bp, Homo sapiens
ttacatgtaaatcttaatccatcttgagttaatttttgtatagggtataaggaagaggtccagtttcagttttctgcatatggcttgccagttttcccaacaccgtttattaaatagggaatcctttccccatttcttgtttttatcaggtttgtcaaagatcagatggttgtagatgtgtggtgttatttctgaggtgtctgttctgttctattggtctactttatccgttytggcaccagtaccatgctgttttggttactgtagccttatagtatagtttgaagtcaggcagcgtgacacctccagctttgttctttttgcttagcattgtcttggctatatgggctctttttggttccacatgaaatttaaagtagttttttctaattctgtgaagaaagtcaatggtagctggatgggataacattgaatctataaattactttgagcagtatggccaatttcatgatattgattcttcctatccat

SEQ ID NO: 741571 - DNA, 616 bp, Homo sapiens
acctaacagctatcataaataatcagagcctatttgaaggtggaagatgggacattagaagctatttacactactagagtgatgccatcgatcagtagcggcaacccgtagataaggctcctatgatgtcatggttatttatgatgggcattgacagtaaagctactayggaattttctcctcagacagcttcattcatttttgtttgtgatgcattttgttattaaagaagcaatcaatagcaaaaatcgtggtgataaaagtattacttgttaaatatgtgaaaaatgtgcatgtatgtaagaatgtgggacaaaagatgaagaatttaaaaattcactggcagtgtttacgtgttccagctacaaatacataatagattcatttcacatgtcttgggctttcaaatgtggcccacttgttcttcctcttacatcctattctcttgttagaaagcagagttaaaatgttgtggtgccctcccacttccccccacatcatatatttgactcactttagacaatataaaatttaattagagaaatcacatgtgataaagacaaacacccattactttgtacataacccatctatatgagagcaaatttggtgattt

SEQ ID NO: 741572 - DNA, 616 bp, Homo sapiens
acctaacagctatcataaataatcagagcctatttgaaggtggaagatgggacattagaagctatttacactactagagtgatgccatcgatcagtagcggcaacccgtagataaggctcctatgatgtcatggttatttatgatgggcattgacagtaaagctactacggaattttctcctcagacagcttcattcatttttgtttgtgatgcattttgttattaaagaagcaatcaatagcaaaaatcgtggtgataaaagtattacttgttaaatatgtgaaaaatgtgcatgtatgtaagaatgtgggacaaaagatgaagaatttaaaaattcactggcagtgtttacgtgttccagctacaaatacataatagattcatttcacatgtcttgggctttcaaatgtggcccacttgttcttcctcttacatcctattctcttgttagaaagcagagttaaaatgttgtggtgccctcccacttccccccacatcatatatttgactcactttagayaatataaaatttaattagagaaatcacatgtgataaagacaaacacccattactttgtacataacccatctatatgagagcaaatttggtgattt

SEQ ID NO: 741573 - DNA, 612 bp, Homo sapiens
ttaataagacaaataaatgcccttttctgaagaatctaaattttcttacttgggatctgattatgaaattccaattataaataaactcccaaccccttacccaaaaaaggaatgtctccaagtttagactgaggtaggataaatactcmacattctattccaaataccaagaacaaggtaggtattttccctgctgcttccttaccctgaaatttgacgttcattttaatgatgcttactttattacttgtcagaaaagtgaaatggcctgtcaattttatggagtttctcctacctttcaaatgattatattacattttgaaataagtgtatagctcccacctcctttttttaacctaaatggttcatgtgtgggtttggtacttggctacgagtggaatgaaatcataatttcaggagtccaaaagaatagatcaaaatcatgccaacactttcatggatggatatatgctgctaaatggatgtttacctagaaaagtcatcatctggcatgcaacagagtgaatgtttctaagcagctaactcatgtatactaaacaaatttggcttggctgctgtgagagctgccctttggaaattctcaacatacat

SEQ ID NO: 741574 - DNA, 612 bp, Homo sapiens
ttaataagacaaataaatgcccttttctgaagaatctaaattttcttacttgggatctgattatgaaattccaattataaataaactcccaaccccttacccaaaaaaggaatgtctccaagtttagactgaggtaggataaatactcaacattctattycaaataccaagaacaaggtaggtattttccctgctgcttccttaccctgaaatttgacgttcattttaatgatgcttactttattacttgtcagaaaagtgaaatggcctgtcaattttatggagtttctcctacctttcaaatgattatattacattttgaaataagtgtatagctcccacctcctttttttaacctaaatggttcatgtgtgggtttggtacttggctacgagtggaatgaaatcataatttcaggagtccaaaagaatagatcaaaatcatgccaacactttcatggatggatatatgctgctaaatggatgtttacctagaaaagtcatcatctggcatgcaacagagtgaatgtttctaagcagctaactcatgtatactaaacaaatttggcttggctgctgtgagagctgccctttggaaattctcaacatacat

SEQ ID NO: 741575 - DNA, 522 bp, Homo sapiens
tgacagcactaattcttttaaaaaattattttatcatagcaagaacgcttattatgagatctacccttataacgaatattcagttgcacaagacagcactgttgactatacacgcaatggtgtaccgcggatcccaagaacttacccagtgartattttccaatgtcatttaacattgattaggggttctaatacagctagtgttcaaaacccctgcaaatggaggacaaacgagagatttcggtagcttctggcaactaagcctagagataactaaggtgaggaccctacttctacttgttatgaaatgaggaaggaatgtgtttacaggaaggatacctgggtttaccagtctaagttacctaattagcccagaggaaagtaattattgaaattttgcatttgtttcaagctctataattgttataaatctacaacaatgttacactatgggctaatggagagccagctgctcttcttgtgctagcacgttcttgaaaaggaaacatttctatcctgcca

SEQ ID NO: 741576 - DNA, 598 bp, Homo sapiens
tgcgtatgggtcagataggaataaataaaattactactatttgaagttggcatgatgatctttatagaaaatgccaaggaatctacaagaaaatttgtagagctaatacttgatatcatcaaacgtgcaaggcacataatgaacatacaaaaatctattgtagttctacatactagcaatgaacacgttgacatcaaaatctgaaatacatcaatcacaacagctcaaagaaaagcttctgtataaatacaataagataagcccaacagtgtatacagaaaagtacacaacactgaagaaaaagttcaaagaaatgctaaataaatggacagatataccatgttaatagtatggaagatggaagactcaataatgtaaagatataggttacttccmaactgatacacaggttttacacaatttccaccaaaatcccagcaagaatttttgggtatatagcaagatctttctaaaatttatgtgggaaggcaaacaaacaaaaaaaaatagaatagctcaaacattttgcgagagaagaataaagcaggagaaacagttcacctgatttcaagacttattttatatctacaacggttaa

SEQ ID NO: 741577 - DNA, 482 bp, Homo sapiens
atataccatgttaatagtatggaagatggaagactcaataatgtaaagatataggttacttccaaactgatacacaggttttacacaatttccaccaaaatcccagcaagaatttttgggtatatagcaagatctttctaaaatttatgtgggaaggcaaacaaacaaaaaaaaatagaatagctcaaacattttgcgagagaagaataaagcaggagaaacagttcacctgattycaagacttattttatatctacaacggttaagactatttggtatcggcagattggcaaagacataaacccgtatgtcaatggatcagaacaaagaacccaaaaataaacctgaacaaatatctccaatttattttcaacagattcaaaagaaattgcatagaataaaccaacaaattatgatggatcaattggatgtccatagcaaatagtaagtttaacaccttatataaaaattacctcaatgtg

SEQ ID NO: 741578 - DNA, 601 bp, Homo sapiens
aggtgcagcaaaccatcatggcacatgtatatttatgtaacgaacctgcatgttctgcacatgtattccagaacttaaataaagaacacttcacatgagatctactttcttaacaaacttgtaagtgtacaacccactattgtcagctgtaggcacaatgttgttcatcggatctccagaacatactcatcagatataacccaaaccatgtaccccttaaatagcaattctccattttcctttcttccctacmcctggcaacctccattcttttctctgcttctgtgcattgtagattccccatggaaatggaatcctacggtatttgactttctgtaactgacttggttcacacagtataatgaccttgaggttcatccatattgttgctatggcaggatctcccttttgaagagtgaagagtaatcctccatgggctatatatacaccacattttctttatccatcaatcagtggacatagtaggattttttctgtacctccactgttttgaattacacagcaatgaacatgagaacacagataacctctttgacatcctgatttcctttttttttctttttttttttttttgaatatg

SEQ ID NO: 741579 - DNA, 671 bp, Homo sapiens
tcacttcttctgtatttctggatcctatttaatatgatggatatagaccatgttttttcatcggttgactgacatttgtattgtttccactttttgcaattatgaataactctgctataaccatttgcatacaaatttttacgtggacacattttaagtatagaactagctgtggatttgctggttcatatggcaatgttatgtcgaacttccggagtattttacaaaatagacgcaccattctatattctcaccagccatagggaagtgaaacacccatacacctcctcaccaacacttactaactgtctttttgatggtacctattttagtggacatgaactggtatctcagtacgkctttgatttgcatttccttgatggctaaggatgctgagaatttttatacgggcttcttggccatttgtgtatcttctttggggcagcgtctattcgattattgtgcccatacttggtaatttgtctttttattgctgagttttaagagatctttatgtattccagatgcaagttatttatattttatataatttgcaaactttccctattctatagatctttttctgttctaatgttttttgaaatacaaagtttaaaattttgatgaattccagttaattcttttcttgtgcttttgatgtcatatctaag

SEQ ID NO: 741580 - DNA, 624 bp, Homo sapiens
catacttggtaatttgtctttttattgctgagttttaagagatctttatgtattccagatgcaagttatttatattttatataatttgcaaactttccctattctatagatctttttctgttctaatgttttttgaaatacaaagtttaaaattttgatgaattccagttaattcttttcttgtgcttttgatgtcatatctaagaagactttgcttaacatcaggttacaaagatttactcctatattttcttcaaagagtttgagctgcacttcttacatttgggtctatgatttatyaatttttttgtggatagtgtaaggaaggggtaccctcttgtggatactcagttgtctgagcaccatttattgaaaaactatttttttcttgattgttttggcatcttgtcaaaaatcaaattgacgggtaatgtcagtggtttttatctctggaacgtgaattttatttcattaatccatgtgtctaatgcaagcataatggaatcatgatcaatgcggtttcctagaaagtgctgaatcaggtaggtatgaatattgaaatttttcttttttaaagattgttttgagtattctaagtcctttgaatatccatatgcattttag

SEQ ID NO: 741581 - DNA, 639 bp, Homo sapiens
acacataactttaacttcagactgttttagaaaccaactgataaaaatcactgccaataatccccataaacttgtaataactttaggtttataaattaatttcattattatgattactgatataactttcagctaatcgatcccttgtrcgcacacaaaaaaaaagagggagaaagatatttctcattgagtgtcattttttgtggttactctgcaaccatttaagtgtgaccgatcattataagttccatatttctttacaaggtgattagtatcattttgatatttagtatattaatcagcatccactcaagacagcaaaaccataaagtaatttaaacacagaaagtttcatgtaaagaaatattaagtatataaggagttaaaaacatgaaggattgtgtacctcaggggtaaaaggaattttaaagaatagaggaataccggatatagggagaagtcactacctctcaggggaagtgccaccaaccaaagaagtacatctgggtttttctgcctgggttgacatacatagactctgccccatggtgtatgggaaaatggagacgttcactacggtgctgcatcaagctgtcccaggggaggtgccaagcctcggaagtcactgcaaagctgtct

SEQ ID NO: 741582 - DNA, 656 bp, Homo sapiens
ccatcctttaagatggcattgtggatcctgctcaaatactactgatggttctatctgtatcattcgatgccttgttgttgtaatttgttttaattttaaaaagctttgcctggaagaactgatatttcatggtcatcagtgaactcaattgactaaggaatgtatcctaacattaccttctagtagattccttcttgaatataacctctaaaatggtcttctttttaaggctttctttgtcttcactctatcgctcaccctttacctttccagagtcactgtctctggaatttttgtgataagaaaacttgtttaatatttctctatgggtaagctttaggagagtgggacttgatgagagtgataagcttttctgaccactttttcagtgtggaaaacactgatcatagcacatgttcaataattatcttccataaacacttgtgattgccttattattttgagtcagggtcttgctttgttgcccaggctggagtggtgcagtggttgattsatggagtcatgattggttggatcactgccgcctggacctcctgggctcaagccatcttccctccttagcctcccaagtagttgagactacaggcacatgcctcatcacacttggttatttttatattattttgatagagaca

SEQ ID NO: 741583 - DNA, 634 bp, Homo sapiens
gaaaacaatggacaaagaagtgctggtgtacaggataaattgagcagaagtgagacaggacgaggaagtccttggtccgggagaaaagtggaacccagtcatcaaggacaggacacccaggccatagcaggagagatggctaggacagggccagtgaaaggcagaatgtggaaaaacaagaaaaagagcaaaattgagcatcttctgtgtattgggcatggtgcccaggttttatacatatgttatggaggttgagattgctaagtaaagaaactgggtgaggatgaagtcatttacygagatagggaacgtaggaggggaagcttgcagggctctgttatgtaaaaatgcccaaacatagctgctcccaactgcttgccaccattgtttctctttctacacccgaccctattctggcatttcttccccatactccctctctctccctctcttcccatcccattcctctcaggctgattatgttcatgatctatgtggattgctccaagatgtattctggctacagcagtgaatattgattatctctattatgggaatggctaaataattagatgagtccattgggatccaacttcctgtgactcacagacacagcctaaagacaaaaaatgac

SEQ ID NO: 741584 - DNA, 634 bp, Homo sapiens
gaaaacaatggacaaagaagtgctggtgtacaggataaattgagcagaagtgagacaggacgaggaagtccttggtccgggagaaaagtggaacccagtcatcaaggacaggacacccaggccatagcaggagagatggctaggacagggccagtgaaaggcagaatgtggaaaaacaagaaaaagagcaaaattgagcatcttctgtgtattgggcatggtgcccaggttttatacatatgttatggaggttgagattgctaagtaaagaaactgggtgaggatgaagtcatttactgagatagggaacgtaggaggggaagcttgcagggctctgttatgtaaaaatgcccaaacatagctgctcccaactgcttgccaccattgtttctctttctacacccgaccctattctggcatttcttccccatactccctctctctccctctcttcccatcccrttcctctcaggctgattatgttcatgatctatgtggattgctccaagatgtattctggctacagcagtgaatattgattatctctattatgggaatggctaaataattagatgagtccattgggatccaacttcctgtgactcacagacacagcctaaagacaaaaaatgac

SEQ ID NO: 741585 - DNA, 646 bp, Homo sapiens
attttcagtgttaaaaaacttttaaaaatagacattatggttacatgttcaccttgaggtgatacgagcgatacacattggtaaaagtgagaactaggaagagatcaagaacatagagaagggaacagaatttccactggacagctaagcttaggggtgatattccaggaaacctcatgcggaaccactttagttttttagttttaccacctgcccctggcaaaaatttccaagaggctttttggtactattagcattgtsttttaaaaaatatggtgagtgtggtaattgtcgtcatttccgaaagatgagtaatcgaacaataaaattgtacattcgtcgagcctcctctacttacacttttttaagtttatcacttaaatctttgaaacgttgtgacttcttagttgtgttcgtttattttcttctccttttataacacttgatacataactgcaaaagagtcttaaatcttaatttggagacttaattttggttttattaactatgagtgcactttctaaaacaagaggtcacaggagagtgtggaaaccattccttccttttccgtaaacctgtcgactttgaacaagcttagtcaagtgggaagtattacatgaaagcgttttctgttgacagagcattg

SEQ ID NO: 741586 - DNA, 646 bp, Homo sapiens
attttcagtgttaaaaaacttttaaaaatagacattatggttacatgttcaccttgaggtgatacgagcgatacacattggtaaaagtgagaactaggaagagatcaagaacatagagaagggaacagaatttccactggacagctaagcttaggggtgatattccaggaaacctcatgcggaaccactttagttttttagttttaccacctgcccctggcaaaaatttccaagaggctttttggtactattagcattgtcttttaaaaaatatggtgagtgtggtaattgtcgtcatttccgaaagatgagtaatygaacaataaaattgtacattcgtcgagcctcctctacttacacttttttaagtttatcacttaaatctttgaaacgttgtgacttcttagttgtgttcgtttattttcttctccttttataacacttgatacataactgcaaaagagtcttaaatcttaatttggagacttaattttggttttattaactatgagtgcactttctaaaacaagaggtcacaggagagtgtggaaaccattccttccttttccgtaaacctgtcgactttgaacaagcttagtcaagtgggaagtattacatgaaagcgttttctgttgacagagcattg

SEQ ID NO: 741587 - DNA, 607 bp, Homo sapiens
cacttccccatatgggcatctccctggttcttaatcccaagcgtttttcatgacgtcttttacctgggctgctttcttctttcctgtgcttatccagaatcccaagatttatttaagactcaccttgtttgtgaagtctttctgaggctcctcaattttctgtcttgctttcctttgatggcatcttcctgttggttttgtttctttatcttgstttaaatccctaaacagaaatgactgcattttaacatttcatttctgtgtcctttagcactttcatcagtgctgtattcttaagagatctgtactagatatttctatgcctgggtaattaattagaaaatgtttcaattacttttttttaattctaaggaatttagctttacagtttgtatagaaccactggccatgtgtatgtaatgttgagccctgtgatctaaatcattttcatcttcattgctattattttgacttctggggtgtagtaagcatagaaaccaaagacaattacccttagctgccaagtctccagggggaatctcggtaataactctgttagcttggccaacatcctcttctataaaatgaaggttgactacttttagag

SEQ ID NO: 741588 - DNA, 584 bp, Homo sapiens
atttcaaatatgagataattataacttgtacactgcctacatgaaatttattataatgttatattgcattatatagtgtgttacaattgaataacaattgcattgccttgtacttctaacatgattcagaaaatgagcatgtcttcttagctcacatattctagcttaaatattgtatcaagtcaaatagcaatataagattgactttattcacttaccctccattcaaagtagacacacatttgttgctgttatttgggggaaaatccatgtttagtaagtgtttatttaacgcttacatagtgtttaacatattccaggctttgttgtaatcatttcaccaatattaactyatttaatccttgtaacaatcctgtgagatactgttattttccacatttcatatagggagaaaagaggcataaatgggtcaagtaatttgctcaagttccaatgacaagagagtggcagagccaggattcagatccagaaagtcttactccagactaaaagagttgtcactgtgacaactctgctagcaaagctctgagataatgcttttccagtggaaataatgacatttt

SEQ ID NO: 741589 - DNA, 612 bp, Homo sapiens
ctttgcaaatattttctcccattttgcaggttgtcttttcactctgttgattattactattattattattatttgctgtgcagttttgaagttgaagccccattgtcgatttttcattttatttttttttcttgtgcttttgagttcttagtcatcaattatttgcctagaccaatgtccagaagtattttttcctagattttcttctaggatttttgtattttcaggtcttacatttaagcctctaatctgtcttgagttgatgtttctgtgtggtgagaaacaagagtmcagtccatttattcttctgcatatggcaatctgattttccaagtacattttattgaaaagattgttcttttcccggtgtatgtttttgttgacattgtcaaagattaattggctgtaaaatgtggctttatttctaggtgctcagttctgtgtcattgatctatgtgtctatttttatactagtacctttctgtttagttactattgccttgcattataatttgaggttaggtagggatgttttcagctttcttttgcttaggattgctttcaatatttgggctcttttatttggtaccatgagaattttagaattgtttt

SEQ ID NO: 741590 - DNA, 632 bp, Homo sapiens
gcatattgccatagacaaaaaagagacaagacccaaactgttaaaatcagaaaaaaaaatggagacattagtaccattttataaaactaagaaggatcatgagagtgtactatgaacagttgtatgccaacagattggatagttttcttagtttctttgtgcttctataacaaaatactaaatattgggttatttataaatcatggaaatttatttctcatagttgtggaggctgggaagtccaagatcaaagtactggcaggttcagtgtctggtgagggccgagtctgtttcaaagattgcaccttgaaccctgtatcctcacatggcaaaacaaaggggaaaaaaggaagctgctatttctctacagcccttttttcaagggactaatcctatccatgagagcacagccctcctggcctaatcactcyttaaaggcctcacttcttaatacggttgtagtggagattaagattcaacattaattttggaggggcaatattcaaatgatagcagtaacctagatgaaatagacatattcctaaaagcacgaaacctattaaaactcagtcatgagtaaataaaaacaacttgaatatacctacaactaataaagagattgaatcagtaat

SEQ ID NO: 741591 - DNA, 581 bp, Homo sapiens
agaaaatatgcattaatgctaatgtctgacaaaagaaataaagatgagatcaatgaaatacaaatagcaagcagctagaattaatcctaatcacatcagtgttcttattacgtacaaatggtctaaacaccctgattaaaaggttgagattgtcagttcacattgagaaagagagatctaagtatgttctgcctgcagggaataacttgatatataacaacacaatgtaaaaacatgaaattaacttcagaaacgttaaagatctcagtgaactcactctctcatgcaaaaacaacaaaatactggcaaaacaattaaaataaactccttcaggactctattaattaatgccacagaaagagttgaaaatcttctaccaagagaaactatggaacctcaataagaaagcagrgtgtatgatgtttgcccaggccagtggtgtggtagctagctatgaacgagtgacagcctcgtacctaacagagaagaataacctattgcggagctctgttaaaagctccatggccagaaatagtcaatatttagtccagattttcaggtctcaggaaaatttctacatg

SEQ ID NO: 741592 - DNA, 633 bp, Homo sapiens
attagagaggacacaaacaaatcgaaaaacatttcatgctcatggataggaagaatcaatatcatgaaaatgtccttactacccaaagtaatttatagattcaatgctatccccatcaagctaccactgactttcttcacagaattgcaaaaaaactacttttaaaatccatatggaaccagaaaagagcccacatagcctagacaatcytaagcaaaaagaacaaagctggaggcatcatactacctgacttcaaactacactacaaggctacagtaaccaaaacagcatggtactggtaccaaaacagatatatagaccaatgggacaatacagaggcctcagaacacatctaccaccatctgatctttgacaaacttgacacaaacaagcaatggagaaaggattctattcaataaatgttgttgaaaaagctggctagccatatttagaaagctgaaagtggatcccttccttacaccttatacaaaaattaacacaagatggattaaagatataactctttaatccaagatggaataaagacataaaaccataaaaaccctggaagataacctgggcaacaccattcaggacataggcatgggcaaagacttcatgactaaaacacca

SEQ ID NO: 741593 - DNA, 645 bp, Homo sapiens
tgaaatctttatgctgtattttcttaaatagattacctgtatttaaaatgtttcatttatacctcaaagggatcttaccaataatctctacttgagagaactgcattcttaaaaaatagttttgattatttgactgctaggaaattatagatgtcagggacaactttaaataaaggggcaaacaaatgcttaacatgattttcagagctctaagttcatcttcctgtctcaaaatatatcctttatctccaatgatgtccgaaatgtcttgcagaagtcgtggtagctattaaagattaaattattttggaatttcattttatattttagaacaaaatactttatggagaggttcaaggtagttgattagatgtagctgggatgcacctcttccataaagaggagccaaaacattgwgtaaaacatacttcaaacacatcttttgagagggaacactgaaattcaatagggaggtgatggaagacactgtgattgaagaaggaaaaaacagggctgcctacttaacatcgctgggtgccgggaccagccctcagacccagacccaggcccaaggaaggggtaagtgaaggaaccccaggataccacattcctgctgctggcccctgggatcctagctacaagaga

SEQ ID NO: 741594 - DNA, 582 bp, Homo sapiens
gatagggattaagataattgttctccagctagctagatgcaatgcagctaaggagaagggctatggtgcagggtctggcttcaattattttcagcccagcaggtcttttagaaatgtcttttagaagtgccagcggtatccaattgtttcggcaacattagacacaaactttttcgtatgagatgtgttgaaaatacagaacaaatgaaatattttttgtaagtgtccattaaatttagtctcattgatccttagtttcttttatgcaaatgtggataataataatatatacctcatatgatggttgtgaaatttaatgaggtaacaaatatagagcacttataataaaactcartaaatgttaactatcatcatcatcagtattgtttttgtttgggctcattctgatgaggctgtcaataacagtttttttttccctttgttcttctgcttaaagggctgggcaaggaattcagccatgcctgaccaaacttactcagcagtgggttcaaaagatgctgcattaatgtcctagggctgccataataatcacaaatggagtgatttcaaataacagagatg

SEQ ID NO: 741595 - DNA, 571 bp, Homo sapiens
aaaggttaaatttagaaaaggacaattaatagtgttatggctagccataaaacatctctctagcagttaaaattattttcaagttcaaaaatgcctcatctagacccattctgcgaagagcattggcaactgcctcatactgtagctcagtagctaagactttgcatgggttttatttccagcttaggaaatgagccatttctggtttgatgtttgtatagtttgccatttattgattatcttcccctctatgggcagcttctgatttcttatcttaattttttttttctttcattcacctttgggatgattccaratcttgtaaaaactgctcactgtctcttttgaaaacacctcatgtgtccatgtttaagttataaccttagttaaggcttattggtttcacttagaatacctatcattaaaaaggcttaagagacagaggtatcatctgtcctgggtaaaatctggtaataagatatttgaaaaaaattcccttcaagagctctataattaaaagtaggcttagttaggctgatatttcagctacatgtgtgtatatattgtttta

SEQ ID NO: 741596 - DNA, 495 bp, Homo sapiens
tctccactaatgttttgaccactcaaagtcattgatgagggttgaaataaacttcttccaaactcttgtcaatgtttgcttttgaccttctttcatgaatcatgaatgtgctgaatgaaaactaggatagtgaataatttccaaaatattttcaatttactttgcttacatctatcagaggaatcactatttatggtgctaaagccttttgaaatgtatttcttaagtattaagacttgaaagtgaaatgatgccttgacctatgggctgcaraatatatgtggtttttatcaaacatgaaaacaatattaaattgtttgtacctctccatcagagagctcttgtatgaataagtgcattgtcaatgggcagtaacattttgaaaggaatctttttttttctgagcaataggactcaacagtggacttaaaatattcactaaaccatactgtaaacaaatgtgccatcatctgtttgttcaatttatagtgttga

SEQ ID NO: 741597 - DNA, 529 bp, Homo sapiens
taaggggtgcatgtgagagggtcgtgattgattgagtaagcaggggtacatgactgggggctgcattaactggtaattagatcagaacaaaacaggatagggattttcacagagctttcctatacaatgtctgtaatctatagataatataaccaattaggtcaggggtcgatctttaactaccaggcccagggggtggcgccgggctgtctgcttgtggatttcatttctgccttttagtttttactttttctttctttggaggcagaaattggacataagacaatatgaggggtggtctcctcccttataaccaattttcaagttcatgtgacttaaagtataacattactaaacaagctagctttaaaattcttggtggaayaaaaatagaaatgcctttgtaattgtcaccatacattttgtctgaattttatgtttgtctttgctagatattttaagatgtcagtgttaattcaagctggcagctgcttggggcgagcctgccttccattctattcaaattctc

SEQ ID NO: 741598 - DNA, 615 bp, Homo sapiens
gtagtttattatcaagtattatgttctgtacataattgcatgtgctagacttttatacgactggctgtgcaataggtttgtttacaccagcaccaccacaaacatgtgagtaatgcctcacactatgatatgaggatggctatgacatcactagacagtaggaatttttcagctttattataacgttataggattccaatcttatatgtgctccattgttgacagacatgttgtcatgcagcatgtgactgcattccacacaagggcttctccttagagcaacagtgttccactatttgcatcagtatccaatggagaacatgggaacctgtggatattgtgtatatcctccccaagctaaaagtagcttccagaagtctaagagtttccagattgtcttcttcaggtcattcattcacagtaaatgggtgtacccstagaatgagggggtgtttccttactttctaccgagtctggcagacctgccgcctgagctcccttgaccagccaccaccacctcaggaacattacccatgatggtgttttctgaagtaagtttgcatttgtcactatgatgtcagccttacatgactcatttacaaggaaattgaagta

SEQ ID NO: 741599 - DNA, 583 bp, Homo sapiens
attttgcatcggaaggaaaaccctgatagcagctctcacagagtcagggtaaaatatccaaactatagaaacagtaaatgtatcagttagaagaaggaaaaggtattccttttttcctgaaatttcaaaacttatctatgcaaatgatccacaatgctaagggcttcctctggggacggttgtcttggaaagtaggccagcaagcagacttgcattgtgactgacggagatgctatggtttactgaagataaatgttcatttttcctgaaaacgagggttcaaagaagcctcctggaaaaggtgatccttagaatttagaaaaacaactaagccctcccctacatcacagtatattaatactctctctggatatttctcactccctgcctcttaggtctagaatattctacmaagatatgctctatacagaagagagggcaaggtttctttacaatgcaggacacagggagcacccaaacacacccatggcagggcacccatgtaccaaagccttggcaactcaccaaatacttaacattttcataaagaggaacccctggctccacccagcatggaaaaaca

SEQ ID NO: 741600 - DNA, 607 bp, Homo sapiens
ttccttatttttaaaactatattaggcaggctagtacctcatcagaaatatgtccaagtgtttccccattatctatagagagcaatgtactattggagcatattgaatgcaatcctcatattccaacattggcaacccaggactagagatacacataaacagaaaatgccaagattagtaaccatactgacacttcagaactggtcgtgtgtgtgtgtgtgtgtktgtgtgtatgtgtagagatataaattccatactccaaaaaagtgactattttggttattttattcttgctgtttcagatgtctacgtcttatatacgtacagacatatttatacatacatttcataagtcaaggtcatgcacatgatcacaaactggcttgttgggacactgaccaaggcacctgaaatgcattagcttaaaccataagaaatcgctctttataaaaaattatggtaaggacatttaatatgacccccttcacaacttttaagtgaaaaatccaatattgttacaataggcagagtgttgtacagcagatctctagaattattatcttgtagaactgaaactttgtacccgtggaacttcaactcaccattt

SEQ ID NO: 741601 - DNA, 652 bp, Homo sapiens
aacaaaggaaaaacacgaagttaaagtttgtatagtgctttgcacgctgcaagccactttagcaattacccattttatctttgccatcattttgtgtattatcattaccattttgcggatagcaaagttaatgcgcagagaaactgggacttgccaaacatcacaaggctggttcataacaggagatgggtaggaaacagatctcctctgacctctgaggattaactgtgggtggcctggctgtgccctggctgagcagatagkatcagaggttggctttcagggtgaaagctagagtggagggttgatatctcagacaggatggatgcagaaacaaaaaaggaaggccaagtcagagctgtgggagactccagtgcctgggagtccagatacaaacacaaattgggtgatacaggaggcaggattcctacgtgggatgccaagctcagaccagagatacaaaatcagaacaagagcaatgagggaaggacagtcagacatgttaggggaatggacagagccctgggcaatttctgccaatggtcgtgcagcttcttgtaaaagttggccattattgggtgggagcgtgccctctggttacagggttcatactgggaacactgtctctccagcccaagctggtacacgaccc

SEQ ID NO: 741602 - DNA, 421 bp, Homo sapiens
tgaaacacttttctagattctgcttttctcactttatatgtcataaacatctttccatatcaatagagtatacacttatgttatcattataaatgaaaatgttattacatatttttgttaataattcactcaactcattgccaattgttggacattcagggtccttataatttcttttattgtaaatagcacaataaacatctttgcccatgttttctgytattcagtcgttttcttgggataaatttctagaagtaaaatttgagggctaaaaatttatatattattaaaatattggctaaattactctcaaaaaatttcctagccatttttattctgtatatttgttttcattttggccaatttgatggaaaattattgtattttattgattttggtttatattttttatcattagtaa

SEQ ID NO: 741603 - DNA, 563 bp, Homo sapiens
aaagttgatctgtcctgacagatccattatgtttagagattttttcagggctttcttgattttgcttacagtatgtaacagttccaaagacctttgtgagaacacttaaaggggcaatgtggtatgaagaaatgcattcagggtagggatgttcacagcaatagaatgtgctgtagttggagaaaatctctgtatgatggtatccaactaccacagaaacaaatatgcctcattgactatggttacatcccaaataatacattttcactctaagccaaattcattgatgtttcctgcctgtggactattggtaatgtatacaaagtaataaaattctgatgatatcaggcggaaaggctacacttgatggacasagaagttcattccttcagtaaatgtgaacacctattggccaggtacaatggaaagtccttagaagacagcagaaaataggttataattcttactttcaaggagtgtatagtctagtgggagagactgaccattaaaatagcaactacatactatatgtaataaaaactactctatggtaaaatagagaa

SEQ ID NO: 741604 - DNA, 632 bp, Homo sapiens
taagtgcttgatagtattaattcacttaatgttggtggtattttcatcaccattctacaggaaatgggggcagggaaaggcaagataactggcctaggattacacaacactcaaacagatattacctcatcttgttaactattaaatktattgcattcagattttacttggtgtggggtacagtggctcatgcctgtaattccagagctttaggaagctaaggcaggaagatcacttgagcccaggagttcaaggttgcagtgagctgggatggtgccactgcagcctgggcaaaagagagagaccctgtctcaaaacaaaataaaagccacacaaaaaatttttgctgatgtacagtttagatacttgttactgatattctttatcctgagatagttttacttcctgaatccatggattcttgttttctaataacttctgaaatattatctgtcattatctcttcaaatattacctctccttgattctctaccaaagattctgattataagtatattaaacattttcattctatcttatctcttaacttctcattcacttttctgttcctttgtttttttgtgctgtttctatgtgatttcttcagatcgatcttccagttcactaatttc

SEQ ID NO: 741605 - DNA, 508 bp, Homo sapiens
aaaaatgaaatgacttgcccaagaccactcagtgaataaataacagaattaagatgagactcaggaatcctaacttttgatcttttttcttggtcagttaagaatataatgagagtagacctagcatgggggctcacacctgtaatcccagcactttgggaggctgaggcaggtggatcatgaggtcaagagattgagaacatcctggccaacatggtgaaaccctgtctttactgaaaatacaaaaattagctgggtgtggtggcacgctcctgtaatcccagctacttgggaggctgaggcaggagaatyacttgaacccaggaggcggaggttgcagtgagccgagatcgtgccactgcactccagcctgggcgacaaagcgagagtctgtcttaaaaaaaaaaaatgagagtaaactgtacatatgacaccacagagaacatttactgagagcgtatctcaggctcctttcctgggagtgactttttctacatcaagacaagtg

SEQ ID NO: 741606 - DNA, 614 bp, Homo sapiens
ccattcatccgttggtgagcacttaggttgattacatattttggcgattgtgaatagccctgcaataaacaataaaaatgggagtgcagatatatcttcaatatactgatttcctttcttttggatctatctccagaagtgggattgctagatcatatgtagctccattttcsgctttttgaagaacctccgtactgttctccattgtgcctgtactaatttacattcccaccaacagtgtacaagggtttgcttttctccataaccttgccagcatttgctattgcctgttttctggatgaaagtcattttaactgggatgagatgatatctcattgtactttaatttacacttttctgatgattactgattactgatgttgagcatttttttcatatacctgttgaccatttctatgtcttcttttgagaaaagactatttgggtctttggcccatttttaaaattggattatttgttttgtttagttgtcttctgttgagctgtatgtatttcggttattaatcacctgtctgatgggtagtttgcaagtattttctctttttctgggagttttcttttcactttgttatttcctttgctacccagaagct

SEQ ID NO: 741607 - DNA, 648 bp, Homo sapiens
aggggtgggtggtcatgccatctttctggtcattgtggatcctcccagactaggaattaatggacgcagacatcatagggtccttttctctagagaagggctaatgaggccaacagtagatagtgaagaatccatctcaccatgtaaccaggactctcaattgatgatcttcctaataccccttaaaggaattagaaaattgacgtaccttctctcatatatatgagttgacctctccaatttttcattatgatattaaatgtgcaaatactacatggtttctgtcatctctaatattttaaaataaagttgctatattaattcttaaaatatgtcaaatggaacctgaccataattaccatatacccacaataatgtatttaaataaatgaacaaactctgtttttaacatttsttcattttacccttaatgatttcaacttaaattcatatttccattaccatctcctttggactttctttccaaattatgtacttttatggaaaagttttcttagaccaataaacatgtatagctcatattttagaaggtacttttaaaaatcttttgaccacaaggcactacatgttaaaaaaaaaagtattctgtcttaggggtcattacaattgttattaataaacatttga

SEQ ID NO: 741608 - DNA, 439 bp, Homo sapiens
aggaaattaaaagagggattagaaggttaaaattttagtttagcccagggaggtcttactgagaagatattttgccaggagcaaatgcatattgtcttagtccattttctgaggctgagtaatgtattttaaaaataataatgataaaagaggttacttagctcatggttctggtggctggggagttcaaggtcaggcagctgcatctggccrgaaacctcatgccgcattatgatagccgatggcaccacaagataagagtgtgtgaaaaagaggcaaaacatgagggataattttatggtataacaacccacttttgtggaaactaatccagtccctggagagtgagaactcacttccatgagatagtattaatcccttcatgagggtggatccctccaaacccaaatacttcccaaaggtcccaccacctctcaac

SEQ ID NO: 741609 - DNA, 618 bp, Homo sapiens
taatggtaatagtacctgatctgcttattgttatgaggtttacactcattaattttcattaattgcctgcatcacacatcagcacatagtaagcactacagtaatatttgttcagtaaaatgatttcagatattttattttaagcctcaagcattataagagttttctttctacccattctactttttaaaacatttctctgtatctgacaccaagaatttatastagctaaaagcattcacttttgttaaaagaagtagaaatttttccttcaacttctctatgtggattttggtcgagataggttggtggtctgggttttctcatcttcatgaaacagatggagcacagaggcacatgcaattcttgccttatcctatagcactgtgaaatgggagattccctgatccccctggcgggatgtgtgacaggagtatggctcgcctgttcagttgctgacactgctcaaagccctgatgggaggcggggcatgcagatggatagatacaggagctcaggtgagtatgtgttagtgtgcctttcagcactgccatccgtggacagtttgagtgttaaccagctcagtggacatctgcctttctgcaaggcagtgtgtga

SEQ ID NO: 741610 - DNA, 557 bp, Homo sapiens
gttgaataataaatacattttacggcattagtttagttttcttttaatgctatagtgatgcacatttgcatttttgggcctctacttttccactacagcctatagtcattcaaagtataataaggggattctatgaacaactttatgccagtaaattgtttgattttacacaaaatggacraagtccttgaaaaacaacttaccaaactaacacaaaaagagattaaaaatctaaatagtagtatacttacaaaagaaatagaaactgtaatttaaaattttttcacaaatctctaatcttggcttcactagtgaagtgttaaacatttaagggagaagaaataataccactattacattaactcctaggaaatagaatagaaagaaacacactttatggggccagtatcatcttgatactaaagccagatatagacaatataatatatgaaaattacagttcaatgtccttcatgaatataggtgcaaaagtccttaacagaatgctagcaaattgatcccagtaatacataaaaaggataatatgtcatgttgag

SEQ ID NO: 741611 - DNA, 633 bp, Homo sapiens
aagtgggatagcatcaaactaaaaagctctgcacagcaaaggaagcaatcaaaaagcaacttaatggaagaaaatatctgcaaaccatatgtctgataaggggtcaatatacaaaatatataatgaactcacagaactcaatagcctaaaccaaacaacctgattttaaaatgggcaaaggaaatgaatagacagttctcaaaagaaggtatacaaatcaccaacaggtgtatttaaaggtgctcaacatcactaatcatcagggaaatgcaaatcaaaactacaatgaaataccacctcatacctgtcagaatggctatgataaaaaagacaaaagataacaagtgtcagcaaggatgtggagaaaagggaacccttgtacactgttggtgggaatgtaaattgctacagccattacagaaaacagtatagagattccttaaactaaaaatagagcyaccttatgatccagtaatcccactctaagcatatatccaaaagaagtgaaatcagtatcctgaagaaatatctgcatcctatgtttattgcagcattttcacaatagccaagatatagaaacaatctaaatacccattaagagatgaatggataaagaaaatggggcatatatac

SEQ ID NO: 741612 - DNA, 516 bp, Homo sapiens
attcgaacaatggctatctgtcctgaaagcttatccttttctcactactctgtactgaggataacaaaagggcattttttaggaagaaggaggcagtattaatttttagttacacaagtgatatataagtacagtctgcttttttaaaaagtggcacaaatcagataacactaaagacccctttgaygctatgctaatcttctttacttccagggtaattactgcttgtcatataggtatccatcaaaagagatatttaaaaaaaaaaaacctttgggcaaaaataaagaggagaaaaaagagacgggttctacatgtagaaagtgacagaaataaacaaaaatatttaatttacttaaattcagtcaactccagtaaggagaatgcttttgaaaatcttcaagaaggaaaaagagtcttgaagtccagcatagagaaaacactggaaaagaatatttagacttcaaaatgcagttgagttcctgggcaaagtaaactataccccagattagtggg

SEQ ID NO: 741613 - DNA, 617 bp, Homo sapiens
caaaattctaagtaattttcccccaattactttaattgtaatcccctaattactttaaataaaaattattgtgctgttattacaatgctgtatgactttttagagtaatggtcaaaatacaagttctgaggtaaaacaatattacataaacacagaattacacttctgacaacttgagtctgatctttttttgtttttatttattaaaaaatctcagtaagaaacaaaatactgtattatccaaattctattcactaggcatatttagaggacttctttctttgaaaactagakaattcaagttgaataaggcacagaccccacaaaaatgtaagccattgtgtagtaggggaggaagagccacatataaaaactttgtgtataatatatgtaccataacagagatggggaaaaaagtagatgaattgcacagaccagaggatgtttaaatctaatgttgtgtttattatataagaacataatgtgtgtattcttatgcgtatataaggagagaacttggtactgaatattttacttgaactgagctttgacaggtaagtaaacttccttcaaggtaattgtgcatgagacactaatggacaataaaagagcaagag

SEQ ID NO: 741614 - DNA, 617 bp, Homo sapiens
caaaattctaagtaattttcccccaattactttaattgtaatcccctaattactttaaataaaaattattgtgctgttattacaatgctgtatgactttttagagtaatggtcaaaatacaagttctgaggtaaaacaatattacataaacacagaattacacttctgacaacttgagtctgatctttttttgtttttatttattaaaaaatctcagtaagaaacaaaatactgtattatccaaattctattcactaggcatatttagaggacttctttctttgaaaactagataattcaarttgaataaggcacagaccccacaaaaatgtaagccattgtgtagtaggggaggaagagccacatataaaaactttgtgtataatatatgtaccataacagagatggggaaaaaagtagatgaattgcacagaccagaggatgtttaaatctaatgttgtgtttattatataagaacataatgtgtgtattcttatgcgtatataaggagagaacttggtactgaatattttacttgaactgagctttgacaggtaagtaaacttccttcaaggtaattgtgcatgagacactaatggacaataaaagagcaagag

SEQ ID NO: 741615 - DNA, 617 bp, Homo sapiens
caaaattctaagtaattttcccccaattactttaattgtaatcccctaattactttaaataaaaattattgtgctgttattacaatgctgtatgactttttagagtaatggtcaaaatacaagttctgaggtaaaacaatattacataaacacagaattacacttctgacaacttgagtctgatctttttttgtttttatttattaaaaaatctcagtaagaaacaaaatactgtattatccaaattctattcactaggcatatttagaggacttctttctttgaaaactagataattcaagttgaataaggcacagaccccacaaaaatgtaagccattgtgtagtaggggaggaagagccacatataaaaactttgtgtataatatatgtaccataayagagatggggaaaaaagtagatgaattgcacagaccagaggatgtttaaatctaatgttgtgtttattatataagaacataatgtgtgtattcttatgcgtatataaggagagaacttggtactgaatattttacttgaactgagctttgacaggtaagtaaacttccttcaaggtaattgtgcatgagacactaatggacaataaaagagcaagag

SEQ ID NO: 741616 - DNA, 617 bp, Homo sapiens
caaaattctaagtaattttcccccaattactttaattgtaatcccctaattactttaaataaaaattattgtgctgttattacaatgctgtatgactttttagagtaatggtcaaaatacaagttctgaggtaaaacaatattacataaacacagaattacacttctgacaacttgagtctgatctttttttgtttttatttattaaaaaatctcagtaagaaacaaaatactgtattatccaaattctattcactaggcatatttagaggacttctttctttgaaaactagataattcaagttgaataaggcacagaccccacaaaaatgtaagccattgtgtagtaggggaggaagagccacatataaaaactttgtgtataatatatgtaccataacagagatggrgaaaaaagtagatgaattgcacagaccagaggatgtttaaatctaatgttgtgtttattatataagaacataatgtgtgtattcttatgcgtatataaggagagaacttggtactgaatattttacttgaactgagctttgacaggtaagtaaacttccttcaaggtaattgtgcatgagacactaatggacaataaaagagcaagag

SEQ ID NO: 741617 - DNA, 569 bp, Homo sapiens
aacaggtgagcaaggtcatctgattcacctatttttttcaagtacatttttctttaaagaaaaaatattgatttctacaagtttgaaaattacttctgtatggcctccaggtcttctcccagcattaacaggctatggatctgcattttagtcccartgaaccctgcttagacttactctacaatttggctagagtatccattatcacccaccatcagggataaagtcctgtgaacattttatctttaaatgaggcagaacaaacacaagtcatcaaatataatttcaataatgaaccttagcattttacatttgaatacttccccaaatggttgcaatttattaatgtcagattagagggctccattcatttttcctgttcagtaaagagacagttaatgaatgatggtgacttggtcaggcttctactgaatgagtctgggagtgtgtagcctcagtgtgaagggaggcaactaatgccagaagactattgacatgtttttcatccatgtagaatatgtctccttatacaacttttggctaatgagatggtaattatgtcatcaaga

SEQ ID NO: 741618 - DNA, 633 bp, Homo sapiens
actgtacatggcagagagactcttgagggggctggtcctggattatcctgtggtgtaacctaatctcaggggtcctcagacgtgaacaagggccgcagaggagatggtcaggtgctggagctgagggcctggctctctgccatgggtcggccgtcgctttacaggcagcagagcccccgaccacggggagctgagttctgcctgtacttgaatgggtaggagacacagccttggttttagttcaggagaccactgggcctctggcctccagaattaagataatcagcctgcattgtggctgccacgtttgtggtaccttgttatggaggcgataggaagctggggcaccctttcctcaggcctggagtatttgggaagcastccagggccgccacgaggggtagggggccgggctcctggggtcagcctgggtgacctgtgcctgccctcccccggggaggactgagaaccaagctgcatgactcctgggccccaaatgacctcaagtgggacatccgctcttgagctctgtgtcctggggtgtagctgtgtgtgttaaagaattctcaagatttacctctgcagcactcttaatattggagtccggtttgagtttatacatgtccacgtccc

SEQ ID NO: 741619 - DNA, 636 bp, Homo sapiens
tttatagaaatgtaattgatcattgcatgttgatcttgtatcatgcaattctgctgaactggtttgttctaagagttgtttagtagattctctatatatgattctgtcatttgcaaatatagttttaattcttccttaccaatgtagttgcttttatttctttttattgcttatcctggttataggcggtgagagtggatgyacctatcttattcttcattttagtgagaaagcattccatctttcatcactaagtagatgttagttaatggattttccatagttgcccttcattaggttaaggcagttcccttttattcgagtttgttgggtgtttttataataaaagagtttgccaaatgcttttcgtgtctgttgagatgatcatgtgggttttattttttattctactatgatgatgtactacattgattgatttttgtgtgttgaaccaaccttgcattcttgggataaatccatgtggtcatggtgtctaacactttttatctgttgctggattttatttgctagtattgtattggggattttttgtatctgtattcgtaagacatgatggtctgtagttttcttgtgatgactttgtctagatttagtattaggataatactggcctta

SEQ ID NO: 741620 - DNA, 597 bp, Homo sapiens
cttccagaaacatgtaagaggagggatcccttcccaactcattccaagaggccaatactcctctgataccaaaccagagacatgacaagaaaagtaaaaacaaagaccagtgtctcccatgaactcatgcgaaactcctcaacaaaacatcagtaaatcggggttggtaaagacataaaaagcacagcacatcacggccaactgaggtttttctcaggaaagcaagcttggttcgatactcaaaaccaacccatgtaattcacaatattaatgcaccaaagaaaaaatgccagctgttcatctcaacagatgtagaaaaagcgtttgactaaattcagtatccattcatgatttttaaaacagcactttcagcaatttaggaatakaagggaatttccttttcctgatagagaacatctaccaaaaaaaccctacagctaacaacatacatagcaaaagactgaatgttttcccgttaagattgggaccaacccaaggatgccctgctccccactcctcttcagcacctgttggcagtcctagagagagcagtgaagcaaggaaagtagacgtcgtactattggaaagcaagagaat

SEQ ID NO: 741621 - DNA, 584 bp, Homo sapiens
accataatacaaggctgtgaaaggaaagtatcttgggtcccttcaacctgcctcccattctagtcagtcatccctctgctcactgagacagatgcacagctgactgtctcctttggaaaggctgatcagaaactcacaagaatgcaactgttcatctctcacatatctgtgacctggaagcccccttcccgctttgagtcttcctgtccttgcttcaagttgtcccgcctttccagactgaaccaatgttcttcttacatatattgattgatgtctcatgcctccctaaaatgtataaaactaagctgtgccccgaccacctcgggcacatatcatcaggacctcctgaggcagtgtcatggatgcatcctcaaccttggaaaaataaactttctaaattaattgagacctgtctcaratttttggggttcacgaggtacataaataacaagcatgggcaagaatgtggaaaaactgaaaccctcacacattcctggtgagaatgtaaaatggtgtagccaatttggaaaacaatttagcaatacttaaaaatgttaaacagttaccacatgaaaacttaagtc

SEQ ID NO: 741622 - DNA, 580 bp, Homo sapiens
ctcactctgttgcccacgctgcagtgcagtggtgcgatctccattcattgcagcctctgcctcctgggttcaagcaattcgcacgcctcagcctcccaagtatgtgggactacaggtgtgtgccaccacgcccagctaaattttttatttttagtagagatagggttttgccatgctgcccagggttgtctcgaactcctggcctcaagtgatccacctgagttggcctcccaaagtgctgggattactatttttaattttttatgaacctctatgctcctttccgtagcagctgtatcattttacaatcccaccaacagtgcacaagagttccactttctttacattctcaacaagagtcattatttttctttaatagtagcyatcctaatgagtatgaggtgatacttctctgtggttccgatttgcatttcttagatgatgagtgacattgagcactttttcacgtgcttgttggtcatctgtataccacttctggagaaatgtctcttaaagtcctttgccaattatttaatcaggttattttattttttgtgattgagttgtgggagttctttat

SEQ ID NO: 741623 - DNA, 627 bp, Homo sapiens
tttttgctgttgtattagcctacatcctcctcttctcatgccatcctctgaatgctaacattgctctttgacagcctctcaccagtgtaacccatcctatctgagggggacaggatcatctttctccagtaccaccactgccagttgagttctttagtgaggacttgagaaaattcagctttaccctcaagtcttcaacagacactgtggtgcaggcttttctcctaaagatgtggatgtgcagtgagacaaagccactgtatcagtcagcagaggctaagttttgctgcattaacaaaggactccaaaattttatgacttacaaaactcacagattgacagtagctctgatctttgtccaattccttctgaaacaaaggcttaatgagcactatccatttgggacatatttgtcttgaataggagaaaaaaggaaacggaggaaccacagagtrgctcttagaacttctgctgggaagtggcatatgtcacttgtactcacatttgtttgcctacaacacgtcaagcctgatatcaatggggagggaaatataaacctcccagagagagcactcggtaggaagggacttggcacagagtcccttggctcagtcatgttttaaacat

SEQ ID NO: 741624 - DNA, 475 bp, Homo sapiens
tgttcttccaatttaaatcttctttctcccaactcagacctaatctcgtttcaagattctctggaggagaagggaaacaaggactattcttttagtatttatctcctccaacaacctgagatttaggcagttctcttgaggtttctttactgggcttgaggtaagggaaggagtttcagtctcttttcctgataattcttgccatttggatgatacagtaaagatttcagaatcagtttgcatccactttggcaattctttcataggtratctaaaacctctttttggaataaagaaaaattatcacctattgttattagttttaggacattaactcagaccagaaaaatgtcctatttaataatttgttatacatattttaaattttaacagatattaataaatagtagtagtttaacaaattttcacttccactaaaattatatcaaacacaatttatcctcatccaaatttt

SEQ ID NO: 741625 - DNA, 513 bp, Homo sapiens
aatgtatatgaaaccacaaaagacccagaatagtcaaggctatcctaaaaaaggaacaaaacggaggaaatcacattacttgacttcaaattatactctagagccacagtcatcaaaacagcatggtagtagcataacaacagacacataaccaaaggaacagaatagagaactcagaaacaaatctgcacacctagagtgaactcatttttgacaaaggtgccaaaaacatacactgcaaaaaagacartctcttcaatatgtggttctgggaaaactagatacccatatgcagaagaatgaaactagacctctatctctcactatgtacaaaactcaaataaaaatggataaaatacttaaatctaagactgctaactataaaactactatcagaaaacattgggaaaaatctccaggacacttgtctgggcataaaattcttgagcaataccccacaagtgcacataaccaaagcaaaaatggacaaacgggatcacatcaagtaaacaa

SEQ ID NO: 741626 - DNA, 575 bp, Homo sapiens; identical to SEQ ID NO: 736280

SEQ ID NO: 741627 - DNA, 657 bp, Homo sapiens; identical to SEQ ID NO: 736281

SEQ ID NO: 741628 - DNA, 613 bp, Homo sapiens
gatgaaacagaagatgccatgtaggactttcatagctagagaacagtcaatgccaggcttccaggcttcgaaggctgacgctcttgttagggactaatgtagctggtgaccttacgttgaagccagtgctcatttaccattcrgaaaatcctaaggcccttgaatctgaagctaaatctacctataccctgccaatgactaacaaagcctcggcagatgacagcagatttgtttacagcaaggtttactgaacgttttaagcctactgttgagacctactgctcggaaaaaaagatttctttcaaaatattactgctcattgacaatgcacctggtcacccaagaggtctgatggagttgtacaaggagactgttgttgttttcatgcctgctaacacaacatccattctgtagcccatggatcaaggagtaagttttacttttacttaagaaatacacttcataaggctttagctgtcacaggcagtggttcctctgatggatctgggcaaagcacattgaaaaccctcaggaaaggattcaccattctagatgccattaaaaacattggtgattcatggaaggaggtcaaaatgcaacatgaacaggagtt

SEQ ID NO: 741629 - DNA, 624 bp, Homo sapiens
gacacagtggctcatgcctgcaatccaaccctttgtgggaggccaaggcaggaagattgcttgagcccaggagtttgagagtagcctgggcaacttagtgagaccccatctccataaaaataaataaataaataaatgggcagggtgcagttgggattacacctgtaatcccaacactggraggccaagtgctaggatcgcttgagtctgaacattcaagaccagcctaggcaacatagacccccaattctacaaaaaattaaaaactagctggggatggtggttcacacctgtagtcccagctactcaggaggctgaggtggagggatcgcttgagcctgggaggtcaagacggcagtgagctgtgatcacgccactgcactccaacctgggtcatagaacaagcccgtgtcgcaaaaaaagaaaattatttcagaaacaagattgagtacagggtagacgttttaaatttttcagaggagatcattttatgtgttagaagttttttgttgggccgggcgcccagactcacacctgaaatcccagcactttaggaggccgaggtggacggatcacctgaggtcaggagttcaagaccagcctggccaacatggtgaaacccca

SEQ ID NO: 741630 - DNA, 567 bp, Homo sapiens
aaaggaaacaaaggccttagagtacaagcgctgaactttgaaaacaatcacagaaatcagaagacttatttagacacttgtatggaactctgatcagaaaacagaaggcatggaagttaaaataaggcataaataaccataaggaaagaagatattaagaagaaaacgtttacaatagaatgaaacgaaaagtaataggcaaaatagaaaagaaagtagaataatgaatagcattaattattttacttccttgttctacttgccaaactttcagaggtaaactaaaaccaggtaaccattgggtacaaartagaggagttggaagagttggaactttctgtttggtaaaagcctatagtacatgccctgattctctgtcctgagcaatggtaatgcattagcgttagcattttctatggtaaggtggtgagtttatgggttttagaatgtaccttgaataatttcccaaaacctagtgtgatttgatagcccagtatggaatcttctcgtattcactaataatgagaaatattctgaatatcaccttttaatgagcactggagataa

SEQ ID NO: 741631 - DNA, 697 bp, Homo sapiens
tttatatgctgttggctgcatgtatgtcttctttagaaaagtacctcttcatgtcctttgaccactttttaatgaggttgttttattttttcttgtaaatttgcttaaattccttataaactctggatactagacctttgttgggtgcatagtttgcaaatattttttgcccattctgtaggttgtttatttactctgttgatagtttctgttgcagtgcaaaagctgtttagtttaattggatctcgtttgtcaatttttgcttttgttgcaattgcttttggcttcttcatcatgacatcttcgtcaggtcctatgtacagaatggtattccctaggttatcttccaaagttttggtagttttaggttttacatttaaatcattaattcatcttgagtttatttttgtgtatggtataaggaaggggtccagtttcagtcttctgcatatggctagtcagttatcccagcatgatttattgaataggtagtcctttcaccattgcttgcttttgtcagctttgtcaaagatcagtttgttgtaggtatgkgggattacttcttggctgtctattctggtctattggtctatgcatctgtttttgtaccagtaccatacagttttggttactgtagccctgtagcatagtttcacgttgagtaacatgatcctgccagctttgttctttttgctta

SEQ ID NO: 741632 - DNA, 518 bp, Homo sapiens
ctcctgaaggaagcactgaatatggaaagacaaaactgggaccagccactgcaaaacacacgaaaatgtgaacaccaatgacactatgaagaaacggcatcaactactatgcaaagtaaccagctagcatcattatgacaggatcaaattcacacataacaatattaaccttaaatgtaaatgggctaaattccccagttaaaagacacagactggcaaattgaataaagagtcaagacacatcrgtgtgctgtattcaagtgacctatcttccgtgcaaagacacacataggttcaaaataaagggatggaggaaaatttgccaagcaaatggaaagcagaagaaagcaggggttgcaatcctagtctctgataaaacagaccttaaactaacaaagatcaaaaaagacaaagaaggatattacataatggcaggtaaagggatcagtgcaacaagaagagcaaactaccctaaatatatatgcacctaatacaagagcacccagattcacaaaaca

SEQ ID NO: 741633 - DNA, 589 bp, Homo sapiens
ctcagaccacagtgcaatcaaattagaactcaggattaaaaaaacttactcaagacaacacaactatgtggaaactgaacaatctgctcctgaattactcttgggtaaataatgaaattaaggtagaaatcaagaagttctttgaaaccaataagaacaaagagataacatgccagagtctctaggatgcagctaacrcagtgttaagagggaaatttatagcactaaatgccaacatcagaaagctagaaagagctcaaattgatatgctaacatcacaattgaaagaactagagaagcaagaggaaacaaattcaaaaggtagcagaagacaaaaaataactaagagacatcaaaaacccttcaaacatcaatgaatccaggagctgttttgtgaaaaaattaataaaatcgatagaccactactcgactaataaagaaaaaagaaagaagaatcaaatagacataattaaaaaatgataaaggggttatcaccacagacctcttcgaaatacaaactgccattggagaatactgtaaacacctctacacaaatacactagaaaatctagaagaaatggataaattc

SEQ ID NO: 741634 - DNA, 589 bp, Homo sapiens
ctcagaccacagtgcaatcaaattagaactcaggattaaaaaaacttactcaagacaacacaactatgtggaaactgaacaatctgctcctgaattactcttgggtaaataatgaaattaaggtagaaatcaagaagttctttgaaaccaataagaacaaagagataacatgccagagtctctaggatgcagctaacacagtgttaagagggaaatttatagcactaaatgccaacatcagaaagctagaaagakctcaaattgatatgctaacatcacaattgaaagaactagagaagcaagaggaaacaaattcaaaaggtagcagaagacaaaaaataactaagagacatcaaaaacccttcaaacatcaatgaatccaggagctgttttgtgaaaaaattaataaaatcgatagaccactactcgactaataaagaaaaaagaaagaagaatcaaatagacataattaaaaaatgataaaggggttatcaccacagacctcttcgaaatacaaactgccattggagaatactgtaaacacctctacacaaatacactagaaaatctagaagaaatggataaattc

SEQ ID NO: 741635 - DNA, 558 bp, Homo sapiens
ctcccaagaaaaaaaacccaggacctgatagacttacagccgaattctactagaggtacaaagaggagctagtaccattccttctgaaattattctgaacaatagaaaaggagagactccttcctaactcattttatgagcccagcatcatcctgataccaaaacctggcagagacgcaacaaaaaaaggaaacttcaggccagtatccctwatgaacatcgatgcacaaatcctcaataaaatactggcaaatcaaatccagcagcacgttgaaaagctcacccaacatgatggagttggtttcatccctgggatgcaaggctggttcaacatatgcaaatcaataaacgtaatccatcacataaacagaaccagtgacaaaaaccacatgatgatctcaatagatgcagaaaaggccttcactaaaattcaacatcccttcatgctaaaaactctcagtaaactgggtactgatgaaacatatcctaaaaggtatttatgacaaaccaacagccaatattgtactgaatgggcaaaagctggaagcattccctttg

SEQ ID NO: 741636 - DNA, 556 bp, Homo sapiens
tattggaatacactatacacccggttatggattcaggtagaaaaatggtacagtaaaatattcttagctcttgtccattgaactaccatgttttaaaaatcttttctaatctttcagaccaacctgtctataccgtcttgtgttttgtcttggaagcaatgagaacatggaaagaggaattgagaaaatttactcagagtaatagataactcccaacaaaactctttgtagagatgaaccgagcaattcccacaaaaattctgtcagttacatgtgcttgaattattttttcggttaattcagatacctgaaattgtatcaatgtgctttgaaacacaggatatttcagttatttttctcacacaaataaagtagagtatctttatttgatggtatatatgttmaaggtcctcacatttgtatataattttaagtattacaaagtacttttacctatattctcttgtattgatttttaaaacaatccaaggaggtcagcatgtcataaaatactcttctttagcaaatgaggacatttaggcacagggtggtagga

SEQ ID NO: 741637 - DNA, 639 bp, Homo sapiens
aatctactaccttccaagttgatttatgtttctccataaacataaacacagaacacagaacatgttctgtgttcctttttctatggtttcttattgtatagattatttaaaatagtttacattttcccctattgcttgttagttatgcatgtgtatatttttgtattacaagaaaaaaaggtttgtttttcctttgtatgctgaaagagattgcatagaattggaattatttgttgctatgtgtatgatagaattcaccaatgcggcatctgtccctgaaggtttggtggtggtggtggtgtctggggaagttaattatgaatttgatttctttagctattgtactactgttacttcttcagttagttttggtcattttttgtgcctttcaaaagttgactacttcattaagttttgaytttattgccataaaaatttcataatattataattttaatgcatataggattgtttgtgattttctctcttcaattcttaacataggtagtttttgcctttctttttccttgaatagtctagcttgaggttatgtatgagtttttggttttattgttgttctccattgtttttctcttctctatttcactgatttttgctctgttcattcctcctacttac

SEQ ID NO: 741638 - DNA, 583 bp, Homo sapiens
ctaatggtgtgaagtgatatctcactgtggttttgatttgcatttctctaatgattaatgatgttgagcatcttttcatttgcttgtttggccatttgtgtaccctttttggagaaatgtctattgaagtcctttttctatttttaaaaatcaggtcatttgttttgttgctgttgttgtagatttgtagaaattcttagatattctaaatatagcccccttgttatggtttggctgtgtccccacctaaatctcatcttraattataactcctacaattcccacatgtcctgggaggcacccagggggaggtaatttaattatgggggtaggtcttccctgctctgttctcataatagtgaatgagtctcatgagatctgatggttttaaaaatgggagtttccctgcacaagctctcttttttctagctgccatccatgtaagacacaatttgctcctccttgccttctgctgtgattgtgaggcttccccagccatgtggaattgtaaggccgttaaacactttttcctgtataaattacctagtctcgggtatgtctttatcagcagcatgaaaataaa

SEQ ID NO: 741639 - DNA, 482 bp, Homo sapiens
accatgcccggctaatttttttgtatttttagtagagacggggtttcaccgtgttagccaggatggtctcgatctcctgacctcgtgatccacctgcctcggcctcccaaagtgctgggattacaggcatgagccaccgtgcccagccagtaagcacacttttaaaggatgtaatgaatcctgggaatataaaataagaggtttttccagtggtaacatctaaatccttacacygtaaggtgaattatgttgtagctttcattcacacatttaattttaaaaatagttaacagcaagaactttctgccagacacgtgccaagctcctgctggagtaagtggcgtcagagaagtagatagatgtagagtctgacttggttttactgtgttgtgcattccacgctaaaacaccctggagatttgggcatttctcctgaagaactgtttttggaacttggttgctttggaaagtctttatcaaac

SEQ ID NO: 741640 - DNA, 482 bp, Homo sapiens
accatgcccggctaatttttttgtatttttagtagagacggggtttcaccgtgttagccaggatggtctcgatctcctgacctcgtgatccacctgcctcggcctcccaaagtgctgggattacaggcatgagccaccgtgcccagccagtaagcacacttttaaaggatgtaatgaatcctgggaatataaaataagaggtttttccagtggtaacatctaaatccttacactgtaaggtgaattatgttgtagctttcattcacacatttaattttaaaaatagttaacagcaagaactttctgccagacacgygccaagctcctgctggagtaagtggcgtcagagaagtagatagatgtagagtctgacttggttttactgtgttgtgcattccacgctaaaacaccctggagatttgggcatttctcctgaagaactgtttttggaacttggttgctttggaaagtctttatcaaac

SEQ ID NO: 741641 - DNA, 647 bp, Homo sapiens
cacacatttaattttaaaaatagttaacagcaagaactttctgccagacacgtgccaagctcctgctggagtaagtggcgtcagagaagtagatagatgtagagtctgacttggttttactgtgttgtgcattccacgctaaaacaccctggagatttgggcatttctcctgaagaactgtttttggaacttggttgctttggaaagtctttatcaaaccttcggaaggaagctctttgtcccagtttgtgagcaggttgctcgcagagagatggaactkcgtctttttcttgatggcgtgatcttatctctgggtgtgccagagccaatttcaacatacttttgtctcttcccagttcagtccccgtccattttttcccttcagtgtgctgtctcagcctgtggagaaggggaaggggcagtcagagacaggacaaaatcagagcgccttgttccctgggggaagaaaaccctgtcagaacagaggacgctgtgcttttcattataatctatcagctataagaaggaactccgaggcctttggaaggattgtcctttagagccaaatggtttatgtcatggaaaggctcatgttacaaaggaaagaggattaaagtagaatttggagcccagctaagtaccaagaa

SEQ ID NO: 741642 - DNA, 584 bp, Homo sapiens
aaaaaaacaacaaaaaacaaacaaacaaaaaacatgcaaattctgattacagggaaagaggagagtaaagaggatgcagaattactgggccagcataactgttcatggctcacgaggaactcatgacaggtcttacatgtcagaacacaaagtattatcatccactcgtacagaaaagaaaaagggtttgtgtggtgagaacttggagctggggtctggtctgaaacacgtgtttggaaggttggcaggatctgcasgtttgccacctgaggctctgtttctcagtgccaccttgagctttgctctgtggcttgaggtgaagctggtgatgccagcctgaggatggtctggatgacaagtgtaacgtttgatctagagtgaatcagctgtttgtccttggagcaattcacccattctctttaaaaatattaaaaatagcctctatgtcccgaaaggaagacagccacagctccccagaagctcattacagtgaggggcagccgggctgaggagagctggaggccccagcacacgagctggggcttttccatgtctttgtgtctgcgtttttgaaaaacaaaaag

SEQ ID NO: 741643 - DNA, 611 bp, Homo sapiens
gtcatgttattgattacttattttctaacacaactataaattttcctctgagcactggcttatctatatccattaagtttggtatattgtcattcctttttattcatctgaaatttttttctcctttaccttgtgacgtattctttaattattgttattttcacataattgtgaactttttacattttcatatagcaatgatttctaattaaattctattgttgttgaagaaaatacaccatatggtttgaattcttttgaattcattgatttttgttttgtggcctagcatatggcctatgctggagaataattgatttgcacttgagaaccatgttgtaggataaagtgtattctgttgttgttgcatagagtgttttagagatatctgtttgttctagttggtttatagtgctcttcaatttyttattttgtcattattcttctgcttagttgtatctgttattgaaagtgggactcaaaagtttccaactaatatttttatttttaaatttatcctcagagtgcatacatgtttatgatttttatgtcttcttgatggaatgagccttttataagaaatttgctttctaattattaaaatattattt

SEQ ID NO: 741644 - DNA, 499 bp, Homo sapiens
caaatgacatggatatatagaaaagaaaatattgtaggtggtcaatcagattatggagctgtgtcaaaatgtaaatcaacacggggagattttcattgagaaagttttgccattcatgacaaaagaagctgaactaaagagtgtgcacagkgccacagtaaaatttgtaaattttataaagtctggtgcctggaattttagatttttcttattgtgatctgataacatagaaactggtttaaataaatattgaatgttaaaccctgatagttatcactgggaacaatttcaagaatgcttgaattatacaacaggttatcagtgtttctataagaaagaagtataaataagtagatgggattgcaagatattttctgatatccttgacatctttgatgacctcaatatatctgtgccaagatagaacatggttttcaatggaaaataagatcaaagagcaaaactaaaaagctttgaagaacagaatttctacagattg

SEQ ID NO: 741645 - DNA, 658 bp, Homo sapiens
ggtcatttaggttttttccatgtaattcctcttgggaataatactgcaatgcacatgagagttttatttagaaatattttattttgtgttcaaatattgggggttatccagatttctttcttttgttgaattctaattcaatttcatagttcatagaaaacataattcgaatgattggaattaaatttggtgattctgcttccaaatttcctttgtacctaacctgtcacatcaattctttccagggtttccagcctactgacttgccctgcagatggagaacttgaagcacctacaacctgataatataattcctcgcaatctctctctctctttctctctctctctcctctcccacttyatgtgcacacatatacacacatacacacacattctagctctattggttctgtttctctgcacagccttgactaaaacagattttggttttattgcctagaatattggctatcttagaaaatattcaacatagacttgaatagagtatgtgtttttctgtttttgcaaagattgttgataattgtcagtcaagttgattaatattgctgttcaagtctgtattcttatttgttttctctcttattgtatcaattattgagaaaatggtactgaagtatccaaatacaattgtggatcc

SEQ ID NO: 741646 - DNA, 612 bp, Homo sapiens
cacatatgtgtatttatgagagggatattatacactaatgaaaaggccaattcaccaggaagacatggcaatcttaagtgtatatataccaaataacagagctgcaagttatgagaagcaaacatcaacagaactgagaaaaacagacaaatccaaaactatatttagagattttaacatctctatccgcaaaattgatagaacacctatacagaaaattagcaaggatacagaagaaatctatattattaccagccaaaatatctaattgacaattgtaagacaattggaccaagaacagcagaatccacaatattttcaagtattcctggaatatatcccaagatagtccatattctgagccgtaagtcaagcctcatacagaatgtgtattttcaccagagtagaaccaaagtacaaaccaataacagaaaaataatagkataatctcgaaacacttgtgtcttagttgtttagcgttgttataaaggaatacctgaggttgagtaatttattaagaaacaagatttatttgtcttgtgattctgctggctgtccatgaaacatgctgccggcatctgctttgggtgacggctttcggctgctttcact

SEQ ID NO: 741647 - DNA, 584 bp, Homo sapiens
acatatatatatatgttgtatcttcctgttgagttgacccatattttattatgtgatgatcttctttgtctctgagagtgtaaattagttccaccattgtggaagacagtgtggtgattcctcaaggatctagaaccggaaattccatttaacccagcaatctcattactgggtatatacccaaagaactataaaccattctactataaagacacatgcacacatatttaatagtgtttattgcagcaccattacaatagcaaagacttggaaccaacccaaatgcccatcgatgatagacyggataaagaaaatgtggcacatatacaccatggaatactatgccaccatagtggcataaaaaagaatgagttcatgtcctttgcaaggacatagatgaagctggaaaccaccatcttcagcaagctaacacaggaacagaaaaccaaacacctcatgttctcactcgtaagtgcgagttgaacaatgagaacacgtggaaccagggaggggaacatcacacatgggggcctgtcggggggtgaggggaaaggggagggagagaattaggacaaatacctaat

SEQ ID NO: 741648 - DNA, 627 bp, Homo sapiens
gcaatactcatttctaattcttggactgattggagttttgccattttccttagaaatgttttcaagcaaaatatttcagctgaaaaatcacaacttgcatttagttttcatcttttttagtcatcttcaatcttgaataatccatcaatcttcttttacgtcagactttggcacttttaaaaattgcagcctggttattttatccaatgtccttcaatttgtgtttccatgatggtacctcatatttagattcaggttatttgtctttggtaggaatatctcagaagtgatactgtgttctcattaaattgtctcctatggaacacggttacaatttagtattttatttataatcccttgattaagggtcagccaggtttcttcactaaaagtaattgataagtattattwctcctttttacttctttaattaattaattattttaagtagcactttatttaagactattgcaataggtgtcaagattattggaagaggggagagagaccaggctcagcttaactctaatatgacaaagatttatagctaaccagcagatcgaagaaggtgagtggatggaaaactactaagagaaacatcaagggtaggggggattcttacaaaaa

SEQ ID NO: 741649 - DNA, 617 bp, Homo sapiens
ataaagggtctgtactgaggaggattagtaaaagaggaaggaatgcctctttgcagttgagataaaagaaaggcttctgtctcctgctcgtccctgggcaatggaaatgtctcggtgtaaagcctatctctactgagataggggaaaaccgccttagggctggaggtgggacaggctggcagcaatactgcttcttaaggcattgtgatgtttatgtgtatgcacatcaaaagcacagcatttttttttttaccttgtttacgatgcagagacrtttgttcacgtgtttaccttctgaccttctctccactattatcctattatcctgccatacccgataatgatcaataaatactaagggaactcagaggctggtgccggcgtggatcttccgtaaactgaactccggtctcctgggcccatttttctttctctatactttgtctctctgtctctttcttttccaagtctctccttccacctaatgagaaacgcccacaggtgtggaggggcaacccaccccttcacgtgacagatgtcccagcagttctgacgcacctaggagagcggggtgggtggcagggcatatgtacgtgttttgaaaaaactcccagtcg

SEQ ID NO: 741650 - DNA, 536 bp, Homo sapiens
atgggtaaaattgggataccatcactattgacctgacagcagtgtgaatgtagcataaggtaacataggtcaagtgcctgaacagtaactgctgagacagcgtgctcagcatgtgttagtgccttcctccatgactgtctgatacacatgttgttactctcagtgattgaccaaggactcccattcactccagcataccaggacttgatgatagcaacatgaaactattgctaattataataaacttyggccaatgacctgtagtgttcagtggaatcattgttgttttgaaatgtaaatatcatgaaattaatggaaaggattatactatcttgagatgtacaaaattaacaggcctcatttgcatttcctaaagccatgtagattcatttttttatatttacagaagcatattacctgaggtattttttggctcataaatacaaaattaaatcccacagatgaccagaaggaaagctaggtcattgtttctcttttttacatatgattttctgtatcaaaagcttaataagatg

SEQ ID NO: 741651 - DNA, 666 bp, Homo sapiens
gttttgactttttgcttctaattcttataattttcttttccacgtatcactatcatgtgcagaatatcaagtacagtgatgagtacaataagttgataatgggtatcattttctcctgattttaaagaaaagattccttgcctttataactgtatttatttgctgtaaatgtttagtcaattccttgtgatacctactgttttagagttttttttttaaatcatgaatgggtaaactgaattttatcaagtactttatakgggcagttaacaagatgatcacgttatttcaaaccatattttaatctgatgaattatgttaaaaaccatttctaaaaccaaaccaaactcacattcctgagataaatcctacttggtcattacatctttccattttctgtacctataactctagatggtctctggcttaggatggttcaacttacgatctttcaactttaagacggtgcaaaagtggtacacattcagcagacactataacacaaatacccacagaactgtttttcaatttcagtacaatattcaataaattacatgtgatattcaacactgtattttaaaaacaggctttgtgttagatgattttgcccaattgtaggctaacacgagtgttctgagcatgtttaaggtaagctagactaagatg

SEQ ID NO: 741652 - DNA, 608 bp, Homo sapiens
aggagacatggaaggacccaggtgtcatgatggaatgagaacaagttgctcatgggacccagctgggtccagggcgtgttgtggtgaggaggggcggtggaggccacagcttctgaagcggagcagttctgggctgtgggaagaccaggcaagccatggagtgggggcccctagggctgggggtcagaggaggagacgtctatggtatgtgacaggccatgtggggaatggcaggaccaacatggggtctcctgtgaggcagatcctggtgtctggagaggaatgatggggcatgcctggaggtcagatgctgcagcggggaggagggcaggaccacgggtgggcctcaaacttccacatggggtggagaatccagaatctggaagcaacaatgggcagccagaggcagggcaattccctctgtgtcttttcccacctgccaccccmtgaaagagctgtctgggagccaggattcagttatacaacaggtattctctgcatttttatacaggttcttaaacattcccaaagcagaggatgtggggcaaagaggagggattttggagctggggagaaaattctccttctttgcttactaactgcatagc

SEQ ID NO: 741653 - DNA, 494 bp, Homo sapiens
attagggaagtaattatctattactctctaggatactgataaaggaagggacttccatgtcaatttctaaatattcaagaggccttgaatatcccaaggtgcctgttagggtcattattttgaaactaaaagcagacctggcctcttctgattaagaaagcacacacacacacacttttcactctgactgttgacaattcaagcccatgcacagtacatgcttccttgggaatacctctcgtgtatayactctggtagggccaggcctataggggcatcctgttgccttcaatgctgaacttgacagcacgatgcactttgctgagtcgtttctgttctgcaaatcgcctcttatgcttttccaatcggcttaggccctttttaagaataccaggctagaagtagtagtttgattggagaataaaaagagattactgagaaacactgaagatccactgagcagtatttacaatgataacagaataagtgtctac

SEQ ID NO: 741654 - DNA, 605 bp, Homo sapiens
ataaattacagttaacagttcaatataattacctccccagagtatttctctccatcactctctttctctatatatgtatatatatatcctctctctctctgtttctctctctccatatatatatatattttttttttgagaccgagtctcgctgtgtcacccaggctggagtgcagtggcgcgatcttgcctcaccgcaagctccscctgccgggttcacgccattctcctgcctcagcctcccaaatagctgggactacaggcacctgccaccacacccggctcatttttttgtatttttagtagagacagggtttcaccgtgttagccaggatggtctggatctcctgacctcgtgatctgcctgcctctcctgacctcgtgatctgcctgcctcggcctcccaaagtgctgggattacaggctagagccaccccaactggcctttatttttatttataatattttagtgatggagtcttgctctgtcacccaggctgaagtgcagtgatgcaatcatagctcactacagcctcgaactcccagacttaagtgatcctcccacctcagcctctcaagtagctgggaccacaggtgctcaccac

SEQ ID NO: 741655 - DNA, 605 bp, Homo sapiens
ataaattacagttaacagttcaatataattacctccccagagtatttctctccatcactctctttctctatatatgtatatatatatcctctctctctctgtttctctctctccatatatatatatattttttttttgagaccgagtctcgctgtgtcacccaggctggagtgcagtggcgcgatcttgcctcaccgcaagctccccctsccgggttcacgccattctcctgcctcagcctcccaaatagctgggactacaggcacctgccaccacacccggctcatttttttgtatttttagtagagacagggtttcaccgtgttagccaggatggtctggatctcctgacctcgtgatctgcctgcctctcctgacctcgtgatctgcctgcctcggcctcccaaagtgctgggattacaggctagagccaccccaactggcctttatttttatttataatattttagtgatggagtcttgctctgtcacccaggctgaagtgcagtgatgcaatcatagctcactacagcctcgaactcccagacttaagtgatcctcccacctcagcctctcaagtagctgggaccacaggtgctcaccac

SEQ ID NO: 741656 - DNA, 621 bp, Homo sapiens
gtaaaatacaggagtgaccttacagtgtagcatatataataaattatttggacagattttggttctctcttctatttgtgttctatatctaatagaaaaaaaaatcacattacactttctacttgagaaatgcttgaattgtacttaggccaatgtcataaagattattaatttgtttcaaaatctacattgaaacttgtagattcagagataaagtgtattctgaaggggaaataccctctctaccctcatttttcttttttaaatcagagacagggtctctctttgtttcccaggctgrattgcagtagttattcacagatgtgattgatcatagagtactgcagcctcaaactttcaggctcaagcgattctcctgcctcagcctcccgtggagctgggattacaggaggagccactgagcctggctgaaatttcccattttaatgaaatatatggtaaagaggaatagattgtagttaccataatattatgatattatgcaaatgaagttgagtgagagaattactgcttctatttgaaaatgaaacaaaacagaattatatttgatgacagttttgaatttttacagttcattatagttttcaggatactttgtta

SEQ ID NO: 741657 - DNA, 576 bp, Homo sapiens
ccaattgctaaacttaaatgtgaataacagaggagagtctctcgtataatgttacagtaactcttctagtcctgggaccagacctttacatttgaatgaaagttcaaacagattcaattaacactgagttcaaattctgaacgaaagttcaattcttaaaaaatctggctgggtgcagtggctcacacctgtaatcctagcactttgggaggctgagacgggcagawtgcctgagctcaggagttcaagacgaacctggccaacatggtgaaaccccatctctactaaaatgcaaaaaaaagaaaaaaacagccaggcatggtggcaggcgcctgtaatcccagctacccaggagcctgaggcatgagaattgcttgaacccaggaggcagaggttgcagtgagccgagatcgtgccactgcactccagcctgggcaacaaagtaaaactgtttccaaaaaaaaaaaaaaaaatccaattgtccttctttttaccccatcttccagactattccccattaatttttatttttcaattttagaagaaatatcatttatgtttgttttggttttggtt

SEQ ID NO: 741658 - DNA, 489 bp, Homo sapiens
actgtgccccgcccattaattcacttttgacatttcagtcttttatccatttggaatgtattgtgatatgagatttgagatatgaacccacttttgtttattgccatgacacctcttatctctgtaaaggatcagatagtgaatattttaggctttgtgggccatatgatctgtgccyttgcagctagtcaactctgcccttgtattgtgaaagcagctatagttaatatgtaagtgaataactggctgtgcttcaataaaacttgatctataaaaaaatggtggtgaagcagatttggcctcccaattgtttcctcagccctgacctaggcttaagaattctgttggaaattatggagagcgactaatccatgtggaaagaaatatgcctttttatgttgactattaggaaaagtgacagaaataatttaagaatttttgttaagctgatattcttataaaatttggaaacttctcacaatttcagaa

SEQ ID NO: 741659 - DNA, 578 bp, Homo sapiens
tggataattctttcacacatatgccagaatcgtcatatttagaaaccttttcttaacctagtttctcactccagtaatggcacctgcaaaacttcttagaagggattgtctatactccctacccttacttccttactgcttgttctctatttattaatttatttatatttacattgtattagaaatatagatccattgtgcaaaatcagaaaatacaaataagctaagagaaaatctaaagtacycatgtggcaaaactgttaaacccatggctaatggcacttcccaacttccctcaccactggggtgaacacttgcattccactggtgagtgagacacattatttctacccactcataacatataagtgatagtgatgtgtcctactttctggcatggtcaataaaatcccccgtggacactcctctacactctttcttcttcctgcaaaactgaatagccaagacgacagcaaccttggaaaccatgtttttacaatggcgtagtcaatatgagtcttgatctataaatgacctctggaaatggacttgagtttaccctaagccaatgaagaaac

SEQ ID NO: 741660 - DNA, 453 bp, Homo sapiens
gctaacactacatcaaacatgaagaaacagaaattataattttattttagtagtcctcattccaagttggcacatgagtctgacattattccctgaactattcacagtgtctatgacagtcttccctagcatagtttcaaaaataaagaaaccattataaaattttaactaycacatttgttaccattttgaaaagaaaaaaaaatctatacctttattagttagcttcttctttagtcacccagtaatgatgcacatttttacaacaaaagcctgaatacattgtgagcttatgtctttaaagttattctttcaatacttcttgcagatcaaagagccactgtattgagcatgtcacaaaaaactcaaaactgtgaaattgtccattaaagtttaataaaaaggaagaattaaattttcaatcccatcctataagctgacagatagttaatg

SEQ ID NO: 741661 - DNA, 661 bp, Homo sapiens
ccagtagtcccaggtataaaattttatttacagctagggtaatagcttgaatccacaatttgaaatatgaaatattcatcttttgtattttatgataacatacacacacttaagagaaacagatattgctttcatttcgtactgtttgtggatgtgacatttggcaggagttcttcagcatttactttaaccagtatgggttgttgacagggtgggaagatttaaaagaaaggcccctttccttgaaattctacattaaaagatttgatatagttctgaagtttctttatctgtaattctcctatataagtgtaaaaccacacacagtgcaaaaccttgcagccattcagtaaagatayacatgtttactagagtaatcttgaactacttgccatataattactaactcaatctgaaaatttaaaaattggatttaaatgttttgtcaacagaattgtagacttctctgggacaactgaatttattttccactactcagttacttaaaatcaaggcaaaatatttcctactcatctaaagtgttttccaacttttgatacatgtacatcaaagatattagagaaaaatcttaaaacacaaatagtcctacaaatttgaaccccacacatatactttctataaaaaatgaaacacccttcct

SEQ ID NO: 741662 - DNA, 661 bp, Homo sapiens
ccagtagtcccaggtataaaattttatttacagctagggtaatagcttgaatccacaatttgaaatatgaaatattcatcttttgtattttatgataacatacacacacttaagagaaacagatattgctttcatttcgtactgtttgtggatgtgacatttggcaggagttcttcagcatttactttaaccagtatgggttgttgacagggtgggaagatttaaaagaaaggcccctttccttgaaattctacattaaaagatttgatatagttctgaagtttctttatctgtaattctcctatataagtgtaaaaccacacacagtgcaaaaccttgcagccattcagtaaagatatacaygtttactagagtaatcttgaactacttgccatataattactaactcaatctgaaaatttaaaaattggatttaaatgttttgtcaacagaattgtagacttctctgggacaactgaatttattttccactactcagttacttaaaatcaaggcaaaatatttcctactcatctaaagtgttttccaacttttgatacatgtacatcaaagatattagagaaaaatcttaaaacacaaatagtcctacaaatttgaaccccacacatatactttctataaaaaatgaaacacccttcct

SEQ ID NO: 741663 - DNA, 661 bp, Homo sapiens
ccagtagtcccaggtataaaattttatttacagctagggtaatagcttgaatccacaatttgaaatatgaaatattcatcttttgtattttatgataacatacacacacttaagagaaacagatattgctttcatttcgtactgtttgtggatgtgacatttggcaggagttcttcagcatttactttaaccagtatgggttgttgacagggtgggaagatttaaaagaaaggcccctttccttgaaattctacattaaaagatttgatatagttctgaagtttctttatctgtaattctcctatataagtgtaaaaccacacacagtgcaaaaccttgcagccattcagtaaagatatacatgtttactagagtaatcttgaactactygccatataattactaactcaatctgaaaatttaaaaattggatttaaatgttttgtcaacagaattgtagacttctctgggacaactgaatttattttccactactcagttacttaaaatcaaggcaaaatatttcctactcatctaaagtgttttccaacttttgatacatgtacatcaaagatattagagaaaaatcttaaaacacaaatagtcctacaaatttgaaccccacacatatactttctataaaaaatgaaacacccttcct

SEQ ID NO: 741664 - DNA, 661 bp, Homo sapiens
ccagtagtcccaggtataaaattttatttacagctagggtaatagcttgaatccacaatttgaaatatgaaatattcatcttttgtattttatgataacatacacacacttaagagaaacagatattgctttcatttcgtactgtttgtggatgtgacatttggcaggagttcttcagcatttactttaaccagtatgggttgttgacagggtgggaagatttaaaagaaaggcccctttccttgaaattctacattaaaagatttgatatagttctgaagtttctttatctgtaattctcctatataagtgtaaaaccacacacagtgcaaaaccttgcagccattcagtaaagatatacatgtttactagagtaatcttgaactacttgccatataattactaactcaatctgaaaayttaaaaattggatttaaatgttttgtcaacagaattgtagacttctctgggacaactgaatttattttccactactcagttacttaaaatcaaggcaaaatatttcctactcatctaaagtgttttccaacttttgatacatgtacatcaaagatattagagaaaaatcttaaaacacaaatagtcctacaaatttgaaccccacacatatactttctataaaaaatgaaacacccttcct

SEQ ID NO: 741665 - DNA, 555 bp, Homo sapiens
taaatgtgtggaaatggatcttaaggatccattaaacatgcaggataatggtggaaagaccataaagtcggatcaggccaaatgtattgatgtgggcccactaagcagagattctgcactgaatgctgcagccctgggcgtgtaaaaaagacctaatagtttagttggttaggggaaacagattaaaaggcggcctacaatgagcaagttggaggtgccagatatcccttgttttaatgtagaggaagggaattgaagagattggaattagagtagatttgccattttagacatacttacccacactagtccagacacacctttcaccaatattgtaagaaatgggtttgtgaggggagccccagcatccttcaagagctgtttcattgcttttctctctggscagaccttacagtgggaaccacagtcactcaattggaaaattaaatgcaatgacagcaactgatctcagggtgggaggagccaagaggggaactcaaccacctaagacaaggtgggtgtgactaccataatggacagaagagacaaagtaac

SEQ ID NO: 741666 - DNA, 623 bp, Homo sapiens
agcccatcacactggaaggtatttataatgggtcacaacaataaagatgaaggatttgctgtgtagagtcaagaatcaatttctgagaacaacgtaaagatttttatgctaggcaagtggttatctgcaaaatgaaacaatgtgaatgggttaagaattggaccctttatttgaaacayctactctaaaacaaattcttggggaaacacatgtagtcaacaaaagggggtactcttcagaaaaacataaatccacatttaattctaaggttacctagtctattctgaaagcctcaagacacaggctagaaactttatttccctggctggaccattactttcagaaccatttagaaagtttcttaatgttttatttgaatctttattaaaagtttaacttaaaaattctaaaggcaagattttcttgtgttagcttactttaaatatttctctgggaatatgtcagactcagttgtccactctggtatccagggttttattcataatagtgtttttctttttatattaatacttagattaagcttaattaagaactttttatgtacatttgtgaattcagtagttcttttgaaaagatactcatttgaattcaattttatttaa

SEQ ID NO: 741667 - DNA, 623 bp, Homo sapiens
agcccatcacactggaaggtatttataatgggtcacaacaataaagatgaaggatttgctgtgtagagtcaagaatcaatttctgagaacaacgtaaagatttttatgctaggcaagtggttatctgcaaaatgaaacaatgtgaatgggttaagaattggaccctttatttgaaacacctactctamaacaaattcttggggaaacacatgtagtcaacaaaagggggtactcttcagaaaaacataaatccacatttaattctaaggttacctagtctattctgaaagcctcaagacacaggctagaaactttatttccctggctggaccattactttcagaaccatttagaaagtttcttaatgttttatttgaatctttattaaaagtttaacttaaaaattctaaaggcaagattttcttgtgttagcttactttaaatatttctctgggaatatgtcagactcagttgtccactctggtatccagggttttattcataatagtgtttttctttttatattaatacttagattaagcttaattaagaactttttatgtacatttgtgaattcagtagttcttttgaaaagatactcatttgaattcaattttatttaa

SEQ ID NO: 741668 - DNA, 512 bp, Homo sapiens
tcactacgttctcccaagagctccctagaatagaataattattattctcactgacagataaaaaaattcatctacagggagaaactgagagactttttccaactgatacaactaataagtagtggagtctactaaattgtrggatgcataccagcaaataacatctatgtgagcacggatttctgtttagtgatatgtcctcagcaccaagaataatgtctatttaataaatacaggagtgagtgaatgagctatgatttgaatccaagtctattagatctcaaagcccaagacttttaaccattaagctactgtctttctgatgtgagggacaaggagaaactcatgcacatgtagaaaatgtaatttggcaattgaaaactgtactctacatcctcaaaggtcaaagaagaaattcaaatgaaaaatgtttaaggattagagagtaatgataacataaacatcatacaacaaaatgtgtgggatacagccaaagtggcattgagggaagt

SEQ ID NO: 741669 - DNA, 512 bp, Homo sapiens
tcactacgttctcccaagagctccctagaatagaataattattattctcactgacagataaaaaaattcatctacagggagaaactgagagactttttccaactgatacaactaataagtagtggagtctactaaattgtgggatgcataccagcaaataacatctatgtgagcacggatttctgtttagtgatatrtcctcagcaccaagaataatgtctatttaataaatacaggagtgagtgaatgagctatgatttgaatccaagtctattagatctcaaagcccaagacttttaaccattaagctactgtctttctgatgtgagggacaaggagaaactcatgcacatgtagaaaatgtaatttggcaattgaaaactgtactctacatcctcaaaggtcaaagaagaaattcaaatgaaaaatgtttaaggattagagagtaatgataacataaacatcatacaacaaaatgtgtgggatacagccaaagtggcattgagggaagt

SEQ ID NO: 741670 - DNA, 460 bp, Homo sapiens
tttttccttcttcctcaaaagctctccttgacttagtggcatttttgtaagcaggaaacaggacgctgtaactgcacatgtggtctggggccagtgtgtggcatcccagggaggtcccaagccctcaccccaccgggagcctcccctactgctgggtcaacctcctggccccatgggggttctcaaagcagcccacgtttytagggcatcctcagagggactcacaggagcagttgggccagtgccccagggagggggcagcctctctaggggcctcttgggaagtgtgtgggatcaggcctgtctgtacctgaggaaggaggagccactggccactgcctgctgtgtccctggtacccctcatatggagaggtctcctctcaggacaccatggagagctgttgtttctgatgatacccgtgtcccaagtctgcctagcagctgctgctgcctgtggcca

SEQ ID NO: 741671 - DNA, 484 bp, Homo sapiens
cactgactgcactataacatcaagtgtccaaagtagataatttcagggtttggtaggttaggtaaattgtcagaagttacactgatggtgagttactaaagcagaatttgagccaaggttatgaaaccctttttaaagaagaatgggaattcaagtgaattcgaataaagtacattttaagcccacatagcattattactcaaaataatataaataagccaacacattattaatggttgcaataggaactcaatatgtttgtacccgttttatwacaaatatgtagacaaagatatagagatgatagatcaagaaatgaaactagtatgctgaaaagtaaaatcattgcatatttcaaccaatataaatatgtacaaaggaaaagcattaaaggacataactagaacaattgtaacctaatttttttagtataagaaaggcaatctgcaaggcaataaatttgtactggttgtgttagagtttt

SEQ ID NO: 741672 - DNA, 615 bp, Homo sapiens
atctggtttaaggcagttctctcagtgcaagggcttggttaggattgaagaaaggccatgatataatagcttaatatatgtgaacagaataaggcaaggattctgaggtaatggtttcaaagactctttggcataaatcatagtttgaaactttctctggtagatctgatgagtattttaagaggtttcttaaatgtgcaacaaagatgtgtgcagctctaacttcctaggcaaaaatctcctgggataaataataaagaataaagacatattgataaataaataacagtgccatgttaaataaataaagagtaaactgtggggwtgatctctgttctcatgataaagaaacacagcagagacaacgtatcttagcatgtataaagtcactcaataaattattgaatcaggacaacatctcaatattattcaagatacaagatgatttccaaagaccacaaaatcctttgtgtttcattcagcacctaattcatcgagttatatcccagacgtaagaaaagttactgctgatttctgagatattaaatgagatagcatattggagtgaaatgagtctgtgatacataccactcagctattttccaacattgttaa

SEQ ID NO: 741673 - DNA, 553 bp, Homo sapiens
atcatatggtagttctatgtgtagttttttgaggaagctccttactgttatccataatgactatactaatttatatctctaccagtaatgtaaaagggttcacttttctctgcatccttgccagcatttcttattgttgtgwttttgataataaccatcctttctgcggtgagatgatatctcactgtggtttggatttgcatttccctgatgattagcgatgctaagcatttttagatatatttgttggccatttttatgtattcttttgagaaatgtttttcagaccatttgctcattttttaaatcagattttgtttctgttgagatgtttgaattctttgtatattctggatattaatctgctctcaaatgagtagtctgcaaatatttcctcccatttggtaagctgtcattttactctgttggttgttttcttgcttttgctgtgcagaagcttcatagtttgatataatttaatttgtttatttttgattttgttgcctctgcttttgaagtcttatccctacaatcttttcctgaccaatgtcct

SEQ ID NO: 741674 - DNA, 634 bp, Homo sapiens
ggaacatcacctctttctgcctgatagccttcacagtgagacattggcttttcctattctgcaacagtttcagactttggactcaaaattggacatcacttctatagatgttaggcttgccagacctcctccataatcatgtaagttaattccttataataaataagtctctctccctctcttccatatatatgccatatatactattagttctatttttctggagaattctaactaaaacagatgcctaaggargggaggctattgaattcctactttagattacagaggcatgtttacctttggtatcccagagcagggggtgtctttctgcagacttattcaattcataaagaagtgttgtaatcagaaaaaaattggttgccatggtctgcagtatccagttaaacccaggagtcttcttaattatcatttcacatgggatgtaaaataagtttggatagtctttaatctatcagaagaggtcattttccctcttagatacatcatgtactaaacaatatgttctcatggttgcaatttatctttgaaattatatgtctttttttctgctactgctgagggccagtaaatggaatcattttgcaggcttccttgttctctcagtaaaata

SEQ ID NO: 741675 - DNA, 629 bp, Homo sapiens
attagatgtgaggtcttcgtgatacagttttgagttttaaagaaaaacgtctgtagcaggggttagtggcaacttgtattgcagtgttcagccttctacatgaaggatgttcagctagagcttagtagtgttgagttttctggtaagtattaataggcattgtcctaacttcttacaaacataacattttactaaaaatgtatcattaaaatagatatttaatagaatagaaaaataatgtggattygaacattagaagtagggcagaatattaataatacacatttttcccgttatataactttctttttgcttttcatgtttctccattgctatctgatctctattaaataagagagaatttctgcaaacataatataccaagtatcagatgcacagaaatacacatatttaaaccacacacataaaccataattgatgacactttcttttaactactaactttcaaaggtttatagatgtatctattttaaaatatactagtaggacccacataaagaaaacaatgaaagttttccaagaaatttaaaaacagattgtagacaatggagaaacaagtactgttcttggatgggaaaactaaacgctggggaaggatgctaattctg

SEQ ID NO: 741676 - DNA, 634 bp, Homo sapiens
attgctatctgatctctattaaataagagagaatttctgcaaacataatataccaagtatcagatgcacagaaatacacatatttaaaccacacacataaaccataattgatgacactttcttttaactactaactttcaaaggtttatagatgtatctattttaaaatatactagtaggacccacataaagaaaacaatgaaagttttccaagaaatttaaaaacagattgtagacaatggagaaacaagtactgttcttggatgggaaaactaaacgctggggaaggatgctaattctgtccacattaatttattattatatatttattatttataaatttaatttaatcttcaatatcctagcaaaaagatgtaaatttgaaatggattggggaagagagttactctagcagatatygataaaaataataaatttataaaattcaaagcaatgttgtgctgacccgtgaattgacagtttaatgcatggaaaagaacagatgttcagaaacatgcttacatacataaagattaacagtgatatgataaatcaataaaagggagggtctgttcaatcaactataatttaaatatttaagaaataaaactagaacctcactgcatctcttata

SEQ ID NO: 741677 - DNA, 630 bp, Homo sapiens
tgcaacatcatcattaatgctgaactttatttccaagtccactggaggcagaagagaaaacaattcaggtaaccagcttcgcagttttactgtattcctctgtccagtgctttcccgtttctgggttttgtgatctaggtttggattagggattcatagtgggaagctccatgttcctgaaacctggtaattattttgaattaaggataagagtttcacttccctaataaaatgtcaacaacaataccttacccttcatgctttctgctctgtcttgagcatttttcatgcagtaactagtgtaataatcatgaaattctaggcgttaagtcttatcctaacaggtaaggaacsaggtctgctaagattgacctgtgctacctcatgtgtgctatctgtctgggggtgaggagtgatatcacagtctagtaaaggtcacttgaacaggccattctccctgtgatttctatttttttatgtacatcataaaagatggcaggatgctatgagactattggctatgaagctctagggtcctgagtctggtatttctagggtagggctttctgagttatggcgtcttcacctcataaacaggaataacacctctgcttcagattgcacaggaag

SEQ ID NO: 741678 - DNA, 626 bp, Homo sapiens
aaataatctgcacgcatgtgtatgagttttagcaggaggggatatgcatgtacacatatgcatatacatacaggtttatttaagtgattggatctacacttttggaggctatttgaagtatcttatcaaaataaaacgcattttaagcaagargttaaaaaagcttttcagacccgaaggccatttaatacagtaaatcttacttgggtagtttagcaaacattttttaaaatccacatccaacagattggttagtattagatacacagatttggtttcaaagctgaaatacccctggtggaataaatcttctcatgaaattcagttatattatgccacaaaacagggacacttatctattgacaacttaaatattaactcagtaggctacctggtgatataaataggaaaaaaacagtggtcatggattaggagtgagaagactatgacaccagcctaccttggactgggaccgcaaaggatgttaaaatctatcctagaatttaaaacaggaaaaatgtcaaatattccactccccatttggcccaaaccatcccccaaggaatacacccccaccccacccccacatgaggtttactaaccagctgctacagatgttactatgt

SEQ ID NO: 741679 - DNA, 626 bp, Homo sapiens
aaataatctgcacgcatgtgtatgagttttagcaggaggggatatgcatgtacacatatgcatatacatacaggtttatttaagtgattggatctacacttttggaggctatttgaagtatcttatcaaaataaaacgcattttaagcaagaggttaaaaaagcttttcagacccgaaggccatttaatacagtaaatcttacttgggtagtttagcaaacattttttaaaayccacatccaacagattggttagtattagatacacagatttggtttcaaagctgaaatacccctggtggaataaatcttctcatgaaattcagttatattatgccacaaaacagggacacttatctattgacaacttaaatattaactcagtaggctacctggtgatataaataggaaaaaaacagtggtcatggattaggagtgagaagactatgacaccagcctaccttggactgggaccgcaaaggatgttaaaatctatcctagaatttaaaacaggaaaaatgtcaaatattccactccccatttggcccaaaccatcccccaaggaatacacccccaccccacccccacatgaggtttactaaccagctgctacagatgttactatgt

SEQ ID NO: 741680 - DNA, 626 bp, Homo sapiens
aaataatctgcacgcatgtgtatgagttttagcaggaggggatatgcatgtacacatatgcatatacatacaggtttatttaagtgattggatctacacttttggaggctatttgaagtatcttatcaaaataaaacgcattttaagcaagaggttaaaaaagcttttcagacccgaaggccatttaatacagtaaatcttacttgggtagtttagcaaacattttttaaaatccacatccaacagattggttagtattagatacacagatttggtttcaaagctgaaatacccctggtggaataaatcttctcatgaaattcagttatattatgccacaaaacagggacacttatctattgacaacttaaatattaactcagtrggctacctggtgatataaataggaaaaaaacagtggtcatggattaggagtgagaagactatgacaccagcctaccttggactgggaccgcaaaggatgttaaaatctatcctagaatttaaaacaggaaaaatgtcaaatattccactccccatttggcccaaaccatcccccaaggaatacacccccaccccacccccacatgaggtttactaaccagctgctacagatgttactatgt

SEQ ID NO: 741681 - DNA, 639 bp, Homo sapiens
aatttttgtatttttagtagaggtggggtttcaccatgttggccaggatggtctcgatcacttgacctcatgatccgcccgcctcgacctcccaaagtgctgggattacaggcataagccactgtgcctggcctagaaagcaattctaaaggaggtttgaggatgcccagraaggctcgaacccatctcttagaattgcactcaatttcttccctcagagggcatgggcacctacagtgatatccaagctgcagaaagaacaaaattcagcaccaagacaagagcacctcaaaaagctacactgggtagacaagcaaaggagagggtgaaagagtgtgtgggtatttaagattccttactgcctagggaataaagtcccaattcgtatacatgatgcccaaggctctacccaatacagccagatttctctttctgaatgcctcaccattcccacccagctatagctccagggttatagctgcagactccaaggggacctcagagttaatgcaaggggctgcagattctgattcttacacacccaggtggtcttacaggtaatgtcttatctgtcattttttaatgtgtacaaaattgctagagggttattataatatagattcatttaaaaatattact

SEQ ID NO: 741682 - DNA, 644 bp, Homo sapiens
ggatggaggggtgggagtggggaaggagtttttgtgctgtgcagaaacaatggccagttcatcttacggtgtccccaaggcttgtgtttttaagacagaagggggcctttgtgttaattacactgataaaaactcccctggcagggcttcccctggaccggtggcataaaagatgtgacatttcgcccgtgtgaatgccacactgccaaacagacattttcttaagcagagaaggccagcccccaccccctcttcctcaccagttgatcagctaacctctcctggtgtgtagagaaaataaataaaaactgtaagactaaaccatctgctgctgggggtgtctggcttctttcttagttgggttggagcttccaggaatccatccattttggtttctgaacggtccaagttgtcytcaggtaggatggacatagaggcagacggcttgtagtggaggaggagatgttgccctgagagtttgggtttcagtgggttttcctgggaagcaggaatttcagcttgttactggaagttacatttctgagcaaaagacgtatgctaggtgaagactgaaggctgaagatgaggaaccagcagggctcactgcttgtaaattagaaaataattttctaaatactatggta

SEQ ID NO: 741683 - DNA, 635 bp, Homo sapiens
gtaagccatatgcacattaaaatttgagaggcactgatctgcgtgccaggaatgaggaggatgaagggatgaggaggaggaggaggatccaacggtctcctggaggttaaataatttacttacagccacacggtcaggatgcagggattctgactgcaaacccagtgycccctccacctctccatgtttgtgagacataattccttacaacctattggggaaccagaacccccaccatgtaacaattatctgaaacatggtttcattagaggtcacaatttagggatcgcaggataggcttcagagaggagaccaaattcatcttggctgtgaaagtgagtagaattcaggtaaggaaaggagcagagagaggactgcagaggagggagaagtctgtgtgtgcatgtgcgcacatgtgtatgtgcgtgtgtgttggggcaatgagagggaagtcgctgagggaggagaaccacatgaacaaagcccagagctacctgacactgataaatcactctccccatcacattctgcccaccagacgtattgatcctgaactaatcaagtagaaagagtcattggggaaaaaataacgggcttaaaaaaataaatccctctcacacgattacttctccagg

SEQ ID NO: 741684 - DNA, 635 bp, Homo sapiens
gtaagccatatgcacattaaaatttgagaggcactgatctgcgtgccaggaatgaggaggatgaagggatgaggaggaggaggaggatccaacggtctcctggaggttaaataatttacttacagccacacggtcaggatgcagggattctgactgcaaacccagtgtcccctccacctctccatgtttgtgagacataattccttacaacctattggggaaccagaacccccaccatgtaacaattatctgaaacatggtttcattagaggtcacaatttagggatcgcaggataggcttcagagaggagaccaaattcatcttggctgtgaaagtgagtagaattcaggtaaggaaaggagcagagagaggactgcagaggagggagaagtctgtgtgtgcaygtgcgcacatgtgtatgtgcgtgtgtgttggggcaatgagagggaagtcgctgagggaggagaaccacatgaacaaagcccagagctacctgacactgataaatcactctccccatcacattctgcccaccagacgtattgatcctgaactaatcaagtagaaagagtcattggggaaaaaataacgggcttaaaaaaataaatccctctcacacgattacttctccagg

SEQ ID NO: 741685 - DNA, 635 bp, Homo sapiens
gtaagccatatgcacattaaaatttgagaggcactgatctgcgtgccaggaatgaggaggatgaagggatgaggaggaggaggaggatccaacggtctcctggaggttaaataatttacttacagccacacggtcaggatgcagggattctgactgcaaacccagtgtcccctccacctctccatgtttgtgagacataattccttacaacctattggggaaccagaacccccaccatgtaacaattatctgaaacatggtttcattagaggtcacaatttagggatcgcaggataggcttcagagaggagaccaaattcatcttggctgtgaaagtgagtagaattcaggtaaggaaaggagcagagagaggactgcagaggagggagaagtctgtgtgtgcatgtgcrcacatgtgtatgtgcgtgtgtgttggggcaatgagagggaagtcgctgagggaggagaaccacatgaacaaagcccagagctacctgacactgataaatcactctccccatcacattctgcccaccagacgtattgatcctgaactaatcaagtagaaagagtcattggggaaaaaataacgggcttaaaaaaataaatccctctcacacgattacttctccagg

SEQ ID NO: 741686 - DNA, 695 bp, Homo sapiens
agattcttggatccatggacttgtggttttcattaaatttggaaactttttggctattatttcttcaaatatttttatatgccaatataaccccactttgaggactccagtagcatgtagatgaggctaatggagattgtttcatactttactgataaatctcttctgtcttttgagccttttttctctgtatatttccttttggatagcttctatagctgtcttcaattcactaatctttacctctgcaatgtctaatatgctgttaatctcatcaagcgtgctttttatctcagacattgtagttctcaccttttaaagtttgatttggtttggtcttttttacatctaattagtacgtatctctattaacaagcaygctcaaccttttctctagcttcttgaacacacagaatacagttacagtaactgtttttagtgcccacgtcatcaaattttaacagcactgttagttctggctggattctaattaattgtttttacctcatttaggtcatatattcctgttttgcttgactagttatttattattggatgccaggcactgtggatttcaccttgttgggtgctgactattttgtagttcctataaatattcttcgttctgggatgcagttaagctacttggaaagtttgattcattgctggcttgcttgtaggctttattaggtagt

SEQ ID NO: 741687 - DNA, 610 bp, Homo sapiens
ctctggttacctgtgcttttgagatcttacacaaaaattatttgccaaaaccagtgtcctggagtgttttccctattgttgtttctagaagtttcgtagtttcaagtcttagtttaagtctgtaatccaatttgatttgatttttgtgtgtggcaagttataggggtctagtttcattcttctgaaatggttattcagttttcttggtatcatttgttgaaaagcctgttcttttaccattgtatgtttctggtgcttttgttgaagataaatctgtaagtgtgtggatttatatttgggtgctttattctgttccattgatctatgtatctgtttttatgccagtgctatggtaatttggttactagctttgtagtaaattttgaagccactttgcagtaaagatgtgatgcctccacctttgttctttttgccaaggattgctgggctattccgagtcttgtggttytgtatacattttaagatttttttttctatttctgtgaataatgtcattggtattttgacgaggattgcattgaatctataaattgttttaggtagtattgtcatcctaacaatattagttctttcagtccataagcataga

SEQ ID NO: 741688 - DNA, 591 bp, Homo sapiens
accatgtaaagatgctcaactgaactcagagtgaaaaaatcccaataaatcctttctcacttgtcagaatggcaaggatttcatgatgaacaatacccagtgttggttgaggggatatcagaaagctactggtagaatgtaatttgacagaaactatctacattaaaatgcacacrctcttcaaatcggcaattctactttaagcaatttattgtattggtgaactggacaaccacacaaaattatttctacaaaaatgttcatagtgcctttttggtaatagcaaaaaccctgaaataacctaaattatttttggtaagtgatgagatgaacagtacaactgaatactatggagtattcttttaaatgacaatacaacaatgatctattgttaaatgtaaaaagcaagctgagatcaacacatgtgctgcagatccattctccactctggtaccctgccccctgccctgcatcttagagacaggtctgtgtcaacctgccctctggcctcctgttggaatcagccgcttggatgccccagaagcacatcagagaaagtgaaggaaagagatccaagtgtttatttcactg

SEQ ID NO: 741689 - DNA, 591 bp, Homo sapiens
accatgtaaagatgctcaactgaactcagagtgaaaaaatcccaataaatcctttctcacttgtcagaatggcaaggatttcatgatgaacaatacccagtgttggttgaggggatatcagaaagctactggtagaatgtaatttgacagaaactatctacattaaaatgcacacactcttcaaatcggcaattctactttaagcaatttattgtattggtgaactggacaaccacacaaaattatttctacaaaaatgttcatagtgcctttttggtaatagcaaaaaccctgaaataacctaaatkatttttggtaagtgatgagatgaacagtacaactgaatactatggagtattcttttaaatgacaatacaacaatgatctattgttaaatgtaaaaagcaagctgagatcaacacatgtgctgcagatccattctccactctggtaccctgccccctgccctgcatcttagagacaggtctgtgtcaacctgccctctggcctcctgttggaatcagccgcttggatgccccagaagcacatcagagaaagtgaaggaaagagatccaagtgtttatttcactg

SEQ ID NO: 741690 - DNA, 627 bp, Homo sapiens
aattccatctctacaaaaaatacaacaattagtcaggtgttgtggcatgggcctgaaattccagctactcaggaggctgagatgggaggatcacttgagcccagaaggtcaagcctgcagtgagccaggattgcatcactgcacttcagcctgggtgacagagagagatccaatttcaaaatatagatagatagatagatagatagatagagatagattagaagtcaatgaaatgaaaaattaatagtaggtaaatcagttgaatacaataatgctaattttgttgtgaacacttactaatcaatatactttagtggttcatattttcacaactgtataaattcatcctttttgaactttatggagcaaaagtgagtgtaaaacacatttgcaaatattctttaaagttattatttaccttttgstaatacgagtaaagatttatgaatttccattcaatgatcacttattgaatacctacagtatattgtcctaagtcctgcagatagttgaataaaacattgccattcaagatgttcacacgctctggggaagactatcaaacacagctgtaacagaaagcatcagagagtcataagaagaatgattttggggcagagattatga

SEQ ID NO: 741691 - DNA, 657 bp, Homo sapiens
aggcaggattaatattattatgccatttgatgaacaaaggtctgtcattcacctccaggaaaggacatgactcctcaaaatcaccagctgataaatagatgagttgaaactagaactgagttcagtgcttctgcctrtatgttgcaatgcccttaggacattcttttaccagtgcatttgtaagctatgtgagaagcaaaggagagagtaatcaaactatttgaaaactaacttagagtggctaacataatgatgttgacatttggggaaaaagatactttatttgagaatcatagtgaaatatctccaccacgtatagttcttgggttttatacaaattggaagttcagttactgtcccagtgtgaaaggtgtgtggaggatggattcgaaggggaatgactcaggcagggatactggtgagaaatgtcataacccctggaagaatgggtggaatggaagaagctatggctcgggagagttgaactagatttgcccatgcaaatggaattggaatgaagagtgaattgaagaacattaagagcctggaatagatagaatttgatggtttattagaaaggaatagggaagagaagacagcagacaatgttgatccttgaatgcataatataaaactagactcttccctgctctgaat

SEQ ID NO: 741692 - DNA, 657 bp, Homo sapiens
aggcaggattaatattattatgccatttgatgaacaaaggtctgtcattcacctccaggaaaggacatgactcctcaaaatcaccagctgataaatagatgagttgaaactagaactgagttcagtgcttctgcctgtatgttgcaatgcccttaggacattcttttaccagtgcatttgtaagctatgtgagaagcaaaggagagagtaatcaaactatttgaaaactaacttagagtggctaacataatgatgttgacatttggggaaaaagatactttatttgagaatcatagtgaaatatctccaccacgtatagttcttgggttttatacaaattggaagttcagttactgtcccagtgtgaaaggtgtgtggaggatggattcgaaggggaatgactcaggcagggatactggtgagaaatgtcataacccctggaagaatgggtggaatggaagaagctatggctsgggagagttgaactagatttgcccatgcaaatggaattggaatgaagagtgaattgaagaacattaagagcctggaatagatagaatttgatggtttattagaaaggaatagggaagagaagacagcagacaatgttgatccttgaatgcataatataaaactagactcttccctgctctgaat

SEQ ID NO: 741693 - DNA, 635 bp, Homo sapiens
tgactatagtatcttattttcatcagctatttataatcaattactagaaatatacactcttaaggaacaaattatccctatattctatgaattctttgaaagagaaacatttttctgatttatttaataagaagcacaataccaaaaaagtaaaaaaaaaaaaaaactaaaaaaagtatcacaaaaaagaaaatcataaaaattcattgaaatactagctaaataatgtagacatcaataaaatagaatacaacacatggtgtttattctaggaatgttaaagtggtttagtatcaggaaacttattaaagtgatttcatagtcttagactgaggaataaaacccctattttaacttccaaatagatttcaaatgacatttgataaaatgcaactatattacttttaagaaaccacacatacatgtagcatagtaatttaggaatagagagatgtcattaaaatataaaacttctgctttctgatttcaagaaarcagaaaaaccctagtggcttactacatgaccaatttcatcacttataattaatatcatttaacaaattttaaccaacgcaataaatgttttaaaagactaatattttcttcatttttcttatatatgctaggaactattc

SEQ ID NO: 741694 - DNA, 553 bp, Homo sapiens
aatagtgatagcatatttttcaatctctaaagggttcatctgcacatgtggacatgacggggcagcagaaactaattttgtatttacagagaattcccatgttttcaaaaaatttcacatacatattttcttttgtratattaaagaggcaataattcaatttttgtatagctcccttacaatgttcagcctttttcctatacacgtatgatattttaaagtcacccactcttaaggtcatttcagcaagatggcagactagaaagctaaaagttctccttccctcatagacactgagttgacaataacagaatatcctgtgagaaccacagaggcaaattgagtagatacatcacttaagtaagccattgtaaaaccaagacaggatttcaaagaaagaagtaaggaaatttgcagcatttgatgtgtctgttcatgtgtctcccactaaatggcatattgcagaacaattagaaagaactcctctcccatattggggcttttgccaaaaacaggagagttgaccacgtttccaatgttctggtttatctga

SEQ ID NO: 741695 - DNA, 595 bp, Homo sapiens
aagacctgacttgtagcatttgccattttccatagtgtaaatattcctatcatgtcagtgtccggctttcaacatgatgtccctgaatggaatcaggaggactcacccacgtcaccgtttctcccacagttgaggaaggattccagattagcaggtgctaactgcaagggcttgcaagtcaacttaagtctctctccaatttagtttgaagtcaatgagttcacaatccatggagsctgagtgggagggatgctgagagcagaagagaaaaatctgtctaggagggcatctgctgccaagcagaccaaggcaccaatgtcattaactagaaattcaaatgattcagaatgaattcaggaaaatctggtgtcagggtttagaggatagactctggagccagatggtatgggttcaatttctcactacctgtgagactttggacatgtaacttaacctgtctgtaaaacggagatggtaccagcaccaactctgtagtggttgtgagaattcaatgagaaatgtgaacacaaagcttgcagcacagtgcctggcacataataagcactaataataacaaataataaacacagatgtt

SEQ ID NO: 741696 - DNA, 525 bp, Homo sapiens
gcattctagtctggatgataaattacatggtcaccttatcacacagcaggctttgtgtgtccccagcctcctctcctccagctggctctgcttacctgccttgctccagccaggcagagaagttccctgaagcagccgctctcgcccaccacatcaccctcatgcacacattacctccacctggaacattctacccctgtttcttcccctgcctaatttctactyagctctcaggcctgatttagatgttccttttttcagaggagtccttcatggcccatcaaccttaagttgggtcctccctctctcctgtcatacaaatgcttatttctcatagtgccagaatcatcagttgtatctgtttcccccactagattgtaagcaccatgaaggcagaggtcattgtatctccagaacctagcatggggctgttgccccataaccgtatgttttatgaatgaataaatggatgaatgaaaacacagtgtttcccataaatgcacacacacacacacacacacacac

SEQ ID NO: 741697 - DNA, 596 bp, Homo sapiens
atggcagaggccctaggtgtcttgagccagggaacctcggactggaaggagtattctatttccaagtggtgagaaggggccataaagaattcaaatttttcctcgatattgagttccttgatgtttgtaaagtttcacctgtcctttaaaaaagttataatttgaaagaaataaatactcaagtctctatgtacatagaatatctttttcagcagtagaatagtaatctccacaagacattttacaaggaactgaggtaatacaaagtactatttattaaaaaattgcccccacctttttacttttactttttacattatctttataatatcagctcgcctttttttcccactgtgctttttaaagacaagastagaataagtgcaaagaaatacaccacatttaacaacatttgagtctgttaagggcactggctttccgttctggcattaacataatttgatatttgaccatgggtagggcttttgacagctctgagccttgatttctctatcaggaaatagatgaaggtgatctcttaagttccttcctgctcaaatatcctgtggtcttatccatctttgcatctcttttga

SEQ ID NO: 741698 - DNA, 572 bp, Homo sapiens
atgtcggtagttaacacagccctgcgaatacaggaagcttttctatgtgaggttttttttttttttttttttttttccttttgaaaggcattttactaggccaggacccaaaatcacagaactcccttttctctcccttgtttgaggatgacccagctctacagctttactttagcatttgacttacataaggaagcagcagaggagcgaccctgttggctgttggctgctggttgcagtctggtgaggaccacctgggacttgatgagtccataaaccctcctgaggcagctttttgtctcaaactcaattccaagcttcagaytgaagccctagtaaggaaaacgggatctgagggatccagaggcagatgacaatggaagtcaaggggcacagcacaggtgagcgtgactgactaattcctgctgattaagtcccccttatttcaaggatagaggtcatgctagtatccatgccataaatgaggtctggggaacccaaaggttactgatagcatgggggacaggcagcatgtgggcaaatgcagataattcccatcccctaggcacccc

SEQ ID NO: 741699 - DNA, 697 bp, Homo sapiens
acattattttgaagaagggaattgacaaatccaaagtaaggagactactgggttcctttggaacccagtgccggtagagccattgaggtagctttgatggaggtcagtgtacttgtggccttcataggagctatttgctgattgttcttcagaataagacattaactgggtttgggagaaaagggtcatggaacgatttgacagttgcgtgactggactcaagaaaattytggggcttctgtctcagcttctctctttgtaataattcctaatgctttcttgaagatctatcttaaattgcaacgatgagaatagctggtaggtgaaacagcaaaactaaagaccttggaaacggatagtgagggttcttgaatataacttctaagaatcttggggccaagtgaggtagcttatttttctctgtagctaattgcttgctgtgtaatctgttgctttgctactggacattgcagtagtctccttacttggtcttcttgctgccagttgctctctttttccaatctgtcttagtctgcttgggctgccataacaaaataccatagatttggtggcttacacgacagaaatttattttctcacagttttggaggctaaaagcctgagatcagggtgccagcatggtcaccttctggtgagggctctctttctggcttgcagagggataccttctcactgt

SEQ ID NO: 741700 - DNA, 521 bp, Homo sapiens
acagaatgctctgttttgtctggcttaaatcggcataattattttgagattcatttatgtaccaatagtttattcttatttcttaattgtaattcatatatcacaatttgtttatttcctctcctgttaatggacatttgggttgtctccaattttgggatattacaaataaagctattatgaccatgytttttttttttttttttttttttttttaagttagagttttgctcttattgcccagattggagtgcaatggcgtgatctcggcttaccacaacctcttcctcccaggttcaagcgattctcgtgcctcagcctcccgagtagctgggattataggcatgtaccaccacacctggctaattttgtgtttttagtagagatggggtttctctatgttggtcaggctggtcttgaactcccgaccttaggtgatccgcccaccttggcctcccaaagtgctgggattacagatacgagccactgcgcccggccattatgaccattcttaatgcaag

SEQ ID NO: 741701 - DNA, 577 bp, Homo sapiens
agtttctaattttggtgaagttcagtttatcaggttattcttttatggattgtgcttttggtgttgtatctaagaaatctttccttaattggtcacaaatgttttttcttatgtctacttgtagaacgtttttttgagaccrggttttgctctgttgctcaggctggagtgcaatggcatgatcatgtctcactgcagcctcgaccatccaggctcaagcaatcctcccacctcagcttcctgagtagctgggactacaggaatgagcctggctaatttttattttcttatttattgtagagatggggtcttgccatgttgcccagactggtcttgaactcctgggctcagaggattctcccaccatgggcttccaaagtgctgggattacgggtgccagccactgcacacggccttacttttagaacttttaagattttctttcacatgtaggtctgtgatccattttgagttaattttgtaatatggtgtgacgtatggattgaagtttttttgtgtgtgtgtgtatgatgagccactgttccaacaccatttgttgaatagattccataaatta

SEQ ID NO: 741702 - DNA, 631 bp, Homo sapiens
ttttttgtgtatatacacacacacacacacacaaatacatgtgtatgtttttctgtattctataatttagtccattgatctcttgtttttatgtaatatcatactttcttgattcttgaagctttgtaatcttgaaatcagtttgtatagtcttccagatttgtttttttttttttcaaagttattttggctattctaggtcctctgcattttcatataaatgtcagtactrttgtgtcagtttctaccaaaagtctccagaatttttattgtaattccataaaatttatagatcaatttggggagaattgacatcgtaatagggttttctgatccatgtagatgctgtagcattccatttatttaggttgtttttagcctttctcagcagtgttttgtagttttcactgtataggtctcaacatatattgtcagatatatctctgtttcatacttgatactgttatatatggcattgttttaaaaattcaatttctgattaatttttagaatatagaaatacaattttatatagcgacattgtatactgtgcagactaaactcactaattctggtactttctgtagattccattccatgggataatcttcataaatggtcatgtagtctg

SEQ ID NO: 741703 - DNA, 520 bp, Homo sapiens
cttcagtagttaattttagctacttttaaagtgtgatttctctttactacttagtaaggtgtgaaaacgattgaatttgtgtaactgatgtttgatgggtttaattgttgtcagtgctgcttagcagagtgctctgtgttgcagtttaaacactactccagattttcctttattagataaaagtctactataacwtttttttgttcttagtcgcctttagtctttagagttactgatcttcaattcatgttggacagcttcctttgaagagagaaaacagctttattggcagtggggacagtcaacattactatccatgttaaagaaaagatcccagaaacatgaagaaaaagactagaatgtaattatgtaaaaagcaaatcaacaaaaagcgaacccagaccaccacagttcaaataagagaaaatgcttccaattagtgatgtaacctacttaggcctcagttttctcattgaacagaaagaaaaggttgttactagatcatctcttaagttacttt

SEQ ID NO: 741704 - DNA, 520 bp, Homo sapiens
cttcagtagttaattttagctacttttaaagtgtgatttctctttactacttagtaaggtgtgaaaacgattgaatttgtgtaactgatgtttgatgggtttaattgttgtcagtgctgcttagcagagtgctctgtgttgcagtttaaacactactccagattttcctttattagataaaagtctactataacttttttttgttcttagtcgcctttagtctttagagttactgatcttcaattcatgttggacagcttcctttgaagagagaaaacagctttattggcagtggggacagtcaacattactatccatgttaaagaaaagatcccagaaacatgaagaaaaagactagaatgtaattatgtaaaaagcaratcaacaaaaagcgaacccagaccaccacagttcaaataagagaaaatgcttccaattagtgatgtaacctacttaggcctcagttttctcattgaacagaaagaaaaggttgttactagatcatctcttaagttacttt

SEQ ID NO: 741705 - DNA, 635 bp, Homo sapiens
aaaattaaagctttcctctaagattgagaaaaagacaagtatgtctgctctcaccacctccattaaacatttaactggaggttgtaagcaagaaaaagaaattaaaggcatccagatggaaaagaaagaagtagaactgtcattatttgaagacracatgaccatctatgtaggaaatcctaaagaatctacaaaacaggtactagaactaataatgagtttagcaagcatgcaggatacaaaattaatgtattaaaaaatcaattgtatttctatttaccactaatgaacaagtgaaaataaaaaaaaattaaaacaatatcatttataataacaccaaaaactagaaaacatttagggataaatctgaccaaagatgtaagaatcctgcatactggaaacaacaaaacattactgacactgattaaagaaaatctgaataaatgaagagatatacctttttcatgcttcaggaggctcaatatggttaagatgtcaattcttcccaatttgagctgtacattcatttccatctcaagcaggccttttggcagaatttgacaggctgataataaaattcatgtggaaatgcaaaggatctacaatcgccaaaacaatttcaaaaaagaacaaaa

SEQ ID NO: 741706 - DNA, 550 bp, Homo sapiens
aatgctgattattaaaaagtcaagaaacaacagatgctggtgaggctgtggagaaataggaacacttttacactgttggtaggaatgtaaattagttcaaccattgtggaagacaatgtggtgattcctcagagacctagaaccagaaatatcatttgacccagcaatcccattactgggtatatacccaaaggaatataaatcattctattataaacatacacgcatgtgtatgttcactgtagcactattcacaatagcaaagacatgggatcgacccaaatgctcatcaatgatagactagataaagaaaatgtgctatakatataccatggtatactatacagccacaaaaaggaatgggatcatgttctttgcaggaacatggatagagctggaagccattatcctcagcaaactaatgcaggaatagaaaaccaaacatagtatgttctcacttataagtgggaggtgaataatgagaacacatggacagagggaggggaacaacacgactggggccagtcgggggtaggggagcggggggagg

SEQ ID NO: 741707 - DNA, 638 bp, Homo sapiens
actcctaggctataaacctgtatagtatgttactatactgaatactatatgcagctggaatataatggtaattatttgtgtttctaaacatagaaaaggtaatgcattgtgcaaagacattagaacagttacatcactagatgatagaaaattgtcagctccattatcatcttatgggactaccatcatatatgcaacccaccattgaccaaaatgtcactatgtggtgcatcactgtatttatagtagagaaccattagaaattatataaagccccttcccccgaacagtggacttattaaataaataatagtataggcttacgatgcagccattaaaaataacatttttggctgggcatsgtggctcacacctgtaatcccagccctttgggaggccgaagtgggaggataacttgagcctagcaagttgaagctgcagtgagccatgatggcacgactgcactccagcctgggggacagagtgagaccctgtctcaaaaacaaacaaacaaaataaacttttgctgggttccctgtcacatcagaaggtaagtataaaagacttctaagtcatgtcaaaagagactcaggaataaacctgaagatgcttccatcgatcaaagaggtgaggaagag

SEQ ID NO: 741708 - DNA, 543 bp, Homo sapiens
gctagaagccccatgcaagtccgaaatctgacaaagcagtaattaaatcttttttttttttttttggtctggtgttttacacggtctgtccatcaaaattccccttttcagtctggcagtaattaaatcttaaagcttcaaaataatctctttgactccatgtctcacatccaggtcacactgatgcaagaggtgggcccccarggcctttggcagctcccctgctgtggctttgcagggtacaggccccctcctgcctgtttcacaggctggtgttgagtgtctgcagcttttccaggcatgcagtgcaagctgttggtggatctaccactctggggtctggaagatggtggtcctcttctaaaaggtccactaggcagcaccctagtgcagactctgtggggggccctgaccccatatttcccttctacattgccctagcagaggctctctatgaggtctctgcccctgcaggagacttctgcctggacattcagacatttccatacatcctctgaaatccaggtagaggttcccaaattt

SEQ ID NO: 741709 - DNA, 632 bp, Homo sapiens
atattcaacttatgtgaatctgtataagctacaaaatatgcattagtttaaggttagtcattcatagtataggtgtttttttggttttgttttgtttttttgtatttgggaagaggaaggcagaccaagctgaatctttctttttttttttttttaaagacctttctacctgaccaagaaaaataaaacattttcctaattgaaaataaaaagaaaaattgcggggggaatggggttgggaatattgtcatatagagagagaaaattatgaacaaaagaccagagatagaataagctaacaagataatgtaacaaaactacttaatgagtgactargagccaatttgcaatggtggaaatgttctgtatctgtgtttttcaattgccattgactatatgtggctattgagaaattaaaatttaaggacactgaataactaaatttttaattttacttaatttttatcaattatattttagatttcaaagttaacattctattcagttattataaaacatttagataggcttgcataaacttggatgtggacatccatgttttcaactatgtatttcacaaaatctaaatatagatgaaaagcttcagtgaaaatgtagtacttaacttgaga

SEQ ID NO: 741710 - DNA, 632 bp, Homo sapiens
atattcaacttatgtgaatctgtataagctacaaaatatgcattagtttaaggttagtcattcatagtataggtgtttttttggttttgttttgtttttttgtatttgggaagaggaaggcagaccaagctgaatctttctttttttttttttttaaagacctttctacctgaccaagaaaaataaaacattttcctaattgaaaataaaaagaaaaattgcggggggaatggggttgggaatattgtcatatagagagagaaaattatgaacaaaagaccagagatagaataagctaacaagataatgtaacaaaactacttaatgagtgactaagagccaatttgcaatggkggaaatgttctgtatctgtgtttttcaattgccattgactatatgtggctattgagaaattaaaatttaaggacactgaataactaaatttttaattttacttaatttttatcaattatattttagatttcaaagttaacattctattcagttattataaaacatttagataggcttgcataaacttggatgtggacatccatgttttcaactatgtatttcacaaaatctaaatatagatgaaaagcttcagtgaaaatgtagtacttaacttgaga

SEQ ID NO: 741711 - DNA, 632 bp, Homo sapiens
atattcaacttatgtgaatctgtataagctacaaaatatgcattagtttaaggttagtcattcatagtataggtgtttttttggttttgttttgtttttttgtatttgggaagaggaaggcagaccaagctgaatctttctttttttttttttttaaagacctttctacctgaccaagaaaaataaaacattttcctaattgaaaataaaaagaaaaattgcggggggaatggggttgggaatattgtcatatagagagagaaaattatgaacaaaagaccagagatagaataagctaacaagataatgtaacaaaactacttaatgagtgactaagagccaatttgcaatggtggaaatgttctgtatctgkgtttttcaattgccattgactatatgtggctattgagaaattaaaatttaaggacactgaataactaaatttttaattttacttaatttttatcaattatattttagatttcaaagttaacattctattcagttattataaaacatttagataggcttgcataaacttggatgtggacatccatgttttcaactatgtatttcacaaaatctaaatatagatgaaaagcttcagtgaaaatgtagtacttaacttgaga

SEQ ID NO: 741712 - DNA, 624 bp, Homo sapiens
tgggtaaatacagccattccaaatgtgggaaattggccaaagcaaaggggctactggctctatgcaagtccaaactccagcagggaagtcaaatcttaaagctccgaaatgatctcctttcacgccatgtcttgcatttgggtcatgctgattcaacagttgagttcctatgatcttgaaaagccctgcccctgtggctttgcagggtatagcttccctcccagctgctttgacaggctggcattgaatgtctgcagcttttccaggcacacagtgcaagctgttggtggatctacaattctgaggtctggaggatggtggccctcttctcacagctccactaagtggtgccccagtagggactctgtgaaggggctctgaccccacattttccttctgaactgcccttgcagaggttttccatgaagtgccctgcccccrcagcaaacttctgcctggacatccaggcattgccatacatcttctgaaattgaggtaaagtttcccaaacctcaattcttgacctctgtgcactcacaggctcaatatcacatggcagctgccaaaacttggtcctctgaagccatggcctgggctctacatgggtccctttcaaccatggct

SEQ ID NO: 741713 - DNA, 630 bp, Homo sapiens
aaaccactacactaaggctgtctgtaaccaaaaaattcatgcagaaccttggccccctaaaagcacaaagaagcaaagtcgaaggactctccccaacatatgctacagtcaaactctcaaaagctaaaaattaaagtcccatccaaatgaaagtaaattcaaaaataagaagtgacagattctccagatgaaaacaaaatggcataagatccctggcaccatgaaaaaccagactgtagcaayaccttcaaaggatcacatactacctctctagcagtgactcctaaccaaaatgaaaattctgaatgaaagctaattcaacatatggatttaaaggaagatcaatgaggttcaacagattgttgaaagccaacacaatgaaataagaaaaataattcaaagtataaataaaacattctctaaagagatagatattttataaagaagaatttttggaaatgaaaaatttgctgaaggataacaaaatatagttaaaagctttaacagtagactagaccaagcagaagaaagaatttcacagcttgaagacaggtatttagaattaaccaagtcagataaaaaagaaaaaaaatttaaatgaacaaagccttcaagaaagataagattatg

SEQ ID NO: 741714 - DNA, 555 bp, Homo sapiens
atttgatcactttttctgttattcacaatgtgacagctacagagtatacatacttttaaaaataaaactttatttcaaaatgattagaggttcacaaaagtaaaaagttatatgtggaggtcccatacacccttcacttctccacctccactgttaacaccttacatgactataggagaatataaaaaccaggaaaytgacattgctacaattcacagagcttattcagatttcaccagttatatacactcatgtgtgcgtaattttatcctgtgtagcttcatgaaacttccaccatcaagatgcaaaactgttccatcaccacaaatatgcccatgttattccttcatagtcatacctgtcccattcttggcccccaaatagtaactcctggcaaccaggaatctgtgatcctttctataatttcattacatccaggatgttatataacctttcgaaactggcttttttcaatcaacataattctcctagggcctacccaagttgttgcatgtatctaatagttcatacctgttcattactgaatagtattcc

SEQ ID NO: 741715 - DNA, 531 bp, Homo sapiens
cctgttcattactgaatagtattccacaataccttatgtaccacagttggtttaaccattcacccattgaaagacatttgggttgttttgagtttggggctatcatgaataaagttgctatgaacattcctttacaggtttttgtgtgaacatagttttcatatctcttaataratactaacagtgtaattgctgggtagaatagtacatatatatttgtttgctttaaaagaaactgccaaactattttctagaatggctgtaccattttacattcccatgaaaatatgtgaattatctagtttctcctcatccttaccaacatttggtattatcattcttttttggccatgctgatgggtttgtactgacactttcttatggttttgatttgtatttcccaaatgactaatgatattgagcatcttttcatgtgcttaattaccatctgtgtattctctttggtgagatgtctattcatatattttgcctgttttcaaattggattgtttagtttttttactgttgact

SEQ ID NO: 741716 - DNA, 565 bp, Homo sapiens
tttaaatgagaaaacacatttaaagattttcataaatagtaaatttggaataaatactgtcattactattaataataaacgaaactgttgaaatgaaattctttataaatttgtatttttaaagcataattttttccctctacataaaaaccttacattggttgaacaggaccaaagaactgagacctttgtttagaaccaactggaaattggctttgagatcaaagtggtaggttggccaagttggctgacaagtacaaaaaawtgtgctctggatgagatcatgattctacagctgtgctgctctcggtggatccctcaaagactagcaggcctgagtattatgtgaaacccaaaatgtatcactaaacagaagtgcagcgatctcaatacagaagttagaggagcacttggaaagtaagcccagcacagatgaagacagctcaagcacagcttactaaagataaaaagaggagtcttgtttttccaaaatagattaagggtactgtctcccactcagcagtgtgcaaatgcaaaaagccaaagataaaagaaagattaaaat

SEQ ID NO: 741717 - DNA, 482 bp, Homo sapiens
tgtgctattttattatctctccataatatgatacatttaatgactgtgaatatagaagttcaacttaactaacaaagagtgcttgaggacattttgttccttagagtggaaggctttacacgtaaaatctgctggaaaaaagacctggactttgaaatcagacctaggttccatcctggattcaaaatktattaactatgctgcctaaggcaatctacttacccttcagggacttgtgatcatgataccaattatcactgataagcaccttctccataccaggcatggagcaagtctacgcaacaagtgaggaattaattataggaatgttgttctgaataggtaggatggaccccctagaacaggatctggcatatattagttcagaaatgaatgaatcaaatatacatacatatgtatatatataatcctgatttaaatttattcattcaaaaataaatgaaaaatgtatttactaaagc

SEQ ID NO: 741718 - DNA, 638 bp, Homo sapiens
aaaaccatacaaaaaaatcaatggatccagtagtttgttttctgaaagaataggtatgatcgatagattgttagttaaactaatgaagaagaaaagagagaagctccaaataaacacaatgagtaattacaaggaggacattaccaaccaccccacaaaaatacaaaaactctcagagactactatgaacacytctacactcacaaactggaaaacctggaagaaatggataaatttctagaaacaaataacctcccaagattgaacaaggaagaaattgaatccctgaacagaccaataatgagttatgaaattggatcagcaatgaaaagcctaccaatcagaataagcccaggacagatggattcacagctgaattctgccagatgtataaaaagctggtatcattcctactaaaagtaatttaagaaattgaggaggtgggactcttccctaactcattctgtgtggctagcattatctggatacctaaacatggcagagacacacacaaaaaagagaacttcaggccaatattctcaatgaacatagatgcaaaaatcttcaacaaaatactagcaaaccaaatccagcagcacatcaaagagctaattcactatgatcgactaggctttatc

SEQ ID NO: 741719 - DNA, 599 bp, Homo sapiens
tataaaagactgagattgtgtcctttgcagaaacatggatgtagctggaggtcattatcttaagtgcattaaggcaggaacagaaaaccaaatactgcacgttctcaatgatcagtgggagctaaacattaagtactgtactagtccattcttgtactgctataaaaaactatctgagactgggtaatttgtgaataaaacaggtttaattggctcacagttccgcaggctgtacaggcttctgcttctggggggggccttaggaaatttacaatcatggtgaagggcaaaggggaagcaagcacatctttatatggctggtaggagggtggggcgaggttctgcacattttcaaacarctagatctcacgataactctatcatgagacagcactagggggatggtgccaaaccattagaaaccacctctatgatccaatcacctccctccaagcccttcctccaatattagggattacaatttacatgggatttgagtggggacacagagctaaaccatgtcaagtacacatggacacaaacaggggaacaactgacagcagggcctactggaaggtggagggtgggaagagggcaag

SEQ ID NO: 741720 - DNA, 628 bp, Homo sapiens
aatgattagttttatgttatatgaatttcacctcaatgagaaaaaaataaaagaaaggagcctggatgcagtgacccatgcctgtaatcccagcactttgggaggccaaggtgggagaatctccagaccagggaacaggtaaygtacagtacagtgctacgacagcgaagcccagattctgggcagagctctcagcggggatcctaagcccctcaaggaggaaaggcgtcctggaggagagaccgcctgagataaccttggaaggtaagtcagagtctgcaggtgagggaagggagagggcattccgagtgtgtgtgatgcaggagagaatgacatattcaacacacctggggcatgtactggggagacagccaaaaaccccacattcattcaagacaccattcatcccccaaatctaatcacaaaacatacaataatggggtgaacattataattatacatcatacttaaaatatttgtttaaaataataattataaaaaatacttttaaaatgccagaagaagacattcaggagaaaacaaggactgaactggatcccaaacagcggcagaagttggagacagacaagtgggaggggacaggccacgcggggtgaaggcggaacgc

SEQ ID NO: 741721 - DNA, 702 bp, Homo sapiens
aatgccaatcatccaaatttaatgaaccagctgcagaggtgtcttgcatattacacagtcaccagggctccactgaaaattaggcgggtgatcaagtttgaggcttttaaatggcagtcatatttcactgtccgctgtagtcacaagacatcttggccctctttgatggggcagagcaaacttgtaaccaacagaaacacagaggagtgattcagcttaaataaactaaggcttctatgcctcttctgcaatctaaacttcatcctttctctaacacacaaaattaaactatgtgcatgaggcccctatattgctctcagccctgtactattagtttaccaaaataataaagaaatggtccctgccttcaggacaaaacattgtttaataatataaaatgtatcctgtaccagtaaggacaggttaagattactttaaattttactttatatgtttaagacagctgatctgttcattactttaagcttcaagatcctcactgataaaaggggaagataacaattttcttggtctacyctgaaagactgccagacggttaaatgaggctgaatcttaaaaaagtaggggaaatgtacttaaatgttttactgtattactataggaggagacctcccacaggataaagatgaagctacctaaaataaatggtaatcatggcagacatggaggtgggagtagata

SEQ ID NO: 741722 - DNA, 450 bp, Homo sapiens
atggctaaataaggtgaggctggtgaaggactcaggtgaggagccctgaatcctgagcaggggaggtgggatctgatccagtagaaagtaattacaagagcttaagcagggcttaagtacaggacttgacaactggggaaggtgcagtattccaagttcactgtccatctgaggctgcagttcatggatggaaatcccaggctccaaacaaagctgaaggaatgaaagaaaaaaggcccacctttcccaagttctttagtcyatagggcaccatggacactctagtcctatggctaacactctgggcagtgacccctggtgtccacaggcaaaggcccgagagcatcacatcatccctctcccacctctctgtcgtccacatggctctttatcctggaaaacccctgcctgccccgctctctgaaccatcttcctccatccaaaccaacc

SEQ ID NO: 741723 - DNA, 624 bp, Homo sapiens
gattgtaatcaatctttagatacacatttcaaaattattattataactgaaaaccagatctaacaataataggaaagtaatattgacattcaggagagaactagataccaattgaacctttccttcttgtcaattcttgttaaaatatatgttctggtagttactttcttctggacagtttaaatgacttcattttcaccaagtatatctctgttggtgcctgctaagtgataatctctttgaaattttaattttatgggtctcaaggattgaaaatgtattaacagcagctgccttgtcattgttattgctttagcttgaagctggctaattgctgtaatatcgcagcactggaaaagacaaaagagaaaggggagacctgtaataaaagacsattttctgtaatgtgtgctatttgctgtgcaaattgatggttttaagggttggaagactgcaggagtcttcccattagctgtactttaaaatgtagttaaaatatcacttatatccctaaataaggaagtagcaaattatacaggcataggtaatttgggctagatttcttaaggacggatataagaaataccaacatagtttttccttaataactcctgtaatattccc

SEQ ID NO: 741724 - DNA, 634 bp, Homo sapiens
tctcttgtagcacttctactttttcacttacttctaaggttattttactaacttcttccagatctatgagggcaggaacctgactggtttgcttatgctgcacttggagcacttagcacagagtccagcatactcagcaagtatgtgctgaacgaatgaacaaaagtcaaatggtctgatttatttctgtccaccccacttggtgaaccttatgtcagaacatttttgtttatttatttatttgtttgtttgtttatagacagagtcttgctctgtcacccaagttggagtgcaatggtacaatcatagctcactgtgaccttgaactcctgggttccagtgatcctcctgccttagccttcaaagtagctaggactacagacacacaccatcatgcctggcccagaatattttgtttaaatttaaatccaataatggaaatctgtgagaaaacccaatcatgtcacttggagaggcttacctgtcacaggmcagccagtgacctacaccaggtgccaatgaactcaggaggcagggctccccttgaaatttctttgtatgtcaatgagactaatatgtagggtaacttagaatttggatcttaagctttcagggactttaaaatccatcagca

SEQ ID NO: 741725 - DNA, 633 bp, Homo sapiens
accattccaaatgggagaaattggccaaaacaaacagactacaggtcccatgcaaatccagtagggcagtcattaaaccttaaagttccaaaatgatctcctttgattccatgtctcatatccaggacttgctgatgcaagaggtggattcacakggccttgggtagctctgcccctgtggccttgcagggtacagctccccagccagcttctttcatgggctgctgttgagtgtctgcagcttttccaggcacacagtgcaagctgtcagaggagctaccattctggggtctggagaatggtggccctcttctcatagctccactaggcagagtctgtaagggctccaaccccacatttcccttctgcactgccctagtagatgttgtccatgagggctctgcctctgcagcaaacctctgcctggacattcaggcatttccacacatcctctgaaatctaggtggaggttcccaaacctcaattattatcttctgtgcacctgcaggaccaacaccacatggaagctgtcaaggcatggggcttgcatcttctgaagccatggcctgagctgtatcttggccccttttagccatggctagagtggctagggtgcaaggcaccaagtcccta

SEQ ID NO: 741726 - DNA, 604 bp, Homo sapiens
aaagattttctcccattctgcggattgtctgttttctctcctgactatttcttttcctgcgcagaagtgttttagtttaattaagtcccatctattatctttgtttttgttgtgtttgcttttgggttcttggtcatgaagtctttgcctaagccaatgtctagaagagatttttccaatsttaccttctagaagtgttattgtttcaggtcttagatttaagtctttgattcatattgagttgattttcatataaggtaagagatgaggatccagttttattcttctacatgtggcttgccaattatcccagcacgatttgttgaataggttgtccttttcccacttcatgtttttgtttgctttgtcaaagatcaattgactttaagtatttgccttcatttgtgaattctctagtgtgttccattggtctatgtgcctattttatgccagtaccatgatgttttgatgactatggccttatagtacagcttgaagtttggtaatgtaaggcctccagatttgttctttccaaaaagctcctagaactgctaaatgaatttagcaaagtttcaagataaaaaattaatgtacataaatcagt

SEQ ID NO: 741727 - DNA, 631 bp, Homo sapiens
gaccaaaacaaaggagctacaggcccccatacaagtctgaaatccagaaaagcagtcaaattttaaagctccaaaatgatctcctttgactccatgtctcacatccaggtcgcactgatgcaagaggtgggttcccatggtsttgggcagctctgcccctatggatttgcaagatacagcctccctcccagctgctttcatgggctggccttgagtgtttaggcttttccaggcacacagtgcaagctgtttctggatctaccagtctggggtctggaggacagtggccttcctcttacagctccactaggtggtgccccagtagggactctgtgtgggagctccgaccccacatttcccttctgccctgccctagcagaggttctccatgaagtccacacccctgcagcaaacttctgcctgggtatccaggcatttccatacatcctctaaaatccaggcagaggttcccaaaccccaattttgacttctatgtactcacaggcttaacaccatatggaagttgccaaggcttggggcttctaccctctgaagccatggtctgagctctatgttggccccttgtagccgtagctgaagcagctgggacacagggcatgaagtccctagg

SEQ ID NO: 741728 - DNA, 631 bp, Homo sapiens
gaccaaaacaaaggagctacaggcccccatacaagtctgaaatccagaaaagcagtcaaattttaaagctccaaaatgatctcctttgactccatgtctcacatccaggtcgcactgatgcaagaggtgggttcccatggtcttgggcagctctgcccctatggatttgcaagatacagcctccctcccagctgctttcatgggctggccttgagtgtttaggcttttccaggcacacagtgcaagctgtttctggatctaccagtctggggtctggaggacagtggccttcytcttacagctccactaggtggtgccccagtagggactctgtgtgggagctccgaccccacatttcccttctgccctgccctagcagaggttctccatgaagtccacacccctgcagcaaacttctgcctgggtatccaggcatttccatacatcctctaaaatccaggcagaggttcccaaaccccaattttgacttctatgtactcacaggcttaacaccatatggaagttgccaaggcttggggcttctaccctctgaagccatggtctgagctctatgttggccccttgtagccgtagctgaagcagctgggacacagggcatgaagtccctagg

SEQ ID NO: 741729 - DNA, 626 bp, Homo sapiens
ttgcctgctgccatgtgagatacgcttttcaccttctgccatgattgtgaagcctgcccagctacgtggaactatgagtccaataagcctctttcttttgtaaattgcctggtctccggtatgtcttatcagcagtgtgaaaacagactaatacaccggacaaggatccaggtaccaagagggcagggtgtaaaaggctgtcaccctgactctctactgagctggtttaacacttagccgtccacaaatggcaactrctaaaagagcattaattgtaacacacccctaaacgctactggggctggagcccaaaagcactcgccccgccccagctcttgcccccgcccatccgtgtgctcgccctcccgaaaggagttcgagcctgtagtggctgagcacatgagcgacacctctgtcataagtcctgtgagggatcagggaactctcccgtttcactaacatatgctgagaaaatgggtgtcaggtgagaaagtctaagcttaagacagaagattaaaagaaaaaaacaaaagatgtatgtttaaagaataaaaaggaagagaagaaaaaggcaaagaagaaggttataaggcaacaaataaaatctctcaaattaagaataaatg

SEQ ID NO: 741730 - DNA, 553 bp, Homo sapiens
aaagtgctggccacacaatgactggctagagagagctgcttaatgcgggggtagccaccctcccacatcacagaaacgtgcctattttacaagaccatggactcaaaggaaaaatacattgaaaatctgactcctgsaggagcaatggccaggactcatcttttatacaccaaagtcggagactcagtttcactgcagagattctaatcctgcttctgcattcttgaccatggcatcacataaaaatagatacatcttttcaagaaaactaatgcttttacatctggtctctatcaaagtaaacaagtattgagaaaacaagttacttttaagcattttgaaatgacaataacttgcattttcccacatttccattaaacacacaatacacctcaaaaaataaaataaaaaaaaatttaaatgcgacattcactgcttcataaacgttgagaatgtctgtttgctaactgtgtgccaaaacctaatgaaacaaatttaagagtaacttgaaaacttctggttccatataaaatactaccaagaaatatggtta

SEQ ID NO: 741731 - DNA, 619 bp, Homo sapiens
attcaaaaggacgctctcagccttaagagggttttcaagccaaggaatgctcatttggtgtccaagggcagtgaaacctctgtgcgtggatgcacgggtgtgaaagctcggagtttagaagaagcttgtgcccgagtacatttttatcctcacagtgaagttcaggaawgatgactttgaacccctttgctggggtttgacttttgtgttttgtcttttgagttttgcttcatggaccttggattttagaactgaaaggaagcttagaaatttcaccagagaggtgcaaaacaaggcaatgatttgatgcagaacaaccgcagacagaagaaaaggggtgggtggcatcttgtgacctctccctgggctggggtcttcttctggctcgttgctgaggggtgccaggcagcaaagaccacttggctgcaactctactgactgtgacactatgtgagtcttgagtttcgggaaccccagtccctgcatttttcattcctagtgtttgaccaggatggtgggaagaggttatggtaaccaaagaggctacctgatatgtatgtctcgttatcattactaatcctttattgcgctagatgttttagaagtattttctagaccc

SEQ ID NO: 741732 - DNA, 619 bp, Homo sapiens
attcaaaaggacgctctcagccttaagagggttttcaagccaaggaatgctcatttggtgtccaagggcagtgaaacctctgtgcgtggatgcacgggtgtgaaagctcggagtttagaagaagcttgtgcccgagtacatttttatcctcacagtgaagttcaggaatgatgactttgaacccctttgctggggtttgacttttgtgttttgtcttttgagttttgcttcatggaccttggattttagaactgaaaggaagcttagaaatttcaccagagaggtgcaaaacaaggcaatgatttgatgcagaacaaccgcagacagaagaaaaggggtgggtggcatcttgtgacctctccctgggctggggtcttcttctggctcgttsctgaggggtgccaggcagcaaagaccacttggctgcaactctactgactgtgacactatgtgagtcttgagtttcgggaaccccagtccctgcatttttcattcctagtgtttgaccaggatggtgggaagaggttatggtaaccaaagaggctacctgatatgtatgtctcgttatcattactaatcctttattgcgctagatgttttagaagtattttctagaccc

SEQ ID NO: 741733 - DNA, 554 bp, Homo sapiens
aagctataataatcactgcaatacattgttattttcattactttgaacgaactgattatctgttggccaggtgtggtgcctcttgcctgtaatcccagcacattgggaggctgagatgggagatcacttgagcctagcagtttaagaccagcctgggcaacataacgagaccctgtctttgcaaaaaataaaaaaattaaccaggcgtggtattgtacacctgtggccccagctacttgggctgctcaggtaggaagatcacttgagcccaagagattgaggctgcagtgagtcatgaatgcaccrctgcactccagacagggtgacagagtgagaccctgtctcaacggaaaaaaaacaaaaaaagaagaagaagaaaaataaaaatacgttttaattttgccttcacttattccttctttaattgtctttctccatgcagatctgagtttctaacctatataattttccttcactttgaagaacttcttttaacatttcttgcagggcatatctactagtgacaaattcccccgatgttttattgatctgag

SEQ ID NO: 741734 - DNA, 561 bp, Homo sapiens
aatgagaaaaggaaagagaagaggttcttcgtgtatcttaaaatggtttggtccccccaaaattgccttttttttaaaaaacacatggattttgcatctctgttggaactggagcaactaggagagatgtttttataaggacttccgttctggttagaatgaaccaccactttcattgcttcgcacyctgcccgtcactgccttgtgcgactggctcctgggcacgtagcacaggatggatctgctatcagatactccgtggaaagactgcggggtccaggttgcagagcgggtgccttccacaggcacgcaagcctctatctgcacacccagcaatctcctggggccaggacacacttgctcacacgggataatccgcctcacagtgcaaaggaacaagggaggctatgggacactcctccaaatacagacgaatggcatcgatgagctgctttgttctccaacaaataacatctgtgaatccaaggattacactctttagaaaccctggtctttgggggctgggttagggagggggtgaatataactcttggaaaaaaa

SEQ ID NO: 741735 - DNA, 647 bp, Homo sapiens
acttagttatggactcagttattgataatgaactcatgaaagttcaggttgagtatcccttatttgaaatgcttaggaccagaagagtttccgatttttgatttagggatattcaacctggaatatcaatataaatatgctaaattgatattccaggttgaacatccctctcgtttttgcaaattgttgtckatgaaaccaaatcatttgtcctgtaaagttctctcataatcagatttttgctgaatgtatccccgtggcataggttaacacatttctctgtctcatgtatctcctgtagggttcaagtgagaggcagccttactttctaacggagcacttttccaatgccagcatgttgttttatgaaaaactgggctggattcatggtctaagtaagtttgggaaacaaacctgtgctattcctccctttgattcacaatgcatatcaccatctgagacacgtggccgctgttaaacttcagaatggcccacatttatttgatcctggaaccctttttggtaaacacccactggcatcccatgaaattagtgctctgctgaacttactttgaaagggctatttaaacagatagttccattatctggataaaatgagtagttctcttgttaaatctcatagttaa

SEQ ID NO: 741736 - DNA, 609 bp, Homo sapiens
caatgcatgaaacaggaaagagaaagaaaatcacatatcaaggataatcccattttgcatatcatgagaagcataccagctaggaaaaataaactggaaggaaatatattaaaatgttaatagcattttcctagatgttgagatagtgaatggtttagattttccaatttttattttgctagatttgccaaattctccacagtttaacatgtaacacttgcccttgactctgtctgtggatgagtacagtgattgggggyggggggcgtcctttggacgtggtctccaggctgctcttgtgggtcctgcttcatccagccctctggctcttgtcccccacagtgaccgattagcactgctccaggtccgggctatcctccagcagctaggtctgaatagcacctgcgatgacagtatcctcgtcaagacagtgtgcggggtggtgtccaggagggccgcacagctgtgtggcgcaggcatggctgcggttgtggataagatccgcgagaacagaggactggaccgtctgaatgtgactgtgggagtggacgggacactctacaagcttcatccacagtgagtgggccttccagttgggatgcgcagagc

SEQ ID NO: 741737 - DNA, 635 bp, Homo sapiens
tgggaggcagtatgctattagggttaagagtaaaggctttgcagtcagaatgcctgggttctaatgctggatttgctacctttttttttttttttttttttttgagacggagtctcactctgtcacccaggctggagtgcactggcacacactcggttcactgtagcctctgcctcccaggttcatgtgattcccctgcctcagcctccggagcagctgagattacaggcacgtgccactatgtccagctgagttttgtatttttagtagagacgggatttcaccgtattggccaggctggtctcraactcctgacctcaagtgatccactcgccttggcctcccaaagtgctgggattacaggcgtaagccaccatgcccggctggatttgctactttttaattgtatacttgggttctaatactggatttgctactttttaattgtatgcctgggttctaatactggatttgggactttttaattgtatgacattcaacaagtttcttaaactctttgtgcttcagtctcctcagatgtaaaacaaagacaataatagtacttacctcttaaaattagtaagcatgcaaagaggaaatgaatgcatgcaaaattcttagaacattatttaaca

SEQ ID NO: 741738 - DNA, 570 bp, Homo sapiens
ttctgccatctttgagatcctccaaatctatatttctatctttcctctgttcactaccagataagaggacatcttcacttggatgtctattgtattttgacattatccaaacaaaatccatcattttttccccatcaccccaagtccccaactcagtttctctgataattatattctctttcaagatgaaaagtctgaagaaagagtatcagctcaaatcagaagcatctgagatgtgaaaattagatgtgtttactgaggtagtgttagaatttaggagagcaggcttagtggtaggtgtggggaatatgttcaggggtttggatctgttattcagagtatctgatgttacatagtttattcawacattaattcatttgtttattagtatttgggtccaccatgtgccaagttctgggttagggactgagaaatggtggtgaataagatagttatcaccactgttgattagagctcagtctttgtcaggaagatggcatcagggaggcccagcaggaggtaaggtggatttcttgacactggttgggttgtgatattgaagagtctggg

SEQ ID NO: 741739 - DNA, 720 bp, Homo sapiens
tttaggatccttcattgcacttatcactaccttcaattatacaatgtgtttgtttgttcatcatctgtctctctcactagaatgtaacttctgtgaaggcaagtgttggctgtgaatccctcaagaaaccatcaaatttagctgttgatcaagcaaaacygagggtattgcataccagtgccttaacaaaaacttagtagcatctcagaagggagaagtaagggcaggatattttaaggcttggtgattccatttaagacaggtatttcaaatatatatataattattattattattatactttaagttctgggatacatgtgcagaacattcaggtttgtacataggtatacacgtgcaatcaacccgtcatctacattaggtatttcccctaatgctattcctcccctagccccccacccactgacaggccctggtgtgtgatgttaccctccctgtgtccgtgtgttctcattgttcaattcccacttatgagtaagaacatgtggtgtttgttttttctgttcctgtgttaatttgctgagaattatggtttccagcttcatccatgtccctgcaaaggacatgaactcatccttttctatggctgcatagtattccatggtgtatatgtgccacattttctttatccagtctatcattgatgggcatttgggtttgttccaagtctttgctattgtgaacggtgctgcaataaac

SEQ ID NO: 741740 - DNA, 609 bp, Homo sapiens
tctggtccaagttatcgtacattccttcgggtattctctttaaaaaccttatggtatccaatgcattaaattgttttgataaaaacctgcttcaggaacattgaactacttctaacatgtttggaaatcacttaattagcctttattgagtgtgatcagcattgtgttaggcactggagagagaaacgagacaattgtgcctcaagattcctgccctcttgtatccccaaattagttgagaagctatggaaaaagttactgtgtgagcaattgtttaattttttagaggttgaaatgctttagggaaagatgcattgactgttgagtcaaggaagttttcacagaagatgaatgagcttgggccttagtggagatattagacatcygtgagcagaggagaaaataaggttttatcttaagaggaataagcaaatgaacaaaagtatagaggaagaaatgcacaaaagaggaagagcaaaaatattctctgatggtatattaataaccctacagaaaataatgtccttgtttttcacacactaaaatatataaatagtacaagcatatgttctataggaaatgttgagttgatgggacaaagtgttgact

SEQ ID NO: 741741 - DNA, 609 bp, Homo sapiens
tctggtccaagttatcgtacattccttcgggtattctctttaaaaaccttatggtatccaatgcattaaattgttttgataaaaacctgcttcaggaacattgaactacttctaacatgtttggaaatcacttaattagcctttattgagtgtgatcagcattgtgttaggcactggagagagaaacgagacaattgtgcctcaagattcctgccctcttgtatccccaaattagttgagaagctatggaaaaagttactgtgtgagcaattgtttaattttttagaggttgaaatgctttagggaaagatgcattgactgttgagtcaaggaagttttcacagaagatgaatgagcttgggccttagtggagatattagacatccgtgagcagaggagaaaataaggtttyatcttaagaggaataagcaaatgaacaaaagtatagaggaagaaatgcacaaaagaggaagagcaaaaatattctctgatggtatattaataaccctacagaaaataatgtccttgtttttcacacactaaaatatataaatagtacaagcatatgttctataggaaatgttgagttgatgggacaaagtgttgact

SEQ ID NO: 741742 - DNA, 587 bp, Homo sapiens
ctgagaaaggagaggaagtatgtcctataaggagacacgaattattgtatattacagtaatgatatctatgtgcattggtacaaagtaatacaatttggctctcagcttgaatgttcttggtgtatagatatgctactgacttttgtacattgattttgtgtcctgaaactttactggtcatttatcagttccaggagctttttgtggagttgttagggttttctaagtatagaatcccatcatcccmagagagctagtttgacttcttttcctatttggataactgttctttcttttgcctgattcctctggctagcactttcagtactgtgttgaataggagtggtgtctttttccaggtcttaagagaaacgcttctagtttttgcccattcagtattatgttggctatgggtttgtcatagatggcttttgttgttttgaggtatgttccttcaatgcctactttcttgagtttgtgtgtgtgtgtttgtgtgtgtgtgtgttttaatcatgaacagttgttggattttaccaaaagcttttttcacatctattgagatgatgatattgttttgttttaaatt

SEQ ID NO: 741743 - DNA, 587 bp, Homo sapiens
ctgagaaaggagaggaagtatgtcctataaggagacacgaattattgtatattacagtaatgatatctatgtgcattggtacaaagtaatacaatttggctctcagcttgaatgttcttggtgtatagatatgctactgacttttgtacattgattttgtgtcctgaaactttactggtcatttatcagttccaggagctttttgtggagttgttagggttttctaagtatagaatcccatcatccccagagagctagtttgacttcttttcctatttggataactgttctttcttttgcctgattcctctggctagcactttcagtactgtgttgaataggagtggtgtctttttccaggtcttaagagraacgcttctagtttttgcccattcagtattatgttggctatgggtttgtcatagatggcttttgttgttttgaggtatgttccttcaatgcctactttcttgagtttgtgtgtgtgtgtttgtgtgtgtgtgtgttttaatcatgaacagttgttggattttaccaaaagcttttttcacatctattgagatgatgatattgttttgttttaaatt

SEQ ID NO: 741744 - DNA, 587 bp, Homo sapiens
ctgagaaaggagaggaagtatgtcctataaggagacacgaattattgtatattacagtaatgatatctatgtgcattggtacaaagtaatacaatttggctctcagcttgaatgttcttggtgtatagatatgctactgacttttgtacattgattttgtgtcctgaaactttactggtcatttatcagttccaggagctttttgtggagttgttagggttttctaagtatagaatcccatcatccccagagagctagtttgacttcttttcctatttggataactgttctttcttttgcctgattcctctggctagcactttcagtactgtgttgaataggagtggtgtctttttccaggtcttaagagaaaygcttctagtttttgcccattcagtattatgttggctatgggtttgtcatagatggcttttgttgttttgaggtatgttccttcaatgcctactttcttgagtttgtgtgtgtgtgtttgtgtgtgtgtgtgttttaatcatgaacagttgttggattttaccaaaagcttttttcacatctattgagatgatgatattgttttgttttaaatt

SEQ ID NO: 741745 - DNA, 587 bp, Homo sapiens
ctgagaaaggagaggaagtatgtcctataaggagacacgaattattgtatattacagtaatgatatctatgtgcattggtacaaagtaatacaatttggctctcagcttgaatgttcttggtgtatagatatgctactgacttttgtacattgattttgtgtcctgaaactttactggtcatttatcagttccaggagctttttgtggagttgttagggttttctaagtatagaatcccatcatccccagagagctagtttgacttcttttcctatttggataactgttctttcttttgcctgattcctctggctagcactttcagtactgtgttgaataggagtggtgtctttttccaggtcttaagagaaacgcttctagtttttgcccattcagtattatgttggctatgggtttgtcatagatggcttttgttrttttgaggtatgttccttcaatgcctactttcttgagtttgtgtgtgtgtgtttgtgtgtgtgtgtgttttaatcatgaacagttgttggattttaccaaaagcttttttcacatctattgagatgatgatattgttttgttttaaatt

SEQ ID NO: 741746 - DNA, 619 bp, Homo sapiens
ttctccatgactgccctgttcctgtgctgacatcagaatttgttcagctatccggagatctaattcttcacttcactattggcaatatttactggaatattgtcaatatgaggtgtaataagttggtcttaattttgtaactttgatcaatccatgctaggagcttagaatgatgcagaaatcaagaacaaattattgatgtgtcctccaaggggctcaaccctgtgtatcagggtctacatttctactttctaggtaatgtgayttgacccagcactgggaactaggaacacctgggtgtaggtaccaatttgctgcagacactttaatatcttccagaggaaaatttgctttttctttatatctactttgtatccttttttagcaaataaatgtctatatgcatgcttgtctctagtctgtcaattcagcacttaaattgatttgccttttttaaaaaagaaaaatatcagtgggaacaaaggaagcgatcaattttacatcaatgaaagagctaaggtttcaccttctagtcggattacttctgcacatcacttttgaaaaggtagttggaaaattgtgcacttaggtggttaaagacttgttcagtgaggtgctc

SEQ ID NO: 741747 - DNA, 622 bp, Homo sapiens
acctcacaatgtctaatgaagttgctaagacttctccccttacttctgttagtgatggctggctgctgcggaggctgaaaaaagatggagctgatgcagcagcaaaggaagtggcaaaggaaggaaatgagctttgtgtcaaaagtaccaagaagaaaaaaaccaaccctttcatagaaattcagctaaaattaaggtcaggcccagtggttcatgcctgtaatcccagcactttgggaggctgaggtgggcagaccacttgaggccaggaggtcttaagtaaatggatgattgacrgtcagagccagacttctcactgttggtggaagggaaagaggctagaatgatccatgaggtaatggaatagagttgggacatccctatgaatgcatatttaacttgatatcactataaatggtcacacacagcaatgtttatggatatatgtaaatatatgggttagtgtatgcacatatatttcctttctctttcagctgagaagcaaagacttccccacagcaacaaccatatctaccacctagatcttgatatttagtaccatttttcaataaaaggaaccagggcttcttggagaaatggctgattctactagcggaggaga

SEQ ID NO: 741748 - DNA, 634 bp, Homo sapiens
aatatatatgccaattggaatatgtataaataatttctttaaaaagcaccttgtattattaagaaaatgcgtttgaaaataaaatctgatatggtttggccctgtatccccacgcaaatctcatcttgtagcttccacaattcccatgcattgtgggaggaacccagtgggaggyaattgaatcttgggggcgggtctttcccatgctattctcatgatagttaataaagtttacctgcacaagctctctggacatccacgtaagatgtgacttgctcctccttgccttccaccatgattgtgaggcatccccagccacgcagaactgtgagctctccattaaacctctttcctttgtaaattgcccattctcgagtacgtctttatcagcagtgtgaaaacagactaatacagtagattggtaccagtagagtggggtgatgctggaaagatacttgaaaatgtgaaaatgactttagacctgggtaacaggcagaggatggaacagtttggagggctcagaagaagaaaggaaaatgtgggaaagtatggaacttcctagagacttgttgaatggtttggacaaaaatgctgatagtgatatgaacaataagatccaggctgaggtggcctc

SEQ ID NO: 741749 - DNA, 521 bp, Homo sapiens
tcttacccaaagaagatatagaaggtagctctggaatcacacaaaataggaggctgtgtaattactcattttacttggctacttttgtgagtaaaaaaggatgctatggacaactgctgacagatacaacaggcataacctgggactgacccaagcaaactggcaactctatactgaktaatgatatcagtgttgagtaagtaaagattcctttttcctgggagcacaaaagagagtagttcctttggttgttgatggaatttgacctaaaccttgaaaaatagctagaagtattacaggtaaagttagttcaagaaacaagacattaggctgagaagcagagcaagatggtagaatggaaggctctactgatagtcccctcttcaaggacaccaatgtaacagctatccacacagaaaaaaacacttcagaagaaccaaaaatcaggtgagccattatgctacttggttttatctttgtatcactgaagaaatagatcaaaacagtcttgaaatgtggat

SEQ ID NO: 741750 - DNA, 626 bp, Homo sapiens
agcaatagactgaaaattctatagacacagattaaaaatttaaactataaattgtaaggaagctcaatcagatacaagagaaagttgtaatgcaatgcaaatgaatcagaaatataatttaaaatatgaataaacattccctaaagacagatatttttacaaaacaaatagaacttatgaaaatataaacaatttactaaaggaccacaacattcatttgaatgtgttagcaatcaactagaccaagcagatraaacaatttcagagcttgaagactggtctttgaaataacttagacagaaaagaaataaaaacaatttaaaaaatgaataatgcttttggaaaatatgggaatatgtaaagtaatcaaacctccaagttataggcattcctgagaggggagaagaaaaagttaaaagtttgggaaacatatttgagggaacaattcagaaaattttctctggtcttgctaatgatatagatgtccagatacaaaaagctcagaagagacctgtgagatacttaacaagatgaacatcactaaggcatatagtcatcagactgtccaaagtaaacagaaggaaaaaatcctaaaagcaacaagagagaaggatcaaatcacatat

SEQ ID NO: 741751 - DNA, 630 bp, Homo sapiens
tccatgaaatcagcattaacttgaaacaaacactgaataaaagtattgtaaattatttatagatcaatggctttcataaatacaaatgcttaacaaattataaatgaatccaattcagtaatatttaaacaggataatatgttacatctaaaagctattttccccaggaacattaatttatgttaacatgcacaaatttcttaaagtatttcactatagtaataaaatttaaaaataatataattatctcaataaataaagataaatttgtcataatttaaaacccattcatgatgaatatcctgagcaarttagaaagaaaatcaacgtcttcaattcaataaagtgtatctattaaaaacctacagtattatcctgaaatattaaatatttcccctaatgtagtgatgaagtcaggcacataggcacctagaatttttttcaaccatgcgctagagaaattatccattgcattaaagcaagaaaaataaattaaaggcatctatatcagaagggaagcagtaaaactttattttcacagatgaaatgactgtttacatagaaaatcctaaagaatctacaagatgaatataaaaagtaattagagaatctagaaatgttccaggtaaa

SEQ ID NO: 741752 - DNA, 609 bp, Homo sapiens
gctgagagaaaataatgaagacctaaataaatggagaataatcacatgtgtatgaattgaaccctcaatgcatttaagttattcattgtctcccaaataaaaattgctttttaacatagaatatctttcttatagaaagtaatgatcttcttatatttatatttaaaaagcaaaagttctggaactgctgaaaaaagcttgaaaaattaaattgaagcatttaaagttgatctaaagttgactttacatcaagattctgcaaaactacatagtcaagagagtgctatgtttttattataactaaaaattgttagtggaagagtttcagaagtaaaactgcaaacacaggggcaattgattttgacaaagatgccaaagtaattccayagacaaatcaaataatttttaattttgctggaacaacttgatttctatatggaaaaaactgaccaactttttacaccacacacacatattagaaaagtattataaacttaaaattagaatttaaaatgttacagcttctgaaagaatacagaaaatgtattcgatgcctctgtgtaggcaacaatttctgaatctaaatccaaaaagcgacaacatcaaaat

SEQ ID NO: 741753 - DNA, 523 bp, Homo sapiens
tgggtaacttatagagaaaagaggtttagttggctcatggctccacatgcagtgcaggaagcacggctggggaggactaaagaaacttacaattatggcagaaggggaaggggaagaaggcatgtcttccatggctggagcagaaggaggaraagaaaaggggaggtgctacacacttttaaacaatcagatcttctaagaactcactcagtatcgcacaagcagcaagggggaaatcttccctcatgatccaatcacctcccaccaggcctctcttccaacactgagaactacaatttgacatgagatttgggcttagatacaaatccaaatcaaatcaagcatctaaagcctcttcctatgcctgtcaattttctagatactatatgtactttttagaggaagaaagaaaagaagaaaaagaggaagggaagaagtgagacaggggatgaacattgctagactcattttctattgctgtatgacaaattcctaaatatagaagctctaaacaacaagaaat

SEQ ID NO: 741754 - DNA, 523 bp, Homo sapiens
tgggtaacttatagagaaaagaggtttagttggctcatggctccacatgcagtgcaggaagcacggctggggaggactaaagaaacttacaattatggcagaaggggaaggggaagaaggcatgtcttccatggctggagcagaaggaggagaaraaaaggggaggtgctacacacttttaaacaatcagatcttctaagaactcactcagtatcgcacaagcagcaagggggaaatcttccctcatgatccaatcacctcccaccaggcctctcttccaacactgagaactacaatttgacatgagatttgggcttagatacaaatccaaatcaaatcaagcatctaaagcctcttcctatgcctgtcaattttctagatactatatgtactttttagaggaagaaagaaaagaagaaaaagaggaagggaagaagtgagacaggggatgaacattgctagactcattttctattgctgtatgacaaattcctaaatatagaagctctaaacaacaagaaat

SEQ ID NO: 741755 - DNA, 523 bp, Homo sapiens
tgggtaacttatagagaaaagaggtttagttggctcatggctccacatgcagtgcaggaagcacggctggggaggactaaagaaacttacaattatggcagaaggggaaggggaagaaggcatgtcttccatggctggagcagaaggaggagaagaaaaggggaggtgctacacacttttaaacaatcagatcttctaagaactcactcagtatcgcacaagcagcaagggggaaatcttccctcatgatccaatcacctcccaccaggcctytcttccaacactgagaactacaatttgacatgagatttgggcttagatacaaatccaaatcaaatcaagcatctaaagcctcttcctatgcctgtcaattttctagatactatatgtactttttagaggaagaaagaaaagaagaaaaagaggaagggaagaagtgagacaggggatgaacattgctagactcattttctattgctgtatgacaaattcctaaatatagaagctctaaacaacaagaaat

SEQ ID NO: 741756 - DNA, 633 bp, Homo sapiens
cagatgaaagctttatgagcaaaacggaggtgttggagaagaaaatactctccctcagcactgcagcaactcctcctgggtttccagtctgccagatttccgtataaatttcaaaatgcctaacccccacaattgtgtgagcaaatttcttactgatctttcagtgacccatctattatttccatctctctctctctctaaatatatatttatataaaatctccatatctctctccatatatatgtgtgtgtatatatatatgtaaatatatatatattcttatatgaatgtaaatcctgtagaagaacaccgactgctaaaacatgctacattgtccccaataactataggtgacaggttctaagctttacaaatgatccaattgaagccactcttacttggcttgcagtgaaaagcttgaaacccaccctaagtagttctgaacacataatraacgaatcctttcaaaacattcccctgtactttcccttagcttttttctactttgctggttcagcagagttcatgaacagattcttgactccttaggacaatttcaatttgatcatataacttccttggtatcactgaagtttcttgaacaaagcatgcactttcctgtccttaaatat

SEQ ID NO: 741757 - DNA, 633 bp, Homo sapiens
cagatgaaagctttatgagcaaaacggaggtgttggagaagaaaatactctccctcagcactgcagcaactcctcctgggtttccagtctgccagatttccgtataaatttcaaaatgcctaacccccacaattgtgtgagcaaatttcttactgatctttcagtgacccatctattatttccatctctctctctctctaaatatatatttatataaaatctccatatctctctccatatatatgtgtgtgtatatatatatgtaaatatatatatattcttatatgaatgtaaatcctgtagaagaacaccgactgctaaaacatgctacattgtccccaataactataggtgacaggttctaagctttacaaatgatccaattgaagccactcttacttggcttgcagtgaaaagcttgaaacccaccctaagtagttctgaacacataataaacgaatcctttcaaracattcccctgtactttcccttagcttttttctactttgctggttcagcagagttcatgaacagattcttgactccttaggacaatttcaatttgatcatataacttccttggtatcactgaagtttcttgaacaaagcatgcactttcctgtccttaaatat

SEQ ID NO: 741758 - DNA, 619 bp, Homo sapiens
gagtaaactctaaggtgtccaacaagctagggaccatatgtgaagtgtcattggcttatctttgtagaactttattgctggtctgtataatcttcctggtctgttttagttagaaattcccttattttatagatcatgaaagtgagactatccgggtttaaattctagatcccaagcacaagtcagggagtcatagagctagaatgagggcacagatagtaatccagggtcccttctaatgcacaacgtgagaataactttctattttcatttgtctgagaaattgtggggataaaaaaagatcctagagaacgtgaggtatatatcttacttagtttgattatattttacccaatagctttgtttaaaatatttataatatctgaatatcacatttcccattaacgtaaaaagtaaattttctctttttaatccttttttatagtagcatcagaattctgagatmttacgtgtaaaattgcatttggaaaaatattttctttttgtttatttggtaaacatatgagtgctgattacaagaaaaaaaacaattttctaggtcttgtagagagaatacaaagatttagtaaagaataaatcatgacctcaaagaacttag

SEQ ID NO: 741759 - DNA, 575 bp, Homo sapiens
cttcttttgagatgtgtctgttcatatccttcacccactttttgatgggattgtttgtttttttcttgtaaatttgtttaagttctttgtagattctgaatattagccctttgtcagatgaatagattgcaaaaattttctcccattctgtaggttgcctgttcactctgatgctactttcttttgctgtgcagaagctctttagtttagttagatcccatgtgtccactttggcttttgttgccattgcttttgttgttttagtcatgaagtctttgcccatgcctatrtcctgaatagtattgcctaggttttcttctagggtttttatggttttaggtcttacatttcagtctttaatctatcttgagttaattttggtataaggtataaggaaggggtccagtttcagttttctgcatatggctagccagttttgccaacaccatttattaaatagggaatcttttccccattgcttgtttttgtcaggtttgtcaaagatcagatagttgcagatatgtggcattatttctcaagactctgttctgttccattggtctatatatctgttt

SEQ ID NO: 741760 - DNA, 630 bp, Homo sapiens
gtatggctattcatgaaataaaatatattcatttacaaatcaattctattttcccaacccccctgcaatcacttcttattagtttctcaatatctaaaatttgagtgtattattggaatataaaatttaatttgtgtatttttgttagaaatatttcatgaaaagttttgatggaagaatggaactgaagattttggtcaaagacaaagggaaaaactgagaaattcacaggaaacaactactagtagtgactttcctaatgcagtggtctgtgggttcactggggtccatgagagtcttccaaattctgggaactgatcacttattaatgtcataatagcttatccatacgtctctattgmgaatacataatttgtgatatttggtaaaaaagtttaagttattatacttcattgaaggtaattttttttatcaaagctatctccattattcacataattcagattttttcttttcttgttggaatcagggataggtagaaaatggtctgcaatttgatagctccaataaaatacaacacgagtgaaaaaaacgtgaaggtcttctgctgtagaggcagctaatgcctgccgaagtaaacagtaagctggaaagaaaccagggttgagg

SEQ ID NO: 741761 - DNA, 642 bp, Homo sapiens
ccagaaattacacagatatgcctgtttcttttgttttgttttgtttttgttttgttttgtttttgagacagagtctcgctctgtcacctaggctggagtgcagtggtgccatcttggctcactgcaacctccgcctccagggttcaagcaattcttctgcctaagcctcccaagtagctgggattacaggtgmgtgccaccacgtctggctaatttttgtatttttagtacagatgagctttcaccatgttggccaggcttgtctcgaactcctgacctcgtgatctgcctgccccggcctccccaagtgctgggattacaggcgtgcactgcacctggccctgtttctttataccagtgtgagagtgaactaacacaaattaaggggattggcagagacaataaaagattcaacaagaaaatgttttgagccactggagggatatgatggggagggaatggtaaggtttacctggaaaaggtcgaggccgaattgtttgattggttgtgaaggctccttgtttgtcctccagctacagtcctttccacacatctcattcatacttcaaattgttccatttctcttcaagccccccaatcctcaattaatgggctttctcaaagaccaggaatatacttcag

SEQ ID NO: 741762 - DNA, 578 bp, Homo sapiens
ttgtcaccacattaacattccagatgttatcattagtacatgattataacaacagcaacaagaaacggagtttatggtggtggcatcaactattaaaatgctcttctatattttcagattaatacatacaaagtagcattaacaattacttttttaaagaaatggtgtcagcatggccatgatgtccatacgataagccagaaatatcactttctttctctgaagtggtatgtactcatcacaggcaatgtttattgctaaaataactgaaaaaaattgtcaaggcaaaagaattcagataatttcaagctctgttatatgtttggtaattttgtctttatttgcttaaagcaaaatatacaagcacttagaatttttcaggaatagttatctaytccttttgtttttatttacctcacatttttgaatttgtaatatagtatctatcaaagaaacaaattataatttaaagatacctttcttaacatctgacttgaggaactctaccagggtcttgtttcactcttcatctcatttctctttctgtctctgtctctgctcttctattttctctgtat

SEQ ID NO: 741763 - DNA, 622 bp, Homo sapiens
tcccacaacccacactcctcaactctggagcatccctctccttcactttatgtctgcctgcatctggtccccaatccccacctccaggcagttctgttggtcctgcatccctctaggactgcatcatagggtcccacttagaggttccttggtatttggtgacacaagaatattgcactgtccctgcagcctttggagtccaggcttggagaggtgggcggcccaaagccctcccattctcccctccccatgtccccctgccaacagcacagcctgtagatagctatgctgggctcccccgtacccacctctgtcctgttgtcttagcaactagaccaaggaagttggttttcttggtatccaaggttaccccgtgttcagacaaatgctgcacactgcatgtgcatatggatctacagttggttcagcgagaggaggctcacattgtatatgagttatacaggtktgtgtaggtgacatgctgaatctgggtctgattttgagataccctttcatttgaataaccagaactcagggttataactaggaacattgggtcctctttgcaatgtttaacatgatctctcccaaatcaacagaaagagctctgcttctatagggg

SEQ ID NO: 741764 - DNA, 646 bp, Homo sapiens
gtctgtcaataattacgtttttaaaaaataccactacaagaaagaaatttaatttccattattccataaagattttatgaagtgagccaagctcaaattttcttttgagataagcaaccaatgtattaaattaactgatggtaacgtatacttgacccttaaacaatataaatttgaatgatgttggtccatttacatgtagattttcttctgcttctgccaccccaaaagaacaagactaamccttcctcttcctccttcttctcaatctactcaacattaagatggcaaagatgaatacctttatggtgatctgcttccacttaatgaacagtaaatatattttatcttccttctgattttctcaataacattttcttttctctagcttcctttattgtaagaatacactgtaaaatatatataacatacaaaatgtgttgactgtttcagttacaaatcaggcttctgatcaacattaaactgctaataattaagtttttgaagagtcaaaaacttttggagagtcgaggttatacatggatttttgacagcatggggtgttggcattcctaacccccacattgttcaaggcccatgtacataaacattgtaagtcaaatggaaaaaataatcaatggagtaa

SEQ ID NO: 741765 - DNA, 586 bp, Homo sapiens
atattaaaaatatattaagtactttctactattgtttttaatttgcgtttagactctgatataatgctttatattttgtaatgtgagtcaaatgagttagggcacttataaaaactcctttatcggccgggtgtggtggctcacgcctgtaatcccagcactttgggaggccaaggcaggtgggttacctgaggtcaggaatttgagaccagcctcaccaacatggtgaaactccatctctactaaaaattcaaaaattagctggatgtggtggtgtgtacctgtagtcccagctactcaacaggctgagacaggagaatcgcttgaacccaggaggtgkgttgcagtgagccaagatcataccactgcactccagcctgggcgacagagtgagactctgtttcaaaaaaaaaaaaattccttcatcaagagtcatttgtaaaatgatatattagacatgtatggaaatcaaactcctaaatcataaataaaatggtgcatgcagatggtttttatattgtgattgtttctattgcaaaaatggcctttctcaaatagttttttttttgtaccacaaaagtaatta

SEQ ID NO: 741766 - DNA, 562 bp, Homo sapiens
agccaccacacctggcccaatgtattaatttaaaatatccagaaccacaaaaggaaagtatttcttttactcattcctgttccagataaaagcaatcagaaagggactaataacaaggatacatagcatgaagaatcagtcgtagtcctagtaagaattacaacataaaggtaagcatagatttatcacaatactcaaaatgaatgattcatgaattttttttaatatgaatgtccttcaggaaagccacattcatcttattgatgcttagaagaaatgtacacartcataagagatttgagtctttaattctaaattcatgcatcataatttttgggtaatttgtgtttaagaataatttatacaataaatttaaatatttcattccaagtcatcagactaaggaaacagataaaaatagtatctgttatcaaatgatcaagaagggtggtgtgtgtgtgtgtgtgtgtgtgtgtattttaattaattgggacttttaataaccacggtcaagtctatattgctatattctgtgcaaaaagagcacaaaataaagatgact

SEQ ID NO: 741767 - DNA, 643 bp, Homo sapiens
aatattatcttattgttaaaaatacagcattgattccatgtgttaagctctcagactttttcttttgatatgtttctttaaatgtgcccatttatggatctttgaatcaggaaaaggagaatgattgtcctaatgaatgttttaaatcaagaaatatttcagatgatagtatatataatatgtgcttataagatgcatgttctaataaaagatattccctaaacaaggtggtggataagacttgatggcaaagatttttgatgttttaaagaatcagcatactcctcattctgtaagaagcagtaagtttaatggcactttaaagttgaactaaaaagaatttgtgcccagygtaatttttcagttttgtgttccaaaaatagactctatatgggtacatttaaccagttattgaatttttaaattacttttcattttaacggcaaaatagtattaccacttaatactaaatgacaaagaaaagcctatttatgaaggaattttgactttatgaaagtggcagtgtccgggaatcacatgaatggacttcattctccatttcaggtctgagtggatgtgcacactatgcttcatgtatggaagaaatatctccctctgcccatctccaactcaagagttcctt

SEQ ID NO: 741768 - DNA, 522 bp, Homo sapiens
ccttggcctcccaaagtgctaggattacaggcttgagcgactgcgcctggcccaacctttcttattcttttgaaaatgcttctggagtccattgatacattctgtgagacctggtgggaagaaataggcctcaaggcacactgagtttttgagttgccctctacrtttttcaagctgatcattattgagtccctattatctgacagatactctgctaagttatttatttaaattatctcattaaacattatcacaatcatattagatggggactgttattatttccatcttatacacaataaatttgaggcatagagaggttaaatttgagcagtgtcactgtaactcacttttaaaaactgtgtgataattaaatggcagtccttagttttaacccagttatggctggctgtaagttccatcccgtcatgaccattatgtttcctcaacttttctattttcctacttcctttgctctgctctcagtcactgggagacgaaagtgctgctggttagcacaga

SEQ ID NO: 741769 - DNA, 577 bp, Homo sapiens
accaaggcaatgcatatcaaggacctaacacaatgctgggtacacagtgggcacgcactagaagttaattccttttttctcccctccacttggaaatgtataacataaatatgtcctggtactaatatgcaccctcactccaatctgtcctttctggacccctgtattttcatagtaatcccttcctaccacacccaatcccttaacacttaactaattttaacaaccattaataagagtgattcattgacccagaaatgaatattttctttcagcttacagaattgttagaatgatgccagcctccccccaggtccagacccacctctcagatgtggcttctgaatgacccacttggagcatggccaagccactcctatcacagctcaataccacatytacccccttcagggcaggactatgccatacttttaatttagggattattttctatgctatacttttactttaaggattatttggggggaacctctaatttgaaatgttggtgagccctctcccaccaagcagtcaatttttgttttcatacttttccaaaattttatatgtaataaac

SEQ ID NO: 741770 - DNA, 630 bp, Homo sapiens
ttttcttcttctttaaatgcccttccttcgtttgttttcttgtatcatcctttgatatttatctcagaaattcaggcctcctgcaaaacccccaaactcactgtgtcaggcaaacagtgcatctcctatgctcttaaagttatcattgtattaatcactttattaaagtaattcttttagacaatatgttcttcaatgaaggtgtggtgtctatctcatctttgtatattcaaagcttaacatactcctgtggcaatcagtaatgtgagttgattaaaatgattcaaggagcataaaattataatatcagtagagacttcatagcttctggagtagaaattccctaaatgacaagtaagaacatttttaccaagcttttaagaatcttttagtattatagctaaaattaaytttagggttaccacatacaaggatggtaatgtattgcatattctacagagtcaggctttatgccttgggatatacacatggtatctcacccacttgaactgcacaggtcgtatgtggtggctcagattagctggacccaaatatgcttatacattgaagcaataactttttaagttatatattttattatggttacaaatttatagaaaaatagcaatc

SEQ ID NO: 741771 - DNA, 646 bp, Homo sapiens
cagcatcagctcaagggacgcagatgcagagtcttcggttaagtgttcctttgctcggaaacagtcaactaagaatggaactgaattcagaatactataatcagctggctggccaatgtagtgagcaaaggacaaaatggtcgtggagtttataggcacccctaaaagtaatagttttcaaactatgggctcagaaataacagcatcaacatcaacttggaacattagaaatataaattcttgaacccaacccacccctactaaactgaaagtctggggatgggatccagcaatttcattcttcgggtgatgtggatgaatgctaaatttcagaaacattgccccagaaatctycccaaaaagaatatgaatttggaaaaaagacgatttttagcagctaagcagtatgatagctttaagtaaaagccagtgaaacagtggtttcatgtaatagactgataagatttgggcatttgagttttatacattaatataactttatttaaataaaaggcttgattgaatttgggttgcagaaagttactatttttttcagttaaagaaataattaacaatccaattacactctttaaaatttcttttaaaataaaaaaagactactttaaaaatattgtgttaaaagttc

SEQ ID NO: 741772 - DNA, 605 bp, Homo sapiens
gtggaagaagacatgagattactgaagcagagacaaaaggcattaatagccacagaaaaagcagtaaccagtgtgtcagaaagtttatgcttattctctgacccctaattgcactgggcaatatggagggacagattatgcctgcataggaaggggtttgtcttacaggagacgatcccagggccaagggcccagtactttctgagttagcagcaaacttggtagcaagcagcaaacaagccagtcttcctccctccagggagcaagaytttacatggtcatcattcccttgtgggcttgagctacatagttgcctatgtggctaattaccgaactacttataattaagagaagaatgtcttgagggtgagcacagtaagcaaaatgtgcaaaaacactcagggtctatggtggacctccctccaaacagtggtaatcggtttaaattttttgcttaggcacttaaattgaaatattcatctaaagcttagtttatcacgcaataccaccctggaggaagactacaacatgggtttaagaaacaaagaaatgtcataacgaaaataatttagactgcaatttaccctcctcaaattgcctcctcc

SEQ ID NO: 741773 - DNA, 646 bp, Homo sapiens
cctcccagttattacagacctctaattgtctaggcttaagatgttttcctgcccttctcccagttatagagggtattttcttgtttccttcctgatctgtggtcttcacctaagctctgaaggcaatagagtttgctgctcttcccacagtrgcttaaagctttttgttccataggggaaacagggaaggaacaaggtgaggcatggttccttttccacagtaattgcttgtctcttccccaaggactgtactaggaaaaagcatttttctcattctcagtcttttttgtgaacgcctgatgagtgtgtgaagaaaagcccatgagtggctataaattccccactgtgtctacaactcccaggggttctaaactttcatgctagtccactgccttttgcaattcactaacgttttagctgaaatttttttttaattttttttttttagacagagtctcattttgttgcccaggctgaagtgcagtggcatgatcatagctcaccgcaacctcaacctcccagggtcaggtgatccttccaccttagcatgctgagtagctgggactacaggtatgcaccagcatgccaggctaatttttttgttgcttttgtttggtttttctttttttttgagatggagtctcgc

SEQ ID NO: 741774 - DNA, 614 bp, Homo sapiens
tctgtcttgaactcaattagaataagtttatgaaatctgtgttttgcatcactggcacctgccctttgttttcattttcttcttaaacaataggattataatgcaataaactactcaaattaatgttgtacagacaaagatggtaatggtkctgaaagtaaaccattgatgggttgctgtagcactatgtagtattttgaaatgtttactgtcagttgaaagcccaaaggtataaaaaagtgagggagaatgtcaatgtttaaaaatacgtattgcacagaagatacatttactgaagttaagctggactgtggactaattgggttataaatatcagcatcagccccactgttgtctgtgaagtttggaattatggctcctcatcgtagggctactcgttttgtgccctgatttctgttaatagctgttatgactgttactgctacttctaccattactattatcactgtccttcttgttggtattggctagtccagcccagcagaagtctttgaggatctgggaccttgagaaagcctgagatttgctgtggtcatagtccccagaactatgactagatttggacaaagtcatgagagattctatcagatgtt

SEQ ID NO: 741775 - DNA, 608 bp, Homo sapiens
ccaacaacataatttattaatatattaactaaaagtatataaaatacttaaactgcataaatacaaatttcactgctagctgctcaatctacaaatcacgacatacataacaaatttgctttctagttggtgacccatcacatcccttctttcatagtctgtctgtaattggtcactgtgaatctgttattcactttaggcacaggcaacaaaccatgtacttttgttgyctccctgtctcacaatgataaattcacaagatgtttttcaaaaattggtaatccaaagaagaaattggacaacaaagatgaaagtgcaggcaagaaatgagaaataatttaacactggaagtgaaactcaagtcaaacataagtggagttacagaagtaactgaaggtaaaaacattgatgctgctgccacttgagagactctccatgtgtggccaaaggcacttagtaaaggcaaattaatagctataaataaggaaattggatatgactaagaggatgaaggtgtcctgagggaattgatgctggcagtaactcactttaatggattcttggatttattttatgacactgaaagagtgaagaataagtgaagtttt

SEQ ID NO: 741776 - DNA, 592 bp, Homo sapiens
catggagtactcaatgtatgccctattctggaaagcctgtcttggggctgtgtcttttagggtactatagagccttccggaaattttagcaatgctttatagttgaacactgagccacaatgactctaaaaatagatattttcttctgcctttctactgagattttctagtcccgctcatcactcagcagctgaataatagaattatagatgaaaatataataaataatacataaaataaaataaaataggtgagattatcttctgctttccaaatgtgatttctcagacccttctcagaaaccagcacctgatgaaaaaggttgaataataaacctatgtctggcccagtctagttggtctgtgcatggtgaacatccaattctgaggagatattaaattccaagaaggtatacgttcttttgaatttctaagtggattaaatgaagcttatcggtacaacasataggatatctgtagtacattagctcttataaccttgtagaagataagagaggaccttgcctcatgattttcagattagttactcatgtgagttgaaattttaaaatcttagtgtgaatttatttaat

SEQ ID NO: 741777 - DNA, 583 bp, Homo sapiens
cctattctggaaagcctgtcttggggctgtgtcttttagggtactatagagccttccggaaattttagcaatgctttatagttgaacactgagccacaatgactctaaaaatagatattttcttctgcctttctactgagattttctagtcccgctcatcactcagcagctgaataatagaattatagatgaaaatataataaataatacataaaataaaataaaataggtgagattatcttctgctttccaaatgtgatttctcagacccttctcagaaaccagcacctgatgaaaaaggttgaataataaacctatgtctggcccagtctagttggtctgtgcatggtgaacatccaattctgaggagatattaaattccaagaaggtatacgttcttttgaatttctaagtggattaaatgaagcttatcggtacaacagataggatatctgtagtacattagctcttataaccttgtagaagataagagaggaccttgcctcawgattttcagattagttactcatgtgagttgaaattttaaaatcttagtgtgaatttatttaatcctttgatagtt

SEQ ID NO: 741778 - DNA, 458 bp, Homo sapiens
ggctacaagaagttgacagaagattccctccttcacctgttccgtaaagacttaataattagaataaaaacatcaaaaggattctagttcaagcaggaacacaaaattggaataaatgtggaattacattggtgagcgaatcaatattaactatattctcaatgaagtaaatactgacttgaaataaattaacatctragaataactttcaaatcctgcatttgaatacatttaagtcaacaacttaaataaatattagaaggtaatttgtttcacattggttcataggatacactgaaggtattacctgactacaagtttaatatatatatataaatggtaagtatacataaaaaagcaaagctaatgagcaaatcagtacattccattttggagaagctcaaattggtagaaagttcttccttatattgagctggattctatacactaaatttcat

SEQ ID NO: 741779 - DNA, 564 bp, Homo sapiens
aaactggattaagcaaatgtggcacatatgtaccatggaatactatgcagccataaaaaaggatgagttcatgtcctttgcagggacatggatgaagctggaaaccatcattctgagcaaaccatcacaaggacagaaatccaaacaccgtatgttctcactcacaggtgggaattgaacaatgagatcacttggatacagggcgggkaacatcacacaccagggcctgtcaggggtgggggctgggggagggatagcactagaagaaatacctaatgtaaatgatgagttgatgggtgcagcaaaccaacatggcacatgtatacctatgtatcaaacctgcacgttgtgtacatgtaccatagaacttaaagtataaataaaaattaaaaaaacaattcattttcattcactgacttcatatcctgtgaagttgttaaactcaattgtaagttctaggaggtttttttgtaggttcctacatatacaattacgctgactgaataaggacagtttgtttcttccattccagcctgtgtgccttttcttttccttgcctgatta

SEQ ID NO: 741780 - DNA, 470 bp, Homo sapiens
catcactgattggcattttgagttaaactatacaagaatgtggaagaacagatgcttgctaggaacaagggaaaggaagttagggccaggaggctagcattttaattggcaagattcaaggtggttaaaacagactagaccaaaaattctgagttttggaatragagaaaataattatgcaaaacccagggaagaacgacttttcaaactaccttcatgtgaaagatacctttaaaacaatgctatagatgcttaaaaatggtacctgcagttgtgatttaatagggccatgaaaataggacttgacccatattttttgtacctaagggaaagtagctaagtgtaatgagaatcagctattcataaaacaataaacttggaagatatttaatgtatcctgtctctattttgtgctttgtgttggaggagtggatttattaaattagtttttttaaaatctctagatacag

SEQ ID NO: 741781 - DNA, 554 bp, Homo sapiens
tgtttcattcatgctgaatttgcacagtgcgttttgggaagtttctttatattgttaaaaattcttcatttattcaatgagatgtcacagccttgtagaaatgttttctgtatgtcattttttataactcttagtttatcaattgttaattttgcactcctcccccatccataatggatgacatgagatgtacctaatctaagtgaaccttagaatctaagggtaccctaaagggtaaatcacattataaatttttctgtccaggagaatactattttagtcctgtcctgatttcatatatatatataaaatacacacacacacacacacacacacacwctcacacacacacaaacatacactactcagacactcttgtgttgaaaatctaaaagctacaagtgtttagtccataatactggccctagtactgatagagtggagtcagtgagccgtggcacacatgatctgaagaattacccactagaagcacatgatctcatggcaggataaagacggtcttcagggagactccacagtagttacaatgatta

SEQ ID NO: 741782 - DNA, 531 bp, Homo sapiens
aataagcattactcattgcttataaaataatagaggacttagcttttgtttgtggattttgagtaagaaaaacaagtggtttaatctttaaaattatacttgtgatcaaatatcagatttcttaatgcaaatattccagtacatacccagattttatttatttatttatttatttatttatttatttatttattttgtttgtttgtttgagacagagtcttgctctgttgcccaggctagagtkcagtggcacgatctcagctcactgcaacctcttcctcctgggttcaagcaattctcctgcctcagcctcccaaatagctgggattacaggctcctgccaccacacccggctaattttttgtatttttagtagagacagggtttcacatgttggccaggctcgttttgaactcctcaccccaagtgatccacctcacggtctcccaaagtgctaggattacaggtgtgagccaccatgcctggctctgattttattattttttaatttttaaaaattattttcttttt

SEQ ID NO: 741783 - DNA, 531 bp, Homo sapiens
aataagcattactcattgcttataaaataatagaggacttagcttttgtttgtggattttgagtaagaaaaacaagtggtttaatctttaaaattatacttgtgatcaaatatcagatttcttaatgcaaatattccagtacatacccagattttatttatttatttatttatttatttatttatttatttattttgtttgtttgtttgagacagagtcttgctctgttgcccaggctagagtgcagtggcacgatctcagctcactgcaacctcttcctcctgggttcaagcaattctcctgcctcagcctcccaaatagctgggattacaggctcytgccaccacacccggctaattttttgtatttttagtagagacagggtttcacatgttggccaggctcgttttgaactcctcaccccaagtgatccacctcacggtctcccaaagtgctaggattacaggtgtgagccaccatgcctggctctgattttattattttttaatttttaaaaattattttcttttt

SEQ ID NO: 741784 - DNA, 531 bp, Homo sapiens
aataagcattactcattgcttataaaataatagaggacttagcttttgtttgtggattttgagtaagaaaaacaagtggtttaatctttaaaattatacttgtgatcaaatatcagatttcttaatgcaaatattccagtacatacccagattttatttatttatttatttatttatttatttatttatttattttgtttgtttgtttgagacagagtcttgctctgttgcccaggctagagtgcagtggcacgatctcagctcactgcaacctcttcctcctgggttcaagcaattctcctgcctcagcctcccaaatagctgggattacaggctcctgccaccacrcccggctaattttttgtatttttagtagagacagggtttcacatgttggccaggctcgttttgaactcctcaccccaagtgatccacctcacggtctcccaaagtgctaggattacaggtgtgagccaccatgcctggctctgattttattattttttaatttttaaaaattattttcttttt

SEQ ID NO: 741785 - DNA, 644 bp, Homo sapiens
tcattacgtctaaggttgggactctgaaatcatgacactcttattcattgtgtaaacttaaatcatatagcccttggagcacagtttcttttaatgaagtattttgtgaaatgatctatgtgtgtgtattatatatatgygtatatgtatatttatgattatgagatttacgttttctttatgaagacacaagtctgagctttcatgatcttgacattacatttgtcgaatgaataaatacggcaaagatttttggtaagatttaataaagagttcaaaaaggactcaaagtcaacctgttatatggagaatctgcttttggaaaaatttatttattggagatgaaaaagtggagatgcaacttaaatattctggttcaaaaattgaaatccacatgccatgtatcaagttaacaggcaaagaatagagagaaaagtgcaaaaactcattctttgactatggtgttgaaagtgagttcaatagccatgagactgctactgaagtgagcatcacaatgctttgaaacaaatggactcttctatttgtctttataaaaacttgccttgattcttaagagagttttacaaccttttacaatcaaaacttaaccatcaggcaataatatgactacttggtcttgttca

SEQ ID NO: 741786 - DNA, 644 bp, Homo sapiens
tcattacgtctaaggttgggactctgaaatcatgacactcttattcattgtgtaaacttaaatcatatagcccttggagcacagtttcttttaatgaagtattttgtgaaatgatctatgtgtgtgtattatatatatgcgtatatgtatatttatgattatgagatttacgttttctttatgaagacacaagtctgagctttyatgatcttgacattacatttgtcgaatgaataaatacggcaaagatttttggtaagatttaataaagagttcaaaaaggactcaaagtcaacctgttatatggagaatctgcttttggaaaaatttatttattggagatgaaaaagtggagatgcaacttaaatattctggttcaaaaattgaaatccacatgccatgtatcaagttaacaggcaaagaatagagagaaaagtgcaaaaactcattctttgactatggtgttgaaagtgagttcaatagccatgagactgctactgaagtgagcatcacaatgctttgaaacaaatggactcttctatttgtctttataaaaacttgccttgattcttaagagagttttacaaccttttacaatcaaaacttaaccatcaggcaataatatgactacttggtcttgttca

SEQ ID NO: 741787 - DNA, 479 bp, Homo sapiens
gccattatgcctggctaattttttttgcaggaatggtgtctcgctatgttgccctggctggtttcaaacttctggcctcgagcgatccttccatctcagcctccaaagcagtgggattataggcatgagccaccacagctggcccatgaagcttattgcacagtccaaagtaaagcaagaaaaacaaagagtcaacctaaacagacttcttaaaaaggatttgtggggcacactaggacaamtttgcttgggttgagtaaatggaagctaacttcttgaaagaatgtgttgtaattacaatgtaagtgttaagaacacagattctgaagccaggttgcctggctttgaatctcacccttgctgcctattatctgaatgactgtggacatgttacataatcctctgtacctcagtttcctcatatgaattataatgctacttagttatgaagttttgtgaggagcaaatgtgctacttaa

SEQ ID NO: 741788 - DNA, 557 bp, Homo sapiens
ttaatcctcaaaacaattctgtgagataggtagtattactattcttactttatagaaagagactgaggcacagaaagactaagtcaaatatcccagtactgaccacttaataaacattagggctagagtttaacccctaacaatctaatgccagagcctgcttaactaatgtgctatgtgttaccagctgtctctatagaaagctaattctaactggtatgagatggtatctcattgtggttttgatttgcatttctctgatggccagtgatgatgagcattttttcatgtgtctattggctgcataaatgtcttcttttgagaagtgttttttcatatccttcacccacttyttggtggggttgattttttcttgtaaatttgtttaaggtctttgtagattctggatattagccctttgtcagatgggtagaatgcaaaaattttctcccattctgtaggttgcctgttcactctgatggtagtttcttttgctgtgcagaagctctttagtttaattagatcccatttgtcaatgatggcttttgttgccattg

SEQ ID NO: 741789 - DNA, 557 bp, Homo sapiens
ttaatcctcaaaacaattctgtgagataggtagtattactattcttactttatagaaagagactgaggcacagaaagactaagtcaaatatcccagtactgaccacttaataaacattagggctagagtttaacccctaacaatctaatgccagagcctgcttaactaatgtgctatgtgttaccagctgtctctatagaaagctaattctaactggtatgagatggtatctcattgtggttttgatttgcatttctctgatggccagtgatgatgagcattttttcatgtgtctattggctgcataaatgtcttcttttgagaagtgttttttcatatccttcacccacttcttggtggggttgattttttcttgtaaatttgtttaagktctttgtagattctggatattagccctttgtcagatgggtagaatgcaaaaattttctcccattctgtaggttgcctgttcactctgatggtagtttcttttgctgtgcagaagctctttagtttaattagatcccatttgtcaatgatggcttttgttgccattg

SEQ ID NO: 741790 - DNA, 670 bp, Homo sapiens
gattaaatgagttgatgtgtggagcaagtgcttaagaagtggtaattattcctttatggctttctttatctggaccaaatgtactttcaataagaagcctttctctctgaccactctcttcacctaactgcaacacatctcccgaggcccctggtggaattttgtgcgaaatgaagctgtaccacctggcttttgaagagctctattatcatctgtttatgttttctcacctgataaaagtgaggcttctccagtgtagtgctgttctttctctgttttcccygtgctcccctgcattcaggggagactggctagtaaagaagtaactcagaaggatgccccagagtcttcctcttcctttaagagctgacctaagtctcattccctgaccataacactgcactccctgtagccaacctgggcattcagtcctttgagctcactgccttcccttcctaagcatttatcacaactgaaccacacttgcctgttaaaaacagactagttaagtgttccagtgccagtaaatagcatgagacaaagcctggaggtaagacctaaaagacatccatcatgatgaagtgatgaacacagaatgagaatgtggcgtggaggtgagcttggagccttaatatccatgtttatgagtcacttaaaggcaggctaggtg

SEQ ID NO: 741791 - DNA, 547 bp, Homo sapiens
aacagaaaatcttccttaagtaaacattatagtaataattgttataggcaggaattagtcatagatcatcaaattagtgggtaaatgatgaataagaaagttctagtacctttgctaaacaggtatttagtatctttagaaacaggtcaaaggcatgtattacttacaaatggacaaatagcagcaggtcccactttaaccaaaggaccaaatttaacattaataaccagacacatggacatcttaytccccctgatatgacgcactgaagataggcacactatcatttctgtggtaattttgcccaaaatatgtaatctcaatctaatcatgagaaaacattagtgaaacccaaagtgagagaccgtctaaataactgtcttaaactttttacaagtgtcaaggtcataaaagacaaaaatcgactgaggaactctcacaaggtcaaggagactaaggaggcatgcacattagatcaatgcgggatcctagactggatcctgtttcagaaaagaacattactggggacttggaagtacaaatacgt

SEQ ID NO: 741792 - DNA, 614 bp, Homo sapiens
gaaaactaagcagtatgattagcatatttttttaaagtcagaaacagcaggaagtcaaataataagcaaaaggtgacttgacgagtgtggaatcagtataatgtttgaatgttgaattgcatgaggctaatccacgctatgctcgtcgccataatacagytatgaatgtcaatggcactataatacccaaccattggctgaaactccttctgacctcacatgtgcttggatgatcaatatgtatatttgttctataagtatttgtgtctcaccaaattttcttctgattgtctcatctttctttagttaatgaaaattaatcagattttaattaagtataacccatctgagaagattgctaacattgatacaatatgctccactttatctctcaaggtataaacaagcctggaagttcaaaatctgccttggttctgtgtcttgcctgctgtcaaacatcatttttaatttcttaaagcaaaacgaattttttaacaattaacataaagcaataaaagtagccaataatgtatatagatatgttaaatgcacatatttaaaatatcaaagtgtctccaatattttttcttctatataaatacaggtagggtcag

SEQ ID NO: 741793 - DNA, 599 bp, Homo sapiens
  misc_feature 303: n = A,T,C or G
gctaatataactttcaaaaaacatttaacttcacaattgtcttcttaaattaaatggtataaagtgtttccatgaaggtactcaactgtatcactcaagcagaaatgacacaccgggagctttgaaattcttaattttccacttagaaaaagtgttatagtctaaaaggaatgcactgggatacctttctctcattatttcttgtacagcaataaactttattgaacacaaattatcttaaacagctgggaatccagggagtataaatgctttgtttgaaataattaaacagaaaagagagancaagataaggtggttattatagaaatgagaaaggagaattagttgttaaaatgacctctaatattgaaagccatgcacgactacatgcagagatgattgcttcwcttgaacattttagtttgtttaacattgtaagttgcaaagctgattgtgagaattggcactccttacattttattgtactgggtgacgttatttacagatttttgcatactagattgtctgctgcagaaaatgtcattctacaaacaataacttcccaaagtaaacagaatgtcagaaaaggtaactactgc

SEQ ID NO: 741794 - DNA, 567 bp, Homo sapiens
tatatatttgcctacatctacagaatatacaacatcaagagtgaaccctaatgtgaactatggactcttgatgatgatgtgtcaatgtaggttcatcagttgtagcaaatatcctactcttgtgggggatgttgataatggaagaggctatacatgtatggggcaggtagtatgtgagaaatttctgtaacttccaatcaatttttctgtgaatctaaaactgctctaaaaataaagtctattaaaacaattctggggtaatgtaccaacacacttcaatttctttagaaagtatttattgaatggtgtcaacttcctcatgcttattttacttrtttttattatgagaagggtaatggtattgacctcataggattgctaagaagatgaactaaaatgatacatctaaactgtacagtgtctagcacatagtaaactttaatatataactattgttcttcgtggtaatgctgttataaataatatgttttagacattatgcttgacatctttgatagaatggtatgcaaaaacttacagtctgaaatcacagagatcatgtataac

SEQ ID NO: 741795 - DNA, 771 bp, Homo sapiens
tataggatcccagaatagataagtttggaagtcatgaggatatatacatacatagtaagaaatgccatgatagtacacatagaggagaacgacatccaaggactgggtctaggatagacactccaccagaaggaaagagaaaaagcacagtatcaagtttgactttgcaacagtgcaattattttataataacaccattgttttagagtacaattatactggctcaattaaacatctcaaaaagattctgttgctgtagtttgttttcataccccatcatttgttgaaattatggcaagaaacctattccaacatccagggcctcaggatgtgactgtatttgagataagggctttaaagaggtaactaagataaattgaactcatgagattgggcctcaaaccagtaggaatggcacccttatcagaagagattaggacaccaacacagagaagaaagaccacatgaagagatgagaaaaaaacagccatctgcaagccaaggagagagctcttagaagaaataaccatgctgacaccttgatctgggacttcgagcctccaggagtgagaaaaatacatttctgttgtacaagccacmcaataagtagtagtggcctgagattttctagacttcttaaggggcttacttccagcttcaaatttctattattattactactatttgtaatattaagacaaatgtagacaatgaaattaagccaactgcttaagcgattatgtgttagatataattgttccttaatattaa

SEQ ID NO: 741796 - DNA, 595 bp, Homo sapiens
atgcaacaatatgaaactcacaacccagatgttcttcagtaataaaatgaataaataaactgtggtatggtcatatcatacaatactacacaagaagtagaagcactaactactactgcatgcaacaatatgaaactcactatcataatgttgagcaaaagaagccaagcacaatagaatgcatacacattataccacattattccatttttcaaataccagtaagctaatctagattgatggaagttagtatagtggttacattttgtggagaggttggagtgataatgttttggaggagacatagggatacttattattttgactgctcatagtgtcctacagcctgatctgaggggtggtttataatatctttccttyataaaaattcacaaaagctgtgcagtgatgaattatgtattcttcaatatagttttgttcttcaatgaaagtatttgtccaggactggtatggtggctcacacctattaccccaactacttgggaggctgaggtgggaggatagcttgacgccaggagtttgaaactagcctgagcaacatagcaaaaccctgtctctgaaaaaaaaaattaaa

SEQ ID NO: 741797 - DNA, 423 bp, Homo sapiens
gccagagtctttagaaatccaggcttctacatttctgctatattcctccattcacgactttattttcaagttctctcagttggtctaagaactgctgatgctccagccattacactggcatgcaggtctttagcgggagaaagaggaaaatgacaaaagagtgtactatccagttttctttaagcatactccatggtcttttattcttcttatttgattaatacatattaaccgattaacagattaatctattcttaatacagactaactacaatctgtaccatayttcctgccaaaattctatcctatgttgtctataataattttctatattaaatattcttttaactgtttaaatatctaatcttatcccttcttattcttcatatacatattgatattactctcctaagtataccttct

SEQ ID NO: 741798 - DNA, 590 bp, Homo sapiens
ctttgtaatagaaatatataagtatttttaacttgaatttcaaagaatttaagattttttattaaagctctagtccaagtttccagctgttaaatttttaaaaaatataatttgggtctctgatagaacttagctgggctaagctacttggataaccttacaggatagtgaggttcaaacagagatcatttcctgaacatggctgatctttaagagaacaatttcctcacccaaagttatgcaggatactgccagatctccaatacaaaaaacctgccagaatttctagacaattgtttacmatccatgttaaaaaccttgtaccaccagaggcaaagcagataaagtaaacttgtttctagtctagactattcacctaaataaactcataaagttgtagagaaaaattaatgaatagaaagtaattttatctgatctgtcagccaaaaaaaaattactaattctctataataaagagaaaactcaaccataaaatgtctgtttaagtaaaaatgccaatcttgaaatcttttaacaccaagacatagaaaaaagtttagaaattcaagatgatgcttaaaatgaaagct

SEQ ID NO: 741799 - DNA, 575 bp, Homo sapiens
agtaatttcacattaggtgagctggaagccaatagcttaattttaatatgaccaagtggattatttattatttatatctgttttaaaataataaccaaaatattgtctttaaaataggtgatttaaagcatattcatatattgtataaatgattaataatgtataattagcaaacagatctttgaaatttatcgttatacatagacatttycagaaaattagtgtcctatgagttttatgtatttcattatcagtaaggtattctctaatcattgaaaaataagcactgcttttttatttttagcaacctctcagtttcctttttgatattgacacatttgcatttcttttattacatatagaagtgaagataaatatttgggataaatgtggaagggacagaaataatcacatgtcctttaagtaacttacagtactctttatagttggtataaaaaccaaacactcatgaagaaattagagatacttaaaacaaataaggaattattggaaataatattgagggatactgacttcaagcacagtatggattcagtttcaaggaggaagtgaaa

SEQ ID NO: 741800 - DNA, 641 bp, Homo sapiens
atgttctaaccagagcaattatacaatagaaaaaaattaagtgcatccacattgaaaagaaagaagtcaaattatccttgttcgcagatgacaagagcttatatttagggaaaccaaaagactccaccgaactactcttagagctgatcagccaatttatttaaattgcaggatataaaaccaacatacaaacatcatctgaaagggaaatcaagaaattccatttacaacagctaccaaaaaaaaaaaataataataaaatgcctaggaataaatttaaccaagacatgaaatatctctacaaagaaatcaacaaaagacttatgaaagagagtgaagagaccaaaaaaatagaacagatatctgcaatagtttggacatgtgtctcctgtaaatctcatgatgagttgtaatccctggtgttggaggtggtgcctggtgggaggtgattgtrtcatggaggcagatttctcaggagtgatttagtgccttcctattggtgctgtcctctcaatagtgagttcttgcaagatctgatatttttcaaagtgccatttcccccgccttgcacctgctttcactatgtgtcatgcttgctcccatttcaccttctgccatgagtaaaagctccctgaggcctc

SEQ ID NO: 741801 - DNA, 649 bp, Homo sapiens
atcaattgctcttactcaaataaacactttgcaatttcattgtgtctcaaattactttttagcagaataaactaggaataaatattacaaaaatatctacggaatatggaaaaaacatagaaagtttatgaaatatatgaatgtagacataagcaaatagacaatttgtatcatattcttaggcagaaaaactcaatattatcaacatcaattgtccttatagttatttataaattcaattttgttcctatactgataccattaaatattgcaagtacacgttactataaaatgttatatagatgaaaacacaaacaagaatagacaagaaaactctgaaaaaaaaaaaaaaacccactggcaagccctgygtaaaatcttgattgattaaaaaactcatggatcactgaaactaaaaattcagaaataaaccaaagtgtctaagaaagtgtcatagtgcatcttggctgctataacaaaataccttagactgggtaaaggataaataagagaaatgtatttttcacagttatggagtctggaaagtgcaagatcaaggcagcagcaaatttcgtatatggtgagagccctattccccatagatggtaccatctcgcacatgggacaagggcattcccttcaacttcct

SEQ ID NO: 741802 - DNA, 587 bp, Homo sapiens
gaattacaggcatgagccaccatgactggccctttctagctttttgatgtggacattagtgctataaattttcctcttttcttggtttctagtgattattttattctatcttggtgagtagtcagggaaataatcttaaatttacaatcaacttatagtttaaatctaaaaaattatgtgagaagaaccctttgttatttgaaggggatgtttgaagattttgtaaccgtgccttttaggtagtcctaaatttctaattgtagttaaaaacatgccattttcatttctaacattttaagtatatggtttagaagtggtaagtatagttctattttttttgcaataggttttagataatttttgtcttacaaaaktaaaagtgaatactcattaattctgaaacaagttagttagcttgctttagttagatagcaagagaagggtccctggaaagtccctggcccttgggtcagtatctcatccctgcataacataaaaggaatcctggaaaaaatcaagctgcagacactaacaaggtaactagcacatggtgttgtgcttggagacctgcccatggctgcccagac

SEQ ID NO: 741803 - DNA, 635 bp, Homo sapiens
tggagtctggaaagtgcaagatcaaggcagcagcaaatttcgtatatggtgagagccctattccccatagatggtaccatctcgcacatgggacaagggcattcccttcaacttcctttgaaagagcactgattccattcatgaagatgaagaactcttggcttcaccactttcccaaaggcctsacgcctaaaattatacacatgaatttgaaaggggacataaacattcaggccatagcaataaaaactacatgggtggtggcatcatttatacatgaggtgtaaaaatgtgatgttcttatcacaaaggaaataaatgatttattcttcatggcatatatcaaaatgaaggtccaatgaaaatatttttatgaagataaatctatatggcaaaaaattaagtattgataagtttaaccctacaggttgcatcaggattttcaaggtttccagggatgagcaaggccctggagtttccttcctgtgacattttcctggaagttgctcatgctgttattcaatttgaaagtagataatattgtttgtttctcttccaatatttactaaattcaaaataatatagggctctttactcataattctcaaacaatcattcagtcagtggggctctgc

SEQ ID NO: 741804 - DNA, 635 bp, Homo sapiens
tggagtctggaaagtgcaagatcaaggcagcagcaaatttcgtatatggtgagagccctattccccatagatggtaccatctcgcacatgggacaagggcattcccttcaacttcctttgaaagagcactgattccattcatgaagatgaagaactcttggcttcaccactttcccaaaggcctcacgcctaaaattatacacatgaatttgaaaggggacataaacattcaggccatagcaataaaaactacatgggtggtggcatcatttatacatgaggtgtaaaaatgtgatgttcttatcacaaaggaaataaatgatttattcttcatgscatatatcaaaatgaaggtccaatgaaaatatttttatgaagataaatctatatggcaaaaaattaagtattgataagtttaaccctacaggttgcatcaggattttcaaggtttccagggatgagcaaggccctggagtttccttcctgtgacattttcctggaagttgctcatgctgttattcaatttgaaagtagataatattgtttgtttctcttccaatatttactaaattcaaaataatatagggctctttactcataattctcaaacaatcattcagtcagtggggctctgc

SEQ ID NO: 741805 - DNA, 559 bp, Homo sapiens
aaaatgtgatgttcttatcacaaaggaaataaatgatttattcttcatggcatatatcaaaatgaaggtccaatgaaaatatttttatgaagataaatctatatggcaaaaaattaagtattgataagtttaaccctacaggttgcatcaggattttcaaggtttccagggatgagcaaggccctggagtttccttcctgtgacattttcctggaagttgcycatgctgttattcaatttgaaagtagataatattgtttgtttctcttccaatatttactaaattcaaaataatatagggctctttactcataattctcaaacaatcattcagtcagtggggctctgctgaggaagagcacagacacatccacacaagtatggtgttcctcaaatagaggacttctccttgtgctggagccacctatgttgcactcgatcagaggctttcccaggatagcatttctctgcagccctacctcagtcttaaccctgaaaatcccactcagaaggcgacggatgaacacccaccctagcattctaatctaatggatcctct

SEQ ID NO: 741806 - DNA, 559 bp, Homo sapiens
aaaatgtgatgttcttatcacaaaggaaataaatgatttattcttcatggcatatatcaaaatgaaggtccaatgaaaatatttttatgaagataaatctatatggcaaaaaattaagtattgataagtttaaccctacaggttgcatcaggattttcaaggtttccagggatgagcaaggccctggagtttccttcctgtgacattttcctggaagttgctcatgctgttattcaatttgaaagtagataatattgtttgtttctcttccaatatttactaaattcaaaataatatagggctctttactcataattctcaaacaatcattcagtcagtggggctctgctgaggaagagcacagacacatccacacaagtatrgtgttcctcaaatagaggacttctccttgtgctggagccacctatgttgcactcgatcagaggctttcccaggatagcatttctctgcagccctacctcagtcttaaccctgaaaatcccactcagaaggcgacggatgaacacccaccctagcattctaatctaatggatcctct

SEQ ID NO: 741807 - DNA, 559 bp, Homo sapiens
aaaatgtgatgttcttatcacaaaggaaataaatgatttattcttcatggcatatatcaaaatgaaggtccaatgaaaatatttttatgaagataaatctatatggcaaaaaattaagtattgataagtttaaccctacaggttgcatcaggattttcaaggtttccagggatgagcaaggccctggagtttccttcctgtgacattttcctggaagttgctcatgctgttattcaatttgaaagtagataatattgtttgtttctcttccaatatttactaaattcaaaataatatagggctctttactcataattctcaaacaatcattcagtcagtggggctctgctgaggaagagcacagacacatccacacaagtatgrtgttcctcaaatagaggacttctccttgtgctggagccacctatgttgcactcgatcagaggctttcccaggatagcatttctctgcagccctacctcagtcttaaccctgaaaatcccactcagaaggcgacggatgaacacccaccctagcattctaatctaatggatcctct

SEQ ID NO: 741808 - DNA, 517 bp, Homo sapiens
agataaggattggggtttgaatctattcaaattaactccctcttaaaataataattttcaaagaaatacaacagaatccagagtccctgtagttcctatcacacaatttaaaaattcatgagatgtgtgaagaagcatgaaagtgtaatcgattcacaagataaaaagcagacaatagaacctattctcaagatgtgcaagatgctgtaatcagtagataagatttgaaagaagctatggtaagtacgttcatgggggtaaaagaaaacagtctcatgacaartgaacagaagcgtaactgtacatttcatgcgcgtccgtgtgaagagaccaccaaacaggctgtgtgtgagcaacatggctgtttatttcacctgggtgcacgcgggctgcgtccgaaaagagagtcagcgaagggagataagggtggagccgttttataggatttgggtaggtaaaggaaaattacagtcaaagggggtttgttctctggcgggcaggagtgggggtcgcaaga

SEQ ID NO: 741809 - DNA, 553 bp, Homo sapiens
gttgagattgagactggtgtacttaggccaaacatacaaattctcatacctggaatccggacatgtgtggagttgttcatctcatccctgtcgctttctgcaggtgggattgtgacatacatctctgcccagctcctgagtgttttagctctgtttcctgtgtccagctcacagatgggattctgatatatcactgaagccagcacctagatgatgtgactcttatctcctgccttrgtgctgcccacaggggacattgggacatatcacttggccttgcacctaggtaatgtatgttttctgtcttgcattagtgctactcacaggggtgttgtgatgtattgctgggtcccacatccatgttatgtgactcttctgcctgtgcccagtccacaatggccattttgacatattgttgcatccaaaacctagatgatttagctctccttcctgagctttgcctaaggggacattgtgaaatatctatgagcccatcacccatgtggtgtgattttcttctcctgcctagtccctgcttaaagaaaggattgtg

SEQ ID NO: 741810 - DNA, 570 bp, Homo sapiens
cccagtccacaatggccattttgacatattgttgcatccaaaacctagatgatttagctctccttcctgagctttgcctaaggggacattgtgaaatatctatgagcccatcacccatgtggtgtgattttcttctcctgcctagtccctgcttaaagaaaggattgtgacatatcactgtkcccagcacctagctcatgttactcttcttttgttttttaggatttgtttggaaggagattgtgatacattggtgggtccaacttctcggtgacattactctgttgactttgctctgcaagcagaaagcactgtgacacattattgggcccaacaccaaggtgagtctcctgcctgaagcctgcctacagcaatttgtaacatatggcattgggacatatctctgagcccatcaactatttgacaagattctccttttttaacaaaggctttgcccataggagagattgtgacataattctgagcccagaaaataggggatatttcttttgttttctgcttgagccccacattgtgatgtatttctcctcccaacaactgagggaaggg

SEQ ID NO: 741811 - DNA, 402 bp, Homo sapiens
aattaacaccaatcatcatatgagtttctggttcatatgtacactatgtgttttactcaggacaatttaggtaaatatatagacttaatcattttcaggtgtctgtaaagggtgcattattaacattacagataacttttcattggaataaaatacctcgacccagaatcttctatggccccatcaattgaggtcagtcatttataataaaatgaagtctactattctttttaaaatatacaaagtwaaagtcatcaagatcaaagttattaagaaataaaattataagaaaaacacagctgtaccattacatcttaataaatcccaaaattgtatatatactgtagaaataatataagtagttataatgtttaaatatattagaggaaaagtttaaaagta

SEQ ID NO: 741812 - DNA, 494 bp, Homo sapiens
tttcattaactgtaaattatgttttatcagtagagcttcaaaggtatgagaatatttataaagcacattaagttggtgaattttgaataaaattaagtagtaatatatttcatttgttaaaaattgttacttacctatttcttcagcagaatgagygtagcatgtctcccaggtctgttttttatttgtttgagaggtgatttcaagcagaatctcacagcttactgttggaaatgctatcagttgtaaagatagggatagtatctcttccactacggtggtaggaaatgaatacatatctgcaagcacatgaggtagattaattgtcaaattacataaatttatcacataagttattctttttttcaaaagagagaacttgtgaaagtgaataactctattccatatgctgccatctgggtgtttgagggtaatgttaagttttaggagctgggactttgcgcctcctggaagtgttcacatatgattaattg

SEQ ID NO: 741813 - DNA, 524 bp, Homo sapiens
agatcccagataagataatgtttcaccttgaactcagcctgttcttaggagggttacgtataaataagggttgtaggtttgctgaagctgtgggtgagtcaaagttcaggggctgtttggaagaagagaaacaagcaaagtttctgtaaagagtatgttattttgaccactgaagactaaattactgaatggttgttcatttttaaaaatgggaatttgcaayctgtgtccatttttgtgataggttaaaaaaacagcagggagcatcctcaaagtcatcacgggaagcacgtttctcttcactaagctgttctttgagaatgcaaagaatgggggaatttctttaaatatagctatttccaggattaccttcacccacaactgttccttgccctagacatctcttccatttggctgtttctgagttatatttttataataaagtagtaaatataattacagttatttgttgaggttttctttttagtaattctatcaaattatttaacttgaaaaggggttta

SEQ ID NO: 741814 - DNA, 524 bp, Homo sapiens
agatcccagataagataatgtttcaccttgaactcagcctgttcttaggagggttacgtataaataagggttgtaggtttgctgaagctgtgggtgagtcaaagttcaggggctgtttggaagaagagaaacaagcaaagtttctgtaaagagtatgttattttgaccactgaagactaaattactgaatggttgttcatttttaaaaatgggaatttgcaatctgtgtccatttttgtgataggttaaaaaaacagcagggagcatcctcaaagtcatcacgggaagcacrtttctcttcactaagctgttctttgagaatgcaaagaatgggggaatttctttaaatatagctatttccaggattaccttcacccacaactgttccttgccctagacatctcttccatttggctgtttctgagttatatttttataataaagtagtaaatataattacagttatttgttgaggttttctttttagtaattctatcaaattatttaacttgaaaaggggttta

SEQ ID NO: 741815 - DNA, 596 bp, Homo sapiens
acttcctgatgccagtactatggcccttcggttttgaggaaaatatcatcttgtatgttggctaacaaggagataggagttcaaatcaaatttgttttgtcatactggctttaaggcagtgattagaaaaggcctaataggtgggttctgtaggggattgctggaaggaaagtaggaatatggaaagtcatgagacatatacagtcatctcttcttgtttcctcacaggtcacatacaaattcagggagagttagtatgaagcacacaatggaaatttgggctccaaagtctgcaaactgatgcttcatggacttcagttggccatattggttccaacaatttcagccaatgtttaaaaaacttatagcagttaaaattttagtgtttcaacaagccrtttcctatctttcattctgaagatccattttttaagtcttttttttaacagtatagggggtacaaattcagcttctctccaatgaaacacagaaaaggatatcccttttgtattagttcaggctgctatgccaaagaaccatagataggcagcatatagacaacaggacttaatttctcatacctccagaggttcaaa

SEQ ID NO: 741816 - DNA, 618 bp, Homo sapiens
tgtataaagccagtaatctgtattatgagggtcccaccctaaggggttaattactttctacctccttatagcgttacgcccggggttacaattttaacacaaatatagaagaaaaattatagtaactctcaagttttttttctttctttctttctttctttttttttttttttttttttttttgagacacagtttcactcttgtatcccaggctggagtgcaggggtgtgatctcggcttcttggaaccttygcctcccaggttcaattgattctcctgcctcagtctcccaagtagctgggattacaggcatgcgccaccacatctggctcattttgtatttttagaagagacggtggtttcaccatgttgtccaggttggtttcaaacccttgacctcaggcgatccacacgtctcagcatcccaaagtgctgggattacaggtgtgagccaccgcaccctgtcaagatgtttttaaagctctaatttttctcctactgggtttttctcgtttgcgccctcgatctttctgtctctttttgtgtaaacctttttgtctaattctgtctattgtattcctcaaacacaggaagcaagctccaatgctatgagatgct

SEQ ID NO: 741817 - DNA, 590 bp, Homo sapiens
ctgcctcagtctcccaagtagctgggattacaggcatgcgccaccacatctggctcattttgtatttttagaagagacggtggtttcaccatgttgtccaggttggtttcaaacccttgacctcaggcgatccacacgtctcagcatcccaaagtgctgggattacaggtgtgagccaccgcaccctgtcaagatgtttttaaagctctaatttttctcctactgggtttttctcgtttgcgccctcgatctttctgtctctttttgtgtaaacctttttgtctaattctgtctattgtattcctcaaacacaggaagcaagctccaatgctatgagatgctccatgtagagacccacataacaaagggtgaggsggtgctcagacgagtagagagaaggaaagtcaggctctccagccacactaaaccctgtcaattttcacatgagtcagcttaaaggctcatgctttcccagtccagcttcagttaagaccacagcccccagtctcataaaagacctgaaggcagaggtagccagctgaactgtgtccagattctggtccacacaaattatgagatattatatgttg

SEQ ID NO: 741818 - DNA, 590 bp, Homo sapiens
ctgcctcagtctcccaagtagctgggattacaggcatgcgccaccacatctggctcattttgtatttttagaagagacggtggtttcaccatgttgtccaggttggtttcaaacccttgacctcaggcgatccacacgtctcagcatcccaaagtgctgggattacaggtgtgagccaccgcaccctgtcaagatgtttttaaagctctaatttttctcctactgggtttttctcgtttgcgccctcgatctttctgtctctttttgtgtaaacctttttgtctaattctgtctattgtattcctcaaacacaggaagcaagctccaatgctatgagatgctccatgtagagacccacataacaaagggtgagggggtgctcagaygagtagagagaaggaaagtcaggctctccagccacactaaaccctgtcaattttcacatgagtcagcttaaaggctcatgctttcccagtccagcttcagttaagaccacagcccccagtctcataaaagacctgaaggcagaggtagccagctgaactgtgtccagattctggtccacacaaattatgagatattatatgttg

SEQ ID NO: 741819 - DNA, 616 bp, Homo sapiens
agatatattgacaaatggaacagaacagaggcctcagaaataacactcaacatctagaatcatctgatctttgatgaacctgacaaaaacaagtaatggggaaaggattccctatttaataaatggtgttggaaaactagctagccatatgcaaaaaactgaaactggacttcttccttwctcgttatacaaaacataactgaagatggattaaagacttaaacataagacttaaaaccataaaaaccccagaagaaaaccaaggcagtaccattcaggacataggcatgggcaaagacttcatgactacaacaccaaaaacaatggcaacaaaagccaaaattgacaaacgagatataattaaactaaagagcttctgcacaacaaaaaaaactatatcagagtgaacaggcaacctaaagaatgggagaaaatttctgcaatctatccatctgacaatgggctgatatgtagaatctacaaagaacttaaacaaatttacaagaaaaaaagaaacaacaacatcgaaaatgggcaaaggatttgaacagacacttctcaaaaggagacatttatgcagccaataaacaaatgaagaaaaggacatcatcactgg

SEQ ID NO: 741820 - DNA, 395 bp, Homo sapiens
ctaatttaaaaaatgcaaaagatcttaatagatgtttgtcaaaaagagatacaaaaatggctaactggaacacaaaaagatgctctacattactaatcaccaaggaaatgcaaatccaaactgcaatgaagtaccrcctcattcccattagaatggctataataaaaataaataaataaataaatcaagaactaatgaggatataaaaaagagtggatgtataccttgttggtggaattgtaaattagtatggccattatagaaaatagtatggaggtttctgaaagaaattaaaaatatatctattatatgatccagcaattttacttctgggtgtatatccaaaagaaaggatattactgtgtcaaaaagatatttgcattcccatgttcatt

SEQ ID NO: 741821 - DNA, 616 bp, Homo sapiens
agatatattgacaaatggaacagaacagaggcctcagaaataacactcaacatctagaatcatctgatctttgatgaacctgacaaaaacaagtaatggggaaaggattccctatttaataaatggtgttggaaaactagctagccatatgcaaaaaactgaaactggacttcttcctttctcgttatacaaaacataactgaagatggattaaagacttaaacataagacttaaaaccataaaaaccccagaagaaaaccaaggcagtaccattcaggwcataggcatgggcaaagacttcatgactacaacaccaaaaacaatggcaacaaaagccaaaattgacaaacgagatataattaaactaaagagcttctgcacaacaaaaaaaactatatcagagtgaacaggcaacctaaagaatgggagaaaatttctgcaatctatccatctgacaatgggctgatatgtagaatctacaaagaacttaaacaaatttacaagaaaaaaagaaacaacaacatcgaaaatgggcaaaggatttgaacagacacttctcaaaaggagacatttatgcagccaataaacaaatgaagaaaaggacatcatcactgg

SEQ ID NO: 741822 - DNA, 395 bp, Homo sapiens
ctaatttaaaaaatgcaaaagatcttaatagatgtttgtcaaaaagagatacaaaaatggctaactggaacacaaaaagatgctctacattactaatcaccaaggaaatgcaaatccaaactgcaatgaagtaccacctcattcccattagartggctataataaaaataaataaataaataaatcaagaactaatgaggatataaaaaagagtggatgtataccttgttggtggaattgtaaattagtatggccattatagaaaatagtatggaggtttctgaaagaaattaaaaatatatctattatatgatccagcaattttacttctgggtgtatatccaaaagaaaggatattactgtgtcaaaaagatatttgcattcccatgttcatt

SEQ ID NO: 741823 - DNA, 616 bp, Homo sapiens
agatatattgacaaatggaacagaacagaggcctcagaaataacactcaacatctagaatcatctgatctttgatgaacctgacaaaaacaagtaatggggaaaggattccctatttaataaatggtgttggaaaactagctagccatatgcaaaaaactgaaactggacttcttcctttctcgttatacaaaacataactgaagatggattaaagacttaaacataagacttaaaaccataaaaaccccagaagaaaaccaaggcagtaccattcaggacataggcatgggcaaagacttcatgactacaacaccaaaaacaatggcaacaaaagccaaaattgacaaacgagatataattaaactaaagagcttctgcacaacaaaaaaaactatatcagagtgaacaggcaacctaaagaatgggagaaaatttctgcaatctatccrtctgacaatgggctgatatgtagaatctacaaagaacttaaacaaatttacaagaaaaaaagaaacaacaacatcgaaaatgggcaaaggatttgaacagacacttctcaaaaggagacatttatgcagccaataaacaaatgaagaaaaggacatcatcactgg

SEQ ID NO: 741824 - DNA, 624 bp, Homo sapiens
ctctgtatctagctacactgggggggatgtggagaacctttgtgtctagctcagggattgtaaacacaccaatcagcgccctgtgaaaaaagaccactcggctctaacaatcagcaagatgtgggtggggccagataagggaataaaagtaggctgccccagccagcagtggcaacccactcgggtccccttccacactgtggaagctttgttcttttgctctttgcaataaatattgctgctgctcactctttgggtccacaatgcctttatgagctgtaacactcactgtgaaggtccacaacttcactcctgaagccagcgagaccacgaacccacctggaggaatgaacaactccagatgtgccaccttaagagctgtaacwctcaccgcgaacgtctgcagcttcactcctgagccagcgagaccacgagcccaccagagggaagaaactctcaacacatccgaatgtcagaaggaacaaactccagacatgccacctttaagaactgtaacactcaccgtgagggtctgtggcttcattcttgaagtcagtgagaacaagaacccaccaattccagacacattgtgatgggtgtgctggaccagtgtgaggtgttctg

SEQ ID NO: 741825 - DNA, 575 bp, Homo sapiens
gaatggcagttattaaaatgtcaggaacaacagatgctgatgaggctatggagaaatagaaacgcttttacactgctgggggcgggagtgtaaattacttcaaccattatggaagacagtgtggtgattccctaagtatctagaaccagaaataccatttgacccagcaatctcattactggttatatacccaaaggaatataaatcattctagcataaagacacatgcactcatatatctattgcagcactgtttacaataacaaagacttggaaccaacctaatgcccatcattgatagaytggaaaaagaaaatgtggcacatatacaccatgaaataatattcagccataaaaagaatgagttcatgtcctttgcagggacgtgaatgacactggaaaccattctcttcagcaaactaacacgggaacaggaaacagaacaccgtatgttctcactcatatgtgggagttgaacaatgagaacacatggacaccgggaacaaaacatcacacactggggcctgtagggtgttgaggtcaaggggagggagaaaattaggacaaatacctaa

SEQ ID NO: 741826 - DNA, 668 bp, Homo sapiens
ggggcttaaatcctagacgtcaggttgatagaagcagcaaaccaccatggcacatgtaaacctatgtaacaaacctgcacgttctgcacatgtattccagaacttaaagtaaaacaaactaacaaaaatgcactaaggctgagggggagtgggggtaggggcaggagtcaggcgggggtgggtgagtcctggagttttatccagtcattgacactgatgtgggaacagcccaatcaggcgcgcagttggagaggacaggagaggagggcgtggcttctggcgtttggcgggtctttgtctctcgctggcgctggcacaggaacttgggatccgtctcctctttcgcctcctccrctttgggagccccgggctactctttcacagcccctgttgccctgtgatctgtaggtccttggggacgcacagttaagatgacaggacatcctggaagctgggaaatggtgagtatacggggttcggcatcccgagaggggagagcaggctgtgaaaccggcaggaccggcccccacggttagctccgagtctcccgcagcttggccctcagtcccctgtggctgcaagatggccgctgggccagcatcgaggacccccacatccggcctggcccatccggtgctgtccctgggcagcgccctgctctgcgccca

SEQ ID NO: 741827 - DNA, 533 bp, Homo sapiens
ggaagctgggaaatggtgagtatacggggttcggcatcccgagaggggagagcaggctgtgaaaccggcaggaccggcccccacggttagctccgagtctcccgcagcttggccctcagtcccctgtggctgcaagatggccgctgggccagcatcgaggacccccacrtccggcctggcccatccggtgctgtccctgggcagcgccctgctctgcgcccacagccatgagtatttcccagattgttcagggaggcctggtgggtcatcagggaaaaactgccactgggtgtttgcgtgggaggagctgcggcccgtggggtccccagtctctcttgttaaaaattaacgggagtctatgttaaaacgttaaccagtttatctgaacaaacagtgattggtgaaatggaaagcacccagccatgatttctggtccaccagaggggcataaaggaaaggctttcataagatgcatgagaaagcagcccaaattcaaaaattggttccagttatgtagtcaccttatttgaact

SEQ ID NO: 741828 - DNA, 533 bp, Homo sapiens
ggaagctgggaaatggtgagtatacggggttcggcatcccgagaggggagagcaggctgtgaaaccggcaggaccggcccccacggttagctccgagtctcccgcagcttggccctcagtcccctgtggctgcaagatggccgctgggccagcatcgaggacccccacatccggcctggcccatccggtsctgtccctgggcagcgccctgctctgcgcccacagccatgagtatttcccagattgttcagggaggcctggtgggtcatcagggaaaaactgccactgggtgtttgcgtgggaggagctgcggcccgtggggtccccagtctctcttgttaaaaattaacgggagtctatgttaaaacgttaaccagtttatctgaacaaacagtgattggtgaaatggaaagcacccagccatgatttctggtccaccagaggggcataaaggaaaggctttcataagatgcatgagaaagcagcccaaattcaaaaattggttccagttatgtagtcaccttatttgaact

SEQ ID NO: 741829 - DNA, 533 bp, Homo sapiens
ggaagctgggaaatggtgagtatacggggttcggcatcccgagaggggagagcaggctgtgaaaccggcaggaccggcccccacggttagctccgagtctcccgcagcttggccctcagtcccctgtggctgcaagatggccgctgggccagcatcgaggacccccacatccggcctggcccatccggtgctgtccctgggcagcgccctgctctgcgcccacagccatgagtatttcccagattgttcagggaggcctggtgggtcatcagggaaaaacygccactgggtgtttgcgtgggaggagctgcggcccgtggggtccccagtctctcttgttaaaaattaacgggagtctatgttaaaacgttaaccagtttatctgaacaaacagtgattggtgaaatggaaagcacccagccatgatttctggtccaccagaggggcataaaggaaaggctttcataagatgcatgagaaagcagcccaaattcaaaaattggttccagttatgtagtcaccttatttgaact

SEQ ID NO: 741830 - DNA, 595 bp, Homo sapiens
aattcagcattctttcaggtttaaaattctcaataaactaggaagtgaagaaacatacctgaaaataataagagccatatacaacaaacccacagccaatatcatactgaatgtgcaaaagctagaaacgttccacctgaaaactggcacaagaaaagaatgccctctttcaccactaccrttcaatatagtatcagaagccttggccaggaaaatcaggccagaggaagaaataaagagtattctaatagaaagagaggaagtcaaattatctttgtttgcagatgacctgatcctacatctagaaaacctcattgtctcaggcccaaagcttcttaaggtgataagcaacagtagcaaaatctcaggatataaaatcaatgtgcaaaagtagctagcattcccatgcacaaacaacaggcaagcagggagacaaatcatgaatgaactttcattcacatttgctacaaagagaaaaaaatacctaggaatacagctaagaaagaaagtgaaggacctcttcaaggagaaccacaaacaactgctcagagaaatcagagtggacacaaaacagatggagaaatattccatgctc

SEQ ID NO: 741831 - DNA, 614 bp, Homo sapiens
agcaatatgttaatatcccatctgtgggctgggtccatgcgagcccgtcaagtcacttaggtgctaggcactgggaaatttgacaatggaagctgcagaatggtccaggaattagattaacaatcgcacagctgtctcagtggtaggcatgacattcaacacctyctgtatgttgggtctaagcccacgaataaccatctcaacaccagactggatttgtgcatgagagcctcaattcctctgcagactgacttgtgttcccgtgagaggatgacaatagttactgttggctgggtatgcatatgagtctcacaatctcacctgtgtgctcggcccagttagcacgctctgtgtactacccaatggccctatactgtatgaatgagagttgtaatcaactttgagaccttcctaaaggtagggacccatgatcatacttgtaacattaagcccagggatgagagtcaacatcattacaattaactatgtcaggataggagactcatcccttgcctataagctgggtttagaaacgagccaccatttcaactctggttgaatgtttatatatgaacacaggcctagcaccaatgtgatgtgagtctttggcctag

SEQ ID NO: 741832 - DNA, 614 bp, Homo sapiens
agcaatatgttaatatcccatctgtgggctgggtccatgcgagcccgtcaagtcacttaggtgctaggcactgggaaatttgacaatggaagctgcagaatggtccaggaattagattaacaatcgcacagctgtctcagtggtaggcatgacattcaacacctcctgtatgttgggtctaagcccacgaataaccatctcaacaccagactggatttgygcatgagagcctcaattcctctgcagactgacttgtgttcccgtgagaggatgacaatagttactgttggctgggtatgcatatgagtctcacaatctcacctgtgtgctcggcccagttagcacgctctgtgtactacccaatggccctatactgtatgaatgagagttgtaatcaactttgagaccttcctaaaggtagggacccatgatcatacttgtaacattaagcccagggatgagagtcaacatcattacaattaactatgtcaggataggagactcatcccttgcctataagctgggtttagaaacgagccaccatttcaactctggttgaatgtttatatatgaacacaggcctagcaccaatgtgatgtgagtctttggcctag

SEQ ID NO: 741833 - DNA, 614 bp, Homo sapiens
agcaatatgttaatatcccatctgtgggctgggtccatgcgagcccgtcaagtcacttaggtgctaggcactgggaaatttgacaatggaagctgcagaatggtccaggaattagattaacaatcgcacagctgtctcagtggtaggcatgacattcaacacctcctgtatgttgggtctaagcccacgaataaccatctcaacaccagactggatttgtgcatgagagcctcaattcctctgcagactgacttgtgttcccgtgagaggatgacaatagttactgttggctgggtatgcatatgagtstcacaatctcacctgtgtgctcggcccagttagcacgctctgtgtactacccaatggccctatactgtatgaatgagagttgtaatcaactttgagaccttcctaaaggtagggacccatgatcatacttgtaacattaagcccagggatgagagtcaacatcattacaattaactatgtcaggataggagactcatcccttgcctataagctgggtttagaaacgagccaccatttcaactctggttgaatgtttatatatgaacacaggcctagcaccaatgtgatgtgagtctttggcctag

SEQ ID NO: 741834 - DNA, 614 bp, Homo sapiens
agcaatatgttaatatcccatctgtgggctgggtccatgcgagcccgtcaagtcacttaggtgctaggcactgggaaatttgacaatggaagctgcagaatggtccaggaattagattaacaatcgcacagctgtctcagtggtaggcatgacattcaacacctcctgtatgttgggtctaagcccacgaataaccatctcaacaccagactggatttgtgcatgagagcctcaattcctctgcagactgacttgtgttcccgtgagaggatgacaatagttactgttggctgggtatgcatatgagtctcacaatctcacctgtgtgctcggcccagttagcacgctctgtgtactacccaatggccctatactgtatgaatgagagtygtaatcaactttgagaccttcctaaaggtagggacccatgatcatacttgtaacattaagcccagggatgagagtcaacatcattacaattaactatgtcaggataggagactcatcccttgcctataagctgggtttagaaacgagccaccatttcaactctggttgaatgtttatatatgaacacaggcctagcaccaatgtgatgtgagtctttggcctag

SEQ ID NO: 741835 - DNA, 477 bp, Homo sapiens
ctagacccagcacctgggtgatgtggctcttctttattgactgagccctgtgtattttgggtattctgacatatccctgtacctaacttctggaagataagaagatccaacatgggccctgcctaaaaagtctcttgtgacaaatttctacatgaatcaccttggagatttgactcttctctcttacctgagctttgcccataagagagattgttacgtacctctgcagcaagcacctaaatgccgtgactcttctttcttgcctgggtcatgcccacagatgaaaggtggcttatcgctgtgtccagcacaccggttatgtgattatgctgcctsatctcttctcacaggagctgttgtgacaaatccctgggcccagaaattatttaatatgactctcctcaatgaccttaactttgtgcatgggataaattgtgacatacctctggatccagcaccgaggtgatgcgactctcc

SEQ ID NO: 741836 - DNA, 528 bp, Homo sapiens
aaggggagcaggaaaggagggggcttttcctcacaggggcaggttttaagacacaggaaccctggtgggtctgtcatgttcatacccaggtcacggttggtggaataaaaagttgtgagttgcggaccaagtacgtctactcagatgtgaatcccaaggccttaagctgtcctcrggtttcctcattggctgggggtctatgcagatactcctatgttcctgatctaggaaacagaatttctaatgcagatgtcacctggtggtaaaaacaaagaagacaattaacttttttcgctgctgggaacactctttgtagagctgcattaaaatcagtgagcagatatttgatgggttcaagtcccccatctccttggacaactggcaggttcaccacaccccccaagcatggcatacaatgagttatgttgagagcaggcacatggggttctctacagagagggacctgacaaaaccaggatgggtccaggatccagacccaaatatggaatttctctgcgctttctccta

SEQ ID NO: 741837 - DNA, 587 bp, Homo sapiens
aggccacctgtgtcatctaatctgggcaacccgaccctgcctaccattaccctgtgttgcaaggggagcaggaaaggagggggcttttcctcacaggggcaggttttaagacacaggaaccctggtgggtctgtcatgttcatacccaggtcacggttggtggaataaaaagttgtgagttgcggaccaagtacgtctactcagatgtgaatcccaaggccttaagctgtcctcgggtttcctcattggctgggggtctatgcagatactcctatgttcctgatctaggaaacagaatttctaatgcagatgtcacctggtggtaaaaacaaagaagacaattaacttttttygctgctgggaacactctttgtagagctgcattaaaatcagtgagcagatatttgatgggttcaagtcccccatctccttggacaactggcaggttcaccacaccccccaagcatggcatacaatgagttatgttgagagcaggcacatggggttctctacagagagggacctgacaaaaccaggatgggtccaggatccagacccaaatatggaatttctctgcgctttctcct

SEQ ID NO: 741838 - DNA, 564 bp, Homo sapiens
atatttatacaggcaaacaaacagttaaatcattgtattaacaaaagacatagggatggttcatatttgacttctgccccacactgtcttaatgcatacagagttgaatattgttatacaatattatattatacaaattaaaacttaaaacaataaactaatataaggtgccctaccctaaaacatgaaacacagaaatgtaaaattgcaaaacaaagttaaaataaacattaacccccaaattcttatttgaataatgaaattcaaaatcataataaataggtagaaagtaaaaacacaattaactgatgtgagacagcctactctaaaaaatacagaaacataaaattataaaacataattaagagaaactttaatccataaaatcctgaataaacatagtgtccaaatgaaaaagaatccyaggtaactacaatttttaactcttcctgtgaatctatgaaaagtatgaattttgaattatttggatacagttagggcaacaacatttcagagaaaacacattataattaatacaaagagctgtgatgagaaagttttaag

SEQ ID NO: 741839 - DNA, 554 bp, Homo sapiens
actcacactgctcaaagcctgcatccacatgtaccatgtcgaagaccagctcaagagcctggacccatatgccaccttcagcagggttgactgcagcttcttgttcttcctgagcatcttctccaatggtgacctgagagttgcgggaggcattggggccaggattgaacagaggaaaaaggagcacggaggccaggtgctgaggaccaggccatctcacctggagagttctggccctgagacatccagaccagcatgatgtttaggtgcaracagctggccctgggtggccctgtgctgatcaccggcctcagcccctcaaacagtgggaaatggaagaatggcttggaaatgggccctgtcgacagtgtgtcacctgagcacattctcccaggggcccaagaggggccatcgtgtctctagaaccagaactggaaggtgaaactgccagggggaacaaggaagagggtcctcagttgggtggagggtctcacagcaagacgcctggcttaatcaagcttggccattcctgaagcacgttcagtgactaaaag

SEQ ID NO: 741840 - DNA, 554 bp, Homo sapiens
actcacactgctcaaagcctgcatccacatgtaccatgtcgaagaccagctcaagagcctggacccatatgccaccttcagcagggttgactgcagcttcttgttcttcctgagcatcttctccaatggtgacctgagagttgcgggaggcattggggccaggattgaacagaggaaaaaggagcacggaggccaggtgctgaggaccaggccatctcacctggagagttctggccctgagacatccagaccagcatgatgtttaggtgcagacagctggccctgggtggccctgtgctgatcaccggcctcrgcccctcaaacagtgggaaatggaagaatggcttggaaatgggccctgtcgacagtgtgtcacctgagcacattctcccaggggcccaagaggggccatcgtgtctctagaaccagaactggaaggtgaaactgccagggggaacaaggaagagggtcctcagttgggtggagggtctcacagcaagacgcctggcttaatcaagcttggccattcctgaagcacgttcagtgactaaaag

SEQ ID NO: 741841 - DNA, 554 bp, Homo sapiens
actcacactgctcaaagcctgcatccacatgtaccatgtcgaagaccagctcaagagcctggacccatatgccaccttcagcagggttgactgcagcttcttgttcttcctgagcatcttctccaatggtgacctgagagttgcgggaggcattggggccaggattgaacagaggaaaaaggagcacggaggccaggtgctgaggaccaggccatctcacctggagagttctggccctgagacatccagaccagcatgatgtttaggtgcagacagctggccctgggtggccctgtgctgatcaccggcctcagcccctcaaacagtgrgaaatggaagaatggcttggaaatgggccctgtcgacagtgtgtcacctgagcacattctcccaggggcccaagaggggccatcgtgtctctagaaccagaactggaaggtgaaactgccagggggaacaaggaagagggtcctcagttgggtggagggtctcacagcaagacgcctggcttaatcaagcttggccattcctgaagcacgttcagtgactaaaag

SEQ ID NO: 741842 - DNA, 619 bp, Homo sapiens
ctagatggcaggttgataggtgcagcaaaccaccatggcacatgtaaaactatgtaacaaacctgcactttctgcacatgtattccagaacttaaagaaaaacaaactaacaaaaatgcactaaggctgagggggagtgggggtaagggcaggagtcaggctcgggtgggtgcgtcctggagttttatccagtcattgacactgatgtgggaaccgcccaatcaggcgcgcggtggcagaggagaggaaaggagggcgtggcttcctgcatttggcgggatctgtgtctctcgctggtgctggcacaagagcttgggatccgtctcctctttcgcctcctgcaccttgggagccccgggctactctstcacagcccctgttgccctgtgatctgtaggtcttgggggacgcatagttaaggtgccaggacatcctggaagctgggaaatggtgagtatacggggttcgccatcccgagaggggagaacagactgtgaaaccggcaggaccggcctccccacggttagctccgagtctcccgcagcttggccctcagtcccctgtggctgcaagatggccgctgggccagcagcgagggcccccacgtcccgtccggccc

SEQ ID NO: 741843 - DNA, 619 bp, Homo sapiens
ctagatggcaggttgataggtgcagcaaaccaccatggcacatgtaaaactatgtaacaaacctgcactttctgcacatgtattccagaacttaaagaaaaacaaactaacaaaaatgcactaaggctgagggggagtgggggtaagggcaggagtcaggctcgggtgggtgcgtcctggagttttatccagtcattgacactgatgtgggaaccgcccaatcaggcgcgcggtggcagaggagaggaaaggagggcgtggcttcctgcatttggcgggatctgtgtctctcgctggtgctggcacaagagcttgggatccgtctcctctttcgcctcctgcaccttgggagccccgggctactctctcacagcccctgttgccctgygatctgtaggtcttgggggacgcatagttaaggtgccaggacatcctggaagctgggaaatggtgagtatacggggttcgccatcccgagaggggagaacagactgtgaaaccggcaggaccggcctccccacggttagctccgagtctcccgcagcttggccctcagtcccctgtggctgcaagatggccgctgggccagcagcgagggcccccacgtcccgtccggccc

SEQ ID NO: 741844 - DNA, 539 bp, Homo sapiens
cttagccctgaatttgtgggatctgtgcgaactctaagttgtgtcagaattaaattttggggcaagaaatgggtgttggagaagcagtgggttttcagggaactttacacatttaggatcaaaagtgttgtaaggagaaagacaatgtgggggcctttgctggagagagactccaggtgtctcggggaaggtaggctctgctctgcacacaggctgctacgccatgcactgccctgtggttccaggcatcctcccatggtaagaaggaccgacgactctgagggaagaagttctgagaacagatgccttctaccctcctgccaacctgaggccaccacatgtttttcacccactgaacatacacactgcatgttgacgtggtcaagcccctcycaggacaaggctttggcatcaagattgttgcccatcctacctttcctcatagactttcccaccaaaaacccacacacgtgcctacaagacccctggcatatgttctacttcagacaccgaatctgcagtggcaacctggttttttc

SEQ ID NO: 741845 - DNA, 597 bp, Homo sapiens
aagtcaccttacatttacttaattttattaggcagtgtctgtctaccacccaataatacttgacgattctccctccatttgcacaggcatcatagctgggaaacggattcacaagacccaggctgttccctacatatgtttcctcctccgacatcagttcatcagtcaatcaagccatgtgagagtggagcccttgtattccctattattcttgggcactctactccaagtaggaaaaggccaggaggtcctgttaaaggatgcactcagagcccgggctccctaacrtatgagagtgctaaccagcaggtgtagacttttcaggagtgaagaatgaggcaggcattccaaacctggaccttcatcacctattgtttcatctcaagacaattctgagggactgttttggagcgtgtctggaaggtgaaccttgaagaagagtgtgggttttgatgtgactcagttgagatctttcatggggaggcaggaattcaatgcccagaatctgggctggtgtctttgaggtcagtaggttgcgtctttgtatccaagtccattgttactaggttggaggctggagattctaaatggcttcca

SEQ ID NO: 741846 - DNA, 648 bp, Homo sapiens
cccgggctccctaacatatgagagtgctaaccagcaggtgtagacttttcaggagtgaagaatgaggcaggcattccaaacctggaccttcatcacctattgtttcatctcaagacaattctgagggactgttttggagcgtgtctggaaggtgaaccttgaagaagagtgtgggttttgatgtgactcagttgagatctttcatggggaggcaggaattcaatgcccagaatctgggctggtgtctttgaggtcagtaggttgcgtctttgtatccaagtccattgttactaggttggaggctggagattctaaatggcttccagaccatctctctgattctctttgggagatggggtctgaaagacaatrtcagtagttttgggaaattctagaaagtgtgcttggaaacgtgggaagagctcttgcctagtgcctaaatgctccatttgcagctctagccaagtagatacttggtaggtatagagccgggtttgcgtttatattagcaaaacctatgtcagagttgaagaagtagtcaggaaaaagcgtcttggtcgcaggccggggaacatcttaaaagcaaacttctagcctgctgactcttggcaatgagtgttggatcctggctaaagtgccttgaatgca

SEQ ID NO: 741847 - DNA, 535 bp, Homo sapiens
gaccttcatcacctattgtttcatctcaagacaattctgagggactgttttggagcgtgtctggaaggtgaaccttgaagaagagtgtgggttttgatgtgactcagttgagatctttcatggggaggcaggaattcaatgcccagaatctgggctggtgtctttgaggtcagtaggttgcgtctttgtatccaagtccattgttactaggttggaggctggagattctaaatggcttccagaccatctctctgattctctttgggagatggggtctgaaagacaatgtcagtagttttgggaaattctagaaagtgtgcttggaaacgtgggaagagctcttgcctagtgcctaaatgctccatttgcagctctarccaagtagatacttggtaggtatagagccgggtttgcgtttatattagcaaaacctatgtcagagttgaagaagtagtcaggaaaaagcgtcttggtcgcaggccggggaacatcttaaaagcaaacttctagcctgctgactcttggcaatgagtgt

SEQ ID NO: 741848 - DNA, 648 bp, Homo sapiens
cccgggctccctaacatatgagagtgctaaccagcaggtgtagacttttcaggagtgaagaatgaggcaggcattccaaacctggaccttcatcacctattgtttcatctcaagacaattctgagggactgttttggagcgtgtctggaaggtgaaccttgaagaagagtgtgggttttgatgtgactcagttgagatctttcatggggaggcaggaattcaatgcccagaatctgggctggtgtctttgaggtcagtaggttgcgtctttgtatccaagtccattgttactaggttggaggctggagattctaaatggcttccagaccatctctctgattctctttgggagatggggtctgaaagacaatgtcagtagttttgggaaattctagaaagtgtgcttggaaacgtgggaagagctcttgcctagtgcctaaatgctccatttgcagctctagccaagtagatacttggtagktatagagccgggtttgcgtttatattagcaaaacctatgtcagagttgaagaagtagtcaggaaaaagcgtcttggtcgcaggccggggaacatcttaaaagcaaacttctagcctgctgactcttggcaatgagtgttggatcctggctaaagtgccttgaatgca

SEQ ID NO: 741849 - DNA, 471 bp, Homo sapiens
tgagatctttcatggggaggcaggaattcaatgcccagaatctgggctggtgtctttgaggtcagtaggttgcgtctttgtatccaagtccattgttactaggttggaggctggagattctaaatggcttccagaccatctctctgattctctttgggagatggggtctgaaagacaatgtcagtagttttgggaaattctagaaagtgtgcttggaaacgtgggaagagctcttgcctagtgcctaaatgctccatttgcagctctagccaagtagatacttggtaggtatagagccgggtttgcrtttatattagcaaaacctatgtcagagttgaagaagtagtcaggaaaaagcgtcttggtcgcaggccggggaacatcttaaaagcaaacttctagcctgctgactcttggcaatgagtgttggatcctggctaaagtgccttgaatgcagcatgaggccaatcc

SEQ ID NO: 741850 - DNA, 648 bp, Homo sapiens
cccgggctccctaacatatgagagtgctaaccagcaggtgtagacttttcaggagtgaagaatgaggcaggcattccaaacctggaccttcatcacctattgtttcatctcaagacaattctgagggactgttttggagcgtgtctggaaggtgaaccttgaagaagagtgtgggttttgatgtgactcagttgagatctttcatggggaggcaggaattcaatgcccagaatctgggctggtgtctttgaggtcagtaggttgcgtctttgtatccaagtccattgttactaggttggaggctggagattctaaatggcttccagaccatctctctgattctctttgggagatggggtctgaaagacaatgtcagtagttttgggaaattctagaaagtgtgcttggaaacgtgggaagagctcttgcctagtgcctaaatgctccatttgcagctctagccaagtagatacttggtaggtatagagccgggtttgcgtttatatyagcaaaacctatgtcagagttgaagaagtagtcaggaaaaagcgtcttggtcgcaggccggggaacatcttaaaagcaaacttctagcctgctgactcttggcaatgagtgttggatcctggctaaagtgccttgaatgca

SEQ ID NO: 741851 - DNA, 535 bp, Homo sapiens
gaccttcatcacctattgtttcatctcaagacaattctgagggactgttttggagcgtgtctggaaggtgaaccttgaagaagagtgtgggttttgatgtgactcagttgagatctttcatggggaggcaggaattcaatgcccagaatctgggctggtgtctttgaggtcagtaggttgcgtctttgtatccaagtccattgttactaggttggaggctggagattctaaatggcttccagaccatctctctgattctctttgggagatggggtctgaaagacaatgtcagtagttttgggaaattctagaaagtgtgcttggaaacgtgggaagagctcttgcctagtgcctaaatgctccatttgcagctctagccaagtagatacttggtaggtatagagccgggtttgcgtttatattagcaaaacctatgtcagarttgaagaagtagtcaggaaaaagcgtcttggtcgcaggccggggaacatcttaaaagcaaacttctagcctgctgactcttggcaatgagtgt

SEQ ID NO: 741852 - DNA, 671 bp, Homo sapiens
tcaatagtagatttgagctggtacaagaaagaagcagagaacttgaatatagattaattgaaattatacaatctgaagaaaaacagaataaaataaagaaaataagcaaatcctcaaagacatgtaggaaattattagcacaccartatagatacagtggaactaccagaagaacaaaactcagaaagaagaggaaaacatatttgaagaaatattgactaaaaagtttacaaatttaatttaaaaactttaatctacacatactaaaagttagatggcccagaaacagcatagtaaaaatatagaaaagcaaagagaacatcttgaaagcaacaagagaaaaatgactatacacaacatgattaacacctgatttctcatcagaaacagtgaaggccagagacagggaggtaacatgaaagtgctccaaaacaaaaaaaccccccaaaaaactcccaaaaccaaaaaaaatccttcagaaccaagaaacctctgttaacaaagaaacttaagtcccgaaaactgtctttcaaaagtgaaggtgaaataagaacattcccaggttaacaaaaacagagagtttgttgcaagcagccgtccttaaaagaaatattaaaggctgaaagcaaatgagcccagacaataattcaaattcacataataaaaagcat

SEQ ID NO: 741853 - DNA, 619 bp, Homo sapiens
atcttagctctaagatttacaaaacctcactatctttgtttaaaacactgataattaaaaattatagctagaagcacttattattagggttttagaagaaaatcaatatcaaacttgccatgcaatgtgagaataagcacaggcttttgccttaactggtttttaactgaattactaatgtttcaattaacaagtactacagagaactacagcaccatcatcacccttagcaaacaggaggacayagttacttttccagatgtctctggttgtcatggtaccctcttaggctcttttcccacatttttattctaggtaacaaacctgcaatcatttactctaacttataacatagttatatgaagattttatatgttcctgatatagactgtgcacacacctgttgaacagaataaaaaatgcagcataagaagttccttagattaacacttagacttcctattaaaaagaggattgaatttttagttcacatacttgataaaaaacagatgtcatgaattttatattttccacataatttatttcagaaaaacctatcttcagattaatattcttttgtaaaaaatattttcgagtacacatttctaaacaatatttc

SEQ ID NO: 741854 - DNA, 619 bp, Homo sapiens
atcttagctctaagatttacaaaacctcactatctttgtttaaaacactgataattaaaaattatagctagaagcacttattattagggttttagaagaaaatcaatatcaaacttgccatgcaatgtgagaataagcacaggcttttgccttaactggtttttaactgaattactaatgtttcaattaacaagtactacagagaactacagcaccatcatcacccttagcaaacaggaggacatagttacttttccagatgtctctggttgtcatggtaccctcttaggctcttttcccacatttttattctaggtaacaaacctgcaatcatttactctaacttataacatagttatatgaagattttatatgttcctgatatagactgtgcacacacctgttgaacagaataaaaaatgcagcataagaagttccttagattaacacttagacttcctattaaaaagaggaytgaatttttagttcacatacttgataaaaaacagatgtcatgaattttatattttccacataatttatttcagaaaaacctatcttcagattaatattcttttgtaaaaaatattttcgagtacacatttctaaacaatatttc

SEQ ID NO: 741855 - DNA, 586 bp, Homo sapiens
attcaaactactatagactcctttttaaatttttcctctcaaggacaatcattttgaattgtatcttctaataaactttacttactcaaaaataaataattcagttctacattttcattcatctaaaatatgtgtgacagttagaacttctaatcagcatgaggtaacccatcaccactctggtttattatcattccagccaaaagcaaagtgagatgaattaattagttattaggaacagctcacaaatgcccatttgcatcttcatagagctgtaagaatttggatccaaaatatgtaggctttattcatattgttacatcttgatttcatgagttataataaagcatttaggaatgcaaacaaaatatgagcagttatatgtgcgactatgcctgagatttactgcaaacatatatgtgcgtgtatatatatatatatatatacgtgtatatatacgtgtgtrtatatatatatatatatatatatatatatatactctttctaaatttgaactaaagcaataaaaagagttaatgaacagcatcatatacttaaaatttttttgagtagctttggaaaatcg

SEQ ID NO: 741856 - DNA, 563 bp, Homo sapiens
cccccaactgagtcctaagcacccactaatcttctttctgcctctatggattagtctattctagatattttatataaatggaatcagaggatatgtggtccattgtgactggcttctttcacttagcatagtgtttacaaggttcgtaatgttgtagcgtggatcaatattgtatttctttgtaytgccaaatgatattctgctgtgtgtatataccacacttcatccatttatccaaatgtccagttggtggacatttggattgttgcctctttttggttattatgaagaaagctgctatgaacgtttgggtatggactgttgtgtgagcatgcattttcgttgctcttgggtatatacctagaagtggattgctgggtcacatggcaatgctactaacttttgaagagctgccaatgtgccaaggcagctgcaccattttatattctcaccaacaacgcatgagggttccaatccctccacatccttaccaacacttgttataatctgtcatttttattgtagccaccctggtaggtgtcaagtggcatctgtttgcagct

SEQ ID NO: 741857 - DNA, 563 bp, Homo sapiens
cccccaactgagtcctaagcacccactaatcttctttctgcctctatggattagtctattctagatattttatataaatggaatcagaggatatgtggtccattgtgactggcttctttcacttagcatagtgtttacaaggttcgtaatgttgtagcgtggatcaatattgtatttctttgtactgccaaatgatattctgctgtgtgtatataccacacttcatccatttatccaaatgtccagttggtggacatttggattgttgcctctttttggttattatgaagaaagctgctatgaacgtttgggtatggactgttgtgtgagcatgcattttcgttgctcttgggtatatacctagaagtggattgctgggtcacatggcaaygctactaacttttgaagagctgccaatgtgccaaggcagctgcaccattttatattctcaccaacaacgcatgagggttccaatccctccacatccttaccaacacttgttataatctgtcatttttattgtagccaccctggtaggtgtcaagtggcatctgtttgcagct

SEQ ID NO: 741858 - DNA, 636 bp, Homo sapiens
ccaggatacacagttcaccagggccttcttttactccaggactgcctgatgccatcagcaaaagcattctttacaaaaatgcaagctgttattttcatataatattccaaggagatcagtaacaatatgtgtaaagggcaggggatgattcatagctgcccactcagctcccaaggaagtttccgaggctgatgttgaatcgttccacatagctattggcataagggccttggaagctgttctgattgcaaaagcagtcctctcagtttcctgaggatggtgatgaatgtccccgcttgaggaccttagtttactggaaaaatrtggcatttgataaaaatttgaacacaggtatgttttcttcctagaagattaagtgctcatttctctgtgggtagcgaatgcagattttggtgaactgagaagtttcttttattctgagaccaagccctagccactctctatcattgactctctaataaattactatacaatttttagtgcacatataagcctgaatttaaaatgctaataaagaagcacagttttatgaaactctatcaagcatgcatgtggattttttagcggcgtcagatattccctaaaagttaccaaaataggtgctcatttcctttg

SEQ ID NO: 741859 - DNA, 618 bp, Homo sapiens
gtgtcttagtgcctttcaatgcaagctcgtgtatagtctactaagtccattctgctacttcagactcctatctcaatactttcctctaaactcatgaccctctaattattctggatgactccatgttccaaaaaatagacacatatgacgatccatcactcaaaacattgatttacaatattctttcaatctgtcatgtttatttcacttttctgtttatcaaataaaacccactatttaacttagcacaattgtctatctcctgtattattttttaattacatttgctcgatttagtagttccatttcctgttctaacttaccgccttacctttatccttattawagtacttttttctgttttgttaatcataatttcatgtttgtttaagttcaaaaggaataaaatatttttggagtctttaactttaaagccatggaacaaagattaaaaaaaaacaactatcagaccctaaattgtaccctaagttggggtctcttcagaaaccctcactcactgcctaggaatgtgggaaatggacgacaagaatatattgtcctcccgttccacccaactcacagtattttctcagaaatgtgctagaatggcctagttct

SEQ ID NO: 741860 - DNA, 613 bp, Homo sapiens
gagtaagtctcatgagatctgatggttttataaagggaaactccttttgcctgactctcattctcttctcttgtctgccgccatgtgaggcgtgcctttcactttccaccatgattgtaagacctccccagctacggaaccatgagtccattaaacctctttcttgcagggcgtagtgactcatgcttgttatcccagcactttgggaggctgagacaggtggatcacttgaggtcaggagtttgagaccagcctggccaacatggcgaaaccccatctctactgaaaatacaaaaattagccgggcatggtggcccatggctgtaatcccaactactcaggaggctgaggcaagagaatcgcttggacctgggagatrgaggttacagtcagccaagatcgaggcactgcattccatcctgggtgatagagtgagactctgtctcaaaaaaacaaaaaacaaacaaacaaaaaatctttcttttgtaaattgcccagttttgggtatgtcttcatcagcagtgtgaaaacagactaatatatcttgccttcataagtgtttgcagtttagtaaaggaactaaatgaccaagcaataagcaataaaaatggta

SEQ ID NO: 741861 - DNA, 654 bp, Homo sapiens
tgccttttatttctttttcttgcttgatttctctggctagcacttccagtactatgttaaatagaagtggtgaaagtgggcatcaatctcttatttcagtacagggtaactttttgatccactgctaagactgatgtcagtgggcagaccagattgccaaggctctggtgagcaaaatttatcttggaccccctggcacatggtttcagtcacaggctcaagaccaaagaggtcaatggccaagtttgaaccccagagcatgactggcaggtttgccacttaagtatgcactggcactctcaaaatgactctcytaggtcttgggctccatttcacaacctcctgccacatctgaagattttcacagagtcttagctgtagatgtgtacagaattattattgttgtggggacataagaacagatgatctcctaacagcttgctgatattaatgaagattttaatcaatatctttctgagtgtcacatcactgaaattatttatataaactagtgacccttgacagcagatatatgtataattttacatttgcttacatgtatatttttcatattgtacaatatatttttgatagactttatttcttatagcaattttaagttcatagcaaaactgagggatatgtatagttaat

SEQ ID NO: 741862 - DNA, 620 bp, Homo sapiens
gatttacattgtgagtctgctgggtccagctataattttaagtttgatagcatggctgacagtctattatgctcaatgcattttttaaaacttttactttcgaagaaaaatcacagcttccttattcttttctattcatcatacgtccgtgttgctaaggtggagtcttggaattttcttggtctcaatgcggtagaataggcccagcccatggagttttgccataagactggccctggasaaaggcagaggccaagatcccacatttggcatgttttaaaccagttctgagagataccattgcatatttgttttcttgccatccggagtatgataggaatctcccaacagagagagcactctacttgctattctagacctaaggtcctcatgacctggtgatccaaggaattggtgccctttggaatgtctttgtgaggaggcagagcgaagggaaaggatattgtctatgtgtttctggaaacttctgtgaaaccagcagccatattttcccacctgtgtctatcctatttctcaatattcacttgttagtagcactggtcccaaagacaccacctcgtcagggacacaccatggaatcaggaacttctgggacataa

SEQ ID NO: 741863 - DNA, 417 bp, Homo sapiens
ctcccactttccccatgggaaaccaataggtatttatgggaagtaaaataatttaagcctttcagaaattttcctctactagaaaagtgtttctcaaacttcaaagtgtgtgtgaatcctctggagatcttgctgaaatgcagattctgctccaatgagtctgaggtgatgcctgagactctgcatttctaccaagcccccagatggtgccaaaattaaggaatcagacttttraggagcaaagctctccctgttcaacagagatataatacaaggcgcacgagtaattttattttttctagtagccacatttttaaaaagcaatgtaaggtgaaattaattttaataatatattttaacccaatagatagtaaaaatgactatttcaatatgttatcatatgaaaaaatgatgaat

SEQ ID NO: 741864 - DNA, 612 bp, Homo sapiens
attttgctcttggaaagtctgccacctatcaaaggtttaagacacttgatatcacaaaataggattataggtgactataaaatagtcattcatttagcaaaatgctaaaacaagaatattcatactttaatagagaagatgacttaatttccaaaacaataagacctaataaagacaatatgaagccaactaaatctgtcttttgccctcccttttttcattcttctgtagttttattcaaaaggtaaacacaatattttattatctctcacctgaaaattttgttccaaagacaaaatcaaatttttgctttgtatggtgtattactaatgttaaatgttaataaaaccttataagcaaatctgtctaatgttaatcagtttgaccataaggtaaratttccataatctttctataccctattaaatagcatatcaatgatccaagaaaaccctgttattccaacagacaggcccagatgctggccttgcattagtgtgcttttgatattaatgtttaatttatataaaaattctgaataaatcttatccctcagagtttgcccttacaatctcatgtgcccacctcttccacaataatccctgggcctag

SEQ ID NO: 741865 - DNA, 584 bp, Homo sapiens
gtaacttcccctccatcttctgaaggttcacagaaaaattaactcataaagagcagataaattggagaaaagacatacaaattcattcacatgaccatgagggcaaatcacagaatggttatctatccctcaactgggttcagaagcctaaatagtatcttgaggttacagaaagaatgggggcttggatcctggcaaaacacattatgggaggggggraaagaggaattctgttgaggggcagtaaatctttctgaggaaaatgaatggattagagaacagaggttcacttgtaaattagttctctttggaatttttatgaacctgagagacagacattatcttgtgaaagggtctgctgaggtgtggttacattcatggtcatcctttctgcaatagataatgagatagaaaggaaggcaagaaaaaaaaaaactattgttctccttggcgtgtccttctggtctttatgtagataggggaaaagtctcttacagtgtgtattgatctctaagagcctttaattcaaaatactcattataccaagtgatcatattttggagtaaagttccttgtgctccttt

SEQ ID NO: 741866 - DNA, 581 bp, Homo sapiens
tagtatttaaatatatcactttgcctcatatagttagagctataatggagctcttaagcaatttgaagctacaacttcaggaaattctgctgaagagctacctctttcattatgtttaatgtgccactggcaaatcacttcctctgcctgttttccttcaggagarggggagagtttcttgattacagcattaaacacaggcacacgctcacacacacacagtctgatgcaggagagcagaatccttcatttcactaactgttgtttatgctgtgaaagcagagttgtgacccctcttggttccttccccacctctttttccaggcccccctcctccacccccacacattcgtgtgaatgaaaaggatgtgctaattagcaagtcttccatcaactttactgtcaactgcagctggttcagcgacaccaatggagctgtgaaatacttcacagtggtggtgagagaggctgatggtaagttatcatgagttaactccactctgagacacagaattgcttcctcagaggtcatgtgggagatctttctgtgacaaagtttaagaaacttaagtagaaaatgt

SEQ ID NO: 741867 - DNA, 581 bp, Homo sapiens
tagtatttaaatatatcactttgcctcatatagttagagctataatggagctcttaagcaatttgaagctacaacttcaggaaattctgctgaagagctacctctttcattatgtttaatgtgccactggcaaatcacttcctctgcctgttttccttcaggagaaggggagagtttcttgattacagcattaaacacaggcacacgctcacacacacacagtytgatgcaggagagcagaatccttcatttcactaactgttgtttatgctgtgaaagcagagttgtgacccctcttggttccttccccacctctttttccaggcccccctcctccacccccacacattcgtgtgaatgaaaaggatgtgctaattagcaagtcttccatcaactttactgtcaactgcagctggttcagcgacaccaatggagctgtgaaatacttcacagtggtggtgagagaggctgatggtaagttatcatgagttaactccactctgagacacagaattgcttcctcagaggtcatgtgggagatctttctgtgacaaagtttaagaaacttaagtagaaaatgt

SEQ ID NO: 741868 - DNA, 564 bp, Homo sapiens
aagttggcaaaaagctgctggtgtggcagaaagatatgatatcctgcttctaactgaaaatggaatccttctgcgcaacacatcagagccagccaccactaagcaacacaaatttgaagatctaacaccaggcaagaaatacaagatacagatcctaactgtcagtggaggcctctttagcaaggaagcccagactgaaggccgaacaggtaattagcacagcataatgttttgtagcacatattgccaatgtctgctattgtgtaagaaccccagggtgagagggatgaagcaacattgggagatgatatctatctcttgatacgctgggaacattcaccctgatttgccayttccatgtcagttgccctatccacgcaggactcagcccaccacactctgtttctgatttttcattaatattggtgctattagcttcctattgctgctataataaactatcacaatcttagtggcttaaaaccacccaaatttattattttctagtcctgaggattagaatctgaaaatggttttttgggactgaaatcaagacaacagggc

SEQ ID NO: 741869 - DNA, 645 bp, Homo sapiens
cactgttgttaccaccacggagtacaggctgccggacttgagagagtggaagctgtatctgctggtctcactggagatgctttcatttttaatgaccacattttcatggatcagtaagacttggtaaaattctacgtctccttgtgcctgggtccagttagtaaacagactactggtcattccttggttggccacatgcaagtcagtcacttgggcaggcactaaaacagtagacagaagaaaaaacaaatgacacttagtcaccttaagaaagtgtaagaaaaatgagtcaaaaaatggagacagacttgaaagtactaaaaataatttttgtgttgttgctatagactctcagttctatttcctgtggcatatggagaactactcctctagagaggctctagtactttgaaaaagctgcttatatagggaatcaaaattatttaasatccaaagatgagatgatgcatgcttattaagtggttttgattttaaattttagataatgaaggctgctatttttgaaaactgcttagttaatgtgattttatctgtccttaccccatgagaattcaaagctatctaatctacctgagccaatgattgttatggggtggtattgggaattcccttcagtctgttgat

SEQ ID NO: 741870 - DNA, 555 bp, Homo sapiens
cataaaaagttcagttgctgtatttacttacattatttatgcttcacacaaatgaaggaatggctagattaacctgcacggacaacagtattattggacactgactacctaacatccaaaatatcaggccaggagcaatttcaagaagtgtgtgtagaatgtctatgagctgtgcactaatttccacaaggtaggagtcgagacgagattaaagacttggtccttgttcttgaggaatttataagcccaatagtcctgcatagaaaaccagaaatactcttccagtagagcactggtgcacmctcttgtcagtgtggcagactaggacattccacaaaggctggtacaggctttcctactaacctgcagatggaatgctgtccaactctgccacaaactcttaaagccacaatttcatgtgttcctttcttgatggaggtgcttatctacgcacacagctattagaacatctcagcataactgaacgtttgttcttggggtgaggatattatttattaaaatagctataaccaattctttttgtgactgttctag

SEQ ID NO: 741871 - DNA, 558 bp, Homo sapiens
cttttttatggctacatagtactccatggtgtatatgtactacattttcttcatccagtctattacagatgaacatgtgggttgatttgatgtctttgctattatgaatagggctccaatgaatttgtgtgtgcatgtgtctttataatagaatgacttatattgctttgggtatatacccagtaatgagattgcttggtcaaatggtatttttgtctttagatctttgaagaatcaccacgctgtcttccacaatggttgaactcatttacacttccaccaacagggtaaaaacgttcctttttcgccacaactttgccagcatctgttattttttgactttttagtaatagccattttgattgytataaaatggtatctcattgtggtttggatttgcatttccctaatgatcagtgatggtgaaattttattggctgcatgtatgtcttcttttgaaaagtgtctcttcatgtcctttgcccactttttaataaggttgtttttttcttgtaaatttaagtcccttatagatgctgaaaattagatctttgtcag

SEQ ID NO: 741872 - DNA, 558 bp, Homo sapiens
cttttttatggctacatagtactccatggtgtatatgtactacattttcttcatccagtctattacagatgaacatgtgggttgatttgatgtctttgctattatgaatagggctccaatgaatttgtgtgtgcatgtgtctttataatagaatgacttatattgctttgggtatatacccagtaatgagattgcttggtcaaatggtatttttgtctttagatctttgaagaatcaccacgctgtcttccacaatggttgaactcatttacacttccaccaacagggtaaaaacgttcctttttcgccacaactttgccagcatctgttattttttgactttttagtaatagccattttgattgttataaaatggtayctcattgtggtttggatttgcatttccctaatgatcagtgatggtgaaattttattggctgcatgtatgtcttcttttgaaaagtgtctcttcatgtcctttgcccactttttaataaggttgtttttttcttgtaaatttaagtcccttatagatgctgaaaattagatctttgtcag

SEQ ID NO: 741873 - DNA, 558 bp, Homo sapiens
cttttttatggctacatagtactccatggtgtatatgtactacattttcttcatccagtctattacagatgaacatgtgggttgatttgatgtctttgctattatgaatagggctccaatgaatttgtgtgtgcatgtgtctttataatagaatgacttatattgctttgggtatatacccagtaatgagattgcttggtcaaatggtatttttgtctttagatctttgaagaatcaccacgctgtcttccacaatggttgaactcatttacacttccaccaacagggtaaaaacgttcctttttcgccacaactttgccagcatctgttattttttgactttttagtaatagccattttgattgttataaaatggtatctcattgtggtttggatttgcatktccctaatgatcagtgatggtgaaattttattggctgcatgtatgtcttcttttgaaaagtgtctcttcatgtcctttgcccactttttaataaggttgtttttttcttgtaaatttaagtcccttatagatgctgaaaattagatctttgtcag

SEQ ID NO: 741874 - DNA, 646 bp, Homo sapiens
ctccatcaggtcttttaaggacttctctgcattggttattctaattagccatccatctaatcctttttcaaggtttttaacttctttgccatgggttcaaacttcctcctttagctcagtgtagtttgatcatctgaagccttcttctctcaactcgtcaaagtcattatccatccagctttgttccattgctggtgaggagctgcattcctttggagaaggagaggcactctgattttttaaattttcggtttttctgctctgttttttccccatcgttgtggtttttatctacctttggtctttgatgatggcgacgtacagatggggttttggtgtggatgtcctttctgtttgttagttttccttctaacagtcaggaccctcagctgcaggtctgttggagtttgctggaggtccactccagggccctgtttgcctgggtmtcagcagcggaggctgcagaacagcggatattggtgaacagcaagtgttgctgcctgattgttcctctggaagttttgtctcagaggagcacccggctgtgtgaggtgtcagtctgcccctactggggcgtgcctcccagttaggctactcagggattagaggcccacttgaggaggcagtctgtccattctcagatctc

SEQ ID NO: 741875 - DNA, 545 bp, Homo sapiens
atcaaaaggaatcaaatggaataatcatcgaaaggaatcatcgaatggaagcgattggaatcatcgaatggaatcaaatggaatcatcgaatggaatcaaatggtatcatcaaatggaattgaatggaatcatcattgaaagaaatctaatggaatgatcgaatggaatcgaatggaatcgaatggaatcatcaaatggaatcgaatggaatcatcatcgaaagaaatcgaatggaatcatcgaatggaatcgagtggcatcatcattgaatggaatygaatggaatcatcgaatggaattgaatggaatcatcatcgaatggaatcatcgaatggaatctaatggaatcatcattgaatggaatcgaatggaatcatcgaatggaatagaatggaatcttcatcgaatggaatcgaacacaatcatcgaatggaattgagtggaatcttccttgaatggaatcgaatggaagcatcgaatggaatcgaatggaaacatcatcgaatggaatcgaatggaaacttcgaatggaatcgaatgaaat

SEQ ID NO: 741876 - DNA, 457 bp, Homo sapiens
aaaagaagctagtggattttaaaaagggcaaatgttttataaggaacatgaatattataattcatgttattttcatgttcatacagaatacttacaaaaattaacattttctagaccataacacaaattcaaacaattttcacggaaataacgtgacacagaatatatttcctaaacaaacagcaatgaaggtagatatcaatacaaaaaagaaagctagaaacataagtctaataatattggttggaagctattttaatgaatattgaaatattwtaaaggtcaatagtcaatacaatgaaccaaacacttttttaaggccactaagatgcaagtataatgtgtaatgcctccttttataaggagtaaatctgtaacatcacctgggctatttgacaactgcaaagtgaatgtgagaaggagagaaacagtgagagagagagagagagataaaacc

SEQ ID NO: 741877 - DNA, 506 bp, Homo sapiens
aataaatgttaagctaatgttttgacagtgattttcttgtatgtcaggaactaagcaaacaggcaaatacaacaaaaacaaaaagaaaaacaagtaatcattagccagcaaaatatgtctctaggccatgcagactggctttgtgctgggttctttaaagcckgcacaaagtgtatgttcactcttgcactgagtgaagttcaagttcactcttgcgcagagcttgcactgaggggagggatcggccaaggtaaaagtgtaggctcttcttatgacatttgacatcatgtggcttaacctatgcatacatgtgactttctagactctcccatgtacgtgaatgttgaatgtcttagttttccaaatactcttctccaacttttcttcctgtgctgaaggtgatctactgtatgtgtaaactctaatttttgccctaagcgtctgtggtttcttaggtctccttgctgagtttcttaataatgtccattccttatctgttctgtatt

SEQ ID NO: 741878 - DNA, 558 bp, Homo sapiens
ttctctctttccacacttaacttcctgaggacaggtgttatgtcgccgtgttcttttgtatttttacatgtgtgcacatgtgtgtgtttcactatgacatctcttacagggtctggcacatagtgtgtatgaaacttgtgtttgttgaatgaatgaatgaataaatgaacctcctactgatgaccacatcttccctttgcaaatgaaggtatctgcagtgcgtttgggtgatatgtgtgatagtttctgcctttagagtaattttacattttttcactcagcttcattatgcatgaagagtaatatcttagagtactatctggcacctactaattgctgattaaamctgactaggcctatgcctaatccaactttgattgcttagaaatccatctgttttcctctacttcaagtttattgattgactgattcaacaagcatttactgatcaccatatgagttcccccaaattaggcaaggcaattgcgatggctcacagtctgctgggggagaaacagtcagctttaaactaataaataatcacaggttaggatccag

SEQ ID NO: 741879 - DNA, 558 bp, Homo sapiens
ttctctctttccacacttaacttcctgaggacaggtgttatgtcgccgtgttcttttgtatttttacatgtgtgcacatgtgtgtgtttcactatgacatctcttacagggtctggcacatagtgtgtatgaaacttgtgtttgttgaatgaatgaatgaataaatgaacctcctactgatgaccacatcttccctttgcaaatgaaggtatctgcagtgcgtttgggtgatatgtgtgatagtttctgcctttagagtaattttacattttttcactcagcttcattatgcatgaagagtaatatcttagagtactatctggcacctactaattgctgattaaaactgwctaggcctatgcctaatccaactttgattgcttagaaatccatctgttttcctctacttcaagtttattgattgactgattcaacaagcatttactgatcaccatatgagttcccccaaattaggcaaggcaattgcgatggctcacagtctgctgggggagaaacagtcagctttaaactaataaataatcacaggttaggatccag

SEQ ID NO: 741880 - DNA, 580 bp, Homo sapiens
  misc_feature 29: n = A,T,C or G
caacgctgagagcacacaggagaacaagntgggaagtggatccacactgaggagggagtgtgacagctcgtgcagtgcaggaaggctgctctgctcaccccacactgcgggtgacaggatgagaggaggtggcaccgctcagaccactagggatcagtctcaccaagaaacagcatgcttccattctcaaggttgctagtgttttgtttttgtttgtgggggtgtttttttgagacagagtcttgctctgtcgcccagactggaatgcagtggtgcgatctcggctcactgcaagctccgcctcccaggttcaygccattctcctccctcagcctcccgagtagctgcgactacaggtgcccaccaccacgcccgggtaatattttgtatttttagtagagatgagtttcaccgtgctagccaggatggtctcaatctcctgaccttgtgatccgcccgcctcggcctcccaaagtgctgggattacaggcgtgagccaccgtgcctggcaggtcactagtgttttaaattattagtatgctaagtaaataccagttctactatcacttgccatttccct

SEQ ID NO: 741881 - DNA, 580 bp, Homo sapiens
  misc_feature 29: n = A,T,C or G
caacgctgagagcacacaggagaacaagntgggaagtggatccacactgaggagggagtgtgacagctcgtgcagtgcaggaaggctgctctgctcaccccacactgcgggtgacaggatgagaggaggtggcaccgctcagaccactagggatcagtctcaccaagaaacagcatgcttccattctcaaggttgctagtgttttgtttttgtttgtgggggtgtttttttgagacagagtcttgctctgtcgcccagactggaatgcagtggtgcgatctcggctcactgcaagctccgcctcccaggttcatgccattctcctccctcagcctcccgagtagctgsgactacaggtgcccaccaccacgcccgggtaatattttgtatttttagtagagatgagtttcaccgtgctagccaggatggtctcaatctcctgaccttgtgatccgcccgcctcggcctcccaaagtgctgggattacaggcgtgagccaccgtgcctggcaggtcactagtgttttaaattattagtatgctaagtaaataccagttctactatcacttgccatttccct

SEQ ID NO: 741882 - DNA, 580 bp, Homo sapiens
  misc_feature 29: n = A,T,C or G
caacgctgagagcacacaggagaacaagntgggaagtggatccacactgaggagggagtgtgacagctcgtgcagtgcaggaaggctgctctgctcaccccacactgcgggtgacaggatgagaggaggtggcaccgctcagaccactagggatcagtctcaccaagaaacagcatgcttccattctcaaggttgctagtgttttgtttttgtttgtgggggtgtttttttgagacagagtcttgctctgtcgcccagactggaatgcagtggtgcgatctcggctcactgcaagctccgcctcccaggttcatgccattctcctccctcagcctcccgagtagctgcgactacaggtgcccaccaccacgcccgggtaatattttgtatttttagtagagatgagtttcaccrtgctagccaggatggtctcaatctcctgaccttgtgatccgcccgcctcggcctcccaaagtgctgggattacaggcgtgagccaccgtgcctggcaggtcactagtgttttaaattattagtatgctaagtaaataccagttctactatcacttgccatttccct

SEQ ID NO: 741883 - DNA, 634 bp, Homo sapiens
ttcatgtgttttgtatactgaggcttaagatcacagggcatctgagttgatattcacaatacaaatgtctccaggcatatgttgtctataagacattggactaaatatgtaaacaatagaaaataagcccatgaatttctatcactagtacagactatgccatatatacaaaaaaaggtacatgtaaactaacatgggctttgaagaagaaagatataagaatgatagctaacattgtctacttactacgtgtcaggcaatattctctaccattttctcattcagtgctcacaactccatgaggyatataggttctgttattatttctacttttcacataaattgattaaataactttccaagatctttaaataggagaccttggatttgaaccactatatctatgctctcaagcacataagtactggctccagtagttgcataatgggctcagtgaaggatgtaagaaagtatgtagtactgaggcagaacttgacaagggaaagaaattagacccacaaacatgaaatggaaagaaagacacattttagagaaacagagagagaatgggaggcctggacagggcagatctatcagttttgctccgtaggccatttacaaccaacagaagtgg

SEQ ID NO: 741884 - DNA, 496 bp, Homo sapiens
ttatcataatctttttataagctggtcttaaaataaaagtttatgtaggaactagtcagtgtatttattttatttaatttgtcttattttgtttgaaagtatttatatacaatcttaacaggaaatatagatgaaaataatgatattaacaaaaaaacatggtactttgaattagaagatttaagttctggatgactgcctttgggcaattcaatatctatcaggtttttttttgttctcttcttttcttttttttttttattttattttattttatttttgagacagtctcactctgtcgcccagtctggagtgcagtggcctgatctccgcttactgcaatctctgyctcttaggttcaagcaattctcctgcctcagcctcctgagtagctgggattacaggcacgcatcactatgcctggctaattttttgtatttgtagtagagatggggtttcaccatgttggtcaggctggtctcgaactcctgatctc

SEQ ID NO: 741885 - DNA, 559 bp, Homo sapiens
tcccactctctcctcaattgcatgagtgaaaaatacaatggtctcagcttgattccaactatactttatttcctgaactgacactttggttttctttaggatagagctgtttagagtcaattgtagcaataaaaaataatgacaacgtcatgaatattcttactgaaaagctgctgcaccttgtttaggcactgaatatactgtcagtctgttcaaaaatagaggatcacaacagctgactgatgtagcaagaaatgtctatcttaacaatcagaaaaggtggtcattttccaaagtgaattcatyatgtggatagtaaaaaaaaaaaaaaaaaaaaaaaaaaaaaattctatgaccaaataagtacacggtgtagagttaaataaaagttaaatgggttacttttccacatttctgagcttttaatactctgacatgtattatgaatttaaaataatttcttattgaatttttcttataaagtgcaacagtttgtagggctagtcttccacagagctttttgaatcttcggaataggccacttaaaagtgtctgaaat

SEQ ID NO: 741886 - DNA, 610 bp, Homo sapiens
cataacctatcatggcaagtaatttttagtgttgcagtagaaatgggcaagaaaaaaagttttgctgtttaggtattttttagacttaactagtcatgggcacaaactcctaagtctagactgaatatgacttattaattctccagaaataatagaggtagaggcttgcctatgtctttgatcccagggatgtcttcttgaattgcctccccgggtatcttttaaaatcccacctacccttactgatgcagctcaactgctgccacttctgtgtggctcagcattcccatcccaggaacaaccttctccacgactacatgcaacattagragtctccccacttcctcctcttttaatgcactttgtgtacaacactttactgtagttacttacagatgtaatcttctagagcatgacaggctccaggagagcagaaaggcgtatgtcttccacacatttatgtctgcagaaatagactgttttcttgtatttataaggttgctataaggtatttatttgaaaaaacacctatgagtgattttgaggctgagtattaacgtagtcttcacccatatctttagttacttaaaccaaaagtaatgttaatact

SEQ ID NO: 741887 - DNA, 574 bp, Homo sapiens
gcatccaatctgttgagagcccagagagaacaaaaaggtggagaaaggggaattcattctctcttctgaagctgggatatctatcttctcctgcccttgggcatcagagctccagtatctcaggcctttatccagtatctctggtacttgtacaagcctgccgcacccactccacccccacctcttcttaggctttggccttagactgggagttacaccatggattcccttgattctcaggcctctagattcaaattgaattataccaccagctttcctgattctccagcttgtagacagcatatcaagggacttctcagtctscatagttatatgagccagttcacatgataaattccgtgtgtgtgtgtgtgtgtgtgtgtgtgtgtgtgtgtgacctattggttctatttctctggagaaccctgactaatgtagcctgagcagactaaggtaccatcttagatttgagtcttaaatcttaagtcacctagttgttctccatgaccccgggcagatcagtttaacttcttgagagtgtcagtatccccatctgtaacatgaagactgcctt

SEQ ID NO: 741888 - DNA, 508 bp, Homo sapiens
cacttcaaatgtgaatgacgtagtagacataccaattaaaaaacagagactgtcagaatggattggatctgactatatgtggcctataagaaacctacactaaatataaagacacagattaaaagtaaagggatggagaaagmtgtatcatgctaacactaatttaaaaaagctgcagtagctatattaatttcagacaaagcagatttgagactaagaaaaattgtcagagacacagagatggtcactacataattttaaaggggacaattctccaagaagacataacaatcctcaatgtgtacacacataacaacagactgtcaaaatatgtgaggcgaaaacagttaagattgcagggagaaatagacaaatccactcttatagctggatagttcaacatcttttcaacaacagactgataaaacaatcagaaaatcagtgaggatatagctaactttaaacagcactggcaatcatcttgatataaatgatatagaattctcca

SEQ ID NO: 741889 - DNA, 597 bp, Homo sapiens
aaaatcagcaatctaagcttccaccttatgacactagagaaagaaaaacaatataagccggaagaaagcagaaaaaaaaaattagagtagaaaccaaaactgctgttagaaaaatagagaaaatgaattaaaccaaaacctgatgtgtgtgtgtgtgtgtggtgtgtgtgtgtgtgtgtggtgtgtgtgtgtgtgtgtgtggcrgggggaggttttggaaaagatcaataagattgataaatttttggccaggttcaccaagagaaaaaaccaggaagataccaatgactaatatcagagattggggagggtttatcagtactgatcgcaaggcatttaaaggacaataaagaaagagtataaatagctttctgcctacacatttgataacttagatgaactggactaattctttgaaaaacacaaactatcaaaacacacacaaagagaaataaataatttaaagtaggcctatatttactagagaaatgcaataaataataaataaccttccaaagcagatagcaacagactcagatggtttctctggttattgtaccagacagtcaaagaaaaaattataccaattttctgcaa

SEQ ID NO: 741890 - DNA, 579 bp, Homo sapiens
taccaaaatcagacaaagagagcacaagaaagaaaaacaacaaaccaatatcttttatgaaaatgataaaataatccttaagaagatataagcaaactgaatctaacactgtataaaaaaaactacaaccatactctgtgcccaagtggggtttattcaagatttgcaaggcttaatctacmtttgaaaattaattaatatgatctatcacattaatacactaaaaaggaagattcatataatcatatcaatcaatgcagaaaaaccatctgacaaaatccaacacccattcatgataaaaactctcagcaaaaactctcagtaaaaaggaggaattttctcatcttgataaagaagatctacaaaaggccgacagttaacatcatagttaatggtaagaaactgggtactttctcctcaagattgggaacaaagtatatatgtctcctctcaccagtcttattcaacatcatattggaagtcctgcttagtacaaaacgtccaaaaaaaaaaaaaaaaccaataaaaaaaatgaggaaagaagaaataaaactgtctttgtagatgacatgtctgact

SEQ ID NO: 741891 - DNA, 579 bp, Homo sapiens
taccaaaatcagacaaagagagcacaagaaagaaaaacaacaaaccaatatcttttatgaaaatgataaaataatccttaagaagatataagcaaactgaatctaacactgtataaaaaaaactacaaccatactctgtgcccaagtggggtttattcaagatttgcaaggcttaatctacatttgaaaattaattaatatgatctatcacattaatacactaaaaaggaagattcatataatcatatcaatcaatgcagaaaaaccatctgacaaaatccaacacccattcatgataaaaactctcagcaaaaactctcagtaaaaaggaggaattttctcatcttgataaagaagatctacaaaaggcckacagttaacatcatagttaatggtaagaaactgggtactttctcctcaagattgggaacaaagtatatatgtctcctctcaccagtcttattcaacatcatattggaagtcctgcttagtacaaaacgtccaaaaaaaaaaaaaaaaccaataaaaaaaatgaggaaagaagaaataaaactgtctttgtagatgacatgtctgact

SEQ ID NO: 741892 - DNA, 569 bp, Homo sapiens
cgtaatttataaacaacataaatttatgtttacagttctggaggctgggaagtccaagatcaatgtaccagcagatgtggtgtctggtgaggacttgctctgcttcataaatggcaccttcttgctgtgtccttacmtgatggaagggacaagggagcttgcttttataagggcactaatcctattcatgacagtagaaccctcatgacttaatcactctccaaaggccccacttcttaataccatcatatcgggcattaagttccagcatgtgaattttaggaggatgccaacatgcagaccatagcaaaaactaactatacagctataaagttataaagacagcgtggtattgataaaagaatagacacagaaatcaatggaagaggtaagaaagtttagaaatagacacacaaatatagtcaactgatctttgacaaatagtaaaaggcaattcaataaagactagtctttttacaagtagtactggaaaaattggatgtccatatgcaaaataataataataataataataataataataataataataatgaatctagacacag

SEQ ID NO: 741893 - DNA, 580 bp, Homo sapiens
caactgaaattctcatgtattttcaatgggaatgtaaaatggtacagcagtttggcagtttattataaagctaatgtatacttactgtgtgacacaacaatgccactttggggtttttatgtctcccctcccctgcccccaacccaaaataaaaacatgtctgctgaaataattatatgtgatttttttttttacattttttgtgacggactctcgctctgttgcccaagctggaatgcagtggtgcgatcttggctcactgcaacctccacctcccaggttcaagcgattctcctgcctcagcctcctgagtagctgggattacaggaacccgccatcatgcctggctaatttttgtatttttgtagaaacggggtttccccatgttggccaggctggtcttgaactcctgatgtcaggtgatccrcctgcctcggcctcccaaactgctgggattacaggcatgagccactgtgcccagcctgtaagtgaatgtttatttcagctttattcataataatgtcaaactgtaaacaaccccaaacaggtgaatttataattacattatggcatattcaag

SEQ ID NO: 741894 - DNA, 652 bp, Homo sapiens
cagtcattctccactttttgataagattatgggatgtgaaggaccagagcctctatgtgggagttgggagctaggaaatgcagaaaattgatgcagaaggaaatagcgtttctcattacgttggctttggtttacatgcctccttcctaaaggacttgttaatttaactattacttgtatatgttaattgaagtactactcgatttgagtgtaattttctctaagtttttcttatcctttggtacaaagaaatcatttgtattccattgttaaaactgatgaaaacatgtgaaatcatacatgaagacatggaaagatacaaactgaaaaatgagttaacattkctgtagtattaaatgggaacaaattaatttccatcgaaggtaaaataatgagtgcatttgtgatttttgttgcttactcatcataattatgagacattatatttaagcacatataaaataagcacactttcacatttaaaactctagtgatcttctgtatggaacttacactgaaataactgccctagctggggtcgtctccctccttgattccatcgggcttggctgccttccctcaatatgtgttgagtgactactgtgtgccacgtttgttcctagaggatccaaaacccaaaccagaagctccc

SEQ ID NO: 741895 - DNA, 652 bp, Homo sapiens
cagtcattctccactttttgataagattatgggatgtgaaggaccagagcctctatgtgggagttgggagctaggaaatgcagaaaattgatgcagaaggaaatagcgtttctcattacgttggctttggtttacatgcctccttcctaaaggacttgttaatttaactattacttgtatatgttaattgaagtactactcgatttgagtgtaattttctctaagtttttcttatcctttggtacaaagaaatcatttgtattccattgttaaaactgatgaaaacatgtgaaatcatacatgaagacatggaaagatacaaactgaaaaatgagttaacatttctgtartattaaatgggaacaaattaatttccatcgaaggtaaaataatgagtgcatttgtgatttttgttgcttactcatcataattatgagacattatatttaagcacatataaaataagcacactttcacatttaaaactctagtgatcttctgtatggaacttacactgaaataactgccctagctggggtcgtctccctccttgattccatcgggcttggctgccttccctcaatatgtgttgagtgactactgtgtgccacgtttgttcctagaggatccaaaacccaaaccagaagctccc

SEQ ID NO: 741896 - DNA, 619 bp, Homo sapiens
aaagtaaagaacacacaaagaagaattaatattctctcataagatctgatatttatttcttattcataaaaaatgttaaaggagtgttaattttgctttttgttgtattgaacaagggtgctacaaatgagcactgatggagctgcactgtgttggttattcaaacaccatgagccaccttgttgtcagcaacatggttttccaaatggtgaacaatgcacagtaaaccttccaaagcaaagaacaattttacctgaaattatacagtagctgtagtcttaggaaattcaacgtatactaaaattgaattaaagcaatttttatatgtgcaaccagttttgtttccaggctcaaataattataaacaggtgtttcacctatatgactacccaaagggattgttgaaaatgcaggacacaacttccgggtccagtcctctcacrtaacaggactgcagtccactaaatgccagtagtgctctccaagcattgcggcatccagaaaacactttccagtcttcccttaggggccagtacagcctcattgaaaagcactaccctagacaaactactacccttcaaacagctggctttgggagtcaggtaggcacatcaagatg

SEQ ID NO: 741897 - DNA, 626 bp, Homo sapiens
aataaaactatttttaaaaataaattatccagcctcaggtaatctgttagagcaacacaaaatgaactaatagaatggctattcactttgattctatttttttaatattatgaacaatcccgaataaatattcctgtacatgtccctttgtatacatatgagaaggtatccctagggattatacttcccatagaatttctgggtccttataaaatatgaaactttactacatatataggtgaaattttctcccaggtgtcaccaatttacattcctcagaattatgaaatttcctactgctccgtatcttcactaacacctggtgacattgaacttcacaattttgtcaatatgatagatgcgtaaaattgtataacagtgtagttttgatttgyatttccctaatccttgtcttggctgcttagtagacatttgggtttcattttaggattaactattcttatttgtcccgtcttccactgtgttacttatattatttttggtattctgaatgctaattctttgttatatttaatgttcatcatttttgttcataattataatcccttcctttgagattagtgctttttaaaatgttgtttataaactactgtccttccctatat

SEQ ID NO: 741898 - DNA, 634 bp, Homo sapiens
actgagattatggtgatgtcagaaggatttaagtccctgctgggggagaacagcacaccatcattgtctaatgtgggatgagtaagaaataagcctttgttgttttaagcgactgagatttggagttttatttagtatccacatgtggtggattaaagatggccagacttttttgacattccttttttaatttttttttgagacagtctcattctgtcacccaggctggaatgcaatggcacaatctcggctcactgcaaactccacctcctgggttcaagcgattctcctgcctcagcctcctgaatagctgggattacaggcgtgcgccaccacatccggctaatttttgtatttttagtagagacggggtttcaccacgttagtcaggctggtctcaaactcctgacctcagatgatccgcccgccttgacctcccaaagtgctgggattacaggtgtgagccatcgtgcctggcttgacattcctttcattgaargctggggcctatgtcccctctccttcaatctgggctggtccgtgactgctttggttaatagaatgcagaggaagtgatgtgttctaattcagggtcaaaccgtaagagactggcagctttcatactgttggatgc

SEQ ID NO: 741899 - DNA, 578 bp, Homo sapiens
tgtttgtggcaattattacataagatatacttacatcaaaacaccatgttttacactttaattttcttttcttttttttttttttttttttttgagacggagtctcactctgttgcccaggctggagtgcactggcacaagctcagctcactgtaacctctgcctcctgggttcaagcgattctccagcctgggcctcctgagtagctgggattacaggtgtgcaccaccatgcccagctaatttttgtatttttagtaaagatggggtttcaccatgttgaccaggctggtctcgaactcctgaccttgtgatctgcccgcctcggcctcccaaagtgctaggattacaggcgtgagccaccccatctggccaattttctatttttcaatcatatcttaataagcctgggggggaaaggatagtatttaraaagtggcttctatgggctgtttaccactgtctccttctatggaaccaagaatataattgtataatagaagtttaaatgctttggctttgggtgaattggccaaaggtaatgcttgtgaccacaggttagagtgtttcctctaaacc

SEQ ID NO: 741900 - DNA, 587 bp, Homo sapiens
catggtgtcatttgtaaaaactaattggtctgtgttttggaaagatgatcatcagaacatttacactgattctttgtgtataatgattctttgtgtataatgatgtttctgctttgtattttctattttctttatattaaagatgagtaataaaactattttcagtgacaaaaatctgcctacttctttgaatagggagagtttatcccatttacatttgttttcacaaataatgtgttctgattcattcttcattttttatttctttattttttatattatataaattttcttcctttgaaatagttttttatatagctaatttgtaatttggcatcattcacctttaaaagcttcaagaacatcattgaatatatatgtctaccaattccaagaatacaacatcccaagattaagaactytattgaatatctttgaactagacgacacaataggctcattttatttcctgtcacctaccctttcttcctctctgtttatgttagattttggacaatatttattttcaagttactattttatgttattgtgaagtaggttcactgtgcactggttcccaacttgcc

SEQ ID NO: 741901 - DNA, 523 bp, Homo sapiens
tttggggaatgctgaatccacaggatcccttactgctcacagaaagagtgtcaacaacacaatgtactatttagaaagaaaaaggactgaaaatattgagcctttaaacaatcttctctccctccttgctgcatgcagaatggattccgtcascttccgggcccggccctgggctctcacccatctttgtgatctgattatcatcctgttacagcagtgaactcaatataccttgtgttaaattaaaatagaagtgttttccccactacaatgcaaattccttgggagcagcaatcaccacttgctagtctttatattcccatacaaagaaacttagtccattttctgttgcttataacagaatacctgaaactgggtaatttatagagaaagggaatttatttcttacagttataaaagctgagaagtctaaggtcaaggtgctgcatctggtgagggccttcttgctggtggggactctctgcagaatcccgaggcaacacaagtcatcatgtagtgaggg

SEQ ID NO: 741902 - DNA, 724 bp, Homo sapiens
ttcgagcacttggactgcatgacgcaacaaaacaaaactccttgccttcccttgtggggcatacattggaggggagtttagccctcagcaggagcatgcctgttttctttctcactggctaccgtttcggtgttgttgaggtgaagagggacagccatgtgcagatgcccccgattagggacatgttctgaccacggctgcccagggctcaggccagcctgggcccatcacgcggaccagaggttggacggaaccatgagaaaagactctccccgtgtcccagggcttggcacagtggtgctgtgccgcgaataataggtcatctgatgcggtataatttaataggaatatgaatccccagtaacccggggaaccaaagcaaggaattggcctctcagttacttttaactttcaaaacttgaacrtttccttaaaccaaatagccccatcgtcatggtcagaagtccactgtggagaaaggcaggatttagtgtttatttaagctgccaccccatgagagaaactgttgcccagtggagtttgactctcaatttttcaaggaatgattttccattttgtggattttttatgtatgtcttctctctctctctgtctttccttccttccttccctacctccctccagaaatgttgatgggagcaggaaaatttattggccaggtaagggtgtatatgaagaaaaaccttgatggtagggatcctga

SEQ ID NO: 741903 - DNA, 620 bp, Homo sapiens
ccagccctggctcacacgtgcattcaacacacattcttgggcaccatgtactaagccttctatgggatatatgaaggtgaacatgacatggaccctgcctttgagaggcttgcagcccagcaggttaaggtagacacgcaaacagctgatcgttttggtataaggtaggggtttgatgctgaagatcttcatgggaccttatagaggtctagagttgagggtactaaaactacctgggggtgaggtttggtggaagaaggcaactaaggaaagcttcctggattcaatcttaaaggaagatttaaaatattgctgaattactgcaataraccgaatgtttgtttccacgcccctgcaaattcatatcttgaaacctaacccccaaggtgatggtattaggaggtggggcctttgggaggtgattaagccctcatgaatgagattagtgcccttattaaagagaccccagagagctgcctcactgcttccaccatgtgagggcacagcgagaagacagccatctatgaaccagggaagaggccctcatcagcaccttggtcttagacttccagcccctagaactgtgagaaatacatttgtgttgtttgtgagccacctag

SEQ ID NO: 741904 - DNA, 630 bp, Homo sapiens
tccttggtggactctgtactcgattttttagctcctcagcactgtgagactgccaaaccctctgctttgcttttgagcctctaaacagtttctttctacttgttttctcaactcctcgtcccatataaacacagcttaatatctggtaaatacctcaagtggaaatgttggagttcaaggaggccaggacttgaagagccagagtcctagaggaaagggactacacagaagtgacccaggcttctatgagatcacttttatgagctcatttccatgcagccccctttttttctgggactttagctcttctcacgcactagctgccttgaattttgattttctccccagctggtgatactgygtaaagctctaggccgctaccaattgctgcttggtgtctgtgcctcgtactagaaattatcaaatgccctgaaaggaaaaggcagcagcaaacacaaggctcaccttaatgcatttcctttctccctgaggtcttgacccatctagtgttgccttgcttggttgctctaagagaacttcaaacaagtgtgttttttagttaattcagtattttttttagtgggaatgttagtttgatacatcatgaccagaagcttaagtctttgaagt

SEQ ID NO: 741905 - DNA, 464 bp, Homo sapiens
actttattaaatttgtatctttataactttgctttgtagcccctaaaatttaatgactatatttgtaaacttcattagaagttgcctctacaattttgaaaaagaaaatgttagaggacgcacattgcccaattttaattcataatacatagcaatgtagtcaaaacagtgtgatwttatataaaaaaagatatataaacaatggaacagatcatagaatacagaagtaggttcacaaaaatatggttgactgacttatgacaaagttgcaaaggtaattgaatgcagaaaagacagttgataaaggtgtttgaacacttggacatctacatggaaaaaactgaacattgacttgtttttcatgctgtttataaaaattagctaaaaatgttcatagacataaatgtaaaacataaacctatgaatttttttaaaaacaaaaaagaaaaccttcatgaccctga

SEQ ID NO: 741906 - DNA, 555 bp, Homo sapiens
gtaattttttttatttttatttttttttttatttttttttttgagacggagtctcgctctgtcgcccaggctggagtgcagtggcgggatctcggctcactgcaagctccgcctcccgggttcacgccattctcctgcctcagcctcccaagtagctgggactacaggcgcccgccactacgcccggctaattttttgtatttttagtagagacggggtttcaccgttttagccaggatggtctcgatctcctgacctcgtgatcygcccgcctcggcctcccaaagtgctgggattacaggcgtgagccaccgcgcccggcgataacaagtaattttaagagtaaaacaaaaatggtgatttttactatgcattatatagtttatgacagcagaattgtatatattacagtatatatcacataatttttaaatttttttaagagagccaaactatttattcctcatttagtcaatacaagcactcagaccaaaggaaatatgctgcttaatagcccacatacaactccttgaaataaacaaatataaatattag

SEQ ID NO: 741907 - DNA, 555 bp, Homo sapiens
gtaattttttttatttttatttttttttttatttttttttttgagacggagtctcgctctgtcgcccaggctggagtgcagtggcgggatctcggctcactgcaagctccgcctcccgggttcacgccattctcctgcctcagcctcccaagtagctgggactacaggcgcccgccactacgcccggctaattttttgtatttttagtagagacggggtttcaccgttttagccaggatggtctcgatctcctgacctcgtgatctgccygcctcggcctcccaaagtgctgggattacaggcgtgagccaccgcgcccggcgataacaagtaattttaagagtaaaacaaaaatggtgatttttactatgcattatatagtttatgacagcagaattgtatatattacagtatatatcacataatttttaaatttttttaagagagccaaactatttattcctcatttagtcaatacaagcactcagaccaaaggaaatatgctgcttaatagcccacatacaactccttgaaataaacaaatataaatattag

SEQ ID NO: 741908 - DNA, 555 bp, Homo sapiens
gtaattttttttatttttatttttttttttatttttttttttgagacggagtctcgctctgtcgcccaggctggagtgcagtggcgggatctcggctcactgcaagctccgcctcccgggttcacgccattctcctgcctcagcctcccaagtagctgggactacaggcgcccgccactacgcccggctaattttttgtatttttagtagagacggggtttcaccgttttagccaggatggtctcgatctcctgacctcgtgatctgcccgcctcggcctcccaaagtgytgggattacaggcgtgagccaccgcgcccggcgataacaagtaattttaagagtaaaacaaaaatggtgatttttactatgcattatatagtttatgacagcagaattgtatatattacagtatatatcacataatttttaaatttttttaagagagccaaactatttattcctcatttagtcaatacaagcactcagaccaaaggaaatatgctgcttaatagcccacatacaactccttgaaataaacaaatataaatattag

SEQ ID NO: 741909 - DNA, 369 bp, Homo sapiens
atccaaatgaaagaagccagttttaaaaggcttctggaaaaggcaaaagctatagagagaataaaaaaatgtcagtgtttgccagggatttggagatcgaagaggaaaggcgaataggtgaatgaagcttaggggattttttagggcagtaaaactagtctgtaygatattgtgacagcggatacatgacaccctgcctttgtgaacaaaaaagaaacttatagcacaaaatgtgaaccttaatgtatgtaaacaaaaacaatcatttaggctgtcctgggatccaaagatggaatacagaatttgacaagataatttaaatgtattgcaaacctatgaaacaattttgctgaagaggatggaaaaaag

SEQ ID NO: 741910 - DNA, 619 bp, Homo sapiens
tctgtaaggctaaagccaaacatctttacgtagtattctacttcaaaccacaaagttacttctggtggaggtatgagttaacaattctgggcagggcacagtggctcacacttatattcccagcactttgggaggccgaggtgggctgatcagttgaggtcaggagttcgagactggcctggccaacatggtgatatgccatctctactaaaactacagaaaaaaaaaaaaaaagaaagaaagaaaagaraaaaagaaaattagccaagcgtggtggcgtgcacctataatcccagctacttaggaggctgaggcgggggaatcgtttgaacctaggaagcagaggttgcagtgagctgagatcatgccactgcactccagcctgggtgacagagcaagactccatctcaaacaacaaaaaaaattctgatactgccacacatgtacactggaagcggacaattacataaatggatgttgggagccagctttctcattgatgcagtgggaatttgcaaataagcaaggggaggaggctagagtgactcatgcggtgatggattagagttgacaatatcagtatgaactcatgtttagcttaatagggttacagatgctt

SEQ ID NO: 741911 - DNA, 619 bp, Homo sapiens
tctgtaaggctaaagccaaacatctttacgtagtattctacttcaaaccacaaagttacttctggtggaggtatgagttaacaattctgggcagggcacagtggctcacacttatattcccagcactttgggaggccgaggtgggctgatcagttgaggtcaggagttcgagactggcctggccaacatggtgatatgccatctctactaaaactacagaaaaaaaaaaaaaaagaaagaaagaaaagaaaaaaagaaaattagccaagcrtggtggcgtgcacctataatcccagctacttaggaggctgaggcgggggaatcgtttgaacctaggaagcagaggttgcagtgagctgagatcatgccactgcactccagcctgggtgacagagcaagactccatctcaaacaacaaaaaaaattctgatactgccacacatgtacactggaagcggacaattacataaatggatgttgggagccagctttctcattgatgcagtgggaatttgcaaataagcaaggggaggaggctagagtgactcatgcggtgatggattagagttgacaatatcagtatgaactcatgtttagcttaatagggttacagatgctt

SEQ ID NO: 741912 - DNA, 619 bp, Homo sapiens
tctgtaaggctaaagccaaacatctttacgtagtattctacttcaaaccacaaagttacttctggtggaggtatgagttaacaattctgggcagggcacagtggctcacacttatattcccagcactttgggaggccgaggtgggctgatcagttgaggtcaggagttcgagactggcctggccaacatggtgatatgccatctctactaaaactacagaaaaaaaaaaaaaaagaaagaaagaaaagaaaaaaagaaaattagccaagcgtggtggcgtgcacctataatcccagctacttaggaggctgaggcgggggaatcgtttgaacctaggaagcagaggttgcagtgagctgagatcatgccactgcactccagcctgggtgacagagyaagactccatctcaaacaacaaaaaaaattctgatactgccacacatgtacactggaagcggacaattacataaatggatgttgggagccagctttctcattgatgcagtgggaatttgcaaataagcaaggggaggaggctagagtgactcatgcggtgatggattagagttgacaatatcagtatgaactcatgtttagcttaatagggttacagatgctt

SEQ ID NO: 741913 - DNA, 619 bp, Homo sapiens
tctgtaaggctaaagccaaacatctttacgtagtattctacttcaaaccacaaagttacttctggtggaggtatgagttaacaattctgggcagggcacagtggctcacacttatattcccagcactttgggaggccgaggtgggctgatcagttgaggtcaggagttcgagactggcctggccaacatggtgatatgccatctctactaaaactacagaaaaaaaaaaaaaaagaaagaaagaaaagaaaaaaagaaaattagccaagcgtggtggcgtgcacctataatcccagctacttaggaggctgaggcgggggaatcgtttgaacctaggaagcagaggttgcagtgagctgagatcatgccactgcactccagcctgggtgacagagcaaractccatctcaaacaacaaaaaaaattctgatactgccacacatgtacactggaagcggacaattacataaatggatgttgggagccagctttctcattgatgcagtgggaatttgcaaataagcaaggggaggaggctagagtgactcatgcggtgatggattagagttgacaatatcagtatgaactcatgtttagcttaatagggttacagatgctt

SEQ ID NO: 741914 - DNA, 587 bp, Homo sapiens
ttttatgtttcttgaatttggaatagatttatgaaaaaaatctgtgggaaaaacaatttgttaggtgggacagaaatttaatctcccaaagtaagaaagctgagcactcacctactttttacatgtatataatttaatctgaggcaaataatgataaaatctttacataaatatcttcttgtggcagctacattactgtgaccatcccagaaggccacataactytaatttatagacataggtggtcacacagtctggtcctgacgattgagaagaagcagctgcctccagtaggttcttaattgatatgaatgttgattttttcctcatgatctgtatcaatttctatatcagtaattgttgttagtataaacttgattgatacataactatgttgctgcccaaacgtgttcagatgttactgttatgtgtaatttgtaaggaaatatatttatttatatttgcaattgataaaggtaaaaatattatggctagagggcagaccccttgtttaaataatacaactgagtatttacttgtacaactacccatttagtagaatgtttataggaggccagttacatgct

SEQ ID NO: 741915 - DNA, 587 bp, Homo sapiens
ttttatgtttcttgaatttggaatagatttatgaaaaaaatctgtgggaaaaacaatttgttaggtgggacagaaatttaatctcccaaagtaagaaagctgagcactcacctactttttacatgtatataatttaatctgaggcaaataatgataaaatctttacataaatatcttcttgtggcagctacattactgtgaccatcccagaaggccacataactctaatttatagacataggtggtcacacagtctggtcctgacgattgagaagaagcagctgcctccagtaggttyttaattgatatgaatgttgattttttcctcatgatctgtatcaatttctatatcagtaattgttgttagtataaacttgattgatacataactatgttgctgcccaaacgtgttcagatgttactgttatgtgtaatttgtaaggaaatatatttatttatatttgcaattgataaaggtaaaaatattatggctagagggcagaccccttgtttaaataatacaactgagtatttacttgtacaactacccatttagtagaatgtttataggaggccagttacatgct

SEQ ID NO: 741916 - DNA, 670 bp, Homo sapiens
aatccagtagagttcagaaattggttgtctgctggtatattctcatctattttttttcacagtcagagttaaatctgtctctactgtattaatctaagctacccttggatggtactgattttcttttttaaaatgtttatgggatctgtcttaccaatagaaaatatactctctcatttccattttttctcaccaaataaagttctattactaataatttatttttcataatcagaataasaatttcttgttgaataaaatttggaaagtgcagaaaaacatatagaaacatgaaaaaaatgactcatttgcttcaaagaaaaactgcaccagagaagttatacaggaaagaaagactttactaaaaactattgcaccaagggagaatgattgagctcaattctactgaacaaaaagtaggagagtttctaagtgctggggtgagctagggggaaagtacgtagcactttaggagggactttcatcaaggtgattaagccatgggcatttgctaattgtcctttataggctcctgtgctccacaaaaactgggaaatatgtgggctatgttcttccctgtttagatttcaaagggatgactcccaggtcataaagacattcctgggttgtaaaactggccagaggctgggagaagatatacatctcaaag

SEQ ID NO: 741917 - DNA, 552 bp, Homo sapiens
ataaattaacatttaaaaatccattttcatcactcaaactaattacagatttttttttaccacataacacaaattttatctggctgatcttgtctctcaattcttactatatagtatagctttactagaagcataatttcctggatagaagcttccatttctggcagggcatggtggctcacgcctgtaaacccagcactttgggagggtgaggcaggtggatcacctgaggtcaggagttygagaccagcctgggcaacatagcgaaaccctgtctccactaaaaatagaaaaaattagccaggcgtggtggtgagcgcctgtagtcccagctacttgggaggctgaggcacaagaactgcttgaactcaggaggcggaggttgcagtgatctgagatcacaccactgcactatagcctgggcaaaaaaaaagaaggttctattaaaaaaagaaggttcattaaaaaaaaaaagcaaagaagaaggttctatttctgtaggtttcttatgggcctctggaaggtctatgcctagttttcatagaggactca

SEQ ID NO: 741918 - DNA, 552 bp, Homo sapiens
ataaattaacatttaaaaatccattttcatcactcaaactaattacagatttttttttaccacataacacaaattttatctggctgatcttgtctctcaattcttactatatagtatagctttactagaagcataatttcctggatagaagcttccatttctggcagggcatggtggctcacgcctgtaaacccagcactttgggagggtgaggcaggtggatcacctgaggtcaggagttcgagaccagcctgggcaacatagcgaaaccctgtctccactaaaaatagaaaaaattagccaggcgtggtggtgagcgcctgtagtcccagctacttgggaggctgaggcacaagaactgcttgaactcaggaggcggaggttgcagtgatctgagatcacaccactgcaytatagcctgggcaaaaaaaaagaaggttctattaaaaaaagaaggttcattaaaaaaaaaaagcaaagaagaaggttctatttctgtaggtttcttatgggcctctggaaggtctatgcctagttttcatagaggactca

SEQ ID NO: 741919 - DNA, 494 bp, Homo sapiens
atgcagtatctgaggcaaccacctgaactcgtttcatcagaatctgcattttaaaaagatccccagattctttgcatgcacagttaaaatttgagaatcacagccctagtaggcccatttttttctagccactgtgagatatattctagtagatatttagcagcgtgatcatgagcaatgtgtttaatctccttgagcatggtatctcatctaaaaaggtttattttatatacactcagactcacacctgcatatacatatatcttgcagtgatrtgtcgaagatcaattttaatatatatatataaggggtctagcacaattattggtttattaatggtagttatgactaagatgataatgatggtcataataataacataaagatatggaactaaaagaaaacaaagagacacaaatagagacactgctacacaaacagatagatggacaaccacagtagaaaaatgtaagagagatcagatatagaggttt

SEQ ID NO: 741920 - DNA, 570 bp, Homo sapiens
actgaatagtagtgaccaaaacgttgatagaaatatggacagtaaaggtcaggctcaaaagttttcagatgaaaatgaagaagtcattgggaactggagtaaagaacacccatgttatgcccaagcaaagaacttggctgcattgtgtccatggcttaggggtttgtagaaaggtaaacttaacagtgatgacctagggtaaatggtggaaaaatctgtaaacagcamatcattgctgtagcaatgatgtgctgtagctgcttcgaacagcctatgatcaaatacaggagcaaggaaatgccttaaagttggaacttgtaattaaaagggaagcagagcattaaaagtttgggaaatttgcagcctggtttggccatatggtagaaagggagaaaacatttttaggagaggaatacaagaagggcgtggagaaaccacttgctagagaggtttgtgtgactaaatgggagtcaactgctaatagtcaagacaatgggaaaaaggcctcaaaggcatttcagacatctctgggtcagccccctcccattacaggccctaaggcctagcaga

SEQ ID NO: 741921 - DNA, 574 bp, Homo sapiens
tagtactgtatgccaaactacatgagtttgtcttcgaaatattcattcactttagttataaatgtttactaaggaaaggcccaaggacagaacgctgtcaagcatattgactctggctttgctctgggccagtgattttttttttttttttaagacagagtctcgctctgttgcccaggctgaagtgcagcagtgcaatctcggctcactgcaagctccgcytcctgggttcatgccattctcctgcctcagcctccagagtagctgggaatacaggcacccaccaccacgcctggctaattttttgtatttttagtagagacggggtttcaccatgttagccaagatggtctcgatctcctgacctcgtaatctgcccgcctcggcctcccaaagtgctgggatcacaggcgtgagccaccgcgcccggccgtgatatttttttttaaccttttatgtaattgtggattcacatgcagttgtaagaaatcatacagagagatctctagaccagtgactctgtttcaaacaatggtcatatcctatgttgagtacaatattacaatcaagaaac

SEQ ID NO: 741922 - DNA, 472 bp, Homo sapiens
aaacaaaaaaagatttaaagttgctcactctgaatgaagacattttagttccaaaatatggagaagagtttcataattattgaacctgaaggttacagatttgggctgatgaaaaagaatctctaagaacagagtatggtcaaataaaaacaaaaytgactgactttcacaagtcttcattctctttatgtttttctgaattcaaggtttcaaacactggggcaatatggctccccaccccccacctcccacacctcttccctctccccttcactcagctgcccaagggctggaggcattttttaattgaataattaaagattctaaagaagtctgatatcgattttttaacagcttccagcagccaggctttctcaccttacaagtagcctctggcttgacaaatatcagtctatgtggagcaagagagctcaactatagaaggttatcagatgtggcttaaatgctgcct

SEQ ID NO: 741923 - DNA, 528 bp, Homo sapiens
aaacaaaaatgaatttttccttgctgccatctgttgttttatagaaggatagctaatttcctaccagctgattccagtaactatgatttgttaggaataaaataaataagacgaagttaccttgaaaggaaaatattctcgataaggaaatattttgatggcaagttaattctaagagtttaggggtatttgttttccaaaataaataataaaggagacatttcctcccccttttctctttccaaattgctgtgggcaagggccctgataaatgccgtgaagacacaaaatgtgtaagtacagggttcctattctcaatcaattcataaactacgaagatagacayagaaatagctgtagtacaaaggtagtgtgcagtataagacagaaagataacctaatagcaggaatgtagagcacgaaatgaaaaggacgtgggtgcaaatcctggctttggcacaacataggtgcatgatcttgagcaaatttcttaatctttccaagtctcgctttcctcgtgaataaaat

SEQ ID NO: 741924 - DNA, 629 bp, Homo sapiens
ttctaaaatgtgtgcgttatatcttaatcagactctaaatagttgcccgtatcagcaatatattttaaattaataaactttattattatttatttatttatttttgagagaaagtcttgctttgtcaccgaggctggagtgcaatggcatgatcatggctcactgcagccttgaatgactgggttcaagctgttggcctatttctgcttccccagtaactgggattatasgtgtgcaccaccatgcccagctaaatttttttttttaagtagagatgaggtcttgctatattgcccaggcagaactttattttttagagcagtttcaggttcgcagcaaaattgagtggaaaagtacagcgatttcccatatccccccattcctatgcatgcctaatctttccagcagcaatatttttaaagagataactaactttatttaattgtgcctattttttcctattgcaataatttattcaaatcttatttttttacattctttcttggctctacttggataattttttctcatctcttagagtatgaagatatttcccttaattttagtcatttgcattaaagttaagaatctctgaataaaactttggctattctcatggatatttggta

SEQ ID NO: 741925 - DNA, 629 bp, Homo sapiens
ttctaaaatgtgtgcgttatatcttaatcagactctaaatagttgcccgtatcagcaatatattttaaattaataaactttattattatttatttatttatttttgagagaaagtcttgctttgtcaccgaggctggagtgcaatggcatgatcatggctcactgcagccttgaatgactgggttcaagctgttggcctatttctgcttccccagtaactgggattatacgtgtgcaccaccatgcccagctaaatttttttttttaagtagagatgaggtcttgctatattgcccaggcagaactttattttttagagcagtttcaggttcrcagcaaaattgagtggaaaagtacagcgatttcccatatccccccattcctatgcatgcctaatctttccagcagcaatatttttaaagagataactaactttatttaattgtgcctattttttcctattgcaataatttattcaaatcttatttttttacattctttcttggctctacttggataattttttctcatctcttagagtatgaagatatttcccttaattttagtcatttgcattaaagttaagaatctctgaataaaactttggctattctcatggatatttggta

SEQ ID NO: 741926 - DNA, 631 bp, Homo sapiens
tatgtgtctgtgtgtgtttgtgaggttcaaataaggttaatatagttttcttggccaaagtaagtagacatatgttaaggtttcttaacaaactcttcttccctcttctccctctctcctttcttttttttttctttctttaagactgtgaagtatgggtatatcaaacaaatctcatgtgaaattttggaagaaagcagacataccatcacaggcaaattgttcccttgcttcatggcatcaattagaaaattatggcaagggctgggcgcagtggctcacacctgtaattccagcactttgggaggctgaggcaggtggatcacttgaggttaggagtttgagacyagcctggacaacatggtgaaaccccatgtctactaaaaatacaaaaattagccaggtgtggtggtaggcgcctgtaattccagctactggggaggctgaggcaggagaatcacttgaacctgggaggctgaggttgcagtgagccaagatcgcaccattgcactccagcctgggtgacagagtgagatcccgtctcaaagaaaagaaaagaaaagaaaaatatggcaagaacttgtttcaggtatattagcatataaactcatcatttatatgctaatacatg

SEQ ID NO: 741927 - DNA, 625 bp, Homo sapiens
tggtatgtttgtattaaggtctattttgtctggcattagtgtagccactccagctttcttttggttgctctttgcatggtgtatcttttcctgccttgtactttcaacctctttgtaactttgtatctaaggtttgtctccagcagagaatatatagttgcatcatttttattttatccattctgctaacctgtctaaattgaaatgtaatgtatttatatttagtgtgattactgtaacatatttttatgtctgccatttcattgtttattttctatttttcttatatcttttttgttcctctattcctctattactgcyttttgttgtgttaaatagacattttctatgtatcattttaattcacttatcatttcttttactctacatttttagttcctctacttttttgtcttagtgactaccctacagattaaaattagcatattaataatctagtttgtattaataccgacttaatttcaatagtatacaaacactttatttctatacagctctgttccctatccccgtgctgttattgtcatacaaattataccattcttacatgtgtgcctatcaacacagatttataaatattgtttgctgaagttttaaattaaat

SEQ ID NO: 741928 - DNA, 625 bp, Homo sapiens
tggtatgtttgtattaaggtctattttgtctggcattagtgtagccactccagctttcttttggttgctctttgcatggtgtatcttttcctgccttgtactttcaacctctttgtaactttgtatctaaggtttgtctccagcagagaatatatagttgcatcatttttattttatccattctgctaacctgtctaaattgaaatgtaatgtatttatatttagtgtgattactgtaacatatttttatgtctgccatttcattgtttattttctatttttcttatatcttttttgttcctctattcctctattactgccttttgttgtgttaaatagacattttctatgtatcattttaattcacttatcatttcttttactctacatttttagttcctctacttttttgtcttagtgactaccctacagattaaaattagcatattaataatctagtttgtattaataccracttaatttcaatagtatacaaacactttatttctatacagctctgttccctatccccgtgctgttattgtcatacaaattataccattcttacatgtgtgcctatcaacacagatttataaatattgtttgctgaagttttaaattaaat

SEQ ID NO: 741929 - DNA, 607 bp, Homo sapiens
ctgatgattagtaatgttgagcattctttcatgtacctgttgaccatttatatgtcttcttttctttctcttgctctctctcatttttcttttctcaatgaagagaacaaatgcctgtcttcttttgggaaatgtctgttcatgttctttgctcattttaaaaatggggttattaattaattaattaattaatttaattatttatttttgagactagatcttgcccaggttagtgtgcagtggtcccatagttcactgcagcatcaaattcctgggttcaagctatccttttgcctcagtccttcagctgggactacaggctcatgtcaccataccaggctatttggttctttttaattttagtaagagactgargtctagctatgcttcctgggctgatcttgaactcctggactcaagagatcctcctgctgtaggcccccaaagtgctgacattacaggcattagccaccacacctggccaggattatttatttttttactatgaagatgtttgatttccttgtatattctggatattcatcccctgttggatgagtagcttgcatatattttctcccatttaagaggttttctcttcaccctg

SEQ ID NO: 741930 - DNA, 562 bp, Homo sapiens
gataattcttgtcatcacagctttctccaaaccttctccatcggcattttactctcactcttagagcttagcttcaaccatcaaacagacagttgagtgttcaacagtccctttatgggacagatttttttagttgactgtgtattctaaccctgagcaayggggcccctggctaagagagagaagggaaagcagagagggaagtgttgcaatgctaccttttcagagaggaaatagagacaaatagtttttatgggtgtaatacacagcctccactgtcccacaataagagcaattgagcttaaataccaaaaagggcttttctatgtgagctgaaaacagaaagagagagcaaatgggaggatgggctggagtaatcttgtttgaagttctctcatcctaaggaagaaccttttcttcctctgtcatacacgagtgcttagggcttacataagccccatctgcacgctgctaggagcagatcatcctactcaagacaataaaaaaggaatcatcatgtaccttacatatttagagatacgtgcgtacacttttctcataa

SEQ ID NO: 741931 - DNA, 562 bp, Homo sapiens
gataattcttgtcatcacagctttctccaaaccttctccatcggcattttactctcactcttagagcttagcttcaaccatcaaacagacagttgagtgttcaacagtccctttatgggacagatttttttagttgactgtgtattctaaccctgagcaatggggcccctrgctaagagagagaagggaaagcagagagggaagtgttgcaatgctaccttttcagagaggaaatagagacaaatagtttttatgggtgtaatacacagcctccactgtcccacaataagagcaattgagcttaaataccaaaaagggcttttctatgtgagctgaaaacagaaagagagagcaaatgggaggatgggctggagtaatcttgtttgaagttctctcatcctaaggaagaaccttttcttcctctgtcatacacgagtgcttagggcttacataagccccatctgcacgctgctaggagcagatcatcctactcaagacaataaaaaaggaatcatcatgtaccttacatatttagagatacgtgcgtacacttttctcataa

SEQ ID NO: 741932 - DNA, 562 bp, Homo sapiens
gataattcttgtcatcacagctttctccaaaccttctccatcggcattttactctcactcttagagcttagcttcaaccatcaaacagacagttgagtgttcaacagtccctttatgggacagatttttttagttgactgtgtattctaaccctgagcaatggggcccctggctaagagagagaagggaragcagagagggaagtgttgcaatgctaccttttcagagaggaaatagagacaaatagtttttatgggtgtaatacacagcctccactgtcccacaataagagcaattgagcttaaataccaaaaagggcttttctatgtgagctgaaaacagaaagagagagcaaatgggaggatgggctggagtaatcttgtttgaagttctctcatcctaaggaagaaccttttcttcctctgtcatacacgagtgcttagggcttacataagccccatctgcacgctgctaggagcagatcatcctactcaagacaataaaaaaggaatcatcatgtaccttacatatttagagatacgtgcgtacacttttctcataa

SEQ ID NO: 741933 - DNA, 562 bp, Homo sapiens
gataattcttgtcatcacagctttctccaaaccttctccatcggcattttactctcactcttagagcttagcttcaaccatcaaacagacagttgagtgttcaacagtccctttatgggacagatttttttagttgactgtgtattctaaccctgagcaatggggcccctggctaagagagagaagggaaagcagagagggaagtgttgcaatrctaccttttcagagaggaaatagagacaaatagtttttatgggtgtaatacacagcctccactgtcccacaataagagcaattgagcttaaataccaaaaagggcttttctatgtgagctgaaaacagaaagagagagcaaatgggaggatgggctggagtaatcttgtttgaagttctctcatcctaaggaagaaccttttcttcctctgtcatacacgagtgcttagggcttacataagccccatctgcacgctgctaggagcagatcatcctactcaagacaataaaaaaggaatcatcatgtaccttacatatttagagatacgtgcgtacacttttctcataa

SEQ ID NO: 741934 - DNA, 643 bp, Homo sapiens
tcttataggtgctccattacctacaagatgaagacccttctcaaactgtcctcagggtatttctttttctttttttcttttctttttttttttttttgaggtagagtctcactctgttacccaagctggagtgcagtggtgcaatctcagctcactgcaacctctgtctcccaggttcaagcaattctcctgcctcaccctcctgagtagctggaattacaggcaccccccaccatgcccggctaattttattatttttagtagagaccgggtttcaccatgttggccaggctggtctygaacttctgacctcaggtgctccgcctgccttggcctcccaaagtgctgggattacaggcatgagccaccgcacctggcctattttaaccatataatagctcctcctgaaaatgatcaatgcttaagtcacagaaaactgttgtcgcatgtttactcctccctgcctttgcacaaactattctctgtgctggacctgccttcctccaccaaccagtcaaaattctacctgtccttccagggtccagattaaatgtcacctcttctgtgaagcattttcaatcccagcccccaatatgctggccaccctgtccctgcagtgcataccacattccgccctgtgtca

SEQ ID NO: 741935 - DNA, 524 bp, Homo sapiens
gataacaaataaaagtgaataaagtggataaccctgactctagggagaggtactgttattgggactagagtctaataatgaggcaaacacagattcgacaaaaacttactaaagtgtcctttaaaaatgacacaaatccagttgttctaaattgtctaaaatgctgactttgaggtaaagttgtatctgtcatgttctttggagcatgacaagttcaggtaggtgttgggggatattcttcattaaatacatgtttataggacacctgatgtgacttaggcactgtgtgctgctctgggagcacagaagagcaggacatgmtccccttcctcaaggactgtgctgtcctgtgcagtagccacaagccacctgtagctattaagccaaaaaaaactctaagtataaaatgccctgggatttgaagacttaattaaatgtatatacataatctcagtaatttctatattaattaatgttcagtttgcaattttttgtatatttgcggtttaaaatatgtattagat

SEQ ID NO: 741936 - DNA, 585 bp, Homo sapiens
gatccaaggtagatcctgtgggctctagtgccatgtggaggtagcagagggttgagaggagagggttctggtgtttctaagatctcaggaacacagaagtggccagtgagtgcccacctcccaaaagaggtgatctcagtctagaatgaatccccagcagagagctctaaggacctagacttttgtaaatttagaaactcccttttctcttaccaatgtctaatttttaagactatgactttgatatagctgtcaatattctgttttggaatattgtttgcttttggtcttctgtgataaaaatccaaattttcccctgggtgaataggcataaggtcacatctaaagaagtgcaaaaggaaaacattaagacctctagtaaattaatgtttttataataacatatatctccatatgcttcacrgaaacatgtaacttctgtctatacaagctttgggtatttcatttataatgaaatggcgcattaacgtgtttttctaaatcaaaagtcaatttcctccttgagattaattacatctccagaatatgaaagcagcttctgacactatgtatttgaaatagcaa

SEQ ID NO: 741937 - DNA, 651 bp, Homo sapiens
ctgcctttggcaatagtcattctaacagttgtgagatggtatctcactgtggttttaattttcatttctctgattagctatgtcgagcatttttttcatatgcctgttggccatttgtatgtcaacttttgagaaatgtcttttcaaatcctttgctcattttaaaatcaggctgttttcttgctattgagttgtttggattcctataccccttatcaagcatatggtttgcaaatgttttgtcccattccatatgttgtctcttcactctattgattgtttctttggctgtaagaaaaacaaggtttttagtttgatataatcccatttgtctatttttgcttttgttgcctgtrcttttgggattatatcaaaaaattattgcccaaactaatgtcatggagcttttcttctatgttttcttctagtagttttacagtttcaggtcttatgtgtaagcctttattctgagttgatttttgcatatggtgtgagatgacagtctagtttcattcttctacatgtggatattcagttgtcccaataccatttattgaagcgactatgctttacccattgttggttcttggcacctttgttgaaaatcaattgaccatgaatgtgtggatttgtttctgggctattttgtca

SEQ ID NO: 741938 - DNA, 617 bp, Homo sapiens
aatagcattttaaaattaaagcatgattatatttattttattcccttgagaaattatattaacaccacaaaatcaccttttccatgactatttgatctgattatgcaagttgtttaaaagaatatcaatcttcctaatatattctattttaaaatactgacataaacctatataagaactatataatgtttacacaatatttcaaaaatattaattgaacttttcttaaaattatcagttagtgatggtgggaaaaaacaaatacttagacatttctactgtagagaacatgcattacattcctgtaatcattattctgttaatgtttattcaaacrtaattagcccaatttgtatatatttttaaagaacaaattcaggcacatttattcatctttaatcaagaaagctatttactcatttttatcccacgtaaaagaaaaacagaacttctttttgaatatttcttgataatttgtgctaacatataatcttacctttagagtcaataagtgtgaaatgcatcaaattataaagttttaaatatgtctaattatgtatggtttatattttattgtatgatatttcaactataggagagctgcacaaatacttata

SEQ ID NO: 741939 - DNA, 545 bp, Homo sapiens
tttgccttgtctcacataattcaattgcagtcatcgatcagaaagacattattttaaaaatatctcctgcttttctattttttttttttttaactaagcacggattttaggatccttggcattgcaattgtcgatgtaatctactttacaggagagcccgccatctctcaccctcaaagacaacagtgaaacaaagaccctgtacctttcccccttaggaatctgggtgaaaatttccctgcaatatggggccagccacagggtaaacataaattaaaatacatacacacaaaacaaaggacatgttgtgcaaaaacatgtctgtacaaatagatacacaaaaactgcctttaaatggctgcacttaracagaaggtcatgggagtgggggatgaggataaaaggggatacataaatacataaaaagaatgtatttgcatggaacaatgaatgtgccaagaaataacttgacactgtgccaagattaattcaactctggtcaccaagagcactacaaaggaggtaaaaaagaaggaaaaaaaaat

SEQ ID NO: 741940 - DNA, 634 bp, Homo sapiens
atgcaaaaagagctgttcatcctgatcatccactaactcagcagatgctaaaagttagcacactacatgatttaattattttctgaagaaaataggttttgtgaggctgtagtcatgttgttacctgccacatctgaaaccacatgaaccaggctcagaaacctgcagcaaggacccatcatgagtaaagaaagatattaatctatcataggatgattagactgcaaatcagtcttgttataattaacaccatacmctatataaattaacaggttacaataattatcctcagattaaaatcgtttctcatttttagtaaaaatttacagtgtaaaataaattgtactatcattatagaaaacgtctttattggggccaggtgtggtggctcatgcctgtgatcccagcactttgggaggccgaggcaggcggatcacgaggtcagaagatggagaccatcctagctaacacggtgaaactccgttttttcttaaaaaaaaaaaaaaaaaaaaaaaattagccgggcatggtggcggacgcctgtagtcccagctactccagagactgaggcaggaaaatggcgtgaacccgggagctggagcttgcagtgagccgagatagcgccacagcactc

SEQ ID NO: 741941 - DNA, 634 bp, Homo sapiens
atgcaaaaagagctgttcatcctgatcatccactaactcagcagatgctaaaagttagcacactacatgatttaattattttctgaagaaaataggttttgtgaggctgtagtcatgttgttacctgccacatctgaaaccacatgaaccaggctcagaaacctgcagcaaggacccatcatgagtaaagaaagatattaatctatcataggatgattagactgcaaatcagtcttgttataattaacaccataccctatataaattaacaggttacaataattatcctcagattaaaatcgtttctcatttttagtaaaaatttacagtgtaaaataaattgtactatcattatagaaaacgtctttattggggccaggtgtggtggctcatgcctgtgatcccagcactttgggaggccgaggcaggcggatcacgaggtcagaagatsgagaccatcctagctaacacggtgaaactccgttttttcttaaaaaaaaaaaaaaaaaaaaaaaattagccgggcatggtggcggacgcctgtagtcccagctactccagagactgaggcaggaaaatggcgtgaacccgggagctggagcttgcagtgagccgagatagcgccacagcactc

SEQ ID NO: 741942 - DNA, 596 bp, Homo sapiens
gaagcttgtgatgagaatgttctcatcacaatctgggcgtaaggcacgcctagatctgtctgcattattttatacaactgcatatgaatctaaaaatatcaaaaataaaaagcttaattaaaaaaatcaagatgtcttcagactggcaaaggctaagtatggtaaggtaatctgccagtaaaatgtagagaaataaggattcattcatggaraaacactggcaatatttttttaattaaaaatgcacataaagtcagatacaaccattctatttccaggaatttatttcacagatatacgcatagctgtgtgaaatgttgtgattatgagaatatttgtctcagcattgttttgttgttgctggtatttacagtgaatattggaaactaaatgtccctgaaatgggcctgattacatttaagaaaaaacattaaacccttcaatataatatggcagccttttatatattcacatggagagatgtccaaaatgttaaagcaaaatgcaaaactgtgtgaagtgtatggtattagaagaaacaagctgatataaagcgacttttgatctgacacaattgattagtcgcaggctcttgg

SEQ ID NO: 741943 - DNA, 485 bp, Homo sapiens
aacttgattggattgaaggatgcaaagcattgttcctgggtgtgtctgtgagggtgttgccaaaggagattaacatttgagtcagtgaactgggtgatgcagacccaccctcagtctgggtaggcaccatctaatcagctgccagtgaagccaggataaaagcaggcagaggascatggaaagactagactgactgagtcttctggcctccatctttctcccatgctggatgcttcctgcccttgaaagcttttggactcctggacctataccagtggtttgccaggagctctagggccctttggccacagactgaaagctgaactgttggcttccctactttgggggttttggtactcggactggcttccttgctcctcagcttgcagacggcctattgtgggacttcaccttgtgatggtgtgagtcaatactctctttcctatgcatctatcctattagtctcctgtcactctagagaaccc

SEQ ID NO: 741944 - DNA, 664 bp, Homo sapiens
aaagtaatcaaccgattcaagaatttctgtcaaatctctagaggatagttaatgaaaaatctcaataatcctattgcttgatcttgttattgactaaactgacattttaataccatcaaattgatcaaaaccttagccacagagtcaaatttaacactgaggaagccatctcacacacacacacayacacacacacacacacacacacacacacacacacccctgcatctaatctaaatctacatagatataatttgtttaatgtgcctcaaggattcaaaaataaaaatacaagaaataaatattatatataactttcactcatgagctttcatataaaaataaaatattggtttagtagcgataatgaaatggataatgccaccaggcacacctaaaatgatgaatgatcataaaattagggattaacttttcataggatctgcagttgaaaaataaacttcagtgtacatgtatcattcctcatgtaatagataaattcattttatggtctgttaaataagggtaccttataagcctttcccctgcctcataaaagatctaggatttatctcatagagtaaataaagaaaatttagtctaagcaatataatttaactgcaaaagtaaagtgtggctcattcagtatttgaaggaaatattt

SEQ ID NO: 741945 - DNA, 559 bp, Homo sapiens
accccccaccccctgactggccccagtgtgtgttattcccctccctgtgcccatgtgttctattgttcagctcccacttataagtgagaacatgtggtggttggttttctgttcctgcattagtttgctgaggataacagcttccaactccatccatgtccctgaaaaggacaggatctcattcctttttattgctgcatagtattccatggtgtttatgttccacattctctttttccagtctatcactgatgagcatttgggttgattccatgtctttgctattgtgaatagtgctgtaataaacatacatgtgcatgtatctttgtaatagaatgatttctattcctttgggtctatatgcagtaatgatatttctggttctaaatccttgaggaatcaccacactgtcttccacagtggttgaattagttgacattcccaccaacagtgtaaaagcgttcttatttctctacaacctcactagyatgttgtttgactttttaataatcaccattgtgacatgagatggtatctcattgtgattttgatatgcacg

SEQ ID NO: 741946 - DNA, 671 bp, Homo sapiens
gctaaaaacatgatttcattcttttttatggctgagtagtattccatggtgtgtgtatatcatatgtatttatgtcacatgtatatatcactatatttcatatatatacatatacatatacacaccacattttctttmtccagtcctctgttgatagctacttaagttgattccttatctttgctactgtaaatagtgctgtgataaacaaggtgcaggtatcttttttatataatgatttatttctctttgggtatatacccagaggttaaattgccggatcaaatggtagttatattttctgttatttgaaaaatctccattctgttttccataaatgtttcactaatttgcattcccaccagtagtgtataagtgttcccttttctccacatcgttgccaacatcttttgtttttagactttttaatgatagcaattctgactagtataagatggtatctcattgtggtctctgatgattagtgatgctaaggatttgtcaatatgttttttggcagcttatatgtcttcttttgaaaaaatgttcacatcttttgcttactttttaatagagttttttgtttatctcttgttgatttgtttgagatcctcgtaaattctagatattagccctttgtcagatgcatagtttggaagtttcttcccatt

SEQ ID NO: 741947 - DNA, 671 bp, Homo sapiens
gctaaaaacatgatttcattcttttttatggctgagtagtattccatggtgtgtgtatatcatatgtatttatgtcacatgtatatatcactatatttcatatatatacatatacatatacacaccacattttctttatccagtcctctgttgatagctacttaagttgattccttatctttgctactgtaaatagtgctgtgataaacaaggtgcaggtatcttttttatataatgatttatttctctttgggtatatacccagaggttaaattgccggatcaaatggtagttatattttctgttatttgaaaaatctccattctgttttccataaatgtttcactaatttgcattcccaccagtagygtataagtgttcccttttctccacatcgttgccaacatcttttgtttttagactttttaatgatagcaattctgactagtataagatggtatctcattgtggtctctgatgattagtgatgctaaggatttgtcaatatgttttttggcagcttatatgtcttcttttgaaaaaatgttcacatcttttgcttactttttaatagagttttttgtttatctcttgttgatttgtttgagatcctcgtaaattctagatattagccctttgtcagatgcatagtttggaagtttcttcccatt

SEQ ID NO: 741948 - DNA, 617 bp, Homo sapiens
gaagggaaaaggattttttaaaaagacagtatagaagcattgaacaaatttcacaatgttaaataagctacccatcagcttagtgagcttgcctttattcgtctataataaaaatcaccctcatgtttcccatttatagctaaactcagttaattacagcattgtttgtggttgcttctgggcagagtcaatacaggtaaytagatcctttacagtctttagaaagttactttcattccctgtgaaatatcaatatctggtgcagtgtgcattagtaaggagatccagtgagtaataatatgatcctaaggttggtgaagtgaaaaacagaggcaattagaaagataactcaggcagagtttcttgcccctgaataaccaagagcaatcatttttgtcagacttatttagaaaaagatctcaattctgaggtttagcaaagccaggagcattagagaatcatactctcttggaggtggataaacccttagaagttgtcaaattttgtcctagtagtgaaagcttttgttcagatcaatttaaaaatagaagcttggtacagtaacttttgggtagcatgacaaagtacagttgacccttgaacaacacaagtttaaa

SEQ ID NO: 741949 - DNA, 604 bp, Homo sapiens
cataagcaaattcatgtcacaggggtttgttgtatagattatttcatcatccaggtattaagtacagtatctaacagttatcttttctgctcctctccatcctcctactctccgccctcaagtagaccccagtgtctgatgttaccttctttgtattcatgagttctcatgatttatctcctactcataactgagaacatgcgatatgtggttttctgtttctgcattaggttactaaggctaatagcctctagttccatctatgttcccacacacacacacaaaaacatgatcttgtccttttttatggctgcatagtatttcatggtgtatatgtaccacattttcttttacctgtgtgtcactgatgggcatttaggttgattccatgtctttgttattgtgaatagtgccrcaatgaacattcacatgcacgtgtcttcatggcagactgatttatatgcctctggttatatacccagtaatgggattgatgggtcaaatggtagttccacttttagctctttgaggaattgccatactgctttccacaatggttgaactaattttcactcccaccagtagtgtataagtgttccttttt

SEQ ID NO: 741950 - DNA, 602 bp, Homo sapiens
catatcaacaatgaataatctgaaaaagaaatcaagaaagcaatcccatttacagtagctacaaaaaaataagatacctaggaataaatttaaccagatatgaaagacctctacaaggaaaaccagaaaacattgatgcaagaaattgaaaatgacaccaaaaatagaaagatatttatgttcatgggttggaagaatcaatattgttaaaatgtctatactaccctaacaatctatagattcaatgcaattcctatcaaaacaccagtgacgttattcatagaaatagaaaaaaaaatcctaaaatttatatggaactacaaaaaacctagagtagcraaagacatccaaagcaaaaagaacaaaactggaagaatcatattacctgactttaaattacactacagagctatagtaaccaaatcagcatgttactggcataaaaatagacacagagaccaatggaacagaataaagaactgagaaatccatgtatcagtgagctaatttttggcaaagattttaaggatatacgttgaggaaaggacagtctcttcaatacattttactgggaaaactggacatccatatgcagaagaatg

SEQ ID NO: 741951 - DNA, 531 bp, Homo sapiens
tgagacaaatacaagttcacaatatcaattttgaaattgatactaaagaaatttgcaatagcagacattattttaaggatcatcaaactattataattcctggcctttgctttcttcatgtgttcaagaagacaggggatggagtggaattgtaaagattactgaactaagttcctttcctgctggagagattacactaaagacaaagaggaaaatagctgctgatcrctgtggaattatgagtgtgtagcaggggaatttctctagaagacagccttctggtgagctcttcctttacgtcattagatgatgatttacacattagccagttctcttctccagagattaaactctttaattttaagtgagcagttttagttcatctttccacagtcaaaactacattaggaaactttctccaaaaaaggaatcaaaagccaatgcaggtcaaaactcattgaatgatatacttcagatttgtgcattccattgtatgtaaattttacctcaaaagaaaaaaaactatagaaa

SEQ ID NO: 741952 - DNA, 589 bp, Homo sapiens
aaaaaaataactgaggaatgtgttcctagaaaatctgccttaaaagaaatgttaaaatgaaattcttatgataaaacaaagacatatatagtaatttgaatctacataaagaagcaaaaattaccagtaaaggtaattatgccattataaacaagataagtaatatctaaatccatattttctcctttcttctgttaagtaaagagcaattgtgtaaaaaaagcatataattgtttkgttgagcctataacatacagaaatgaaatacatttggtaataacagcacaaaggaggtgagtggaagaatagttttgttggaatgagaaaaagacactagatggtaacttgaatccacaaggacagataaagaaaacaaagagcaaataaacaatattaatattgcaaacatcataaatctatacttagtcttcttctttaagtttcttccttttttttttaaattgagatggagcttttgctctgttgcccaggctggagtgcaatggcgagatctctgctcactgcaacctctgcttcctggactcaagcaattcttctgcctcagcctcctgagtagctgggattacag

SEQ ID NO: 741953 - DNA, 614 bp, Homo sapiens
acgccggtgaggctgcctcttctttcaagggtggttcttcgtccttcctgagccactcaagctttgcctctgagtcccgcagctgcagcctggacccggtgttccacgtattaaatgtcccccactgaaggctgtgcatcatcatcaggagatataaacgccatcactcactggattcttcctggcagtgctcagctccccgtgcagcgcctgctgccatccatccagtgcataccttcgccactccagggatgcttgcagtgcggcctccccttggaggctgtcctctgtgcccctcctcactctactctttaattagaatccaatattttggccaggctcgatggctcaggtccttcttatagactcactgaatattgaaatcggtaggacacacctttttgcttatttattgttctcattkagtgcttatctctggtctttcctgtccttttggagtcaccaaaatttgataacagaaactttgacttccatttctgatcccatgtgatcttcccagtaagtctaaccctaggatgtgatttgtatatctgttaccctctcacccacatactccctactaagataacctgaagcataactgagttgtccat

SEQ ID NO: 741954 - DNA, 557 bp, Homo sapiens
gaacttaaacaatacaacaagtaaaaaacaaacaaccacatttaaaagtgagcaaaagacaggaacattcaagacatacaagcagcaaacacgcatatgaaaaaaatgctcaacatcactaatcatcagagaaatgcaaatgagataccatcagaatggctttcagaatggctatcattaacaattaaaaaaaaacaacagaygttggagaggatgtggagaaaagggagtacctatacattgttgattggaatgtaaattagttcagccactatgggaagcagattggagatttccaaaggacttaaaacagaattaccatatatatataccaagtgatgagattgctgggtcaatatatatctaccaaaaagaaacatgcgctcatatgtttatcacagatctagtcacaatatcaaagacgtgaaatcaacctagttgtctaacagtgatggagtggataaagaaaatgtagtacatatacaccatggaatactatgcagccatagaaagaaagaaaatcatgtcctttgcggcaacatggatgcagctggagg

SEQ ID NO: 741955 - DNA, 623 bp, Homo sapiens
aactgacatccctaacaaagatgtgatgtgtaaaggatgcttacttacccagactatgacctttgccattctagggagagttacaggaatagtgcagggtttaagatattatcctagacagatggaagacaaaccagagcagccctaattttccatgaggtgggttytacattttaaggttcttccctcttcttctaatagtttttttttttaagacagatgaagattgctttaaagggccttcttttctcaaggatgtgccatcagaaactaaagagatgtatctgttatagacttacttcttcctgagactgatttggaggtatgagatagattttgtattgtctgaactgctgcttcctgctatttctatttctatatttctaataatacaaaataatcgtagaaaaaaacctaaatgctcagacttaacaattgctttatgattttttaaaaccccaataaccaagaatacttaatccaaaaattacttaagaaatttctgaggtgagccagggagtcagtccacatatgcctgaatataattctctttgaatcatggaagaggagaagaaaatagcaagcttatatttctacattagaatggttaaaaaaaaaatctc

SEQ ID NO: 741956 - DNA, 581 bp, Homo sapiens
aagtgccagcctctggtctagaactaggcccctggggcagcaccatggccggcaccgtccatcagcacttgcctggaagcggcatcactgcaccttaggagatgtggggctcccaggctggaaaagcacctcccctccctcttcctcagtgttaggctgcaattcgttcccatcctgcaggaaaaattaaaaaactcagatctcatctttgccttcaagatcatttgcccaaatctgggagcacaacttcctcctggaggtggagaagcacagtctgtatgagcagcaggcctaccaccgccagcccttttggatatgctgggaagtgagtccactctgctggagtccacgcccaayaaacttcacagaagccagtgctcccaaacactggcttaaagaggacaaataagtcatttaaagaaagatattgtatggtgttacctgtccatcataaaaaggtctagcctatatggttttataactttgccaagtcttattgtggtgtttgagtttagcctggacagtggctaaatttggagttccttatttatttatactttcatgcaagagggtcacagtgt

SEQ ID NO: 741957 - DNA, 631 bp, Homo sapiens
aaaaggtgacgcgattctgaggatggggacgagaagacaaccttgggtttgaaacatgccaggcaggaagatctgaaaaattaactgaaagccagggaagtccttggtatcaaggcatttaggaataactgcacatcccagctttgcttccaagcccagcgacatctgctcagtgtggaaacaaaactgctggtggtcaaataagcaaggagcacaagttcactaattcraggagcggaagatcatttttaaagggcatttagagctggaagtgcctcacaacatgtcaggcctgcaggcatttttagcctgagaatgcaaaggggagcctactccctggtctctggggcccaaacgaaggtgacttgaagctcttgtgttatcgagtagagttcgaagaacatgaaacagccatcctacagaaaaggttcctcgaggactgtggggtcgagaagagatcagaggaccagatccccattaggggatcaaagggtaaaaaggaaggatccaggaggaagggtaataactttagacttccacgagaaagactagaatattaaggtgctaatggcatacagccggcaaacaagactgcaaataactgaatggagagagaatcatcagggtgata

SEQ ID NO: 741958 - DNA, 631 bp, Homo sapiens
aaaaggtgacgcgattctgaggatggggacgagaagacaaccttgggtttgaaacatgccaggcaggaagatctgaaaaattaactgaaagccagggaagtccttggtatcaaggcatttaggaataactgcacatcccagctttgcttccaagcccagcgacatctgctcagtgtggaaacaaaactgctggtggtcaaataagcaaggagcacaagttcactaattcgaggagcggaagatcatttttaaagggcatttagagctggaagtgcctcacaacatgtcaggcctgcaggcatttttagcctgagaatgcaaaggggagcctactccctggtctctggggcccaaacgaaggtgacttgaagctcttgtgttatcgagtagagttygaagaacatgaaacagccatcctacagaaaaggttcctcgaggactgtggggtcgagaagagatcagaggaccagatccccattaggggatcaaagggtaaaaaggaaggatccaggaggaagggtaataactttagacttccacgagaaagactagaatattaaggtgctaatggcatacagccggcaaacaagactgcaaataactgaatggagagagaatcatcagggtgata

SEQ ID NO: 741959 - DNA, 536 bp, Homo sapiens
tatttcaatatcacccttctttcaactcactagatatgtgaaaacttttctcgtctcttatctcaatactaagcccccacattaaaatccctttgcttcacgccagaacatctgccatgtttatgtttctctttgtctttatcaaatctcccttcagttccagaccatcttttcccgacatccartgtaatgattcttctctgaaattttactgtggacaacctatcttcttggaagacagcaagattctcaatgaatgagatgcttaagaattattcagcaattacacaaaaatgcaccacgtctaggccctgtccttaaagattttgtttcgggggagtgtctagaaattcacatgctaccaaagtaacatacatggtgttttgggggagtgtctagaaattcacgttaccaaagtaacatatatggtgttgagttggtagtcacagtccatgtgtggggcttgctaccataacagcagatgcctatggtagcctgatgacagtttttcaattcttcttgtctttcacactcca

SEQ ID NO: 741960 - DNA, 554 bp, Homo sapiens
ccttcagcgagttgtaatctttttgccagtggagggtcttgcctagactctgatggttgccaactgatcagggtggtggttgctgctgtggaaatttttaaaactaagacatcaatgaagtttgccacatcgattgtctcttcctttcaagaaagatttttctatacatgcaatgctctttaatattttaaccagataacttctttcaaaattgaagtcaatcctctcataccctgccagtgctttctcagctaagtttatgtaatattctaaatccttgattgccattttaacaatgttctaacatcttcaccggaattagattctatctcacgaaaccattttctttggttattcataggatgcaactccccatctgttcaagttttaccatgagattgcagcaattcaaacacatcrccaggcttcacttttaattttagttctcctgctacttctacaacatctgcagttacttcctccactaaaatcttgaaccccacaaagtcatccatgagggctggaatcagcttcttccaaactcctgttaatgt

SEQ ID NO: 741961 - DNA, 655 bp, Homo sapiens
ttctaccatagggtcttactttttggtggtttgctattttgcaatgtgttatgtgttttgggctgaactgtgtctccctcaaaattcatatgttgatgtcctaattcctgctacctcagaacacaattgtattcggagatagggccttcaaagatataagttaaaatgggcccacttcaagagaaaccaacactactgacgccttgacctcagacttccagcctcttaaactgagagagaataaatttctgttgtataggccacctagtctatggtatttggttatgacagccctggcaaatgatacacagtggtgatcccagcagagcatgagatttcaaaaatcacaccttcaattattgattgttcagaaatcagaagggttcccttttgcctttctggtgataccgtcatgaagaagacagattcatgctaataaaggacatcccatcatgccaaaccctggtaaaagttccaaacacrgaggctatttccattctatagcagatcatttgtttcagtcaccatttctaccataaaatggttttatcataaatggccatttctcctcataattaatcattagataatattttgtactgtactgagttctaaattttatttatttattctttcattcattacttatttactt

SEQ ID NO: 741962 - DNA, 580 bp, Homo sapiens
attctatcattctagctgcttcagcatgatagggtacatggtaagaccagtgaattccatgagcatgagcccactgctgcacttctttagccacaaaatgagtgccttgttcagaggcaatgctgtgtggaataccatgatggtggataaggcattccatacgttcacagatgatagtcttgccagaagcattgcgtgaaggataggcaaacccatatctggagtaagtgtctactccagtgaggacaaacctctgctctttccatgatggaagaggtccaatataatcaacctgccaccccaaggaatgatgccatatctagggctcartgttggtctctgctgctggcaaattgggcactcagcagtggcagtagccaggtcagccttggtgagtggaagtccatgatgctgagcccacgtgtaacctctatccttgccaccatggccactttgtccatgggcccattgggcaatgacatgggtggctggggaaagaggctgagtggtatccacaggtcataggtcattctatccacttgatcattaaaatcctcctctgctgaggtgacccattggt

SEQ ID NO: 741963 - DNA, 589 bp, Homo sapiens
actttgtgtggatgtactaagattgcttcccctgtaacgcaagtttctcttcatttcccattagtcttcagaattataccagtataaaaggattccctatcttttagtgttgcagtttactgagttaacctaagcttggtctcataacccaatataaatgcaagattttttgttatttgttttcaagaggtagagtggtgtgaaaggggtagwagcaaccagctcaagcccattggagatttgtagggctcacctgccccaacctctatttcctagaggactttatgtcacactatgaataagggaaatcaggagtttcaagataagcatgaaaatcatattgtactggagatggcaaaaaaaaggcgattcacattctagaccagcactaaacccaatcatctctggctttgaccttcccacctggatcctctccacctgaatgcctaggctttgctgatgtttaagtgaagatgctgagtatgattagctctgattttaagttccagccagccatattgatgagcattctgcagctgctgtttccgtatattgagaaagcaaagccacggttgggctcttctgttag

SEQ ID NO: 741964 - DNA, 663 bp, Homo sapiens
tacatttgcatcacctcctcttattcaggaaaattccaaaacagctctattttgtcaatgatatccagattcctacagatcatagtaattatcttttgtcccagggttcagtgtgtttttaaggtgcagttagatgaacattctacacagaaaaaaagcaaacccgtacttgactctgagtaagacccttgtaaatgactaagtcatttacaagggtcaaatttggtctggatgccaggtggaaggagacacttttcttcattgctcctactaaagaaatccatcaagactgtatctgagattagcatggtttcaggttctggagaatattaggtcccataatgtcttggctacagwaggtagatctgaaagtttttaaggaaaaaaaaaaggaattttaacctgatgccagggaagaaaaagacacggtagatcccccgatttaatgagtaattcttattttctaacacttctgcacatatagcattggtttcttaacttttccctttctttaattgcaaaatttcaaagtctataaatttttatgctacttgcacatttcaaattatctgtgggtttaaacaccatttataaaatgtaaactacgaaaatgaaaaggaaaaagcaatacttacttatatccatatttcccagatgtattta

SEQ ID NO: 741965 - DNA, 525 bp, Homo sapiens
caaaattcagatacatatctggtttaattacacatgattctttccaaatggagggaagtggggaaggtgtgaagaacattatttagggaagtacttagttttccaattttctcttcattggcagtaggacccagcttcacctaaacactgtctttatcaccttcygttttactgaccgtgctccacagaattcaagtgcatggccacttatataaaaggataaaaggatcaatgagcctgatgagtcctaagagtgaagatcagggaatagagttagtcctaagtggataaatatgccctgaacatcctaaaaggcagagaaggtgcccccaaatacttgtattctacatagattctcttcacttaaaaaaaagttgatctactagcgaacaatacagtcaggatggctaaaggtgacccctagaaaccaaacggcaagatgtctgcttatgccttcttcgtgcagacgtgcagagaagaacataagaagaaaaacccagaggtccctgtcaattttgcagaatt

SEQ ID NO: 741966 - DNA, 605 bp, Homo sapiens
atttgagtaatgataaatatatatgtatgtaaatgttcaactttcccttatgtaattttaatattatttaatttataaaaaggaaagtataatgtgtcatcaaaaactaagtagtattatgtgttcacatataagtatatggatatttaaagtataaatatatatacaaagtatattaaagtataagtattcatataagtgcatggatatttaaataggcaaattcaaaattaaattccactgtatgcattgagtttgtccttattttagtgaaacttggagwcattgtatttttaagaaacttatcttgttcaaaaacagatttctttatgtcaagatttatggtgaaactatgtaatattaatagatggaataattgggtaaatcacaaatttgtcttatgaataatataaacttttcaaaaaaactaattctacttcatatacaactatgtgatgtgacatataacaatatgatataactaacatattttaatagagttttttatgaagtttcatgaagaatgttaatgtcctcaatagtgagactgaagaatcttactttttttaattttataatgagatataaaacaaccaaatcaaccc

SEQ ID NO: 741967 - DNA, 537 bp, Homo sapiens
actccccagccagctctacatcctggaaattttatgacatatttttgagataacttcttaatgctggcattcactttacatctgtgcctcttagttaaaccattagtaatggactgtgcttaggctggcaagccaggacacacctttcctgggtatttgggaagcatataggcctattgttgaatttcaatgagttttccatttccggtcaatgagcggtcactgaagtaggcataggacaatttatacaaaatttttttatttatgccaaaaaaaggagattgacaactcttcaaaacatggtatggatggacagttaccttgaaacatatctaatactatatcactttattactaattctgtrggcaagccataagtaaacattattgagactagccattgtgctgtggttaaactttggcaaatgaaactgctttgagttaaacaaagtgtataaagttttgggcagctaaaacatttttgacttaatttctaagttatgcatattttaattttgtgtatgctttaatccatca

SEQ ID NO: 741968 - DNA, 605 bp, Homo sapiens
atttgagtaatgataaatatatatgtatgtaaatgttcaactttcccttatgtaattttaatattatttaatttataaaaaggaaagtataatgtgtcatcaaaaactaagtagtattatgtgttcacatataagtatatggatatttaaagtataaatatatatacaaagtatattaaagtataagtattcatataagtgcatggatatttaaataggcaaattcaaaattaaattccactgtatgcattgagtttgtccttattttagtgaaacttggagtcattgtatttttaagaaacttatcttgttcaaaaacagatttctttatgtcaagatttatggtgaaactatgtaatattaatagatggaataattgggtaaatcayaaatttgtcttatgaataatataaacttttcaaaaaaactaattctacttcatatacaactatgtgatgtgacatataacaatatgatataactaacatattttaatagagttttttatgaagtttcatgaagaatgttaatgtcctcaatagtgagactgaagaatcttactttttttaattttataatgagatataaaacaaccaaatcaaccc

SEQ ID NO: 741969 - DNA, 649 bp, Homo sapiens
ccagtattttgctatatataattagcacagataattttatgaactagttggaaattagtgcctgtagatgtttatttctcttcatcccttcagaccacccattgcatatcggatatacctgtaaagtatgtgtgcatgtgtgtatgtttgtaaaatatatctttacattctaagtatgtatgtctgtatgtatgtatttacatgtgtatatatccatctatcacctatctgtctatcatctatcatcatgctacacttggtttcatattccagtaaggcaagtttgtcctttgttccttccttcttttatcacatttttattcacctataccaaacacattgcatgcatctgtcagaaccaaaatcactaaacacagaacattaaaatgtgtttcaaatgtctttagcaaattaaaaataaataatcatataatraactaaattgaagatggtcataataaattcagataatgtgaaaaataatgtggaatttaagaccagatactaaatgggaaaacaagcaaaattcaatgataaaagttgtaatatacaataaagtaataatgacaacatgtttctgcattgaaaaacacagtaaaatgcatgagggaaatttactgagaaatgcaaacatttaaaacaataaatt

SEQ ID NO: 741970 - DNA, 645 bp, Homo sapiens
agggagtttacatttagtctgaaactgaccagagtaaaaacaactctgactccatactgtcaaataacagcactgtgtgaagctttattaaaaaagaagatgaaaaagaacctaagcaatgtcaatattaaccttcctcgcagaactcaggagaatgataaattatttagcactgcctcagccacagttttgatagatcctccatacctttaagtaaacgagcatcttagcaaaaaattccaacaacacttcaaacaaaatacatttttattagttcttcactcctgccaatgccttaaatagtccaaatctcaacaacctcattagattatccatgaatgaaatggctggaaaaggaaagcagcaaattctaccaaattttaattgacaacaaggaggcagttgcacagctgatctgcagcacaytggatgtgggttgaaggctgagttattcttactgagggaaatcttggcacattccaactgactctggaaatgcctgtagaaaattcaaggtaagtggggagccctgtgtcaattccgtctcctctcctttctaagaagaagagatttataacaaggtcaaagctatcacttcccttgggtcctcaatcccctgcctcagggccagttcagcctcgctca

SEQ ID NO: 741971 - DNA, 681 bp, Homo sapiens
gcttgaatacatacatacattaatgaatgaaagaatagtaggtaggtaggcaggtaggtaggtaggtaggtagataagagacaaatcacccatgcagaagaattttaaataagtagatactctgccctcaaggagggggatggttaactccccacttcttaagtgtggactgtccatattacttccttccaaagagtaaagtgtggaaagggatgggagggaaataactttacactgtaaaacctggtaagtgctacctcagccaggtgatcaaggttaacatcaatagtcrtaagtcatggtgatagcatgtacccttgatgtaacatgatgagaatgacatttgacttctgtaaccctggtctaaccataagaaaaatatcagacaaattccaacagaagataaccctacaatatacctgactagtactcctcaaaactgtcaaacatcactgaaactgagaaaatgtcacagccaagagaagcctagggagatatgagaactaaatgtaatataatatcctgaataagatcctgaaatggaaaagggtcattaggttaaaactaaggaaatccaaagtatggactgacttttataataatcaatattggttcattaattataataaatgtatcatattaatgcaaaatgttaataatgggagaaactgtttgcaaggg

SEQ ID NO: 741972 - DNA, 516 bp, Homo sapiens
ggtgaagcaggagctgggtgtcacatggtgagagtggaagcgagagagagagggggcaggtgccacatgtttttagacaaccagatctcatgagaacgcactcaccgcctctaggacagcacccagccattcatgagggtccacccacgagacccaaacacctcccaccaagccccgcctccaatattgggattacatttcaacatgagatttggaggggacagtcatccaaactatatcaggcattatcgactactctatctgctttatttaccaaccagtycccaagggcctaggacagggctggcacatagtaagcactcaataagtataaatttttaaaaaatgaatgaatcttaaagtcattccaaccttaaactttgctccttgtctatcaacatttctgctaatataaaaatgatttttctccaaatggtagagtaaaaatcaatgtctcgtgtcttccacaaagctggggtttcaaatgactgcatacatcacagctccaggcaccac

SEQ ID NO: 741973 - DNA, 590 bp, Homo sapiens
ctcttctacaaagcctatcctgaacccttattagaactctgatgacatttatttgtccctcttttagaagacttacaggacttctaatgattcatttagcttacatacatgcttcatttccctccatgaacccccaaaatctcaggtgcctcatttccctccatgaacccccaaaatctcagacaggtctctcagttaattcagaaagtttattttgcgaaggttgaggatgtgcacctgtaacactgcctcaagcggtcctgacgacatrtgcccaaggtggtcagagcacagcttggttttatacattttagagagacatgagaagcaatcaacatatgtaaaatgaacattggtttggcccagaaaggtaggacaactggaggcaaaagcaggacagggagggggcttccaggtcacgggtagatgagagacaaacaattgcactcttttgagtttctgattagcctttccaaaggaggcaattagatatgcatttttctcagtgagcagagggatgactttgaacagaacgggaggcaggttggccctaagcagttcccagcttgactcttcccttagcttagtga

SEQ ID NO: 741974 - DNA, 428 bp, Homo sapiens
ctaattctagttcagagatgcattctaaagggtcttctttttcttcttgtcagctaatagtcttaaatttgcatattaaaggaaacaactcacrtaaaagtcagacagcaaaatttacctcgtaaggtacaaagtgaaagtctggtgagctggagggaaattaaaatgaatttaattaacaattggacataaaattatagacatctatcataaaggccttcaaatacatacatgtgtacatgtacatacacacatacacacatacagattctataacttttactccagtactttagccatgagataaatacaaatttgccagcttgcaagaaaaacccaaaaaactattagacccaaacagtggttttatctcagtggaaaaataacagcagacttaaagcatggcagaaaggaaaatagagaaaaac

SEQ ID NO: 741975 - DNA, 793 bp, Homo sapiens
aaacagtggttttatctcagtggaaaaataacagcagacttaaagcatggcagaaaggaaaatagagaaaaacggactaggaactctagaatttgcaggttgaccttagggctctttttccttaatgtaaatttgcacaaagactgtattacttccattttactctggcaaatagaggtgccataaaaccaataaggtgctctaaagggggtcattctccttgttttctcctcattctcagattgtttcctgcttctttttttttttcttaaaaggaagaattgagctgtggcctagggtttttgtgcatggatcgatgtgagctgcttgtgggcaggactccacagtgtgtcatcactgagttgtttccagcctcttatgcatctcagcttctctctccagaggtctatgwcctctgagagggctcaaaatgccaggtgatcagcccttatatgcatttcctggatgacccatttttaaaattaaatttttctggggatttccctgcagggccactgcatgttgcagggggtcaactccccagacgctcccacgaggcccctggtcacccagggacgcctttcgctggaaagagcaaatgtcctttctctttggagctcagaaaactcagtttctcatttgcctatgaaaacaacagttcagttcctcagacaaatgcacacagacaaacacaattgagattaattatgggagaaaaagcaatagataagaccctttagaatgcatctccgaactagaattaggatccttaaacaacaatttcctaggagag

SEQ ID NO: 741976 - DNA, 563 bp, Homo sapiens
cttctttttttttttcttaaaaggaagaattgagctgtggcctagggtttttgtgcatggatcgatgtgagctgcttgtgggcaggactccacagtgtgtcatcactgagttgtttccagcctcttatgcatctcagcttctctctccagaggtctatgacctctgagagggctcaaaatgccaggtgatcagcccttatatgcatttcctggatgacccatttttaaaattaaatttttctggggatttccctgcagggccactgcatgttgcagggggtcaactccccagacgctcccacgaggcccctggtcacccagggacgcctttcgctggaaagagcaaatgtcctttctctttggagctcagaaaaytcagtttctcatttgcctatgaaaacaacagttcagttcctcagacaaatgcacacagacaaacacaattgagattaattatgggagaaaaagcaatagataagaccctttagaatgcatctccgaactagaattaggatccttaaacaacaatttcctaggagagaagagaaaagaaaagaaaccag

SEQ ID NO: 741977 - DNA, 563 bp, Homo sapiens
cttctttttttttttcttaaaaggaagaattgagctgtggcctagggtttttgtgcatggatcgatgtgagctgcttgtgggcaggactccacagtgtgtcatcactgagttgtttccagcctcttatgcatctcagcttctctctccagaggtctatgacctctgagagggctcaaaatgccaggtgatcagcccttatatgcatttcctggatgacccatttttaaaattaaatttttctggggatttccctgcagggccactgcatgttgcagggggtcaactccccagacgctcccacgaggcccctggtcacccagggacgcctttcgctggaaagagcaaatgtcctttctctttggagctcagaaaactcagtttctcatttgcctatgaaaacaacagttcagttcctcagamaaatgcacacagacaaacacaattgagattaattatgggagaaaaagcaatagataagaccctttagaatgcatctccgaactagaattaggatccttaaacaacaatttcctaggagagaagagaaaagaaaagaaaccag

SEQ ID NO: 741978 - DNA, 617 bp, Homo sapiens
cctccctgactctccagaaaattataagcagggaaacttgaacttgggtcttgaatacgctcattttgtgtatcagtgtaacctgagcacctagcaaccgccagggcttggtgtctggtgacttccccttcagcagctctgcagactgccagaaagagctgactgctccaagcccaagccaagcttccctctagtttaaatcaaagaaaaatggagggtgccgagaatgtaatgggataaaggtcaaccccagggcayagccctccactcaacacgagaaccagagtcatgtttgacgaaattcccaaaagacattcttcggaacaaagaaaatgagctaagaagatttcttagaaaaggatgcgttttatgtcaaaacaagggtgagaccaggtgcagtggctcacacctataatcccagcactttgggagcccaaggctggtggatcacctgaggtcaggagtttgaaaccaacctggccaacatggtgaaaccctgcctctcctgaaaatacaaaaattagctgggcctggtggggcacacctgtaattccagctactcaggggcagaggcaggagaattgcttgaacccaggaggtggaggttgcagtgagcc

SEQ ID NO: 741979 - DNA, 590 bp, Homo sapiens
tctagtagaaaatataaacaataaataagtaaaaaacaaatataaacatgaactataaaaatatcagagtggtaagtgctatgcaaaaaattaaaatagagtgatgggctagagagaagttgagtggcccctttggaggagttggtcagcgaagttcggcaaaaaatatacttcttgtgggcttctgagttgagcataagtaactctatacttattattgaagtaaattgtattacttgtctccacatgccttagagcttttgtgtgtagttttttctgacatttacagtttgtaaagtatttggcaataatttaataacaggccacgcttgttttctcttaagcttctattatattggattaagatagtccagtctacttccagtagaagtggatggagtgaaagrtgttgcttctttggctcaaactgcaaataagtctgataaccttgcatagagagcaatttccatgaagaaaaatgggggaagcaatcaattcactaaaggaggaatcagaggaaaggaaatgagggcattggatataggaaacagggaccacaagttgggagcaatcttctcattctacttgat

SEQ ID NO: 741980 - DNA, 480 bp, Homo sapiens
tgcttggtatcctctagaatttggttttcaatgtccttgccttacatttgcaacatcttcagagaaagtggtcctagcccatcccagctcccacaggctggtatttctagtttcctggccaaggagggcacacctttcaggtacacagagatacaaaggctgccaaatatttctcattgcattgtttagctggagtatctcaggccagagacagggacatgaccaggcaaacttcagaggaagttgtgaagctgtgagaggtcttggaataaaaaaatggatctagagctcttctattgctgaatgggccatgtgactgctgcccattctatcaaagtgsaagccaaaccagtcccttcccttagagcttccatagatgagagggtacagggaagcaggagggatggggttgtttttactcttgcacaccagctaaatatcagcgctggtctccagagtagagaagccctctacgagaga

SEQ ID NO: 741981 - DNA, 573 bp, Homo sapiens
gtaatatgaaacaaacaaaataatatgaaagcattataattagttggatggcacatttattatattttattttatttataataagcgcttttgatcttgggaaaaatgaatgaggattctgcatttatctgtaatccttaacactcaataaatttcttttctgtttccactgtatcatttagactgacttaaaatgtgatatgaattcattcattcattcaccaattatttttgaatgcacacttttaccaaacactgtacttttttttttttttgagatggagtctcactctgtcgctcaggctagagtgcagtggcacaatctcggctcactgcaacctctgccccctgagttcaagcgattctgcctcctcagcctcccgagtagttaggattacaggcgcctgccaccgyacctggctgatttttgtatttttagtagagacggggtttcaccatcttggccaggctggtcttgaacgcctgatcttgtgatccaccagccttggcctccaaaagtgttgggattacaggcgtgagccaccgaccctggcccaaacactgtacttttat

SEQ ID NO: 741982 - DNA, 594 bp, Homo sapiens
gcttgaccaccactgatacagcccatgtcaagtgtgcccagggtgacccagggctcagcttgtgtgtagaaggccctcgtgtattttgccaagtttcccatggtgggagtgaacacaccaagtgccttcctgaagtcacaccacaaagagcatgagatgcctaagttcattgccatttccacgtcgggtctgagacctttccctgcagggatggtaaccatactctattctacaaccctccatgaacctgcttccaattggctattatgatgaataaagagaacctggaccactccgtggacaccaggagccacatcactgtttttgaccattactctgcaggtggmcaaaaaaaaaaaaaaaaaaaaagtgtgtcaaatgataactatccctttgcttttgacagaaagtagcctaaataaacaacagattttttaagtactaaaacttttaattaactgatttatttattcattctgaaaatgggtacagatcactgacattttcgctttgtaaacatccttaattttggagagattgcacacaaactttgagggtcttacagatcatttactgaatttattaaacactcca

SEQ ID NO: 741983 - DNA, 600 bp, Homo sapiens
aaacgagttaattaatatatcactgccttcttataatttcaagaatctaaatttaagagatattaaaatataaaagcaagaatgagtcctagaatcaatgaagtactatattccccaaggaaataggtgctgtaaatgttaatattgcgtatcaacctgactggattgaaggattcaaagtattgctcttgggtgtgtgtgtgtgagggtgttgccaaaggagattaacatttgagtcaatggacttggagaggcagacccattcacaatctgggtaggcaccatctaatcagctgtaagcacagctaggataaaagtaggcaggggaatatgcaaagactagactggcttggttttccagcctacatctttctcctgtgctggatgttacatgccctcaaacatcaaactctaagttcttcagcttttggactcctggaccttcaaccacagrctgaaggctgcactgttggctttcctacttttgaggttttgggactcagactggcttccttgctcctcagcttgcagacagcctattgtgggacttcaccttttgatcgtgtaagtcaatagtccttaataaactcctctttatat

SEQ ID NO: 741984 - DNA, 635 bp, Homo sapiens
ctacccaaatctcaacttgaattgtatctcccagaattcccatgtgttatgggagggacccagtgggaggtaattgaatcatgggggctggtctttaccatgctattctcgtgatagtgaataagtctcacaagatctgatgggtttatcaggggtttccactttttcttcttcctcattctctcttgccaccaccatgtaagaactgcctttcaccctctgccatgattgtgagacctcctcagccaggtggaactataagtcaaattaaacctcctttttttccccagttttgggtatgtttttatcagcagtgtgaaaatggactaatacactayagcttaaaagtaaaccctatcatttttttttttaagagatagagtctcactctgtcacccaggctggagtgcaatggtacaatcatggctcactacagcgtcgacctactgggctcaagcgatcctcatgccttagcctcccaagtagctgggaccacagatgcacaccaccttgccaaactatttttttttttttttctgtagagatgggggtctccctaggctgcctaggctggtttcaaactcctgggctcaagagatcctcccatcttggcctcccaaagtcctgggattaca

SEQ ID NO: 741985 - DNA, 708 bp, Homo sapiens
aaaatagaaggatcctaaaataccctaatagatgtacatggtaatgattccacaaatactccctcaaagggatctacagacatttaattggttgaccgaatgctggggaaaggggaatgcccaatattttgaggactgttggacagaaggtctgagctgacattgatttacctcatcratgacatcaagccagagacccaaaacatcatcatgaccccctattagtgtaggcatatttaggtgtcttagaccattcatgctgctgtaacaaaataccatagactgggtggcctataaacaacagaaatttatttctcatagttttggaggctgagaagtccaagatcaagttggaggcagattttggtgtctggggaaggcccacattctgattcactgatggtatcttcttgctgggtcctcacttggcagaaggagcaagcaagcttccgttggcttctttggtaagggcactaatttcattcatgaggggtctgccctcatgatctcatcccctcccaaaggccccacctctgaataccatcataccccatacaactggggatacagtttcaaaacatgaattttggggggacacaaactttccaaccatagcaataagggaagtaataaatagaatgtaatgggccatggtcccactcacagtgggtccactggggccatggacatttcccctgttcctgaatg

SEQ ID NO: 741986 - DNA, 604 bp, Homo sapiens
tttcaaaaaaaataaaaataaataaattaattatttaattaattaaaaaggccaggcacagtggctcatgcctgtaatcccagcactttgggaggccgaggcgggcggatcacgaggtcaggagatccagaccatcctggctaacgcagtgaagccccatctctactaaaaatacaaaaaattagccgggcatggtggcaggcacctgtagtcccagttactcgggagactgaggcaggagaatggtgtgaacccgggaggtggagcttgcagtgagccgagatcgcgccactgcactccagcctgggcgacagagcaagactccgtctcaaaaaaaaaaaaaaaaaraatatatttgaaatgaagcataccatgtatggaaaataaatgactaaagtatatgttgtatggttcattctcaacagctgtgagtaaacttacaattagaaggtttccttctttttgtatggtgtgtattattttttaatttgcaattttaaggaaatattttatttagaataagaggaatatgaccattttatttctattacaaaactttgtaacaatactatattattggcgtaagtgaatagactaattaaga

SEQ ID NO: 741987 - DNA, 604 bp, Homo sapiens
tttcaaaaaaaataaaaataaataaattaattatttaattaattaaaaaggccaggcacagtggctcatgcctgtaatcccagcactttgggaggccgaggcgggcggatcacgaggtcaggagatccagaccatcctggctaacgcagtgaagccccatctctactaaaaatacaaaaaattagccgggcatggtggcaggcacctgtagtcccagttactcgggagactgaggcaggagaatggtgtgaacccgggaggtggagcttgcagtgagccgagatcgcgccactgcactccagcctgggcgacagagcaagactccgtctcaaaaaaaaaaaaaaaaagaatatatttgaaatgaagcataccatgtatggaaaataaatgactaaagtatatgttgtatggttcattctcaacagctgtgagtaaacttacaattagaaggtttccttctttttgtrtggtgtgtattattttttaatttgcaattttaaggaaatattttatttagaataagaggaatatgaccattttatttctattacaaaactttgtaacaatactatattattggcgtaagtgaatagactaattaaga

SEQ ID NO: 741988 - DNA, 615 bp, Homo sapiens
ctttgagccaccagatgagaagtctgagttttgtcatgcttcacatgaagacgtcactgtaagcattttggctgacttccccagctgagatcccagccaagagctagcattaactgccacatatctaagtgaagatgcagccagatattaccagttaccaaccactgagccattcaaagccacagagtaactcccaggcttgagtgatgaacttccagatatcatgaagcagaaacaagctgtctccactgtctgcccaaattcctgacccagmgtctagagtataacaacatggttactttacagttaaaagctgacgggtagaacatacagcatgactagaaagtttgcaaggcattgggaacagagcaaggattagagaatttgccagttctagctctgtcactcaattatccctatcattctgttaaaacgtgtgtgactttgggtaatttagtctgcaggctctcagaagacaagttttctaaaatgtaaaatagagggaaaagcatatcttaagattgtaataaagattaaaagtggcactgtggatgaatgtgcctgacatgttgcctgttacatatgagaataaattctcacagtgaaaatttaata

SEQ ID NO: 741989 - DNA, 641 bp, Homo sapiens
ctactacaccatcttcagcatgtctgttcctttcttggccaaaatgcccctctctctctacttgcccccaccaccaattcaaatgtgggtatattcttatggtcttttatttttacacaagctccgcctcccaggttcacaccattctcctgcctcagcctcccgagtagctgggactacaggcrcccaccaccacacccaactcattttttttttcttttttgtatttttagtagagacggggtttcaccgtgttagccaggatggtctccatctcctgaccttgtgatccacccgcctcagcctcccaaagtgctgggattacaggcgtgagatactgcgcccggcaaaagtagatattttcaattacatcaaatctatagctatttctgtatctacaactatatgcatgtatgatgtggcagtgactcaatttcagtttctatattatttttttattttcactaggaaatcccgatgttgtttgccttctcatttagatactcacatctttaccccaacttaccatcttttccatgggggaaagagaaccctaaaacactgctttcatgcttcaattcagtcttttgtgtacggaacctttggactaagtttttttgttagtttttgtttgttagttt

SEQ ID NO: 741990 - DNA, 641 bp, Homo sapiens
ctactacaccatcttcagcatgtctgttcctttcttggccaaaatgcccctctctctctacttgcccccaccaccaattcaaatgtgggtatattcttatggtcttttatttttacacaagctccgcctcccaggttcacaccattctcctgcctcagcctcccgagtagctgggactacaggcacccrccaccacacccaactcattttttttttcttttttgtatttttagtagagacggggtttcaccgtgttagccaggatggtctccatctcctgaccttgtgatccacccgcctcagcctcccaaagtgctgggattacaggcgtgagatactgcgcccggcaaaagtagatattttcaattacatcaaatctatagctatttctgtatctacaactatatgcatgtatgatgtggcagtgactcaatttcagtttctatattatttttttattttcactaggaaatcccgatgttgtttgccttctcatttagatactcacatctttaccccaacttaccatcttttccatgggggaaagagaaccctaaaacactgctttcatgcttcaattcagtcttttgtgtacggaacctttggactaagtttttttgttagtttttgtttgttagttt

SEQ ID NO: 741991 - DNA, 614 bp, Homo sapiens
tattgaagatgtgatgtttatacaaggagagaagtatactttctggacagccaagaaagctagtagccagggcatgccatcattttggaaagcctagttggaaatcaggccttgcagtgagaaggaggccattttgctttaggcagtgctcttgtgtgattgtactttctcctctaaagaggaactccttgtgactggtaatttattaagaagtgatatgtattgtttgagggcaagacagaaggctctctcactctctcagggctccctctgtccctctctttcccagggacacatagaattaacatacttttaaaatgtaggattgaaaaattggtgaatgcattcctgtgattcatgtccaaattttatttaaatggcaagyactagcaaaaagaatgttaatgaaaattctcctacagaaaaagcaaaaactaggtacataaacttgccgatagttttatagaatgaagctacatatgtattctcccagggcactagcagaataggagtttccttggctgcccttggagcaggtgactttaggctaacatagctatccatcttctttgagacagatgagtaaatataaaagtatcaacaaaacacttaat

SEQ ID NO: 741992 - DNA, 614 bp, Homo sapiens
tattgaagatgtgatgtttatacaaggagagaagtatactttctggacagccaagaaagctagtagccagggcatgccatcattttggaaagcctagttggaaatcaggccttgcagtgagaaggaggccattttgctttaggcagtgctcttgtgtgattgtactttctcctctaaagaggaactccttgtgactggtaatttattaagaagtgatatgtattgtttgagggcaagacagaaggctctctcactctctcagggctccctctgtccctctctttcccagggacacatagaattaacatacttttaaaatgtaggattgaaaaattggtgaatgcattcctgtgattcatgtccaaattttatttaaatggcaagtactagcaaaaagaatgttaatgaaaattctcctacagaaaaagcaaaaactaggtacataaacttgccratagttttatagaatgaagctacatatgtattctcccagggcactagcagaataggagtttccttggctgcccttggagcaggtgactttaggctaacatagctatccatcttctttgagacagatgagtaaatataaaagtatcaacaaaacacttaat

SEQ ID NO: 741993 - DNA, 614 bp, Homo sapiens
tgagacgccacctcattccagttcaaatagctattataaaaaagatgaaagataacaagtgttggagagaatgtggagaaaagggaacacttatatactgttggtgggaatgtaagttactatagtcattacagaaaacggtttggaggttctgaaaaaattaaaagtagaactactgtatgatccaataatcttacttctgggtaaatatctaaaggatatgaaatcagtatgttgaagagatatcagcaccccatgtttattgcagcagtatttacaacagccaagatcatggaatcaacrtaagtatctatcagtgaatgaacggttgaagaaaatgtgacatataaccacagtgaaatgttacccagtcatgagaaaaaataaaatcctgtcattgtcaacaacatggatggaactggaggacattgtgttaagggaaataagccaggcaaagaaagacaaatactgcatgatctcacttctaggtggaatctaaaaaagtgtaacttcgaagcagagaatagaatggtgattaccaggggctgggatgggggtggtaggagattggagatatatttggtcagaaagacacaaaatttcagttagatagg

SEQ ID NO: 741994 - DNA, 638 bp, Homo sapiens
taataaacttgctttcactttgtagtgaaattagtaatttttctaattaattatttcttgcaggagattcaagaatgatctcttggggtctggattgggactcctttccggtaacaggaatacaagacaaattcttaatattcaagccttattttataactttgcataaaattatttagatttcctcatatatgctgagtggttttttaactaaatgtaaaccttggcatatttttagttttgctggtattgttaacaaaattttattcatattaacataataactggtaatattaaaaaggaaagttagaggtttaaaaaatatatatttagtatttattacattgctttactagtttcatttctagttgatgaatatttattacatatataatcaccttcaaatattaatagctgatttctctayataaacatttaatttttcattattaaattagttcacttttaaaaatttgttgactgacatagtgagagaagaattatggtcttcctcctcattttatttggaatgcatcccctatgcccctatacgtgtattttgatttattaaaaaagcttaaatttttttcaattagtttttaatcacaaaaaacagcaactcttgtttttatttaaaa

SEQ ID NO: 741995 - DNA, 545 bp, Homo sapiens
caaaagcacacacatagtcctaaaatgattattttgagtcggaacaacattttcagtttttatttttttctgttcattatttaattgttgaacaaggaaatgccagaggctatgagtcctcattagagctattagcatacatatcattgaataaactcattgggttaaaagaaaacaggcactctcatataccaaaattccctaaagaggaatacgttacacttaaggtgtatctgttcaattaactattagaaggtgaaagccaccagaaactagaaatacctcttctggagctcatcatcacttyttaccttacacaggtttaaaaagtaattactcgctacttaatacatacagtaaagggtacaataagtaacgattacataaacattgaaaatattaaatattatttcagaagagattgggtctattcagggtggtatggccatagactaaatactatttaaaaagctatcatatattttacagtataatttgaagctgttaagtattaataatatgcatataactgtactcagtggcaa

SEQ ID NO: 741996 - DNA, 519 bp, Homo sapiens
aacaaatgttatgacatttaagataatgaaacccttcatttattctactatctggtatgagttttatttcacatataaggagtcagaacagatgtccaaatattgtaatgccaaaagaaagttagggcatatcttgattaataccctcagagctgcctgtagtgtctctttaaaactggcatggtttacttcaaaacaactattcaaaatccattctaggaagcctagctagacaaagattcccaagacaaaacgaaaacaataaagcttagtataacccttttagcaatgtgagttgcgtattattgacagaacattcattgcaatcagtaaatgattaattgsaaatttgttgctaaattgaccacacaaaaaaaagagacaagcttcaggctactgttaaagaggaaaaacttatgttaaaaattattggaggcttcttgtagtgaattaattctaatcaatatactttttgactacacagtggaataatgacttccttaaatatcagaggtaccc

SEQ ID NO: 741997 - DNA, 519 bp, Homo sapiens
aacaaatgttatgacatttaagataatgaaacccttcatttattctactatctggtatgagttttatttcacatataaggagtcagaacagatgtccaaatattgtaatgccaaaagaaagttagggcatatcttgattaataccctcagagctgcctgtagtgtctctttaaaactggcatggtttacttcaaaacaactattcaaaatccattctaggaagcctagctagacaaagattcccaagacaaaacgaaaacaataaagcttagtataacccttttagcaatgtgagttgcgtattattgacagaacattcattgcaatcagtaaatgattaattgcaaatttgttgctaaattgaccacacaaaaaaaagagasaagcttcaggctactgttaaagaggaaaaacttatgttaaaaattattggaggcttcttgtagtgaattaattctaatcaatatactttttgactacacagtggaataatgacttccttaaatatcagaggtaccc

SEQ ID NO: 741998 - DNA, 561 bp, Homo sapiens
ttcatgggagtaacccttttaattcctttcaagaacatttccttttcattcacaacttgaataactgtttggctcaagcggcttagctttcagtatctcttggctttcaaaatgccttcctcactcagcttaatcatttttagcttttgatagaaagtgacagatatgcaactcttcctttcacttgaatacttagaggccayggtagggttattaatagcctaatttcaatattgtgtctcagggaacagggaggcccgagaagaaggcgaaacagaggaatggctgcagcttctccatcagcagtcagcgaagaagtcagaatgcagaattgatgaggttcactctcttttatgggtgcatttgtggtattcccaaacaatgacaacagtaacatcaaagattacttatcacaaatcaccaaagcagatataataatgaaaatatttgaaatattgcaagaattaccaaaaagtgacagaaacataaagtgatcacatgcatttaaaaaaatggtgctgatagatttgctcaaaatagggttgccatagaccttcaatt

SEQ ID NO: 741999 - DNA, 704 bp, Homo sapiens
gccaacatggaaaccacatctcaaattgttctccttttgggattatggttgatggatccactcttagagatcaattcctgtctataaattttaaaaagtagttgcaagccagaaaaccttgtggatacaattcaagccagaggccatgaagactaactgacagtcactatttagagaggggagaactaaatctgaggaagtagaagtaggataataaatgagaaacagagtgaagagctaaaagtagtttgagctggaattaatttaggagtatatcctgaaagaataaagacatgtggaaaagtgctacagacatggatggtgtttacagcctattgttttgcayggagggagtgatgatggggcttgagtacatagctcttagaagggttatgtctactcctcatttttgcctgttttgcaaattgctcaattcttactcaaggtaaaaaatccctttatagcgatgatagggcaacagcaagtacagacagttacaaagggaaatatttctgatttgacagtagcaacttctatactttgcagtgagaaaccaataattgtttgcagaagattttgtaaatcaggaatttattctgtatagatgctgttacactgaagtctattttatcaacagaaataaaaatgtaaatattaggagacgagacaacattgtttttatatttctgggcaagcactttcat

SEQ ID NO: 742000 - DNA, 623 bp, Homo sapiens
ttgtttgcagaagattttgtaaatcaggaatttattctgtatagatgctgttacactgaagtctattttatcaacagaaataaaaatgtaaatattaggagacgagacaacattgtttttatatttctgggcaagcactttcattttcccctgaaacatacctggcatagtctttcacagctaacaaatgtcaagacattgcaaaatgtacatttataaataacatatgtaaacatagatgtgaagattataataaggacatgatctcttataccatagctacaatataaatccatgtggctttcccattattgcatatgrggggctatttttctttaatatattttttatgaaaaatctcatatgaatcaatatatacatctttctcaagaatgtatcagttctataataacatagataaaacttaatttgattattggattaagtgcaaaactagttaaaatattgtcagaaaatttgctccttaatgacttaccacaataaaatataattttaaaagtactttttatagataaaatttattcattaaggcacctagagtattgcctttagaaagtaaacagtgttgtttgatgatacttagtctattatgtaagagctac

SEQ ID NO: 742001 - DNA, 623 bp, Homo sapiens
ttgtttgcagaagattttgtaaatcaggaatttattctgtatagatgctgttacactgaagtctattttatcaacagaaataaaaatgtaaatattaggagacgagacaacattgtttttatatttctgggcaagcactttcattttcccctgaaacatacctggcatagtctttcacagctaacaaatgtcaagacattgcaaaatgtacatttataaataacatatgtaaacatagatgtgaagattataataaggacatgatctcttataccatagctacaatataaatccatgtggctttcccattattgcatatgaggggctatttttctttaatatattttttatgaaaaatctcatatgaatcaatatatacatctttctcaagaatgtatcagttctatartaacatagataaaacttaatttgattattggattaagtgcaaaactagttaaaatattgtcagaaaatttgctccttaatgacttaccacaataaaatataattttaaaagtactttttatagataaaatttattcattaaggcacctagagtattgcctttagaaagtaaacagtgttgtttgatgatacttagtctattatgtaagagctac

SEQ ID NO: 742002 - DNA, 559 bp, Homo sapiens
gaatacttccaattttttaatgaaatagaattataatgtttataaaatacaacattgtagaatgaaattacatattttagtaggaaaatagaatcacagaaaaatgatttctaaagcagcaacttttatttaactcccagagtaaaaaactatcaattcttgccatgcaacaactcaataaaaagaaaacgcgctaactatgatcttttgtggaggtgccgagtactggcactaaaaacttctgctatatggaagtaagatggaaatttttagtgtgtgaaccctataccatgtaattttaaatggtttgttagtacccaaaaaagcatctttgggtaaagtgaaataaataccttagagaaaaataacttgctgaaaagtacaagttgatgaattwcataaaatttcaacagtcaatgtaagctctggatcttctgtttttatacatattttgtattcatttgccaagtcaaaaatcttaaaagccagtcaccacaacctccatctaacaggtctttccactgcactgacagctgctctcacctttataaaatagccc

SEQ ID NO: 742003 - DNA, 634 bp, Homo sapiens
tgacacttgatgcctctgactcctttgaagagggcatcaagaagtgaaagaacaaagtccttttctgttcgggatctgggcccatcctgggagaggtttttggcagaaatggctgcagtggaaccctctgactgccagggtgaaatagtgctccagcaggctgcggtagactcactgccagagtgggtcaggactggcccagaggacagggtcgtctcttgagagtcctcccagctccagggcctgattttaaagcagtaacacgaggatataggttatatacaggctcctggaaggcaggtgccgcagctcctgtgacaccccatatgcctgagcaagcttctccagcacaagagatgatgcaagtatgaatgggtacggggggagcttaaaacctgccaacactgagacttgatgccaggggccrtgcacccgctctgccacctgctaggtctgtgcaatggtcagagcagaggtgtgtgatgagttcagctcccaagcacatccacacttaggaagtgttctgtgtgtttttaaataatccttaccatgtaaagattgtattacatttgtatacaaaatttttttgcattttacttttgtaatatttggggttttatagatttttatttta

SEQ ID NO: 742004 - DNA, 604 bp, Homo sapiens
atggtggcacgaacctgtaatcccacatgctcaggaggctgaggcaggagaatcacttgaaccggggaggtggaagttggcagtgagccgagatcacaccactgcactttagcctgggcaacagagcaagactccrtctcaacaataataataataataataataataattaattaataattctaaagtgttttagaaatacaatactctatagaagccaccagtgatattccatccccagatttcctaatgtaccactaatgagtcatatgtaagtagaaaatgtgattgatttatttgatctacatctagcaaatatattgtgaacatgaagtattaggttacgttttaagaatctcttgaaaattatgtcacattttaaatggtatttatcatagctatcagatgcttcccaagtaattgtgcaaataatttggtcactgccttagccagcagtatgttctttattcactaagtgattcttttgttatctatttccatatctatcttctattcaaagaaacaaagtaattaccaactatttgtattatcagaatatactaaatattttataatccccgaagactaatgtaattggagggga

SEQ ID NO: 742005 - DNA, 597 bp, Homo sapiens
ctttgtgccttgctccagggcaagagtgcaatgggcacactacacaagctccccagcccctctctgcagaatgtgagcgcaggcctccctagcacaccccactggagctgaacatcccagcccctttccttcctcccgtccactgcaggccccgttccttcagatctggcttagagccatactaggccacctggaccatccacctgatacatgacagtgctgttcaccactgtctgattgatcttttcacacagcccgtgactgcactccactgctctaggaccactccrgtgcccacagccacaggattcaagtcgaagtcctcctttggccttctcagttggcctcaatccagtttccagtcccattccccatgtttctcctgcgccaaactcctctcacgccaaagagtcagtcaactgaaggatcagtcatgtgtggaaggccacttggtgccttgggctgggtgggactccctggtggagtataaaaaatactgagacactgggtttgcctttaaggatttacaacctcttggagaacaagccatatgtgaaagcctgtgattcattgccaagctgtactgactatattcaa

SEQ ID NO: 742006 - DNA, 591 bp, Homo sapiens
actcccaaatctactatcatgttgtttctttgtcatttctgctattccgctgaaactgcccttgctcaagccacaaatcactggacttggccaaaacaaatgaacacgtttctctccttatctttgttgccttctctgcagcactccatattctgacactgtcctctggaagctcttatctgcgctaggctcttacttggttttcctcttttctcyacagaagtttcctccttaatgccattcttcagttcttttttctcagttcatttcctaaatgttggcattttccagacctcctgttcttctcactctatacactcaacctggaggacctaattacttatatgttcataaatctgaaaattcatctccagccagagctcccttattcatctccaaaatagcaactctccatttagaagtcctattgatatcgtaaattaaatatgtccaaaactcatccgttttcacttctaagcttgttcttccttcttaattatctcagtgaatgccatcttcatcttctcatccatgccagaaacttcaaagtcattctcgcctctctctcctcattgctgacatccaactaaa

SEQ ID NO: 742007 - DNA, 561 bp, Homo sapiens
tcttagttcctcaagtatttgatttaaagcttagtgtgatggaaccccgttgttacaggaaaatattccagtctttccacaaacatttttgagcaccggttatgtgctcaaaccacatagcaagagattggattattttgtagcacctaatcatctttcttgaagatgaaatggaaattcctactgcacaatcctcatggttttttcaacagttgagtaggtttgaagaccatattttgtcttgtrtaggagaataaggttcaaaataatgggtatcttaaccttaatccaagcaaaatgtcagttagatataatcatctcttgtatcttgcctgctctagtgaacaatttctgtaataaatttcacagttgaaggattaagccttagaaatgattcattatgaaaagagtgagtacaaaatacactagccttttggaggaggtaggagaaagactgcgcagatggggcttgtagagggggcggtgtggacgttgtaacacagatctagttctgaaaagatgccctgaaagagaagtttagtaatatactaccatggtgat

SEQ ID NO: 742008 - DNA, 596 bp, Homo sapiens
aacttgataattttacatatttttaaaaaggtaaagacagaagaaagtagatctgtgctctttgaattttctgttcatttgtattctcttgggaagaagccagtaagcatcataagttttttatgctgttccttagttgttactcctttccataaatttagttccaatctaggcaggaaaattcctttttcctgtggctctactgagacttctggaatttctccaggaggctgtggagaatgttttattgtcattttggtggctgttcctgattggtgagcaaaggtcggaattgttgtcrataatttacaaggcatttcctacaaatttctcagaaattcttcatacatattccaatagctgctgtgtcagacacatccagatcagattgcagcctgctgataccgtgcagcactcatatcaaagtgcttagcaacttctctagcatctttttaattttaattttgcttttagcattctcacagatagaaaccaagtaacaaaatgttaataagggattactaactttcaagaccactcttgagctaaagtccagatgtatgccaagaaagaaataagtaataatctaccctttg

SEQ ID NO: 742009 - DNA, 520 bp, Homo sapiens
ccgggaccgggctgagaaggacctcagctcgcgggcccgccggagccatcggtgtggcgccgagagacggtgcttgggatatgcgacgggaagcccccgccacagcgcaggcagtggccccgccgcgccgcggagccgggcagagcaggtaggagacgccccctgcgcacctccgccyggcggccagcgcgggggaccggagcctggtggtgtgctctgtagggatgcggaagggattcggtcccacattttgcacagggatcctttgcctgttgctcttgtctctgtcccatcctgcgctctaggaggggcagtctttctcgcaggtgatgaatttctctgcaaggtcattgctctctttggctctggctttgaaggtaaatgggagaagacgcctgctgatcgtgggcagggaaatttataatcaatcgggtctgcacactgcgaatatccgaatatgaggggtgtgtgtgtgtgtgtgtgtgtgtgtgtgacatttgtctcattttcctatgcttat

SEQ ID NO: 742010 - DNA, 520 bp, Homo sapiens
ccgggaccgggctgagaaggacctcagctcgcgggcccgccggagccatcggtgtggcgccgagagacggtgcttgggatatgcgacgggaagcccccgccacagcgcaggcagtggccccgccgcgccgcggagccgggcagagcaggtaggagacgccccctgcgcacctccgcctggcggccagcgcgggggaccggagcctggtggtgtgctytgtagggatgcggaagggattcggtcccacattttgcacagggatcctttgcctgttgctcttgtctctgtcccatcctgcgctctaggaggggcagtctttctcgcaggtgatgaatttctctgcaaggtcattgctctctttggctctggctttgaaggtaaatgggagaagacgcctgctgatcgtgggcagggaaatttataatcaatcgggtctgcacactgcgaatatccgaatatgaggggtgtgtgtgtgtgtgtgtgtgtgtgtgtgacatttgtctcattttcctatgcttat

SEQ ID NO: 742011 - DNA, 610 bp, Homo sapiens
tgaatgctgaatgactgggagttaaagtcaatttttggcaaaaacttatactgatgaacttctaggatataggaaaaacataaaaatgttgtctctctttcccctcccccaaaattagatgatacaaggaagatatcctgaaatttaatattgacaaagtagtcttctcaaatggaggcgccaattcagtttaacgtttctgccaaataaaaattttaaagttagaattatattcaagatttaagttacagctaatgctcccctaaacattttactgaatagtatggtaacctcaccccytctctacaccaatttcttatattctacatgtttgattaaattactgattagaagtatagtgtgttagaaggaaattttaaatgattaagtatgcacagcctgcccttgctaaacccaaactgaagaaatttaaaattttaacatgttttaatgattctaagaacatttgccaagttaacatttctacttcatattgcatcattatttttaaggattaatcttattaaaatacaaatttatcttccaccatgaatgtccatagcttaataagtgaaagtatgcaattttaccacaattcatttcatattca

SEQ ID NO: 742012 - DNA, 531 bp, Homo sapiens
agaggaaaaatatttttttcttaactaccatcatttgtccttaaaatcagcagtctgtgtacattatatatggtaatccattacctccacttatcatcttaatgctctcggttccctagaaaaatgtctgatccataagaggtaccaataaatatgtagtgaatgtcaagtagccacaatctttgtctcatttggtagatctcaaaggtcaaggggggaagaacttaaacccaaaagatgtggaaatttatttcattcatttatttcactatgtgtgattaccactcgattccctggcagtaatgtctccacatcatcagcccagactggacaagaaaaggggcagtggggcaaaattgarggatagttctgtcttctaaactggaagccaacatcagaatgcaggccaccatgactgagaaggcagagcccatctgacatctcagggccctctttatgtaagctgtcatccactccagggctacctttacctcttgtgggactcagattaacttcaacaaggacaagatc

SEQ ID NO: 742013 - DNA, 442 bp, Homo sapiens
tttattttgtggaaagaaaacaaaaagactttaaatttatggaatttctttacatcaaccaacatataataaggaataagtcaactccaaggacgttttcaagtattatctcaaatattgtttcctcaagaaagccttctctgactatcaracaccattaggttctttaaacaaatactcttgtagcaacctggactgtctttgggtattttacacaattgcaatcaagtctcaagttgtgtaattctttgtgtcgtatctgtatctcctccatgaggccagggtttagtaagtcttgtgcacccctgtattccagaacatagcccagggtcacatgctcggtaaacatgccttggctgatggacgcaatacgctaaaatgcagagaaacagtttacaaggagaattactctctccttgtttcaatttccttcctagaaaga

SEQ ID NO: 742014 - DNA, 637 bp, Homo sapiens
cagtggttccatatgagtgtgaagttacatcagagaccctgagcaaaaacaaccctataagtttcccgaaaaagcatatgaaaaacattgctatttaagactttctgtgactcatgaaagctagcacttttaccctatatttgcatagttatcatttacaggtattttcctctaattaatttgggttaatttatttcagcccatacaggtataaatgttatccactttatatataagggaaactgagactttgagaggtaragtgatgtgcttaaggtcccatactgctagatgagaccagctacagaatttgcagagtgtcttgttaaaaacaaatgaataaataaatccaagaatttcaagacgacaatagcagagcattaaaccaacttgtagtccctctaagcagggagcccatgtgacaatcacgacccggctactagacagacacggagccaggaatcacatgcaaacctttgaagtccaagtccatctttctcatcaccctctggctggattaggattcagtccctggctttcctccattcatggctgtgacattgcccatacactgcttaagtgacatggatcccagcttctcctcctataaatcaagggattagagaaaattgtcacc

SEQ ID NO: 742015 - DNA, 394 bp, Homo sapiens
gaaggatgataagtgatatggttgccaagggaaactctttcctgattggaagagaggtcatcacaggtttttacaaagaaaggagaagagatggctttatttcctaagatttttwttttctgctcttacagtggaagaaaaaagcagcagaaacaaaaattgtgttgtctgctccttattcactctctgaattcacagaaagtctctaggtaatgagcctctagaggtgcaaacccccatgacaagttttcttagcattgcttaaattattatttgactgtgatgttgtttacccctgtgtttatgtttgttctgtccaattagaatgcatagtaggtatagctaaggtttacatttcataattggtgtgttgcccaggtgccttgtgcatagt

SEQ ID NO: 742016 - DNA, 593 bp, Homo sapiens
agtaggaagaagaggaggagaaggaggttggagaataggggaagttaccatgctctagtaaactgcaagatgttggcatatgacaaaccttggtacaagatataagacaaaatgaaatgggatcgagcgtataatccctgtggctactaactactgcattagtagacaaagcaacaattaggatgagccgtgaatgaggatgtggtgctgtcccttagggcaggtaatmcccaaaacatgcagccatacacttgtctattctccaaagagctgaaccactgaagaaatggtggtctgaaatggcttggaagtctaggtgttattgggagcttggattcgtcacgagccccctaggggcttcacacacatactgattttgcagacttctaccccctcgaatattctgtggagaacaacctatttttttctatcctctcccaaaccgccatgctgagctcatcgcctctgaatttatctccgtgtcaaggagaagatgacagccaaaagtaatacattttgtttaagtcaagtcatgacacatctatgccaaatggagaactcagctggcaattaccaccctgaaaagtgggaca

SEQ ID NO: 742017 - DNA, 651 bp, Homo sapiens
gccctcatcctatatccttgcttcttttcatctccaaatgtatcaggctgttcttgcattgctataaagaaatacctgagactgggtaatttatgaataaaagaggtttaggcctgtaatcccagcactttgggaggctgaggtgggcggatcatgaggtcaggagttcaagaccagcctgaccaatatggtgaaactccgtctctactaaaaatacaaaaattagccaagcatgggggcgcrtgcctgcgtacctgtaatcccagctacttgggagactgaggcaggagaatcgcttgaacctgggaggtggaggttgcagtgagccaagattgcaccactgcactccagcctgggcgacagagcgagattccatctaaaaaaaaaaaaaaaaaagaagaaagaaaaaagaggtttaattggcccacagttctgcaggctttacaggaagcatggtgctgatatctgctcagcttctggggggtctcaggaagcttataatcatggcagaaggtgaagggggagcaggcatatcacatggcaaaagcaagagcgagaaagaggggaggggaggttctacacacttttaaacaaccagctctcgtgagaactcactgtcaccacagcaccaacccattagggatccacccc

SEQ ID NO: 742018 - DNA, 601 bp, Homo sapiens
ttttgagacagagtctcactttgtcacccaggctggagtgcagtggcacactcttggctccctgcagcctccgcctcctgtgttcaagtgattctcctgcctcagcctctcgagtcgctgggattacaggtgtgcaccatcacgccctgctaactctcgtatttttagtagagatgggatttcaccatgttggccaggctggtctcgaactcctgacctcaggtgatctgcctgtcttggcctcccagagtgctggcattacaggcatgagccactgtgcctggccaaattttacataattttcatgtatcatgaaatagtcattgttttttcaattacttamaaaatacaaaaatcattcctaggttgcaggccatagagaagaaggcagcagccatttggcccccatgacttagtttccctgggtttaagctgctgttacgatgattttctttgactggcagcctcatgcagtcctacttaatgcagtgacagtgatggtgatgttccttatggggaaatattcctaacccctcttgcttttcttacatctatttcagagggtctcgctgttggagttggatttggggctatagaaaag

SEQ ID NO: 742019 - DNA, 613 bp, Homo sapiens
taacctttccaaacaaatactactaatataaagtggtgaatgttatacaggtacttgagatattcacaaaataatatctaggctcccaaataacatagagtggccatcatcttatgtggctaagccttgaactttatgcagaccyctagcacaaatcaatccaaacaacacataattatcttagtaagatccgcagttagttgtagtcattcaaaactttgctaagtcttaagtttgcgaaagtcttgagtaggcaagagaccattattttgaaacagaaaaatagttaaatatgtagagtatttgagaaatgtgtgagaactgcctattcaactctgttgggccaggatgtagatctttccaaatcacatgacttctccctgttggcacaatcaatcatatctgaaaatgatgacatatggaaataattaaataacaaagaagagagataaacattgtcaagtgacttgggctgtagccaggaactgacaatgttaaaaaatattttgcagaagattgtacatttaaaagccgtaaactgtgactgatcataggaatttatttttaaataggtttcattagttcaagttagaatgacaataaatgtgaagac

SEQ ID NO: 742020 - DNA, 648 bp, Homo sapiens
tttttttttctgtagagatggggatcctgctacattgaccccctgcctcaacccttcaaagttctgagattacaagtgtgagtcactgtacccagcctatggatcatttaaaaaataaaaataaattctttagtgcgataaatttatttataaggtggggaatagatacatatacatttgtataaaaatataaattctatgccaggcgcggtggctcacrcctgtaatcccagcactatgggaggctgggacgggtggatcacgaggtcagatcgagaccatcctggctaacatggtgaaaccccatctctactaaaaatacaaagaattagctgggtgtggtggcatatgcctgtagtctcagctacttgggaggctgaggcaggagaatcgcttgaacccgggaagcggaggttgtagtgagcagagatcgtgtcactgtggaggttgcagtgagctgagattgcaccactgcactctagcctgggcgacagagcgagactccgtctcaaaaaaaaaaaatctttatctatatctatctatcatctatctatctgtctatataaattcttaggcttggtgtggtggctcatgcctataatctcagcactttgagagaccgagaagggaggattgcttgaggccatg

SEQ ID NO: 742021 - DNA, 634 bp, Homo sapiens
tgaagctttactccaatcatcttcaacgtttatatccccacttagagttggtttcatgaatttgggccattttggatcttcctaacaatcctctaagatagaggtgatatggccattagggaaacattcttttctatcttaatggcatcagaatttctcttgggatatttctggacacacttggtgcttctaaaaacaatctccctaaataaccccaacasggtgggaatactgtgaagatccaattaacatctgtggggtaggattggttgagtagaagcttgaggctaaggaatgtggagaacaacgagaactggggaaggtggtgggagggactggaagataaagaacaggggagacaaagcaggctcttaaagggacaacgccaagcagatgactcagcccacaatcagggctcaatttaacaactgtgtcataatactagtcctcaccggtagagatttcagttcagcatttcccaacattagagcaagcctggttaagccttactgaaaatcctcaagaccctctcctctcaaactcttcctgcaatccttttgggaggtcctaggggtgccttgagtccatgtcaaacaagtcctaaccaccacatggaggtcatcctttttcttcc

SEQ ID NO: 742022 - DNA, 609 bp, Homo sapiens
atattgatattgttttactatctttgctgtttttgtgcgtgaggagagtgataattaagaggattttcttttttttatgtactattatgcaagacttcagtggattgctttttttgactaagcatccttttttactcttcaggaaaaattgcaaattgtgtgtgtgtgtgtatgaatatatacaaakaatatatacatacatacaaagaatatattctttgtaaacaatatcattattttaaaagatacaggtatagtctttgttttctgaaattaaatgaaataaagttttatttgggagagacttcatttactaaatataaatcaaagttagacagttttaatgtaattattaatgtttcctagtaactgtagctttgttccattgtaaatatccatatatattttttcttttttttttatttcttaagaactcaccctgctcctgctctctctcttttttacttcacacttttgccttccaacatgatgaactactgagtttcattcttataggtaccactgaaatgtcactttttctttgaaggcatgatatactagtctcgtaatcattttaatttcacgttaattcaaattatgaaaacattt

SEQ ID NO: 742023 - DNA, 387 bp, Homo sapiens
aacaaattcactcactttgtgtttgcctgaaaatgtctttattgcattcattgctaaaggatatttttcctgtgtatagaatactaggttggagattattttctttcaacacattgaagatatttcattatcttctggctttggttatttctgctgagaaatctcttgttttattttgcatctytgaagctaatttgtagtttctttccccaaccccaccacccccagctgcttttaagactctcctgctgtcttcagtttctttgagttttctgcttaccaacatgtttctctgcttcattttctgttctttcccaccttttgtcagattttgttttctcacatggaaggccatgcacaggcctgaccatggaaaaccctgaaact

SEQ ID NO: 742024 - DNA, 541 bp, Homo sapiens
gttctcttgcctcagcctcccaagtagctgggattacaggcgctggccacaatgcctagctaatttttgtatttttttgtttgtttgttttgagacggtgtcttgctctgtcgcccaggctggagtgcagtggctctatctaggctcactgcaagctctgcctcccgggttcacaccattctcctgcctcagcctcctgagtagctgggactacaggtgcccgccaccaygcccggctaattttttgtatttttagtagagatggggtttcaccacgttggccaggctgatctcgaactctgggcctcaagtgatctgcccgtctcagcctaccaaagtgctgtgattacaggcatgagccactgtgcctggcctgtggaagacccacttctaagaaagctcactcacagggttggtaaattgatgctgctttttggcagaaagcctcacttgctcaccatgcagaattctccatggggtacttgagtgtctttgtgacatggtaactgggttctcccagagtgagtgatggaagagaaac

SEQ ID NO: 742025 - DNA, 481 bp, Homo sapiens
ctttcctcatttctgtcaataaattcaccttcagcacgtttttgtggctgcttatctgaagcctctcaatggtggctgtatcaacagttccaccatgaactatttcttctgtaactcaatttacatttgattcaagtttcacttacagcatcaccacttttgggcttttttgctgcaatttcatcttcgttggtcagttccctcttttgattatccattgtgatgaaatgtcacatgggagacaagaaggcaacataactgcrcactttgctgtctgtgcatgaactgagtaacagatacacagtgaccagtcactgatagactgaaagttgtatgattggtcactgatcatgatgtgcatctcttatttgcatagtgatttgtggactgaagaagctagcagtgaattgtgtactttatgcagttacttagagctaatataccatggtaatttgaatgtgctgttgagggaaggtgttat

SEQ ID NO: 742026 - DNA, 633 bp, Homo sapiens
tgatagactgaaagttgtatgattggtcactgatcatgatgtgcatctcttatttgcatagtgatttgtggactgaagaagctagcagtgaattgtgtactttatgcagttacttagagctaatataccatggtaatttgaatgtgctgttgagggaaggtgttatttaacaaaagcatagcggctgaaattcatgcatatcagaactgtgggaagtaaggatgccctattttctactggaatacagagggcagctaaaartaggttttgtctaagaaattaggatacaaagagtttggcatctaggtaactagaaaccacttgaataggctgatgcatgttaattaattcctttattttggatatacattggatttttgaaaccctacgaacaagtaaatcaaaagcatttaagtccaccattgaaatacttatgaaggtggcagagaaagattgaggttaaacaaagaagtcaagttctctcacaaagaagaaaacatctcagtttccatagctgctgggagacattggaaagagacacggtgcacagtcaagctcctcccccagccccttccctgttctcatgagggcttcaccgatttcctctagcagtagaaactccagaccacatct

SEQ ID NO: 742027 - DNA, 644 bp, Homo sapiens
tgttcttgtgatggtgtcaggccctgttgcagaggcctgtggtggtatgtctaacttacgccaaatctggatcaggactcagaggacttgcacacagagatcctggggggacattctcttctacatcctggatcaggtcatggatgycacagaattactgagaatgaggcacttctcaagtaagcccctgagggcaacagttaaaaggacaaccgggtttatcataaactttcaacttcctggtttcaattggatccagacacataaataccagaaatatcaaagggaaaaggaaagtcacagagctctatacatgtccagaaaaatatggcaggaatgttccagaaaagccaaaccattagcaatcttgacattaaagagtagtgaactccacctttaggtttatgtgctgatatttttatcttcacattgtgctgatatttttatattcacatttcatgttgaactctgatactcaaacttgtggcccagtaaattgcttgtgctattatctgcactttcaaaatgaggaaaaaaagatcatgatcttctcaccactgtgtggcactgcatgtgcctttggggatttctaagtactaacttatatatgactcttgccgggtacagtgtcatgcacctactca

SEQ ID NO: 742028 - DNA, 621 bp, Homo sapiens
ctaaacaagttaggaatggaacaaaacttccttaatttgttaaaaggcattgatgtggtttggctctgtgtccccaagcaaatctcacctcgaattgtaataagccccatgtgtcatgggaggaaccaggtgggaggtaattgaatcatgggggcagactttttccatgctgtttttgtgatagtgaataagtctcatgagatctgatggttttataaaggggaggtctgcacatgccctctttcctgctgccatgtaagctgtgactttkttcctccttcagccatgattgtgaggcctctccagccatgtgaaactgtgattccattaaacctgtttcctttataaattacccagtctcaggtatgtctttattagcagcatgagaacagactaatacaggcatctacagaaaacctacaactaatgccacaattaatggttgaagactgaaatctttccgactaagataaggaacaagacgtggctagtttgccacttccacatatcattgtactagaaatgctagccaaagcaaatatacaagtaaaataaataaataaataaagcatccagatcagaaaggaaaaagtaaaactatctagtataagtatgaaatta

SEQ ID NO: 742029 - DNA, 639 bp, Homo sapiens
ttttgagtttgtccctggaagcccagttacatgtataagcctctaagtctcagtgccttctgtatcagatcttttctttgatttaaaaaaaaatgcatcattatactaataattgcaggacactaagagagaaggagaaacggcaaattttgataatggttctaaggggtaaaaactaagtactgcacaattctaaagtggctttcaactgattaaggattcaaaaagtcattttaaaaggaagtgatacttgatcttggttttccatagcccacaaacacaataaagtgactacacaattgagtctacaaaacaaccagctaacaacatgatgacaggatcaaaaactcacatatcaatactaaacctgaatgtaaatcctttacttaaaagaaatagaggggaaagctgaataaaaagacaagatccaactgtctgctatcattaagagacctatcccacatgtaatgatactcacaggctcaaagtaraaagatgaagaaagatctaccatgcaagcaggcaacaaaagagagcaggagtcacaattcttataatagataaaacagactttaaaccaataacaattaagtaggacacagaaagacattacataatgataaagatttcaattcaaca

SEQ ID NO: 742030 - DNA, 628 bp, Homo sapiens
cacatcaaatgcatgacctgctgacacagtggaaatgcaaaggtgattttcttccctttgccttcccttttatgctctctatcccataagaaatattattatgttgaaaatagcactaagtcaaaatcaatgtaatcacctctggttttattcactatattcagaagcataatttccacggaggaagaataactggtaaaagtaaataaatagtcagcttttgatgkttctcttaaatgcagtaatttgttctataatgaattcgtgttcataaaaaaatttaaaccctacatagagatacagttagaaattgttagtgtcatattactgaaaatgaccatattctcagacaattattttatttgtgtgccctaagtgaaaatttttacacttttatttgaaaagctttttacataaattcatttctttctcactgatgctctttttttagaaatacatttttttacaaaaacactttcaaaaatatttctaacattgcagtgttggataatacacatggaaaagaatgctagtgatgcaaaggcttcatttgttgttttaaattcaactcttacctcctcagaaacaaacttttaaagttgtctcatggcttatatctaaaaagaaa

SEQ ID NO: 742031 - DNA, 612 bp, Homo sapiens
ttacctttgtttacctttgttattttgcccttaaaacaaaagttttgaaatcatggggataaaaatattgctattaacattgagataatattaaaacctatcaggaaagctagttcatctagatctttatttttgaaaccccaatgaaccacatttttaaaaggaatcttaagaagtggcaattttcaaaaaatctaatcataagaatacagtttttcttcttaagatttggtggctcaaacactgcagctgttgttgagtgatctggcccaaataaaaaggctccccaaactcatcaaaccccacatgggataatctattgactttttatgtcatagtacccaaactggagtgtctcatggtgatttgtacagactccagaagaaaaatcttcatgcaggaaaaaaggagtcaaraaatgaatggaattcaggtaacagttacgcacaataaatataattagtatatgtatctaattgtactctaaagaactgtgcatttatgtatacatatgtaacaaacctgcacgttgtgcacatgtaccctaaaacttaaagtataataataataaaataaaaataaaaaaaagaactgtgcattcactgtatgtaa

SEQ ID NO: 742032 - DNA, 590 bp, Homo sapiens
aatttgcctgtaagaggtgtttagtaaacatttattgctaccacaaaacgttgttgacactgttgcagataagaactatttgactaatcagattctgtatcccctagcatgaaagatgcagattcataagaggcacttctggaagagtaacaatagctaacatgttttaatattcactacatattaggcataatgctaagcattttcacgtgttacctcacttatcctcatcaaaatccgtatttgttattattactctcattttacatatgaggaaactgaacctttgcaaaaataaataacttgcytgaggacctacgcaaaccgcccatgtactgcaagaattccaagatgtatatcagggcctatggcatgcaaaaccaaaacagattttaattgatctcacatgtcacattgaagtgaattatttaagtccttgtcaatataaatttgagcttgtggttatttggttagtatttgtcttcccccaaagactgtatgtaagctttgtgaagttagggactgttttgctacatatacagatggtccccaacttatgatggttccacttgcaatttactgactttacc

SEQ ID NO: 742033 - DNA, 618 bp, Homo sapiens
ttaattaaataatatggaaaagatgagttggagtaaagataatagacttacatgagaaactgataagtcttttctagttgtagagagtttggtcactggcttgatcttttcaccctaattcattgttttcttttcacccaacttgttccctttctgtcctcttttatcatcttcatgctcttgttgcaagggccttacagactcagatgactcayctaatccctttctcattcatcttcactttacaggctcattcatactgacaaggctgagggaactttcatgtcacctatatgtggaccctgtaagcagtcacttttcaggtcatcttctttgtagtgtgcctcagaggctctaggcatgtatactttctttagtgttttataatgctaatgtatattgctcatctctcaattcttgactcatactctacttctccattggaaccattttcctgttttgaggcctggtctcgtgactagtcctcttggtatctggatagagcatttcccttcaattacacttgctgcttggtgtcatgcaaggagtgaactgagttcttagacacatggcctcacttctgcttgcaacattctattgctttgtcctacctcagag

SEQ ID NO: 742034 - DNA, 583 bp, Homo sapiens
caaaatgagggagtagggattaggtcattatcacaatcatgtcattcttagcattcttgttcttagacagtacttatctttttttgacaaataattctagttagcaacctgattttagtattccattcccctttacagagagaaatcctattttattttttgctgacaataaaccacaaggtaaaaaaaaaaaaaaaaagaatactacatattagcagctttattcttgttcarggtggtccgtaaaatataagcagtagtcattgagaacatttattaagaaagctctttaaagattatttatatgcaagtttttgttaatacagagctaaaaggctagtcaaaaatttcaggagcattggccgggcgcggtggctcaagcctgtaatcccagcactttgggaggcctaggtgggtggatcatgagatcgggagattgagaccatcctggctaacacagtgaaaccccgtctctactaaaaatacaaaaaattagccgggcatggtggcaggtgcctgtaatcccacctactctggaggctgaggcaggagaatggtgtgaaccctggaggtggagcttgca

SEQ ID NO: 742035 - DNA, 650 bp, Homo sapiens
aaaacatgacctcaccaaatgaactaaataaataaggtaccagggaccagtcctggagaaatagagatatcaaacctttcagatagagaattcaaaatagctgttttgaggaaactcaaagaaattcaagataacacaaaggaattcagaattttatcagataaatttaacaaagaaattgaaataataaaaaagaagcagaaattctgcagctgaaaaaatgcacttgcattactgaagaatgcatcagagtcttttaatagcagaagtgatcaagcagaagagaattagcaaactttaaggcaggctatttgaaaatacattgcragaagagacaaaagaaaaaaatttaaaaaatgaagcacacctacaggatctaaaataaaaaaaaaaaaaagcctcaaaagggcaaatctaagcattattggccctaaagaggaggtagtgaaagagatagggataaaaaggttattcaaagcaataataatagagaacttctcaaacctacagaaagatatcactatccaaacacatgaaggttatagaataccaagcagatttaacccaaagaagactacctccaggcatttaataatcaaatccccaaacatcaaggatcaagaaaggatcctaaaagcagcaaaagaaaa

SEQ ID NO: 742036 - DNA, 650 bp, Homo sapiens
aaaacatgacctcaccaaatgaactaaataaataaggtaccagggaccagtcctggagaaatagagatatcaaacctttcagatagagaattcaaaatagctgttttgaggaaactcaaagaaattcaagataacacaaaggaattcagaattttatcagataaatttaacaaagaaattgaaataataaaaaagaagcagaaattctgcagctgaaaaaatgcacttgcattactgaagaatgcatcagagtcttttaatagcagaagtgatcaagcagaagagaattagcaaactttaaggcaggctatttgaaaatacattgcaagaagagacaaaagaaaaaaatttaaaaaatgaagcacacctacaggatctaaaataaaaaaaaaaaaaagcctcaaaaggrcaaatctaagcattattggccctaaagaggaggtagtgaaagagatagggataaaaaggttattcaaagcaataataatagagaacttctcaaacctacagaaagatatcactatccaaacacatgaaggttatagaataccaagcagatttaacccaaagaagactacctccaggcatttaataatcaaatccccaaacatcaaggatcaagaaaggatcctaaaagcagcaaaagaaaa

SEQ ID NO: 742037 - DNA, 477 bp, Homo sapiens
aaaatatctttcaaacaaggagaaataaagactttcctagacaatcaaaagctgagggatttcatcaacaccagacctctcctgcaaaaaatgctgaagggagtacttcagtcataaagaaagggatatcagtgagcaataggtaatcacctaaaagtataaaagtcattggtaatagtaagtacacagaaaaaaacacaggatattacaacactgtgagtgtagtatgtawattactcttatccctagcagaatgactaaaggatgaacgagtaacaacaaaacaacaaaaagaactacaacaacttttcgagacatagacagtacaataacgtataaatagaaacaaaaaagttaaagagcagggggacaaagttaagatgtagagtatttgtcagttttctttttgcttatttgcttgtttatttgtttaagcaaacagttttaagttgttattagcttaaaataatgggttat

SEQ ID NO: 742038 - DNA, 477 bp, Homo sapiens
aaaatatctttcaaacaaggagaaataaagactttcctagacaatcaaaagctgagggatttcatcaacaccagacctctcctgcaaaaaatgctgaagggagtacttcagtcataaagaaagggatatcagtgagcaataggtaatcacctaaaagtataaaagtcattggtaatagtaagtacacagaaaaaaacacaggatattacaacactgtgagtgtagtatgtatattactcttatccctagcagaatgactaaaggatgaacsagtaacaacaaaacaacaaaaagaactacaacaacttttcgagacatagacagtacaataacgtataaatagaaacaaaaaagttaaagagcagggggacaaagttaagatgtagagtatttgtcagttttctttttgcttatttgcttgtttatttgtttaagcaaacagttttaagttgttattagcttaaaataatgggttat

SEQ ID NO: 742039 - DNA, 553 bp, Homo sapiens
aggccattactgtttgttgtctggatccaatggctcttttgtaatgtttgtgcagttttcactttacaaataatgtacagaacaataaaaggatagggagaacagctttattagaatactttaataagaatttaagcatagtatacccaaattcttcttccatgatgtattccaaatgagtaatgtgctaaaatgcagctaactgttcatcaactgttatacgtgaatctagaacatttccatcttattaatactgattccatatttcaaatacatctctaataagttctaccttatcattactttttgttcttcttgyacttacatcatcaaatgccatgcttgaagaactttgtgaaatcttggacaactcatagttctgttgaaggaggccatcatctttcctccatgtttgcaacatatttttcttcctaggtttgtaaaaagccaattagcatcatcaatctagtgaatattttttatttccaaatcatgtatttcctactagtctttttatttttattttatttttatttatttatttttgagatgg

SEQ ID NO: 742040 - DNA, 506 bp, Homo sapiens
gttgtgagaactttggctacatggaaagtttccttgttgttcgtttgtgtgttttctttattcatacttctttgcctccaaaacatgccagatttttagggaggttaatttcctaaataaaattatttttggggtgagrgggatgggttctgtttgtttgttgttaaccaaaatgtagtgtatctccaccctaaatgttgaggaagctcaaataactgaaatttgaaaagccattgctgatgttgctgtgaatttggtagaaaatgacacaaccctgtcttagttcgtttaggctgccattataaaatatcatagaatgtgtggttttataaacaacataattgatttctcacaatcctggaggctgggaagtccaagatcaagttgccggcagattccttgttgatggaggcctgtttcctggcttatagttggccatcttctcactgtgtactcacctggcaggaaaggcaaggcagctctctggggctgcttttatgaggtca

SEQ ID NO: 742041 - DNA, 399 bp, Homo sapiens
gctgaactcaaaaatatatatttttaatgaatggatgatttaaacaatagttttaggaaacaacatctatggtggggttctaaactgggggggtcggttgatgaatggattataggaggctcagtaaaccttctgaagtactatgcaatactctcggtctgcaggacttggcattttgtgtcttctctttccctgagtgtaatctcctagaaattcctccttgcctttagaatcctcctcaggcctcactctccctgtagagtttcactgagagctctgacaagctatcactccatctkctctagtactcctgtatccttaaatatgtgtcttatatactcagtaaaatgtacttgaattgctgacatattgtctcctctgctaaagaaagaactaggt

SEQ ID NO: 742042 - DNA, 522 bp, Homo sapiens
ggtcggttgatgaatggattataggaggctcagtaaaccttctgaagtactatgcaatactctcggtctgcaggacttggcattttgtgtcttctctttccctgagtgtaatctcctagaaattcctccttgcctttagaatcctcctcaggcctcactctccctgtagagtttcactgagagctctgacaagctatcactccatcttctctagtaytcctgtatccttaaatatgtgtcttatatactcagtaaaatgtacttgaattgctgacatattgtctcctctgctaaagaaagaactaggttgctgatgagatgttgacctattatttatcttgtatcccaaataccaagcccactgaccagcacataatagcagtttatgcacatttgtagaactgaaccaaatatgttaaaaagaaatttaaaagcactgagaatgtgaagcaaactgttttagagactttgatcaactgaggcacatctcatcctctatgtcttgaatcttaactacttgag

SEQ ID NO: 742043 - DNA, 570 bp, Homo sapiens
tgctgtaacaagttaccccaaaccgtgtagcttaataaaacacataattattatcttactgttcctgtaggtcagaagcctgggcaggcttggctggctctactgctttggatcttacgagcctgaaatcaaggtcttgataggcccggcctcttctctggaggctctgtgggagaaatcacttctcagctcactcaagtctttggcagaattcaattgcctgcagatgtagtactgatttccttgctgcctgtcagttggagattctctcggttcctaaaggtcacttgctttcctgcagcagcacagcaagcctttctcatactttraatctctctgatttacccttctgtcactcttctgcctttagtcagagaaaattcccttttgccacatgatgtaacatttataggttacagggatgaggatgtggacatctttgggaaacattctgcctattacagagttcaagggctccaactgctgcaccttgaaatccatcattgggtttgtgctgaggccatcctttccatgggctgctcaatgatggaatgtggcagaaatactaag

SEQ ID NO: 742044 - DNA, 483 bp, Homo sapiens
agctttagtaaatacatttttcatttatttttgaatgaataaatttaaatcaggattatatatatacatatgtaagtatatttgattcattcatttctgaactaatatatgccagatcctgttctagggggtccatcctacctattcagaacaacattcctataattaattcctcacttgttgcgtagacttgctccatgcctggtatggagaaggtgcttatcagtgataattggtatcatgatcacaagtccctgaagggtaagtagattgccttaggcagcatagttaatamattttgaatccaggatggaacctaggtctgatttcaaagtccaggtcttttttccagcagattttacgtgtaaagccttccactctaaggaacaaaatgtcctcaagcactctttgttagttaagttgaacttctatattcacagtcattaaatgtatcatattatggagagataataaaatagcaca

SEQ ID NO: 742045 - DNA, 565 bp, Homo sapiens
attttaatctttcttttatctttggctttttgcatttgcacactgctgagtgggagacagtacccttaatctattttggaaaaacaagactcctctttttatctttagtaagctgtgcttgagctgtcttcatctgtgctgggcttactttccaagtgctcctctaacttctgtattgagatcgctgcacttctgtttagtgatacattttgggtttcacataatactcaggcctgctagtctttgagggatccaccgagagcagcacagctgtagaatcatgatctcacccagagcacawttttttgtacttgtcagccaacttggccaacctaccactttgatctcaaagccaatttccagttggttctaaacaaaggtctcagttctttggtcctgttcaaccaatgtaaggtttttatgtagagggaaaaaattatgctttaaaaatacaaatttataaagaatttcatttcaacagtttcgtttattattaatagtaatgacagtatttattccaaatttactatttatgaaaatctttaaatgtgttttctcatttaaa

SEQ ID NO: 742046 - DNA, 555 bp, Homo sapiens
tggaatactattcagtaatgaacaggtatgaactattagatacatgcaacaacttgggtaggccctaggagaattatgttgattgaaaaaagccagtttcgaaaggttatataacatcctggatgtaatgaaattatagaaaggatcacagattcctggttgccaggagttactatttgggggccaagaatgggacaggtatgactatgaaggaataacatgggcatatttgtggtgatggaacagttttgcatcttgatggtggaagtttcatgaagctacacaggataaaattacgcacacatgagtgtatataactggtgaaatctgaataagctctgtgaattgtagcaatgtcartttcctggtttttatattctcctatagtcatgtaaggtgttaacagtggaggtggagaagtgaagggtgtatgggacctccacatataactttttacttttgtgaacctctaatcattttgaaataaagttttatttttaaaagtatgtatactctgtagctgtcacattgtgaataacagaaaaagtgatcaaa

SEQ ID NO: 742047 - DNA, 618 bp, Homo sapiens
gaaaaacagaagaaaagaaaagagaggcaatagaaaagatgtgagatgagaactctcaaagtggcaggcaggagagtgatttttctggagtcgatacgtgtgggtttgtgtatgagggagatttgagaacactaacatggagagggaaaggtgaaggttaaaggagcaagaaaacaaacagaactgccaagttctttctccaaaagtctgagtagtgccagaaaaggaagaagggtacattatacagaattctatttgtgataaacaattgttctaaaccttaaggcaagagggaggggattatggtatttactttgtggaagcatattaactcttctaggtgataaggatacttttccttcagtggggaagaaagttatttctacgttggaccttcagtattttcagagtccatgcaatcacacaagtaagcactttatccatgcccttaaattaaaaacaccacctcaaacrgcaattaaatgcgcatacacatgtgtaatgtgccaaattactaaactgtttgagttaatttaagaacaaagaactctctagcttagatgtctagtttagatgggttttattcatgtattacgttaagctttggacaactttata

SEQ ID NO: 742048 - DNA, 623 bp, Homo sapiens
ctaatcctacagatgtgtacatacttatacacatatgtgagtacttatcacatctgtgatatgtgtatacactgaaatagaaaaacagaactgatcattcacttgttttgtaaattctcatactattaatattgaaacatttcagatgggggagtttcatgttcctgttttttcgttagttttttcatctcctttcaaattctaaaattgatttctctttataattccatttttaaaatttctttcactttaaaaaaactattttttcttttcttttctttcattttttcttttcttctttctctctctyttttttttttttttttttttttttttttttttttttaaaagggtctggctttgttacccaggttagaagtacagggacgtgatcatagctcactgcagcctcaactccccgggctcaagcgatcctcccacttcagcctcagctgggactacagggacacaccaccacgcctggctaattttttgtatttttgtagagatagagtctcaccatgttgcccaggctgcttttaaactccctagctcaaatgatctgcctgccttggcctcccaaagtgctgggattacaggtgtgagccactgaacccagcctt

SEQ ID NO: 742049 - DNA, 590 bp, Homo sapiens
tattactattttttactaacattgttattattattacagagaatttttcgaaggctacattgcattacactagatcatttaaaaaattttactgagttttgaatttaaaaagtaatatgtgcagatggtaaatttgtttctaataatacataaaggtcctgtgaaaagtcggcctactgacttcctttttccttcccccagaggttttccgtgagtccttcctgaagtggtccatgcatattcagctatgtccgtcggtctgyctgtctagttacctacctctctgtttatcttgatccaacttgtcttttcttcctcaccaaatgggtttgtacaatgtattctgttccatgccttgcatatttcttgtctttcctttttttttctgagattattacaacatgtttctttttttatttgtacaaacttatgtggtacataagacattttgttacatgcatataatgagtagtgatcaagtcagggtattgagagtgtttgcctgagtacaatagatttctgttgagtacagccaccgtactctactatccaacactgaatttattccttccatcttagtgtgtgtttgt

SEQ ID NO: 742050 - DNA, 654 bp, Homo sapiens
ttttcagatgccaaggaatattagcctccagttctcattaactaggtgcttatgcctccatctctggtcattagaaacttcagtaaaatgtactagtcctacattgtatcctagtaaatggagcaaagtgagcatggatacaaatttaacaaacccaaatatcttttaggattgtgaaaataatcgcaggtagcttggaatatraagagaagcataaagaagggaagagaaatcacacagaagcccacaacacaggaatgagctctatgtactaatgaggatgtgaatctgccgtcgacagcagatctggggatggcttctgagtccccgtccatgctgcagattccagacatggacagtctgctgaggccagcacttttccccttttgaagaaagcaactcggctactctgtgaattagctgggtgtgtagaactttaaaagagtgattaatagcaacaagacggatagctgctttgaagtctaagccaaaggcagttcatactttgcagccttttaaaaatgtcttcatctttacttctaaaactgctgtgaatgccagagctatgggaaagagccaagttcaatcctcacagtgctggagtgcatcaaataaccctgggcaacagggttcttgctcactttcttgggagtt

SEQ ID NO: 742051 - DNA, 654 bp, Homo sapiens
ttttcagatgccaaggaatattagcctccagttctcattaactaggtgcttatgcctccatctctggtcattagaaacttcagtaaaatgtactagtcctacattgtatcctagtaaatggagcaaagtgagcatggatacaaatttaacaaacccaaatatcttttaggattgtgaaaataatcgcaggtagcttggaatataaagagaagcataaagaagggaaragaaatcacacagaagcccacaacacaggaatgagctctatgtactaatgaggatgtgaatctgccgtcgacagcagatctggggatggcttctgagtccccgtccatgctgcagattccagacatggacagtctgctgaggccagcacttttccccttttgaagaaagcaactcggctactctgtgaattagctgggtgtgtagaactttaaaagagtgattaatagcaacaagacggatagctgctttgaagtctaagccaaaggcagttcatactttgcagccttttaaaaatgtcttcatctttacttctaaaactgctgtgaatgccagagctatgggaaagagccaagttcaatcctcacagtgctggagtgcatcaaataaccctgggcaacagggttcttgctcactttcttgggagtt

SEQ ID NO: 742052 - DNA, 654 bp, Homo sapiens
ttttcagatgccaaggaatattagcctccagttctcattaactaggtgcttatgcctccatctctggtcattagaaacttcagtaaaatgtactagtcctacattgtatcctagtaaatggagcaaagtgagcatggatacaaatttaacaaacccaaatatcttttaggattgtgaaaataatcgcaggtagcttggaatataaagagaagcataaagaagggaagagaaatcacacagaagcccacaacacaggaatgagctctatgtactaatgaggatgtgaatctgccgtcgacagcagatctggggatggcttctgagtccccgtccatgctgcagattccagacatggacagtctgctgaggccagcacttttccccttttgaagaaagcaactcggctactctgtgaattagctgggtgtgtagaactttamaagagtgattaatagcaacaagacggatagctgctttgaagtctaagccaaaggcagttcatactttgcagccttttaaaaatgtcttcatctttacttctaaaactgctgtgaatgccagagctatgggaaagagccaagttcaatcctcacagtgctggagtgcatcaaataaccctgggcaacagggttcttgctcactttcttgggagtt

SEQ ID NO: 742053 - DNA, 595 bp, Homo sapiens
cttattctttcacccatgggttatttagaagtgtgttaattttcaaatttgggggattttctagttatctttctattgatttctagcttaagtccattgtgatctgagaacatattttgtgtaatttctattttatttcttaaatttttttttttctgagacagagtcttgctctgtcacccaggctggagtaatgtggcgtgatctctgctcactgcaaccgctgcstcccagattcaagcaattctccttcctcagcctcctaagtagctgggattacaggcacctgtcaccatgtctggctagtttttttttttttttttgtatttttagtagagatggggttttaccatgttggccaagctggtctcgaactcctgacttcaagtgatctgcccgcctcggcttcccaaagtgctaggattacaggtgtgagccaccatgcccggcctatttcttacatttgtaagtgtgttttatgacccagaatgtggtctatattagtgaatgttctgtgtgagcatgagaagaatgtgtacttggtggtggtggagtattctataaatgtcaattagattaagttgatggctagtgc

SEQ ID NO: 742054 - DNA, 595 bp, Homo sapiens
cttattctttcacccatgggttatttagaagtgtgttaattttcaaatttgggggattttctagttatctttctattgatttctagcttaagtccattgtgatctgagaacatattttgtgtaatttctattttatttcttaaatttttttttttctgagacagagtcttgctctgtcacccaggctggagtaatgtggcgtgatctctgctcactgcaaccgctgcgtcccagattcaagcrattctccttcctcagcctcctaagtagctgggattacaggcacctgtcaccatgtctggctagtttttttttttttttttgtatttttagtagagatggggttttaccatgttggccaagctggtctcgaactcctgacttcaagtgatctgcccgcctcggcttcccaaagtgctaggattacaggtgtgagccaccatgcccggcctatttcttacatttgtaagtgtgttttatgacccagaatgtggtctatattagtgaatgttctgtgtgagcatgagaagaatgtgtacttggtggtggtggagtattctataaatgtcaattagattaagttgatggctagtgc

SEQ ID NO: 742055 - DNA, 595 bp, Homo sapiens
cttattctttcacccatgggttatttagaagtgtgttaattttcaaatttgggggattttctagttatctttctattgatttctagcttaagtccattgtgatctgagaacatattttgtgtaatttctattttatttcttaaatttttttttttctgagacagagtcttgctctgtcacccaggctggagtaatgtggcgtgatctctgctcactgcaaccgctgcgtcccagattcaagcaattctccttcctcagcctcctaagtagctgggattacaggcacctgtcaccatgtctggctagtttttttttttttttttgkatttttagtagagatggggttttaccatgttggccaagctggtctcgaactcctgacttcaagtgatctgcccgcctcggcttcccaaagtgctaggattacaggtgtgagccaccatgcccggcctatttcttacatttgtaagtgtgttttatgacccagaatgtggtctatattagtgaatgttctgtgtgagcatgagaagaatgtgtacttggtggtggtggagtattctataaatgtcaattagattaagttgatggctagtgc

SEQ ID NO: 742056 - DNA, 604 bp, Homo sapiens
tgtagtgccaaaaaggaagcgctaaacaccaaccccctgcccactcccctcccccacacataatgttgagagtttgtaaatgggatgaaagatccaattgaaagaggttcgcatgaccaaggttggaataaagtagtattttatcataatccaaagtataaaataaatatccaagagtccatcctgatatataagtaaatagaatagataaatctcccattcaaaaaattccaaattatttgtatagatacctcaaggaggtaaagcatagmttcccactccttaagagtgaagtgtgcacagtggctttcatttaatgagtacagtatggtaaggggagcgaaaagagtcactttaaagtggagaacccttataaacactacctcattcaggtgatcactgttaatatcagcagagataagtcacgttgatagtatatctttgatatgatgtgatgagaataggactttacctctgtggtctaccctctgaaacctatatgtattaggctgttcttgcattgctataaagaaatacctgagactgggtaacttataaagaaaagaggtttaattggctgtacaggaagtataacacaggtatt

SEQ ID NO: 742057 - DNA, 600 bp, Homo sapiens
cctcttaagcagtttgatttgaagtttttgttccatttaccttgaatctggaacaatatccctgggtatcatatttatgtccgctctcactatcccttttagcatcttgaagacttcagccatatttgctcttaaccacctttttccccgtgagtacagccctagttttccttagctctaaataaatctgattgccctttattggtgtttttcattcttcgratattttattctggcctctttgtattcaaatagtttgtgtgcctaatctgttccttgactaatacttttcgtgccttttgtgctttatgatgaactttgtattttcaatgcactgtttagagaatttgtggtgattctgcaactcctttatatcttaaaaaaaaaagactgtaacatttttcactgctcctactccataggatttttacttttattagtgcagaaatatgtgtgagataatcctttgctattaattggtctcttttacttttacctttatactgccatttatttcttcatgcttctttatttgttaaccccatttcttattgtatattatcttctactaataaatttcttactatgttactgcacatt

SEQ ID NO: 742058 - DNA, 605 bp, Homo sapiens
ccttcaggtctcagctccctgcacactcctggacagatgaggcatctcgccctctgtgtctctcatgctgcctgctcttcctgtttctgccaggacacatggcaaattccacgggagcagagtattttgttcaccatggtattcccacagaaggctgtcagtatttatcagatgacttgctgaatgaacggatgcttaaacatgtgcacagatgaatgaatgaattgatgggtgaatgaatgaatgaatggatgaatgaggaagtttgcatgtcatcacgacagaaccttgtctctgaagtggtttaagttgtatgtgatattcagatgggtctgtgtagcaaggaccaatagaaatcctccatactctgatgccacatggagtccacaactggataatcaggaaaatgaaattaatattgaaaataatagtgatctttagatgttctttttgggartgctttaaaaaaaaagagaccaacccaaatgcccatcaatgatagactggataaagaaaatgtggcacatatacaccatggaatactatgcagccataaaaaagaatgagttcatgtcctttgcagggacatggatgaagctggaaat

SEQ ID NO: 742059 - DNA, 600 bp, Homo sapiens
tatctcatgtagcccaaaaatatatacacctgttaggtacccacaaaaattaaaaataattttaaaaatgattgaatcacaagagccaagggcagagtttgtttcaataatgatggagtaatatcaatattgccaccagttataatgaggtaatgaatggtaagtattgagaagcagtcattatttttagcaaaaatgcaaaaaaaaaaaaaattcagggacyttggcaagaataattttggtggtaaaaaccactttgtagtgaattcatttatgagatggcaatgtgagaatttagagttaatgagtataaataattcacacaaaggatctggcaatggggcaaaaagcggcatagagtagtggcttaaggggaataaggggctaaaaaaatgttgtctctttttaagatgagagacacttaggatgcttaataataatgagaagggtgcgcacacgtgtgtgtgtgtgtgtgtgtgtgagagagagagagagcgagagagacagagagagagaggttaaagtcatactaagatgagataagtaatggaacaaagatctgagagaataagagaacataagatcaagagcataactgaa

SEQ ID NO: 742060 - DNA, 603 bp, Homo sapiens
atactgctaaagctctcagtcttatttatttcgttggttgaattcttcagctccacaatttatgtttgtttcttttccattatatgtatctctttgatcaatttctcattcatactatgaattgtttttctgattttgttgcagtgtgtgtctgtgtactcttgtatatttctgagttttcttgagtcattattttgaattactttttaaaaaaaattagaaatttccattttggggggtcagttaccacaaaattattgtgtttcattggtaatgtcatatttccttgacttttcatgtgtcttgtgtccctatattaatacccatgcataaggtggaatggttatcttttccaatattatcaagtgtctttcatgtggagatacttttacctgctgatgtttcctagggcttgaytgggtagagcatgctggctttgattccagtgagtgcaatagcatagtctctatgcagttccttcagctgtagtcaacaccagcaatgcctttgtgagcatcagtgtctctggtgctgctccactgtgggtgggacataagctgctccacatgcagagggagttcacgatttatgcattcatatgtg

SEQ ID NO: 742061 - DNA, 555 bp, Homo sapiens
gccctggtctcctgaaagcacacagaattaaaaccaactgactataatcagctttcaacacagttaagggaacaccagccccctcagaggagaaagaataagtgcaagaattatgaaaattaaaacaacagcggcagcaaaaaaaaaaaaaaaaaaaaaaaaaaaaaaaaacttagcatccccttacctccaaataaacaaactagcctttttgacagatatgraactcattatctgaatggaaagaaaactcatcgagattcaggagaaagttgaaacccaatccaaggaatccagggaatccattaaaatgatctaagaactgagagatgaaacagccatttaaagaaagaaccaaacagacctcctggaattaaacatttcactacaaaaagttcataatacagtaggaagtattgacagcagaatagaccaagctgaggaaagattcgtagagctcaaagactagtttttcaaatcaactcagtcagacaaaaataaagaaaaacaaataagaacaatatacaaaacctccaagaaatatgagattatgta

SEQ ID NO: 742062 - DNA, 643 bp, Homo sapiens
agtgactactgggaaaataacaaaattaaagcagaagtaaagaagttctttgaagccaatgagaacaaagacacaatgtaccagaatatctgggacacagctaaagcagtgtttagagggaaatttatagcactaaatgcccaaaggagaaagcaggaaagatctaaaatcgacaccctaacatcacaattagaagaactagagaagcaacagcaaacaaattcaaaagctagcagaagacaagaaataactaagatcagtgcagaactgaaggagagaaatgaaaactygtcgaaaaatcaacgaatccaggagctgtttttttttgtacagatctacaaaatatatagactgctagccagactaataaagaaggaaagagagaagaatcaagtagatgcaataaaaatgatgaagggaataccaccactgatcccataaaaatacaaactaccatcagagaatactataaatatctctatgcaaataaacaagaaaatctagaagaaatggataaattcctggacacgtacaccctcccaagactaaaccaaaaagaagtcacatccctgaatagaccaataacaattgctgaaattgaggcagtaattaatagcctaccaaccaaaaaaaaaaaaaaaaa

SEQ ID NO: 742063 - DNA, 629 bp, Homo sapiens
aagcaggaacaagaaagcaccagcctttggcttaagttctcccatgtgaagaataagaggtggtggtatccttccccatctgtactcaaagcggaaaaacagcagaaatatcttttttttaattatactttaagttttagggtacatgtgcacaacgtgcaggtttgttacatatgtatacatgtgtcttaaatacatatgacaaaggggcaattccactggtgcactctttcttgttttgcttctaggggtccgtcccattcttaatctttgccctttcttgtctctttcacataactctaagactcagagttttttaatcttttcttctacttctcacttcttaaccaatatagaagacaaaaataacattttaattttatatatttctcattcaaattaaaaaagaaagatgagcyagttcagttcatattttgcactaaaactaatttaacattccaaagttaaattatttgtgatcaacaaaaggaaaaacatcttaccctattagcaccatctgacattttcatcaccttagcatcattaaatacaacaggtctgaggttggaactataaaaaaataccaaaaatccccaaccccattcataatgcacaccacagttcaggta

SEQ ID NO: 742064 - DNA, 631 bp, Homo sapiens
aagcttatccacaatgatcaagtgggcttcatccctgggatgcaaggctggttcaacatatgaaaatcaataaaygtaatccagcatataaacagaatcaaagacaaaaaacacatgatcatctcaatagaagaagaaaaggcctttgacaaaattcaacaacccttcatgctaaaaactctcaatacattaggtattgatgggacatatctcaaaataataagagctatctatgacaaacccacagtcaatatcatactaaatggacaaaaactggaagcattccctttgaaaactggcacaagacagggatgccctctctcaccactcctattaaacatagtgtccgaagttctggccagggcaatcaggcaggagaaggaaataaaggacattcaattaggaaaagaggaagtcaagttgttcctgtttgcagatgacatgattgtatatctagaaaaccccattgtctcagcccaaaatctccttaagctgataagcaacttcagcaaagtctcaggatacaaagtcaatgtgcaaaaatcacaagcattcctatacatcagtaacagacaaatagagaggcaaatcatgagtgaactcccattcacaattgcttcaaagagaataa

SEQ ID NO: 742065 - DNA, 631 bp, Homo sapiens
aagcttatccacaatgatcaagtgggcttcatccctgggatgcaaggctggttcaacatatgaaaatcaataaacgtaatccagcatataaacagaatcaaagacaaaaaacacatgatyatctcaatagaagaagaaaaggcctttgacaaaattcaacaacccttcatgctaaaaactctcaatacattaggtattgatgggacatatctcaaaataataagagctatctatgacaaacccacagtcaatatcatactaaatggacaaaaactggaagcattccctttgaaaactggcacaagacagggatgccctctctcaccactcctattaaacatagtgtccgaagttctggccagggcaatcaggcaggagaaggaaataaaggacattcaattaggaaaagaggaagtcaagttgttcctgtttgcagatgacatgattgtatatctagaaaaccccattgtctcagcccaaaatctccttaagctgataagcaacttcagcaaagtctcaggatacaaagtcaatgtgcaaaaatcacaagcattcctatacatcagtaacagacaaatagagaggcaaatcatgagtgaactcccattcacaattgcttcaaagagaataa

SEQ ID NO: 742066 - DNA, 631 bp, Homo sapiens
aagcttatccacaatgatcaagtgggcttcatccctgggatgcaaggctggttcaacatatgaaaatcaataaacgtaatccagcatataaacagaatcaaagacaaaaaacacatgatcatctcaatagaagaagaaaaggcctttgacaaaattcaacaacccttcatgctaaaaactctcaatacattaggtattgatkggacatatctcaaaataataagagctatctatgacaaacccacagtcaatatcatactaaatggacaaaaactggaagcattccctttgaaaactggcacaagacagggatgccctctctcaccactcctattaaacatagtgtccgaagttctggccagggcaatcaggcaggagaaggaaataaaggacattcaattaggaaaagaggaagtcaagttgttcctgtttgcagatgacatgattgtatatctagaaaaccccattgtctcagcccaaaatctccttaagctgataagcaacttcagcaaagtctcaggatacaaagtcaatgtgcaaaaatcacaagcattcctatacatcagtaacagacaaatagagaggcaaatcatgagtgaactcccattcacaattgcttcaaagagaataa

SEQ ID NO: 742067 - DNA, 604 bp, Homo sapiens
gtagtgtcttggattattcccttcagataaagtctatttctcttttgtctctttttaatagtagttgtatgtattagttgtttctcattcttttcaacatttttattttcagaaacaaatgatctatcaaatattaagattgtaattctacttaatccttttgctcaaggaggtgagctatattatagtaaaacaatctcacagatacatcagaattgtatctttccaaattcattttgaaatgtgttatttttaattaactggatataatatgaaatgaaagtaaatgtagaaatacaagaaaattatcagagaaaaacaacaaattatgctggggtgattttatttaagtatattaaatgaatgacaacacttatttgaggatatttgagcttggtagtaacttaaccatccttatacgagccttcatagagatagcgttgagataaataagattttcaaygtaagaaaaatggtgtaaataccagtgtagattttatgtgccttagataccgaaatcttgttagccaaaacaatctggtagtaacaattaatgaattctaaaaaaagggaatcctagaaagtttgatgccagaaaatgctt

SEQ ID NO: 742068 - DNA, 495 bp, Homo sapiens
cttcttttctatgaattaaatacattttatggtttcatcttatctccttttttacttgagaattaaaactctctatattgttaattttaatggttgcttttgagtttgtagtatacatctataactcatcacattctaccttcaaattataatatactactttacatacagtatcatgaagtaacattttcattattttatcctgttgttctgttattgtcatgtaatttatttttatataggttgtaaactcattataaattgttattattcttgtttacattcgaggttaataatgttgttttcttctctctctttctttttttttttttttttgagacasagtctagctttgtaccaggctggagtgcagtggtgccatctcagctcactgcaacctctgcctcccgggttcaagcgattgtcctgcctcagcctcccgagtagctgggattacaggcatgtgccaccacacccagctaatgtttgtatttt

SEQ ID NO: 742069 - DNA, 625 bp, Homo sapiens
gtcctttgtctctgattcggaaatcttgtgtcttctttcggcatttataaaatggtggcaggctagcaggtagcttataattaggataaaatttcagagtttttacagttcttgactaagatagtattactctcttactgtgtctagtcttactacttctaccaggtgatgcttgtgaggtcaagtcctttcattacatcaaaccacagttgagtagcagcatcttccatacatataagggagattaagtgtttcttaaatttttctacattgtagatattgcacatttcaacagagtttctcttgcttctttcgacattcaactatttaatttccctctaatgaatatccttgttttgagatcataattccaccacagtttgtgatacactgctacgtgttcctagagatattatacaaataattattatatagtrgttttaaaatgtaattgttcaatccttttcctacatacaggcaatacatttcaaaatataatatcaataatgtgttttgttttatataattgaagtaatgcattaggcatgaataaaagaaaggttaatagtttaatttgaaacttcataacagtaatcaataaaatttaattgcatgcatttcatta

SEQ ID NO: 742070 - DNA, 573 bp, Homo sapiens
aataactcttgctgctgctcactgtttgggtttgcactgcctttatgagctgtaacactcaccacgaaggtctgcagcttcactcctgaggccagcaagaccacgaacccactaggagtaatgaacaactctggacgggagcaacgaacaactccacacgygctgccttaagagctgtaacactcaccgcggtctgcagcttcactcctgaagccagcgagaccatgaacccaccagaaggaagaaactccgaacatcagaaggaacaaactccagacataccatctttaggaactgtaacattcactgcgtgggtccgcagcttcattcttgaagttggtgagatcaagaacccaccaattccaaacacagaacaacgtggagtttggctggggtggtcccaggagagtctggccactgaatagcccaactccaggggaaaaaccatctttccactccatctggctcccccatctgctgagaggtacttccactcaataaaaccttgcacttggtttccaagcccacgtctgatctaacttttccagtactccaaggcaaaaactgggatac

SEQ ID NO: 742071 - DNA, 527 bp, Homo sapiens
ctttataaatggaagacttctcggtcgggcgcggtggctcatgcctgtaataccaccactttgggaggtcagggtgggctgatcacttgagcgcatgagttcgagaccagcctggataacatggtgaaaccccgtctctactaaaaayaaaaaaattagccaggtatggtggcacacacctgtaatgccagctacttggcaggctgaggcacgagaatcgcttgaacctgggaggcagaggttgcagtgagctgagatcgtgctactgcactccaacctgaatgacagagtgagactccatctcaaaaaataaaaataaataaataaataaaataaaataaatgggaatcttctctcctgcttcctgcacacactcacggctgaggtccctgggcatgccggcaaggcggccaccacaaggcatccacttgcgcctgtgccattccctgtttaaatatttgaaatatcccttgttgaatatatacgtttttattttactattaggttgttcatcccttgaagacaat

SEQ ID NO: 742072 - DNA, 527 bp, Homo sapiens
ctttataaatggaagacttctcggtcgggcgcggtggctcatgcctgtaataccaccactttgggaggtcagggtgggctgatcacttgagcgcatgagttcgagaccagcctggataacatggtgaaaccccgtctctactaaaaacaaaaaaattagccaggtatgrtggcacacacctgtaatgccagctacttggcaggctgaggcacgagaatcgcttgaacctgggaggcagaggttgcagtgagctgagatcgtgctactgcactccaacctgaatgacagagtgagactccatctcaaaaaataaaaataaataaataaataaaataaaataaatgggaatcttctctcctgcttcctgcacacactcacggctgaggtccctgggcatgccggcaaggcggccaccacaaggcatccacttgcgcctgtgccattccctgtttaaatatttgaaatatcccttgttgaatatatacgtttttattttactattaggttgttcatcccttgaagacaat

SEQ ID NO: 742073 - DNA, 490 bp, Homo sapiens
agagctttatttcccataaagagttgcaccttgaggatggccattctgacaggctaagaagcataacttcccgtcagaagcagaaacagacacaaagggaacaggaattttgctgagtagggtggcctaatatacatatttaataagctaygggaagcatcattaatatttaggaatggagaaatgtatgcatgcacaattgagcttcatgccccttcctgggtcccatgtacaaaaaatggcagcattagcatgacccgaaggttgagtttccagccctctgactgtcaaagggtgaagcagaggacacgaaaaccctcactgcacattctccataggctggccagagccactccctggcagatggtctcttatcaggcacagaaggaggggtagcatcaggggttggttgatatcagagtggagtttgaaagggctggtttctggtcagccttaagggaagaaagcttcatcctagttattaagggtg

SEQ ID NO: 742074 - DNA, 594 bp, Homo sapiens
tactgggtactaggctcactaccttggtgacaggatcgtttgtaccctaaacctcagcatcattcaatatactcatgtgtattagtccgttctcgcattactataaagaactgcctgagtctaggtaatttatacaaaaagaggtttaattgactcacagttccacaggctgtacaggaagcatggctcgggagacctcaggaaacttacagtcatggcagaaggggaagcaggcacgttctacatgtctggagcaggagtaagagagcaaaggggtaagtgctacacatatttaaacaaccagatctcgtgaggactcactcactatcacgagaacagcaaggggaaaatccacccccatgatccaatcacctcccaccaggctcctcctccaacattgaaarttccaatttgacatgatatttggctggggacacagagccaaactatatcaccatgtaacaaacctgcccatgtaatccctgaatctaaaataaaagttgaaattatatttatattaaaaagaaccaactaaatggttctcaaagtgtggttcctggcccagcagcatcagtatcacctgccgtgaaataa

SEQ ID NO: 742075 - DNA, 634 bp, Homo sapiens
ttagttgcgtggtcaaaattatagacctgaaataggatcgtatgatataacaaaaatcaaaacaaaatctgtctcctgaaaatattcagtcatatttccttcaacattttcaatgcagtgaaatcagcagtagtttaactcctgagcaaaacaaatgtctatcagcaatattttccctatttaaaatccatgctttacaatttgtataaaaaatgagtttgaaagtcaagggaaaaaaatagaaagtaaattactttgaaatggttgggcatcttgagtggtgttttaaaattgaattattcttgtgtttggaaaacaaagaggattgtaatataaattgtttttctcccagaaatttctttcaggatttatrgcaacaaccagtttatccatggccatacgtggcattgtgttaaataacacactactctcactttatgaattacaaaacacccatggaatgttaaataacctaaattcaatcgtgtatatcagtgaattactaaagtgcatttaaaaagctgtttgcctatgaaaacatgtaaaataagacatttaagaaaatgcaaattgttcaacttcatagaattcctacaaaagaagaaatagtttaatatcgagcagtaacatgaaa

SEQ ID NO: 742076 - DNA, 605 bp, Homo sapiens
gtatgcacacacataaacacatatagtagttaattgtaccagtcatttttttccaacaagaaaacttaccttttttgcctttctgaagtatattaaatgcattggataattataaattactcatctaatcacaaggaagaccacagagaattaaaaaaatggtgtcactaagaaaacatatttcttttctaatttttcaaataattttgataagcttygattctaagcagtaaatggttctgtaaaataaggtcatatatttttcaaatttttttacaaatattttggtgtagaaggcacacattagcttgtgtgcttttataagtgttagaaattaagatgttcagtaacaccccagacgagctcaccatgcaatccttaggcacacaaaaagttcggaaacgttgcctgggattagtggttctcaagtttcagtgaatatcagactcacccagaggacttgtgacagcagattgctgagtcccatcccagagtccctgatttagtaaatttaaagtagaaacttctagcaagttcccaaacaatgctaaggtttctggtctggagccaccacattttgagaatcaccactacaatccttatta

SEQ ID NO: 742077 - DNA, 605 bp, Homo sapiens
gtatgcacacacataaacacatatagtagttaattgtaccagtcatttttttccaacaagaaaacttaccttttttgcctttctgaagtatattaaatgcattggataattataaattactcatctaatcacaaggaagaccacagagaattaaaaaaatggtgtcactaagaaaacatatttcttttctaatttttcaaataattttgataagctttgattctaagcagtaaatggttctgtaaaataaggtcatatatttttcaaatttttttacaaayattttggtgtagaaggcacacattagcttgtgtgcttttataagtgttagaaattaagatgttcagtaacaccccagacgagctcaccatgcaatccttaggcacacaaaaagttcggaaacgttgcctgggattagtggttctcaagtttcagtgaatatcagactcacccagaggacttgtgacagcagattgctgagtcccatcccagagtccctgatttagtaaatttaaagtagaaacttctagcaagttcccaaacaatgctaaggtttctggtctggagccaccacattttgagaatcaccactacaatccttatta

SEQ ID NO: 742078 - DNA, 605 bp, Homo sapiens
gtatgcacacacataaacacatatagtagttaattgtaccagtcatttttttccaacaagaaaacttaccttttttgcctttctgaagtatattaaatgcattggataattataaattactcatctaatcacaaggaagaccacagagaattaaaaaaatggtgtcactaagaaaacatatttcttttctaatttttcaaataattttgataagctttgattctaagcagtaaatggttctgtaaaataaggtcatatatttttcaaatttttttacaaatattttggtgtagaaggcacacattagcttgtgtgcttttataagtgttagaaattaagatgttcagtaacaccccrgacgagctcaccatgcaatccttaggcacacaaaaagttcggaaacgttgcctgggattagtggttctcaagtttcagtgaatatcagactcacccagaggacttgtgacagcagattgctgagtcccatcccagagtccctgatttagtaaatttaaagtagaaacttctagcaagttcccaaacaatgctaaggtttctggtctggagccaccacattttgagaatcaccactacaatccttatta

SEQ ID NO: 742079 - DNA, 645 bp, Homo sapiens
aattttggtctcaattcccactctacagatcattagccactcagtttttggcaaatagcttttcttgacttcagtttactggtttcttcaactgtaaagtaggaatgttgaacattaggctatatggcagaatgaattttaatagatgtcataagtatagatgaggctattttatctgcttgatgtctgtaatgccacatcccagaccactggaaagcacagttaacactgcaaatatacaagcagttttgacttcttttgattctattttgcatcatgaaggcaaagtataacctctcatttattcaaggcccatttatttttttttattcagtgattgggtaaatgcagatagtttctaaaatgcctttctaattattggaggaattatttgaaggtttggctgggtatttctgtgagacgagatggggaagatggagatagaggaattaatatttctcaggtttatgaraaattctaaatgaagagtaaacctaccttaaagtaaacctaccaggagtaaacctaccatgaagattgtgtggacttccctctctccatgttttcctcttagataaaaaaatattttgaaagtaagtatcaaatcatttaataattaaccaggcatccttcatctaaaatagt

SEQ ID NO: 742080 - DNA, 582 bp, Homo sapiens
atttcctgattttctttcttttttttttttgaacagggtctcactttctcatccaggctggaggtgcagtggcacaatctcagctcactgcagcctcgacctcctgggctcaagcagtctgccttcctctgcctcccagagtgctaggattacaggcaatgagccaccacacttggccccttatcattttcttaataacctttgcctttctctagtttacttattgtaagagtatattatatactatacatataccatacaaaatatgtgttaatcaactgttaakcttatcagtaaggctcccagttaacagtaggctattagcagttaagttttgggggaatccaaagttatacaaagatttttgactgcacaaggcattggcagccctagcccctgcattgttcagtggtcaactgtagtacatgaaagtgttcaccaataaactccttaggtatcgcagaattttttaaaaagtcagaactgaaaggaatagagttagaaaaagggaaatggaaggtaatggagttccagtgacacaaaaaactaacttaaagcatgtgactaaaagatttctttccc

SEQ ID NO: 742081 - DNA, 607 bp, Homo sapiens
attgcattgaatccataaatcaatttgagagaacagacatctttatgatgttctgtttatgaaaaaggtatgtcttagctaggtgtggtgattcacgcctacaatccaagcacttttggaggccgaggcaggaggattacttggggccagaagttcgagaccagcctgggaaagatggtgataccaagtctctacacaaaatacaaaattagctgggcatgatggaacatgcctgtagtcccagctacttgggaggctgaggcaagaggattgctttagcccagaagattgaggcagcagtgagccgtgcttgcaccaytgcactccagcctgggctaagagtgagaacttacctcaaaaaaaaaaaaaaaaaacaaacaaccagatgtgtctttccatttatatttgtggtagacagaataataccccctgctaagacgtccatgtcctaatgcccagagcctgtgatatgttacattgcatctgagttatctagatgggcccaatgtaatcacaagggttttataagagggagacaagagggtcaaagtcagagagaagatgtgaggactgaagcagggtttgaatttgaagatcaagaaagggg

SEQ ID NO: 742082 - DNA, 607 bp, Homo sapiens
attgcattgaatccataaatcaatttgagagaacagacatctttatgatgttctgtttatgaaaaaggtatgtcttagctaggtgtggtgattcacgcctacaatccaagcacttttggaggccgaggcaggaggattacttggggccagaagttcgagaccagcctgggaaagatggtgataccaagtctctacacaaaatacaaaattagctgggcatgatggaacatgcctgtagtcccagctacttgggaggctgaggcaagaggattgctttagcccagaagattgaggcagcagtgagccgtgcttgcaccattgcactccagcctgggctaagagtgagaacttacctcaaaaaaaaaaaaaaaaaacaamcaaccagatgtgtctttccatttatatttgtggtagacagaataataccccctgctaagacgtccatgtcctaatgcccagagcctgtgatatgttacattgcatctgagttatctagatgggcccaatgtaatcacaagggttttataagagggagacaagagggtcaaagtcagagagaagatgtgaggactgaagcagggtttgaatttgaagatcaagaaagggg

SEQ ID NO: 742083 - DNA, 607 bp, Homo sapiens
attgcattgaatccataaatcaatttgagagaacagacatctttatgatgttctgtttatgaaaaaggtatgtcttagctaggtgtggtgattcacgcctacaatccaagcacttttggaggccgaggcaggaggattacttggggccagaagttcgagaccagcctgggaaagatggtgataccaagtctctacacaaaatacaaaattagctgggcatgatggaacatgcctgtagtcccagctacttgggaggctgaggcaagaggattgctttagcccagaagattgaggcagcagtgagccgtgcttgcaccattgcactccagcctgggctaagagtgagaacttacctcaaaaaaaaaaaaaaaaaacaaacaaccagatgtgtctttccatttatatttgtggtagacagaataataccccctgctaagaygtccatgtcctaatgcccagagcctgtgatatgttacattgcatctgagttatctagatgggcccaatgtaatcacaagggttttataagagggagacaagagggtcaaagtcagagagaagatgtgaggactgaagcagggtttgaatttgaagatcaagaaagggg

SEQ ID NO: 742084 - DNA, 538 bp, Homo sapiens
atacaattccagattattttttagaataagatatatctgtcagagaaaaaaaaatctaactataatgccaagctctggaacatgcctctaggaaatgttaaaagctgctctaaatcagcaaaagaggaaacatataatttaactttagagcagaactactacccaagcaaaaattttaatattttgatctcaagacaatagcctcaaatacaaaaattcaagatgtgccgcagaacatttaataatgatcattttcaaagtgtcaaaataggacaaaycatgtgtattatatatttacataccttattttctttaattctcataaaaactctatgacatattattttccttttcaaaatgagaaaaccaatgctataaaggttaactcaagtcccacacctacgaggatagctggaaataaaaaccctgtctgattcctaagtccatttctttctatgactctatactctgaggcttgtatggcttcatgaaaagccataattttttaaatacccattttagctaatactccaaatgt

SEQ ID NO: 742085 - DNA, 613 bp, Homo sapiens
atatcatgttcatggattgaaagacttaatagtattaagacatccatactacctaatctacaaattcaattcaatctttatcgaaaccctaagattggcttttgaagacattgaaaaaaccatcctaaaattcaaacaaaatctcaagagatcccaaatagccaaacagatttgaaaaagaacaatgttagaggactcacactcctgattccaaaacttactacaaagttatagtaatcaactcagtgtggtagggtagtggcataaagacagacatatagaccaaaggaataatatagagatgccagaaataacccttgcatatatgrccaaatgatttttgacaaggatgtcaagattatacaatgggaaaaggatagtcttttcagcaaatggtgctggaaaaattggatatctacatgcaaaaagatgagttggatctttacctaacaccatatacaaaaattaactcaaagtggaccaaatacctaaatgaaagacctaaaatcataaaactcttataagaaaacatagaacaaaagcttaatgacattgggtttggcagtgatattttagatatggtactaaaggtgtaggcaaaatgtgacaaaat

SEQ ID NO: 742086 - DNA, 533 bp, Homo sapiens
aagagtaaaaaggcaatgtgcagaataggagaaaatgtttgcagataacatatctgataagaaattaatatccagagtatatagagaattcctaaaactcacttaaaacaaagtaaacaatctgacaaaaaatgggcaaaggacttaactagacatttctccaaagacaatatgtaagtggcaaataagcacatracaagatgctcaatgtcactaaccagtagggaaatgcaaatcaaaactataatgaggtaacacatcacactcattaggatggctactattaaaaaaaaaacagaaaataataagtgttggtgagaatatggagaaattaaaaactttgtgcacttttggtgggaatgtaaaatggttcagccactgtggaaaacagcatggctaaaactagtattaccatatgatccagcaattttacttctgagtatatacccaaatgaactgaaagcaagatcttggggagtatttgtgcgctcatgtttatagcagcattattcacgatagctaaaacagggaag

SEQ ID NO: 742087 - DNA, 481 bp, Homo sapiens
aacttagccacaaactcagtcacataataaaagattttcttggtgttttaggatcagtctgagcagatttaaaaaggagactatgttgtatttcagaggcccaccatctgtgtgggcagacagaagaagaccacagctcaattcagatggaagaggcaacaatcagaaaggatgtggctgagaggaaggactcacatctgctgtgagtccactggagccatgagtaataacagtgccttytattttagagctggtggtgagaaagctctctcaaagcctgacaagtcatctcctctactgcttatttattcgtgttattaaagatgtttataccttacttactttggtataggtctacaagtgtaacggaagagaaaaatagaaaaaaaaaaaaaacagaactaggttttccatgatggactgcaacccacgacaggttacatctatcaagaacacagtttctctgttcacacatttaatt

SEQ ID NO: 742088 - DNA, 509 bp, Homo sapiens
accctgggcacatcccatcagctcagtaatccttcattctcaacagcagacatccaatttggatccaaagcctgaccattcacaggaggatcgtctggggagataaaagtagagcctgctttgggagcagggaggtggttatgccagagttgagtcactatcactcttcaagaggccggagcacttgtactcagcactggggaggggaagcgtctggtgcttgtgttctcccagaactccgtccctgcctacagagggctccagccagcatccctkgattaacactgcccacctccactcactcctttctctctgggccaggcccaggccacagcagttttcttttgttatctcatttaaaccttaaatagtggtcttgggaaacatgttttctgtgtctttattctccacaaatgaggaatcacagcctccagatatatcaggtgcccatttagggcatgctagtaataatcacaaagtctaatgtgtatcgagcccttactccatgt

SEQ ID NO: 742089 - DNA, 509 bp, Homo sapiens
accctgggcacatcccatcagctcagtaatccttcattctcaacagcagacatccaatttggatccaaagcctgaccattcacaggaggatcgtctggggagataaaagtagagcctgctttgggagcagggaggtggttatgccagagttgagtcactatcactcttcaagaggccggagcacttgtactcagcactggggaggggaagcgtctggtgcttgtgttctcccagaactccgtccctgcctacagagggctccagccagcatcccttgattaacactgcccacctccactcactcctttctctctgggccaggcccaggccacagcagttttcttttgttatytcatttaaaccttaaatagtggtcttgggaaacatgttttctgtgtctttattctccacaaatgaggaatcacagcctccagatatatcaggtgcccatttagggcatgctagtaataatcacaaagtctaatgtgtatcgagcccttactccatgt

SEQ ID NO: 742090 - DNA, 501 bp, Homo sapiens
tacaccatcttctgaaatgcacagagagggatcattaactgtcctctattttctctgaggatggaataaagcaaagaaggatttcaactgcagcaggaaggagccgagttagatattagatgaaccgacaggttaatcaaacaattcaactagcttccagagatgacttggctactgcagatttaacataygcatgatctcctagattgccttctacttttataattcattctcagatcagatatacactagaacccaagaagtctctcttctcttctagttctttccaacctagaatgcctatttagaccttcgtcaaaattccgacttgtctttgaggtgcacatgtacttttaccttcttttggtctgtaagatctttaattcatgtaacattctgttacatagcactcctttctcatcaataacatatgccttggtactttattgtatgagaatataaattagattcatcaggctacaccactgccttcttagttaa

SEQ ID NO: 742091 - DNA, 573 bp, Homo sapiens
ttccccaatgcgagtgctgtattaattaacacgggaaagtgcttgaaacagtgcctagctcataataggtgttcagtaagcgtagctgccatgactggccacaatcaccacaacagagctgaaagatgcctctagagatcatctagttctgtgtctgcatacacaaaacaaaacaaaagaaaaactgaggcctacagagagcccaggacttatccgcactcagtcaggtagttttgataaaggatttgtgttacctctgtgaggccagtataggaaaaagggccttaagttatggcaaactggatttagaactcttatgaagtttctagtcttaattaggaaaaggatggattaatgaaaagcaagatggaaacaacacgtagtaactatagtgattaacatttaagtgtttatgayagataccaaatattcttcaaacagcttcccatgcattacatcattcagtcttcaaacagccctatgaagcacgtattattaggaatgacattttatagatgagggaactgtacagagaggctaagttacctgcaccagttggcacagcaattaagt

SEQ ID NO: 742092 - DNA, 633 bp, Homo sapiens
agtttcttgggtgatccttttcacctcctactcccactatattttttcttcagagacttacattgggggacttatgccttttttgtcatagcagaaaactctaaatatgtagaaagtttaaaagaaataaatctcattggctgaacacagtacattttaggagacaaaaaaaaatagaaggatgtgtttgaaaataaattgagttggaaaatatctagaggtttcttcactatcatatggtatgtttaaacttgtctccttgtcatcttccttgctctctgatcttaagaagattaatgagatgatgatgtttaatgcttgaatgtttggaagaagagtgctttgcaaatgtcaagggttagtgttatccttcgcagtagtgattgaccataagactgttctcgttattgtatttcattaactaatgctctcatttatcaagtattgaggcaagggagatatagtagtgggcaacagacaagatccttgaawactgtttaatgaaaaagataaacaagtaacacatgattacttattaaaggaattaaaatttatttaaaattgtgttaatatctctggaaaaaagaattccctttttctctatcttaacatatagaacaatgggaatcttgg

SEQ ID NO: 742093 - DNA, 497 bp, Homo sapiens
gagtgtcccagagcagcttagtctatgttagctgctggtgacaaacgaccctgtttgcccttgagcacaccggccctgggctgagtgtgcttgctgctggcactgcccctggctcttcctgcatgccagggtctaagcctgagccgcatgcttgatttccacaggctcatattgaaccttcactgcatctgtgaggcaggtacagctgacactcttactggtgactcacagaggatcaaaggtctgagtgacttcagatgacgtgcaccaccctcctggkccatggagatccacgtggctaggatggcttccagctagacctacagctcaggtatggtgacagaaaacaaaggcttctctccacctctatgctatttccttgtttaacctgccctgcaaaggagctcatagtggagtccctgtggcttagcgggaggggagggcaagtatcagaggcacccggtgggacacaggaacctaggaccccaatgcctagg

SEQ ID NO: 742094 - DNA, 505 bp, Homo sapiens
tactatactattatggcacatgagacagagacccaggttcaacctcccttctgtcacttatcatgtatctatctggccttggtcaaaccacttacttcttcagagacactggtttccttatctacaacaataaggagtttaagcttcaggttcccttctagctgtgatcttakgtgaccccctctcctccgactcaatccctaaccactggcaaccactaatctgttctccgttcccaaaaggttacataaaggggatcatgcagtatgtagttttttgggattggtttctggcactcggcataattccctggagattgatccaagttgctggatgtactcagcatttgttccgttttaccgctgagtgatattccacggtatggctgtatcgcaagcagaaccattcatcagttgaaggacacgtgggctgttttcagtttgggactattatgaataaagctgctatgtgaacaggctcttgtgtgaacattttcctttcttgg

SEQ ID NO: 742095 - DNA, 604 bp, Homo sapiens
cttgttgtttacattcattgtctcttgatggtgaaaatactgtttgacggtgaccactgggaacctctttccagggctgtgatcagtcaggtcacctcggtagcttgtaatcagccatggagggaatacttacaccatggacactggcaaatgctatgaaccagggcttgacttactgttttgttgattgtttagtcttaaagacatgatagagaaaaygttaatacccaatgcagattaaacatgaaagcatgtcatgtctatagccatcatactgtgaatagcacaaaaacgtgaggatatattctttcattgtcagaaaactcagcaattcagcaaagaagtcactcacatcatgaacaagctagtgaagcttcattgttgtttcatttcttttttacttgttaacatgaatgaaaatatcaaccagcatttatgtcagaacttctctcattcaagaatcggaaccataggttgactacagatattacataaaagtttggcagaaaaaaatcaataaaatattctgtgagaataaattggctataagaaatttataataatgagtattataggatttggtattatttgtaaatatttgctg

SEQ ID NO: 742096 - DNA, 604 bp, Homo sapiens
cttgttgtttacattcattgtctcttgatggtgaaaatactgtttgacggtgaccactgggaacctctttccagggctgtgatcagtcaggtcacctcggtagcttgtaatcagccatggagggaatacttacaccatggacactggcaaatgctatgaaccagggcttgacttactgttttgttgattgtttagtcttaaagacatgatagagaaaacgttaatacccaatgcagattaaacatgaaagcatgtcatgtctatagccatcatactgtgaatagcacaaaaacgtgaggatatattctttcattgtcagaaaactcagcaattcagcaaagaagtcactcacatcatgaacaagctagtgaagcttcattgttgtttcatttcttttttacttgttaacatgaatgaaawtatcaaccagcatttatgtcagaacttctctcattcaagaatcggaaccataggttgactacagatattacataaaagtttggcagaaaaaaatcaataaaatattctgtgagaataaattggctataagaaatttataataatgagtattataggatttggtattatttgtaaatatttgctg

SEQ ID NO: 742097 - DNA, 652 bp, Homo sapiens
cggccaatggcatttccaacaaaagtacgtcaccttggcctgctcatctgcctgtttctcttcttgcctctttgtccactcaaagtccctgatacccagcctcctggcctgccttctcacaccctgaataatctgttcatcttctgcccacttacctcygagcacagacccagtgaaaactcctttaattcggatttatgcagcaagtaatggatgcacctcacaatagcagccgggggaaacagcagcactcctcccagcctccatgggggatgtgcaacctcccctggacagcctctctgctgatagctccatgacgaaagtattgagtaaggaacatagcctttcctgtgtgccaggcgaagtttcaggggcttcagctctactgtgtaacagactcctgacagctcctgctatactcaacagtgttcgagatttctaagtaggactgtcctggacaaccccaaacacgtgctcactctacctctagtcatgattcctgctgaagtcttgagaaaactgagcagagagaagctacatgcattttccaaggtcactcacctagtgagaggaggaggtagccttgaacctgggtggtttggcatcagcatgggtgttctatgctgtagcacaggggtcctcaacccccagg

SEQ ID NO: 742098 - DNA, 652 bp, Homo sapiens
cggccaatggcatttccaacaaaagtacgtcaccttggcctgctcatctgcctgtttctcttcttgcctctttgtccactcaaagtccctgatacccagcctcctggcctgccttctcacaccctgaataatctgttcatcttctgcccacttacctctgagcacagacccagtgaaaactcctttaattcggatttatgcagsaagtaatggatgcacctcacaatagcagccgggggaaacagcagcactcctcccagcctccatgggggatgtgcaacctcccctggacagcctctctgctgatagctccatgacgaaagtattgagtaaggaacatagcctttcctgtgtgccaggcgaagtttcaggggcttcagctctactgtgtaacagactcctgacagctcctgctatactcaacagtgttcgagatttctaagtaggactgtcctggacaaccccaaacacgtgctcactctacctctagtcatgattcctgctgaagtcttgagaaaactgagcagagagaagctacatgcattttccaaggtcactcacctagtgagaggaggaggtagccttgaacctgggtggtttggcatcagcatgggtgttctatgctgtagcacaggggtcctcaacccccagg

SEQ ID NO: 742099 - DNA, 586 bp, Homo sapiens
aggaagctaaggcatgagaatcacttgagcccgggagaaggaggttgcagtgagtggagatcgtgccattgcattccagcctgggtgacagagcgtgtctccatctaaaaaaaaaaaaatatatatatatatatctagctttgctttggttttttgtgcttttggggtctgatctaagaacgtttgcccaactgaaggtcrtaaagatttactcctatttattttctaagagttttataattttagctcttacatatgagtctgtgattcatgttgagttaatttttgtatatgatgtaagatacaggtccaacttctttctttttcgtgtagatatccagctatccctgcaccatttgttgaaaagacaagtctttccccattgaatatcttggcatccttgtcaaaaatcaatggaccatagatgtacggggttatctccagacactcaattctatttcattgaccaatatgtctgtcttcacactaataacacactattttcgtagctatccctttgtgataagttttgaaaatgggaagtatgagtgttccaactttgttcttattgttaaagataattttg

SEQ ID NO: 742100 - DNA, 586 bp, Homo sapiens
aggaagctaaggcatgagaatcacttgagcccgggagaaggaggttgcagtgagtggagatcgtgccattgcattccagcctgggtgacagagcgtgtctccatctaaaaaaaaaaaaatatatatatatatatctagctttgctttggttttttgtgcttttggggtctgatctaagaacgtttgcccaactgaaggtcataaagatttactcctatttattttctaagagttttataattttagctcttacatatgagtctgtgattcatgttgagttaatttttgtatatgatgtaagatasaggtccaacttctttctttttcgtgtagatatccagctatccctgcaccatttgttgaaaagacaagtctttccccattgaatatcttggcatccttgtcaaaaatcaatggaccatagatgtacggggttatctccagacactcaattctatttcattgaccaatatgtctgtcttcacactaataacacactattttcgtagctatccctttgtgataagttttgaaaatgggaagtatgagtgttccaactttgttcttattgttaaagataattttg

SEQ ID NO: 742101 - DNA, 636 bp, Homo sapiens
aaattgctgcaactattaatatccaccaactttgtatgaaaaatgtaatcctgcttaaaaacaaacaaacaaacaaaaaaacttcctccgtctctgcctgtataagtgaaaccttaactttcctactttgaaacattgactccgtttcttggagttggtgttttcrgataggccatcctcacacttggtgtttgaaggcactctctttattcattccatcatttattgtgcttaatgcgccatttgggtcctctaaggggcagacgctgagatggagttaggactccagaagattgctgggatttggcctctgtgagcgatgagggagaggtggattggacgcaatgtagctctgacaaggcctcggcccaaccacacagggaggagttcccgcactgggtagaaactgccagggctccagtgcccggctgtgctcagtgagtgtctgggggcaacctggaaggagtgtggagggggctggaggtgctactggctggagccccactgcacccttgcagttgaatgtcaagttttctcctgaagggagatgtctgctgtgctttctcgtggacgctgcagcccatcccttgctccctggccctctgcttctccatacatgtgctggagctgcacctg

SEQ ID NO: 742102 - DNA, 508 bp, Homo sapiens
tgacagttgtaatttagtgaagggcataggctgtagtgggcctactccatcttgattagcactagaagtaaagaatatgattttgaaggacctatgagagattcaaataattatatctagtgaacaatatgagtctggatcttygagtttctattgaattcaatttgggattcatatataagtatatgctaattacatttctaggaatgactgagagtacccaattggtgaatgtacatgaataagaagagagcacaatcttggtgccagcaacatttaggtaacatttgaagaaagggatgcatgcagtcaggctgaaagggaatgagagatatttgtgcattacaaggaaatcacagagtatgaattcttatcaactagaatgttgcatgctacagaagctaagaaaaagaaagctttataaagcaagaaattgttaaaagtttgaaattctacccagagatcaagaagcatgacatctgaaaagtatccatttaatttagggaca

SEQ ID NO: 742103 - DNA, 508 bp, Homo sapiens
tgacagttgtaatttagtgaagggcataggctgtagtgggcctactccatcttgattagcactagaagtaaagaatatgattttgaaggacctatgagagattcaaataattatatctagtgaacaatatgagtctggatcttcgagtttctattgaattcaatttgggattcatatataagtatatgctaattacatttctaggaatgactgagagtacccaattggtgaatgtamatgaataagaagagagcacaatcttggtgccagcaacatttaggtaacatttgaagaaagggatgcatgcagtcaggctgaaagggaatgagagatatttgtgcattacaaggaaatcacagagtatgaattcttatcaactagaatgttgcatgctacagaagctaagaaaaagaaagctttataaagcaagaaattgttaaaagtttgaaattctacccagagatcaagaagcatgacatctgaaaagtatccatttaatttagggaca

SEQ ID NO: 742104 - DNA, 689 bp, Homo sapiens
atatttttcataagatgaaaaaggggtgcagagagtgttttgactcaatatggctaaattattcttatatatctcctttcaatgtttccataaaattgcaagaaaactggcaatagcattgatagctaaagagaaggtcattggtggttatttgggaaactttgtgctacctccattgtggatggtgtgaatcataaaacaacacttccttgactgtatccttgtgatctatccttcaaagcagagcaaggcaggtatcttaaaatatatatatatatataggcaaagaccttcaaactcttccctactgtaagttcctacctcagaatacagtaagcacactgaatagaaaaagttatatgcttacctcrtatataataaagacattttatgggacaggaaaaaaattctgatacattttcccaaaattgatcttctaaggcatacaactagctgaaagaggaaaagtgaacacagatatacaggaagtttagttagggggaaaattgaaaataaaacgggaaacataaaactgctagaaaaaaatagaagtggagtgtagtctttcattcattaaattgctcaaaatagactccaaatgcctccgtactcttagaataactgaccataagtgtcagagtaattctgtctttatccagcagccctggagaggttcattgatgcttagg

SEQ ID NO: 742105 - DNA, 633 bp, Homo sapiens
atatctggagggaaaaatggaagaaaatatgccaatatatggatcattacttttgaaatgttaaaacactgctaatttgtgtttttatttttatgccttcagtaattattcctaatgacgatgacttttgttatcaggaaaaagtagcataaaatacaaatatcaggaaaaaaggtgatatgggctggagagcagacatagccttcagaggccrggtaccatgatggcccatggctgccctccagagcacctacacagcttatcacttgcagccactatcactgcattcacatcagagccagagtgcctaggtgggggcaagtgctcatagtcagcatatttgccacccttaatatatttgtttgtaacttaatatatttgtatatatgtacatatatacataacacacattcataaaggtatacatttctctcttttttatatatatgtatatttctcttttgtgagtacatatgttagggagggattctacacataaactactgaatttatgagtcagagggcatcaaacatggctaaacgtcagaattacctgggagacctttaagtaaaaaatgacatacccaagccttatccacagatattcacattcaataggtctgggaggtggga

SEQ ID NO: 742106 - DNA, 648 bp, Homo sapiens
ctgtggtgtcgaactagagagcaaaagagccttggtggccgccttctcgatgatgtgtcaggtccactgtggcctttgggccctagagtggtggtggcaggggggtgatggaggaggcatgtggagtggatcagatgcttcttgaagtcgatagtgcacacaagtcacccagggatcttactaggatgcaaattcagggacaacaaatctgggtagaggttctatgtttctcctaagctctcgggggatgstgataccactggtgcatggaccacactttgagtagcaaggtagagactcaactgacaaaagaagacagtgaagcctagagcaagtcagggacttgcctcgggtcactggtcaggcagcaggagctgagaagggacggcctacctccgcgggccagggctctggaattcgtggggcaggctgggctgagtatgcctttgtgaggcatggcatacctggactcacccgagctgcccgtccctgcccatgaatagtgggcctctttccttcctgcataaggcttggcgggcgcaagcccacggccgccccctcccctgcacacacacttacacacactcacacacccctgccggctcagctgccctccctgtttggggaaagtcaacaagagcatttgaa

SEQ ID NO: 742107 - DNA, 609 bp, Homo sapiens
atttcccttctccagtggttaaatctactgtccttacttcctccctgctcttggcatggaacattccatactctcagccacctctctgttagagctgggaatgaccccttcgggcaggcagtcccaagattaagacccctgcttatgtgagaatcaaaggattcccccatgtagtcagtgcagaaacaaatggtgtatcatgtcccttctgtaagattcagtcagtacatccctctttcactggtatccagaacaagtgtgcttctattcataaatgtgtttcctttgctccgtcaccctaaccttggccagtgattatattcccttcttgctttggctgctaggaagctcaaagccatgatgtaagtttaagcacagttactgtcttggtttagctttctgggacagttatcttcgtgttccttgtgttcacaaagtttctcaatctttgatgttttagttaatgatggtartgaggaggtggtagcccccaacttctccttgttctgcatgatattggaggtggctttccctcgctaaagaccactttccgtatctgtgaacggaagaaaacagttcttgttctgtctgtcaagaggccaagagaga

SEQ ID NO: 742108 - DNA, 531 bp, Homo sapiens
agaaaaacagctaatgacagaagcagaggtcatagacagagagaaatcaggagatgccactctgttggctatgaagatggaggaggaggctgtgagccaaagaatgcaggaggcctgcaggagctagaacaggcaaggaaataaattctccctgctggctccttgatttcagcccagtaagactccttttggacttccaactttcagaactstctgagaataagcttgtgttgttttaagtcactagggttgtggaaattttttatagtagccctgggaagctaatatggcatgccagtctgttggctgggataactgaaaaatgagcccagccagcacagtgaccacagcacctacacatgacctctctgtgtagcttgggcttcctcacaaaatggcagcttcagagtggttagttttgccatggggtggttcagagctctgagaacaagtgtcccagccaaaaccacagatgttccatggccttctatgacacagcctcagatgtcccagtgtcccttccatagcaca

SEQ ID NO: 742109 - DNA, 621 bp, Homo sapiens
cagtttcctcatctctaaaatgagaatgatctcactgtcccatgggaacttggggtgggcatgagaggtcaaataaggcagcataaaagaaggtgccaggcacatcacataggagctattttccctctcgggcttgggctagctcagtcagccaccgcagcctgccaagctgtcccccagcctctctccagcaggaggaactcaactcctccccgcatggcccctccaggtacctatgtccgcacccctactccaggagagccctgcagaaacaggaagagggatgcaagggtcatatattccccaaggcagttttcctggccaaacactgaagctcaccagccgaagggatgtgatcttctggagcccctkccccaccccaggctgcaaagggtgatatccccaatggacaactgagacctacaagaggtcattgctgttccatgccatatctgtccatatagcacccttgagagccctaagtccactccaaatggataaagccaaatatgggtgccagagagggggagggaagaacctgaggacacacagcaaacccgagacctcaggggcagtgagacgcaggccaaagagccaccaagagttccaaagaacagtgtg

SEQ ID NO: 742110 - DNA, 506 bp, Homo sapiens
gctattattatcataactagtacttcttgagtgcttactacatactaggcacttcacatattaatttatctacatcctcactcacaacaatcctccaagttaggtaccactattgttcccattttacagatgaagaaaccgaggcatagggtggttaaaaattttgctcaggattgtgattacatgagtggtagagctaggatttgaacctaggtggtctggttccagaaactgttctcttagccactggactggaatggactgtgtgtttctgtggttctaataagagtggatacaatgatcccatttcacagaggggatccctgaggctcarggaagtgaggccaaggtgaagttcagtcaggaggtagcaaagtcaggattcagacacagagagctctcacctcctgcccaccccacccaggttctgctcccactcacctgagcaggcacagatggccacggggacatctgggccttcttcccaggactggccttccctgagc

SEQ ID NO: 742111 - DNA, 399 bp, Homo sapiens
tgggcatctataaaaacctactttagctaacacaatgcttaacaataaaaaactgaactctatgattgggaacatggcaaaaaatattcactaatttcttctattcaacattgtactggagggacctactcagaatagtgaggaagaaaaaaaataaaaagaatacagattggaaggaaagaaataaagctgtctttatttgtggatgacatcaatatgcaaaagaaaatccaaaraaatctaaaaaaatctattagaactaataagtaaatttagctaatttgcaatacacaaattcaatacacaaagattgatttttttataggcaatagcaacagacaattggaaaattaaatttaaaagtcatggtagtgtcacaaaccataaaatacttggaga

SEQ ID NO: 742112 - DNA, 577 bp, Homo sapiens
gggggaacaactgaccagactttgcctgggtttggcctctgggggtgtggggctacccctgctctccctgtcacgccatctgttgcaggataccctccctgtcaccagggaccacctagctgatggagctggaatcaccagaaaacatgctgtcatcatctatgcacttcggtggggcccgtggcagcagaatctgacagggagtggtgggcggtagatccaatgatttgctgtcacggttgtggctctccaggagccaaagatgggagactcaggcccatttgccatctgctctcctgctggatttcatctttgtgtttttgggcatgtcactcccccggcccccgtgcctgggcctcctgggccctgccaggagggtctcttggggccctgccaagggactaggccactcagagggtcctggggagrtctggcttgaggtcctggagccctcacgagagctagttggcccagcagagtccttggccttcacccagcctacccctcccttgagacctagtgctgaccaatcaccattgttttctttctctctcctgtcccccacccagcagaaagc

SEQ ID NO: 742113 - DNA, 610 bp, Homo sapiens
tccttctaccatgatgtgacactctcattatattactcattagctgtgatataatgagaaaagcacgggatttagggtgagaagttttatatctgtgtcttggttccaccacttttatttactcattcaacaaatagtttttctgagactattctaggctagctgcctgaaattcaggggtggagaagatacagtccttgtcctcaaagagtttgtatagccaaacaagacaaagcaaaaataacaaatctggaggcaccacattacctgacttcaaacataccgcaaggctacagtcaccaaaacagcatggtactggtataaaaataggcacatagacagtggaacagaatagagaacccagaaataaagccaaaaacamcaacagatcttccataaagcaaacaaaaacataaagtgggaaaaggacacccattcaacaaatggtgcttggataactggcaagccacatagaaaaggatgaccctcatctctcaacttttacaaaaatcaagatttaaatctaagacctgaaatcataaaaattctagaagataacattagaaaaactcttctagacattggcttaggcaaagacttcatgaccaga

SEQ ID NO: 742114 - DNA, 559 bp, Homo sapiens
gaaatatcacatcatagataggaggtggtatattcagtagtaagctcaaaacctctgtcatttacaaaatggcaaagggtatttagggtgttcctttatctccatttagtaccttggcatcctgcataatacttgcagtgccaactttgaagtcttttttgcatgccttcaattgctgtaatgacattttcagcaagggcacagccaatctgttttgatcaaggtrgatactgtagcttttgtttcccagagtgatgccaaatgacataaattttgcgacctaacaaggtcttgcttgtaccgtgtgcaacagattgcactttttgggcaggttggcagctccccatgttgtattaaaggttacatagcaaaaggggttttgtatacttctaaaacttgtctttttttttttttttcctgctgagttgtatagtagaaaattcacactccagttttggagtttagctcataattgctgccatttttaaacatcaaaatattttatttagctaactatagttgtttatgaaataggatccattttttaaatgcaaagaaa

SEQ ID NO: 742115 - DNA, 620 bp, Homo sapiens
ggatggttaggagcatccctggcctctgcctactagaggtcagtggcaggccatcccacccagtggtgacaatcaacaatgtctccaatattgccaaattcttccaatttgaaaacactgtgttagacaatgcccagcgctccattgtaaggacaccaggattttcttctgcccagttccaactcctagacaatttytgagtaagtcagaaccactttccccacatctcttttcttttctttttttttttttttttttttttttgagacggagtctcgcactgtcgcccagcctgggtgcattggcgcgatctcggctcactgcaagctccgcctcccacgttcacaccattctcctgcctcagcctcccaagtagccaggactacaggcaccggccaccactcccggctaattttttttgtatttttggtaaagatggggtttcaccgtgttagccgagatggtctcagtctcctgacctcgtgatccgcccgccttggccttccaaagtgctgggattacaggcgtgagccaccgcgcccaggctccccacagcttttttactcccccttgagtgtaggaaaaaatcctccgagttgggtagaaatagagtttttaca

SEQ ID NO: 742116 - DNA, 502 bp, Homo sapiens
ttcctttacaatttgaattccttatctatacagtatgtctaagcatctgtgtttgtctctaaaaatttcttaacaatttgaggacaaaaagtatttgttttcacatgcaaaagacacttcaagggaaaaaagcaggaaagcacaaataattacaggaaacaagttccagaaggaaggactgattatcactagttcaaagactttgactattttaaagatataaacccttctaaatatttaagaacaacatgtttggttgttggaagttatcataatgcctttggcttaacaaacatwaatgtccgtgttctttcctgaggacagtggaattgtgccactatggtttaatcgaaagcccaaaatctagaagattctttgcatagcaagctttcacaatgacacagagagcatctttttatagtgatagaaattgtttgaacttatacattataaaatgtggaaaacagagggaaggattgagatatttatagtctaaaatgat

SEQ ID NO: 742117 - DNA, 525 bp, Homo sapiens
cttaactggctcctcttagttacacaaaagtaagactagcaggcactattacctggggaaaagatagaacctgatgaaccctgacaaagtctccctatatttcttgataagcagaggtagcatttgtggagaaggtggacaaatttgcataagagtctagaagcctcctgaggaaaaaaaaaaaaaaaggtgagtctgatcttttccctttttgaagttcaacattattagaatatttgggatggtcttgacagtrgcctgatggtaggaaaggacaccaagtacccaaagtagagtccctcagaagggtggaaatctggggtactttattctttcaaagtaaagatctgaagtctgggaaaagggattggcccagcacagagtgtggctgagtctagaagatcctcaagacttaacctgttttgtgaatccaattagacaaacacaaaagaggtaacctggggattctgagcatggagtttggagccactttgtgatctgcagagatctgaagcagccaagagt

SEQ ID NO: 742118 - DNA, 620 bp, Homo sapiens
tctgaatgtttctaaattcaattgtgttccaacaaaccatctagaagtccagctgaatctctgtagagagccaagcaacctctgacactggagtaaaagagaacctcactctcaggttggagggtccttctgtcccattgacaagtcttcatgagttcccctcatgtgagacatggttccttgcatcatgggggtatgagatacaagcaaatggctcagagtagcatgggaacactgggacctgaattttatccatatccaggatgttatgagaaccctattatgaaatataggaaggacaataaaattgatttcagttaatgaatatatagatgtcttgtgttctttttcattaactctaaaaacgatgtccccacacatttaaagcggtgtgtagrgggacatttatagcactaaatgcccacaagagaaagcaggaaatatctaaaattaacaccctaacatcacaattaaaagaactagagaagcaagagcaaacacattcaaaagctagcagaaggcaagaaataactaacatcagagcagaaatgaaggagatagagacacaaaaaaacccttcaaaaaatcagtgaatccaggagctggtttttgaaaagatc

SEQ ID NO: 742119 - DNA, 528 bp, Homo sapiens
actatcaatgtgaatgaatatgggaaaaacatagatggggccataaagctgccgttcttcctgcagagtgaattatgcccaaggctaagaaggaaaccaaattctttacaagtaaaatgtgatcaaagcacatgctatgagtgaatattgaaacacctgttcttaatttactcaagtaatcaataagcctttagtaagcaatcatcaaaatatttacctcttgccaacaaccgtagaaagaaaaagacccccaaatatactggcctaagttaaacagtagtgcaattctctcttatgyatgttaggtagtcgaaggctagcatgatgacacaacagagctggagattttgcctccttctatcttgtagctctgcccttcctagtgctctgccctcatctttcatggtccaagatagctcatcaccacattcacattcaactccacaggaaaggggaagaagaggacataaagatcatgtccattctcttttaagggttttattaagctgttctttgcattgctataaa

SEQ ID NO: 742120 - DNA, 489 bp, Homo sapiens
gaacttttaaaaaacagaaaaattaaccttaaaaggatagtaaacaggaaataaacataagtaaaaagacaatgaaatggaaaataaatatgcaaaaaaagatccacagttttttgaaaaactgataaaacagagaaactttagttatattgacaagagaagcaaacaaacaaaaacatattagggacaaatgaaaaartatgaaatataaaaagcagacatcactacaggtactgtagatatttaaaagttcttaagctatagaataaacatctttagacaataaattttaaatattagatgaaacaaacaaattatcaggaaaatatgatttactaaaacttcccccaaaagaaacctaacctgttctataaccattaaaaaacagaaggtcaaacatattttcacaaaaaaactcttacgtatgccattctaactggtgtgagatggtatctttatatgatatagcctctatgttttcattggtga

SEQ ID NO: 742121 - DNA, 634 bp, Homo sapiens
cacagctaagctcagctgacgggtggtctctttagggtgcataccgtggactcgagacatatacctgaacacagaggaaaaacaaatttaaaaatctttcagtactgaaaactaaaaatgaatgaaaataagaaaatggtggtaatttctttcattatgacttgtatttatgagagtcctgttgagataaagaacaagatmaagaacgaacacgataaacagaaaagaaaggaaaagtcttcaatacgcaactcttccaattatcatgctattttaaactcaaattctcttctgtaatgattagaccaagatatgttcaaaatagtcccaaatcagcgaatataaatcacttaagagactgtagtcaaacatcccatttagttttagcctccagagggagcaattaccactaacttctactctacagattctacatttagaattttataatctccaaccataggaccttagaactacaaacatattttgtaatacttttacctaaaacttaggaaatgacaccagagaacatttagaaattacacgagtgcttgtcaacatataaggaaagcatggacgcatgttgtgatcagtcaggcaaaaacgtgattttcagtgaaatatactttgagtc

SEQ ID NO: 742122 - DNA, 592 bp, Homo sapiens
acctttgcctcattgtgttcagaatgagcccgccctggctggctcttaactccctgccactgtgcccctccgcactggcgggatgcagctagagaaagacgcctcgtggagctgtgtggccttggtctcctttcttgacacctcatctcaagcargccctggcactgctgggcgtccccagtccgagaggccacttgtctcatgcgtcctccttccgccgcattctctctggcactgagcttcctgcttctatgaggaagcagagggcactggagaagagcatgtctggagccagcctcctcccacggtggcagcacgtgtgccctccctccggttaccccggcctgccgtgctgttggacaaagccccatgtctggccaaggacaccctcactccccttatcacctgtcctgtcccatgaggcgccccccttcctgaatggctcccagcagcacatgtgggaggcgtgctaagaactggcatcttataaacagcgccggccctcctcctcctcagccctggacgcatccccagcacatgcaagagcacgtttctacacgcacgtgggtgaacacctgaccaatgagcaagc

SEQ ID NO: 742123 - DNA, 541 bp, Homo sapiens
cacaaataaatgagaacatataatatttgcctttctgtgcctggattatttcgcttaccataatgacctccagttccatccatgttattgtaaattactggatatcattcttttttatggctgaatagtactccattgtgtatatgcaccacattctctttacccattcatctgatgatgacacttaggttgcttccaaatyttaactattgtgaatagtgctacaacaaacgtgggagtgcagatatctcttcaatatactgatttcctttattttgggtatatatcattcagtaggatttctagatcaaatggtagctctatttttagttttttgaggaacctctgaactgttctccatagtggttgtactaatttacataccctccaacagtgtgtgagggttccattttctccacatcctcaccagcatttgttatggcctgtcttttgcatataagccagtttaactggggtgggatgatatctcattatagtttgatttgcatttctttgatgatcaatcatgttgagtatcttt

SEQ ID NO: 742124 - DNA, 541 bp, Homo sapiens
cacaaataaatgagaacatataatatttgcctttctgtgcctggattatttcgcttaccataatgacctccagttccatccatgttattgtaaattactggatatcattcttttttatggctgaatagtactccattgtgtatatgcaccacattctctttacccattcatctgatgatgacacttaggttgcttccaaatcttaactattgtgaatagtgctacaacaaacgtgggagtgcagatatctcttcaatatactgatttcctttattttgggtatatatcattcagtaggatttytagatcaaatggtagctctatttttagttttttgaggaacctctgaactgttctccatagtggttgtactaatttacataccctccaacagtgtgtgagggttccattttctccacatcctcaccagcatttgttatggcctgtcttttgcatataagccagtttaactggggtgggatgatatctcattatagtttgatttgcatttctttgatgatcaatcatgttgagtatcttt

SEQ ID NO: 742125 - DNA, 541 bp, Homo sapiens
cacaaataaatgagaacatataatatttgcctttctgtgcctggattatttcgcttaccataatgacctccagttccatccatgttattgtaaattactggatatcattcttttttatggctgaatagtactccattgtgtatatgcaccacattctctttacccattcatctgatgatgacacttaggttgcttccaaatcttaactattgtgaatagtgctacaacaaacgtgggagtgcagatatctcttcaatatactgatttcctttattttgggtatatatcattcagtaggatttctagatcaaatggtagctctatttttagttttttgaggaacctytgaactgttctccatagtggttgtactaatttacataccctccaacagtgtgtgagggttccattttctccacatcctcaccagcatttgttatggcctgtcttttgcatataagccagtttaactggggtgggatgatatctcattatagtttgatttgcatttctttgatgatcaatcatgttgagtatcttt

SEQ ID NO: 742126 - DNA, 541 bp, Homo sapiens
cacaaataaatgagaacatataatatttgcctttctgtgcctggattatttcgcttaccataatgacctccagttccatccatgttattgtaaattactggatatcattcttttttatggctgaatagtactccattgtgtatatgcaccacattctctttacccattcatctgatgatgacacttaggttgcttccaaatcttaactattgtgaatagtgctacaacaaacgtgggagtgcagatatctcttcaatatactgatttcctttattttgggtatatatcattcagtaggatttctagatcaaatggtagctctatttttagttttttgaggaacctctgaactgttytccatagtggttgtactaatttacataccctccaacagtgtgtgagggttccattttctccacatcctcaccagcatttgttatggcctgtcttttgcatataagccagtttaactggggtgggatgatatctcattatagtttgatttgcatttctttgatgatcaatcatgttgagtatcttt

SEQ ID NO: 742127 - DNA, 629 bp, Homo sapiens
agaaaagaggtttaactggctcatggttctgcaggctatataggaagcatagcgccggcatctgcttggcttctggtgatggcctcaggaagtttacaatcatagcagaaggggaaacagagctggcacaccacatggtgagagggggagccaggaggtagtggggtggggacgggaggtgccaggctctttaaataaccwgttctcacatgaactaacagagcgagaagtcacttattaccatggggaaggcacaaaaccattcgtgaggggtccacccccatgatccaaatacctcccaccaggccccacctccaacatttgggattacatttcaacataatatttggaggggacaaacgtccaaactataccaacatgtattaagcatttatcattttccaagagctcttctaacagtttggcatgcattaactcatttaaactccataaaatctctgagaggtaggaacaatatataaacacttcaatttagcagataaggatactgagggacagtacaacttaaagcctgatctctcggtgggagctggagcggcttcctcctttgtgattttcctctgcttcagtcgtattcacctcccagagactatcatctgcccctgcta

SEQ ID NO: 742128 - DNA, 591 bp, Homo sapiens
accatgctcttgctgcaggctggctgcatccttcactggcagccccagttcctttctggtggccttctaagcacagccctccctgtctctgtgctcccatgtcctctgcaaacccctgtctctgcaggctgagaaaagggcacagtgccctactagaaccagtccttggtgttgacctgcacgttcctttgcacatagtcttatttgttaatttttcccctgattttcccaactcatgtatgtcgtctgtttcctaccagggtcctggactatgaatcaactgttcttaaccgcgatgataggagggtggaggaacccagatactgctccccaggcaggggctgtgtatsaggtgtttgacctttgtgctggctgaacccatcagaatactgttagtgacctggacatcttaggccagctactgcatgctgctgacaaagtggggcactaataatgtcaccagcgatgtcactgtagcagacaggaatctcaggccacacaatcaggtgccagaaatgcacgtttctactttcctaagtgaatgtatttctacttcaaatccccattgtgctgagtggtaggaacttggtt

SEQ ID NO: 742129 - DNA, 646 bp, Homo sapiens
cctgaaatatcctaaagaaagggaaaaatattagtaagaatgcctacagtgagacaaagctctatctgatgaagtaaaaacatggcaaacaacagctcatcattcaataattagcaaactaaaaatttgtgtcctagttaaccttctattattctaactatttgctttcagtcaaagattctttcctgactgtatataaaaatatatttyctgagttttgctcatgtaaaatgcaacttcagcaacactgtgaaatctgcatatacattaattatcttgatagatacagtcaaagcagaaaccctgagtttaatatgttgacattttaaccttcattaaggagaaataattttttgcttgaaatttttctctccttctattgacattaaccactgtgttggcacttgtagccatgtgctgatctgtcagtcaatccattcgtagcattttcgtgtccggatgttggctgacccaaaaagttaacaatagtaatatattctgatgatgatgttgtttgagatcttggtgatttttattgctcattaagggacaggacctcatgtttacttgaatgtcctgctgtcatctcatatttaagaactttttttttttaagcaccattattgactgggcatggtggctcatg

SEQ ID NO: 742130 - DNA, 649 bp, Homo sapiens
gattaatgaatcagtgggttatcccgggattggaactggtggctttataagaggaagagagatttgagaaagctcgcacagccccctcatcctgtggtgccctgtgccaccttaagatgctaagagtcctcaccagcaagaaggctctcaccagatgttccctcttgaccttgatttcccaagcctccagaattacatgaaatacgtttttcttctttatccattgcttagtttcaggtattctgtcataagtaacagaaaattgacaaagacagagtgtcacttggaaacattttttaaacttgaccccatgaagcaggcagagcccaggtggtaaactccttcattaaccactaaggtttctcaagaaagcctattaaaattcagtctttcgccaatagaagccacctaataaatgtcmattaaattaatgcatgactatattcgattcttttttcaaataaagggattgggcataacaatgtctaatatacttttgtgatctcaaatgctatctataaatgataaaagaaataatcttcctctaggatataaccaagattgtgtacaataatctgtgcttattctaaaattagtttctcaaagaggaagatagtgatgatttttgttttctgccctcagaactctt

SEQ ID NO: 742131 - DNA, 577 bp, Homo sapiens
gcattttatctaggcaggttttggatagtcacattgtggaaaatgtcccttaacacatgagaatttttaaagaaaaatgtgctttgttggtgtaaatctcttatctagtagcaggttcttgtatttccatttggatttttcttaatgcccatyttctctatagtatgagacttcttaccactatttgttacaaatcatattatacatgcatgctattacaatctccacttttcaaacagttattgttttcattggggaaattgggtttatattctcctggattttttaattacttgagtatgtcttcaagaagtggggcatagaatgtggatatgttctaagactgcctgctgcctaatcctttcattcatcttacattggtatgtccaggaaatatggatgctatttccggatcatggaactaaatgacttaaattaaatgtccatttttttcaaacagatgtcactactgatactcatctgtattttgttctattgaatattgtctattctcttcttttacatcttatagattaaatatacataataataaaatctggttaacaaaaaggtactt

SEQ ID NO: 742132 - DNA, 577 bp, Homo sapiens
gcattttatctaggcaggttttggatagtcacattgtggaaaatgtcccttaacacatgagaatttttaaagaaaaatgtgctttgttggtgtaaatctcttatctagtagcaggttcttgtatttccatttggatttttcttaatgcccattttctctatagtatgagacttcttaccactatttgttacaaatcatattatacatgcatgctattacaatcyccacttttcaaacagttattgttttcattggggaaattgggtttatattctcctggattttttaattacttgagtatgtcttcaagaagtggggcatagaatgtggatatgttctaagactgcctgctgcctaatcctttcattcatcttacattggtatgtccaggaaatatggatgctatttccggatcatggaactaaatgacttaaattaaatgtccatttttttcaaacagatgtcactactgatactcatctgtattttgttctattgaatattgtctattctcttcttttacatcttatagattaaatatacataataataaaatctggttaacaaaaaggtactt

SEQ ID NO: 742133 - DNA, 619 bp, Homo sapiens
tttaagtctttgacattaaaatcatttttttttgaagcatcactaaccttactttttttctttcattatttgggaattggctacctctgcccatacttcttggtcagtggcttagctgcctgaattaatgcagcctccaacatcactttcactgacctcatgaaatccctcattaattaccagatttgcaatttcattttgccatatatttgcacagcatttgcaaataaggtcagatattgtgggtatcagaccatcaggaaggtacagacctgtgcttctggcaagaaggagtgcttgtgttaattgaaaggaggtttggagtagggaccaatgtgtgagtatttttgcgatatgaaaccttcaccatcttgtgccataccatatttcaggcccttgcataatgaatgytccagtgacagggccttccttttatatttgtacagtgtttctaagtttacaaagcactttgacatttcatttgattcttaccgctgcctattgaggaaccaccattttccaaatgacttttctgagagccagaaaggttaagtgacttgcccaaggttccagagctgcttgagacgcagagccagggttggaactcaggtgtgttggt

SEQ ID NO: 742134 - DNA, 586 bp, Homo sapiens
tttatatttatgcacatgtaaatacatatatgtaatttatatttattttcccccaatactcctcatacctagagaccatgaactacatacagagggaaggcacactttctacctgaaggccagcccttatattggtgatcagtttgttcagtgctcttaatcattagagtaattgtgtataaaatcatgaatggggactttgtgagtcacttaacatttgcaagaagcatatgaacgtgattgttcttttagagtttgttaggtgggtggtggtaaagyaatacaattttctaaatggtaaaatcatgaatctcatgcatgtcaaaaaatttattcaattcattaattaatgagaatatcagtaagatgttacaccattttaaagagcatttgagaaaccaagtctgtgcaacttaataaatatatattaggataaaattgctgggttagataaaaactggttaatgtcttagaagccaataaactgtaacatttgagatatctgttctatgggacaaaattcattttcatctcttttagacatctttaagttgacatgtaacttcactaaatctgggacctttaa

SEQ ID NO: 742135 - DNA, 594 bp, Homo sapiens
caggtctccataattcaagtttatctaatctataatgtgtgtgtatgtgtgtgtcagtttttttataatgtttgctttttaaaatatattgtcctgtgaattttaacagacctatacagctgtgtaggcatcactacaatcaagatgtagaatatttccattacactgaaaagttttcttatgctcctttrtaatcagtctcaacacttctcccctttgtcccctccagacaatcaactgatacctgatttctgtctctatcagtttgccttttctggaatgacatgtaaattgaatcatgcaatatataactttttgagtctggcatatttcttctagcattatgcatttgagattcatccacgttgctgcatgtatctgcagtttattcctttttattgctagtagtatgcccttgtatgaatgtaccacaatttgtttttcccttttctacttgatgacatttgaaatgttgcgagatttttgcaataaggaataaagctgctataaatatttgtgtacaggttttatgtgaacttatatctttttttattttgggtaaagacctgggagtggaacaactgggtcatatga

SEQ ID NO: 742136 - DNA, 637 bp, Homo sapiens
aaataaagaaatggaggaatatttaccaagcaaatggaaagaaaaaaaaaatagcaacaacaaaaaaaaaccaggggttgcaatcctagtctctcataaaacacactttaaaccaacaaagatcaagaaagacaaagaagggtatttacataatggtaaagggatcaattcaacaagaagagctaactatcctaaayatatatgcacccaatacaggagcacccagattcataaagcaagttcttagagacctacaaagagacttagactcccacacaataatcacaataatagtgggagactttaatgccccactgtcaatattagacagaacgacaagacagaaaattaacaaggatattcaggacttgaactcagctctggaccaagcagacctaatagacatctacagaactctccacctcagatgaacagaatatacattcttctcagcaccacatcacaattattctaaaattgatcacataattggaagtaaaacactcctcaccaaatgcaaaagaatggaaatcataacaaacggtttctcagaccacagtgcaatcaaattagaactcaggattaagaaattcattcaaaaccacacaactacatggaaactgaacaacctgctcct

SEQ ID NO: 742137 - DNA, 475 bp, Homo sapiens
acacattctcatgtgatgtgtccagtatcagtggcttgtggaataaggcttcctttattaaatctaggtgtttgttacatatataatagggctctttgcaacaatacctgaaatggcttcaattattccatttttattggtttcagattataattgcttaaggcttttcacaataaactcgatcgtaagagtgggttaattaaaatgtggtagaaaaggacattctattatctttctttactattttcattctattctctttctttatcttttagactgtccagtaccacagaatatcacagaatcatagacttccagagatttgtaaaatattasatatagagagatcatctggtccaaacctttttctgtataaatgagatgaattaggctcagagagtggttgctcaaggtgagccaacagcaagtagaattaggtctcctgggttcacaatcctcactgctacagtaagct

SEQ ID NO: 742138 - DNA, 381 bp, Homo sapiens
ctgagactcttactcattttgaggggtaaaacagtttatttctgtttttcagattgggtaaatgttattgattttgagaagtgaagccaggtggacttcctgggtcgagcgtggacttggagaactattctgtcttacaagaggtttgtaaaatgcaccaatcagtgttctgtaaaaatgcactaatcrgcactctgtagctaactagaggtttatacaatggaccaatcagcaccctgtaaaatggaccaatcagcactctgtaaaatggaccaatcagcaggacatgagcagggacaaataagggaatgaaagctggccaccccagcctgcagcagcaacccgctctggcccccttccatgctgtggaagctttgttct

SEQ ID NO: 742139 - DNA, 381 bp, Homo sapiens
ctgagactcttactcattttgaggggtaaaacagtttatttctgtttttcagattgggtaaatgttattgattttgagaagtgaagccaggtggacttcctgggtcgagcgtggacttggagaactattctgtcttacaagaggtttgtaaaatgcaccaatcagtgttctgtaaaaatgcactaatcagcactctgtagctaactagaggtttatacaatggaccaatcagcaccctstaaaatggaccaatcagcactctgtaaaatggaccaatcagcaggacatgagcagggacaaataagggaatgaaagctggccaccccagcctgcagcagcaacccgctctggcccccttccatgctgtggaagctttgttct

SEQ ID NO: 742140 - DNA, 588 bp, Homo sapiens
ttagagctgcctgtaatttagtcatagctatcaaatttacttctggtaataattttgtaaattttattgttatcttgtattttacagttatctctgaagtaatttatgtctaatagcataattttaacgtaattaattacatgggaatttaaagattcatagtaaaacaatttacagtagttttaacaatctgttccaatttttagcccttatattttatcgtgaataaaatatgaacatgtctatgaacatgtccatactttttaataagaaaacgayctttaactttgtatcatggtggaatttgtaaaagctattgatagttttgttcagacagaaatttaagaattatagtaaatagttatgatttggttggattaaaaattctgtaagatctgatcttagaatcttaatcttgccaatgatgaagattctaagtgatggtgaggagttgtctgggaatagctgtatgtcataacaagctaagtttgtttataaagcatggtagagctcaaagggaaagcttttatgaaatctggctctagcactttttgtcaaaataaatcaatgaacacagaagaaatgaaa

SEQ ID NO: 742141 - DNA, 588 bp, Homo sapiens
ttagagctgcctgtaatttagtcatagctatcaaatttacttctggtaataattttgtaaattttattgttatcttgtattttacagttatctctgaagtaatttatgtctaatagcataattttaacgtaattaattacatgggaatttaaagattcatagtaaaacaatttacagtagttttaacaatctgttccaatttttagcccttatattttatcgtgaataaaatatgaacatgtctatgaacatgtccatactttttaataagaaaacgacctttaactttgtatcatggtggaatttgtaaaagctattgatagttttgttcagacaraaatttaagaattatagtaaatagttatgatttggttggattaaaaattctgtaagatctgatcttagaatcttaatcttgccaatgatgaagattctaagtgatggtgaggagttgtctgggaatagctgtatgtcataacaagctaagtttgtttataaagcatggtagagctcaaagggaaagcttttatgaaatctggctctagcactttttgtcaaaataaatcaatgaacacagaagaaatgaaa

SEQ ID NO: 742142 - DNA, 536 bp, Homo sapiens
atattttcttctaaatggataatatatgtatgtagaagagcagagacctttgtgttatctggacaagtaaaaattataaatgctctctagctggaaaagaaaaattccacttgacaagtcagccttccttcatggtctttttcgtttctaggtatcaagtcaatttttcarttcttcgtacgatttttgtcatgctcctgattataaagcagttaggcttaggaagcagcatgagaagggcattgtttctgcgctgtctcccattgttttttagggcatgcctctagacacacttccctattctattatgaatctggcactcttcagagatatggaatgcaattataatggtcaaggatctcagtgtgtgaaaatgaatctttaaaactagacacaattgttagaacacaattgcaaggccttcgataaacattccacgcatcttagaggtggaggaaagcacagagacttccttgcgtataatgctacacattaataaagcccaatgtgacagtttttggatggatagtttatcg

SEQ ID NO: 742143 - DNA, 712 bp, Homo sapiens
ggttacatcaaaatggcaattaattttaaatcctgtctgatgccataaatatatatatagttgagaaacattagttttctttttccagtgaggaaggtatatgtcgtaggttaaaaaacaacaaaatcacgcaatttcggaactttaagcatcactcttctctgtgcagaaggtaaaaacttgaactatcaattgtttgggaaaatctaagtgataaaaaaaaagagtttggctggggtgcaggcagatctgcagcaatctgggccatgtgttctttgcagaaacgtttcttgtataacatttttcctccctatacgtgtacattagtgtttgttttcagacagttgtatgtatgtattcttgatcaagaagttacagggkatcagaagcagagaaaaaatagactacaggaaaggcctgttagcctgattttctactcaagaatgtgttgctctgccctggtgatagctcacatgtgattgtatttaagactgaataactcagacttcagtggatattctaatactagattattgtattgaaagaataagaccagaccacatccctggaggtagaagtgagattttaaataagaagattggatattccggactactagaaatttaatgacaaaaatggaaatgaagttgtagacccttcactggaagtgccagagaaatgaattggtctttcaggatcatggcagcagttt

SEQ ID NO: 742144 - DNA, 553 bp, Homo sapiens
ccagtcactggttaccttttaccctcttagctgactatccagagtactttttcacttattaggtctattaacttagtgtcatcattccaatatggtggaatgttcaaataagccagttgtctttagatttatcatgacagcaggcaagtyagcatatctctggagcaagactgaatatatactgttgcccatcctagatggatgtaaactacctcagatgctttcatgaagaatactgaaaattacatatgcacccaaatcaaaattcacataccatgaactagagacttagttagtctgttttagtaaagacaccacacccaggataagagctgtgattgtggatactgcttggacaagtccaccatacttcactaatatttttttgttttttgcagagtctacattggtgaattaaatggtgatagagtgggaaccaacacccctgcctcatttaattctttaggggtaaaactaacctctgccattccaaacaggatgtggaactcattagtttgaagaactttgatgaatgggaagtttcaggggcttc

SEQ ID NO: 742145 - DNA, 602 bp, Homo sapiens
atattacacacacacacacacacacacacacacacacaaactactgtaactaaggcagctttaaatgagatgacatattaagctttcagcatagtgttgaaaacttgtgatatgttcaataaaagtgctttgccctattgacctttatctttttcttaacaaaatcttcartcagcaaattcatataacatgagctggtaatttgctttcacagcggttttaggctttttgtttcctgatcttgaatatcggtatgtttgctgctaattcagtgacgattagatcagttacacagtaaaatgttgttaaaataccttaaggctttcataattaaactattaaataagaaaaatgtattagtttgatattgtttttcaaattttttttaaaagtttctcttctttgttgtttagatattatttttacctattacttgatggaggaaatatttacatttgggcatcctttgatgattctacttgtattttcagtattctatatatttctttttgctctttcatgaatagctaatgactggttttctaccttaagttccctagctggacagtgtaaactgtgttagggttaccaaaggtaacact

SEQ ID NO: 742146 - DNA, 598 bp, Homo sapiens
taatgtaatctccaaagccataagatattaatatttcaggttacagattgtctgtaacatttgttgcacaagatggtagtttagtgtgcagtctgtgctataatttactgttagtctttaaatactgagctttaaagtgccaactcttaatatattgctgctgtagtatcataggtttgaactcaactccagataaaagtgagcagttaaatatgcagccaaactgaaacattagaaaaaatgctactcttaaaaatgaatgttaatatctgttatatttcctaagtaagaaatttaagccctarataagtattctaaaaatttgatagcttgaatttccgttgcaacagcttatccagtctatgaaattaatagaaagttgatttgatttgaatttggacaaaacatcaagggaacatgatctatgaaacatatgctagaaaattatttatattgtgtataccattcaactggtgcaaaaattgtcattctctctctctctgtatctctctctctctctgccctcggtatgtgtgtatatatatatatatatacacacatacgcacacacacacacatatataaataaacaacatgg

SEQ ID NO: 742147 - DNA, 503 bp, Homo sapiens
ttttaaaacataattcataactggaaactgatttttttaaatttaataataagaggtcaaatataaaactttctaaaagcatcattttatagtatgtatatggatatatagtatataagttcatactatttaaatatataccacaaaaatatagtataggtagaattgacttttgataagatttagtttatctcaaactcgtaacaatgtctaagtacactaagcaactgagttttctattgacattatttcaggtctagtttctaatcttatcaataatggagctgaggcagagtaaaatttagacttctttcataaacattattaaaactgaggttcacaccaaaatcatctggttakaaaggaggatttaaatggatggtataatttttaaatatgtgaaacaaaaatcaaatttactataggcacagaggcatggctgcctcgtcctttattctgtaaacatcgagtcttcaaattccatctatatcagcaaatggtca

SEQ ID NO: 742148 - DNA, 601 bp, Homo sapiens
atcttgtattttaaagccatctaaatcaggtatgagtgagacttggggtataatccatcttggagcaaagtcattattcatttgtgaatctgtgaaactaaaaaacaagttatcttcttcaaaaatgccatggtggaacaaacattgaataggcattctaattccaaaaggaaaaaaaaaagggaagggataaagaggttactggtcccaagcaagtttgaaatccagcaaggaatgttccactaggttacaagacatgagaataatcctctgtggctcaaggctctaccctctgggctcacagcagctctgtcctctgcctctgtgcctgctgyctcttcctcagccccactggcttctgctccttccatgtcagactcggcctctgcactggctacatcagacccacaaacccaggtggcctctgttcacagcagttctgtcattggagttattctttctgtttcttgaaggacagcttaggtttgtagccaagtaattctgttagttcactcctgtttgtacaatcctagaaatctgacagccttctgtatttcatctcttctctgtctccttcagctcaagctggcagtatttctgc

SEQ ID NO: 742149 - DNA, 631 bp, Homo sapiens
aacataatgttatatctatgttacttattctagtaatttaacttttaaataaagaatataaatattcataaaaattattaatttataaagtgaggtttaagaaccacatgtattctatgatgcagttttggcttgaaaatatacatttgtatatttgtgcatatttgtatgaagtgtctatgtctattcgatgagaaattatgaaagtttacacagcaacttctcagtaatgccctttgggagagcaattaaagataacaagtaaagaaatttggcttttttattatatacttgtgtattaattgaactttccaatgagcaattayagtttttgttacctattttcaaaaatttgctttaacaattgtatatgatcccatcaaaaacagccataaactattcaaaatacaagaacataaatacaacaaaatgaatttttattatttcaatatattttatcttatcttttatctagttaacataaactatatggaaaaaaaaacttctctatacagagcactaaagcaatagtgagtaacccagcaggaacttctccatattcaagagactaagagtaaaagcagtgcaggtaattgccaaggtctactgacaaatactaagtcagggtata

SEQ ID NO: 742150 - DNA, 631 bp, Homo sapiens
aacataatgttatatctatgttacttattctagtaatttaacttttaaataaagaatataaatattcataaaaattattaatttataaagtgaggtttaagaaccacatgtattctatgatgcagttttggcttgaaaatatacatttgtatatttgtgcatatttgtatgaagtgtctatgtctattcgatgagaaattatgaaagtttacacagcaacttctcagtaatgccctttgggagagcaattaaagataacaagtaaagaaatttggcttttttattatatacttgtgtattaattgaactttccaatgagcaattatagtttttgttacctattttcaaaaatttgctttaacaattgtatatgatcccatcaaaaacagccataaactattcaaaatacaagaacataaatacaacaaaatgaatttttattatttcaatatattttatcttatcttttatctagttaacataaactatatggraaaaaaaacttctctatacagagcactaaagcaatagtgagtaacccagcaggaacttctccatattcaagagactaagagtaaaagcagtgcaggtaattgccaaggtctactgacaaatactaagtcagggtata

SEQ ID NO: 742151 - DNA, 577 bp, Homo sapiens
tatacacaaggcttcactcgtgtatatgtgtgtgtacatatatatatatatattgagaaagagagagagagattataaaaaattggttcatgcagttatgaaggctgacaagttctcagatctacagttggcaaattggagacctaagggaactggtarcatagttctagtctgagttcaaaggcctgagaaccaggatggccaatggtgtggttccagtttgaaggctgggaacctcatgatccaagaagagccaaggttttagtttgaatctaaaggcataaaaacataggtgggaattcaaaaatgaaaacacttggacacaggaaggggaacatcacacaccggggcctgtcatggggtggcggggggtggtgggggagggatagcattaggtgatatacctaatgtaaatgacttgttaatgggtgcagcacaccaacatggctcatatgtgcatatgtaacaaacctgcacgttgtgcacatgtaccccagaacttaaagtataaagaaaaaacaaaacaaacaaaaaaaccagaaagttccaactcaaagacaggcagtgggaattcccc

SEQ ID NO: 742152 - DNA, 524 bp, Homo sapiens
aattatgacttttagccttcctaaattttaatacttagtgtaaaaatgtattaaagattctagtcaaattaatggttaaagggaataagattctggcagtcagggctcctcaaggatgtttgcaattctgagacttaacaattgttgaaacataaaagcgaaggacttccttgaaatcacttctttctggatgggtatgagtttcacacgtgtctgaataagygggaaaattcaagagtaacagaaagacaaaaacaaaaaaggagaagtgagtaaagtgaagtataaaccaaataaccatttatgtcacacaaggagagaacaacagttgttttagtttttctcactgatttttagatcaatgaggttttcgtgcttggtagagatggaaaaaacagaattaatgactacactaattgtattttgatgcgactcataaacacacaaaataagggaggtgggaactagtgagctttagtccagtttgcattgttctatattagctatcaaaacccagaggcagt

SEQ ID NO: 742153 - DNA, 609 bp, Homo sapiens
actaattattcatttctaattacatttcaatagatattatactaatgggtaaaaaggcatttcattgtgttattatttgtaatagtaaaaaactgtaaacgattattaataaatgcctctcagttggctaaatgcatgtgttagcttctacacagataaatgtttgaagaatatacaaccgtgaatagyagggacctttggaaagccgaattaggaggtgggagtgggagtcccacctcctaactctgtattattgtacatttccgtatcatttgaaggttttacaatcatcttgttccactttttaaatttttgtaaagatattttttccctctctccctctctcccctccctcctgccttccttactatattctttttttttttttttttctttttttttgagactgggtctgtcacccaggctgcagtgcactggcaggatcttggctcactgcaaccttcacctcctaggctcaagccatcctcccacttcagccttccaagtagctgtgactataggcacacaccaccataccccgctaatttttgtatttttggtaaagatggtgttttgccatgttgtccaggcctgtcttgaacacctgag

SEQ ID NO: 742154 - DNA, 609 bp, Homo sapiens
actaattattcatttctaattacatttcaatagatattatactaatgggtaaaaaggcatttcattgtgttattatttgtaatagtaaaaaactgtaaacgattattaataaatgcctctcagttggctaaatgcatgtgttagcttctacacagataaatgtttgaagaatatacaaccgtgaatagcagggacctttggaaagccgaattaggagrtgggagtgggagtcccacctcctaactctgtattattgtacatttccgtatcatttgaaggttttacaatcatcttgttccactttttaaatttttgtaaagatattttttccctctctccctctctcccctccctcctgccttccttactatattctttttttttttttttttctttttttttgagactgggtctgtcacccaggctgcagtgcactggcaggatcttggctcactgcaaccttcacctcctaggctcaagccatcctcccacttcagccttccaagtagctgtgactataggcacacaccaccataccccgctaatttttgtatttttggtaaagatggtgttttgccatgttgtccaggcctgtcttgaacacctgag

SEQ ID NO: 742155 - DNA, 626 bp, Homo sapiens
tttatttgatccttacaaccaccctatgatgtagtgtagcagagatgctagctcttccattctccccgtgatgtaggctaaaaaccatccagaacccccttccatgaaggatatgttgctggtagtgctgttggccagaaggcctctgtctgtcaggctcttcagggatcacctcaacttccaacggctccctcacccacagtcacccttcttcccataatggcctgtacctaatgactgatcaatgtargaacataaaggcctgaccatcctgtggagcctgcatagtatcctgacttctctctctgccctcccttccatcactactgatccaataaacattttgcaagctgaacttcgtctcagagctgcttcctaggaaactcaacctatgataatcactcctcttcttttacagaaataaatgccaagaataaagacatttcctagcttcccttggagtctgctgggtgtggccattcaaccatgctctggcccctgggatgaaaatggaagtcatgtgtgcaacttccaggaagtgttcttagcagtgcccctctttctcctcctgctggctggaatgcagacatgaaggctggagtgggagcagccacttcttgaggaca

SEQ ID NO: 742156 - DNA, 626 bp, Homo sapiens
tttatttgatccttacaaccaccctatgatgtagtgtagcagagatgctagctcttccattctccccgtgatgtaggctaaaaaccatccagaacccccttccatgaaggatatgttgctggtagtgctgttggccagaaggcctctgtctgtcaggctcttcagggatcacctcaacttccaacggctccctcacccacagtcacccttcttcccataatggcctgtacctaatgactgatcaatgtaggaacataaaggcctgaccatcctgtggagcctgcatagtatcctgacttctctctctgccctcccttccatcactacygatccaataaacattttgcaagctgaacttcgtctcagagctgcttcctaggaaactcaacctatgataatcactcctcttcttttacagaaataaatgccaagaataaagacatttcctagcttcccttggagtctgctgggtgtggccattcaaccatgctctggcccctgggatgaaaatggaagtcatgtgtgcaacttccaggaagtgttcttagcagtgcccctctttctcctcctgctggctggaatgcagacatgaaggctggagtgggagcagccacttcttgaggaca

SEQ ID NO: 742157 - DNA, 605 bp, Homo sapiens
acaaaatacttgaagagggagtgaatgctgccaaccatcttggctgccatattgcctctccccctgcaataggcaagaggttctacccagggactagaaaatgaagaatgagcatatttcccctggaaggccagaaacactttcaagagatataaattatactattttgytgtgatcacagcttctattttaaaatccttgagatacttgttagattcttgagattgtgaagcatccagaagcaaataataaatcactgctccgagcagttgttctaattccataattcctgatttattgcagttctttgaatgacggggttggggggaatggaattaacagatttcaacaagtcttcaaataacttacgagccttagttactcaataagcagtgctaccccaaaacacctcacattttggatttaaagtatttttatgctggttattgttcttctcattcatattgaagcccatacatttaccacatttactaaaaagttcacattgcaatttttttttcttgccagaagttccttcacactgtttgttaaatcatctctttacagccctttctccagtcctcctttgccatttgggtacatta

SEQ ID NO: 742158 - DNA, 630 bp, Homo sapiens
tataattgttacttatatagaagccaaaatcccatttattttctaaaaaaaaaactttgagtagaaaatttatatatatttaactattaaacagaaaagttttagaactttaagatgtaaagcttcagagatgttgtaatctgtcttcttcacagatgagaaaaccaactcagaggagataatggcttgcccaagatcacacagaaagaggataacagatcttgggctacaatccgggcctcacgactctctgcatctctaccaygttgcttgtcaccaaccaaaaacattttcgtggacattccacagagagagatttacgcaaattaactataaaatgattaaatataatccattgaatgtaaataaactgtttacaagtgttcttgtcactgtgttgcctgccaccctgaaaactttacaaaagagccaattcagaattcctcatatcatattgggaagaaaagtagtagtggggaccaactaggaaaagtccttgcatgtcatccttgagataccatatctatcagtagttctagcaataagatgccaaaacattgcaaagtcagtttgattctctgacagttgctgaatccttttaactaaaaagtaagtacataaaggaatggc

SEQ ID NO: 742159 - DNA, 563 bp, Homo sapiens
ctgatgagcaagaggctatttacgtgatctcaaagtatctgccaaccaattttttattttaatcatttttttattttttaaaatagggatgaggtcttgctatgttgcctagcctggtctcgaactcctgggctcaagtgatccttctgcctcagcatcccaaagtgttgcaattacaggcacgagccactgtaaccagccagcccaccaatttttaaattacaaatggaagaatagcaactttacagyggaaaaacctagtgatgattaccttaaccaagtgaataaagtgaacgtccctaggactgggacgagtaagtatccagggcctcctgacatgatgctctggaaatgacatgacatcgcttctgtggcacgcctgtctcaaatgcacaacccaaattcaatcaggaggaatcatcagacaaacccaaactgagggacattgtataaaatagtaaacctatattcttggaaaacatgggaggatagaagtagtttcagcttaagggggactaaggaaacattacatacttacacactcagtcctggatggatcctag

SEQ ID NO: 742160 - DNA, 530 bp, Homo sapiens
acttcaccattttcataaagaaccacatccgtttccccaaattcaacttctccaagtacgtgggcttggctactgggggccacgggtgggccttggtcgatgaggggccttggctggccctccgtgggtctctgcctgggggtgtgtgtgcgcgcgtgtgtgcacgtgtgtgcgtgtgttcgcgtgtgtgcgtgtgtgcgcgtgcatgtgtctgtgtgcatgtgtgcgtgcgtttgtgtgtgtgcgtgtgttcgcgtgtgtgcgtgcgtgcacgcgtgtgtgcgtgtgtgtgtgatgtctgcatgtgagtgggtgatgtctgcatgtgaataaacggtgggtggygctggggcgccccttcccctgctgtaaagtggggtgttgctgcggggagctgtcagcactcaggttggtgagggaccgagtgactcctggccaggccgggaaacatcaagtcttacttcatttctcggctgcccatggcctccacccagaagcaatgtgatggacgtcaaggacagatctttcct

SEQ ID NO: 742161 - DNA, 528 bp, Homo sapiens
catttcctgtgtctgaaggctgtgcctcagtgcttttgactcactctgaagacagcaggcagccctttctgttttttttggagatgaagtcttgctcttgtcgcccaggctggagtgcaatggcgcagtctcggctcactgcaccctccgcctcccaggttcaagcaattctcccaccatagcctcccgaagctgggrctacaggcacacgctgccacgcctggctaattttttgtgtttttagtaaagacagggtttcaccatgttgcccaggctggtctcaaactcctgaactcaggcgatccgcctacctcggcttcccaaagtgctgggattacaggtgtcagctaccacgcccgacccacaggcagccctttcacctcacgccgagcacgtctcctccatccatgaacattttgcaacttttttttaaagagacaggttcatactatgttgtctagattggactcaaactcctgggctcaagctttcccaagtagcttgaacctcttaagtaactgtgactac

SEQ ID NO: 742162 - DNA, 623 bp, Homo sapiens
cgtgggctcttaatcgctgtattaaacagcttttattctctccaccgcctactcactgcccgccccacaacacacacactactcaagctttctaaaccactcctaccatttcttcttgagaactagtttggcctttgaagagctttttctctaaactgacatctcctccctcacttcctttgctttactgcctcttgagccatgaattctccatggtgattatgacctcagagagtacgcatcacttggggagcagaaccccattcctagaatgcactgccctgggctgggtggctcccctttggcagttgctctctcgtccccaagccacttatattaacccttcccaacatgctgagttgggggtcagggagaggagaggaaaatggatccgtggcttcacctgaagagcagggctctgatggtgcccaaagtgtcacatggaaacttgaggcwtctacctggcttcctttatcactggataggaattttcacagttgccttaatgtgatgctaataatctttagatttaacaaacaacggaatccgtactaagttgattttattttaatacatttaaaataaataaatctaatggagaaggataaaattttttcttccat

SEQ ID NO: 742163 - DNA, 624 bp, Homo sapiens
cactccagcctgggcaacaaactctgtctcaaaaaaaattaaaaataaataaaaaaaacacgacaggcttctctggcccgcatgctggctgtgtgttctagcccacgggccactcactgtgtgtccctggctgggatgtctgagttgagcctgtagtcccctcctcatgaagcaggaatagattagattaagaagtctccccttggggtgccctataagaactaatggttcttattttgaatatgtttatattccccctctaaggtaatccagaatcaaatgtgaatacactttgggttgttcaaatttccattttctaatatacccccaaaggtcatcctgatctctagtacagtttactgacttcattctttcttttttgttcattttaatttttttagagwcaaggtaggtctagctatgttgcccaggttggtctcaaattcctaggctcaagcgatcctcccgcgataggcatgtgccaccatgtccggctcttgacttcgttctttcaacattcattgagtaaaattcattgactatattcttacaggccagatcgaggttctagaaacatactgcctgaactcagtttgagttctagtttcctcaccatctgcttct

SEQ ID NO: 742164 - DNA, 616 bp, Homo sapiens
aaactatgctatatcatttcactctattactttcaaaactgatgctgtaaggctgtaatcttgcttgtaacataacctgttttggtagttataaatgaggtactttgccttacatcccttcccagtacctctcaaaatatgccagaaacctcatgtttcaatgagaaccctagtcacatgctactgtccccacggacacaattacttcaaggctccaaataatcacaatagtctgtttggggctggtgttaatgaacactaacttaagaaagcaaagtgccaaaatgggracatcaccctttgcttcactacatgttaaagaactcaatttatggccagatgagaatgttgaattaatttggttttaaattcatttggtagtctgttttaaaaatctaagtattctatcaagttatcggagaaaaggatctactcggtcgctttagaaaaaaaaatagtactcacaataatggtaattttcccagtcaaaagacccacagtctttttttgtggggggctgggagggaataacctctggggacaaattgtaacaaatgggttgggtcacccacagtgaggcagcagtgtatcataacaactgatgaccactatacaa

SEQ ID NO: 742165 - DNA, 616 bp, Homo sapiens
aaactatgctatatcatttcactctattactttcaaaactgatgctgtaaggctgtaatcttgcttgtaacataacctgttttggtagttataaatgaggtactttgccttacatcccttcccagtacctctcaaaatatgccagaaacctcatgtttcaatgagaaccctagtcacatgctactgtccccacggacacaattacttcaaggctccaaataatcacaatagtctgtttggggctggtgttaatgaacactaacttaagaaagcaaagtgccaaaatggggacatcaccctttgcttcactacatgttaaagaactcaatttatggccagatgagaatgttgaattaatttggttttaaattcatttggtagtctgttttaaaaatctaagtattctatcaagttatcggagaaaaggatctactcggtcgctttagaaaaaaaaatagtactcacaataatggtaattttcccagtcaaaagacccacagtctttttttgyggggggctgggagggaataacctctggggacaaattgtaacaaatgggttgggtcacccacagtgaggcagcagtgtatcataacaactgatgaccactatacaa

SEQ ID NO: 742166 - DNA, 496 bp, Homo sapiens
tcctacagtgaaagatgaggcaattagtacttaaatttctacccattcttatttttccccgaccttaatttttgttgttagttttattattatctgttctgcactcatcattccttcagctacagtgtgggtcctacgtttcagtgtatttagtgttcacaacttgcttcgcttttaccttcgcaagtgctggagggcaggatttcttgtctagtggttttttrgtgtttttttttcagaatgctcaagaatcacaattgtccagtggttttttgttacaagagctggaatgtgttgtatttttaagttcattcatgtttcagaatttctgcctgttacttttatacttgaaaagagatagcatgttggcatgctcagccccctcactgtgtgatgcactgtgccactttgggacttcacagagtccccaccagcaagaaggctctcaccaaatgtggccacttgaccttggacttctcagcctccacaactgtaa

SEQ ID NO: 742167 - DNA, 598 bp, Homo sapiens
ctgagactgacacgtgctcaccaggggtcctcatgaaggagtcactgttttggaggccaacagtggatttggacatagtcacctcacaaacggggcacctaccatgtgtcaggccctgccctaggggcttgggatgcaacaatgaasaagacaaagtccttgcctgcagaaagcttctatcctagtgggggaaacaggcaaggatcacgctatgaagaaaaataaaggcgcgtaaggggagtgagagcaacgtggtactatgttgggtagtgtgaccaggaaagcctcttcaaggagagggcattgaggcagagacctgaggggcctcagggacccaggggagagtggtccgggctgagggagtagcaaatagaaaggccctgaggcaggtgcctgcagggccagtgaggggccagtgtggctggaatggagtcagtgccagggcgagagaggagatgaagtcaggtcacgagcagagcccaaagcccagcaagtcctttttccgtagaatgagatgggagccaggggagggtcttaagcagaggagcgacacgacctgaccttgcttttaagtggatcctctggttgctgtgaaggt

SEQ ID NO: 742168 - DNA, 598 bp, Homo sapiens
ctgagactgacacgtgctcaccaggggtcctcatgaaggagtcactgttttggaggccaacagtggatttggacatagtcacctcacaaacggggcacctaccatgtgtcaggccctgccctaggggcttgggatgcaacaatgaacaagacaaagtccttgcctgcagaaagcttctatcctagtgggggaaacaggcaaggatcaygctatgaagaaaaataaaggcgcgtaaggggagtgagagcaacgtggtactatgttgggtagtgtgaccaggaaagcctcttcaaggagagggcattgaggcagagacctgaggggcctcagggacccaggggagagtggtccgggctgagggagtagcaaatagaaaggccctgaggcaggtgcctgcagggccagtgaggggccagtgtggctggaatggagtcagtgccagggcgagagaggagatgaagtcaggtcacgagcagagcccaaagcccagcaagtcctttttccgtagaatgagatgggagccaggggagggtcttaagcagaggagcgacacgacctgaccttgcttttaagtggatcctctggttgctgtgaaggt

SEQ ID NO: 742169 - DNA, 635 bp, Homo sapiens
gtgttgtgggtagcccgtagggagagtagggcctggatcctgatggagaagtcggtttgttcgagcaaagggccagccctgcatttgcctccagtctcaccccgcatacagaagatatctagagagcaaccactgagagctagggctttcgggagacccctttagatggaggacgaaaaccctctcaggtgtggaagatgagcagaaaggagtgggagctgaagaggaaatgttagtggtaggactgggagcatcttagagataaagctgagtttaaaggcttgggagatgaacacagttcctggatggctgaaccagagttagggatgtagaaagaaccagagtgtgggatcacttatgtacagagcacgttttatgtcccaggctctcttctaagtmtattatgtaaatcaaatcatttaggcctccaacaatcccataacatgtagataaattgccattcccattttacagaagaggaaactgaggcacagagaggtaaaggcatttgcccaaggtcacataaccagggagtagcagagccaaaatttgaacccagaggcctggccgcagactctgcactattaatgacttcactttactgctttatgtgggaaaccttgagacctgtcttc

SEQ ID NO: 742170 - DNA, 617 bp, Homo sapiens
tgggtagcccgtagggagagtagggcctggatcctgatggagaagtcggtttgttcgagcaaagggccagccctgcatttgcctccagtctcaccccgcatacagaagatatctagagagcaaccactgagagctagggctttcgggagacccctttagatggaggacgaaaaccctctcaggtgtggaagatgagcagaaaggagtgggagctgaagaggaaatgttagtggtaggactgggagcatcttagagataaagctgagtttaaaggcttgggagatgaacacagttcctggatggctgaaccagagttagggatgtagaaagaaccagagtgtgggatcacttatgtacagagcacgttttatgtcccaggctctcttctaagtctattatgtaaatcaaatcatttaggcctccaacaatcccataacatgtagataaattgccattcccattttacagargaggaaactgaggcacagagaggtaaaggcatttgcccaaggtcacataaccagggagtagcagagccaaaatttgaacccagaggcctggccgcagactctgcactattaatgacttcactttactgctttatgtgggaaaccttg

SEQ ID NO: 742171 - DNA, 671 bp, Homo sapiens
acatacatgtaaatttgtatgtatagagaagctcctgccattcagtttaccatctagttgggcaaatcacatgcccatgaaaaattatgaagtgatatatcagcaagcacaaaataatatagcataaaacatatcraacaagtatgtgctggcagaaaaaagagtgggatataattaaaatctgattattataaatttccagggaaaaacggggggcaaatatttcagaaaaataaattggcgtgatgaatgaaaagaagtttaatgtagcaaatcacaccctggggaaacgggtttcactaatgtgagaaaaggacccatacggatgaagtatgagctatgaaattaaagttatggattgataaaggacaattggtatggcaagccaaattttagttttgcttgaaacatccaggtaagtaaggcaacattcatattgttgttgttgttttgcttaaaatatcccataatttctttttatgctgtgtaagacaacataaagataccaacataagaaggcacaacataatactaacctcatgtcgggaacttgacatgtgtgcacaagaattgtgcatgctcttggacctgttcaagctttgacctttgtttctgaaatgtcaaggtatctcttgtgtcatcatgagcctcctcccccagcccctcatagt

SEQ ID NO: 742172 - DNA, 615 bp, Homo sapiens
tttcaaaacctttatttcaaaagctagtctcactcagagtaaaagtcaaagtctttcccatggcctcaaggctctatataagtggaccccatgatctctctgactccatctcccaatcattctcttcatcctgctgtttcagtcatccaggcctccttactgttgctgaaacacacggagaacatcccagcctcagaccmtttgaacttgctattcctgttatctgggatgttcaaccctcagatagccacacggttccgttgcctacttccttctggtctctgattaaatgtcaccttattttggagacattccttgacaatcccatctgaagtagaaactcccaccctagaatttgaccctagtctgtctggctccagagtttgtgctctcaactactacattacctggtctatgaagctttcagatttctttcatattctctatcatatgcccatcacctaggttttccacaacaaaggagaacctgacagctgtccctacaagcaataatcattccctgttagaaaccaagaggaagaaggaacattgcaagcactgataataaatttttttcctggaaaaaagacataattttcccctagtgtaagagaa

SEQ ID NO: 742173 - DNA, 607 bp, Homo sapiens
cagttcagaatttaaaggaagccatggaatgactttatcattgatattttttaaactcctttatttctcaagatatgtattaagctatcatgtttcacctgcaattattattgatgcatatcatatttgcattttaacattaattttcagtttcactaggcaatatgaagcttttgatcaacactggtggatgtccaaatcagcaaggatgcagaaaaatactgatgagaatttgaacccaaatgtattattgatcggatacacttactctattcctgtaaacccctctttaattaatgtgaaagtctatatagagtttttcatcattaaatattttgttgcatcacttcgtatataacctacacaaatgctttagtaaytcttatacaatgcatatcttaacatagcagattcctcccagaaaaagatattagaagaataaacatccaggtataatcaaaacaggttttaactactccaaaagagtctcctttaatatctgaattatctgacattctctttaacatgcaaaattctaaggaaactgatgacttaaggttaggaggaaagaattttcagtaaagaatttcaaaggaacactgcagcg

SEQ ID NO: 742174 - DNA, 597 bp, Homo sapiens
accttccagccacctcaaagtgagacccgtaagcaaacaggtatacttcagaagtctctaattctcattagttgactttcagtaatcgatgttggccccatgcagatgttttaaatcactaacacaaacattgctgtctttggtattcttgcagtgttttcatttatgagaaaacctgcagaagaaactgcttgaaccaaagcaaagtagcaaggaaacaggttactatataatcagaaggccctaagaaaggtagcagcaggtcatataattacctccttgtggataaaatccctgtcctcaaactacgcaacctactacctgtacttcttccttaggaaccaattttttcttgccagtcttctacttggcagatgccctttaaagaaacctgtgaaattaagccaccttttttgatttttttttccaaattcaaaccarttagaattgtttcacagatgcttttaaaaagttattggccatatgatgttcatcaaaaccacaaatgcatttgcttaaaaccaaacttcaaataagttaggaaggggcgaaagtaattcaattacattagaagatgcaaaccagtagtctaagcct

SEQ ID NO: 742175 - DNA, 564 bp, Homo sapiens
ataactcaaggagaatgaaaattgagaattgaccactggttttagcattggtccctgggggactgggtaaaaattatctgagtggattcaagagaaaatggaagaaaaaaattggaggcagcaaatatagacaaccgtttacagcttacttttttttaatacctgaaaggactgttatatttgagtctttgaagataggyaaaggactgagaatagagtatttgcaatcacacactttagagtaaaattctaataagtaactcccaattcctcctccccagcaactagtgaatctcttagctaaggaaattatttctatgtgttgagcccattcaggacctgctgaaacttgactcaagctattctgatcccatactagtctgagatgagaagattcacttccacatgtcaatatgtttaatattaattacaaagaactatcagactctcagtgtgcaattgttcagttttaattttaagcagagtcttactccctgtgtttctcaagagggttgctctctccaggatgcctgcaaaacaccagcctctggttgctgttatcta

SEQ ID NO: 742176 - DNA, 580 bp, Homo sapiens
gtcaagggtattggtccaatgggcaatgagatgtgggtgagattggggccagttcctgggaagcccctctgaggcccccacacctccatgcctccatggcctccatgggcacggatggcaggcccagcacataagcctctctgccatcatcccaccccaacccccacttggagaatagaggtcaggtctgctgtatcaactgtcctatcttgaatgctggtagttgtaatagagtgaacgagagctgtatagggtcttataccagcaatagatgcttsgcccagaaataacacatcacttccactcatatttcactgttcagctccatccatggggtcctgtccaaccacggggagccgggaattgtagtcccaccaagggcccagaaaaaaagagagacagaagtaattaatgaatagcaataataactgcacaacctccaagacaacttcccatcttaaaaccctcctgcttttctctcaccaccaagagtcccagatcagagcccctgaggtcatgagaatgcagcctttgccaccctgccagcctcatttctaggcctccatctccagtaacccag

SEQ ID NO: 742177 - DNA, 646 bp, Homo sapiens
gcccagctaatttttgtattttttagtggagacagggttttgccatattggccaggctgatctcgaactcctgacctcaggtgatctgcccacctctgcctccctattaatctatatgagtttttaaaaaataagtggtaggaggaagaaagctttttatttatttatttatttatttatttatttatttatttatttatttatttgagacagggtctcactgtcgcccaggctggagtgcagtggcacgatcttctcactgccaccactgcctccctggttcaagtgattctcctgcctcagcctccagagtagctgggaacaggcacgtgtcaccatgcccggctaatatggaagcaattttttttttttttgggacggagtttcgctcttgttgcccaggctggagtgcaatggtgtgatctcagctcactccaacstccgcctcccgtgttcaagcgattctcctgtatcagcctcccagatagctgggattacaggcacccaccaccatgcctcactaatttttgtatttttagtagagatggggtttcatcatattggtcaggctggtctcatgctcctgacctcaggtgatccacccgccaaggcctcccaaagtgctgggattataggctcacgtgag

SEQ ID NO: 742178 - DNA, 634 bp, Homo sapiens
aaaaaaaaaagattcttttcttgtttgcttggccaaaccttattcaggcttctgaaccttctcataggccagtctgtgcatgttcttgtaaaatccagttttagtaaaggaaccctgctaagtcaatttagctgaaacccaaattctccaaatctgatcaggttcctcatcctgcaccaccccccaggtgatatctgatcaccccagcctgtcttcagcaagaatcctgttagatcagtttagccagaattcctcttacccctgatgtttcctcttggtaattttctaaccactgacctycacactgctccttggctacaaattcccatttgcccatgctgtactttggacttgtgcccagtctttctcctccactacaagaccccattgcagcggtctctatacctatcctgatggtcctgaacaaagtcatccttacagcaaaaaagtgcacctctcccagctaccaaagcctcttctactgatgtgcctggaggagctgcagtaactataaacccctgcaaatgtggaggaagtaactggagcctgggtccagtcatgactgtctactgaatcatcttagccaatgcccactgaaggctcagggtgctcccagcacagggagaagaacttc

SEQ ID NO: 742179 - DNA, 662 bp, Homo sapiens
aatcaactggatatctggaggatcccagtgctgccacacattcatctgcatgtgcattttcccttctgatggtcaggccttctgttagctgctgctgcctgaagtgtacattttaaagggattcctccatcattcctgccaatactgccatattatttgcacgaggttccctgtccagcatttgcaggctttgtgtaggtgctcacacatctgtgatgtaatgctgatttcctcacccatagtaattgacatttgaatggaaattggccattttgattgcaaacattctggaactgctatgttgccaattgaaacggaaccctcaaaaccattattcaacaacaaaggaagtcacaggatacccatttggatgataggtcataggtgagaatcactacgctaaaataaattgatcaaattgttcctacaagcaattccatttcagtccctggaatttgttttcactttcctattcagccacatgaatacagaggctgcatccactctattttgctcttgmgaccaaggggtaaagacggtgccttcagatgcctgtgatggctcaggaaggggcctgggaggttgttggaggcagccatggaaccactgtcaatggtacaagtcatgcactattctttagcttgttgaagtttcattttctg

SEQ ID NO: 742180 - DNA, 587 bp, Homo sapiens
atttgtgctttgtaatgatagctagcaactctctgtggtttgggatagctcaggacagatactccttgaataattaccctgctcaatcagaaggaagcattcttgttatattgctgtgcatgattgatccatgtctgtacagcatttttttgttatttactctgatgttcacaaagtgtgttcagttaacacatgaattgaattgtggcaktttaaaaccataaagaaggttccccttgctggctgggtgtggtggttcatgcctgtaatcccagcactttgggaggccgaagcaggcggatcacgagatcaggagttcaagaccagccttgccaacatggtgaaaccccatctactaaaaatacaaaaattagctggaagtggtggtgcacgcctgtaatcccagctacttaggaggctgaagcaggaggatcgcttgaacccaggaagtggaggttgcagtaagcagagatggcaccactgcattccagcctgggcaacagaacaagactacatcttaaaaaaaaaaaaaaaaaaagaaggaaagaaaagaaaagattccccttgtcaaataagtatgggtagct

SEQ ID NO: 742181 - DNA, 638 bp, Homo sapiens
tcaaataatgagtccagcaggtgtggcattgttagaatttgaattcgaaactaagtttaccgtatagttttagagaaattgactgcttctttatgtgcctttttatgcgctgtattactgagaggtgtgtgtgctgagaatcctgtcgcatcatcttgctcttggtgagaaggtctcccctggtgttggccaccagatctgggaaraaacccaaaatatatattttttattactagtgtttcagtgtgtgcaactctgcttcttgggccgctagccttagtctctggtgagaagaagtaggtatcaaaaatgtgccctagacacatttgggagcaaggaggaaggctgtagatttctttttccccattaaagttttcatgtattggcaatttaaaccccaaagcattgtttaccacctgtcagatgcactcggaagcgtaaggattaactaataaaagatttgtaaaatgcttcctgagtctaaaattctataaatatgctaaatagtaataatccacccattgttaaatttatgtagctgcttatgccatgcatgtaagatgatttagatgcatgtttcctgtcaattaaacaatgagtttggagcaaaataacgagttcagttcacatcctatgaa

SEQ ID NO: 742182 - DNA, 620 bp, Homo sapiens
aaaatcgaaagcaaaaaattaaaacatactatcagagaaaattatctttactaaaagaaagacaagaaggaaagaaaaagaaagagaagtccagaaaacaataacaaaataagagaagtaagtccttatctattaataatwacattgaatattcattacctaaactctccaataaaaagacatagagtggataaataaataaaaataaacaagacacagtgacctgttgcctacaagaaacatatttcacctacaaagatacacatagactgaaaataaagggatggaaaatgatatttcatgcaaatgaaagccccaaaaaagtaggagaaggtatgcttatatcagacaaaatagacttcaagaaaaaactgaaaggagagaaaaagaaagtcattaaataataataaaggggttaattattcaacagatatgacgattgtaaatatatgtgcacccaacactgaagcacccagatttataaagcaaatattattagagctgaagagagaaatagacctcaatacagtaacagctggagacttcaacatcctgctttcagaattggacagatcttccagacagaaaatcaacaagaaaacgttggacttaatctgcac

SEQ ID NO: 742183 - DNA, 574 bp, Homo sapiens
tgggccgggcacggtggctcacacctgtaatgccagcacgttggggggccgaggcaggtggatcacgaggtcaggagatcgagaccatactggctaatacagtgaaaccccatctctactaaaagtacaaaaaaaaaaaaaattagccaggtgtggttgcgggcacctgtagtcccagctactcgggagacggaggcaggagaatggcatgatcccgggaagcagagcttgcagtgagctgagacygtgccactgcgctccagcctgagcgactgagcaagactctgtctcagaaaaaaaaaaacaacaaaaaaaaaccaaacaagtaatgggtttgaaagctggaataaaaagtctcccagtaaagaaaaccctgggacccaacagcctcactgctgaattctatcaaacatttaaagaagaactgataccaatcctactcaaactcttctgaaaaatagaggtggaagtactttcaaactcattcctttaggccaatattaccctgataccaaaaccagacaaagacatataaaaaataataataagagaaaactacaggctaatatccctg

SEQ ID NO: 742184 - DNA, 684 bp, Homo sapiens
aggtcatgtattaagagcctaatctaaggcagctttcactcacggaggaacattaacattataaaatcccacaccagataaaacaaggcaaggcattatcttcaattagtaaaaatggatatcttggaaaggctatgttgctggggaaaragagctaacatattgagtccccagtatatgatagatagctcatgtatacaaaatccttgcaaggtgtgttgcagtataacaattgtgcagatgaagaaacttaagtctgcaaggccaaggagcttgccaagtttgcatagctgaactgagctactatgaggcccagatgagattgaagcctagcttggtctacattgcacatgtgttccattggcctacactgaagtgaccacaactacactcagtattattgacatcctgaaaattttctggtttaggaggaataaataatctgacaaaggatttttaaatttaccaatatatgcatagtgaaatctttacaaagataaataacaatttagctttgcacaacctttaagacaataataattctaaattgagtcttgtgtgtaaggcattttatatacattatcattatgctccagaacaggacttctaacctcattttatgcacgaagtaactaaggcttagagaactttatgggagccagtgggtaaaaactacatgataat

SEQ ID NO: 742185 - DNA, 684 bp, Homo sapiens
aggtcatgtattaagagcctaatctaaggcagctttcactcacggaggaacattaacattataaaatcccacaccagataaaacaaggcaaggcattatcttcaattagtaaaaatggatatcttggaaaggctatgttgctggggaaagagagctaacatattgagtccccagtatatgatagatagctcatgtatacaaaatccttgcaaggtgtgttgcagtataacaattgtgcagatgaagaaacttaagtctgcaaggccaaggagcttgccaagtttgcatagctgaactgagctactatgaggcccagatgagattgaagcctagcttggtctacattgcacatgtgttccattggcctacactgaagtgaccacaactacactcagtattattgacatcctgaaaattttctggtttaggaggaataaataatctgacaaaggatttttaaatttaccaatatatgcatagtgaaatctttacaaagataaataacaatttagctttgcacracctttaagacaataataattctaaattgagtcttgtgtgtaaggcattttatatacattatcattatgctccagaacaggacttctaacctcattttatgcacgaagtaactaaggcttagagaactttatgggagccagtgggtaaaaactacatgataat

SEQ ID NO: 742186 - DNA, 611 bp, Homo sapiens
cacatagtgagcataatatccagtaggtagtttttcaatccataacccctgcctgccccttcttgtagtccagtgtctattgttcccatgtttatgaccatgtatgctcagcgtttagcttttcttacttataagtgagaacatacagtttttggttttytgtttctgcattttcttaggattatggcttccagctccatctatgttgctgcaaagaacacaatttcattctttttatggctgtgcagtgtcccatggtgtttaagcacaacattttctttatctaatccaccactgattggcacataggttgaatccaagtctttgctattgtgaatagcattgtaattaccatacaagtgcatgtgtcattttggaataatgatctattttcctttgggtatatactgggtatgctggttagaatggtagctcctttttaagtgctttaagaaatctccaaattgctttccagaatggctgaactctggaagtgtatatgcattctctttcttcctcagcctctccagcgtctgttgttttttgactttttaatgattgccatcctgactagtatgagatggtgtctcattgtggttttgatttgtgtt

SEQ ID NO: 742187 - DNA, 611 bp, Homo sapiens
ggtggagggtgcctccatcccacccaggcccacaggctggcctcgcccttgctctgcagcaagcccatccaggtgccctgctcagagccaccagcattaatagctgatggtttaataccctcaggagccagcgcactcaagcagcaatcagaaggccccatcaccgctgctgtgtaattgcgcccgatcactcgcacagcgagcgctgattgcggctcagagatggctyagcttccaggctgatgggctggagcccttggaggcctaatgagggtaattgaggatgggctgattgtgccggaaaaaagctgaaggggactgagccatgagaacaggctgcgtcacaccctaaacgggaccacatttgctaaatttgtttccgacacaatttcgtggtgattacactgatttctcttgagttactgagcctggcacagagcttgtgcttgcagccccactgtcaagatgcgcctgtttgagagtgggaggtattgttgatgacttatgggccactgtcagccctgggaacgagttcatggagaggctggtgggagacaggtgggagcttgggggcggtggggagggcctggggtcccaagggcctacgtttg

SEQ ID NO: 742188 - DNA, 611 bp, Homo sapiens
atctcctttgtgaccaatcccttgcattcaactccccctgctcaaaagcaagggtgctgttttcctggttggaccctgaatgatacaaccaatgtcatcaccaagcaactggtgggatgagtattaatactcctgcttaagggtcactcagccagggcatgagcctgcagcacccgcctccaggtgcacaccctgctggacacacccctcacctgtgcatttctctctcagacctgacctcctaccacacacgtggaggtactgaggtgtaggtacacatgagagcacacacacattcacaytccaatgcagtgttacagatggctccagcacacacacagtctccagcaggggaggggcaaagatctggctctgagaaagtggagaaatgagatgatatccaggctgggaagagcccgtgaggatccgcaggtgccgagcatggctggctgcttgtgcacaaactcaagtacacatgcacagacatgaacacatgtgaatggacaggtacacacacacatacctatgcacatgcttgcacatgtgtgctggcacaccatgcactcacgtgtgcacacacatggatacacacgcaggatggacatgtgcac

SEQ ID NO: 742189 - DNA, 580 bp, Homo sapiens
tttgagggcctctaaaagcattaaagcagcagcagccgctgcacgcagacatgagggctaggctaaaacagtaaggtcaagttgtttggacagaaaggctacagggtgtggtcctggctcttgtgtaagaattctgaccacactaaccatgcctaggaaagaaaggagttgttgttttgtagaagatgctggggtttgagagatcagtcggacacgattggcagggagagcacgtgtgtttttatgagaattatgccgagataggtaacagatgaggaagaaatttgggcttgattgaagtaatgggggctgtctgtgaagctttgcagcagtacagcctaggtaatttgctgagcctaatgggtgtcagagacagtctaagtgaaagcaaagagaggctgggamgaggggtgcaggggaatagtgaaaaaagcatctttaagatcaagcacggaatagtgagttgtggaggaaggtattgaggacaaaagagggtacgggttgggcaccacagggtggacaggcaaaacaatttcgttgataaggtgcagatcctgaactaacttgtaaggcttgtctg

SEQ ID NO: 742190 - DNA, 630 bp, Homo sapiens
atgtgacccagaatggagggagaaatctcccaggtgtagcaggagtggcagtgtgcagtgagtggagttaaaattcccacttcccccggctattccttaatgatttggaaactggccaggagcagtggctcacgcctgtaatcccagcactttgggaggctgaggtgggtggatcacatgggatcaggagtttgagaccagcctggccaacatggtgaaaccccrtagctactaaaaatataaaaattagctgtgtgtggtggccggtgcctgtaatcccagctacttgggaggctgaggcaggagaatcgcttgagcctgggaggcggaggttgcagtgagccaagatcgtgctattgcactccagcctgggcaacaagggtgaaactccatctaaaaaaaaaaaaagatttggaaacaacagttgacaagatggaaatagttgttgatgctcctctttattcaaacattgtcttcttcaacttttacttaatgatcagataatgattaaagagatgacgttctcgccactgtgggaaagaacagaggtctagagaagtggaggaattgctctgcaacccagacaacccaagggatttgggggagcggcactcacccgtcgtagcaaga

SEQ ID NO: 742191 - DNA, 630 bp, Homo sapiens
atgtgacccagaatggagggagaaatctcccaggtgtagcaggagtggcagtgtgcagtgagtggagttaaaattcccacttcccccggctattccttaatgatttggaaactggccaggagcagtggctcacgcctgtaatcccagcactttgggaggctgaggtgggtggatcacatgggatcaggagtttgagaccagcctggccaacatggtgaaaccccatakctactaaaaatataaaaattagctgtgtgtggtggccggtgcctgtaatcccagctacttgggaggctgaggcaggagaatcgcttgagcctgggaggcggaggttgcagtgagccaagatcgtgctattgcactccagcctgggcaacaagggtgaaactccatctaaaaaaaaaaaaagatttggaaacaacagttgacaagatggaaatagttgttgatgctcctctttattcaaacattgtcttcttcaacttttacttaatgatcagataatgattaaagagatgacgttctcgccactgtgggaaagaacagaggtctagagaagtggaggaattgctctgcaacccagacaacccaagggatttgggggagcggcactcacccgtcgtagcaaga

SEQ ID NO: 742192 - DNA, 612 bp, Homo sapiens
aaagtaatggcgaaaacctcaattacttctgcaccaacaatatagtgataataatgaaaataagaaaagatgttggtactccaatagtaagcaagacagataatgttcttcatatgatagagtgagtcctcaaagttatatctttaaaagactgaattagatatccaaaattttaccgtaaaattaagttgtcattatttcactacatttctcatgactattattggataattatttataaatctttgtttcttcmgtgacacttgcagaaaagcaagtcatgtgatgacaggacaataataattatttattgaaggggatcaaaatatgccagccaaaatatactatcccctaataagcgactttgggcacatggattattttgagtggaaggccatcgagaatcaacagatgcaggaagaagccttcttggagcttctcctacctgactatgtgcagacacttctgagaaattctctctccctgggagagttttatggccaagaagaagacggaaagtgggtgctgagtgggcacacaaacctcacaaaaataaaccttagcatccattggtttccccatatatttccttcccacattatactgcctcta

SEQ ID NO: 742193 - DNA, 582 bp, Homo sapiens
aggagtacactctaaaataagtattgtataataagtacataaaccagtagcatagtcattaattatcattatcaattattatgtactgtacataattgtatgtgctatatttgtatccaactgatagtgcagtaggtttgtttatgccaggatcaccataaatagatgagtaatgcactgtactgtgacactgggatggctacaatatcactaggcgataggaatttttcagctccagtataatcttaggggaccatcatcctatatgcggtcgcttgttgactgatacatcattatgcggtgcatgactgcataaatttgggtatggayatagatatagacagagatatcttcagccctgaacagtctccttaactccatacttaaatacctgctggatatttccaccaaatgtttcatatgcatttgaaatttaacgcataaaaaaccaaactcatgttctgcttgcaaaacctgactcttccccaatctaccctatctgcatgataccctccctcattatggtactcaaaaaactttgcaataatcctattctcctctcatatctcacatttactccat

SEQ ID NO: 742194 - DNA, 642 bp, Homo sapiens
attaagaaattattttagacagatagggaggaaaagggtccttgggaagttatttttcttttaaagcagctccagaaatgtttcttgtctagcaggaaagccctggctcttaaagctgggctggcaagctttggtatgcaaatacaggccattagaaactgtgtccacccaaacattgcgattcccgctgtcttcttgcccttgccccaacatctgtctgacaacatggccgcccccacatatccccatgtgtgcagaacatcatggcgccctgaatttgcatattaaaaggctagagtgggagggcragtcccccccgcccaggctacatgaatgacatgcctggtcaaaccaatcccctgagccctatgcaaatcagacaccacctcctccaaccttctcatataagcagctacttctccccccacaaacgaggttttctctttgttggaatcccccctctttctgtgtctgtatgggggagctgtttttcttccttccttctttcttgcctactaaacttttcgcactttaaaaccactccatgtgtgtccatgtcattttatccaaacccgtgtgagaccaagaaccctgatgttcctccagtcattggagccatattattaccaggggtccttgctc

SEQ ID NO: 742195 - DNA, 642 bp, Homo sapiens
attaagaaattattttagacagatagggaggaaaagggtccttgggaagttatttttcttttaaagcagctccagaaatgtttcttgtctagcaggaaagccctggctcttaaagctgggctggcaagctttggtatgcaaatacaggccattagaaactgtgtccacccaaacattgcgattcccgctgtcttcttgcccttgccccaacatctgtctgacaacatggccgcccccacatatccccatgtgtgcagaacatcatggcgccctgaatttgcatattaaaaggctagagtgggagggcaagtcccccccgcccaggctacatgaatgacatgcctggtcaaaccaatcccctgagccctatgcaaatcagacaccacctcctccaaccttctcatataagcagctacttctccccccacamacgaggttttctctttgttggaatcccccctctttctgtgtctgtatgggggagctgtttttcttccttccttctttcttgcctactaaacttttcgcactttaaaaccactccatgtgtgtccatgtcattttatccaaacccgtgtgagaccaagaaccctgatgttcctccagtcattggagccatattattaccaggggtccttgctc

SEQ ID NO: 742196 - DNA, 642 bp, Homo sapiens
attaagaaattattttagacagatagggaggaaaagggtccttgggaagttatttttcttttaaagcagctccagaaatgtttcttgtctagcaggaaagccctggctcttaaagctgggctggcaagctttggtatgcaaatacaggccattagaaactgtgtccacccaaacattgcgattcccgctgtcttcttgcccttgccccaacatctgtctgacaacatggccgcccccacatatccccatgtgtgcagaacatcatggcgccctgaatttgcatattaaaaggctagagtgggagggcaagtcccccccgcccaggctacatgaatgacatgcctggtcaaaccaatcccctgagccctatgcaaatcagacaccacctcctccaaccttctcatataagcagctacttctccccccacaaasgaggttttctctttgttggaatcccccctctttctgtgtctgtatgggggagctgtttttcttccttccttctttcttgcctactaaacttttcgcactttaaaaccactccatgtgtgtccatgtcattttatccaaacccgtgtgagaccaagaaccctgatgttcctccagtcattggagccatattattaccaggggtccttgctc

SEQ ID NO: 742197 - DNA, 626 bp, Homo sapiens
ttatagaactcccagtgcaggtctaataaatgacatttgattttgttattagttgttttaatcacattcaacagaatgtgattcagagcttcttttttccagcgaaacacaggtaatattatgggttcttctccaaagtactcttactccgttttcacattgtagtttgtgttctyttttttcaccatccgtgtcagcaggccccttcccacctttactatgcctgattccctcttttttttttttttgcaagcctcttgcattcagcttgtgtttcacaggactgaatccatcagacactgactaccagctaagagaactattattacatttcttctccagtgaaatttgacccccttacagtcttacagtcaaatcactcaagtaatatcatgtaaatgtacctaagttgttcagaattccagtgcctgagtttttttttttagaatcaaaaggaaattgcaaaaaaaaggctgccatcttgaatttcattttacgcgagtgacctccagaagtcagaagtttatgaagacttacacaatacactgtaaatgctaaagtgttcaaaatgaatgttgctgaacaaataatacaattatatgcatttctggtcttttcaaatttta

SEQ ID NO: 742198 - DNA, 556 bp, Homo sapiens
ctaataaatgacatttgattttgttattagttgttttaatcacattcaacagaatgtgattcagagcttcttttttccagcgaaacacaggtaatattatgggttcttctccaaagtactcttactccgttttcacattgtagtttgtgttctcttttttcaccatccgtgtcagcaggccccttcccacctttactatgcctgattccctcttttttttttttttgcaagcctcttgcattcagcttgtgtttcacaggactgaatccatcagacactgactaccagctaagagaactattattacatttcttctccagtgaaatttgacccccttacagtsttacagtcaaatcactcaagtaatatcatgtaaatgtacctaagttgttcagaattccagtgcctgagtttttttttttagaatcaaaaggaaattgcaaaaaaaaggctgccatcttgaatttcattttacgcgagtgacctccagaagtcagaagtttatgaagacttacacaatacactgtaaatgctaaagtgttcaaaatgaatgttg

SEQ ID NO: 742199 - DNA, 632 bp, Homo sapiens
accagtgggtatcaaatggctcttcctgaagccccattattttggctaaaaagagtcaatccctctccctagcaatgctagaaactggagaatttggtttggatagaaaatagaaatggtggcagtgctggttgagggcaggggctgtgggattgattgctttaaccaccatgacagctaggaaggaaatcagcgttccttgaggacacggcaattttccatgttgacaattttctagagagaaataggaatgctttttgaagcattcattacttatcgagtggctgctctgctcaccccagamttataagtatgattaagacatagtccagctctcaaggcatgcacagtttagaggacatgatagacatgtaaatacacaattatgaggcagagttgtaagggctgtaataaaggtaagtgaagggtgcaacaggagcaaggagaaggaggcatgctattctataactccagaacataaagagggaaaggaagcaaagacttttccagtggctatgactctggtgatctatggtgattgtacagctctatcacagtgcttttaaaagtgaaggataatgacataaaaagtaggctgacattttacgatgaggaatattttgcttaaatgt

SEQ ID NO: 742200 - DNA, 652 bp, Homo sapiens
tttctaccaagatttctaatttataagagtagtaagatgcattgggaatatcttatttgtttctatttttgcctctaaaaatctaatacacactaagaaaatttctcctcaaagataaaaaaatctaattatgaatctaaatattaaccagattttagagtaaaaaatctagaaaagaaatgtttttttcacagggaaataaaattaaaggacagtttatttttttctaacaaatgcatataatgtgatttttttcagccttctacataaatcatagaaatctttaaagactttttcatcakatggaataacaattagacaacaagcttttattaaaagtgatattttaaaattagtcgtaatgtgtacagagctttaaacataacacatactattacaaactcaaaaccttcacaaattgatttgaaattgtgaagcctgatattcaaatctaagagtcaagtcagctagtattcctgattacaaaagcatgctttcataggaactcaatttcatttatcaatacaattttggccacttaagagattaaaaaataaataaatacacaaacaaatcatgtatataaactttcctggtcagattgcaatcactgttcatcaaaacaatggctcttggatgcttccatcctaac

SEQ ID NO: 742201 - DNA, 564 bp, Homo sapiens
tttcaaattgacacccaagcaaagcacacaaacatcacacttgagcaacactagctacaataactaggtagcctttctcattagggctgaggtcttatacagcattgcaatgaacttcatctgaatactagcttgtatgccaactacaggtcaaactccaaggacttcttgctctgtgcctctttccacaactttccttattgtgtgcaattgtctcaggtactcagagcaatgtaggctgacttccaattagtcctccaaagttttaaggacttacataaatgactatatggaaacaatactctctaaggaatcttactaccctggaaacaagatatagctacccagtcmatttctattcctcatgtaaattccataaccttttagttaaaactatcacatattctcaagatctactttatattgcactgatcctcagccaaagtcagtccaacactctaggcattttgatgttgccattctttgaacaagtaaaagtataagaaaagtataagaggaatatatatatatatatatatatatatatatatatatatatatgac

SEQ ID NO: 742202 - DNA, 646 bp, Homo sapiens
tgccagactatcactgatgttcccttaaggcacaagcattcttaagtcagcttttggtgaatgctaacatgcctgggactcatttttcagagaattaagctcctctgtggcccagggtgggtccagaaatgtcatccaagagtcaagtcctggaatcagggaccccaagggcctgttggcacactacccatgccccagatggcaatgctgttagctaaggtgcaagacaaagtcctttttactttactctctccttttctcaagcagaaaatgatttrtataatagccaccacagctggtaatgtgttgagtttcacctgaagctcacaagtcttaagggctcacccaagtccctcaacatagaacctgggtatcactgctgattattcaaggcctaagggctcttcagctgcaggtgatgaatgctgccaggactgggtcttttctctcaaggcaagcaggtttacttctggcccagagtgcatctagaaatactgtctgggagttagggcctggataggggacctcacaactctgactagtaccctatcctgctgtgactgagctggtatccaagatgcaagacaaagtccttcccactctttcttctcttctcctcaagtgaaaggaaggtatatttttagga

SEQ ID NO: 742203 - DNA, 591 bp, Homo sapiens
ctttgtttatcccttaggccactttgtggcagctatttgcagttgatctatgtccgtaaggaagacaataaaaacaaaatttattgaacaattcaattttatgttcccttaatccctgattatttgttttgttttcatttgggtaagaagtaggcatcataygtagattttttgaagagatgctgctaagaaacacaacaggctatgtgaaaatcgtgggcctgaaatgctcataatacagctctaacattacatgtttatatgaacaaattattttggcatattttggtttaagtgcaaatcatagaacatttattattataggtataaaaaaaggttgccaaacactttgggcctagtgcttatgaaacaataccactcaatgcttcaaaatactaaataacacaataagcaaaatcttagcttctgaccaagtaaacaagtcgaatgatccagagatctaatggcttaggtttttagcctatttttgggattaatgtgaatgtgtactttatgtctgtcttcttcttggcagaatctgcaacctggcacatttcccatttacctggaatactgagcacttgcctcact

SEQ ID NO: 742204 - DNA, 564 bp, Homo sapiens
ttctgtgtgaatctgtagtttttatcaggccctccaaatggatttagagcttataagcaagggtgggggaaaacacacatgtagataaataattcaatgtaactcctcagagtttgagtgggagcaggtcaaaagcttcacagaagaggtgatattcgaccacttcagccaagcaggtggaaagagcattccagggatagggataggatatgcaaaggtataaaasgataaaagagcatactgcatttgggaaactacaaatagtttgatatggcaggaacatgagaccagaggcagcatgccaactccagactgacaccctcctgcattcactccacttatggaatatcaccaactgcttatagattcatccacagtgtccccacactgcaatagctgcttagaagagatgactagtaggcagatgttccccacagaacctggcccttatctcagaattttaaagtgagaagcaatgaaagaaggtttgaaaaagtagctttattctcctatcacatttggattcctagtttgggcacttaggaaatcaccagtggtaaatgg

SEQ ID NO: 742205 - DNA, 555 bp, Homo sapiens
aggcagatgttccccacagaacctggcccttatctcagaattttaaagtgagaagcaatgaaagaaggtttgaaaaagtagctttattctcctatcacatttggattcctagtttgggcacttaggaaatcaccagtggtaaatggaatgtcatcagttacttctctttatttctttttcattttatatctaaaagaattttaaggcccagagcataagatgtggagcagtgtgtctgctatcatgtagacttatctagttgctaactttccaactcattctatactgctgctctatacctatgtccaatagtytaacccattactggctatgtttgtttctcttctcccagaaccagtatctttggcactgttttatgcccctgcctttttctccttatttctcaagctgctcctgaatttaaaagttttttaaaaaatattttacacattctttatccattatccccttgaaagatattgaggattgttctgctgtttaactcttttgaataaagctgctctaaatattcatgcaaaagtctttgtgtggaca

SEQ ID NO: 742206 - DNA, 626 bp, Homo sapiens
agggatccagtttcagctttctacatatggctagacatttttcccagcaccatttattaaatagggaattccccatttcttgtttttgtcaggtttgtcaaagatcagatagttgtagatatgtggcgttatttctgagggctctgttctgttccattgatmtatatctctgttttggtaccagtaccatgctgttttggttactgtagccttgttttcttccttttttttttccttttttttattattattatacttgaagttttagggtacatgtgcacaatgtgcaggttagttacatatgtatacatgtgccatgctggtgcgctgcacccactaactcgtcatctaccattaggtatatctcccaatgatatccctcccccctctccccaccccacaacagtccccagagtgtgatgttccccttcctgtgtccatgtgttctcattgttcaattcccatctatgagtgagaatatgtggtgtttggttttttgttctagcaatagtttactgagaatgatgatttccaatttcatccatgtccctgcaaaggagatgaactcatccttttttatggctgcataacattccatggtgtatatgtgccacattttcttaatc

SEQ ID NO: 742207 - DNA, 626 bp, Homo sapiens
agggatccagtttcagctttctacatatggctagacatttttcccagcaccatttattaaatagggaattccccatttcttgtttttgtcaggtttgtcaaagatcagatagttgtagatatgtggcgttatttctgagggctctgttctgttccattgatatatatctctgttttggtaccagtaccatgctgttttggttactgtagccttgttttcttccttttttttttccttttttttattattattatacttgaagttttagggtacatgtgcacaatgtgcaggttagttacatatgtatacatgtgccatgctggtgcgctgcacccactaactcgtcatctascattaggtatatctcccaatgatatccctcccccctctccccaccccacaacagtccccagagtgtgatgttccccttcctgtgtccatgtgttctcattgttcaattcccatctatgagtgagaatatgtggtgtttggttttttgttctagcaatagtttactgagaatgatgatttccaatttcatccatgtccctgcaaaggagatgaactcatccttttttatggctgcataacattccatggtgtatatgtgccacattttcttaatc

SEQ ID NO: 742208 - DNA, 640 bp, Homo sapiens
agctgaatgttaatcaccaagacaatgaggaaaatatctctagggtatgtcagagaccttcagagcagcctctccaatcacaggcctagaggtctaggaggaaaaaaatcattttgtagactgggcccagggcgccccttctctatgtaacctcatgacctggtgccctgtgtaccagttgcttcggctccagccatgtctataacggccaatgtacagctcaggcctttgcttcagagggttcaagccccaagccttggcagcttacatgtgatgttggtcctgtggttgcacagaaatcaagaattgatgtttggggaactctgcatagatttcagaggatgcaaaggaatgcctgaatgtctgtacagaagtttgctgcaggagtggagccctcatgaagaacctctgctagggcaatatggaagaaaagtttggagcccccacacagagtctccactggggcactgcctaktggagctgtgagaagagggccactgtcctccatacctcagaatggtagattcactgacagctttcaccatgcacgtgtaaaagccacagataatgacaggctgttaaagcagctgggatgggagctgtaccctgcaaagccacaggggtggagctccttaagact

SEQ ID NO: 742209 - DNA, 614 bp, Homo sapiens
tcatgacctaaaaccacaattacttttgcagcaaactaatatacatacaccaagacacattgaattttttttgagacagagtatcactctcttgcacaggctggagtgcagtagctgcaatcatggcaaactgcagcctccacctttctgggctcagattatcctcctacttcagcctcccaaatagctgggactacaggcatgcacagccatgcycagttaatttttgtatttttttttttgggagagacagggtcgccctatgttgctcaggctggtctcaaattcctgggctcaaatgattcatctacttcagcctcccaaagtgctgggattacaggcatgagctcccatacctggctgacacactgaatcttaaaagcagcaagagagaagtaacttaccacataaaagggatcctcaataagattaacaaccaatatcatgaaaaaccatggaggacagaaggaaatgtgatagcataattacagtgctgaaggaaaaacaaaaacatgtgaaccaagaatttcatttatagcaaaatttccttcaaaaaatgaagaaattgaaacatcccagataaacaaaagctgatggaatctgtcagtagtaca

SEQ ID NO: 742210 - DNA, 588 bp, Homo sapiens
actaaaaagctcctgcacagctaacgaaataatcagcatagtaaacagacaacccagagagtgggagaaaatctttacaatctatacatctgacaaaggataatatccagaatctacaaataactcaaacaaattagcaagaaaaaaaaatcacatcagaaagtcggctaaggacatgaatagacaattcacaaaagaagktatacaaagggcctacaagcatatggaaaaatgctcaacatcactaattatcagggaaatgcaaatcaaaaccacaattcaatagataccacatcactcctgcaaaaacggccataatgaaaaaataaaaaaaaatagatgttgatgtagatgcagtgaaatggggacacttatacactgttggtggaaatgtaaactagcataaccatcatgaaaatctgtgtagagattccttaaagaattaaaagtagatctaccttttgatttaagaattccaatactgggtatctaccgaaaggaaaagaagtcattatacgaaaaaagataatggcacacacatgcttgtagcagcacaatttgccattgcaaaactacagaaccagccta

SEQ ID NO: 742211 - DNA, 625 bp, Homo sapiens
tcttgacatcttgctcttcttcccttcatctattgtgttagtcaggtgcatgctggtcttccctctatcaaactgtaagctacttggagacttgggatgcctcactcatctctattcccaaacctcagggtctatcattctaccttctgtatagacaggactttcatagttttgaacaagtcagaacctgaaagaatttgyttccagaacaggacattgacaggaaaattaagcatgatcatgccgaggtataaaacaatattaaaattgcagcattttcttctgtcttgctttgcatgaaatagatgtttggtaaatgctttttaaattacaagttgttttatgttttggggggattttcttctgtaacaagaagcaaaccactgaaacccaactcctaagcaaacgttttagaggagcttcatgaaacattacccccagctagttctttctccacctctatatatgataacccattttctcctccacatttttgagtatgtaaagccagttgttcctgactaggtgcatttaatttggggttctggcatttgtattcacttgaacaagatggatgataatagtaaaaagtgtacaagatttgggttatgtagatggagtcaaa

SEQ ID NO: 742212 - DNA, 554 bp, Homo sapiens
agctcttagtacaagtaagtacctagtacataataggtactcaataaatatcaattgaattgaataagaaaactgagtttaggttaaaaaaaaatctcagatggaatgtcagagagtaagtacatacctattgctggggtgaccaggggcaaattacttaacatttctgagttggaaataatgccaactacaattacaagaccattgtgaagataaataagatgacacaggtaaagaarctgtacaaagtaggggtctagcttgggtgacagggtgaaactgtccattcttctcataataaatgcccattctcttcacaataaattgaaaattagtttgcaacaaacttattcctgcccttttttgtattcagggtttggcaagaccttctgagttaatttaggacaacttagtgtttagcataactctttcacagatttgctgtattatcagtgtctgatgatgttgacaatgttgaagaagaagaaagaagaggagttggaggaggaggaagaaaacatccagagcattcaatttattctagttaaattact

SEQ ID NO: 742213 - DNA, 554 bp, Homo sapiens
agctcttagtacaagtaagtacctagtacataataggtactcaataaatatcaattgaattgaataagaaaactgagtttaggttaaaaaaaaatctcagatggaatgtcagagagtaagtacatacctattgctggggtgaccaggggcaaattacttaacatttctgagttggaaataatgccaactacaattacaagaccattgtgaagataaataagatgacacaggtaaagaagctgtacaaagtaggggtctagcttgggtgacagrgtgaaactgtccattcttctcataataaatgcccattctcttcacaataaattgaaaattagtttgcaacaaacttattcctgcccttttttgtattcagggtttggcaagaccttctgagttaatttaggacaacttagtgtttagcataactctttcacagatttgctgtattatcagtgtctgatgatgttgacaatgttgaagaagaagaaagaagaggagttggaggaggaggaagaaaacatccagagcattcaatttattctagttaaattact

SEQ ID NO: 742214 - DNA, 642 bp, Homo sapiens
taccaaccatttccgattagctgagtgccttatttaatttatttgcctaacacttttcatttatgctgccgtgtgtcattctgtatttaataaaaataataatgttttctctaaactgattgtagccccttaaaaggcaggatgaatttttgtggcccccaaccatttaaaacagcataggatttatgataggcatcagtatgttttcatagattgatcaaaatgccactgaaacattattttttataggatggaagagatcggaaacaaagccatatattaaaatcctctcaggatgacttagggccatatgtcaatcccaaaacccaataggctttcccatgttgacagtcccaggtttagggagggtgaagacaagaaaatgtgtaacacttcaatttgacctctaggccattacagactttaaactactttcttctcattatakattatcatcaggcttctggtccctctgattgtagccttattagattctaactgctctgcctcttcccctccccacccctaccatactttctccactcattcaccccgtctacaccccgactctgtcaaacagaaatgcatgcagaccttctacgtatgtagacaggtccatcaggaaattttaatttattagat

SEQ ID NO: 742215 - DNA, 642 bp, Homo sapiens
taccaaccatttccgattagctgagtgccttatttaatttatttgcctaacacttttcatttatgctgccgtgtgtcattctgtatttaataaaaataataatgttttctctaaactgattgtagccccttaaaaggcaggatgaatttttgtggcccccaaccatttaaaacagcataggatttatgataggcatcagtatgttttcatagattgatcaaaatgccactgaaacattattttttataggatggaagagatcggaaacaaagccatatattaaaatcctctcaggatgacttagggccatatgtcaatcccaaaacccaataggctttcccatgttgacagtcccaggtttagggagggtgaagacaagaaaatgtgtaacacttcaatttgacctctaggccattacagactttaaactactttcttctcattatagattatcatcargcttctggtccctctgattgtagccttattagattctaactgctctgcctcttcccctccccacccctaccatactttctccactcattcaccccgtctacaccccgactctgtcaaacagaaatgcatgcagaccttctacgtatgtagacaggtccatcaggaaattttaatttattagat

SEQ ID NO: 742216 - DNA, 600 bp, Homo sapiens
gccgcttccacttccacccgttgattcctggacccgtgaatcctggctatgggagaaacagtaccatatattagttgctgattcagagcatacgtggccttctggagaactttgccccagccctgcaaagtattgtcacttagttggagttgtaattgtgacttacaaagctatttcaccattctatcaatccagttgyttcaggatgatggggaacatagtaagaccagtgaattccatgagcagccacacttctttagccataaagtgagtgccttggtcagaggcaatgctgtgtggggtgtgtgtaacaatgtgtgtaccatgacagtggataaggcacttcatgagtccacagatggtagtcttggcagaagcattgtgtgcaggacaggcatacccatatccagagtaagtgtctattccagtgaggacaaacctctgctctttccgtgatggaagaggtgcaatatatatataacctgccaccaggtagctggctgatcaccctgaggaatggtgccatattgagggctcagtgttggtctctgctgctggcaaatggggcactcagcagtggctgtagccaggtcatccctg

SEQ ID NO: 742217 - DNA, 550 bp, Homo sapiens
ctcttcccttactagacttccccagttggcaaggggccaccacacattgaaattcaggaggggtaggagggatgggagagttgttacattattcatgtccaattctatttgtctaatggccttgctaaaagcaccctggatggaaagtgtgagtcttaatggcattttataaaagttgctgtgatgaattaacacataaagcaaattaaaaacagcttatcgcttgttaaattaggtgatggggcactgtagcatttttcccagatgtgaggatccattaatatccaaaggagccagaagctgctgaaatgtgtcagctgcttgrttttagggacctgacaagtctgaataaatgtaatcctagaggggcagattgtccaagatcaatagagctcgtggaaagaacctgttgctgagctcctcaggaaggacacctgcagctaacagcaggagtgggaaagttccccttaaggactcttgggaatagaagaacacaggcgagtgaatgtctgacctggtagggacctccaggaatagtcccacccccact

SEQ ID NO: 742218 - DNA, 550 bp, Homo sapiens
ctcttcccttactagacttccccagttggcaaggggccaccacacattgaaattcaggaggggtaggagggatgggagagttgttacattattcatgtccaattctatttgtctaatggccttgctaaaagcaccctggatggaaagtgtgagtcttaatggcattttataaaagttgctgtgatgaattaacacataaagcaaattaaaaacagcttatcgcttgttaaattaggtgatggggcactgtagcatttttcccagatgtgaggatccattaatatccaaaggagccagaagctgctgaaatgtgtcagctgcttggttttagggacctgacaagtctgaataaatgtaatcctagaggggcagattgtccaagatcaatagagctcgtggaaagarcctgttgctgagctcctcaggaaggacacctgcagctaacagcaggagtgggaaagttccccttaaggactcttgggaatagaagaacacaggcgagtgaatgtctgacctggtagggacctccaggaatagtcccacccccact

SEQ ID NO: 742219 - DNA, 623 bp, Homo sapiens
acaatttgcatataattgaaagagttgctggatttcatccatttgtttcatcatcctaagagttattaaattttaagagatttctctaagtttaagaagaaaatcacaaaaatatccttatgaaatattggtcataaagctttgattttaaaatatttttgattattaatattatatccaatattcataattaatataattaattttctataaaatatttttgtgtattaatattacatataatattaacaattaatataagtaatattatactaattatctattctattatatattaatatataatatatttatattctaaacatgaatatatagaatattaaaattattatacataatatataatatacaagtattctttacaagtatatattaatatcatatatgtttatgtatrttaacaaattttatgttaaaaatgtgagaattctgtaaaaaataaaaaagtaattatgtataaatatatatttttatatttataattttatatttatatttaattttatatttatataattgatatataaatattaatactattaatttgttaagttttaatatgtaatatttaacacattaataatactggtaaatatataagt

SEQ ID NO: 742220 - DNA, 510 bp, Homo sapiens
atgaagccatatggaccccacacttctgtaatgtatatccccaaaaagtctgaattttttctatggtcattgatgcatttaaaatgtctgactttattgactccattttaataatttgtggagaaaacatgtatttgttctggacttacaggttcatgaccagctggtcataaaaatactctcagaagggtactgatctcttccatcagtatggttaaatctctttcttcctatttgtagttcttgttgtcatgagcatttctactttattttcaaagcaccagcatttagctttaaatatcagttctatttttaactctaatttattaattttaactgcaatttttatcaacrccttcctcttttagcttacttaaatttttatttttctagctcttaaattaaactgcttatgtactttaaatactgccaggtaacaaaatcattttctaaataataaaatggttaaaaacattcttcataagcattatagacagtgttctcgtttct

SEQ ID NO: 742221 - DNA, 612 bp, Homo sapiens
aaaaaatatcaataccttgatttgtaattgcattgagtaagttattaaaatggatgatttgtacattcaggcataaagtaaagaattaaagaaacacaatgaataaatttgtcagaatagactaaagacatgaacaatattatttttagagaggctaatctgaaaaactaaaatatcgggagatatccaacatctggggagaggaccaaatattattttatccatgaaagttttgtcattctgactttattaaattatattcaatatatttatttacaaaattgataagcgttagttttttaatattaattttattaattttaccctgaattcacacatcaggttttctggaccagagacaaatatttattaataaatgcaagtcagacatgctggctcacacctgttatcctagaactttgggaggccaacgtagacagaccgcttgagcccagaggttcaagtccaacctgggcaacatggcaaaaccatgtctctacataaaatacaaaaattatccaggtacactggcacatamctgtagtcccagctactcaggaggctgaggtgtgaggatcaccagaccctggggaggtggaagctgcagtgagc

SEQ ID NO: 742222 - DNA, 603 bp, Homo sapiens
agatttctaaagcatattttaattatgcattcaaaaactggctgtgaattttgtaagttgaggggcagggcagagagaaaggaatcgaagatggtaagcttgttaaacaaatcctaaattgagtccagggaggtctgtgggaatatgggggcatcagcatgatgccttgtttgacaaaaaaacgaacaaacaaacaaacaaacaaacaaaaaagttccattctgartgggtagagaagcggctatggggcaagaggccaattaaaggagatcacttctgtaagttcaagcttgggacctaacttcacgtgctcccagagacaatggtctctgtgaggtttggatctccagtgtttctcagttcctggcacactctggactcacacagtaggtggttgatgatgggtggtgaatgaaagacctttgtagaaaaacatttgctactcctgtttttccttaattttccctgagcaatgtgctgctcccttgcctgagccatggtgccctgtaaatgagcttgaataaatagagaaccggcagcttggacatccttagcttaagctaatgggaactctacaacatgcaaaacaatgacaaaattagc

SEQ ID NO: 742223 - DNA, 603 bp, Homo sapiens
agatttctaaagcatattttaattatgcattcaaaaactggctgtgaattttgtaagttgaggggcagggcagagagaaaggaatcgaagatggtaagcttgttaaacaaatcctaaattgagtccagggaggtctgtgggaatatgggggcatcagcatgatgccttgtttgacaaaaaaacgaacaaacaaacaaacaaacaaacaaaaaagttccattctgaatgggtagagaagcggctatggggcaagaggccaattaaaggagatcacttctgtaagttcaagcttgggacctaacttcacgtgctcccagagacaatggtctctgtgaggtttggatctccagtgtttctcagttcctggcacactctggackcacacagtaggtggttgatgatgggtggtgaatgaaagacctttgtagaaaaacatttgctactcctgtttttccttaattttccctgagcaatgtgctgctcccttgcctgagccatggtgccctgtaaatgagcttgaataaatagagaaccggcagcttggacatccttagcttaagctaatgggaactctacaacatgcaaaacaatgacaaaattagc

SEQ ID NO: 742224 - DNA, 691 bp, Homo sapiens
cagcagccgctccagacaggcctccactaccatcagtagtatgtgccttgtaagacttttatgaggatctaattcaattatgcttgtaagatagatgactagaatgaaggaagggagtgtggcaaggagctggctatttgttgggtgatattgttgaccttatgcacagcaaaaactagtcatctacctcattctatttgcaaagtctcacagcttttaatctcatgcaccacccagaatgtaaacaaaatatgggtagaagcacctttatttatcacaattttctggctcactattctatttcatttaygtcctgagtatgttcacatatactacagaacaagtctcaaataagtgtgaacagaatactgcccaaattgatgaccatcttaattgttttcttctggcttgtccactaattgccagaagaaatgaaagtaagagagagaggccaggaagaagggcagggaacaaaagaaggcgtgagagagagaagggataaggaagagacctaaaggcagttccttgggctggctcagggagatgcctggaacagaccatgcagagactcttcaattttatagctgaaaaagccagtagtcacattttagtacctttgtctccaagcaggactacaattaaccctaactcctctagaccaatgggggatctgtcccagaccttaaggatc

SEQ ID NO: 742225 - DNA, 606 bp, Homo sapiens
taaccacaaatgtatgttacattatttgagtattttccatttatgagtcatttaatgcagaaactttatctttggaccctttctttctggagattctattctttttgagatggggcggtacctgtaagtggagacctgctgacctgcatgtcaggaggcctgtgtgcctgacagtcacccactgtttcctgacctcactctttctttcttgttttytcttttcttttcttttttttgagatagagtctctctctgtcgcccaggctggagtgcagtggcgtgatctcaactcactgcaatctccacctcccaggttcactccattctcctgcctcagcctccggagtagctgggactacaggcgcccaccacaatgcctcgctaattttttgtatttttggtagagacggggtttcaccattttagccaggatggtctcgatctcctgaccttgtgatctgccctcctcggcctcccaaagtgctgggattacaggcgtgagccactgtgcccggcctctttttttttttttttgagacagaattttgcccgttgcccaggctggagtacagtggcacaatctcagctcattgcaacctcctcccg

SEQ ID NO: 742226 - DNA, 551 bp, Homo sapiens
ttagaagttcttgtcagtgaggtgggaaaggccagctagtgttttgatatgccaacagccacgtagatccctcacactgggacaggccggtaggagaagaacaaattaaattcattctcttttccagcctgcactgagattcaacccagatgcctcggtctgttgaccacagtctgtgtgccccagtgccttggtggggagaaggcacgttgctggaatcrcttgagggatggaaatggccaggggttttggaataaaggatatttgcagtagaatgaaaatgattgttgacttgctttgctagtttttctcaatacttaaataagaatatgggtgtttttaactgattttaaaagtttggaggaagaggagcctcactaggcacgctgtttacagcgttaatttcctgggtaccattgttcttcctcagaaaacccagatgatacaaacaaaatgaccattttttttttcactgttgctgagaaagaatttgatttgtaacaagaagtatactccacttataggtgacatttttatttttgtttttccca

SEQ ID NO: 742227 - DNA, 637 bp, Homo sapiens
catctctactaaaaatacaaaaattagctgtgtgtgatggcccacgcctgtaatcccagctacttgagaggctgaggcagaagaatcacttgaacccgggaggtggatgttttagtgagccactgagattgcaccactgcactccagcctaggcgacagggggaaactctgtctcaaaaaaaaaaaaaaaaaaaagtgtgaaacaaagtactaggcaaagaactcattaagccaaattagctagcttgccaattagttaaagcatccctaatgtctagattcggtttcctttatttgggtgtgtcagagccatttttcatgaacaactaaatttactattgttaaaagaaaaactttggacaaattaaatttaacagagttttttgggggggaacgggggtggagtcttgctcagcctctggrtagctgggactacaagcatgcgccaccacgcccggctagtttttgtatttttagtggagactgggtttcaccatgttggccaggctggtctcaaactcctgacctcaggtgatccacccacttgggcctcccacagtgctaggattacaggcatgagcgactgagcccagtctaacagagttttattgagcaaagaacaatcttgaatcaggca

SEQ ID NO: 742228 - DNA, 612 bp, Homo sapiens
aactaaatttactattgttaaaagaaaaactttggacaaattaaatttaacagagttttttgggggggaacgggggtggagtcttgctcagcctctgggtagctgggactacaagcatgcgccaccacgcccggctagtttttgtatttttagtggagactgggtttcaccatgttggccaggctggtctcaaactcctgacctcaggtgatccacccacttgggcctcccacagtgctaggattacaggcatgagcgactgagcccagtctaacagagttttattgagcaaagaacaatcttgaatcaggcagcacccctccccacttgatcaacactgccctaacaagaataggtttagaggaactcctggggctaccacatkgtcagataacatttatgggcagaaaaaggaaagtgccatacagaaaagagaagtgaggtacagaaacagggggattggttacagctttgcttttgcctttttgaacaggatttaaacagttggctgcctgtgattgactaaaactgatctgctgtggtttacaagtctgcttggacatccagttaggttaagattcactatatatggagaaacttttaggctgaact

SEQ ID NO: 742229 - DNA, 622 bp, Homo sapiens
taaatcataacttctatggtcatatttgaatcagaattcttattcctgttggcaatttttcgtgtcccaaagtttaaaagagaaaatcaaaggcatacgtatttttttaaaacagcactcatgctctcctcctacttacttttctttcctctgtccttaaggagagggttaagactgtgaatttcctttgggtcatctccttgatgaagcctctgatatgaactctgccttcaggccactttcccrggatggaattcaccctccatttctctcctcctcaattacttttcatacagaatcaaaaattccttatgttagctttccttctctagaatgaccacatagtgccctgggattttttccattccatgaaagagaaacttagttaaaaacaacaatatcaaaacattttatatcagtgatggtgattcctgaagtaattggcaattgcttataaaaaaaatcagttaagtattcagcttaatttagtgatctcccccaaaattggaaactgaaagggagcaatttaacttctagcaactttcaactgtgagcagctgtaatacaattattttggaataaccatcaagagaatacacctagacaaaagcatatataattg

SEQ ID NO: 742230 - DNA, 654 bp, Homo sapiens
tgtgcaaagcgggaaatatttactttatagctgcatttattttctataattacaaaacatgtgagtcgagagaacgacaaatgcattcagaggaattacaagagtgggtcataatttttttcagtaaaaagtatataggatgtcagtaaataggaaatattccattttagtatcaattatgggtagaagaaatcttttactaaagctcacctctaaacatctggtgctgttgggtgctgctttattctttcttcctcttttcttggcttactacaaagcccacaatcttttatccaaaacccttggaattagatgtgcttgggaattcattattcattagattttagaaagggtcatacacaatgtatcatgtaacatccccagtgggggctggggcagcaatctgtattaaacacaataattttgcagcaagtcacatgacacatgattatttctactaagagattactagattataaacagcctcacatcagtytgttgggttagactgtgctgccaaattatcaaataattttgtattttcagagtgttaggacttcagaattacagataggggatcgtagatctatagtattcctatttgaatggctaaatggatttttcctaaggtcctagcatgtattatgaccagga

SEQ ID NO: 742231 - DNA, 617 bp, Homo sapiens
tttatttgatccttacaaccaccctatgatgtagtgtagcagagatgctagctcttccattctccccgtgatgtaggctaaaaaccatccagaacccccttccatgaaggatatgttgctggtagtgctgttggccagaaggcctctgtctgtcaggctcttcagggatcacctcaacttccaacggctccctcacccacagtcacccttcttcccataatggcctgtacctaatgactgatcaatgtargaacataaaggcctgaccatcctgtgggagcctgcatagtatcctgacttctctctctgccctcccttccatcactactgatccaataaacattttgcaagctgaacttcgtctcagagctgcttcctaggaaactcaacctatgataatcactcctcttcttttacagaaataaatgccaagaataaagacatttcctagcttcccttggagtctgctgggtgtggccattcaaccatggctctggcccctgggatgaaaatggaagtcatgtgtgcaacttccaggaagtgttcttagcagtgcccctctttctcctcctgctggctggaatgcagacatgaaggctggagtgggagcagccact

SEQ ID NO: 742232 - DNA, 617 bp, Homo sapiens
tttatttgatccttacaaccaccctatgatgtagtgtagcagagatgctagctcttccattctccccgtgatgtaggctaaaaaccatccagaacccccttccatgaaggatatgttgctggtagtgctgttggccagaaggcctctgtctgtcaggctcttcagggatcacctcaacttccaacggctccctcacccacagtcacccttcttcccataatggcctgtacctaatgactgatcaatgtaggaacataaaggcctgaccatcctgtgggagcctgcatagtatcctgacttctctctctgccctcccttccatcactacygatccaataaacattttgcaagctgaacttcgtctcagagctgcttcctaggaaactcaacctatgataatcactcctcttcttttacagaaataaatgccaagaataaagacatttcctagcttcccttggagtctgctgggtgtggccattcaaccatggctctggcccctgggatgaaaatggaagtcatgtgtgcaacttccaggaagtgttcttagcagtgcccctctttctcctcctgctggctggaatgcagacatgaaggctggagtgggagcagccact

SEQ ID NO: 742233 - DNA, 563 bp, Homo sapiens
gagctcagagtggggagcaggccccagatgaggcagcacctggggccactgtgagataaaactggatcttcctcttgaaggtttcaggaagtcagtgggggttccgtgccgggagtcacaggttgtcattgtgcgaagctcctggggtttcccctygagtggaggacgggtgtgttgagggccagcgagcaggagcctgtcatcagtaagagttgatggatgtttgagtggagaggggcagtgaggggtggacaaggggactggagcgggaggcattgtggcactgagccggccaggcctgctgactagctcttcctgtgtacttatgtctgtctgtggctggtttccctccagcacagacctttcctgtctcaggaaatagcactgttgtgcccccagggctgagcttctgcctggcacatggttagcacttagtgaacgtttctgaacgaatgggaaaatgctctccctttggaggagtggccagagtgagttggccacgtctctgtcctgagggaaagacggcggcaaggctgactcctgaggtcccatcgatcccgcct

SEQ ID NO: 742234 - DNA, 594 bp, Homo sapiens
agcagcgtagactcaggtctgaggatgagatccccagtggtttctgataccacacagtccatctctaacattctcctgtcatggttgtaattcctcattaatagatttctttttcctgcatacccgctacattcctggttctgtgctgggactcacttgccgttgtatttcctctgcagagacctggttcgagttcacccctcaccacgctggcttcyctgcactgggggcctttgtttccataacccacttcggaagcaaattcaagaagggaagactggtcagaactcaccctgagagagacctgactttcctgagaggtcagcgctggggtcagaggggattaaaagggggtgggaagtggaggagaggcaagaattttccttctgagggtctagtttgcccagctcttaaatttcttgggggaaagaaaaggacttggtaggcttccagaaagaggaatggtgtattccttctgctgagtcttcagtgtctctcaaaggtctccttaatgcggcagatacctgatatcctatcaaacaatccaggagagggagcttaatagaggggctcaagtccagggctgtggcttcc

SEQ ID NO: 742235 - DNA, 649 bp, Homo sapiens
catcgtccgatggaaagatctggcaagccacgtatgtaaccttaaactttcttgcagccacgttaataaaaagggggaaaaaaccaggttgaacttggtttgaagagtctattttgctcaatacatctaaaacagtatgattccaacattctgttttcatgctaggtcttcaaaatccaatgaactcactgcacatctcaagttggacaccagattttcatcggcaacatgatctgtgtaggtttcataaaatgtacagctattcacataccaaagctgttccaaaatgatgtggaaaaagtgcaaagtctttacgcactgaatcacatattagctttcaaatgtaaattcaactgaaaggatctaacatgaaagattcagctcccctgtcacactcaccacgctaaagcgctcaataggctagaccggacggcaagggctcacactgccccgcattacgaatgggtctctcgccctgttcttmccccacagcaaacattccaagtcccccttaggacaaagacgctgttccccaagctggttttccaggaccttctcacctcattgctcaccatccccaatcctgcactctacacgccagcacaccaggccctcagcagcccccaggccttctcaatttctatgttcc

SEQ ID NO: 742236 - DNA, 590 bp, Homo sapiens
gcagcttgggaccctgatgaggggcaggcacctgcagggggcattaatcaccccagcgtggggcaggcatgagcaacctctatctgtgggcccccagggccatccaggaagtttggaaacgggtctgaggctcaccaggtttggctcagagcccagggttcgggctggtcagtgtaggagggatgaccacccactggtgggttctcatccgcctggggagaggatgtgctgggagcactggagctggcttagggccatgggcaccaacatttagggaagkcgggggtttcaggctttcatgagaggacagagggactgagaaaggttgacttggatcaggaaagagttacgggcttatgggagccagaggagatgagactcaagattttctcactcattcactcaagatgtgtttcgggagcactgacgtcataccagacccagcacacacggggtcggttaagaatactctgagctgcaggtaacagaaaacccaactacattggcttggacaaagaaggatctgtttttctcacaaaagaagttgcagatgctggctttcctgcccaacaatccatggcagctggggc

SEQ ID NO: 742237 - DNA, 590 bp, Homo sapiens
gcagcttgggaccctgatgaggggcaggcacctgcagggggcattaatcaccccagcgtggggcaggcatgagcaacctctatctgtgggcccccagggccatccaggaagtttggaaacgggtctgaggctcaccaggtttggctcagagcccagggttcgggctggtcagtgtaggagggatgaccacccactggtgggttctcatccgcctggggagaggatgtgctgggagcactggagctggcttagggccatgggcaccaacatttagggaagtcrggggtttcaggctttcatgagaggacagagggactgagaaaggttgacttggatcaggaaagagttacgggcttatgggagccagaggagatgagactcaagattttctcactcattcactcaagatgtgtttcgggagcactgacgtcataccagacccagcacacacggggtcggttaagaatactctgagctgcaggtaacagaaaacccaactacattggcttggacaaagaaggatctgtttttctcacaaaagaagttgcagatgctggctttcctgcccaacaatccatggcagctggggc

SEQ ID NO: 742238 - DNA, 530 bp, Homo sapiens
gagctctctgaggcttcttttataagggattaatccaaatcaagagggctccaccctcatggtctcaacacctcccaaaggccccatctcttaataccatcaccttggggttgccatttcttttttgttgttgttgttgttgagacaggttgtcgctctgtcaccaggctggagtgcagtggtacaatcaccagcctaccatcccacaacattagttagccatttgcaggttggagatagattctccttccagacttgtctataaccagcatatggtgaatgctgrtgtcaaaaaacaacattaaagcccgccatgtggcaagaagttggctctctgcaacccagaagagggttccccagaatccaaccctactggtactctgatcttgggcttccagcctccagaactgagaaattaatctctgttgttgctaagccagccagcctatgtatggcactttgttctggcagccttcacaactaaaacagggagggaggcatgaagtggatgaagggctgtgctcaggacc

SEQ ID NO: 742239 - DNA, 624 bp, Homo sapiens
tatcgacatcttggagcagaagttatgagaggcctctgaatcatcctgagaattttcttcagtaagcattcataaaaattctgggatcaagggtgggttaagcttttgtgatggtttcataggtggtctactcacagcgctaagcttcttctggatctttggatcccaacacaaagtgatactagaccctcaaattgctacagggtagtctggaaagaactgtatagcccagaaataacttggaaacccaaagtgtaacaaatgttggtgaaagaatcaaactgattttttttaaacataacttctttgggggtgaatttttttaaagaccatcatgtagattcctttgtcttgataatgatgtttgtcacaatgctgttggcccagttgctctttgattggtatttgggagttaaatataaaagtaaatacaaaataattcttagatggaaaaatcacattaaaagcatwctgggaaataagagttaatatcacatggccaggagttaaagtatgtttttatgttttctttaaaattgtaaatgcacatttttaccactaagacatactaattgttacttcaataagccccaacagaaaagagggcgctgtttcatattttat

SEQ ID NO: 742240 - DNA, 565 bp, Homo sapiens
aatttttcatgccaccttattttatttttaatatttaacttttttaaaaaagtagtatttaaggtacatgcagaaaaattgacttgttgtgatctattttataaattttagtatgttctccaactctgtatggtttaatgttctggaatgtctcataaatgcaactatgcagcatgtagcccatacgactggctacttgcagcatrataattttaagattcattcaagttgttgtatgtagcaataattcattactttttcactgttgagtagcattccattgtgtgcctatgccacattttgtagaatcaattcatttaaggacaatagattcattgaaggacgtttgggtagttttcattcttagacaattatgaatagaagtgctctcaacacgtatacacattgtgtagtgaaaataaatgtttatctgtttatctgcctaaaacctagaaatagaatgctgggttatgtggtaagcgtatactgaagtttacaagaacctgtccaactgttttccacagtggctttaccatattgcattgctgttggtaatacacaagag

SEQ ID NO: 742241 - DNA, 565 bp, Homo sapiens
aatttttcatgccaccttattttatttttaatatttaacttttttaaaaaagtagtatttaaggtacatgcagaaaaattgacttgttgtgatctattttataaattttagtatgttctccaactctgtatggtttaatgttctggaatgtctcataaatgcaactatgcagcatgtagcccatacgactggctacttgcagcatgataattttaagattcattcaagttgttgtatgtagcaataattcattactttttcactgttgagtagcattccattgtgtgyctatgccacattttgtagaatcaattcatttaaggacaatagattcattgaaggacgtttgggtagttttcattcttagacaattatgaatagaagtgctctcaacacgtatacacattgtgtagtgaaaataaatgtttatctgtttatctgcctaaaacctagaaatagaatgctgggttatgtggtaagcgtatactgaagtttacaagaacctgtccaactgttttccacagtggctttaccatattgcattgctgttggtaatacacaagag

SEQ ID NO: 742242 - DNA, 565 bp, Homo sapiens
tggtaacagtttttagatgaaataagaatcttcaggcctttgattcgtactctttcctctgtcagtcagtgttctcccttatccatcttggatgccatggtcaagttcttaaattactatcttgtaaaaatattaagcaacattatttttctatctaaaaatgggtaagtaaataaataacaagaaataaatgaaggtaagatgggtggcagacagaagaattcattcctgaggggaaacagcatgtgcaaatgagctggggcaggagagaacgcagatgatttgaagtgctaaaagtgcagagtagttgaagaagaaagagctagagaaagaaaggtttgagaggaatataatgcagtggccactcatgcagggcctctcaggcagcatcaaagattcagacgttgaggwatgatattactaagatggcagattaagggttaccagccctaatcctcctccaaaaagaaaaaaaatatagagataaatggctattcacaaaccaaaatagcccaaagaggactcaatggctcaataaagaatctatagtaacacagtgaagcaa

SEQ ID NO: 742243 - DNA, 557 bp, Homo sapiens
aaaaagtcaataatttgaaacataaaaatatatgaaaaatataaaactcaatggtaacacagtcaaatttagaatactctaataatgtaatagtggtgtgaaaaatcatgtatatcgataatatgaaggttaaaaaacaaaatgattaaaaataatagttataataatttgtaaagaatatgcaatataaaataatgtgaattrtggcatcaaaaatataaaatgttggcaaggggagtaaaagtgtaaagttttctatgcaatcatagttgctatcaccttaagccagcctgttataactgtaagattatttatgaaagcttcatgtttacaaaaaccataagtgtagtagataaacaaaatagaaaaagtcaggaattatagcataccactagattaaattacctaataataatggaagacatcttgagagaaagaaaggatataaaaaatgaccagaaaacaactaccataatggcaatcataagctcttacctattaacaattaccttgaatgtaaatgggttaaattcaccaatcaaacgaatgaagtagct

SEQ ID NO: 742244 - DNA, 616 bp, Homo sapiens
ataatttgaaacataaaaatatatgaaaaatataaaactcaatggtaacacagtcaaatttagaatactctaataatgtaatagtggtgtgaaaaatcatgtatatcgataatatgaaggttaaaaaacaaaatgattaaaaataatagttataataatttgtaaagaatatgcaatataaaataatgtgaattgtggcatcaaaaatataaaatgttggcaaggggagtaaaagtgtaaagttttctatgcaatcatagttgctatcaccttaagccagcctgttataactgtaagattatttatgaaagcttcatgtttacmaaaaccataagtgtagtagataaacaaaatagaaaaagtcaggaattatagcataccactagattaaattacctaataataatggaagacatcttgagagaaagaaaggatataaaaaatgaccagaaaacaactaccataatggcaatcataagctcttacctattaacaattaccttgaatgtaaatgggttaaattcaccaatcaaacgaatgaagtagctcaatgactataaaaggaaatgagacccaactatatatactttctccaatggactcacttaaaggacac

SEQ ID NO: 742245 - DNA, 621 bp, Homo sapiens
acagagaaccactattctagggcggtgcagacaggaaatatggagttggagcccccaaacagagcattcaccagggcactgcctagtgtagctatgggaagggggcagctgccctcccgacttcaaaatggtagagctatgggtagtttgcaccttgatcctggaaaagccacaggaattcaactcttaaccatgagagcatccaaagggtctggaccctgcagagccacaggtactgagctgcccaaggccttgggagaccattccttgcatcagtgtggcctgtatatgagacatggagccaaaggagattattttagaactttaagatttaatgtctgcttcactgagtttcagacttctgtggggtctgttacctstttcttttgaccaaattctcccttttagaatgagaatgtccactcaatgctgctaccaccattgtatcttgggagtaaataacttgtatttggtctcacaggcagaagaaactcatctccagataatatttggactaagaacttagaattttgagttaatgctggaatgagctaagactttggggcactattgtgaaggcataattccatcttgaaatgtgagaagaacatgagatctgga

SEQ ID NO: 742246 - DNA, 649 bp, Homo sapiens
tcagagaggctagcatataaagggttttaagcaagagagagacaaagtacaagttacatcttcaaaagagcattctgactgctctatggagaatgaatttttgtgggatgagagtgaaagcaaaacgaacacataagaggtagttttagcagaatgacaagaagtgatggtttgaacctggcagttgtattagaaaaggaaagaaagaaatagaataaagaaagtttctggtaatatcatccacagggctattgtttgattgaatacacaaaggcagagcaataaagaggaaaataaaccaagattggttgctaggtgtttaccttgaacckctgggaacatgctgatgccaagtattgagctgagcaatctttaaaactagattatagtagaaataaacagatctgttttgcacagaagtttgagaggtttattaaatattcaagtcaatctagggttctaatgagttgtccagtgagtagcaaggactagagttataaatttcagtcaatggactacatacagtttatacaatttatgacaggatgaaaatgtccatcccaaaggatattgatgcactaatctctggaacctaagaatgttatcatatacagcaaaaatttaaaaaggtgtcattgcatttttcttt

SEQ ID NO: 742247 - DNA, 641 bp, Homo sapiens
ttattgattgctcatttactgtgtgtcagtgtactctaccatgaccaggtcagagtgatgcacaagataaagcccctgccctcattcttctacctgctcatggagtctggcccctcgtcatttgccttgcatctaacttatagtcattcagctgatcagtcaatatctctatatttttatttcaaaatcccactaggagacatataatttactaaaacacatgcacacaaacacacgagttagtatataaattaatgactcttggatcaggtgcaatgccatatcagataagtcatagacagyaaaatctgcatggatactgaaggactttcctcatagtagaagttgtaggtaaaacaggtctcatggaagaggttaaatgtgaataggtggcataaacataaatagtgtatctacattataatatattctacttttaaaacttccccaaagactaagggtatgacctaagtgttggggctcagaaacagatacctgaaaataaatttgtatgccatttctcccatcaacgtgccttttgtcagtcagttgactttcagtgacttttagagggcaaaggtaaaattttcccatggcacataaagttttggcactctgagcagtataccaaagctgctcta

SEQ ID NO: 742248 - DNA, 618 bp, Homo sapiens
cttcttccaattaaattcattcgttccttcaacaaatatttttgcgctcctactatgcaccaggtactgtgctaggctctggggatgggatagggtgtggaggtggatgaaatgatcctatggagcttacgttctggctgggtggagacaggcaataaacaactaaaccaacgcacagataatcagatgctgattaacgytatgaaggaaagcaaatagggccatggggcagagagaggctggagggtgctttagggatggtggcccgggaagccttttggaggaggtgatactggagttgagacttggacattatcggaataggccttacaaagttggcatggggtggtgggggaggtggttccaagcagaaggaacagcgagagtacagacccaaggcaagagcttggattccgaggaatgtgaaggcaggaacagagggagcttagggagctggcagcagaatggcaggagggatgggaaagggtcagaccacacagggccctgtgaaccctggtgaggatctgagttctctgtatccccgcagggtttacggtaagggtcctgtgagaaatgcacagcaagtgctgaacccagtgcctggtgccaacacacgct

SEQ ID NO: 742249 - DNA, 648 bp, Homo sapiens
ttttcccaaatcacaaaaacttgaaccatttcatgcttctatcagcaaagcaagagtgtgcacactgcctcttcagaggggcttggcccggctcagtggctcacgctgtaatcccagcactttgggaagctgaggcagggggatcactggaggtcaggagttcaagaccagcctggccaacatggtgaaaccccgtctctactaaaaatacaaaaattaaccaggcatggcgatgtatgcctgtaatcccagcattcaggaggctgaggcaggagaatcacttgaaaccaggaggcagaggttgcagtgagctgagaytgtgccatgccctccagcctgggacagagtaagactcctcccaaaaaaaaaaaaaaaaaaaaaaaaaagagaggcttgacaaataagaggatggtcatgtgaacttggctgggacagtagagggtcgggtcaccaggctgggagcacagggcccgtaggatgggggctgtgagtttgaagaagaggacagacatagtagcagcgtgcagccatttgaagagtagaagagggacacaaggcagaactctaaccaaaggcgaaagttacagggagatagattgtggctcagtataaggaagaaatgtctaacagggcagtcccagagcagaa

SEQ ID NO: 742250 - DNA, 616 bp, Homo sapiens
tctgccatgaattcacttccaagtactgagaggaaccattattttacaaatactctgcttctgctggataaatggccaacctgggcttttcttgcttttggaaaaaaaaaaaaaaaaagtttaccaactccctttattgaagctctggttcatgctgccttttaaaaaaaaatgcttgttgcctgtaatcccaggactttgggaggccaaggtggatcayttaagcgtaggcattcaagaccagcccagtcaatatggtgagaccctatctctacaaaaaattaaattagccgggtgtggcggtatatatctgtagtcccagctacttgggtggctgaggccagaggatcacttgagcccaggaggttgaggctgcagtgagctatgatggtgccactgtactccagcctgggcaccaaagtgagaccctgtctgaaaaaattaaaagtgcttgcttaggcacatgggtcaaatgaagctggaatgtttaggaatggtgatatgggctgaatgtgtctaccaaaattcacattttggaaacttcatccccaaggcaaccttattgggaggtgaagccttggggaggtgactgagtcaggattgtgctgccctcatg

SEQ ID NO: 742251 - DNA, 616 bp, Homo sapiens
tctgccatgaattcacttccaagtactgagaggaaccattattttacaaatactctgcttctgctggataaatggccaacctgggcttttcttgcttttggaaaaaaaaaaaaaaaaagtttaccaactccctttattgaagctctggttcatgctgccttttaaaaaaaaatgcttgttgcctgtaatcccaggactttgggaggccaaggtggatcatttaagcgtaggcattcaagaccagcccagtcaayatggtgagaccctatctctacaaaaaattaaattagccgggtgtggcggtatatatctgtagtcccagctacttgggtggctgaggccagaggatcacttgagcccaggaggttgaggctgcagtgagctatgatggtgccactgtactccagcctgggcaccaaagtgagaccctgtctgaaaaaattaaaagtgcttgcttaggcacatgggtcaaatgaagctggaatgtttaggaatggtgatatgggctgaatgtgtctaccaaaattcacattttggaaacttcatccccaaggcaaccttattgggaggtgaagccttggggaggtgactgagtcaggattgtgctgccctcatg

SEQ ID NO: 742252 - DNA, 622 bp, Homo sapiens
ggagtgcagtggcacgatcttggctcattgcaacccccacctcctgggttcatgcgattctcctgcctcagcctccctagtagggactacaggcatgcaccactacacccagataatgtctgtatttttagtagagatggggttctgctatgttggctaggctggtctcgaactcctggcctcaagcgatccatccgtcttggcttcccaaaatgctgagattacaggtgtgagccactgcgcccagcctgcccctgactgccttcagaaaagtagaagcaggaggtctgccacattctcatcccatccttgacacctgggtgatgtgctagagcttgaggggaaggtcagaggtaacccagttcaggaagtgaccccgtaggaggagaagaatccagccaygtgacacacagtacgaagagaacagtaaatgcaaagacctggaaacgaggaacagcaaggacagcatgtcccagaacctggggagagaggagggagcagccggagctgagggcagctcaggggaagagttgctatttgattttcagtgcatgggaagccactgaaaagttttatgcagagaagtaaaaccatctcactcatgtttctagaagccttatgg

SEQ ID NO: 742253 - DNA, 587 bp, Homo sapiens
gctttttcacaggcccacagctggccggtacagtggcagagaaggcgaggctgaggtggggctggggaagccagcaggggcctgatcatggagcgccttgagctgcatcccacaggtactgagaaagcatggagagctgtcccccagcccccagcatcttattagaaaatattgaaacataacagaaaacatgaagggttttatgttcatattttcattttagagagatcattctgcttgaaatataacacctactgagtactgctgaggacttascatgtgccgggttctgttcttagcatgtgacatgtattggcctatttgattctcctacataatcctggaagattggttgtgggagtgggtgatcatgacctgaacagcctaaccatgtttagggaacactctgtgttatgcgttccaccacacaattcatgtcacagctgaatgtcccagtttcccttgcagctaggacacaacgggagacccaagctttccaaacatatgccccaggcaacactttgatacacaaggaataacactggatgctgggtgtgcacagaattcaaattcaggaatggagggaa

SEQ ID NO: 742254 - DNA, 587 bp, Homo sapiens
gctttttcacaggcccacagctggccggtacagtggcagagaaggcgaggctgaggtggggctggggaagccagcaggggcctgatcatggagcgccttgagctgcatcccacaggtactgagaaagcatggagagctgtcccccagcccccagcatcttattagaaaatattgaaacataacagaaaacatgaagggttttatgttcatattttcattttagagagatcattctgcttgaaatataacacctactgagtactgctgaggacttaccatgtgccgggttctgttcttagcatgtgacatgtattggcctatttgattctcctacataatcctggaagattggttgtgggagtgggtgatcatgacctgaacagcctaaccatgtttagggaacactctgtgttatgcgttccaccacacaatycatgtcacagctgaatgtcccagtttcccttgcagctaggacacaacgggagacccaagctttccaaacatatgccccaggcaacactttgatacacaaggaataacactggatgctgggtgtgcacagaattcaaattcaggaatggagggaa

SEQ ID NO: 742255 - DNA, 558 bp, Homo sapiens
gtaggctgagaatctaagcaaacttcagttggtggttttcagttggtgggcagtggcagaaggaggaggagttccgtctgtgctctctcttcccccagtcacagccctcaggcttgttgtatccaggctcttcttagttaaaccagacaggttgacaggtttatttaacatttagcagacaagtcagctcagggtaggcgggtgaggtggggtgtgggctgctagtacagtgccgccctttgacccagggctgcccgtgcccatggggctattccacatattatatatkatatatatacataatatttttatatttatgtatataagcctgttggtttgttaaaaccatggattctaagttgctctgtcaacgtgatcattagaaaaatgtgatgtacttagtgtgtaaattttagaacatttcttctgttagtcttgttaatactcaattcttttctaaaacacctagcgcaaatctctataggttttaatcgaattatattataatttggattttctggtctgcctatcttccaaataataaagttcttaaaattg

SEQ ID NO: 742256 - DNA, 612 bp, Homo sapiens
tgcttaatttcagagcctagaacacattagactctaaataaatgtgaatgagtgataaatattatatttacagattgctgccacattacaattctgtcctctcactggtggtggaatcatatgtactttttaccatctccactttgcattcatactgaacatggctatgttattcctttcacctgggtaatttgaaaccatctctccatttctatttgtagagatcttatctaacaagcccttctcaaatgccacttcaaaaaactttttctaatccccaaytgtcttagtcaatttatgctcttacaacaaaataacacagactaggcaatttatgaaaaccagacgtttatctgtcatagttctggagactaggaagtccaagatcaaggcgttggcaggtctgatgtctgataagggctgttctctccgttcaagatggtgtcttgatgctgcatcttccagagacaaggaacactgtgtcctcacatggtggaaggcaggagagcaagagggatgaactccctccatggagccctttcatgagggctcctaaacccattcctgaggtaggagtcctgatggcctcatcacttcctgtaggctccatct

SEQ ID NO: 742257 - DNA, 608 bp, Homo sapiens
ctgcgatgaaatgccaagacacagaaaagccatgtgtcaagaaggtgggagttattctttagacacatcctggtatatgtttatcattaaagatcagtggcttttgtgagtctaaaaaattaagccttaaatgttttcatcaaattccagttaactacctgatttatctagcttatattaacaatgttatttagaatttcaccttgatatgaagatgtctgtgtaacttttacaatgatgtaaaacaaagagtaggattagggagggcacaggccactggtgcaatggataacacatctgactayggatgagggaatttagcctggaataaggaacttttatttccagcttagtgatgcacacaaattttcaaaataaaataaaaatcatgttttatgtgattcatgtttctcctaatgcaaaggaggacaggtactattaataaaaatatttttaaaatgtaagggctaaggccccagaagttctgctatgattttttatgtttcatagagtgattatcatcacagaacctcaagcattacgtaaatacaaatgcgtataccccaacctggtaattctgcttctggaaatttttcttcaggtccacc

SEQ ID NO: 742258 - DNA, 600 bp, Homo sapiens
atcttagctactcaggcagttgaattacttgaacataggaggcagatgttgcagtgagatgagttctctcccttgcgctccagcgtgggtgagagagagagactccccctcaaaaaaaaaatgtgtgtatatatatatatatatatatatatatatatatatatatatatagagagagagagagagagagagagagagagagagagagagagagagacagagacagagacagagacagatagagagaaaatttatgaaagtatgcccaacaaaattaaaatgttgactgtaaagtgagctactgagtgactggggtgcatgagagaaaaggttacttaacatttttatacctattgaattgtatcctatgtatgcattataaatttaaatgtgcaataatgcatataactgaaatgtgggtatgctttgattargactttgcatttcccatttgctcaaattccttatgattctatatgcatatgaatagaaatacaaaatgtagggagacacgggacttctgatagccctttcttctttacacattttgtgtctctggctgtagtctgccatatgagtccatatggctaatgagcaaaa

SEQ ID NO: 742259 - DNA, 356 bp, Homo sapiens
aggaatgaaacaaagttagagtaaaattataaaatcaaagctaaggacaatttccagaaagggtaatatcatttaatatcatagaagtttaggagcacaagatggaaaaatggcctgtgggtaactgacattgaggcgatctttagggaarctccatttccgatagagaagtagacagaaagtcagcttgaagcagggactaggtgaagaagctgttggctggtcgcatggggaaataaataagggatcgcatatgccatatttctgggtttctttctttcttgcccagcctctatatatgcctagagtttggcgaaaacttacaaaaaataaaaatgaaaccaatttcgtttgta

SEQ ID NO: 742260 - DNA, 512 bp, Homo sapiens
tactaaccattgccgtttataaaataaaaaccttaaaaatggtttaacatgcaaaaggttaaattttaaaaagaggtcaggttttaaagaaggtaaaatacctcaaatttaaacataataaaaatgaggaaaatacwcaaaacatttcaagcaaattgttcttcagaagaggagaggttggaattaatcaaaagaccttttttacacacaccaccccaagagtttcccaaacaataaattcatttacaaaacaaaaagaggaatcaacacaaaacctcatccacatacagagaaaaataaattgtggtgattctgtaacagctgaaaaactagtgagggaggagaaaaatgaataaactctaaatccattaggtgatatttataaatagcaaaattggaggatggaatggagaaaggagttgcacttatcattaaagaagtaacacatgtgaaaacataaggtgtaactcatccccaaagaaaagtaaactctccataaagtagcaagtata

SEQ ID NO: 742261 - DNA, 605 bp, Homo sapiens
tcaagaaaaagaaaaagatttaaaggacaggctgactttcttgttacaagccaatgctcatttgctattccataaatcctagggcacctcttaagaattatgctaaatctacactacccgtgctctataaatggaacaacaacacttggatgacatcagagctgtttaccgcatgggttactgagtattttaatcccactgttgagacctacagctcagaaaaaagattcacttcaaatacttcagctttttgacaatgtacctggtaactaaagagctctaatggagatgtacagggaaacacatgctggtttcatgcctgccaacacaacatctattctgtagtccatggattgcggcatcattttgactttcaagacttattatttgagaaatatatttgtccmgggaacaaatctcctcacaacatacctaagaaagagatatatgtacagaaaaggaagaacagtaaaatatcacttcattactatcagagattttccccaaacacagagaaagctctacggaactgagcttaagtcagaactctgttatttacttggtctaatgccaaagcaggccagagacccctttcaccttcttct

SEQ ID NO: 742262 - DNA, 602 bp, Homo sapiens
acgtaatgctctggaaagaaccctgggtgcaattgaaagaggaacctgagaaggataggctcaatcgggtgaggacaaaccggccatttgggaaaagggaaggtgtcttcgtagggtaataccctcctcaatgcccagcccagacctgccctccaggtgcacctgtgtactcactctccttgcaaagagttggcatagcataagaactcaggagtgctttggactctgggaagtccacaccgctctaaccctccctccagggctatgcaccccggatcctggtacatgctgggagtatatttctgaagcctaccgacaaacaggctgagagcagttaacggactacagctcccagcatattaggtggggcgcgtaccactctgccycttcttccagttctgcgcctcgccctggagcctggcgcatgctgggattgtagtcctgtagccctttgaccaaagggttgggagtgtttatgagaatacatcttccagcaatcctagggaggcgcacacagcccggtctcttcctccagtgacacgcattgtccctgagactagtgcatgctaagattgtagtcctgcagctctttgaggaaaggg

SEQ ID NO: 742263 - DNA, 592 bp, Homo sapiens
ctggtggctagtcagtcaggatcccccagtcatcacaggcctgcctgactgcccaaggactgaacaggtcaatatcttggcacaactgtaacttcttcatttacaccaaatgggaaactctgactacatagctcatttccacttcttcttgagccttctgacacttttaaacatagcttcccatacttggcaatacatcatcaaaacctacaagttgtaaaaattataacccagayaaacgaggcttgctaaccttccactgaaaagcaagagggagaaaggtccctctccaaaacttgagggagtacaggaagatagctatgggtagtttaggtgccacaaacccagtcatatgctcccatgaaactctgcctacatgggtcttagtgttttggctgtatacctttaggcctgcaggcatcatgcacgtagggcctcactctcactttttcaaatggaagtagaatttcacatttttgcttcaaatgaaatacttaagaagaaaactatgcatttgatgaacattctgggataacactgacaaccacagaaacaaatgtgacaggtaattcagtaatccagatacttacca

SEQ ID NO: 742264 - DNA, 592 bp, Homo sapiens
ctggtggctagtcagtcaggatcccccagtcatcacaggcctgcctgactgcccaaggactgaacaggtcaatatcttggcacaactgtaacttcttcatttacaccaaatgggaaactctgactacatagctcatttccacttcttcttgagccttctgacacttttaaacatagcttcccatacttggcaatacatcatcaaaacctacaagttgtaaaaattataacccagataaacgaggcttgctaaccttccactgaaaagcaagagggagaaaggtccctctccaaaacttgagggagtacagsaagatagctatgggtagtttaggtgccacaaacccagtcatatgctcccatgaaactctgcctacatgggtcttagtgttttggctgtatacctttaggcctgcaggcatcatgcacgtagggcctcactctcactttttcaaatggaagtagaatttcacatttttgcttcaaatgaaatacttaagaagaaaactatgcatttgatgaacattctgggataacactgacaaccacagaaacaaatgtgacaggtaattcagtaatccagatacttacca

SEQ ID NO: 742265 - DNA, 580 bp, Homo sapiens
  misc_feature 1: n = A,T,C or G
naattccattttgtcactgaagcatcaattcatctggctgacaaaactctcccttggaggactggttctcccagagtacaaaacactggaagccagagttaatggaaagattttatttatagccgaactgagcacaatcagtcttccaagggtagacttcactcatggctggtagattacatcaggtgtgcaggcacaggatgggtctcakttcaaatggtaaaaggacaaagtcacaaaccagaagatagcctgtaattaagggccagagtgacacctgggatgccattacaagcttgcttaatgctgagaaggggccataggcagaagttgtcgattccactaccacacacaggaaaagccaaactactggccagcaaattgcactcagaggaataaatgatcatgtttacatttttatgaaatttcccctcttcctcctaccttgcagatggatttgaagccaattttttccaaagctgttttatgttgtattctttcatgcctgtccagttactgcgaaattggaagtctaccatcctttaactgacgtaaatgtgtatgacaatgtcattaacta

SEQ ID NO: 742266 - DNA, 627 bp, Homo sapiens
ttgcccatcctggctccagcaagctgtttcaggaaatgtgtacagctgcctgccatgggggtggtcatgggtagcgtccactacactaagagccgaaattgaccaaaattaaccacaatttaggtccaagccttttcctggaagtcacaaaccttcaatagactctagagttccaaaataattacatcagacagatgctgctgtgcaaatgttgtctagctggggagagacattccagcagcttcctactccaccagaatgctgtctccttctccacattttgtgcagagaacataactggcctccacacaaagtttatttttttctccccatccccagtagtaacgaaggctaagatgttccatttgggagggaggggcagattgggtgtatactggaagtcacagatggtggttgtggatcatggggagggacctcagggttgaggtggctcaaaytgttatctgaggtgccttggctaaaggatattatagcaggtagagaggtatgtcaccttttatattactttattcctttgattagggaagttttgctcccctttgtgaccaggcaagactgggcataaggtatgtggggcagaggatccttctagtatgagaaagaaga

SEQ ID NO: 742267 - DNA, 644 bp, Homo sapiens
gttatccaaataaaagaagaaaaactgagtccaggcgcggtggctcaagcctgtaatcccagcactttcgggagccgaggtgggcggatcacgaggtcagaagatcaagaccatcctggctaacacggtgaaactccgtcactactaaaaatacaaaaaattggccgggcgtgatggcgggtgcctgtagtcccagctactcgggaggctgaggcgggagaatggcctgaacccgggaggcggagcttgtagcgagccgagatcgcaccactgcactccagcctgggtgacaagccagactctgtctcaaaaaaaaaaaaaaaaaaaaaaaaraagaagaagaagaagaaaaactcacggcctgtaatctcagcactctaggagggcgaggcgggaggatcatgaggtcatgagatggagaccatcctggccaatatggtgaaaccccttctctagtaaagataaaaaaaattagctaggcatggtggcatgcgcctgtagtcccagccactagggagactgaggcaggagaatcacttgaactcgggaggtggaggttgcagtgacctgggatcacgccactgcactccagcctggcggcagagtgaggctccatctcaaaaaaaaaaaaaaaaaaaagaaga

SEQ ID NO: 742268 - DNA, 644 bp, Homo sapiens
gttatccaaataaaagaagaaaaactgagtccaggcgcggtggctcaagcctgtaatcccagcactttcgggagccgaggtgggcggatcacgaggtcagaagatcaagaccatcctggctaacacggtgaaactccgtcactactaaaaatacaaaaaattggccgggcgtgatggcgggtgcctgtagtcccagctactcgggaggctgaggcgggagaatggcctgaacccgggaggcggagcttgtagcgagccgagatcgcaccactgcactccagcctgggtgacaagccagactctgtctcaaaaaaaaaaaaaaaaaaaaaaaaaaagaagaagaagaagaaaaactcacggcctgtaatctcagcactctaggagggcgaggcgggaggatcatgaggtcatgagatggagaccatcctggccaatatggtgaaaccccttctctagtaaagataaaaaaaattagctaggcatggtggcrtgcgcctgtagtcccagccactagggagactgaggcaggagaatcacttgaactcgggaggtggaggttgcagtgacctgggatcacgccactgcactccagcctggcggcagagtgaggctccatctcaaaaaaaaaaaaaaaaaaaagaaga

SEQ ID NO: 742269 - DNA, 517 bp, Homo sapiens
gtacagtctttagggttttccatatataaaatgatgtcaactgcagacagggacaattcggtttcttcctttccaatttggatgccttttatttctttcttttgccaaatttctctggctaagacttccagtactgtgttgaatagaagtgagaatggacatccatatcttgttccagttcagcttttcctcattcagcatgatgttagctatgggtttgtcatatatggccattactgttttgaggtacatttcttttacatctaatttgagagttttaaatcatgaagtgatgtggaattttgtcaaatgattttaatgcatttattgaaatgactttgactttwatcatttcttcttctaatgtgatgtatcacatttattgatttacatatagtgaatcatccttgcatccctgggattaattacttgattgtggttgatgatcttttcgatgtggtgttctatttggcttattagtattttgttgaggatatttgcatgtatgttcatcata

SEQ ID NO: 742270 - DNA, 596 bp, Homo sapiens
gctccaaatataaggggacttagagtctaagcaaaataaatgagtagataaaaggaacttttgaattactttataataaagacaatttaagcagtgtactttatcctaagatttaaattatgtttactttcatgatctaaactttagattgaaaagctctgaaatcaaactgacttggatacaaatccttgctctatgtcttcccagaagtgtgatcttgggcaaaattcatcagcttctctgagcctctggctgtcatgcacagtaaggtgtgaactgatgagataatgtataagaagtttatgatacaatgcctgcaatgatgaagaagctattatcaatttcatgacacaggcaaggtgaaatgagaaaaatgaggtaagamtcaatcgacttgttttatgaaagaatttgaaaatcactctttggagaactggcatagaatagtaaaatgtttatgatgttttagtgcacattgacagtgagagtctgaggaagatacttcctctttagtcccagttttatcatctgtaaagtgggaaaaacaatattttctacacaaggtcattgaaagaaagaaatgattactgcaaagt

SEQ ID NO: 742271 - DNA, 633 bp, Homo sapiens
aatgggaaaatctcttgcatgggaggccgaggcaggtggatcacttgagcccaggagttcaagaccagcctgaccaatatggtgaaaccccatctctactaaaaattccaaaaagtagctgggcatggtggcacacgcctgtaaacccatttactctggtggctgaggcacgagaattgcttgagcctgggaggtggaggttgcagtgaaccaagattgcacactccagcctggctgacagagcgagagtctgtttcaaaaaaaaaaaaagaaagaaaatctctttctgttctctgattttctgttcttaagccttgtcagccttcttccagtctttcaaaagaamcaactttatcccaactcagaacgtttccatatgccgctctccatctgaaatgtgcttcctccctgcactgctctagctacttcctgcccctcattccggtctcagccgctatctcctctgagaggctatccctgatctcacagttgaaattgggatcctcctgttcttttccttcaagatgcgctgttcttatactggttaccattactaagaatataattagtgagaatataattgtttacttaatttctgacttgtccattacagtgtaaatttcatgaaagcag

SEQ ID NO: 742272 - DNA, 633 bp, Homo sapiens
aatgggaaaatctcttgcatgggaggccgaggcaggtggatcacttgagcccaggagttcaagaccagcctgaccaatatggtgaaaccccatctctactaaaaattccaaaaagtagctgggcatggtggcacacgcctgtaaacccatttactctggtggctgaggcacgagaattgcttgagcctgggaggtggaggttgcagtgaaccaagattgcacactccagcctggctgacagagcgagagtctgtttcaaaaaaaaaaaaagaaagaaaatctctttctgttctctgattttctgttcttaagccttgtcagccttcttccagtctttcaaaagaaccaactttatcccaactcagaacgtttccatatgccgctctccatctgaaatgtgcttcctccctgcactgctctagctacttcctgcccctcattccggtytcagccgctatctcctctgagaggctatccctgatctcacagttgaaattgggatcctcctgttcttttccttcaagatgcgctgttcttatactggttaccattactaagaatataattagtgagaatataattgtttacttaatttctgacttgtccattacagtgtaaatttcatgaaagcag

SEQ ID NO: 742273 - DNA, 591 bp, Homo sapiens
cagttgaaattgggatcctcctgttcttttccttcaagatgcgctgttcttatactggttaccattactaagaatataattagtgagaatataattgtttacttaatttctgacttgtccattacagtgtaaatttcatgaaagcagatgtcatgtccatcttgtttatgaacagtgcatggcccatagcagatgttcaagaaacatttgatacaaaataaacgaataaactatttttctgacctcaaatagtctgtcctsttcaacaaataatgtctcttcaaagttagcttttcatgttaaacctaagcctgaacccacaaagatcttgaacccaagacactccagcagttacttagcactaatatatagtttaactccgctgtgcttttgcgttatttgtcctgtgttaccccaccagatggtttgtttctcagcacagggcttacttctgtcacttcctctgtctccctgaggtgttctgtacactgggagtggtgttcagcaaacaccgaagccttgctctcgtatcacctacatgctgtaaagtggcattcagtgtgtacccaaggagaccttgttgtggcactg

SEQ ID NO: 742274 - DNA, 608 bp, Homo sapiens
gatgtgaggatcagacctgcaaggagagatcgtaggttagtctcacaaagtggtgaaccaagcctgcacattcaatacagagggaagtgaatgatctgaagcttgcaaagaggaagctcaggataactcctgccagcacaaatgaaatgaatgccaatgctcagaaggccatttctactattgttgaaaggttgactgagatgttccctaagactcattatctatgatttgtctacttttaacatcccacttcccctctgccttctgaatttgagcatcagcttaatgtgccgcccttgacccattgtatattcgcaacttcccaacctcctttttytgaatgtggggagactaccataggcaacctcagaccccccttgcccttggcctagtagagctctgaccttggagtgcttttagcccagttaggttatagaaatctcctcctaaaactggtaaacaagagcaagtttctgtccatcttcatttccgtaggactgcatcatcctacctgtccggtcagcagcccttatttattattttatcaagtaccagctttatagcaagcactgtacttggtatgagaggactatgaaaatcaatcagtt

SEQ ID NO: 742275 - DNA, 613 bp, Homo sapiens
caaatgcagctaatgaaatttgattatgccccatgtactgtgccaggtgctgggtataaaaaaacaaacatgattcaagcccagggctaagaggacacattctgctgaggaggcagagaaataaatcagcaattaaaattgaagtgatatcatcagtggcagagagtcctgggaagatggtgatctgaactcaattctcttcccttcagtcacactttctatttcttttctttttttttttaaactccagagttctctttattttctttccttttttttattattattatactttaagttttagggtacatgtgcacattgtgcaggttagttacatatgtatacatgtgccatgctggtgtgctgcacccattatctcstcatttagcattaggtatatctcctaatgctatccctcccctctcccccaaccccacaacagtccccagagtgtgatgttccccttcctgtgtctaggtgttctcattgttcaattcccatctatgagtgagaacatgtggtgtttggttttttgtccttgcgatagtttactgagaatgatgacttccaatttcatccatgtccctacaaaggacatgaactcatcattttt

SEQ ID NO: 742276 - DNA, 655 bp, Homo sapiens
gtttgaagtcaggtagtgtgatgcctcaagctttattcttcttgcttaggattgctttggctatttgggctcttttttggttccatatgaactttaaaatggtttcttctaatactgtgaagaatgtcaatggtagtttcataggaatagcattgaatctgtaaattgcttcaggcagtatggccattttcatgacactgattcttcctattcatgagcatggaatgtttttccatttgtttgtatcatctctgatttctttgagcagtggtttgcagttttccttgaagaggtccttcacttcccttgttagctgtatttgtaggtatttttattctttttgtggcaattgtgaatgggattkcctttctgatttggctgtcggcttgcctgttgttggtatataggaatgtgtgattttcacacattgattttttatgctgagactttgttgaagtttcttatcagcttaagaagcttttgggctgagatgatggggttttctagatatataatcatgtcatctgcaaagaaagatagtttgactttctcttttcctatttgaatatgctttatttctttctcttgccttattcccctggccagaacttcaaatagtatattgaataggagtggtgagagagggcaaccttgt

SEQ ID NO: 742277 - DNA, 657 bp, Homo sapiens
attagaatgcaagatccaggtcccatttaaagaatcagtcaggccacatctcgacaaaacagccatgccttgctgcggaaccagctctgcccttgttggcttggactctccaaagcccrtaggctggaattgctgagttgtcccaataaccaaggtggtggcccagccctcccaccacacactctcccctagggagagatcagagctctgtctatagaatatgggagagtgggggtgcttgaggctgccccggctgggaggtcccacccagtgaggaggaatggatggggtctcgtttaaagaagcaatctggacacattctggcaaagcagctgtgctgagcttgggggacccttcctcatctggactgcttggactctccaaagcctgcaggctggaatggctgagtcaaccaaacaacaaaaatcacagcccacttctccccccgggggctccatcctgtctcaggcaggctccatccaccctgttgccggtggctgcttggaattccaagctagtaagtctcatcttgtgaggtgcagtggaagtggggcctgcaaacggatgctgcttggccccctggattcagccccctttttagaggtatgtacatacagacctcccaccttgctggggatatcggggccagggtatgta

SEQ ID NO: 742278 - DNA, 657 bp, Homo sapiens
attagaatgcaagatccaggtcccatttaaagaatcagtcaggccacatctcgacaaaacagccatgccttgctgcggaaccagctctgcccttgttggcttggactctccaaagcccataggctggaattgctgagttgtcccaataaccaaggtggtggcccagccctcccaccacacactctcccctagggagagatcagagctctgtctatagaatatgggagagtgggggtgcttgaggctgccccggctgggaggtcccacccagtgaggaggaatggatggggtctcgtttaaagaagcaatctggacacattctggcaaagcagctgtgctgagcttgggggacccttcctcatctggactgcttggactctccaaagcctgcaggctggaatggctgagtcaaccaaacaacaaaaatcacagcccacttctccccccgggggctccatcctgtctcaggcaggctccatccaccctgttgccggtggctgcytggaattccaagctagtaagtctcatcttgtgaggtgcagtggaagtggggcctgcaaacggatgctgcttggccccctggattcagccccctttttagaggtatgtacatacagacctcccaccttgctggggatatcggggccagggtatgta

SEQ ID NO: 742279 - DNA, 582 bp, Homo sapiens
cgtcttccacctcaaaactagaaaaacaacacatgaaacacaaagtaagcagaacggttatcaaaatggaaatcaaggaactagaaaacggaataactattccgattcagtaattcttgaggttgggctctgacttccagctcttccggcggttctgacgtaatgccaggtttgtgaactgttggattagatgtcctttagaatcccttcaaaccatgatatcctaggaaactatgatcttgcgtttacattggtccttgaattatggattatgagaacgataatctgatcagtataggcacagtaatacttcataagaggatctgtaagatgtcttggatatggatgttaattacagagtgatgaaatgcagacmgctgaactgaaagttcaatgtaaggcaaagcatttacgacagtaaagttgtctaagggctctattccggtactcataaaccaacccgaaacagaagccgaagcactgtgtggagctgggaagtatggaaggcacctgatgccccctgccatcttatgaattatggtgtgatctcggctcactgcaagctccgcctcccgggctcac

SEQ ID NO: 742280 - DNA, 555 bp, Homo sapiens
atatcttccctgctgaggctgtcagggaatctgtgagatgtgaggccaagagcagtgtcctctactgaatatgtgccaagagaggggagatgttttgatggcacatatatttaatttttgcaccattgactgatataagtgggaaaaatgtttagattaaagagaacaggtagtctgaatgaagcacccaaactcggacaacaaagtagtattcattccagagcattcgtgtctttatttgtaaaatgtataaagtattcttgttgtttagcctatgggtttatgtgcattgtaagaaacaacaaataacaatttatggtgtaaataaaccatgtttgtggttcaccaccacccaaasagtgatgacactgactctcaatctctctgactttggattcaaaacacagtgacaaatgctacccagctgtctgtcagaaataaatttcttgattaaatcaacaaggcttcaactcaatccagataaaattgtggcaatgttggcagcataaagacatgctctgaggaactcaccagaaatgcatcctcacgagagat

SEQ ID NO: 742281 - DNA, 559 bp, Homo sapiens
tcaataactcccattataacaacttttatttacattttcttcattctgtcacctctgaagatggctatttcagcttcatagtaagtgtcattaaggtctccaaaagttatgagttacattctttttctttgcctaaacattggttctcaatgggaaccaattatacaacagcctacatctacttacaatggttaaaactctgcttttcaactgattttaaatgtgccctagtaaacatttgaaaagataaarattatcaattgctaaccttctttttcaatacttctttcctctttcctgtttttactatttttcttccagaacttatcaattgcttttgtggcagcttttggctcagggacactattgaaaatttaatcatgctcaaattttacccagtgaaaacttaattgctaactttttctcattcagataggacttgtgtattatttaataatctttaaaccaggaaaagccttaaaattctctaaagcactaggaaaaaaattagaagtaaattatagatagctttgacaaatgttccctcagtagaaatctt

SEQ ID NO: 742282 - DNA, 603 bp, Homo sapiens
cacaaatgtgaaaaaaaaaaatgctcagcatcactaatcagagaaatgcaaaccaaaaccacaatgagatatcatctcactctagtcagaatggctagtatttaaaagtcaagcaacaaatgctggcaaggctgcagagaagaaacaacgcttatatattgctggtggaaatgtgaattagttcaaccactgtggaaagcagtctggagatttctcaaagaacttaaaacagagctaccatttgactcagcaatcccattactgggtgtgtacccaaaagaaaataaagcattccaccaaaaagacacatacaccatatgttgatygttgcactgttcacagtagcaaagacatggaatcaaccaaggttcttgtcaatgttagactggaaaaagaaaatgtggttcatatataccacgaaatactacacagccatgaaaaggaataaaatcatgtcttctgcagtaacatgaatgaagcttggagctgtaatcctaaggaaattaacacaggaacagagcaacattccttgaattgctacatctcttcagattctctctcctctgagacccattccaagttcctctgatactcatactatgg

SEQ ID NO: 742283 - DNA, 627 bp, Homo sapiens
ttactttgaacctttgatacctcttttctgtgcttgaatccaggctgttgagcgtggatggaaaagcctattatcattctgatttgtctcctttgaattcagtaccactagccttaatggggaacttccttaaaccactcacctagttgcctatttttattttctctctcctcctacctcccacaccttcttcttatcctccctctcagctgatcacctgacttctattccaccaaggatggagaagtaatcaggggaggatgcccatagctccctttctcacacttatgcacaatccctcgccctgaatctgtgtgcgcaggcactctttctccctattactttctccctattactatggaagaagcttggaggccagcatctcaacttgttcactggatctcattctctctctctctctgtctctctgtatctctctgtctctstgtgtgtgtgtgtgtgtgtgtgtgtgtgtgtgtgtgtgtgtgtgtgtgtgtctgctcctccacccctccatcaataagttttccctctcttctggagagaagaaattttgttatttctcccattgaaaggaacctttcttttggtgttactgtgccctccacctactgacctactgactga

SEQ ID NO: 742284 - DNA, 630 bp, Homo sapiens
aatccattacactgtacacttagcacttgtgcgctttggggatgtattttatacctcaatttattttattttatttattaatcttttttggagacacagtctcactctgtcacttaggctggagtgcagtagcaggatctcagctcgctgcagcctctgccgcccgagttcaagccatcttcctgactcagcctccccattagctaggattacaagtgtgcaccaccatacctggctaatttctgtatttttagtagagacagggtttcaccatgttgcccaggctgatctcaaactcctgacctcaagtgatctagccgcctcagcctcccaaagtgctgggattacaggcatgagccrctgtacctggcctgtacctcaatttagaaaaactaaaaaatgaatgtgttgaattcctactacatgacaggcattattccaggcacagcagtaaaatcagagtccctgctcctgtggaacttacagtctagggaaagaagacatttcctacactaatccactagtaaatggaaatgccgagagtctgggaataacacaaagacagagccaacgggatttgctgacggatttgatagaagattttcaaaagaagagcagatttttactttg

SEQ ID NO: 742285 - DNA, 589 bp, Homo sapiens
tctgctcaattttctgtaaacctaaaactgctctaaaaaacaaaagctattaatctttttttaaaaggtgactctgatgctgtaaaatgtgtcaacacactttactgtgtttcaaaaaaaatttgagacactctaaccactcagcatgattgaggtcaaggatttggacagggttgcaacaatcactttgctattactcttatgtctttaatgtcaaatgccaatgtcactaagtaattatgaagtcaatatcttcaactaaaaatcaagacaaacaataattatatcttcacacaccgagatgcaaaatacacactaaacyttatgctactaaaaatgttatgattatgttgattatgcaaagaaaactataatggaagcaatgagcccttaaagtacatcatacacattttctacatgatgccaagttaggaatttttgctacaagatttcattctgcctgcatgtcaaattcaaaggtttgaaaatgtgaatcacagacctatgggtggatgccagtggtccatttcataagtttctctaaaatatatctatctctagcagtaatgtaggctcttggagttgaaat

SEQ ID NO: 742286 - DNA, 617 bp, Homo sapiens
ctcatttttattgttctggggaaaatactcaagggcttgattagaagaggcagttttgtattcagtactcctttagcatctgaaaatactgtcgtgattttctccacaaacggaaagttcctggctcttgctttgctcacagtttttccctcagagatgtgtggctgcccctccaatgcctcccactggtgttcctgagagcygtgacactgttttctgttcctttatgcataatctgatgctttttatattttttaggagactttaaatttatctataattttttcagtgcacagtgctcactgcttccattgcgactttaaattcaagaatcatattcttaaactctgtgactacaacaatcatacccatcattttttgagtgttcctgaccaaatccaggcactgggctaggtggcatttacccagaatcacacagcctatcaagaaatttgaaccagggttttgaaaccaatctacccacctcgaaagcctatgctctgaccacctctctccataacattgagtactgggatcagtattagtttatctcagattgtcctattttcagaaagtctttctctagatcagaggttatgatgtttcattttatgtgt

SEQ ID NO: 742287 - DNA, 617 bp, Homo sapiens
ctcatttttattgttctggggaaaatactcaagggcttgattagaagaggcagttttgtattcagtactcctttagcatctgaaaatactgtcgtgattttctccacaaacggaaagttcctggctcttgctttgctcacagtttttccctcagagatgtgtggctgcccctccaatgcctcccactggtgttcctgagagctgtgacactgttttctgttcctttatgcataatctgatgctttttatattttttaggagactttaaatttatctataattttttcagtgcacagtgctcactgcttccattgcgactttaaattcaagaatcatattcttaaactctgtgactacaacaatcatacccatcattttttgagtgwtcctgaccaaatccaggcactgggctaggtggcatttacccagaatcacacagcctatcaagaaatttgaaccagggttttgaaaccaatctacccacctcgaaagcctatgctctgaccacctctctccataacattgagtactgggatcagtattagtttatctcagattgtcctattttcagaaagtctttctctagatcagaggttatgatgtttcattttatgtgt

SEQ ID NO: 742288 - DNA, 613 bp, Homo sapiens
ttgtttgcagaagattttgtaaatcaggaatttattctgtatagatgctgttacactgaagtctattttatcaacagaaataaaaatgtaaatattaggagacgagacaacattgtttttatatttctgggcaagcactttcattttcccctgaaacatacctggcatagtctttcacagctaacaaatgtcaagacattgcaaaatgtacatttataaataacatatgtaaacatagatgtgaagattataataaggacatgatctcttataccatagctacaatataaatccatgtggctttcccattattgcatatgrggggctatttttctttaatatattttttatgaaaaatctcatatgaatcaatatatacatctttctcaagaatgtatcagttctataataacatagataaaacttaatttgattattggattaagtgcaaaactagttaaaatattgtcagaaaatttgctccttaatgacttaccacaataaaatataattttaaaagtactttttatagataaaatttattcattaaggcacctagagtattgcctttagaaagtaaacagtgttgtttgatgatacttagtctattatg

SEQ ID NO: 742289 - DNA, 613 bp, Homo sapiens
ttgtttgcagaagattttgtaaatcaggaatttattctgtatagatgctgttacactgaagtctattttatcaacagaaataaaaatgtaaatattaggagacgagacaacattgtttttatatttctgggcaagcactttcattttcccctgaaacatacctggcatagtctttcacagctaacaaatgtcaagacattgcaaaatgtacatttataaataacatatgtaaacatagatgtgaagattataataaggacatgatctcttataccatagctacaatataaatccatgtggctttcccattattgcatatgaggggctatttttctttaatatattttttatgaaaaatctcatatgaatcaatatatacatctttctcaagaatgtatcagttctatartaacatagataaaacttaatttgattattggattaagtgcaaaactagttaaaatattgtcagaaaatttgctccttaatgacttaccacaataaaatataattttaaaagtactttttatagataaaatttattcattaaggcacctagagtattgcctttagaaagtaaacagtgttgtttgatgatacttagtctattatg

SEQ ID NO: 742290 - DNA, 521 bp, Homo sapiens
actaaaatttaaaaatatgtatatatatgaatgtcatttgactcaatgttaatcattaatttgatacataaaactaagctaatcttaatattcaccagaaaatagtcaaattccaaaaaggaatagaaatatatttatatgtaatcactttatataatatgtattatatattcattatttcatatgcttatataatgtatttacttttagaaatacatattttaacttttaaacctgtactctggtgagactctataggagggtttttttttattttttgtttgtttgtttcaacrtagatcacatcagaaagtcttgaaatgactaggtgctttcttcagagtatttaaattttatgtagttgttaaaaattatgttcacaacagataaaattttaatggataagttacacagggaataatgtcaaatgactcagcttgtcagaaatgttaagtgcccttcacacatccctaagactggagaatgtcatttcacacccgtgtcaacctatttagaatgaa

SEQ ID NO: 742291 - DNA, 526 bp, Homo sapiens
ctattcacactagccaagacatggaatcaacctaggtgcccatctgtggtggattggatcaagaaaatgtgttatatatatatatgccaaggaatactatgcagtgataaaaagaatgaaatcatgtcatttgcagcaatatatatgtagctggaggtcattgtcctaactaaattaactgaggaacagaaaaccaaataccacatgttctcacttataagtaagagctaaacattgggtacccatggacaaacatggcaacaatagacattggagactactagaacayggagagaagatcagggacaagagttgaaaaactattgagtactatgctcactacctgggtgacaggatcatttttatctcaaacttcagcttcatgcaatatacccatgtaacagacatccacgtgccctccctgaatctaaaataaaagttgaaattatcttttaaaactcacttacaagggaagtgaaggacctcttcaaggataattacaaactactgctcaagaaaataagag

SEQ ID NO: 742292 - DNA, 547 bp, Homo sapiens
actcatacagagcatgcctagttttagcagctgtgcagaggcagtggacaggagagaacaagagtttagaaggttctgcgaacactgcaatacagaaattgtccacaaatactcaaaaagagaaggtcttaccttgagtgggattctcagcaagtaaatattgtgaaaataacagtaaaaaggagaaggcttctgactccaatttatggctgagtagaataaaaatatctcagccacacactaagagaaaatgggaagatcagaaggtactgggtggcttatgtactcaaataactcagaaatagccaataaaatayctttcctgaggaaaacacttccgtgaagaaaattcaaattgagcaggatagaaactctgagagtaaatccaatattttgacgaccttacaatgcctttgttgtttgttgagagaaaaagatcaaacactgggaggtcaggtgggtctccagagaaggcacatctctggaagtgggtgtgacgacacaaaggccatccacgtctacatgtgtatcttaatctgtctgctat

SEQ ID NO: 742293 - DNA, 496 bp, Homo sapiens
atttcctaaaagtacagaacacctgattttgtttatacaaaagcaacagaaaggagatggtcgaacacaaaacaagtacactattataaagaaaataaactaaataatgaaaaaatgggtagttaatatgtaccagaaaagacataatttaaaaaaatgaaaactaaataatataacaaaattaatggaagcaaattragaaaataatggaaactataaagtaacagcatatattagaaccaggaaactcagagacgagatggctaaacatgaattggggactgatataattcagaactggagttgagtcactggtccatttccaatttatcctttttcataaaatgtggtctcttgtggtcccaattgaaagcctagtgttttcgtgtttcggtttttgttttattttagatctcatcctccttgtgcagctcagaactccaattttcccctcaactccttgagtctattgaaagttttgttcaaattctcatcc

SEQ ID NO: 742294 - DNA, 496 bp, Homo sapiens
atttcctaaaagtacagaacacctgattttgtttatacaaaagcaacagaaaggagatggtcgaacacaaaacaagtacactattataaagaaaataaactaaataatgaaaaaatgggtagttaatatgtaccagaaaagacataatttaaaaaaatgaaaactaaataatataacaaaattaatggaagcaaattaagaaaataatggaaactataaagtaacagcatatattagaaccaggaaactcagagacgagatggctaaacatsaattggggactgatataattcagaactggagttgagtcactggtccatttccaatttatcctttttcataaaatgtggtctcttgtggtcccaattgaaagcctagtgttttcgtgtttcggtttttgttttattttagatctcatcctccttgtgcagctcagaactccaattttcccctcaactccttgagtctattgaaagttttgttcaaattctcatcc

SEQ ID NO: 742295 - DNA, 582 bp, Homo sapiens
ttttctttttaaaaatattttggagatggcatttaactagaaaattagtctctggtctcaggtttcacctgatctttcatggctaggatggtttattcctagaagagcaaatagtggaagaagaagggagaaaaacaacaaacaaaagaacactcctggaaaatcaatataggccccactactctgaagtctataaatcagtagcaggtatgaaagtggcttatgcatgtaaataggtggctgttattttcttytgaactttaagttgtctagtttcagtttgcagggctttaagaaagcacagcttggttttcagtgactcccagttaggaaaaattgaaaaaaaaaaaaaaaaagaaggaaaaaaaagaaaaaaaaaattgaaaacattattttgaagacttgtagtcaagagaaaattagaatttagcccaaactgtagaaataataaaaattgaaaaacattagacaagactagaatctaacaacaggtgtacaattgtttttgaaacataatttttctctctccagtttcccatttttgctaaagacaaatcatggtaggattggtttgctttatta

SEQ ID NO: 742296 - DNA, 535 bp, Homo sapiens
tttaagcaaaaagtcaaaaagatcagttcagtccatgcagttaattcctgttctgcttgatactcatgaatattttatagctctccatgagtcctgaaagtttttcctctattctgatgtcacaatctccaaagttatcagaaacctgcattcaagagcacctgttaragttttgtagctgattataaagccaccttctaaagaggaccaaaacaagacaaaaattgtccatggatgacaaaaagttttaggacagccatagtcaaaaacacagttgaaaaggacatttgttacctctgcggcacacaataattttaacataacaattatgattattactgataatgtacactgagttatatagaattataggaatttcccataattttggaacacatactaataacatattttaaaaatgcagccctcaaaaacccaacaccatttcatatttgacaatgcttcctatatgatttttgtaccaaataagccaaattatgttattttctgaactttagggaacctaatatgttaa

SEQ ID NO: 742297 - DNA, 656 bp, Homo sapiens
tggcatctctgacctgcacctactagatgccagtagcagctcatctgcagttgtaacaagaaaaaatgtcccccgacattgccaaatgtctcttggggacaaaataggccctggctgaaaagcactgtctcacaggaagcttctccatctttccaactctggtgcactgtgtctccagcagstgcttctgctggactcactggtgtttgcttgtgcagcaccacaagctccttttccctgtccaattatctgaatctcatccatccttcaagacccagctagagccacatctaccgcatacagtctcctctaagcactagagtctgttccatctcttctatttctgaattcctattgcatttcttttgtttgatcactaccgtcttcatctattagctgaatccatcattgtttgttaaaaggattgcattttattatctctactagattataaattcttggaaaggagaaaccttgctttagtcacctctgcatcttcatagaccacataaaaaatacgtggaataaggacactcattaagtaatgggttgaatttagcatcagcaatcctattcacaaaaattccactaaaaaccccatcctcaatcaggcaaagtgataaataacacaaacagtataatcttcacaacaatca

SEQ ID NO: 742298 - DNA, 656 bp, Homo sapiens
tggcatctctgacctgcacctactagatgccagtagcagctcatctgcagttgtaacaagaaaaaatgtcccccgacattgccaaatgtctcttggggacaaaataggccctggctgaaaagcactgtctcacaggaagcttctccatctttccaactctggtgcactgtgtctccagcaggtgcttctgctggactcactggtgtttgcttgtgcagcaccacaagctccttttccctgtccaattatctgaatctcatccatccttcaagacccagctagagccacatctaccgcatacagtctcctctaagcactagagtctgttccatctcttctatttctgaattcctattgcatttcttttgtttgatcactaccrtcttcatctattagctgaatccatcattgtttgttaaaaggattgcattttattatctctactagattataaattcttggaaaggagaaaccttgctttagtcacctctgcatcttcatagaccacataaaaaatacgtggaataaggacactcattaagtaatgggttgaatttagcatcagcaatcctattcacaaaaattccactaaaaaccccatcctcaatcaggcaaagtgataaataacacaaacagtataatcttcacaacaatca

SEQ ID NO: 742299 - DNA, 509 bp, Homo sapiens
agtgttgattggggtaaatgttagaactgcaacttctttatcagcagataactttttaagaatttatttttaattgacaaataattgtatatacttatggggtacaatgcatttcaatgcagatacacttttttaataatcaaatcaggataattaacatatttggcatctcaaacatttatcatttctttgtggtgagaacatttagaatcctttcttttagctattttaaaatatacagtatgttattaatcactatattccctctaatgtgcaaaaagatcttcaaaacttatttctcccaattgtaactttgtactcacaaaccaacagctcttctttccccagtcaccctcccccacrcctcactcagactctagtaaccaccattctattctctacttgtataaggtcaactcttccagatatcaagtatgactgagatcatacattatttgtctctttgtccctgtctctctgtgacactatttcacttaacatagtctcct

SEQ ID NO: 742300 - DNA, 604 bp, Homo sapiens
gttctatttttttttttatttcaggagatgaattgcaatctctttgccacaaaatccaaatctagtcattaaaactctgattttcaaaacaagctcttgcatgcatatatgcatatggcttagatagagctgaaattcttgattttccactcaggttctttctcccttgttctgtaatggatcaaggtgagaagagttgtttatgatctttataagtgrtaccatgtaagcatggatttactatcatgctgcacttaactgcctcttctgtaggctaaatagcctagttctacaaaccttcccctaagtgtagatcattttcaactgtttaatagctatctttgttgctttccactgaaggatttccaaattatttccacccttctaacgttttcatcatcagtaacattgcatctgtgaagtaaatgttctgctgggcactgtgccagatttgattgcgaatgtcttctacctgttccacaagctttagggccatgttacaaacaacacaaatgagatcaatacatttaataacacattgacaatgcatggcctttgattcaggcagagagaaagacataggcattgcctgggtctttttatc

SEQ ID NO: 742301 - DNA, 604 bp, Homo sapiens
gttctatttttttttttatttcaggagatgaattgcaatctctttgccacaaaatccaaatctagtcattaaaactctgattttcaaaacaagctcttgcatgcatatatgcatatggcttagatagagctgaaattcttgattttccactcaggttctttctcccttgttctgtaatggatcaaggtgagaagagttgtttatgatctttataagtggtaccatgtaagcatggatttactatcatgctgcacttaactgcctcttctgyaggctaaatagcctagttctacaaaccttcccctaagtgtagatcattttcaactgtttaatagctatctttgttgctttccactgaaggatttccaaattatttccacccttctaacgttttcatcatcagtaacattgcatctgtgaagtaaatgttctgctgggcactgtgccagatttgattgcgaatgtcttctacctgttccacaagctttagggccatgttacaaacaacacaaatgagatcaatacatttaataacacattgacaatgcatggcctttgattcaggcagagagaaagacataggcattgcctgggtctttttatc

SEQ ID NO: 742302 - DNA, 549 bp, Homo sapiens
taaggtggtagtgtaaaagctgcatgaacaatcatggttcttcttgaatacaaaacagtaatctctgccactaattcattgactgccaagtcccaggctctgggatgggtactctttgtaagtcatgatttcatttaatttcccaaaaagtccatcccatcacctgtaatctcacagctagcatgtggccgacactatattgagagtggggtttgtgctaatccagactcagcaaaatcttgactactgggaccctttcatctcatccaacatatttgagggatctcctgtgggccaggcactgatcctagtgctggaagtccagagataatgcctsccttcaaagagtttctagttcaataaagagagcctcatttaatcaaaagtgttgcacatactataattttaggagaaaattaatcccaggaaacaaacgtcttaggagatattttactctaggaaaaaaagataatccaatcttttaaggatttgtttttaggacaatacacattaaatcattctcctgaatgtgaatgttgacaccactct

SEQ ID NO: 742303 - DNA, 606 bp, Homo sapiens
cctccctagtagctgagattacaggtacatgcctctgcacccagctgacaatgtgtgttttttgtttttttgagatagagtttcgctctcttgcccaggctggactgcagtggcacgatctcggctcactgcaacctacggcccctgggttcaagtgattctcctgcctcagactccctggtagctggtattacaggcacccaccaccacrccctgctaatttttgtatttttggtagagacggggtttcaccatgttggccaggctggtctcgaattcctggcctcaggtgatccacctgcctcggcctcccaaagtgctgggattacaggcatgaagccaccacgcctggccaaagctgacaatgttttttaaccaaagaactcattctatgcctagccaaactatcaatgaaatgtctatgaaacagaaagacgtattaggacttgcaaaatgaaaaatgagccaactaataactgagcaaacaaacgtatgtgccttttctcagaagctactgtgcaccacagttagaaactggccagttcagactgcagcaagaggacagacgacagaggctctaggatggatgctttgagaaaaacaatg

SEQ ID NO: 742304 - DNA, 634 bp, Homo sapiens
aatagcagctctctataacaggggtgagcagagtcactggattctttgtctacttctacataagcaactatttctcccttttcgtttatcattctgtgtatttgtactttctctatttttttgttgttgttgttaaggtcactttacagtttatattatattgttactgtgttcctaagatatttgacaaggatgccaaaaatacacagtgaatttttgtatttttagtagagacggggtttcaccatgttggcaaggatgatctcgatctcttgacctcgtgatcctcctgcctcggcctctcaaagttctgggattacaggcgcgagccactgtgcccggtcatttaatagtattttcytgaggattttagcatctatgttaatcagggatattggcctgtatcttgctttccttgtagtgtttgtgtctggttttggcatcagggtgatgctagcctcataaaatgagtttcaaagtgttatctctgctcttttttggaagagttttacaaaaattgatattaattatttttgaatgtttggtaaaactcaccaacaatgctatctggtcctgtgcttttctttgttgggaggtttttgattgtgagtcaatctccttatttgtttttggt

SEQ ID NO: 742305 - DNA, 609 bp, Homo sapiens
ccgttgtcattttaacagtgaggaagcaagtgaggcagagcatatgctgaggtgtggagcagctgcgactgggaagcgtgttatttcttttatttgctggggggcggagaagaggcagacaccgcatctcctgggagtgggcaggatttatttattgggaagggagtgccagaggaaaagttccgtcatcatggaaggaattctccagccctgcttagtattattgtttgggcctttatttattttttttttcctgccttgacactccctgcccaaagcacagattcaaataaaaattgtagccagagccaatgtctttgtagtagatggtgggacagtgaattttacatgtcaacttgaccaggccacaaggtgcccaggtatttgggccaaagatgatcctgrgtgtgtccgtgagggtgtttctggatgagattaagattcaaatcagtagactgagtaaagcagctcgccctccccaatgtgggaaggcctcatccgatcagtcagtcggcctgaacagaacaaaagctgaccctgctgtaagtaagaggggtttctcctgaccgcctttgagttgggacattggtcttttgctgcctttggact

SEQ ID NO: 742306 - DNA, 429 bp, Homo sapiens
ttttgtaaagctccccaggtggttctgatgggtgtggccaaggtcagaagcactgccaagcctggaggcagatttgtggcccacctgtagcctgtgtatggcattttctaaatacggtttcatgtaggcaacattccctcctccgtttcctgctcctacacttgtgattctctctcctacttttgatttatggygtcttaatgtatccttttaagtcccctgcaatcctttctggaacttagcaaagtgaaaacaaatagagtagaaaggttcctgcttttctctggctgggatctgggcacagctcccaccccagtcagccctcgctggaaagagggtaggagcctcctgtttccccagccacagtagctggtcagcagcctcgttctgtaaccccacaatgggtaattgtagctagttctgccaaga

SEQ ID NO: 742307 - DNA, 595 bp, Homo sapiens
cacagttaagaatagatttggctgtgatcacctgttgaatatgttgtgattaagtgtaacagaatagagtgattgtaggctttaccaatatgatttctgacatggcaaggtcagaggacctaatagtggtattttctgtatatatatcttaaagtcttgtttcaaatacacttgaacctcttgtctcaaaagacttctgttcttgagccacttcttgcagatttttatctagaatatggctaatttggaatgatcyttcctttactcccggaagacctggctttcagacactgttattttgtcttatatttctaagatagttcatattgactggaaaaaaatgaatctgtttaatgatcattaaaatactacttgttgctacttatttataaactttattcagctttagctaaaatacctcgggaattgcactaaaagtcctctgaaatgtcttagtttttcttagttctgtgaatatttccagacgtcttttttaaagcaactttattttattaacctttctttacaaatgcatttcttctttcaggccttcagtggtggctattatagaggtgggtttgaacccaaaatgaca

SEQ ID NO: 742308 - DNA, 531 bp, Homo sapiens
ccctaagtacttcagtggtctgtatttcctaagaacatggatacactcctatataatcaaactgtagttatcaacttcagtaaatttaacatggattccatactttaatccacatcatttaccatcaattgatccaatgaagtcctttttttcctccagtcaggatccactctggaatcagatrtcgtatttacttgtcttgtctctttattgttgcttaatctggagcatatccacagcctttctctcttttacaatatagacattttttgaagaaaatgtccctcaccctcttttttttgtagtagaatgttcttcatttagggtttgtctgatatttcatcatgattcaatttgagctaaacatccctggccataatgctatataagtagtatgtcctcagggtatcaaatatggaagcacacatatttatctgccctcacttgtgaattaattttgattactccttcaaatttctccactacatagttatattttttcttgcaactaataagcaatctgtgaggaga

SEQ ID NO: 742309 - DNA, 591 bp, Homo sapiens
tatcatgtttactaggaaagcttgggttacctatgacactgcgcctccgggtgcgatttttaaggacttaaggcaaactagtgtcagctcccacactggacagtaaaaagagcgcagaaagattatatgaaacccattaaagacgtaagacttaaaagtggaggggtcgttattttagggtgatggtcttctctgtttatcactgactcattcattcagcaaatattaatgacggtcaacttaagaaaggctgatrtaaaacagttaaagacatgaggcttgaaaataaaataacttttcggatgttggtcttctctattcatttgttcactgaatcactcgttcagcaaatatttatgaagggttactgtatgtccattagaagctggagatagcagtgagcaaaactgaacagtttctgccttctcagattttacaggctaattaatgctggggaaaaaccctaattcagttgactcaacaaatatttactgaatgcctcctatgtgtctagcactgttctaagcactgaaataataaaaccaagaaaaactcttccaatcttggagcttacatttgagtaggaggagt

SEQ ID NO: 742310 - DNA, 585 bp, Homo sapiens
tggctaccatctgcctaataaaccaagctcccattcctcagcctgccacaaaggctctctatgatctttctagcttttctcatcaccactgaggcccacttccaattctgccaggtcccctttcagttgtctctcccttctctaacagccagataactstctttgaaagtggagcaggaaccatgtcttacctttttttttttttaacccccacagtgcctatttacattttcagcaaatgtttaattgatttttgagcataaaagatgaaaacaaagttatcataataagccctttgacacatttcctataactgttagacagtgctaaaagtcttgcttttaaaaaaattagaaatatgtacctttggtggaaagagcttttcatacacttttttccacaactccataggtgagtgggcatgaagctttccaatgtcattttcaggaacaggaggagatcctaaaatagcaagttttaccacaaatgactgcaatgattaaaatattacaaactccaccaataaaagaaatgacactaacaaaggtatacatctcggatcactcattttccctctccttaata

SEQ ID NO: 742311 - DNA, 585 bp, Homo sapiens
tggctaccatctgcctaataaaccaagctcccattcctcagcctgccacaaaggctctctatgatctttctagcttttctcatcaccactgaggcccacttccaattctgccaggtcccctttcagttgtctctcccttctctaacagccagataactctctttgaaagtggagcaggaaccatgtcttacctttttttttttttaacccccacagtgcctatttacattttcagcaaatgtttaattgatttttgagcataaaagatgaaaacaaagttrtcataataagccctttgacacatttcctataactgttagacagtgctaaaagtcttgcttttaaaaaaattagaaatatgtacctttggtggaaagagcttttcatacacttttttccacaactccataggtgagtgggcatgaagctttccaatgtcattttcaggaacaggaggagatcctaaaatagcaagttttaccacaaatgactgcaatgattaaaatattacaaactccaccaataaaagaaatgacactaacaaaggtatacatctcggatcactcattttccctctccttaata

SEQ ID NO: 742312 - DNA, 489 bp, Homo sapiens
actctcattttgacatgcagcttctaggaatatcttcatatcttctcttagctctcagtccttggatgtgaaatggagaaattcagtgtctcagcttcaagaattatactcataaaaagtacagagcttttcctaactttccattccacaaactgtataaacatataccaaaaataaatgtattacacagatttgctttgttttgaggcaaaaaaaatgcccatttaaattgttaagataggctgggcacagtgactcatgcctgtaatcccagcactttgggagacagaggcgggcagatcacttgaggtcaggagttcgagaccaacctggccaacatggcaaaatcccatctctatcaaaaatacaaaattagccggcmtgatggcacacacctatagtcccagctactcgggaggctgaggcataagaatcacttgaacccaggaggtggagattgcagtgagccgagatcatgccactgcactc

SEQ ID NO: 742313 - DNA, 612 bp, Homo sapiens
aagtatatattttttcaactttgaatatatctggtgtatttggagtaatatctgagtaaatacacttatatgtaagagaatcaaaggaacaagatattattttatatccaaggaaattaacacttagaacataaatacgtattgcattacttcatattaaagaaatgttttacaaaagaaaataaaggagcttattttatagccccatttccacaaataatagcaaaggtacatacacatatctaatgttttacacactcattattgtttctcttaaaatttgttgcttatactattttaaaaggcaagcctatagattgttgtgtgtatatacatatacacacaacatacatatrtgtgtgtgtgtgtgtgtgtgtgtgtgtatatatatatatatatatatatatatatatcagcaagcaagagaatgggcctcttcctgctgaggtttaacatttgcatgtatatgtatattttgattcacatagacttattgttctttaattacatgaacagtgattcctggttacattattggaaaatggaagcaatgctcaaagagcatcacctaaatttccatcatattttgctctcaatatattttgtacatcc

SEQ ID NO: 742314 - DNA, 612 bp, Homo sapiens
aagtatatattttttcaactttgaatatatctggtgtatttggagtaatatctgagtaaatacacttatatgtaagagaatcaaaggaacaagatattattttatatccaaggaaattaacacttagaacataaatacgtattgcattacttcatattaaagaaatgttttacaaaagaaaataaaggagcttattttatagccccatttccacaaataatagcaaaggtacatacacatatctaatgttttacacactcattattgtttctcttaaaatttgttgcttatactattttaaaaggcaagcctatagattgttgtgtgtatatacatatacacacaacatacatatatgtgtgtgtgtgtgtgtgtgtgtgtgtrtatatatatatatatatatatatatatatcagcaagcaagagaatgggcctcttcctgctgaggtttaacatttgcatgtatatgtatattttgattcacatagacttattgttctttaattacatgaacagtgattcctggttacattattggaaaatggaagcaatgctcaaagagcatcacctaaatttccatcatattttgctctcaatatattttgtacatcc

SEQ ID NO: 742315 - DNA, 612 bp, Homo sapiens
aagtatatattttttcaactttgaatatatctggtgtatttggagtaatatctgagtaaatacacttatatgtaagagaatcaaaggaacaagatattattttatatccaaggaaattaacacttagaacataaatacgtattgcattacttcatattaaagaaatgttttacaaaagaaaataaaggagcttattttatagccccatttccacaaataatagcaaaggtacatacacatatctaatgttttacacactcattattgtttctcttaaaatttgttgcttatactattttaaaaggcaagcctatagattgttgtgtgtatatacatatacacacaacatacatatatgtgtgtgtgtgtgtgtgtgtgtgtgtatatatatatatatatatatatatatatatcagcaagcaagagaatgggcctcttcctrctgaggtttaacatttgcatgtatatgtatattttgattcacatagacttattgttctttaattacatgaacagtgattcctggttacattattggaaaatggaagcaatgctcaaagagcatcacctaaatttccatcatattttgctctcaatatattttgtacatcc

SEQ ID NO: 742316 - DNA, 494 bp, Homo sapiens
gagttaaattaagaacacaatcatatttacaacacctaggatgaaaataaaatccctgcaaatacaactaacctaagatgtgaacgatctccacaaggagaattacaaaacacagctgaaatctgaagctggatgcagtggttcatgcctttgggaggccgaggcaggtatatcgcttggacccaggagtttgagaccaacctaggcaacatagtggaacctcatctatacaaattttttttttttttttaaatagcgaggcatggtggcacatgcctgtagtcctaactaccctgacggcttgaggccaggagttcaagcctgcagtgagctatartgactccactgcattccagcctgggtgaaagggtgagactctgtctcaaaaaaggaaggaaataagaaaaggaaggaaggatggaagggagggaggaagggagggagggagggagggagggagggaaggaaggaaggaaggaaggaaggaaggaagg

SEQ ID NO: 742317 - DNA, 612 bp, Homo sapiens
aagtgtaaaaaaataaaaaataaaaaaaaatggtgtctattatttcagatgctttcttgaaaacaatgatttagtgatactatggtggtatcccaactgtcactctaaaggaccttatagaagagcaaggcaaacaacayatattattagactacagaaggaaggaaagcactaacaaaattctgcggaaataagagcgaaagagtcaggaatgcccaactgtgtcagtggaaaaagagcggttaatgaagcaaaagagcggaggaaatgaagaggaaaaaggtaggtattctagggaaaagggaacagtgtgtccacagaggagggtttatttaagaatcaccaatgtaaatggaacacactctctcttaaaaagagaactaaaagtcagagcacacttggcaatgtggatttcattttatgtgtgatgaaatcaatgaatattttgatgcaggcaaatcacatgatcagatttgcattttagagtaagagtattagtcacagtgaacagatagaaaaaagaaagcaatgtcatcagtttagagaccactataataatgtgggcaatgatgagggtatctctgatatatggcagtgataagatgaatgaag

SEQ ID NO: 742318 - DNA, 666 bp, Homo sapiens
cagcaagggtatacaatttgtttttggcagaagagcagccaaggtccctctgcacaatggatcctctgtaagccaagctctgctgctgtggatatccagccttctgcatgatcctctcttcagacaaaaatggtgcttgagccggtgcagcaagcatgcccttctgtattcctctcttgaggctgttcgcatttaatatttgtgcctagacgcacccgttcctgctggagggttttaatagcccacttgacattttctattttttggatggttgtttctattaaattgttgtaatgaaacaaatgaacattacttgtttttttttcttttcttcttcaaaatctctttctaaatggactgtatatcaagcttgcaacagcagtagattttttcytgaatgactgagccaggcagtgccttgaaagaaacagcattcaaagtgggcattagaaccaggcccccaagaagatggactccagctgtttcatttcggaggtgaggtaatgagactagagatgaagtaactgctcctcacattgttagtgacagagttggccttataacccaggaacgcttatcatttaagagtttatttattttttaattatcaataacattgtcttgtaataaaggctcttcttaactgctgaagtccaggaataagaa

SEQ ID NO: 742319 - DNA, 606 bp, Homo sapiens
tgcaacaaaagacaaaatcttcctaagatagtatgtacccttgctatactcaatgtgctttgatgttttctttcttcatctcttcaattctatttcatttattaaaatgctggccatgccttattaaactgatgacagttcactaaagggtcatcacccacagtttgaaaagaatgttgtgttcactgaggactcaggtgcagttatatggctggagtcagtaagaatcaagggcagggccctgtttragcatatgtgccaccaagcgaagagaatgggtaaagtgtctctataatttatttttctttactctttctcgcagcagctcatccttcgtatccatacaatttcttgtttcatattccatatctcaaggctctgatgtctgccagcctatcttataacccaaaaaccccaagatgtagtagaaactaaattgtaggtttacagtttaccaaatactctattattcttataataatactatgaagttgggtttttctatatgttacagtttaataaatggagatttggtgaagttagctaacttttataagataactcagctagttagtggtggatccactgatttcatactcatgagat

SEQ ID NO: 742320 - DNA, 573 bp, Homo sapiens
cggggagatgttggttaaagggtgcaaagtttcagttaaacaggaaaaataagttctggaaatctatcgtacagcacagtgactataattaataataaactgcccaaagaatagattttaaatgttctcatctcaaaattgaaaagcatgtgaggtgatggatatgttaactagcttgatttcatcattccacaatgtatacatatttcagaacatcatgttggacaccataaacatctgtcaattaaaaaaatttaaaagakatagaatgggatgagcactctaggaagagcactttgcaagtgcaaaggccctgaggtaggaggtgcagttctgtttattagtggagggtaggctgatgggactggcatggaccaaatgggacaggtgtgagagacaggccagagaagtgacaggcgggatagatgaggggagctccaggtggacataaatcatcctgtttaatttgtcctttgttgtgaccaagacagggagttagaggaaagttctgaactgaggagtgacatgacctgagtcacattttaacaggatccctctggctgcttcactggg

SEQ ID NO: 742321 - DNA, 603 bp, Homo sapiens
gaaaaccccatcatctcatccccaaatctccttaagctgataagcaatttcagcaatgtctcagcatacaaaataaatgtgcaaaaattacaagtattcctatacaccaataacagacaaatggagagccaaatcattagtgaactcccattcacaattgctacaaagagaataaaatacctggaaataaaacttaaagggatgtgaaggacctcttcaaggagaactacaaaccactgttcaaggaaatgagagaggacacaaacaaatggaaaaacattccatgctcatgggtaggaagaatcaatatcatgaaaatggccacactgcccaaggtaatttatagattcaatgctatccccatcaagctaccattgactttcttcacatgattggagaaaacaacttcaaacttcatatggarccaaaaaagagcccacatagcaaagacaatcctcagaaaaaaagaacaaagctggaggcatcatgctacctgacttcagactatactgcaaggttacagtaaccaaaacagcatggtattggtaccaaaacaggtatatagttcaatggaacagaacagaggcctcagaaataatacca

SEQ ID NO: 742322 - DNA, 603 bp, Homo sapiens
gaaaaccccatcatctcatccccaaatctccttaagctgataagcaatttcagcaatgtctcagcatacaaaataaatgtgcaaaaattacaagtattcctatacaccaataacagacaaatggagagccaaatcattagtgaactcccattcacaattgctacaaagagaataaaatacctggaaataaaacttaaagggatgtgaaggacctcttcaaggagaactacaaaccactgttcaaggaaatgagagaggacacaaacaaatggaaaaacattccatgctcatgggtaggaagaatcaatatcatgaaaatggccacactgcccaaggtaatttatagattcaatgctatccccatcaagctaccattgactttcttcacatgattggagaaaacaacttcaaacttcatatggagccaaaaaagagcccacatagcaaagacaatcctmagaaaaaaagaacaaagctggaggcatcatgctacctgacttcagactatactgcaaggttacagtaaccaaaacagcatggtattggtaccaaaacaggtatatagttcaatggaacagaacagaggcctcagaaataatacca

SEQ ID NO: 742323 - DNA, 674 bp, Homo sapiens
tttttcacgtctgtatctccttcagttaagttctaatcttggttatttcttgtctttatctagctttggggtttgcttgcttttggttctctagttcttttagttgagatgttaggttattaacttgagatttttccagctttttgatgtgrgcatctagtgctatagatttccctaacactgctttagctgtgtcccagagattctggtgcattgtccctttgttctcattagttaaagaactcattaacttctgccttaattttattctttgccaaaaagtcattcaggagcaggtttttcaatttccatatgttggtgtggatttagtgaatttcttaatctttagttctaatttgtgtgtgctgtagtctaagagactgttatgaattcagttttttgtgtttgctgaggattgttttacttccaattatgtgaacaattttagagaaagtgccatgtggtgataagaatgtatattctgttaaatttgggtaaagagttctgcagatatctatcaggttcacttgatccaaagttaacgttaaggcccttaatacctttgttaattttctgtctcaatgatcttctaatactgttagtagggtgttacagtgtcctactattattgtgtgggaatctaagactctctgtaggtctctaacacgtacttt

SEQ ID NO: 742324 - DNA, 587 bp, Homo sapiens
atgttaggttattaacttgagatttttccagctttttgatgtgggcatctagtgctatagatttccctaacactgctttagctgtgtcccagagattctggtgcattgtccctttgttctcattagttaaagaactcattaacttctgccttaattttattctttgccaaaaagtcrttcaggagcaggtttttcaatttccatatgttggtgtggatttagtgaatttcttaatctttagttctaatttgtgtgtgctgtagtctaagagactgttatgaattcagttttttgtgtttgctgaggattgttttacttccaattatgtgaacaattttagagaaagtgccatgtggtgataagaatgtatattctgttaaatttgggtaaagagttctgcagatatctatcaggttcacttgatccaaagttaacgttaaggcccttaatacctttgttaattttctgtctcaatgatcttctaatactgttagtagggtgttacagtgtcctactattattgtgtgggaatctaagactctctgtaggtctctaacacgtactttattaatctgggtgctcctgtg

SEQ ID NO: 742325 - DNA, 659 bp, Homo sapiens
aaaatacatagtaatatattttaatagaagataacacaagtaaactcctgtgatacttgtttttacattaatgcaaaagagctcctctgccttactgatgtgcaaattaccatgcgattgtgacactagctgtacacttttagtttgaagtttagcacagtagtgarcatcagtggtgatctgtcagaccccactgtaaactggtggtggtggccatcataagaggatcctttgcctgtggaaaggagaggaaagacagaaaaggctttgtattgtgctttgagtgccagcttagctagagcagaataaaacatcaagtcaatttctaacgttcttgactccaatctctggctcccagacagcatctctgaacatgcctggggccagggtgaacagacaaccctaaaggaatgagctttggcaaggcccagtcctgtactgacttcagatctaatccagcaaatttacagtggtgatggccacggggttgctggcatctctacattgacagttccaggtggctcagcacagagggagaaattccatttatttggaagaaagtagtgaaaaagagccagattctctgcctggtaatccagagaattttttcagatcttatccaaaatcactaaggcaatacttccatgagtctgcaaaaa

SEQ ID NO: 742326 - DNA, 602 bp, Homo sapiens
tgtactctgcttctcttctttactctgcagtcacctcctctcttgttttactatgagtgtgtcaaagttttgtgaatcattccaaatttcactttctccaaaaaggactgtactcctctttttccatatacagctattctygcttggtggtggaaaatagtaaatgtgtaggagccctacaaaacagtaacattattttagatttcctcctccagatataagaaccaaatattcatgaaagaaaaaagaaatacttttcacataatcttttctctcatcttatcctcaaaatatgaatataatatcatacccccttcagtgaaaatcttgaggttccttgttaaaacttaacgctaagttttaaaagctctagcaccttaacttttatctttctaactacattctattctatgtgtttttctggttgtaactgttgttcctaccagttagtggttggaaaagtaaatgaaatatttacacagactgtggaatgataagcgccaatacaaagaaactagaaagtggaagtctttataccttgctttggaggtaagcatttgtctgataaatgtctacatgttacttaaatggcagagatgtga

SEQ ID NO: 742327 - DNA, 491 bp, Homo sapiens
aatttacccttctaccaaccatttatagctgtttccttttctctgcaacctcgccagcatctgttattttttttactttttaataaaagctaatctgactgacataaaatggtatctcactgtggttttgattttcatttctccaataatcagtggtatttarcttttagctttttaatatacttgatggttgcatgtatgtcttcttttgcaaactgtctgttaatgtcctttgcccactttttaatgaggttgtttctttcttgtaagtttgtttaaattccctgtaaatactggatattagatctttgtcagatgcatactttgcaaatattttctctcattctgtagattgtctgtttactgttgatagtttattttgctgtgcagaagctcttaagtttaattagatatgatttgtcaaattttgcttttgttgtgattgctttcggcatctttgtcataaaatatttcctttttctatgtccagg

SEQ ID NO: 742328 - DNA, 587 bp, Homo sapiens
gagccctctagctcactgctgctgctatagaggtctagaaatctcatgttctaggtactgctgctttatgatgcagacagactcacatcactgtttggcaggcacctctctggagagccacctaacccgtggagactgcagaaacaagaaataagaccctgaactttcagtgtttggatattgctgctggagcttctagcttaatctttcctatataattttattttttccctgttayagaagttatatgtattcactgaagaaaaatccaggtgtatatcaaataaccattcagaatcctacctctaagaaactgtcattttaacagtttcagtgaatgtttggttataaacatacatttagtataaaatatgcatattatacagatgtaatataaacataaaatatgacacaaaatatacatattatataataagaattataaaattaacatatactgaatacccactttattcatgcattgtactaacagccatatatgaattattcctttgaaatcttacaaaggccctgcaaatttgaaagtttcttaatgccattttatagataaggaaactgaatttcag

SEQ ID NO: 742329 - DNA, 587 bp, Homo sapiens
gagccctctagctcactgctgctgctatagaggtctagaaatctcatgttctaggtactgctgctttatgatgcagacagactcacatcactgtttggcaggcacctctctggagagccacctaacccgtggagactgcagaaacaagaaataagaccctgaactttcagtgtttggatattgctgctggagcttctagcttaatctttcctatataattttattttttccctgttatagaagttatatgtattcactgaagaaaaatccaggtgtatatsaaataaccattcagaatcctacctctaagaaactgtcattttaacagtttcagtgaatgtttggttataaacatacatttagtataaaatatgcatattatacagatgtaatataaacataaaatatgacacaaaatatacatattatataataagaattataaaattaacatatactgaatacccactttattcatgcattgtactaacagccatatatgaattattcctttgaaatcttacaaaggccctgcaaatttgaaagtttcttaatgccattttatagataaggaaactgaatttcag

SEQ ID NO: 742330 - DNA, 587 bp, Homo sapiens
gagccctctagctcactgctgctgctatagaggtctagaaatctcatgttctaggtactgctgctttatgatgcagacagactcacatcactgtttggcaggcacctctctggagagccacctaacccgtggagactgcagaaacaagaaataagaccctgaactttcagtgtttggatattgctgctggagcttctagcttaatctttcctatataattttattttttccctgttatagaagttatatgtattcactgaagaaaaatccaggtgtatatcaaataaccattcagaatcctacctctaagaaactgtcattttaacagtttcagtgaatgtttggtyataaacatacatttagtataaaatatgcatattatacagatgtaatataaacataaaatatgacacaaaatatacatattatataataagaattataaaattaacatatactgaatacccactttattcatgcattgtactaacagccatatatgaattattcctttgaaatcttacaaaggccctgcaaatttgaaagtttcttaatgccattttatagataaggaaactgaatttcag

SEQ ID NO: 742331 - DNA, 572 bp, Homo sapiens
gttattaattataatctcagttgaaggcatgatctgaaactcaattttatgcagaaaaagataggatggttaaaattattcagctcagcacatcattggtgtatctctacttggctaaaatatattgggaaatcctcctggtatatcaggtctgatcaatttaaaggccctgtaattaagtttgactccaaagaaataagaaagatgggtgacattttgagattgtaatttagacaaggctttgaaatcacttggtttaaaaatgttattcttttatcaatgccttaaagcaatgtccttttttttgaacataaaaacacaaaaatagtcctattgataattagaaagagmtttctatgatatcccattcttttaaatgtttacattaaattcataactgttaattttgtggtatattttcacttagattgctcttgcttgtgagtatagggaatatttttaaatggtctggctaccattacagcactcttctttctaaagcattactgttgattcagatataacctctggaagggaaagaaattgatgttataaaatatgaatgttaggcc

SEQ ID NO: 742332 - DNA, 621 bp, Homo sapiens
taccagggataatggaggaagaagtgggaggtaagtgtgtgtggccataaaagtgtaccatgaggcatccttgtggtaatgggaatgtgctgtattttgatgcatccttatcaatagcctggctgtgatattgtacaagatgttctcattgtgagtatctctgtaatatcctgtatgcgaacctataattatctccaaatacaaaagttcaaatgrtaaaggtgaaataaagactgggcaaatttgttgctaacaggcctaccctacaagaaatattaaagggagttctttaggccgaaagaaaatgataccagatggtaacttaaatctacctaaagaaataaagagtacctgtgaaggtcattatggaggtcaatataaaagaaagtatgcttatatattttctgttctcttctcttaactgatttaaatgatgattaaataaaacaataattaaattactgttagtttgaagtagattatgataagttgaaatgcatattgtaattcctagagcaaatactaagaaaataaatatatatccggaaaaccaacaaaggaattaaaataacacactgaaaaaatacctatttaacacaaaagaaaggaggaacaaataaa

SEQ ID NO: 742333 - DNA, 600 bp, Homo sapiens
acttgataagccggatcccttagccttcttccaaaactccaaacaagtttttagtactgaaaactcttaccataaaacactcttgtgtgtagcttttttttttgttaggtgacatttcaagaatagattagaaattaaacatacttatttctaagactgtgctataaaaagcatcaatgatatcctctgagaattgtttacttatttttaaagaaaccacttccaactcagtgagaaaagatataaattttaattgtaatccacatgcaaagagaaagagaatatatttcattaagtcttcatcataatatctgttatttttctaattttctacaagtkgcattgacctgtatttatatccctgctttgagatcaagccattatcctcctcaaaaccctcctatgctcccagtggcttgcggaataaaatccaaattgtcagatatgcagtgtgatctgacccaagctatttgcctggactcctctgcctcccacagctcactgcactgagttattcccagtgtcattaaaacattgtgacctcaaaatatccaagtatagatttgttcacatatttctatctaatgtcctttccattct

SEQ ID NO: 742334 - DNA, 600 bp, Homo sapiens
acttgataagccggatcccttagccttcttccaaaactccaaacaagtttttagtactgaaaactcttaccataaaacactcttgtgtgtagcttttttttttgttaggtgacatttcaagaatagattagaaattaaacatacttatttctaagactgtgctataaaaagcatcaatgatatcctctgagaattgtttacttatttttaaagaaaccacttccaactcagtgagaaaagatataaattttaattgtaatccacatgcaaagagaaagagaatatatttcattaagtcttcatcataatatctgttatttttctaattttctacaagtggcattgacctgtatttatatccctgctttgagatcaagccattatcctcctcaaaaccctcctatgctcccagtggcttgcrgaataaaatccaaattgtcagatatgcagtgtgatctgacccaagctatttgcctggactcctctgcctcccacagctcactgcactgagttattcccagtgtcattaaaacattgtgacctcaaaatatccaagtatagatttgttcacatatttctatctaatgtcctttccattct

SEQ ID NO: 742335 - DNA, 470 bp, Homo sapiens
tgagtataactactctctgggttttcacttcttttctgtgaagcccctacacatgtaaaaatattaacatcaacaaaagctgtatgcgtttactcctgttgatctgtcttttgtcagtttaattcacaggcttcagccactgaatatataagtagaggaaaagtttctttttccctacatgaggaaacagaaacattacataaattcrtttctttatgggccagaactatggttttcaaactgtgtcttgaggagacaatctagagcaggggtgtccaatcttttggcttccttgggccacattggaagaagaattgtcttgggccatatataaaatacactgaggatagctgatgagctaaaaaataaaaattgtaaaaaaataccttgaaatgttttaagaaagtttacaaatttgtgttgggccacatttaatgccatcctgggccacatgtggcctgcaggctgtg

SEQ ID NO: 742336 - DNA, 630 bp, Homo sapiens
gagagtcaatacttcaatggaggtagaacatggtgtaagttttctgtttttaagctttttacatgaagaacagcatatagttgatcctatgcatggtggataaaatgccaataggaaacatatagtctttctgagatgagaaatcagagaacagagtgcaaggcaatgacagtctctgaaattgggagggagggcagcaataaaaaatatgcagagaaaggtgccctaatttttatgtagaatctctgcacaaatctctgactgatcttgatcacacaaacacatggcagacacaaaatgatgtaactgatataagagaactgaactgaaatttcaattgcagcccaagagaaacaacttgctgtttttatctagtcaagataattatctgcttaaaaaataataaatcaatcagcattcttcagagagacataaaagaattcagaatctccacaacatacagtttaaaatgtccagkataagattcaaaagactaaacatattaacgaataagaacacatgacctattcttaataaaatgttaatcaattgaaatacatccaaagataacaaagatattagaaggaacagaaaagaattttaaacaagctacttataactatgtttaat

SEQ ID NO: 742337 - DNA, 535 bp, Homo sapiens
gggaatgtgaaaaggctttatactgtattattccaatgatatgacattctggaaaaaacaaatctatgaagacagtaaaaggattggtggttgtcagggattagaggaaaaggagagatgaataagccaagtgctgggagcaggccccccaaaatctggccccaaaaactggccataaacaaaatctctgcagcactgtaacatgttcataatggccctaacgcccaagctggaaggttgtgggtttatggaaatgagggcaaggaacaactgtcccacccagggtggaaaactgcttaaataaggcattcttaagccacaaacaatagcatgagcaatctgtgccttaaggacatgctcctsctgcagttaactagcccaacctattcctttaattcggcccatcccttcatttcccataagggatgcttttagttaatcaaatatctatagaaacaatgctaatgactggcttgctgttaataaatacgtgggcaaatctctgttcggggctctcagctctgaaggctgtgag

SEQ ID NO: 742338 - DNA, 617 bp, Homo sapiens
tgtggggatatgatcaagaaattttactttatgctttcatgtgaattaatataaccctacatctaaaccctcagaaaaattgatcagaacttgcctttattaagaaaacactaatcaacatgagtaatgaaggaacatatctcaaaatcataaaggccctatatgataaaatcacaactaacctcatactgaagtgaggaaaaattgaagactttcctctaaggactggaacaacccacggatgcccactttcacccctattattcaacataatactggaaatcctggccagagcaattaggcaagataataaaataaaggacattcaaattggaaaggaagaagtaaaaacatccttgttcacagatgacatgatcttacacctagraaacctaaagactccactaaaaaactgttataactgataaagtaattcagtaacattgcaagatacaaaaccaaaataaattctgagttaatgctggaagagttaagactttgggggactgttgggaaagcatgattggattttgcaatgcaagaaggacatgagatttgggaggggccagagacagaatgatatggtttggatctgtgtcctcacccagatatcatgt

SEQ ID NO: 742339 - DNA, 569 bp, Homo sapiens
taaacactagttaatattctttaccttatttaacattcaaactatagcatttgaccttcgttttcatgctgtgtaatattggtagttattaacagtcaccatttgatatgatagttttaaattacataagattgctaggcaaagggctctgattgcctttaatcaagaagtgaggagtattctctctgggcaaatgaggtacctttttaggactttaaagagggaaaatgaatcagactgcttttattgttttcttgttttgctttacttttaggtgttttyccccccttctttggcttatctgtttatcaatatataatgtccaataaaaggaaacatcaaatacaactgcattttatttaaaggaaaataccctctggacatgaaatcatttccagataaaggtcaaatactattatttctttgttcaaataagtattttctgttcatgctcagttcattctgtgcttttatctttctgtggaatgtgttctctattaccatctagtgaacacaggcttttatatgcattgtataattataaaagtgtgatactaagtttaataggc

SEQ ID NO: 742340 - DNA, 571 bp, Homo sapiens
gattaagccaactgaaattgtggaaatgatacttaccagaatgaccatgatcatgaaagaatgttttcattatttactactcatttcaaacaatttttgtgagtaccattctgattgattggctgcttccatacttcaggatggatgtacagtctttgttgttggtttttgttttgcataatccctaaaaagcatatattaaatggttttggttttatcytcttcttaatctcaccaatgtgttcagtactaaaatgtacattagaaggcatacattgttgagtaaaacaaataaaacaagagtaaggacttgtaatagtctgttcttgcgttgctataaagaaatacctgacactgggtaatttataaagaaaagaattttaattggcttgtagttccacagtctgtacaggaaacacggctggggaggcctcaggaaacttacaatcttggcataaagcaaaggggaagcaggcacatcttacatggccggagcagtaggcagagagaggggcgaggtgccacacatttttaaacaaccagatctcatgataacccattcactatcacc

SEQ ID NO: 742341 - DNA, 571 bp, Homo sapiens
gattaagccaactgaaattgtggaaatgatacttaccagaatgaccatgatcatgaaagaatgttttcattatttactactcatttcaaacaatttttgtgagtaccattctgattgattggctgcttccatacttcaggatggatgtacagtctttgttgttggtttttgttttgcataatccctaaaaagcatatattaaatggttttggttttatcctcttcttaatctcaccaatgtgttcagtactaaaatgtacattagaaggcatacattgttgagtaaaacaaataaaacaagagtaaggacttgtaatagtctgttcttgcgttgctataaagaaatacctgacactgggtaatttataaagaaaagaattttaattggcttgtagttccacagtctgtacaggaaacayggctggggaggcctcaggaaacttacaatcttggcataaagcaaaggggaagcaggcacatcttacatggccggagcagtaggcagagagaggggcgaggtgccacacatttttaaacaaccagatctcatgataacccattcactatcacc

SEQ ID NO: 742342 - DNA, 642 bp, Homo sapiens
aaacatctcaaactcagtgtactcaagactgaattcattatcttgccttctaacatcttcacatcacctactttacctcctataatctcatataatctcctctgtggtgaatatcaagcatccatccagacaccaagtgaaacattttgaagttatgccacaaattcttgttataagacttttacctactcttgcattagtcctctcccttctctaatgtgccttactgtccttgttgagattaccttgttcagaggagtacagtagcctgttttctttttttttctttyttttttttttttttttttttgagacagagttttgctctgttgcccaggctggagtgcagtggcacaatctctgctcactgcaacttccgcctcctggtttcaagagattctcctgcctcagcctcccgagtaactgggattacaggtgcccgctaccaggcctggctaatttttgtatttttagtagaaatagagtttcaccatgttggccaagctggtctcaaactcccaacctcaggtgattcacctgcctcagtctcccaaattgctgggattacaggcatgagccaccgtgcctggccctacaatagcctcttaattggtctccctgtgatattgtttggctgtgtcc

SEQ ID NO: 742343 - DNA, 541 bp, Homo sapiens
taatttaatgtagtagcattactagagcatttctatagctagatggtctcaggcaagacccaaattacatatcttagaaaatattttctcacttattaactaacaccttacattattgaagcttaaaaatactttatattcaagttgactttttatcaaagaagtaatttkttttcttttaaaaaaatgtaattatttaagatagtgtaatttctccatgtttagatttttcactttatttcctggttctcaaatattacctcaagtttcctttgtgtttaggcttttaacaccacaggaaaacaaattttaaaaatatattttttcattgatattttcaagaaaagaattattgttgctttgggaactttaacagagagttttctgactcctgtgtaattacaatctcagtcttaatgatacattagcatatttttgcatctaattttataaaaaaatgcaaaactctgtaataatgcagtcttgagtggcaaatttaaaaccatgaaagttaggtaattcctaaaaataagatgccttg

SEQ ID NO: 742344 - DNA, 628 bp, Homo sapiens
tttttgctgtatgcaatgtactagtacccaagcttggagcaaaatcacctgtcacgtactactctcctggcctgactcatattatatcctggaggaagacacaaatgctattacacccctggctcatgtaaaatccttctagccccacttccaaagagcacccttastttatctctaataaatgctctaggactctcactgcaaaggctactgcagaacttccttctccatgtcccaataagcacttttaattgatcttgattcccacttcactgaaacaatagaagccatctggtgtgaccacctcctctttacaaagctttgccacttttgttgccaaaaatacatgctttcctattctcatcttaatctttgaccatttcttctctttctcctttgtcttctggacattcctgaagacttagtcatatgtgcttctagtcttctagcttttctcaaatgttgtatgtagtaaatacatccgttcctgtagagttaacaatcacttttgtccacatgagttaaagtcagtatctttggtttgctctcttttacaagctccagtttttcatatccagctgccctctggacatttcaagattactctgtgttggttagaacatggtat

SEQ ID NO: 742345 - DNA, 628 bp, Homo sapiens
tttttgctgtatgcaatgtactagtacccaagcttggagcaaaatcacctgtcacgtactactctcctggcctgactcatattatatcctggaggaagacacaaatgctattacacccctggctcatgtaaaatccttctagccccacttccaaagagcacccttactttatctctaayaaatgctctaggactctcactgcaaaggctactgcagaacttccttctccatgtcccaataagcacttttaattgatcttgattcccacttcactgaaacaatagaagccatctggtgtgaccacctcctctttacaaagctttgccacttttgttgccaaaaatacatgctttcctattctcatcttaatctttgaccatttcttctctttctcctttgtcttctggacattcctgaagacttagtcatatgtgcttctagtcttctagcttttctcaaatgttgtatgtagtaaatacatccgttcctgtagagttaacaatcacttttgtccacatgagttaaagtcagtatctttggtttgctctcttttacaagctccagtttttcatatccagctgccctctggacatttcaagattactctgtgttggttagaacatggtat

SEQ ID NO: 742346 - DNA, 628 bp, Homo sapiens
tttttgctgtatgcaatgtactagtacccaagcttggagcaaaatcacctgtcacgtactactctcctggcctgactcatattatatcctggaggaagacacaaatgctattacacccctggctcatgtaaaatccttctagccccacttccaaagagcacccttactttatctctaataaatgctctaggactctcactgcaaaggctactgcagracttccttctccatgtcccaataagcacttttaattgatcttgattcccacttcactgaaacaatagaagccatctggtgtgaccacctcctctttacaaagctttgccacttttgttgccaaaaatacatgctttcctattctcatcttaatctttgaccatttcttctctttctcctttgtcttctggacattcctgaagacttagtcatatgtgcttctagtcttctagcttttctcaaatgttgtatgtagtaaatacatccgttcctgtagagttaacaatcacttttgtccacatgagttaaagtcagtatctttggtttgctctcttttacaagctccagtttttcatatccagctgccctctggacatttcaagattactctgtgttggttagaacatggtat

SEQ ID NO: 742347 - DNA, 597 bp, Homo sapiens
tatattttttaaacatatatttacaacattctgtgtgaggactaagctccaatttttttttaatcttgcccaaattcctatctaaaaggtctggggagtcatgccctacaaaccataaattcttgtcagacaggttttatttagccctatatattgtgactttctttccaccctgaatctggcataacattatgagacaagcaagaaaatcaaaatattttaccccaaaacwtgtttatttgccagatcttgaaatggccccgccaagctgtcctttgtgggaaaatgtgaatctgtaaagaagctctaattacatagttagatctttttcttccaggccctaccaatcctgaagagattcagtcagcatctagcatctttttaaaggtctgaattggaaacatttgtcatctattgtctctaaggtcggccactataagacatcaaaataaccttggtctccacagtcttttatcctaacctgaacatttattttctattgatcccagatctttagacaaactcaaccaattgtcaatcagaaaatgtttaaatttacctatagcctggaagcccccctttgcccccactctttga

SEQ ID NO: 742348 - DNA, 645 bp, Homo sapiens
taaaatcagaaatgaaaaagggcacattacaactgatactacagaaatacaaagtatcatagtagattactataaacaattatatgccaacatattggataacctagaagaaatcggtaactttctagaaaaatacaacctactaagactgaaacataaagaaacagaaaataaatttaccaataatgagtgaggagattgaattactaatctaaaacctcccaacagagaaaagcccaagacatgaaaactttaatgctgaattttaccaaatatttaaatagctaataccaatcctttaaaactcttccaaaaaactgagaactaaacactttttaactcattttatgaggcctgtattaccctgatacgaaagctagacaaggatastgcgagaaaagaaaactacaagttaatattcctgatgaaaatcgatgtaaaatttcttaacaaaagcatagcaaaacaaattaagagcacattaaaaggatcatacaccataaccaataaggatttatcccttgaatacaaggatgttttaacatatgtaaatcaataaatgtgattcaacactttaaaacaatgaaaggcaaaaatcatatgattatgtcaatatacacagaaaaaaataaaattcaacattct

SEQ ID NO: 742349 - DNA, 645 bp, Homo sapiens
taaaatcagaaatgaaaaagggcacattacaactgatactacagaaatacaaagtatcatagtagattactataaacaattatatgccaacatattggataacctagaagaaatcggtaactttctagaaaaatacaacctactaagactgaaacataaagaaacagaaaataaatttaccaataatgagtgaggagattgaattactaatctaaaacctcccaacagagaaaagcccaagacatgaaaactttaatgctgaattttaccaaatatttaaatagctaataccaatcctttaaaactcttccaaaaaactgagaactaaacactttttaactcattttatgaggcctgtattaccctgatacgaaagctagacaaggatactgcgagaaaagawaactacaagttaatattcctgatgaaaatcgatgtaaaatttcttaacaaaagcatagcaaaacaaattaagagcacattaaaaggatcatacaccataaccaataaggatttatcccttgaatacaaggatgttttaacatatgtaaatcaataaatgtgattcaacactttaaaacaatgaaaggcaaaaatcatatgattatgtcaatatacacagaaaaaaataaaattcaacattct

SEQ ID NO: 742350 - DNA, 618 bp, Homo sapiens
actaatattagcattcttcggttgattttgcctacagtaattcatactgtaatattctaatggtgattttctaattcctcactccttcttatatttattaattggaattatttataagaaacagttgtttttacacctccatttattttattatytgtttataaaaacagactaatagatatttattatattctttgggtattagtcatattttacctttattttgtttgtcgctcaaattgttccaactttggccattagaatctctttcagattggtccttgtgacctttcaacattcctgacccatccttttgttgttgttgttgttgttgagcatttctttttacattcatcaccacaagatgcatcaggtgcccattttctgtttttccttctccagccccagaatcaaccagtcagtcatttattggagaatatctttcaaaaccataatctatgccataaatgtgcttgctattgagactatcactacttctagcccctcttgatgcagaacaggtgagctccaaattggggcttagcctatgacgattcttggatttccaagaaatgattcagtggtgatctgttgttagggtagaagaacatctttatt

SEQ ID NO: 742351 - DNA, 502 bp, Homo sapiens
acgggttgcaatcctagcctctaataagaaatactttaaacccacaaagatcaaaagagacaaggggattacataaaggtaaagggatcaacacaacaagaagagctaactatcctaaataaatatgcacccaatacaggagcacccagattcataaagcaagttcttagagacctagaaaggcacttagactcgcaaacaatagtagcaggagactttaacaccccagtgtcaatattagacatatcaacaagacagaaaattaacaaggatattcaggacttgaactcagctctggaccaagcagacctaatagasaattacagaactttccaacccaaatcaacagaatatacattcttttcagcacctcatcacacatattctaaaactgaccacataattggaagtaaaacactcctcgcaaatgcgaaataacaaaaatcataacaaacagtctctcagaccacagtgcaatcaaattagaactcaggattaagaa

SEQ ID NO: 742352 - DNA, 528 bp, Homo sapiens
gattcacctgccttggcctcccaaagtgctgggattacaggtgtgagccactgcacctagcctaattttttttttttttatgtgtgttactggattcattttgctagtattttgtttgggatgttttgtgtctaggttcctcaggtatattgtcctatagtattcttttttgttgtgtccttgtatagttttggtgtcagggtagtgctggccttgtagaatgaattagcaataattcccttctcttctttgctttgaatgttttgaagakttagccttagttctttataaatttagtagaactcagcagtaaaaccatttggtccttggtttttatttattgggagactttttaattactgattcaatctcattacttcatattggtctgttcagttcaggttttatatttcttcctggttcgatctttgcaatttgtatatgttcaggaattaatctatttctactggatttttgtatttgttagctcatacttgttcataatagtctttgatgaactttttcatt

SEQ ID NO: 742353 - DNA, 599 bp, Homo sapiens
ataaaggaccacctgagattgggtaatttaagaagaaaagaggtttaattgactcacagttctgcatgctatacaggaagcatggcttggaggcctgaggaaacttacagtcatggcaaaagggtgaagggaaagcaagcatttccttcacatggcgacrgaagagcgagcgaactaatggggaaatgctacacacttttaaacaaccagatctcttgagaactcactatcatgagaatagcaagggggaaatccgcccccatgattcaatcacctcccaccaggtctctcccccagcactggggattacaattcaacatgagatttgggtgggacacagagccaaaccatatcaatgaactttttcttatggtcttgttattaaatcataaacagacttatttgtttctgtttgctttttttctctttgaattaattacttttttggatagatagtgtttctgtgtcctccttcccagtttccaattagtagctcttgtcacggttcccaccccaagaatcagccactattctgacttttttttccactgtaggttaattttgcctgttctggaacttagtataaatagaactataca

SEQ ID NO: 742354 - DNA, 623 bp, Homo sapiens
ccttgagagttactctgataatctagatggcagctaagtgactaatgagcaggtgatgtgtacagcatggatacactggacaaagggatgattcacatcccacagggcagtgtgaggtttcattacactactcagaatggtgtgcagtttaaaacttatgaattgttaggccaggcacagtggctcatgactataatcccagccctttgggaggccgaggtgggtggatcacttgaatccaggagttcgagaccagcttgggcaacatcgtawaacactgtctctaccaaataacataaacattagctgggcatggtggcatgtgcctgtagtcccagctactcaggaagctgaggtggcaggattgcttcaacccaggaggcggaggttgcagtgagccgagatcatgccactgcacttcagcctgggcaacagagtgagacccttcctcaaaaataaataaaaataataaaacttatgaattatttatttctggaatttttcatttaatattttcagactgcagtttactctggacaactgaaaccatggaaagcaaaaccatggctaagaagagaatactgtatttggtttcttagttcaagaatgttttttattattgg

SEQ ID NO: 742355 - DNA, 594 bp, Homo sapiens
gtgcagtaaggcaagaaaaagaaaaaaaataaattcagattgcaatgaaaaaaagtaaaactgtatttagagatgacataatcatctatgttaaaatccaatggattccataaaaaacctattgggactaataagtgagcttagcaaggttgcatgatacaagattaatatacaaatatctactgcatttctatatgttggcaatgaaagaagatattgaattcaaaaatatgatttacaatagcaccacaaaaatgaactagttaggaataaatttkacaaatgatgtgcaagatctgtaccctaataactataaaatatttctgagagaaattaaggaagacttaaacaaatggaaaaatatcctgtgttccttggccagatgacagttaagatatcagttttggctgggaatggtggctcatgcctgtaatcccagtaatttgtgaggctgaggcaggaggatcacttgagcccagaagttcgagaccagcctgggcaacacagtgagaccccatcactacaaaaaaccaaaaacttagctaggcgtggtggtgcatgcctgtagtcccagagacttgggaggttaaggag

SEQ ID NO: 742356 - DNA, 578 bp, Homo sapiens
agctattcataaatctgagattgcctatataaagaaatttgctttcaaacttctaaatttacaaatcacaaagttgatttcagatgtattactgaaatacatgcttttacagaattttcatttcatttgctgcctgttttaggaaagataacttttgtttatttgtgtttgcattttggaattgtatgtattatgctcgtgcatttatttttcccagattaagccccttatttctaaaatatagcagctttaaaatgtattaatgaaaaagatttgaatagtctcagaacattgttgtgtactattctatagtagaatcttgggtaggtaaattkaaaactttttggttttactacaaacctttgctgccttgcatgtatatattaactatttttacaaaaaaaattctggggtaattaaaactttttggtgaataatagttacggccagtagctagcgattttgtaggcactaccaacagggcacagccaaaactttaaaaatcatttttatgtgatccagtgtgaactaagggccatatgtttggtttttatttatactctgatgtctagaataaa

SEQ ID NO: 742357 - DNA, 562 bp, Homo sapiens
atgcaaagccgtgcattaggtaactgtcttagttctgttactacacatgataacttaagtaattctttcatcatgggatatcatggactaccagtgtttaaccctcttatgatcactgcagcctttctgtcttcaaacccaaccagatcagataccaatcacacatttccatttgccccaggagtacattrcctgaaatcatttctatacccaattactataatggtcattgtttaattacagaccactacagtacgctgtaactggctaaagcagaaaggaatttattaggtgaattggcctccagaatttctggggtgacgtgggtaccataccgtcagtatcgggctgtcaagagaaatgccttcaatcacgcagtgagatgatttcagcaaaaattctgctgcggctacagtttgtggttgaatacatctctttataggtgactagagttatagttaggtactttaatagctattgtattgatgtttgaagagaggaattacatggattatattctaaaactttatgtttattttgactgggacttaaaagtattttt

SEQ ID NO: 742358 - DNA, 610 bp, Homo sapiens
gagcttctttcatatattatagttactcctgttcctctctttacaataacaaccaaaataattagctcttaatgagcatctgctatgtgtgccaagcactgacaccatgagctttccacacattactcatgcgttcctcacacccaccctgcaaggtggtcaatctcactctcctaagagaggcgacaaagagtcagagtcagtcacagacagaggagaggttcgacacagtcagtgtgactccaaagaccacgtcctctctgcctcygacaacaccattctgcctatacacaagccatgatttatggcaataccatccttgtcaccaataaagagagagggggaaacagggcagttaacatgtgctgggaaaacccaaaagataattctttaagaaccaggagcatatctcttcccccacaaacgctctcttgattgggctagtcaggtggacaaaagaaaacatagaaaaatgggtggccacaggatggggcaagaatggagggagataatcacctgatagagaggccctggttgagatttctgcagagcttatttccagggcaaatcgtgaaggcaagctggctgtatgcagccaataacctttcaa

SEQ ID NO: 742359 - DNA, 610 bp, Homo sapiens
gagcttctttcatatattatagttactcctgttcctctctttacaataacaaccaaaataattagctcttaatgagcatctgctatgtgtgccaagcactgacaccatgagctttccacacattactcatgcgttcctcacacccaccctgcaaggtggtcaatctcactctcctaagagaggcgacaaagagtcagagtcagtcacagacagaggagaggttcgacacagtcagtgtgactccaaagaccacgtcctctctgcctccgacaacaccattctgcctatacacaagccatgatttayggcaataccatccttgtcaccaataaagagagagggggaaacagggcagttaacatgtgctgggaaaacccaaaagataattctttaagaaccaggagcatatctcttcccccacaaacgctctcttgattgggctagtcaggtggacaaaagaaaacatagaaaaatgggtggccacaggatggggcaagaatggagggagataatcacctgatagagaggccctggttgagatttctgcagagcttatttccagggcaaatcgtgaaggcaagctggctgtatgcagccaataacctttcaa

SEQ ID NO: 742360 - DNA, 576 bp, Homo sapiens
gttgattgccttttccctgtataaacatactttcttgtttctttgcatttgtttgccccaactgttatttaccacctcaggcagctgcaaaattaatcagtcatttctagttgttttttgaaagacttttcactgaacaagcttagaattaggtcaaataaagatagtcttgcaagtgagcttttccagggaatcactagactgggcatatgatgacagttttccagaaatgcagctttaaaggtgtttcaaacccattctgccccctccagtggctgccaggccactagttttcacgaagattgcaggctcttggtattcaagactactacagaactggagaagaggggattggaatggtacaagttaaaatgccatgaascttgctcttcttaccaagatttagcatttctcttgaataaatgcttcctgtattattgcaagtctttggttaattttcagagttctgaaaaagttggttctgacacttttggccagttttctggttattttgtagtggagggaattttcagatgttcttataccattacatttgctactgtctgcctgtggaat

SEQ ID NO: 742361 - DNA, 603 bp, Homo sapiens
ctacagaaaccatgagagggaaacaaatgattgctgttgttttaagccactaagttttgagtgggtttgttacacagcaataggaactgcaaccattgtttaaagaaagagggtaagtctagtaacagttacttcatcctggccaggagcagaagagggcactgattatgaaagagcaggatccaagaatttaaatggagacatttgggaggatttaaataacagaagttctccaaatctactaagtttcctgtaccagcagagtatatctgataagactagcgctactttgcttaaagacaccataatgactgtacccttccatccctcaytgccttcagacataaaaataaaccaacatgcaaaaagaacggctgattttgttaatttacaggggaaaaccttgggaccacatggtaaaagagattctaaccatgctagaccagagagaaaaaggatcataatttaaatcgggctgaattaagatattcatcagaaatttttgattcgcagtgctaactcaagcagctggggatggttctaaattatttgctcaactgcttgactaaaatctggactcaaatgtggccaaaactaaacaaa

SEQ ID NO: 742362 - DNA, 493 bp, Homo sapiens
gtttgttaggcctcctgtctctcagcaagtcacattgggtcaagagcaggagtcaatattgttgaacactgaagttatgatgcttcaagactttgtttggattagaatttgtacagcaaactaaaatgtaatctggatgctgcttggtctgccttctttacatgttggtggattatggaactggaaataatgggactgccataggactggggtcaagcagtcctcagaatgcaagtatgtgggcatgtcctcaccacctggagcagttatggaagtacgcctcctgtggcaatttgaatattggaagaactattagaagaagcattytcctggagctgtctggtagtgttcattacaccactccaaagcctcaagtttaaggaagcaaaattacttcctggccaccgcaactgcaaaagtgaggggacccagtgtttccgtatctgttacacccattgctggttcaaagctcacgttggttaagtctataaaa

SEQ ID NO: 742363 - DNA, 608 bp, Homo sapiens
catctgacaaaggattaatatccataatatataaggaactcaacccaatagcaaaagaaaaaaaaaaccctaatatttcagttaaaaaatgggcaaaagacctgactagatattcctcaaaaaaaaaaaaaaaacattcagatggtcaataagtatatgagaaaatgttcaacatcactaatcatcagggaartgcaaataaaaaatacagtgagataacacctcaccctgattagaatagctattatcaaatgctgcttgcggctgtggagaaagagtaactctaatacacagttggagggaatgtaaattagtatagccattatggaaaacagaatggagatttttcaaaaaattaaaaatagagctaccatatggtacaacaattctactacttgggtgtatctccaaaggaaataaaatcggtgtgttgaagagatatctactatctcattttattgcagcactattcacaataaccaagatatggaatcaacttaagtgttcatcaatggatgatggataaagaaaatattgtgcatatatacaatggaatattacttagctataaaaaatagaatgctgtaatttgtggcaacatggatgaa

SEQ ID NO: 742364 - DNA, 608 bp, Homo sapiens
catctgacaaaggattaatatccataatatataaggaactcaacccaatagcaaaagaaaaaaaaaaccctaatatttcagttaaaaaatgggcaaaagacctgactagatattcctcaaaaaaaaaaaaaaaacattcagatggtcaataagtatatgagaaaatgttcaacatcactaatcatcagggaagtgcaaataaaaaatacagtgagataacacytcaccctgattagaatagctattatcaaatgctgcttgcggctgtggagaaagagtaactctaatacacagttggagggaatgtaaattagtatagccattatggaaaacagaatggagatttttcaaaaaattaaaaatagagctaccatatggtacaacaattctactacttgggtgtatctccaaaggaaataaaatcggtgtgttgaagagatatctactatctcattttattgcagcactattcacaataaccaagatatggaatcaacttaagtgttcatcaatggatgatggataaagaaaatattgtgcatatatacaatggaatattacttagctataaaaaatagaatgctgtaatttgtggcaacatggatgaa

SEQ ID NO: 742365 - DNA, 642 bp, Homo sapiens
accttcaatttgtaaaaaacacaatatctgtgaagtgcaataaagtaaagcacaataaaatgaggtatgcctgcatttcacacctatttattaattgtaaggaacacatagataggcaaactctatctttttcaaagagtgtccattgattttctctgcttctgtatttaaaaaaaaacagttttgtactcatttgtaattcttttcctttgggtgtgtatgtgtgtgtgtgtgtgtgtgtgtgtgtgtgtatgtatatataattacttttcctgaactggtgataacatcttccttgttccctcatataaraaaagccataaagtttaatgtgtttagattttacatttgtatgacggttctgactttatcttcttctgaatattatgtttaacagtactatacaaacacttcaagattgctcatggaaaagtaagcatccctaaaatatagagggggatactgtcattatttcaactctctctctctctctctctatatatatatatatatacacacacacatatgtgtatatatgtgtatgtgtgtgtttatagtgtcactatttaatacacattaggttttggaaacaagattaaagatctatctattgatagacagatagatagatagatagctcat

SEQ ID NO: 742366 - DNA, 511 bp, Homo sapiens
gctatcttccagactttctcatcatccttctcccattgtggaaatacatcactgttcttagtcaatgataagaatatttcaagcacacgcaagttttcataccaatataaccaccatcgctgcaatggccgggaggtgacattgtctttgaagacatgtttttttcaacgagcaacataaactttcttcagctatgaaaaactctttaaactatattattgtattaacaaggcaaataaactccaaaatttcacataaacctagcctgatttggtttatgacaaaaaaaaaaaaaagatggtaatcacatttgagctgaacaagagctaggtagagctggaaaaraaacaaagtatatacgaacttttcatgtttgttattcaagcatctggacaaagagcatacttacacatattagaggaagctgaatctgaggcatgatttaactaagtttaagactaagtcttctgtaaatagaactggtgaatattttttaatatgttatttttat

SEQ ID NO: 742367 - DNA, 491 bp, Homo sapiens
agcttcaaaagtacaaggatgggacaggcatagaatatacattcccattccaaaagggagcaagaggaaacataaaaagagtaacaggtctagagtaagttcaaaaccttatggcttgagaataatcctcgacttgaggttctgccccccgagcccactgaggcagaagccaagcctcttctgcagcttttytagataggggatggccaccctagactccagatgaccctggccctacagttttggtggacacagcccacaccacattggttgtagttgggtgcttgcagtttgcacaaactgaaattgaaagctggtggtggctgtagcaaactaagattggaaagtaagaggaaaaggccccaccaccatggctccattaggcattgctctaacgggggcttcctccattgggcatgcctttgtaacaattctgtgtctgggtctcatacacaggatctggatggctccatccttcagattctatcttg

SEQ ID NO: 742368 - DNA, 643 bp, Homo sapiens
taaagaatgacctgagatggggtaatttataaagaaagaggtttaattggtgcacagttctgcatggctggggaggcctcaggaaacttacaattgtggcagaaggcgaaagagaagcaaggcataccttacatggtggcagaaggggcaggggggaggtgccaaacttttaaaccatcagatctcatgaaaactcactatcacaagaatagcatgggggaaaccgcccccatgatccaatcacctcccaccgggtccccccccctgaaatgtggggattacaatttgggattcgatttgggtggggacacagagccaaactttatcaaatgaatattcttcatctcagaatgcagcactgagagcaaacagacgagatgtcattggtctttgaaaagctactgtttttgaaagaaaagctagctcaagagactgtactgtgatttttaagaagagaacttactaatctattacttgatgccaagttrggggaaaaatcagttcatttcagaatatgaccttttacagtaaattcttcacataaattatgaaagatacatctcaaatatctcacacacatctaaagtgtgtgagaaagaggcactatcaattcactggtctgtcatctataatttcttagcat

SEQ ID NO: 742369 - DNA, 599 bp, Homo sapiens
tcattttttaaaagttcttgtggcaacagagactacaaatgctaaagcttctgcatgctgagttttgctcatatggttcagtttcccatgacatttgtaaattctcaaaacacagaagaaaagaaaagagtcaggtggtgtcctcaaacacttatagagcaccctatgtctctccaggcagcgccacagatacatagacagtagaggttcaatacatgcttttcctgtcactgaattcttcaggtagttccttataacctgctcttattaaggaggtctaaggaagccttgagatctctccagaaatagaaaagcatccaaaagctttgacaccagcctccaatatttctgatggctttaaaggacgtctttaggacaggcagggggmcttgataaggctttctagttataagtcatgcagacttccttgcagaagcctcagatggggggaataagttaaatacagctgcttcagcctggggtgctcgatattgtctttaatgattaaaaatgctgactccagtgggagcagagcacatgctgcagagattattatggtttgaagcattttctatgtgagtggcaaggggcagggtggg

SEQ ID NO: 742370 - DNA, 582 bp, Homo sapiens
gttaattcttattaatacttatttataattaataattcttattaatgcttatctgttaattaatgtttattaataaccaaatgagacgggtagaatttttttccccagtttatgtatggggaaaatgaaagattggttacttgtccagaattatagctaacaagctctttgtacccagacaggctgatgcgaaggttgggctcttaattgacccattaaactgctttgtatataatcaacttaatacagacatgggctggatgtggtggtttatgcctgtaatcccagcactttgggaggccaaggtgggtgcatcgcttgaactcaggaatctgagaccagcctggataacttctgagaccctgtctctacaaaaaataaaaattagccaggcatggtggcacacacctgtggtcccagctattygggagatggaggtaagaggattgcttaagcccaggaggtggaggctgcagtgagctatgactgtgccactgcactccagcttgggcaatagagcaaggccacctcaaaaaaaaaaaaaaaaaaaaaaagacatgatatatactaaaatttatccca

SEQ ID NO: 742371 - DNA, 514 bp, Homo sapiens
actctgtgaagcatacacaagtatcaatagccgaatcgataaagcagaagaaaggatatcagagattgaagatcaactgaatgaaataaagcatgaagacaagattagagaaaaaagaatgaaaaggaaggaacaaagcctccaagaaatatgagactatgtgaaaagaccaaacctatgtttgcttggtgtacctgaaagtgacrgggagaatggaaccaagttggaaaacactcttcaggatattacccaaacgaacttccccaaactagcaagacaggccaacattcaaattcaggaaatacagagaacaccataaagatactccttgagaagagcaaccccaagacacataatcatcagagtcaccaaagttgaaatgaaggaaaaaatgttaagggcagccagagagaaaggttgggttggccacaaagggatgcccatcagactcacagtggatctctctgcagaaaccctacaaaccagaagagaataggggccaatattcaacatt

SEQ ID NO: 742372 - DNA, 622 bp, Homo sapiens
ctcgcactgctataaagatatatctgagactgggtaatttataaagaaaagaggtttaattggcttacagttctgcaggctgtacaggcttctgcttctggggagggctcagaaaacttacaataatgacagaagatgaagggaaagcagaagcaggcacatcttcctatggccaataggagggagaaagagcgaagtgggaggtgctatacactttctttttttctttttctttttcctttttttttwaaattttgagatggaatctcattctgtcacccaggctggattgcagtggtgtgatctcagctcactgcaacctctgcctcccgggttcaagcaattcttgtgcctcagccttccaagtagctggaattacaaatgcatgccaccatggctggctaattatttttgtatttttagtagagacggggtttcaccatattggacaggctggtcttgtactccggacctctggtgatctgcctgtcttggcctcccaaagtgctgggattacaggcttgagccactgtgctcagcctacactttctaacaaccagatcttgtgagaactctgtcacgagacagcactagggggattatcaggggaacctgcccccaa

SEQ ID NO: 742373 - DNA, 622 bp, Homo sapiens
ctcgcactgctataaagatatatctgagactgggtaatttataaagaaaagaggtttaattggcttacagttctgcaggctgtacaggcttctgcttctggggagggctcagaaaacttacaataatgacagaagatgaagggaaagcagaagcaggcacatcttcctatggccaataggagggagaaagagcgaagtgggaggtgctatacactttctttttttctttttctttttccttttttttttaaattttgagatggaatctcattctgtcacccaggctggattgcagtggtgtgatctcagctcactgcaacctctgcctcccgggttcaagcaattcttgtgcctcagccttccaagtagctggaattacaaatgcatgccaccatggctggctaattatttttgtatttttagtagagacggggtttcaccatattggacaggctggtcttgtactccggacytctggtgatctgcctgtcttggcctcccaaagtgctgggattacaggcttgagccactgtgctcagcctacactttctaacaaccagatcttgtgagaactctgtcacgagacagcactagggggattatcaggggaacctgcccccaa

SEQ ID NO: 742374 - DNA, 559 bp, Homo sapiens
tagtgcttagcatgtggtaaatgatgatcagtaaatgatgagaaatggagactggaatctattctattctcatgcagtgtctttgttgagagaccaaattgtagataaagagtaatgaatttttaagtgtgtattaggttggcaatttgtccactcccagcttattcaataaaatcattcaaaactatgtacctttttttttttttttaaatagaaacttaaggaaactgggcacagtctccttcatatcaaatctcatgttcacagtgcttgttttacaagccatagttgtagagctaattggacaattaacttggggggagcatacttcctaaccttagaattaacaacagtggmaaacacattagaaaactccaagggtgagtacagttgcaaaataggcccttgatggttatttcagaaactctgcactgagcacacatagtgacttggaagcacttgtatagctttctgttgcttgaatagtccactcagatttcagaccctgctaggaatcatcaaccagctctgggtaaaggactgaatcagaatggctggt

SEQ ID NO: 742375 - DNA, 415 bp, Homo sapiens
cttcagaatgtgaacaggatttcagttgggccgtgaggaggagaccctactacctagggaacagatgatctcagccagggcacactgaaggaagagctgggaaggccagtgtggctggggctcgggtggcaggaggtgcgtgcttcaagattgagaaagatcataaagccggctgagaattttggactccattctaaagggagtcagaagcctgtttcacatgccccacaataccctgaacttctctgtagaacttaccacacwtgcccttgttctctctctttcccactggattttaagccccatgagggcagggaccatgtcttcttgttcatcagttattcccaggacttggctcagtgccccatgagtgtcagttgggtggtcagacaaactaatcctctgtacagtccgg

SEQ ID NO: 742376 - DNA, 646 bp, Homo sapiens
ttttgtagttttagtagaggtggagtttcaccattttagccaggctaatctcaaattcctgaactcaaatgatctgcctgcctggtctcagcctcccaaagtgctgggattatagacatgagccactgtagccggccagaagttgaaatcttgatgttgggaagttcatcagtcgaatatcaaaagtttaaaacatttgatgccacaaaataggatcacggttcattataaaatagttattcatttagccaaaacgataattcaaagatttccaaaaaaacaaaaaaccaaaacaccaaagacctttactcattgatatgaaggagactcagtttccccaactgtaagatccaatgaagacagcaggaaaccaactaaatgtctgtytctctcctttttttttcctgtagtttacttaaaaggtaaacaaaaatctttgatctcttattaatgttttaggggtattattaatgttaaagctaataaaaccttataaacaaatctaattttaatcagtttgaccacgaagtaagatttccatacgccttgtataaccttttacaatcttctattaaagagtagatcagtggtccaggaaaattgttattccgacacaggggccagacgcttgcctggcctcagtgtg

SEQ ID NO: 742377 - DNA, 624 bp, Homo sapiens
tccccttcacttgaatcctaatgtaaccatgattgaacaatctggaccatgtgaaaactctgcatttatttctgtataatcacccatgtaactatactggtcttctatattataccaaaatgagaagaacaagtcttgttaaaagatataattcagtacagaatctaaaaccaccacagagtgatgcctgtcagtttgacaaagcatttaagcccttactgggtttaatggcaggcaatggcaaatctcttaaggtttgtagcagtggctgtcaaggtgcacatgtttttgcaygtaaaggtcattttatttctaccttaactattatataataattaacattttgtcacttcctttatttgacattttgcatatactttacatacattaattcatttaacctttacaaaaatctgtgagctaaggactattatctccattgacaactcaggaatctaatggcaatgagctcaaggcaacagaggtattgatgaccaacccaggtctacaggcttccaaagcctattcttaaccattaagctattctatcatcccagtaggtcttttctccccagtgcaaactgtcccaacaaatgtaattaaaaagaaaaatatctggtcatt

SEQ ID NO: 742378 - DNA, 599 bp, Homo sapiens
tgtcacataattatactgaaattttaagaaagcagtgggatccccaaacataccagtttttcctgaaaacagtatattcacagcacccaatccaagagagatcaggccacccaagtcagtgtaacaaggaagtcccctgtgcttttacccttacaagaaaagaaacctgaaataacctaatgtgcacaatagcattttttttctattatcctgtgttgttgtttttaccttacaaatcccactgttctgtcaattgcccagtgggagctttcatctatttgatagaataaaggctgcccaatccatgaatcatgaataaaagccaactagatctttaacaaaatttattctaattttgtctttcaacagattgcagccttaggctagcactataatccatcttttcaggaggrgagtttgaataagagtattattcagtgacatgttttaatgcaactttcacctataagaaaagagtctcgttgtattggcttgcttaacatttgagttttgaggattactgtacctacttaaacaactctctaattaccacttccattgtcataagctgtgtttctctgtattattcataatcttat

SEQ ID NO: 742379 - DNA, 616 bp, Homo sapiens
tctgcacatggttggatcatgtttctttgttcagccagtctctatctttgaagtgaggaatttaatcaagttacattcaaggctattatttctatgtgatcttttttactatcatattacttttatttgatttttgtttttaatattatttgttcctttcattttctcttattgtttgtcatagtgatttggtggtatactgtagtggtagcatttgaggccattctctttctcattgtgtgtttggtttaccactgaattttatacttttgtgtatgttcttgattataaatgtcatccttttgcttctaagcttaggactctctcragcatttcttgtaggacaggtccagtcgtgataaattccttcagcagttgctcatttggaaagactttatttcttgttcatttatgaaagataatttttaaaaatatatccttgggtgacatttttttttcagcactttgaatgtgtcatttcattctctcctttcctgcaaggtttctgctgagaaattttctgtcagtctgatgagagttcttttataggtgactagatgcttttttcttgctgcttttagtttcttgtcttttactttgtcttagtaaaagacaa

SEQ ID NO: 742380 - DNA, 591 bp, Homo sapiens
tttgtcacatgtaaataatttcaattcctcaagaaattacattcattctgcctcacagttaacatcaaggttgaaaacgtaactttattttctttctacccattaatcaaggttcaaactgctcccattttcatactaatggaaagctgactaaataagaaagaaaatcattcatttcaatatatcagttagctaataaaatacttttctaaatgggtgtttgcctggtaaaatattgtaaagatctcattttatattttaattcctcctgcataaaccatttctaaaagatgatttttagttacataaaaccttttatgttttcttttaattgataaacatttaataatgattattctttatcaacattcagaagagactattgagtggtttcacaccaggcatacttatacacacacacacacacayacacacacacacacacacacacacacacattctttgcattcgttgggcaccatatataacagttttattaggtaattaaatctttattttgtaagccctaaactcaaaataagtaaagtttaaaaataaatcatgttgatttaaatcacacttggaaatatt

SEQ ID NO: 742381 - DNA, 573 bp, Homo sapiens
aaagtaacccagtagtatatgctgtggaatttagaactgtaataactcattcctttacatatacccaatcctatgccatccatacataccatattttaccaagaaatttaaatcacggattatttaaatcacattcctttttttttttgagacggagtcttgctgtcgcccaggctggagtgcagtggcgtgatctcggctcactgcaagctccrcctcctaggttcacaccattctcctgcctcagcctcccgaatagctgggactacaggtgcccgccaccacacccggctaattttttttattattttttagtagagacggggtttcaccatgttagccaggatggtctcgatctcctgaccttgtgatccacccgcctcggcctctcaaagtgctgggattacaggcgtgagccaccgcgcccggcctaaatcacattcctttacatgtttgaaagtagtttataaataactttagggtattctacatggaacctgtattttcttccacatctgttaaaagttaaaaaacaaaaacaaacatgtatggagccatcgcacagaaaatctg

SEQ ID NO: 742382 - DNA, 531 bp, Homo sapiens
ttatgcaaaatagaccccacaggattgagaggggactaaagaagagagtctgttgggagcaggtctgaaaaacacagctgaacacacaccacaggtccaccatcgaccttgtgatcattacagggatggaacaagtcatcaagccaacaggtccccgggttattaaaatctaragaaagttggctgggcatagtggctcatgcctgtaatcccagcactttgggaggatcgctagagtccaggagttcaagaccagcctaagcaatatagcaagaccccatctgtataaaagtttaaaaaataaaattttctaaaaatctagagaaaggaagggaggttacagaaatcaccaaagagcataaggtccaagcctattctgatttcatcaattagcttcctaaagtctgcagtgtgcaggtaaaagattaagaacccaatccttattgaaggttgggcaaacaacaaccaaaaaaaggcaaaaaaataataataacctaatcttttctggctatttctctagctagctaagca

SEQ ID NO: 742383 - DNA, 634 bp, Homo sapiens
ttttcaatacacaaacccaagagttaattaggagattaaaaatggtggcattccaatttgatcagttcttcatttattaactgaatacttccataaagaggaattgttgtcacatatatttaagttatccaaaatccatgattctttccctttatttatgaatttccaaaattggtttttcttcgtttagtattataataaatatatggttctatgcatatttgatgtttcaaatctgtaaggattattatccttactgatattaaaattataccctctgtttcttgtgagagcttctataagttggctccaaagttcttttaccaaacctgtcatcctgaatgtttgctgcttctgctcagttatttccctaagaggtcccrattcctttttaatgtggaattttacaagatcatattctataagtgaggatgatcattgttattaggtcgttatttgtaggacttttcaatgcagagacctaggaaatttttttgagataagatatgccagtacttcatatttatttatttgtcagttaaaaaaaaaaacctcagctcttcatctccttctccatcatgatagctgtcaacacacaatgtttgaactgttaaagtagcatcttaaatggtct

SEQ ID NO: 742384 - DNA, 591 bp, Homo sapiens
cacatagatttttaatgattgcacactattattactgtgattacttttatttggtttggctctgtgggagatatgatgatgctgatggaggttttgacagagctaaagacatgtcacatcttgacaatggctggaggaaggacttcatagtcaatcaaggtataaatactagcaatctgttttcaccctactccaaagcacttcttaaatcacattagaactcaaaaatgtaatgagaaccacgtcactgttttgcaatctctaaatgccaaattaaaatatgaatcaaggattgtgtagtcaagtcaatgggaactctgacttgagtaacattttcccttgaggcagtgtacagattacaaaaggtattagcacagaaaatttagctttgggtgggacttgcaattaagtcaaattaatgaatctgarcggagtgttttttttttattttcaagacatgccattaagcagtgaaacaccaaaaagataaagccaaaacttggaaataacccacgtgtttttcagtgagtgaatagttaaacaaactgtggtgcatgcataccgtgcaatgctattcagcaataaggagga

SEQ ID NO: 742385 - DNA, 470 bp, Homo sapiens
ttggttagaatttcttttctttaaggatgttgaatacaagcccctaatctcttctggcttgtagggtttctgctgaaaggtccacagttagcctgatgaggttccctttgttggtgaactgccccttctctctagctgcctttaatattttttctttcatayagaccttggagaatctgatgactatgtgtcttggggatggttgtcttatatactatcttgcaggggttctctgaatttcccaaatttaaatgttgacctctctagtgaggttggggaaattttcatagacaatatcatcaaatatgttttccaagttacttcctctcttcctctctttcaggaatgccagagagctgtaggtttggtgtctttacataatcctatattttcagcagattttgttcattttttaaattcttttttctttatttttgtctgactgggttcactgaaataaccagtcttca

SEQ ID NO: 742386 - DNA, 632 bp, Homo sapiens
aataaaaatttatttattcatcatgtttctaaaagtagtgtgtgtcatggtattaatttactcttaatgcatcaaagactgcattctgattatcttagcttgtaacaaaaattaactttgaaaaccatcaagtaatcatgatagtattccttaatatgcaaatgtatacaaattctgtgtcattcacatgatgttagattcacctaaaggcaagatctctttatcatgatttctcaattatttaggggataaagaggtaacattttgcatgactttcacaaaccacagaaatttgaaaatatgaaaattatagaataattcacagcagtttttaaaatgtattcacaacactaaattgattacattagaaaatagataatttaactcctacataaattattcaactgagtatgaaatcacaatatttctgaagtaaagacatagcaggcataatgctgatcatgttyattgttctttacaaaacatggaattttcttatgctaagatagttttaaaatatttcagtttatctgtgtattttcagaataaattctttacatgaaagagatgtagaaaaacaggaaatagataaaactaatgaaacattcaaaaaagagggggttaaaaaccct

SEQ ID NO: 742387 - DNA, 545 bp, Homo sapiens
tcatgggaagtaattgaatcatgggggtagttactctcatgctgttcttgtgatagtgagttctcatgagatctgatggttttgaaaggagcttttactgtttgctcagtacttctcctttctgccaccatacgaagaaggactgtttgctccagcttctgctataattgtattttctgaggccacctagccctagagaactatgagtcaattaaacctctttyctttataaattacccagtctcgagaatttcttcataccaaatgtggcacatatacaccatggaataatatgcagccataaaaaatggtgagttcatgtcatttatagggacatggatgaagctggaaaccatcattctcagcaaactatcgcaaggacagaaaaccaaacaccgcatgttctcactcataggtgggaattgaacaatgagaacacatggacccaggaaggggaacatcacacaccggggactgttgtggggtgggggaaaggggagggatagcattaggagatatacttaatgctaaatgacgagttaatg

SEQ ID NO: 742388 - DNA, 635 bp, Homo sapiens
tattcaaagataaaatgtagaagtacaaattttctcatgaggtaaattgatggccgaattgtggcttaatttccagagactgaaaattgaattggactctatttcattttactccatatatctatatctttgtgggtatatttatattcttgtgctattaaacttgctaagtatattccttgtgtaataggcaaaatattttttttggccagtgaacaaaactattagctcatagtttagtatttaatacctacataggaaatcctaattcataactcaagatttggtgtttttttcaaaactacctataattcttaggttttacagaaattctgtaatgcaggctgcaaaacaactatttaaaagtgagcgaaacgcctgtctactattagtataaaatggccctgwctctgtggaatgatagaggatccctgggtatgcttagatttgtaatgaacagctttaagaaaattctctagtggctgccttgatttttctaaatgtcatgttcctggggttagcactttcctatgttaagaacatgcctacaaagtgaaatatatgtggtgcacagtagagattggagtacaatctgcattctatatgtgcaaatacttacatggatttaaatgtga

SEQ ID NO: 742389 - DNA, 601 bp, Homo sapiens
actgcctgagttcattccaccttctcctttgacacaattctttccttgtctggtgaagttagtgtggccccagaaatgttaggtatctaggaggaatttgggttggtcaaacctttatttgaaatataatgggttgtattgtgtgatggcagtctcttctaactataaaacatgcaaaatggttagcagacaattctgttcccattgatgcgaagtgaatatagaaatttctccctgccaggaataaacttaacatagcataaataatttaaacaaccgcaggacatttttcccccatgggaatatagagaaaaagatctatcagaattcctgtctttgtaagacacaaacctgtagaagtacyataaacagcaagtaagtgtgtgtgaagttgcatgttttatgcattccagtgtttcagatcgtatctttttatccaacagctcttctcttgctgaactcttgatctttcagataaaatactaactagatcatacttaaaacagtaaaatcctgaagaagaaagataaatttcttatagaagtaacaaatagacttctggattgtttgataatccagtaaatgaagaggaattcattat

SEQ ID NO: 742390 - DNA, 622 bp, Homo sapiens
taaaaaaaataaaaactggaccccttcctcacacgttataaatgaactcaagatgtagttttacactgttagtgggaatgttgattagttctacctttgtggaaaactgtgtggtgattcctcaacgatctggaagcagaaatgccattcaacccagcaatcccattactggatatatacccaaagtaatatgaattattctgttacaaagatacatgcatgtgtatggtcattacaacactattcacaatagcaaagacattgaagcaaccacaatgcccatcaatgatagactggataaacaaaatgtggtatgtatacatgatggaatacagtgcagccataaaaaggaatgagatcatgtcctttacaggaacatggatggaactggaagccatyatcctcagcaaataaatgcaggaacagaaaaccaaacaccacatgttctcatttataagtgggagctgaataatgagaacacatggacacagggaggggaacaacatacactggggcctatcgggggtgaggtggggtgagcaaaagcattaggtaaaatagctaatgcatgctgggcttaatgcctaagtgatgggttgataggtgcagcaaaccaccatgg

SEQ ID NO: 742391 - DNA, 620 bp, Homo sapiens
atttcattaattcaacaagtatttattgagggcctagtctgtgccaggcactagagaggcaacagagagcaaaacaagcatgttctttctatggatgtgtttggaagagaaatagcaatcttgcaatagctccaatacatgcaaaaattggtaactactacacatttttttggcatcccgtgcacatatcaattcatttttatggtgactcacacrtacatactatgtccttgaattggataatagtggctctgttgtgcttactgctgtaattctttaatcaatcacccagaatacaagagacattctggggacttagaaagtaaacctaagtaattccagtggcaaaaccttgactcaggttagtcgtcaaactaaatctactcttccttcaattacacggatcattgctttaactctttacctggctttagtggcaagaaccttacatcttagaataagataacatcagatgtgatcatttcttaaagatgaatataaaatatatttctcatataccataatatctgctttaactttccaaagcaaaaataaaataaaatagcaaaggaaaaataaacattaaaaaaatcaagatatattacaacaatcaatattgg

SEQ ID NO: 742392 - DNA, 480 bp, Homo sapiens
atttaattttaatcgaggtgatctagaacagtgctaacccatatgatggccactagacatttattggtattgagtacgtgaagtttgtctaatgcaactgatgcaaatgtctttacattttattttaaatagtttaaatttgtattggatagtttaacyagttattaaaaactttaaaaaatatttagaaaaacttgttcatgtaaatctatttttttgagctgtagattttataaaatctaaatatagattaaatactttgtacaaaaatttagcatccaaatgaaatgtgttataacaataaatagtgaattttgaagacttatacaaaaatgagctccaaatatctcaataattcagcattgattaaaagcgaagttatgatattttgggtatagctggcttcaacaacgtatcaataaatttatttttaacctatttcttttgcttttcagaagtgactattgaaaaatttaaaat

SEQ ID NO: 742393 - DNA, 550 bp, Homo sapiens
atgatgttgtggtacatttcttgtatacccaattcgtcaagcatttttatcatgaaaaggtgtaaaatgttgttgaatgctttttctacatctgtggatgactgtgtagtttttatccttcatgttgttaaaatgatgtagcacatttattgattgtcttttgaacaatccttgctccttgggataaatcacacttgattacggtgtataatctctttaatgtatttccatgaattttgtaaatcaaactacaattaagctttcatctctaccagtacaacaaaacagtctttgccaactcagcaatgatcttcactttgatataccacgtttcattcttmgtcttttattacttctgtcaatagaatttgatacagttgcccacttcctcattcttcaaacacttttgcacattttccttggttcatttcctatatcattagttgctgtttttctgtcttctttgctgttctcttctaacttgtttactttacagtacccaaggttcaacctatgaaccccttctcttttctagtgtcactcactgttt

SEQ ID NO: 742394 - DNA, 560 bp, Homo sapiens
acagggctgaaacacccctccccaccaccaagcaccactacttgctctgttgtaggcaacgagaaggagagaagtgctgcagccctttgaggagccaagacctaggggctccccaagctagtgrtgtgacaccctgtttgggtctctgcagttcctggcatctccaagcttctgggaaccactgcattttcctccacatgggtgcctgcagcagaagccatgtgcaatacatcttgtccagccacagcctcacatggagccggcacctatgccagcgcttggagctgtccatctactgtagcaggcagcatgcttggctgtgcacactggccagatcctgcactcacttgctcacacaccccttaccgctccacacgtaactggcccttggtagatgtggaatccgggctggtagcgtgagctaagcacagcctgtcacgctaaatgagtggaaggaccccggtgggcgcaagcgatactcaggcagaaggtgctgtggacagcagggctttcagctggtgaagtgacaccccaaggatcctgtgacacaaatatatctg

SEQ ID NO: 742395 - DNA, 524 bp, Homo sapiens
aaagatagtcttattcagacaaacaaatgctgagagaatttgccattacctagccaccactacgggaactactaaaaggagctctaaatcttgaaacaaatcctggaaacacatcaaaacagaatctctttaatgtgtaaatcacacagaacctataaaatgaaaatacaagttaagcaaaaacaaaaaacaaaaacaaagtagcaggcaacaaataacacaatgaattaaacggtacctcacatctcaatactaacattgaatgtaaatggcctaaatactccacttaactgcagaatggctaagaattcaccaatcgacaatccattgccttcgggagactgacctaacacataaggactcacawaaacttaaagtaaagggatggatttcatgcaaatgtatgtcaaaagcaagcaggggtagctattatatcagacaaaacagactttaaagcaacggcagttaaaaaagacaaaaagggacattatataacggtaaaaggcattgtccaacaggaaaat

SEQ ID NO: 742396 - DNA, 626 bp, Homo sapiens
aagaatttacaaaaagaaaaagattaacccagcaaagaccaagaaggccaagataaatggagaagcaagacatgtttaatctaggaaagtaatgtttttcaaaaaggatttatttaatttctaacatcctattacccctatcacagtttggtcagagatggaatttattctgtgrtggtggaataagaatcaggtttagaggaagttacttttctgtcaaatggcttatagtcacccaggttatacatacaataacaccatatgctcaaatgtgaaaattttatcaagctatgtattaggtgatctttgtataaattcaattatttgggttcacagggatactcctaaaacaagcaagtataaaagcttattgaggtacattaaagttaataaaacctagagtttctcagcctcatatattgtataaattttttaaaatatctctagaaatcatgttttccaatgagacattttaagaagtccaaataaaatatgttacaactattcattaattcataagaactgtaagcatgtttatatataaactattgtttagctgtaattacatggtttctaaaattttatactatcttactttccttactccactgcattacttagcagta

SEQ ID NO: 742397 - DNA, 624 bp, Homo sapiens
ctgggagtactttcaggttggtttctgtgtcactttgacatttcccaacctgttttgtaagcactatattactttttggtagtataaggtgctctagggtcatcttatattttccctgttctggccctacaatcagccatttctctgaaaatatctggtttcttttattggagaatagtatttgagcactggctgctgttcatatttgtcatttttttccccactgtgtgattcacattggrtcctttgtttccctctatcttcatgtattctgactcttctgacctttctgtttcactgttaaacctgtttacctctcagagatctggtcagactatatagggaattttctcaatccagacttccaactagtttactttttatgtttttttcttctctactgagactctatgtttgttcattcatttaaaatatatttttctttttttaatttccttgaacatagttatggctgctttaaaatttttgtttactacaaccaatatttgcatcatcttgaggtttgtctcgtgttggaggctgaaggactgagggtcgtgatcaactcagtataccactggaggctacatgagtaagcagcaagctgtttctcataaatgcaga

SEQ ID NO: 742398 - DNA, 624 bp, Homo sapiens
ctgggagtactttcaggttggtttctgtgtcactttgacatttcccaacctgttttgtaagcactatattactttttggtagtataaggtgctctagggtcatcttatattttccctgttctggccctacaatcagccatttctctgaaaatatctggtttcttttattggagaatagtatttgagcactggctgctgttcatatttgtcatttttttccccactgtgtgattcacattgggtcctttgtttccctctatcttcatgtattctgactcttctgacctttctgtttcactgttaaacctgtttacctctcagagatctggtcagactatatagggaattttctcaatccagacttccaactagtttaytttttatgtttttttcttctctactgagactctatgtttgttcattcatttaaaatatatttttctttttttaatttccttgaacatagttatggctgctttaaaatttttgtttactacaaccaatatttgcatcatcttgaggtttgtctcgtgttggaggctgaaggactgagggtcgtgatcaactcagtataccactggaggctacatgagtaagcagcaagctgtttctcataaatgcaga

SEQ ID NO: 742399 - DNA, 635 bp, Homo sapiens
gtgccattttattattttcctatattcttattattctctcttttcttatcttcctataggttgagtattttttagaagtccgttgtgatttatttctaacgtttttctgtatctcattttggatagttttcttagtggttatatgggtatcacaatgtacatatatgatactttgaagtgtagaaaccttacttccatttaggttcctttccttttctacttctaaaatgtaattgttttacatatttcttctacattcactgagtagcacataaagttacaatttttgcatcaaccatcacatatgaacctcaayagaagtttgattgtgtattatatttgcccctatttttctgcgctccaacattcttttctttctaaagtccgggtttttattctattatttctgtttagaatattttatgcagctcttccccaataggacaggtttgctaacatcttttcctacctttctgtcatttaggaacatcttgattttcctttcatttttgaaggatgtttttaccagatgcaaaatttgctgtacacagttcttttcttttggtgattgaaaaatttgctacttcctcccagcctccatagtttcgaatgactgctgtcattttcacctgccc

SEQ ID NO: 742400 - DNA, 606 bp, Homo sapiens
atttatttgcatttatcctatttgaggttcactcagcttcccgaatttataggtttaggctttttaccaaatcggagatgctgtcaaacattacttcttcaaacattttcagcccaaccttctttctcatctccttatgaattctgatgataccaatgttacctctcagtcttgtcccacaggtccctttgggtccattgttgttgtgtccaatctattttttcttagttgttcagattggctacattcttgacctgtcctcaagttcatggattcggtcctctgtgtcatctctattctactaytgagcccatctaatgagtattttattttggttattctatttttcagttctctgctttccattggctcttttatttctgtgctaagattttctatttttttttttcatttatttcaagagaattcaaaattacttaccgaagcacttttatgactagctgctttaaaatattttccagattattccaacatcacattcatctctgatttagcatctgataattggcttttctcattcaagttgtgattctgctggttctaagtatgataaatggtcttcaggtatatcccacatattttggg

SEQ ID NO: 742401 - DNA, 606 bp, Homo sapiens
atttatttgcatttatcctatttgaggttcactcagcttcccgaatttataggtttaggctttttaccaaatcggagatgctgtcaaacattacttcttcaaacattttcagcccaaccttctttctcatctccttatgaattctgatgataccaatgttacctctcagtcttgtcccacaggtccctttgggtccattgttgttgtgtccaatctattttttcttagttgttcagattggctacattcttgacctgtcctcaagttcatggattcggtcctctgtgtcatctctattctactattgagcccatctaatgagtmttttattttggttattctatttttcagttctctgctttccattggctcttttatttctgtgctaagattttctatttttttttttcatttatttcaagagaattcaaaattacttaccgaagcacttttatgactagctgctttaaaatattttccagattattccaacatcacattcatctctgatttagcatctgataattggcttttctcattcaagttgtgattctgctggttctaagtatgataaatggtcttcaggtatatcccacatattttggg

SEQ ID NO: 742402 - DNA, 561 bp, Homo sapiens
gggtgaaaccccgtctctactaacaatataaaaaattagctgggcgtggtggcaggcgcctgtagtcccagctacttgggaagctgaggcaggagaatggtgtgaacctgggaggtggagcttgcactgagctgagactgcgccactgcactccagcctgggcgacagagcaagactccgtctcaaaaaaaaaaaaaaaaaaaaagtactagaagaggccaggtgtggtacgtgtaattccagcactttsggaggacaaggcaggagtataacttgagcccaggagtttgagaccagtctgggcaacatagtgagaccccgtctccacaaaaaaatacaaaatttagccaggtggcaacatagtgagaccccgtctccacaaaaaaatacaaaatttagccaggtgtgatggcatgcacctgtagtcccagctacttgggaggctgaggtggaagaatcgcttgagcctgggagtttgtggctgcagtcagccgtgatagtgccacaaaaaaagaaactcaatagagcaaacagacaacctacagaatgggagaaaatatt

SEQ ID NO: 742403 - DNA, 561 bp, Homo sapiens
gggtgaaaccccgtctctactaacaatataaaaaattagctgggcgtggtggcaggcgcctgtagtcccagctacttgggaagctgaggcaggagaatggtgtgaacctgggaggtggagcttgcactgagctgagactgcgccactgcactccagcctgggcgacagagcaagactccgtctcaaaaaaaaaaaaaaaaaaaaagtactagaagaggccaggtgtggtacgtgtaattccagcactttcggaggrcaaggcaggagtataacttgagcccaggagtttgagaccagtctgggcaacatagtgagaccccgtctccacaaaaaaatacaaaatttagccaggtggcaacatagtgagaccccgtctccacaaaaaaatacaaaatttagccaggtgtgatggcatgcacctgtagtcccagctacttgggaggctgaggtggaagaatcgcttgagcctgggagtttgtggctgcagtcagccgtgatagtgccacaaaaaaagaaactcaatagagcaaacagacaacctacagaatgggagaaaatatt

SEQ ID NO: 742404 - DNA, 607 bp, Homo sapiens
cgtgtggtcccagctacctgtgagtctgaggcaggagaatcgcttgaacccaggaggcaaaggttgcagtgagccaagatcgtgccactgcactctagcctgggtaagggagtgagactctgtcttgggtggcggggggtggggaggctgggcaccgtagcttacgcctataatcccagcactttgggaggctgaggtggacagatcataagatcaggaaatcgagaccatcctggcaaacacagtgaaaccccatctctactgaaaatacaaaaaattagccgggtatggtggcacgtgcctgtaatcccagctacttgggaggctgaggcaggagaatcgtttgaamccgggaagcagagattgcagtgagcagagatcacaccactgcgctccagcctgggcaacagagtgagactctgtctcaaaaaaagaaaaagaaaaagaaaaatcccagctctcccctgactagctctgtgatcttggacaatctacttaacccctatgtctgggtttctcaatcaacaaagcaatagcaccaacttcttcaagagcagcagttctcaaagtttttggtctcaggatccctttgcaacatacaaaaaaa

SEQ ID NO: 742405 - DNA, 539 bp, Homo sapiens
ggtctttcttgtctgatgttgattttcctccaccttttattattgccaagtgagggttttctggtgtcttcattatgagacatagtgttgattttattatctccaaatgtaatttttaatttactaagtggagttttatatctccctttttggtagtccacactaagtaggaatggccctggacaactaatgtagtttcctagaggagattggaaggagagtctggattagttatccaccctcttataatgcaaattttgggaaggttttcttggatggtaggaattcargctcaaatgggtcctacactagatgaaaaagtgcccggcccatggggcagtctatggtgaatgggtagcagggaagtaaatgcccaatttggcttacctttatgggatgggggtaagttaaaaatatccatgaagatatcaaaaaatatccatttgatatgctttggctctgtgtccccacccaaacctaatctcaaatagtaatccccacgagtcaggggagggacttggtgggatgggattagatca

SEQ ID NO: 742406 - DNA, 553 bp, Homo sapiens
cttccaaaatgtaacataaaaacatttatctaaaggaaaagactgattaattacatttcaataaagccaagaatttctgttcacaatatataccattaaaataatcaaaagacatacagctgacatgcttaagatattgccaaaatgtatacctagcagagtatttttgttgagaatacrtggaaatcacctacaaattaataagaaaaagaggttagtcaatggaaaaatggcaaaggtcttgatcagacacttcacaaaagatgatatcaatatggacaataaacatgagaaggtttaacagcattagttattaggaaaataataaataaactacaatgaaatactgcaacagagttatttgagtggctaaattaatatgccacagcatcagatattagaaaacatctggcacaaacataactgctctatcttttggtggaagtacaaataggcacagtcactctttaaaattcttttggtctcatatattgagtataacatatgcattccttatgcctagcaattcatttttataaacaacagaaatgtt

SEQ ID NO: 742407 - DNA, 553 bp, Homo sapiens
cttccaaaatgtaacataaaaacatttatctaaaggaaaagactgattaattacatttcaataaagccaagaatttctgttcacaatatataccattaaaataatcaaaagacatacagctgacatgcttaagatattgccaaaatgtatacctagcagagtatttttgttgagaatacatggaaatcacctacaaattaataagaaaaagaggttagtcaatggaaaaatggcaaaggtcttgatcagacacttcacaaaagatgatatcaatatggacaataaacatgagaaggtttaacagcattagttattaggaaaataataaawaaactacaatgaaatactgcaacagagttatttgagtggctaaattaatatgccacagcatcagatattagaaaacatctggcacaaacataactgctctatcttttggtggaagtacaaataggcacagtcactctttaaaattcttttggtctcatatattgagtataacatatgcattccttatgcctagcaattcatttttataaacaacagaaatgtt

SEQ ID NO: 742408 - DNA, 553 bp, Homo sapiens
cttccaaaatgtaacataaaaacatttatctaaaggaaaagactgattaattacatttcaataaagccaagaatttctgttcacaatatataccattaaaataatcaaaagacatacagctgacatgcttaagatattgccaaaatgtatacctagcagagtatttttgttgagaatacatggaaatcacctacaaattaataagaaaaagaggttagtcaatggaaaaatggcaaaggtcttgatcagacacttcacaaaagatgatatcaatatggacaataaacatgagaaggtttaacagcattagttattaggaaaataataaataaactacaatgaaatactgcaacagagttatttgagtggctaaattaatatgccamagcatcagatattagaaaacatctggcacaaacataactgctctatcttttggtggaagtacaaataggcacagtcactctttaaaattcttttggtctcatatattgagtataacatatgcattccttatgcctagcaattcatttttataaacaacagaaatgtt

SEQ ID NO: 742409 - DNA, 640 bp, Homo sapiens
ataaaatttcttataattaaaattgtctatttaagctgataaaaatttaatttcacttgcatacaaaaactctgtaatcatacatctccctccttcacatgatatgctatgacatcacaatttacatctatttatgttgtgtaccctttaacataatttagtcttagttattctaatattttttatgttttaatttttacactaaagttaacagcaatttacccaccatcattatagtaatacagtattctggttttatctatctatttacctttacaaagagtttcatacttcttatgctcttatattgctgtttaacatttttttgttccaacttgaatacttgctttagcatttttggtaaagcaggtccagtggtgatgaaatcatttagtttttgtttggaaaagcctttatgtttccttcatttytgaagaatagatttgttgtgtatagtattcttggttgacagtttgctatcgcactttgaatataccatctcagtcacttttagcctgcaagatttcttgggaaaaatctgctgatagtcttatagtcattttattgtatgtaaaaagtctctttctcttgcttctttcataattccatgtatttaacttttgacaatttgattataatg

SEQ ID NO: 742410 - DNA, 624 bp, Homo sapiens
ttcttagcattgttaattcaggtgtctaaggactttcttagtcttttagcggcctatatactgtgagagatagcaaataaccaactgttccaaaagttttattctattaaccctgctgttcttttgggttttgtgacacatatggtttcccctatgtattttaacagcccatgttcatttttgataagtaacatataaacccacttttcttttttatttttatcttcttaactagagtgctgagaatttgtatgtattttgaaaacattgacactcattttgctgaaatgtgcctttgctttaggttatttttatttcttgctattcttttcagcataggcttggcctgcrtaaatttaattacaaaatttcttctgtatgttcattttgcagtcttcaaaatatctaaaatacaagctttatttttgcaatgcttcctgaagtcattccaaattaagaaaattcaacttctttctaatttttcagtcttctctcattcagttgatgacattgtcctgtcttgtcaaaggtgtgagaataatccattccatcaaggaaagacatttaatcttatttcttcacacaatagtgtacagtgattggcagatggtataaattattaga

SEQ ID NO: 742411 - DNA, 608 bp, Homo sapiens
ctttcactttttataaagttaggcacatgattatgatataatacaatattccctctcctaggtatttacctaggagactaggagatatgaaaatatttgttcacacaaaaactagtacaagtatatttatagcagctctattttaatcatcaaaaactagaaaaaacttagatgtccctcaataaataaaatgataaatagtggaacatacatacgatggaatattacycagtgatttaaaaaaaagcaattaactaggcttcatctacataatatgaaccttggtctccacaaccccttatcttaacccagacactcccttctattgatttcaggtcttcagctacctatcccctggaagccccggcttcaagctgtccttcctttccagatcaaatcaatgtacatcttacatgtattgattgatgtcttatgtcttcctaaaatgtaagctgtagtctgaccaccttgggcacatgttctcaggatctcctggggctgtttcatgagccatggtcactcatatttggcttaataaatttcttcaaatactaaaaaacataattaactgttgatatgtgcaataacataaatgaatatcaagtata

SEQ ID NO: 742412 - DNA, 608 bp, Homo sapiens
ctttcactttttataaagttaggcacatgattatgatataatacaatattccctctcctaggtatttacctaggagactaggagatatgaaaatatttgttcacacaaaaactagtacaagtatatttatagcagctctattttaatcatcaaaaactagaaaaaacttagatgtccctcaataaataaaatgataaatagtggaacatacatacgatggaatattactcagtgatttaaaaaaaagcaattaactaggcttcatctacataatatgaaycttggtctccacaaccccttatcttaacccagacactcccttctattgatttcaggtcttcagctacctatcccctggaagccccggcttcaagctgtccttcctttccagatcaaatcaatgtacatcttacatgtattgattgatgtcttatgtcttcctaaaatgtaagctgtagtctgaccaccttgggcacatgttctcaggatctcctggggctgtttcatgagccatggtcactcatatttggcttaataaatttcttcaaatactaaaaaacataattaactgttgatatgtgcaataacataaatgaatatcaagtata

SEQ ID NO: 742413 - DNA, 610 bp, Homo sapiens
ttgggtaggaattgtctgggttaactcctctgtgtatcacgtgatgctggatggcctcagtcatgcattttttgattagttgtaacagcaccttgagcctgattgtcctggatagcctcctgcacatgcctggtaaagctctgggggctgttggtcaggtgaccttggttctccaccacctgatttctcataggccaaaagttgtaataggcatctttccatgatgatggaagcactctaagaaggtgaaaacagaagctgcaaagtctgtagggcccaatcttagaagtcacattctattattatgaattttattagttataggaagtcacaaaaatcaaggaattcggtgagagccattataaaaatttactattcaaataaatataagtaatataaatgtaaatacacacacacacagagaaagattggtataccayttaagatttgagattgcagactctgaagacaccctgacaaagcttgtgttttagctctgatggttacttgatgtatcatatcttagacaagttatttaacttctctgtttttcagtattattatcagtaaagcgataataagaatagctatactgtaggtttgttttaag

SEQ ID NO: 742414 - DNA, 504 bp, Homo sapiens
taagttactgttaactatagtcatgctattgtactattgaacactaaaacttattccttctctccaattttatttttgtgcccattcatcaatctctcttcattattccccccacccccactttctagcctctggtaaccatcattctactctctacctccatgagctcaatttcttttagctcccacatatgaataagaaaatgtgatatttatctttctgtgcctggcttattttacttaacatagtgtcctccagtttcatatgtgttgctgcaaatgacaagattttattctcttttattgctgagtaatatttccttgtgtwcaaataacacattttcctcatccattcatccactgatggtcacttaggctgattctatatcttgactattgtgaaaagtgctgcaataaatatgggagtgcagatgtctctccagtatactgatttcctttcttttagatatatactcagaaatgggattgcagaattatatgttag

SEQ ID NO: 742415 - DNA, 524 bp, Homo sapiens
ctcatggttctgtggattgactaggttcagctgggtggttcttctgcttaattgcactggaacatctaaatggttcactcaaatggctgatacttgatgctgcctattcgctgggacagctggggctgtcatctaaaagtgaacatccatttagcctctgggttctggaggaaagtgtcccaagtgtgagcatttcaagagagaagcagcagtgcttttaaaggctgggcctagaactaccacaacatcacttttacatcactgtattgattaaaccatcatagggccagctaacattcaaggaggaagataaataaactccatttcttgattttttagagygacaatttatggctatctttaatctgtcacaacttgcaaatgtctataacaaaatatttctcttgagctccagactggtatactctactgcctgcttgacatatattcctggatgcttcataggcgtgagggctgacttcatggcatgtgacatgtgcagtcgcacaggacctcacgttttg

SEQ ID NO: 742416 - DNA, 397 bp, Homo sapiens
ttgcgcccagtaggtaatttttcaaccatcacatccctccctccctccctgatttggagtccccagattctgttttccccaagtttatgtctatatgtatcctttgtttagcttccacttgtaagtgagaacatgcaatatttgattttgtgcttctgtgttagttcacttaggacaatgacctccagctccatttatgttgctgcaaaggacataatttcatcctttttatggctgcatactattccataamgtatatatacaaaattttctttatccaatcagctattggtggacaccaaaaaacatgttgttttttgactttttagtaaaagccaccctgaatgttctaagatggtatctcattgtggttttaatttgcatttctctgataatt

SEQ ID NO: 742417 - DNA, 617 bp, Homo sapiens
ccgaaaggggataatttgcattatttctagatataaggaaatatcacagctacattaaagagcagatggttgtctgattcttgagaaatacatatgtatataatattttgtatctatagtttataaatctttctgcatatttagaactatatgttctaaataaatgtatttctaaagaagtaaatggctataatcatatatgtgtatatatacatatacatgtatgtcatataaataaaatcacacatacacattcttagtaaaaagattatcatctttttcttataagtgcttcgtttttaagtgtttcattctgacatatattataaaagaattttcagttcgttggtcttttttatgtttttacatccaagtattktcatttgctctggctaactcattctcactctattgattttagtttaaaactcttctttcaggaagtccagtatcctaagttaagaataaatttctcttttggggccttctaaaacttggctcttccttgccattgtactcaccgtcgcttaaacacttgacattactaaccacaacacataaacatggggaagagatggtctcccttttttaccagggtgtttctcccatgatgagca

SEQ ID NO: 742418 - DNA, 615 bp, Homo sapiens
tctttatttcttgagaattttttataaaccctgatgatttacatttctaaactactgcagatgcttggcttttatgtcatcagattgagaacaaacaggacaaggaggcttctcagaaaataagaattatttaactaaaacattctttacttggtgatattccctctctcaacctgttagtttatatcttttttactatacaacactttagaaaaaatactacattctctcatactaaaatattttgttagttggtttttaagcaaaaattcttaaaataaataaaataaaaatgagtaattttyttgctcattgttaaggaaataatagagaaggcaaaatctctcaagaaccgaggaatgattaatatcctttaatgcaatggtcctcaatattttggcaccagggactagttgtgtggaagaaaatttttctacagactgagttggggttggatggttttggaatgaaactgttccacctcatcagcagtgcacaaccctcacacgcacatttcacaatagggtttgcgctcctatcaaaatctagtgtcccctctgatctgacaggaggcagagaaacataaatataaaaaaagcaccaaagaaaaatgag

SEQ ID NO: 742419 - DNA, 665 bp, Homo sapiens
ccaggctcaagtgaattgggaaaccttctggtggtttgaagcttaagaatgacaggaactaggctgggcacggtggctcacgcctgtaatcccagcacttcgggaggcctaggtgggtggatcacgaggtcaggagatcragaccattctggctaacacgctgaaaccccgtctctactaaaaatgcaaaaaaattagccaggcagggttgcgggtgcctgtagtcccagctactcgggaggctgaggcaggagaatcacttgaacccgggaggcggagcttgcagggagccgagatcgcgccactgcaccccaacctgggtgacagagccagactacgtcaaaaaaaaaaaaaaaagaaaaagaaaaagaaaagaatgacaggaactaatttatatcctaaaaacatcactgtggaatggcttggttggggtggtcaagttaggaggagaggagcccagttagaaagttactgtcgtatttctgaaggcagatagtggaggcttagattgtggttgcaggagtggagatgaggaagtgagtggattcagaatgcatttgggtaagtaattgccagggcttgccagggaattgaatcttgggaggaagcgtttaaaggaagaagcaacaagacttcaagtagactttcagctgtcaggattgaag

SEQ ID NO: 742420 - DNA, 486 bp, Homo sapiens
catgttggccaggctggtctcaaactcttgacctcaagtgatctgcctgcctcagcctcccaaaatgctgggattgtatacaggtgtgagccaccatgcccagccttaccctgttataatcttcttagcactgaccacyactagatgccataccatatgtccactggttggtttgttcattttatgcttacagtctagcagcctgggctgcaaagacctggagagcaaagagttggccttctgttgtacactgctgtatcatcagcttctaaaatcatgtgtgacacagagcagggggtcaatatatatccactgaatggctataaagtgtctagaaatatttacattagactaattgtaactgattaccttcatgagtggagtaaggatggaaatggtagaagttttaatgtatactcctgtgcaatttgattgatataatcaaatttattgctgcttatgcagcaacaacatcttgggagcaaa

SEQ ID NO: 742421 - DNA, 604 bp, Homo sapiens
cattttcctcaaactgatttcctcagggacttttccaaatggaaataatttgaagaatacaagagcccatacttataaatgctaagcaaatgataagcagtttcctcctgtcaccctcctggtagtcagagtaattgagtcatgagcaagtctttacagggggactttggaaccatggataaaatcacacaattccagaacaaaaagggactggagactttatcttccacgtgaaaaaaacaatgattagagactaatcattagtaggakcaaagccaagaaaggagttgctgaactgccaatcaagggctttccaccacatcccacacaaaccccgatccaggtcccctgcttgtgacactaacagaaacattttagttttcactgcagagacaacacagttgtggtttgagaaagcactttcctccattctcagttcttaagcgtatgacttaaatagagttgaccacctatctttctcatgggatgcttgacgactgaccttgtatattcaactcccctggacacaatgactggttgagggataaatatgttacctaactagagccaatgaaacataaggatatgcttatcggatcctatg

SEQ ID NO: 742422 - DNA, 616 bp, Homo sapiens
caaaagcaatggcaacaaaagccaaaattgacaaatgggatccaattaaactaaagagcttctgtacggcaaaagaaactaccatcagagtgaacaggcaacctacagaatgggagaaaagttttgcaatctatcyatttgataaagggctaatatccagaatctataaggaacttaaacaaatttacaagaaaaaaacaaacaaccccatcaaaaagtgggcaaaggatacgaacagacacttttcaaaagaagacatttatgcggtcaacaaacgtatgataaaaagctcatcatcactggtcactagagaaatgcaaatcaaaaccaccatgagataacatctcaggctagttaaaatggcgatcattaaaaagtcaggaaacaatagatgctggagaggatgtgaagaaataggaacacttttacattgttggtgggagtgtaaactagttcaaccattgtggaagacagtgtggagatttctcaaggatctagaaccagaaataccatttgacccagcaattccatttctgggtacatacctaaaggattataaatcattctactataaagacacacgcacacgtatgtttattgtggcactattcacaaa

SEQ ID NO: 742423 - DNA, 616 bp, Homo sapiens
caaaagcaatggcaacaaaagccaaaattgacaaatgggatccaattaaactaaagagcttctgtacggcaaaagaaactaccatcagagtgaacaggcaacctacagaatgggagaaaagttttgcaatctatctatttgataaagggctaatatccagaatctataaggaacttaaacamatttacaagaaaaaaacaaacaaccccatcaaaaagtgggcaaaggatacgaacagacacttttcaaaagaagacatttatgcggtcaacaaacgtatgataaaaagctcatcatcactggtcactagagaaatgcaaatcaaaaccaccatgagataacatctcaggctagttaaaatggcgatcattaaaaagtcaggaaacaatagatgctggagaggatgtgaagaaataggaacacttttacattgttggtgggagtgtaaactagttcaaccattgtggaagacagtgtggagatttctcaaggatctagaaccagaaataccatttgacccagcaattccatttctgggtacatacctaaaggattataaatcattctactataaagacacacgcacacgtatgtttattgtggcactattcacaaa

SEQ ID NO: 742424 - DNA, 536 bp, Homo sapiens
catgggtatttggatgaatgcacactgcagaagattttttaaaatcttggtaaaactgtagagtttctatagattagaggagattctgacaaaatcttaaaggacaatgataacccagttgacatctggtattgcagcttgttaatatagatgacaaaagtaattacttacgagataagaaataagcataatatggattttaaagttttggttattttaacaaaaacaacagacttagaagaagtaaaaacatattacacgtatcatcctacacagtatataggtgctatttcatgcttcacattaatagagaaatacaagtttaatcctgcaagacaacrcatcagactgaggattgcttgagcccaggagtttgagaccagcctaggcaacatagcaagagccccatctctacaataaataaataaattaataaattaaataaataaataaataaaattaactgggtgtggcagcacatgcttgtagtcccactacttgggaggctgagttgggaggatcacttgagcctgggg

SEQ ID NO: 742425 - DNA, 595 bp, Homo sapiens
attctggggctgggggcgtggaaggatagagcatgcttattatgaaaggtcagcatgcggtgattacagcttttctaaatctgggtcatgggtttataaaaggcttatgatccatcaaaagacctctctgagtccacagaatgaaaagaatgtasaaaaactattgttcagggaaatgctttgcttgttattaagatgtggtcatttcaattattaacttattttgtaatgcagtcacccaactagaattctctacttcaaagtgtatgtctttggaatgttacataatcttttcaaaatagtatgtcttcctttctgaaaaattcatttctccaatgaattaggaagctgagtcacttccttaatcaggacaggcccctcccccaggagtgctgttcggctccattttaactaccctggcaggtggcggcctggtttttagttccttgaaatctacaaatatacccttcactttggaagaggctcttagctcaaaatgcatttctttagaaagattcactgagaagaagtaggggaaaaaaaaaaaaaacaccacaaagccatgtacttaaacagtctctttcaagcaccactt

SEQ ID NO: 742426 - DNA, 655 bp, Homo sapiens
tgtaaacatcgtaatcatcaacactaactcaaaacatgaatgtgattgcctgtccaattgccatgtggatcttcatgctgagcactgcaagaccacccctaaggagctctgtagagaagaaagacaatcaatagaaagtacatgaattgcacggcctgaagtgtcctcacattctgcaatcaattaatttaattgctaataccaggaacatctccatggccaacatcacaccttgtcaactctccctggacccaggtcattgtttaacatacgagatatatgttaaaggagatgtatgaatatcacatttgacaaaagatgagactgatgttcataatggtgaagggattttctccaaaacaaccattaatggcaaaaataatactaatagttggtctttattggtcactactcaggtactrttctatgagctttacatatcctaagaaaatcctttcagagatggaaaaactgaggccctactaataatcttatagatgccattattattcccattttatagatgagcaggccaaagcccagaaaataggtagtagagcctgatgaaaggccagataggatagcttgatggctcacactgtgtgccagaatctcagtccaggtcccataaagcttcataggtgactcttccttg

SEQ ID NO: 742427 - DNA, 594 bp, Homo sapiens
cccggggttgtttaaaatgttctgtggagcaaatctgcctttgctgcttcatgccactgggcaattttcatatccttggatgagattatttgttaattctttggcttaatggttattttccaggggagtttgtgtaaatttgaattcctgtccaggtggtggcatagaccttgaatttctgcttctaatgtctgattccttattttttttacttcccaagactgtaaagaagttcagacttcttgtactttctttgttctgtgagagtaattctgttccgcttttcactgagggaaagcaggttaagcctgactcaggtatgtttttcccacrtctgtagctcttggcaatgttctcttccctgaaaggagtagaccacatgcaggcctgtctcagggaagaccctctctgtgaactcctgcatgaatgatgaatgcatgctcacctcctgattctcatccctctttctttctgtctcttatacctgagattttattttgacttattttaggctcagttataaattgatgtctggctctaatttgggaagcatttctgtgtgccctactgagagaagccattccccattagctt

SEQ ID NO: 742428 - DNA, 520 bp, Homo sapiens
tgccatctgataaaataacctttctttggaggacaaatttggaagcattgggtagttagtgctggaatgaccttagggatattcgtaacttattcagttttagtcctttctaatcttaacagaagaaaccaagatgcctttcattaattcttccaactaaattaatggagtcactgcatctcgaasaccattagcagagcagagacaagagttttggctggaaaagtaagtaaatatttgacttctttctttcaacttgatctgagaaattggttggaattgcctatctaatggattttctggcaaacattttagaatatctgtgtttaaggcaggccaaataagaagataatttgtttttctttccctgcaattactactacaatggacatattttctggaccaaatatcaggccatgttgtcttaaaaggaccacttgcttacagtgaaaatgaggcccaataattaaagggaatggagaaagggcatgatcttgcaataaagaatactgaaggggga

SEQ ID NO: 742429 - DNA, 520 bp, Homo sapiens
aaaagcttctgcacagcaaaagaaatagttagcagagtaaatagacaacccaaaaaatgggagaaaatcctctcaaactatgcatccaacaaataactaatatccagaatctacaaggaactcaaataaatcagcaagagaaaaacaaacaatcccaaagacatgaatagacaattctccaaagaagatatacaaatgtccagaaaacaaatttaaaaatgctcaccatcactaatgattagggaaatgcaaatcaaaaccacaatgcrataccatctcactcctgcaagaatgtccaaaataaaaaaaaatcaaaaaataatagatgttggcattgatgtggtgaacagagaacacttttacattgttggtgagaatgtaaactagtacaaccactatggaaaacagcgtgaagttttcttaaagagctaaaagcagatctactgtttgattcagcaatcccactactgggtatctacccagaggaaaagaagccattatatataaaagatacttgcac

SEQ ID NO: 742430 - DNA, 520 bp, Homo sapiens
aaaagcttctgcacagcaaaagaaatagttagcagagtaaatagacaacccaaaaaatgggagaaaatcctctcaaactatgcatccaacaaataactaatatccagaatctacaaggaactcaaataaatcagcaagagaaaaacaaacaatcccaaagacatgaatagacaattctccaaagaagatatacaaatgtccagaaaacaaatttaaaaatgctcaccatcactaatgattagggaaatgcaaatcaaaaccacaatgcgataccatctcactcctgcaagaatgtccaaaataaaaaaaaatmaaaaaataatagatgttggcattgatgtggtgaacagagaacacttttacattgttggtgagaatgtaaactagtacaaccactatggaaaacagcgtgaagttttcttaaagagctaaaagcagatctactgtttgattcagcaatcccactactgggtatctacccagaggaaaagaagccattatatataaaagatacttgcac

SEQ ID NO: 742431 - DNA, 620 bp, Homo sapiens
aggaattacacagtggctggttttctgggttttcttttagccacacatatcccagacttgtagctgaagaagctggtaacccagaaacaccaacagtcacaatcaaaaaagcttctcaaaagctggctctgtagtcaaagggccagaaagcagcagcctaataagacagaaatattttagtcaataacttttctactccagtcaaacacaactgagagtattgtggctacatgctcttcagcaaaagcctagtgagaagctgaaacatcacctttacccagckgtagagaggtgcttcgagcctcccctgtggtgtcagagaaggctgagtagagagccaggactcttccccgctgagaagcaatgagtcctttcccaccacttctatcagtggagatcaggtatggagcagtacaaaggcaccctgctcctcccaaccagggtgctctcagcagagactagatgggagccagaacttctaccttaccctgacattaatgagtccatgctactatttttccctgctgcagcaatgtctaagtaagccaattaaaacagaaaatttaagtaagttccagatcatcacaaaataatacatacaatgtccaggctgtcatttt

SEQ ID NO: 742432 - DNA, 570 bp, Homo sapiens
gaggactggttagcagctctgctccgcagtgtgggaagtggttaggctgcagagggggcaccctaatgcatgccttttgaaatcagagcagcttaagcccttgagaggggatgtagggaccctggggtcccaaggggaaagatcttgcagccctgataagaatggktgcctggcaaggctaagctggaatgggaatctccaggcgtggagagcgtccactcttgctgtggtcagaatcagaacggagaatgcggagcatgagacagaggctttccgtaaacacggctcattctcagagcacttcagggctgggttcccagagggcggacattcctagaaatggtgcagatgcacagcccctccttccagggcaccgcccccgcagcccggcagagcaaccgcagacatttattttccttctccgaataacaccgccgcgctgggtggaaacgaacccgagagcccacacttggccagcggccgcggggagtgggcgccagcagtaggtccctgctggggctgtcgctcagcttctccctgcggacctcggacacagcccccaccaagctg

SEQ ID NO: 742433 - DNA, 570 bp, Homo sapiens
gaggactggttagcagctctgctccgcagtgtgggaagtggttaggctgcagagggggcaccctaatgcatgccttttgaaatcagagcagcttaagcccttgagaggggatgtagggaccctggggtcccaaggggaaagatcttgcagccctgataagaatgggtgcctggcaaggctaagctggaatgggaatctccaggcgtggagagcgtccactcttgctgtggtcagaatcagaacggagaatgcggagcatgagacagaggctttccgtaaacayggctcattctcagagcacttcagggctgggttcccagagggcggacattcctagaaatggtgcagatgcacagcccctccttccagggcaccgcccccgcagcccggcagagcaaccgcagacatttattttccttctccgaataacaccgccgcgctgggtggaaacgaacccgagagcccacacttggccagcggccgcggggagtgggcgccagcagtaggtccctgctggggctgtcgctcagcttctccctgcggacctcggacacagcccccaccaagctg

SEQ ID NO: 742434 - DNA, 613 bp, Homo sapiens
ttgtagattaatcctaaatattacaatcatcatgtcctcccaatagaggtggcatcaagctgttcagaatgtggcctgtgctagcagggattggaccttcctggtgacagggagcaaggctggagcctgatgagaagcgragagggaggtattaaacaccacaggtggtaagatggcaacacattcacgcagcaacaggcttcctgtctcactgccttcggttgtgcaggtcttcagctgcttctgtccttggttgccaattttacccagtcatcaatgcctgtttgttcagaattcccaatagaataacaagcatcctaccatatttgagaaatgcatgagcagtggggaatgtaattttcttacattatggttgctctctgtcaaaggagaaaaaaaatttttgcttagaaaagtaaagccttctctgcagttacatggtagagaagacttaaaaataaccttggttttaggcaggaaagagctaacttcaaggttgaatgctactagactttccccttttttcagaaatcctttattcaacagttgcttcctatacttgcagtaaatgccccatgccgggagaagacaaggttaacattttcttacttcc

SEQ ID NO: 742435 - DNA, 612 bp, Homo sapiens
tggattacagatgcatgctaccaggcccagctacctttttgtatttttagtagagatgaggtttcaccatgttggccaggctgatctcaaactcctgacctcaggtgatccacctgccttggcctcccaaagtgctgggattacaggcgtgaaccaccacgccaggacttatgtcttttctaaaaagtatgatagtcttacacataagtgctcatgaatgaatgtatgactttggcatcaagatcatatgtmacaagaagataagccaagcagaatcaaatcagagagaatgcacagaaccacaaaatattcatgaaaggcatgctcttgggggttaaaataacttcctcattatacagatgctaaataaaagctcagacagtattagtttcctgtgcagcatactaaaactagtggaagatgaaaatcaagacttgaaggcagtttctcactcttttgaaacctacagctataagttctctgtttcaagaccttgtacaatgtttcacaggtttattgcttttccggcagaagacaactccaaaaattctaacgaacagtattttctcttcaagctaactcatactcagaaaatggatggctaaaataagg

SEQ ID NO: 742436 - DNA, 645 bp, Homo sapiens
taatgtccacagccatcagatcacaagtcgagaaggccctaacgtccacagccatcagatggcaagtcgagaaggccctaatgtccgcggccatcagatcgcacgtggagaaggccctaaggtgaccacacagatttcctctcargcagcccctcctcctcagaggccagcagcccaggacaccaccgcacacctttgggtcactgatctggagaacgcgatacaggaagccaggaagactttagaaaaggaagacacctgcgtgtcaccggatttagccccgtgatcaagtggcaaggcagccctgagattcagtaaagagtaatgaagaaagaacctcatatattctccaaagtattccagaaacagagcatttaaagcaacatctatgtgctaaaggcagctgcacacacgcaagctttctttagtctagaaagcacattgctaggctcttcctcaggaaatgctgattcctgtctaagggaagatgcaatgtctgctataaagaatatatgtatgtgtgtgtatacattgatttagagatattttagtggactggagtatgaacataaaccataccttgctaggtattatatatccatttactatatatttctcaaatcacatgaatccaaaaaatattta

SEQ ID NO: 742437 - DNA, 645 bp, Homo sapiens
taatgtccacagccatcagatcacaagtcgagaaggccctaacgtccacagccatcagatggcaagtcgagaaggccctaatgtccgcggccatcagatcgcacgtggagaaggccctaaggtgaccacacagatttcctctcaagcagcccctcctcctcagaggccagcagcccaggacaccaccgcacacctttgggtcactgatctggagaacgcgatacaggaagccaggaagactttagaaaaggaagacacctgcgtgtcaccggatttagccccgtgatcaagtggcaaggcagccctgagattcagtaaagagtaatgaagaaagaacctcatatattctccaaagtattccagaaacagrgcatttaaagcaacatctatgtgctaaaggcagctgcacacacgcaagctttctttagtctagaaagcacattgctaggctcttcctcaggaaatgctgattcctgtctaagggaagatgcaatgtctgctataaagaatatatgtatgtgtgtgtatacattgatttagagatattttagtggactggagtatgaacataaaccataccttgctaggtattatatatccatttactatatatttctcaaatcacatgaatccaaaaaatattta

SEQ ID NO: 742438 - DNA, 565 bp, Homo sapiens
gttgtatgaaagcaactgcatcattcaaagttctgcagaacttcctcagtcttagatgttattagtcccacgccagcattccagaaaacaacttcagtgttagcggtaatcaccactaaatcacgctgaaattggcccaggcttggatgagacccttccttacagcagaagctcacaatctttccttgagaaacaacgattttcttttttttattattattatactttaagttccagggtacatgtgcacaacatgcaggtttgttacatatgyatatgtgtgccatgttggtatattacattagatatatctcctaatgctatccctccccgcttccccgaccccacgacaggccccagtgtgtgattttccccatcctgtttccaagtgttctcattgagaaagaatgattttcaaagctacattacaaattcacttttgttgtagaaataatatatatactacaaaaaaataggtgggttaggggagacatagaggcaaactaccgcaggcaaatactccatttatgcagaacgagatgtgtggcctctctcattggcccat

SEQ ID NO: 742439 - DNA, 628 bp, Homo sapiens
agccaaccaaatgccagaaagagcaaggcagaaccagagtgtgcacctgcactgggcgggtttgggtgctgtgttattttgtttgtttttttaattaattttgtttctaatcaacacatagtaattgtaagaataagttctggtgttctattaccttgcagsgtgacgctagctaataataatgtagtatatatattccaagacgcctacaagagggatcttgaatgggtgccttttgagaattaattttagtaagagtagtggcagaaggtagataaaatatgttaatttttagattatagtcaagataaaaaatttcagaattatttgaaattggcatttgttttgagagaagtattttaaaaatcaacgtaaaatatcttctcggaagagagtccaagttttccagatataaagaaagcaagctggcaaagtaattctgccctaaatttttgtttgaattgaggggctttaaaattgggtaatttcaaaggtgcctaatccagtgaacaccgctcaatcttatcactgcattatagttctctcaaaaggaagagcccaccccagaaaacacattttgcattgattttaacgttaatgcttgaaagagttcatgcccacagacaaa

SEQ ID NO: 742440 - DNA, 628 bp, Homo sapiens
agccaaccaaatgccagaaagagcaaggcagaaccagagtgtgcacctgcactgggcgggtttgggtgctgtgttattttgtttgtttttttaattaattttgtttctaatcaacacatagtaattgtaagaataagttctggtgttctattaccttgcagcstgacgctagctaataataatgtagtatatatattccaagacgcctacaagagggatcttgaatgggtgccttttgagaattaattttagtaagagtagtggcagaaggtagataaaatatgttaatttttagattatagtcaagataaaaaatttcagaattatttgaaattggcatttgttttgagagaagtattttaaaaatcaacgtaaaatatcttctcggaagagagtccaagttttccagatataaagaaagcaagctggcaaagtaattctgccctaaatttttgtttgaattgaggggctttaaaattgggtaatttcaaaggtgcctaatccagtgaacaccgctcaatcttatcactgcattatagttctctcaaaaggaagagcccaccccagaaaacacattttgcattgattttaacgttaatgcttgaaagagttcatgcccacagacaaa

SEQ ID NO: 742441 - DNA, 431 bp, Homo sapiens
gtagatattcttgtaagcattgggatgcaacattgaacaaagtgaagttcctactctcatgtagttacattcatgtgagtgtgtgtgtgtgtttggaagaagaaagacaataaacaaatacgtcgattgggagctagtgataagtgttactaagaaawataaattagtgtcaaagggaggagtgacaaggtgttgttttagattgtatggccagtaaaatcctttctgaaaaggtaccagttgagcagagatccgaaggaagcaaaagagtgagatatgggaatctagggataaagtcagttcaaggagaacagcaagtatgaaggtaaagtctgaaggtggtggtgcaactagtatgtttaacaatcagcaaggagacctgagtggctggagcagagtgggaaaggcaggaagcgagaggatgacatcag

SEQ ID NO: 742442 - DNA, 431 bp, Homo sapiens
gtagatattcttgtaagcattgggatgcaacattgaacaaagtgaagttcctactctcatgtagttacattcatgtgagtgtgtgtgtgtgtttggaagaagaaagacaataaacaaatacgtcgattgggagctagtgataagtgttactaagaaatatamattagtgtcaaagggaggagtgacaaggtgttgttttagattgtatggccagtaaaatcctttctgaaaaggtaccagttgagcagagatccgaaggaagcaaaagagtgagatatgggaatctagggataaagtcagttcaaggagaacagcaagtatgaaggtaaagtctgaaggtggtggtgcaactagtatgtttaacaatcagcaaggagacctgagtggctggagcagagtgggaaaggcaggaagcgagaggatgacatcag

SEQ ID NO: 742443 - DNA, 621 bp, Homo sapiens
agataaatgaaagagcaagggatagcatgagtgctgcatggggctcagatttcagatgtcttcctttttttaacccatactcaagcttgcagaattcacaaatatataacctcataattcatcgacttcaagatttcttactactctattcacatagacttttctaaaaccaataaggggttagggagtaagacatctgcaaataaaagcaaaatatttacacaaggttgatgtttaagcatgaataacaaaatcattcttttgctctaaagagtgtttggaaatacacatttggttcatttccattcacagttttctaatgaacatacaagttctgctttcattcattttcaccagctagyaggcttttcatgaaaatgttattcaatcacaaacattaaactaatattgttggcattctgcatgacatttttattttccaggacaagctcatgatatttttgccggtaaaatagctgttgagtagtatatttaaattcccccttctgattttgtttgtaggcctgaagaccattgtgggggccctgatccagtcagtgaagaagctttctgatgtcatgatcttgactgtgttctgtctaagcgtgtttgcgctaatag

SEQ ID NO: 742444 - DNA, 593 bp, Homo sapiens
ttagaaagaaaaagggagcataagaaataaaataaaattaaacgccagcaaactagataacctatgtgaaattgaaaaattcctagggagtaacaagcgcctgaaactgactcaagaagtaatagactatctcaatatacttataataagtaaacattgaattcacaattaaaaaaaagaaaacttccygccaaaaaaagcctgagcccagatagtatcactggtgaattttgccaaatgttcaatggagcgttaacatcaatccttaacaaactgttccaacacatagaagagaagggaatacttctcacctcactttctgaagctagaattaccctgatattaatgccagacaaaaataatgcaagaaaagaacacagacacaaatatagaccagccatatcccatatgaacataggcacaacaatcctcaacaaaatactagaagccaaatcacataacatatttagatttttagattatgtactctgaataagtgaaatttatcccagtgatgcagggctggaccagcataaaaaattaatgtaatatatcatattaattttaaaaaactatacaatcatctctataga

SEQ ID NO: 742445 - DNA, 571 bp, Homo sapiens
ccacaaatccttttattatattcatagttttgtctgttccagaataccatgtagttggaatttagagtacacagccttttcaagtttgatttttcatttagtaataagcatttaacgtttctctatttttttcttggtgtgatagctttttttcttttcttagccctgaataatagttcattttctggatataccaatttgttcatccatttatccaaacatttactgaaggacttctgggttacttctgagtttttgcaatttgttttgtattgttttgtttttcccaactttattagagtataartgaaaaattaaaatcgtataaatttgtggtatacaatgtgatgttctgatttatgtacacattggaaaattaataaatcaaactaattaacatattcatcacaacatatacctatgtttttgtggtgagaaaatttaaaatctactcttagtttggagttatggcatagaaatgctgctgatttttatatgctgattttctatcttgtaactttactaaatagtttattagttctaacaatttggtgatgtcattagggttttc

SEQ ID NO: 742446 - DNA, 571 bp, Homo sapiens
ccacaaatccttttattatattcatagttttgtctgttccagaataccatgtagttggaatttagagtacacagccttttcaagtttgatttttcatttagtaataagcatttaacgtttctctatttttttcttggtgtgatagctttttttcttttcttagccctgaataatagttcattttctggatataccaatttgttcatccatttatccaaacatttactgaaggacttctgggttacttctgagtttttgcaatttgttttgtattgttttgtttttcccaactttattagagtataagtgaaaaattaaaatcgtataaatttgtggtatacaatgtgatgttctgatttatgtacacattggaaaattaataaatcaaactaattaacatattcatcacawcatatacctatgtttttgtggtgagaaaatttaaaatctactcttagtttggagttatggcatagaaatgctgctgatttttatatgctgattttctatcttgtaactttactaaatagtttattagttctaacaatttggtgatgtcattagggttttc

SEQ ID NO: 742447 - DNA, 610 bp, Homo sapiens
atcatgtcatctactcacagaacattttacttcttcctttccaatttggatgccttttatttcttttcttgcctaattgctctggctagaacttgtagtactttttaaaatagaaatggtatgactgagcgtccttgtcttgttcctggccttagaggaaaagcttacagcttttctttgttgagaataatgataacgtgggtttgtcagatatgacctttattctgttgaggtacatttctatacctaatttgttgagagtttttatcatgtaaggatgttgaatttttatcaatgcaacttttacatttattgagatgatcaaatgattttatcctttattgtgttaatgtggtgtatcacaattattgatatgcatatgttaagccaagcttgcataccagggataaacccacttaatsatggtgtattatccttttaatgttagatttggctatctagtattttgttgaggacttttgcatctatgtctatcagggatattggtctgtcattatcttttccttgtagagtctttacctggttttggtatcagggtaatgctggccttgtaaagtgaatttgcaaatgttccattctcttcaatttt

SEQ ID NO: 742448 - DNA, 608 bp, Homo sapiens
atccaaagcacagaactattctgcaagaaccatgctgccatccaaagcaaagctaagctccaattctcatcttctcctgtatttgtttcaggatatttttcaggcattcttttcatctttcattaaactagtaagttttttagaatatgaataataaaaaatgcaaaatgtatccagtgtgatggatggcaatatattttaaaacatacatgtgctraaactaaaggtgacccaaaaatgagaaatccactccaggagacagtcttcatcactggagtcaggcattcaaatcacgtgtggtatcttgtgatggttgttcacagcagagagctggaggcgttactgacctttctgtggcatccacaagggtttaccacattttctcaaacacaaatgcatctctgcacagaaaatgaaactttcaaagtcttttggagaaaagagcctttctcagctgaatctgcagcttagaagggtgctcattaaacgagaaaggagcaggcatcttggagtcctcttttggggcagatcaaatcaatcactcctggccttcaaatagagatgagggatcccatgaccagatttctcacagcctatatgagctttga

SEQ ID NO: 742449 - DNA, 532 bp, Homo sapiens
ctttggcccaacaatcaggctctatcctattatccagtcctaattgtatgcctcattccaggtaaactgagataatcatcattttgcaaatatacactgtacttttttacttctgaactttcttgtcccaccccaatcccacatcctctaccatttttgcttaggaagatctttcccttcgaagcttaattcaaacaattattctaggaaactgttttaatgaaaatagtttgaatagtgtaaaaccaaggacatattttataaggatgctttctagaacagtcttcaatataattccatgccctcatgtccaactattccaataaaagcatttctatgtgggccaggctatgatgcattccaagtctgattctacaatgggatgaatttagggacrcattttagagtgtggatggatagattatcatgggtgtccaatcttttggcttccctgggccacactggaagaattgtcttgggccacacataaaatacactaacactaacaatagctgatgagcttccaaaaaat

SEQ ID NO: 742450 - DNA, 635 bp, Homo sapiens
cattattacaactataatacaaaggggaaaaattgccaagtcctacaagggaaattttcacgttaaaccagtcattgctgacaataacgaatataattaatatgactctgaagcgtggcataaatgaaagagaagtgacagaaaaattataattcagtcattatataagctaggcaagatactaagaaatacctccctcccagakacctggcatacctgtgaggacatccttgcaccgtgcgccgctcacacgcactttccctgtctgggggtctgtcttcttgagcaagctcactacctccatgtaattggctgtggcagccccatacctggcagcagtcagagcaatggcaaggttcatccgtgcatcgttatgttgtcctgcagcggggaaagcatcaggggagggagaggagtcacctcgagccacagactggtggtacaaaagtgtgtcacaacagatatgtcacatctgtccctgtcacccaggatatgcatgatggctgggcagcttgacagggcacaatttaaaatacacggtcattctcagccaggcatctacctgccgcttcagcaagtgcatttcgtgtaccataaaaatagtgaaaatatccctttcctacagagctgacatc

SEQ ID NO: 742451 - DNA, 635 bp, Homo sapiens
cattattacaactataatacaaaggggaaaaattgccaagtcctacaagggaaattttcacgttaaaccagtcattgctgacaataacgaatataattaatatgactctgaagcgtggcataaatgaaagagaagtgacagaaaaattataattcagtcattatataagctaggcaagatactaagaaatacctccctcccagatacctggcatacctgtgaggacatccttgcaccgtgcgccgctcacaygcactttccctgtctgggggtctgtcttcttgagcaagctcactacctccatgtaattggctgtggcagccccatacctggcagcagtcagagcaatggcaaggttcatccgtgcatcgttatgttgtcctgcagcggggaaagcatcaggggagggagaggagtcacctcgagccacagactggtggtacaaaagtgtgtcacaacagatatgtcacatctgtccctgtcacccaggatatgcatgatggctgggcagcttgacagggcacaatttaaaatacacggtcattctcagccaggcatctacctgccgcttcagcaagtgcatttcgtgtaccataaaaatagtgaaaatatccctttcctacagagctgacatc

SEQ ID NO: 742452 - DNA, 577 bp, Homo sapiens
tgcaaaagtgatattaactccccttcaagatgaagaaactggtactgagatgtaagtgacctgctgacattccaagccaaaggtctctggtttcaatgccttttttctgtccactttactctccaatagccgaggtctgttttggcctctcttcattactgatttccaagctattccacaacttgagtaggcagacactttccctttatctggttattcagaaggagaggtttcagctttcaactgccaacccctctccaatgcaaacaaggattttggaaataaggaccatatgcttctcatctggytccaatccatctagatatgtgatgcctcacaaggtctgtttctcttacaaaaggtagcaaatatttagaaatcattcttaagctatgtacacagcagcaggacatcaggtcctggcttttgtcctatttgaatttaaattaagaaagcaactaaaaatagatggaagacacagctatctgggggataaagtctaccacaaataacacttgtagacaatgtccaaacgtaaccaataaaccatgtaattacattagagagactgctggga

SEQ ID NO: 742453 - DNA, 565 bp, Homo sapiens
agacagaggtctttggccttatctcccaagggaggttgcttttaatgagatgctattttaacagatctggagaaagaagtgtagtcagacacctgcttcttgggaatgagggcttccaattagtatcagagtgaattctcgggacaactgttgcagtagcgaagaagggccagccatggtggctgtggatgaggccttgacatttggatgcctggacattctctcttgatttctattacagaaggrcaggtttatggctgggcacagctggtaaggtggcactgctcactgacaatgggaaaggctgttttggagcaggagaggagatccactggataacaaggacctcaggagagttcggcgtctctgtgctaatgagcttcaaggaaaagatgtgaactggcataatgagcaatcatttgtaatcgtcttttgagtacagtttcctgcttggcagaagacaagctgtatctgtggctcactgccagcatgggtaatgtttgtggtagtacctgtcactttataacagtgtcttaatgtcttatgcaaattaccttataacaaa

SEQ ID NO: 742454 - DNA, 634 bp, Homo sapiens
tccctagaagtttagggactgatttttatggaccacatgaacatggaagaacaagaaataaagcctagagccagaacggggtagaaggctggattagaggacctccaaaaaaccaacataccaggctgagcaacacagcgagaccctgtctctaaaaatacttttaaaaattagccgagcatgggggtgcacatctgtagtcccagatgctagaaaggatgaggcaggagaatcacgagcccaggaggacaaggctgcagtgagccatgattgcaccgctgcaactccagcctgtgagaaagaatgggtcccatttytaaaaaaaaaaaaaaaaaaaaaaaaaaattaagacaaaaaatctattgtcagtgtatacagtgtatattttttaaccttccctacagtgtgagcaaacagtacaaacagtagagattttggccttgaatctgggtagaataggacccaaaaggggagggggaaaccgtctagagaattcttaatcacaagcctttactcatgtgaatttggagttggaatttatgctacccatagggacagaaaactctgaagtcaaaaatttcattgaaagtgatgccaggttgactagtaaatcctaaccagaatgaaccaaaag

SEQ ID NO: 742455 - DNA, 634 bp, Homo sapiens
tccctagaagtttagggactgatttttatggaccacatgaacatggaagaacaagaaataaagcctagagccagaacggggtagaaggctggattagaggacctccaaaaaaccaacataccaggctgagcaacacagcgagaccctgtctctaaaaatacttttaaaaattagccgagcatgggggtgcacatctgtagtcccagatgctagaaaggatgaggcaggagaatcacgagcccaggaggacaaggctgcagtgagccatgattgcaccgctgcaactccagcctgtgagaaagaatgggtcccatttctaaaaaaaaaaaaaaaaaaaaaaaaaaattaagacaaaaaatctattgtcagtgtatacagtgtatattttttaaccttccctacagtgtgagcaaacagtacaaacagtagagattttggccttgaatctgggtagaataggacccaaaaggggagggggaaacygtctagagaattcttaatcacaagcctttactcatgtgaatttggagttggaatttatgctacccatagggacagaaaactctgaagtcaaaaatttcattgaaagtgatgccaggttgactagtaaatcctaaccagaatgaaccaaaag

SEQ ID NO: 742456 - DNA, 590 bp, Homo sapiens
aaagttgttctaacccttgaattttccgaagaaacttcctttaaaagctttaatgactgcagtgctccttaagcataaacaaggagggacattcggcagggagatacctctctagcaacattccacagctgccagggccccacacctaggggcaacttgtggatacgtagaatccaaaccaaaccccccttctgagtgtgataaaatccctccaaaccccgaatggcctcaccatgtttcgaggggttccctccctctaaacattccccaaaccgctcagcccaagcaccaggaacctcattttgggaaaacacgggctcttcctgcccaaatctcgccctctagggagcggctytccctccgccgcggtctacacagctgtgcttacagcctgcaccgctggctgggtgcccgccacgcacagaagggcagtaggaacacaaaagggtgtggtggccagggtcccagaacaagtgaaaggggacctgcgagcggggagttttctgaaaactgcacaagccttcttgggcagcgtggtgtcttttcaccaggacgcaggtgcctctgtctgccagcggtgacatgggtga

SEQ ID NO: 742457 - DNA, 612 bp, Homo sapiens
cttctggaaaaattcctcacacagggcctgaggatcccccatccctgaaatttccaggtgatgtctttccctctcaagtgtagagtggaactgtcaggatatgactcctgtcaatcatccctaagcaatgcccatgagccccttcgcagacacgtgctgcctacctgcagtggggaggaaagcagggagaggctgcaaaaccctggttagtgtaaaatcaccctcattttmtcttgtgtttctataatagaatgaagagacacccattccccagtatcccaaatcaagtaagcgagtggcaactgccaccgtggcttccaatttcttccttgaggagtgtaataaaagaatcagatgacaccaaaagcatgaaccataagagaaaaagaatttataaattggacttcactaaaattaaaaactcttgctcttcaaaaaacaccattaagaaaatgaaaagaaaagtaatatcctgggagaaaatatttgcaaaatgtaactgaaatgacttgtattcagaagacattttaaaaaatcttacaagccaataagataaacaactcaatttaaaaataattgagtaaaacatgtaaacagacaattcattaaaga

SEQ ID NO: 742458 - DNA, 585 bp, Homo sapiens
tgatgattatttgattacagcggtggctatccaatttctccattgtaaaagtacatattttttcatgttgtaattagtctgtgatttatcaggtaatatgtcttcagtgccatgtgactatcctgttctttataacctttcaaccgatgcttttagcatccattgatgatttctgactgaaccaactattatacaaattaggatcttggctatccttctatcatgacttctacatttattacctggcttttgattcaatgtgtttcagtcaattatagtcaattacgatttttgatgtttgaattattttgaatytggccagtgactgccctttcaggctggtttctctgtcttttcatgactcccttaagtctttgacaatgtacctgctttctggtgtaacaggatatctgaaccttaccttgcaatttctgtgctccaaacctagaatcagctattttgtgaagaagcacaactacattctaagcagctagctgagtccatcatccaacaatacagcaacttccttattttgccctcaatgagctctgttagggctggaaccaaacatgtttgtatgtgtat

SEQ ID NO: 742459 - DNA, 546 bp, Homo sapiens
ttttttaggactaaatgaatcatgctgtcacaccagagagtgacttcttggttagcaaaccttagccatttgtgtaataaaatgggggtacagaagggggctggggttgcactcccagtcgacctctatccctcagaaactggccagccctgggcagagcagctggggtaccccaagaaggccctgctctggagggctgtgggcagaggagcagtgggaggggacccaggggttstggggctcagcagggcatggtattgattgcattttcctcctctgtgtggcccttggtcctagccccatgagtctttggtttcctggtgtgtgagtgggaagttcatatcccatagacccatgtgaggacttggtgaagtgacccacatgtagctgtatcaggtacccaagagactaagaggcagtaaagagttcctgattcctggcccacttggaaagaggtcacagtttgtcaaactggaggaagcagcctgctaggccctgcccctccctatcgcagacagctggcacttggaaggacccttaggatcc

SEQ ID NO: 742460 - DNA, 587 bp, Homo sapiens
tcaatattctggaaggacttcaagctcattttctccaatcgcctcagcctcatagagcattagtagtctgctgtctcttactgtaggatgtttttgtggcattggaacatctctctaaaggctaagagccctcataaagttgcttacttcaaaactacgaatttcagatactttaaaagaaatttgatcaatcacaaaccccattttccctttgataggctttcatgataggttttgccaaaacttgcagtggctggctgtggtcttggaaatttagatttggggaagcatttattgtcactatgtctgagccaggtcactaggctgtgtgtggtaaccaacattattctcataagatattcactactccttgctcagatagcttaacagcaacctcagctatcaagagtacagcctagaggaagtcaaaggaggtgckctgtggctgcccagagctcatgccctttactcttcaaaaaattatttcagaaactatttgcttcatagaggcacagttgagtgtatgtatagattgttttctgagaaataatttgaatattatcaaattcacctatttaaagtgcaca

SEQ ID NO: 742461 - DNA, 480 bp, Homo sapiens
gattaaaataaccacaatcagaaatgacaagaaggatattatcacttaccctacagaaatataaacaaccatcagagaatattatgaacacctctatgtacataaactagaaaatctaggagaaatggataaatgyctggacacatacacccttccaagaatgaaccaggaagaaattgaatccctgaacagaccaataatgagctctgaaattgaggccagtaataaatagcctaccaaccaaaaaaagcccaggatcagatggattcacagctgaattctgtcaggtgtccaaagaagagctggtatcattcctactgaaactattccaaaacactgaggaggagtgactcctccctaacttattctatgaggccagcatcatcctgataccaaaacctggtagagatacaacaacaacaacaaaaagtcaggccaacatccttgatgaacattgatgcaaaaattcttaaaaaatta

SEQ ID NO: 742462 - DNA, 480 bp, Homo sapiens
gattaaaataaccacaatcagaaatgacaagaaggatattatcacttaccctacagaaatataaacaaccatcagagaatattatgaacacctctatgtacataaactagaaaatctaggagaaatggataaatgtctggacacatacacccttccaagaatgaaccaggaagaaattgaatccctgaacagaccaataaygagctctgaaattgaggccagtaataaatagcctaccaaccaaaaaaagcccaggatcagatggattcacagctgaattctgtcaggtgtccaaagaagagctggtatcattcctactgaaactattccaaaacactgaggaggagtgactcctccctaacttattctatgaggccagcatcatcctgataccaaaacctggtagagatacaacaacaacaacaaaaagtcaggccaacatccttgatgaacattgatgcaaaaattcttaaaaaatta

SEQ ID NO: 742463 - DNA, 583 bp, Homo sapiens
aagtcacatagtgttaggaaaacattcctgtgttttgaatacgatgaatccataggatagagaaaaatctgcttgttctattctgagagttctctgagatatcccttcactctgcttggcatttggccattgatattcaacaggtcactgaccaagcttttctaaatttttcagagagagttacttaccartaaggtctgttcttaaacctacctagttgattttcatatctttccataaagtgtcatgattctgtcatagaccctgacttaacattgtaaggactatgagtcctccattttttaattaatttttttttagcaaattaggacttcggcaggttttcctctcctaaactcattctttcctccacaggattgctttgtccatctcctgctttcatttcaagtgcataaacaaaacctcaaagggcctgggaaggtgaggcaggccagagtctgtgttctgtgttgagtgtcaagctatttgttaagaaggtctgcaacaggcctttggtgtgggctctgccagagactgttctgaacactttgcttgagatccgtgccctgtaaaatggatatga

SEQ ID NO: 742464 - DNA, 583 bp, Homo sapiens
aagtcacatagtgttaggaaaacattcctgtgttttgaatacgatgaatccataggatagagaaaaatctgcttgttctattctgagagttctctgagatatcccttcactctgcttggcatttggccattgatattcaacaggtcactgaccaagcttttctaaatttttcagagagagttacttaccagtaaggtctgttcttaaacctacctagttgattttcatatctttccataaagtgtcatgattctrtcatagaccctgacttaacattgtaaggactatgagtcctccattttttaattaatttttttttagcaaattaggacttcggcaggttttcctctcctaaactcattctttcctccacaggattgctttgtccatctcctgctttcatttcaagtgcataaacaaaacctcaaagggcctgggaaggtgaggcaggccagagtctgtgttctgtgttgagtgtcaagctatttgttaagaaggtctgcaacaggcctttggtgtgggctctgccagagactgttctgaacactttgcttgagatccgtgccctgtaaaatggatatga

SEQ ID NO: 742465 - DNA, 483 bp, Homo sapiens
cgaaggcagtttctcaatccagtttgaggatttacccaggactatttccggcttgaaagtggggttttgctggagacccacccttatctgcctagacatttgtctgcctcctgcccctatcgcaaataaacaaacaaaaacacatcccctartccctgatgcttcaagagaacttaacaagcttattagtttgaataaagaaacttgagccagtgacttccattccaattctggaggatctggagtgggttcactttttttcaggagtggcagtcatcaaaaaaggaacaaacttcaattggctttaatttttatgatagaagtataccactgctgcactgaagaagagagtgagcttattgtaaaacacagtctaacaattatgtttggattggagaattgctacttgggctcatagccaatggttttcacacatcaaaattaactgggtagattatgtacaattcaggatccccagcccca

SEQ ID NO: 742466 - DNA, 637 bp, Homo sapiens
ttatgttcaaagcagtcactatgcttcctgctttacacaggcagcagggcaggtttttcttgtcctccctgaactctcctttcctaaggcttacaaataatgtagagagaaagtcattgggagaatgaggaatcayaaaggtgggaaagaaagaaaagctcttttagcacaataacgtacaggggctctgcaggcaggaggcaaactggcacagaggaaagcctcattatcttttagatactttaaactccatgcagagacacagccaggtttaacaccaccaggagtggctggggagggaggtgggtgggaggacggggcttggaggaggtgggacctatacttttatatgggagggagggtggatacataacagcacgctcacctttaactaccttctctgtgtgcctttcaggcatgcttttagtctgcttcctctaacatctttctacatagtcttgattgacacggcaccacttctaaggccaaactatggaaagggtttcttcctatcccttccctaccttctcactcattttctcaagttccctcttgatcctaaaagaaacaaggcagaatcactggccacctatgcttacagttggggttgggacaaaaagaatatggtttgagggac

SEQ ID NO: 742467 - DNA, 438 bp, Homo sapiens
tgggtaaaatcatagttagacaatctctgaatcagaagagtcaatgacatttagatgtttgcagtctgctttttgctcaactgaagccccttagtgttacaagttgaattcagccagatacattggaatcttgttgaattattttttttttctttcagaaaagcaacttatgtatgccaactagtgcttcaaggaaagtgtyctgattctcttagaaatacgccaaggaattctggtagaatatggactccttttttttttttttttttttttgagaccaagtatccctctgttgcccaagctggagtgtaatggcgtgatctctgctcactgcaacctccacctcccgggttcaaggattcctgtgcctcagcctcttgagtagctgggactacaggcgtcaccatgcctggctaatttttgtatttttagtagaga

SEQ ID NO: 742468 - DNA, 598 bp, Homo sapiens
attacaaagccccagggacaccattcagattttattttacatatgtgccaccccgggagtacgtggagtacaatgaaaatgtaccccttggacttatgaaacacagaaacactggtctggtgaaactggttcagtagttctcagcttttactaagcatcagaattagatgagtttcttaataaaagtgcattcctaggcctcagcctcagagagtcacatttartaactttgatatgagcctacaaatctgaatcttaaattaggacacccacaggtgatacagatgcaagtctccttgggatcatttgctgatcaacattgacctagcaagtacattgttataggaacactatgatatcgggggaaccagcccccgataattcaacataggttcttttctattttccctaagtgtcggccagtctgagaagtaaagggaaagagtataaaagagagaaattttaaagctgggtgtccaggggagacatcacatgtcagcaggttctgtgatgccccccaagccacaaaaccagcaagtttttattagtgattttcaaaggggagggagtgtacaaatagggaatgggtcacagagat

SEQ ID NO: 742469 - DNA, 598 bp, Homo sapiens
attacaaagccccagggacaccattcagattttattttacatatgtgccaccccgggagtacgtggagtacaatgaaaatgtaccccttggacttatgaaacacagaaacactggtctggtgaaactggttcagtagttctcagcttttactaagcatcagaattagatgagtttcttaataaaagtgcattcctaggcctcagcctcagagagtcacatttagtaactttgatatgagcctacaaatctgaatcttaaattaggacacccacaggtgatacagatgcaagtctccttgggatcatttgctgatcaacattgacctagcaagtacattgttataggaacacyatgatatcgggggaaccagcccccgataattcaacataggttcttttctattttccctaagtgtcggccagtctgagaagtaaagggaaagagtataaaagagagaaattttaaagctgggtgtccaggggagacatcacatgtcagcaggttctgtgatgccccccaagccacaaaaccagcaagtttttattagtgattttcaaaggggagggagtgtacaaatagggaatgggtcacagagat

SEQ ID NO: 742470 - DNA, 633 bp, Homo sapiens
tccacctaatccattccccattatccttcaaacgttgtctccaatgccttcagggaattatccaaccatcagcctaccttggggtcctctacagaatttcagggtcccatgtagcctttattcctagcgtttatcacagcaagacttgagtcttaccatgcacaactcttacattaccaaaacaattgcttatccaacaatggacacattgaaaccctggaatttcttctaatggaatttttttgaccatgtattttttaatggtatgataaacacattgagaacaattttcaaggtgagtgataatggagtgattcgctaggcagccgatggcttgttgaagatgctgtatcagctcactctccacattataaacackcagcatgggtcaaaatggacagatcaaaaatgactctgtcagaagtatttcactatgacaatcttaacaactacagattgcttacaaatgaacaagagatggtagggaggtactaggtgagagataactttggaaatacatggcaaatgcaaatagataatacgaatagattgtacccaacacgtttaaacatcttctccttcacgttccgtagaatctcacctgaagattttcctctgaactctgctttcact

SEQ ID NO: 742471 - DNA, 587 bp, Homo sapiens
tgtaaatacattttaaatttaatttaaaatctgaaacgttgctgggtgaggtggctcatgcctgaaatctcagtgctttgggaggccgagttgggcagactgtttgacccctggagttaaagaccagcctgggcaacatggcaaaactccatctctataaagaatacaaaaaaaattggctgggcatggtggcatgcaactgtagtcccagctactcgtaaggctgaggcttgaggatcacctgaggctaagaggtggagggtgcagtaasccttgatcgtgccactgcactccagcctgggcaacagagtgagaccctgtctaaaaaaaaaaaaaaaaaaaaaaaaaaaaaaaaaaaaaaaaaaaaaaaaagttaaatctgatgcatcagataaacgtttctccagctccttgctcatttagtcatacgcaggacttttgctctggttcctgattattcggctcttaataattttttaaactttttcatgaaaatttgctctttttttaaaaactatcttcttcagttattgcctccaacattcaaaagtcacctagttcttatcctaaagctgctaatagtatga

SEQ ID NO: 742472 - DNA, 666 bp, Homo sapiens
gtcaggatcccctaattccaaaatcagagatactacaagagaataaaattacaggccaatatttctgatgaacaaacatgcaaaaatcctcaatataatactagcaaacccaatgcaacagaacattaaatagatcacatatcatgaccaagagagatttatctctggaatgcaaggatagtttaacatacacaaatcaatcaatatgatacaacacatcagcaaaattttttagaaacagaattatctcaacagatacagaaaaggcaaatgaaaaagttcaacatctatttatgaaaaatattctcaacaaaattggtatagaagaaaattacctcagcacaataaagatcatgcgggaaaagtacatagctaacatcttaatccrtggagaaaaactgaaagctttccttctaagatccagcacaagaaaaggatgcccacttttactacttctttttgacatagtactgaagtcctagccatagcaattagacagggaaagaaaataaaaagcaaacaattggaaaggaagaagtaaataatctgtatgcaaatgacatgaccacagacataaaaaactgtaaaggctcactgttataactaatatctattttaactaataaacaaaacagtaaagttgcagaatacaaaatcaacattcaa

SEQ ID NO: 742473 - DNA, 626 bp, Homo sapiens
accattatattagaattttgattgaattacacctataaaataacttgggaaaaatagatatctttacaatatctagctccagacacaaaaatgaaactgttgtttccatgtatttaggacattttgtatttcctaaaacaatgggatttgctactttagctaaaaatttctaaacataattcagtgttacatataaaatacatctatatatctatctttatagttatttgaacraaatatgcttttcactaatgctttctatttattgctggtgtgggaatactactgatatttacatatacatttttatattactttattaagttcattaataaattccaaacattctttatgttttgtgtgttctagagtctgctttttgtacattaatattcattctcacattctttagcaatagaacttttgtatatggccatgaaaatagagattgcatgtcctggtctcttttacagcttagagtgatgtgagaccaagttttcttcaatggcatgtaagtaagagtcatgtgtgctacttcctgatctcgcccttaaaagttttctttatatgtttattagctccctataatacctgctggctggaagtagtgccatctgtgacaggca

SEQ ID NO: 742474 - DNA, 534 bp, Homo sapiens
tttaccttttcacttaaaggatacactttatggatgctctttggcatatccaaattgccaacatcacttctcttgagctctggggccattattaagaaactgagggctaggtgcagtggctcacacctgtattcccagcactttgggaggccaaggcgggtggatcacttgaggtcaggagttccagaccagcctagccaacatggcaaaaccctgtctctactaaaaatacaaaaattagccaggtgtgctgacaggcacctgtagaacctgggaggcagaggctgcagtgggccaagattgtgtcattgtactccaacgtgggctaccaagcaaatgtgtgtctcaaaataaataaaagaaattaagggttatttgaacataagcactgcaataccrctacagtcgatctgataatcacaacgctgctaagtgaatccaacgacaaagagataattcatgtcccaggcaggacagagtgggatagtgagagatttcgtcactcaatcagaatatcatgcaatttacgactta

SEQ ID NO: 742475 - DNA, 523 bp, Homo sapiens
cctacaattatgggagctgattaacagtttctgtgaggctcttctcttccagtctgatgctggagaggcaatcaagagggaaaggcaggtggaaagtgagggacagcaagaacaagctggaacccacaagcacatccgcagctcacaaagccagctaaaacctgtgtcagttcctgctgcctctgaccgtaatggtatgggtgtcctggagaagccaggttcctttgtcgtgtagctaaacacacatacatgcctaggagtcagaaaaactaaagaaggatccagggaaaggtgctgcaattgcagatccagctgctgcctctcaccacgaggtgagctggcaggtaaatracaacgcacgtgaactacaaaatggctgctgcttcattttcagcctccaaatcccccaagactctctcttgtggtgcacatgaacagaaacataggaaagggaagtctaggcactgtatttcagcctagccgatttgacatatatcgaagccacggcagtctacctcttgtc

SEQ ID NO: 742476 - DNA, 598 bp, Homo sapiens
aaatggttaagagcacagtcactggagttaaaacagcctggatccaaatcatgtttctgtcacttatcagcatgtgacctaggacaagggattaaacctcctcttggaggtttgttcatcgcttaaaggggattaatagactacatgccttagagcgttctaataaggattaaatgccatgtgcttaaaagagtgtctgggggccgggcacagtggctcacgcctgtaatcccagcactttgggaggccgaggtgggtggatcacctgatgttaggagtttgagaccagcctgatcaacatggagaaaccctgtctctactaaagataaaaaattagcagcgcatggtggctcatgcctgtaatcccakctactcaggaggctgaggcaggagaatcgcttgaactcgagaggtggaggttgtggtgagcctagatcacaccattgcactccagcctgggcaacaagagtgaaactccatctcaaaaaaaaaaaaaaaaagaaaagaaaaaaaaaagagtgtctgatatccagtgagcattgtgtaagggttttataattaatgttattcccctaccaggctactatctctccaaaaa

SEQ ID NO: 742477 - DNA, 667 bp, Homo sapiens
agtctcaagtatttctttgtagcaatttgagaatagaacaatacaggtgaggaatcctattgtctacactgtttcataatctgcttctttatctaacacattctttatctaacacatcgtgactgcttttctacagtgataaatattctttaggatcatatttaatggccacatattgcagttctataacagtaccagagttatttaatcaggctcctatttgtggtcatttaaattctsttttcttactgagattttttttttaaagcactgctataaccaaatctttgtacacaaaaatatagttatttcctaaagttaaattccttgaagttggatggtagagcccaagggtatatgcagaaatctcagtgttttttttttgttttttgtttcgagacagggtctagttctgtcatccaagctggagtgcagtggcataatcacagctcactgcagcctcaacctcctgggctcaggggatcctcccaccttagcctcttgagtggctgggattacaggcacacaccatcaggcttggctaatgtttgtattttttgtaggaacagggtttcaccatgttgcccaggctggtcttgaacacctgagctcaagtgattcggcttcagcttcctgaagtggcaggattacaggcatgagccgccac

SEQ ID NO: 742478 - DNA, 667 bp, Homo sapiens
agtctcaagtatttctttgtagcaatttgagaatagaacaatacaggtgaggaatcctattgtctacactgtttcataatctgcttctttatctaacacattctttatctaacacatcgtgactgcttttctacagtgataaatattctttaggatcatatttaatggccacatattgcagttctataacagtaccagagttatttaatcaggctcctatttgtggtcatttaaattctcttttcttactgagattttttttttaaagcactgctataaccaaatctttgtacacaaaaatatagttatttcctaaagttaaattccttgaagttggatggtagagcccaagggtatatgcagaaatctcagtgttttttttttgttttttgtttcgagacagggtctagttctgtcatccaagctggagtgcagtggcataatcacagctcactgcagcctcaacctcctgggctcaggggatcctcccaccttagcctcttgagtrgctgggattacaggcacacaccatcaggcttggctaatgtttgtattttttgtaggaacagggtttcaccatgttgcccaggctggtcttgaacacctgagctcaagtgattcggcttcagcttcctgaagtggcaggattacaggcatgagccgccac

SEQ ID NO: 742479 - DNA, 627 bp, Homo sapiens
gaatattcacatgtgtgtatgtacacacatgaaatatatacacaatatatatttgataatttagtataggataaagacaccatttcaaagcagagtggaaaggttggactggttaaggagtagtatagagacaaaatttgggggaaaaggatggttattttcttaagccattcacaaaaataaagtccatattgatttaggtgctaaagataaatagtaaaattctagaagttttasaagaaaatgtaggaaaatatacatatattattgaattagggaaatactttttaaaccacaaaatgtgagaatcacaaggaaaagatttacttacatcaaatttaaaattatatttaacaaaaatgaccacaagcaaatgtaaaagacaaactgggaggagcaatctgcaacatatacaacattcaaagaagtattacagatatgtaaaaagctgccaaaaaataaacatcaagaaagaaaagacaactcaatggaaaaatgggaaaaagatatgaacactgtttgctgaattcaaagaagataatcgagtgaccaaaaaaacatattattggtatcaagttgctcaacctcggcaataatcttaataattaagaaataaaataataatca

SEQ ID NO: 742480 - DNA, 588 bp, Homo sapiens
tatgatttgcaaatattttctcctgttctgcaacttgtctcttcactccgttgattgtttcctttgctgtgcggaagctttttagtttgaaataattctatttgtctatttttctttttgtttcttgtgcttttggggtcttatttwaaaaatccttgctcagaacaatgtcatgaagcatttcccttgtgttttcttccactagttttattgtttcaggtcttacacttaagtctttaatccattttgatttgatttttatatatggtaaaagatagggatctagctttattcttctgcatgtggatatccagtttccagcactatgtattgatgagactgtcttttctccattgtgtgttcttggaacctttgtcgaaaatcagttggctctaagtatgtgaatttatttttgtgttctccgttctgtcccattggtctgtgtgtctggttttttgtcagtatcatgttgttttagttactacagctttgtagtatattttgaagtcaggtagtgtgatgcctccagctttgttctttttgtttccttttctgttttccatttttcctcaaagactgccatgaata

SEQ ID NO: 742481 - DNA, 634 bp, Homo sapiens
actgtcttttctccattgtgtgttcttggaacctttgtcgaaaatcagttggctctaagtatgtgaatttatttttgtgttctccgttctgtcccattggtctgtgtgtctggttttttgtcagtatcatgttgttttagttactacagctttgtagtatattttgaagtcaggtagtgtgatgcctccagctttgttctttttgtttccttttctgttttccattttycctcaaagactgccatgaataccaccactttgagaaaggcaggaaagtgaatttttgtccggcttaaacttcttatttgcatatagaatattttgaatgggctatagatagctccctagcacatccatgaagaaagcacagtatctcttcagaatgccttagttaagcattgttctgattcatggtggaagaacaactttaaagaactgtagccttgatgatggctaattaaaaatgttcctaaagctgggcgcggtggctcacacctgtaatcctagcactttgggaggccaaggtgggagaatcgtttgagcccaggaggttgaggctgcagtgagctgtgattgcacccctgcactccagcctgggcaacagaaaaaaagaaaagtgcctggttgcattagc

SEQ ID NO: 742482 - DNA, 634 bp, Homo sapiens
actgtcttttctccattgtgtgttcttggaacctttgtcgaaaatcagttggctctaagtatgtgaatttatttttgtgttctccgttctgtcccattggtctgtgtgtctggttttttgtcagtatcatgttgttttagttactacagctttgtagtatattttgaagtcaggtagtgtgatgcctccagctttgttctttttgtttccttttctgttttccatttttcctcaaagactgccatgaataccaccactttgagaaaggcaggaaagtgaatttttgtccggcttaaacttcttatttgcatatagaatattttgaatgggctatagatagctccctagcacatccatgaagaaagcacagtatctcttcagaatgccttagttaagcattgttctgattcatggtggaagaacaactttaaagaactgtagccttgatgatggctaattaaaaatgttcctaaagctgggcgcrgtggctcacacctgtaatcctagcactttgggaggccaaggtgggagaatcgtttgagcccaggaggttgaggctgcagtgagctgtgattgcacccctgcactccagcctgggcaacagaaaaaaagaaaagtgcctggttgcattagc

SEQ ID NO: 742483 - DNA, 562 bp, Homo sapiens
agcctgctcttctatcatttctggtagtagtctttcacattctctttgtgtttccttccactgcaatggtaggttctcacagatggagagtcgtgggtgatgtatgtattgcagaagtcacaacaaaacttaggcatgttggggggtagcccgttaaccactctcttccctgattttgctttgttttgatgtgacattgaagcactgcacatgcgcaragcagctaatagttcttccctctttggattgttggatgaaatttttttgaattttattttttattgatacataatagatatatgtgttttgggggtacatatgataatttaatatatttatataacttgttaagaacaaatcagtgtaattgggacagccaccatcttaaatacttgtccttcctttttgctggaaacatttgtattattctcttagctattttgaaatatacaataggttattctaaactataatcaccctagtgatctatgaaacactacgtcttatttcttctattggattaaatgatttaatacctgcaatgctcttagcattgtgcctg

SEQ ID NO: 742484 - DNA, 502 bp, Homo sapiens
actttcctattcctgtacatatcctaacacggagtagcgtcagcagagacactgcctggccatgctacttcccaccatgtaaacttgagtaagtaactgagcactctttctcaggttcctcacttgtaaactgggctgttactggtgtctgcttcatagggttgttttgatgcttgaatgagttaatgggcataagatgtggagaagggcctgctggtgcatatgaagtactcagtaagcaggtagcggtctgggtctgggcaggacacccaaattgggtaactgaggagaggctgaragactatttacaaaagtataggtcagatgaagggacaaaggatggtggaacaccatgggctataactggctgagaagtctttagtactcctaggcctgatgaggcgaagggaggaagtagttatcagacacccagcagcctcaaaacagggtgacagggcaggaactgtgggggtctggacaagagtgcagctgggccaacctg

SEQ ID NO: 742485 - DNA, 637 bp, Homo sapiens
ctttataaaatcaatgtttgtgttgattttaagaatttaaaattaacaggggcaactcattgttcaggttcttggtggcaccttcctgctgtcctcagtcctacccagacttacaagctaatttggtatcatggattgtcagtaacagctttawggttttagggaatgctgaatgcaaatctgcctgtaaccaggtaaaacacagggtagctttggccattgtgtaagtcattttgctaggattagaactcacacctacagacttcctgccccactctgctggtgctgtgaaggcctgactaaacactaccctactactgtgggggcaggtgcctaggctctggcctgatcttcactgttccctcctcaatctggatactcagtgtggtcgcagaataacagccccctaaagacctccacatcttaatatgaaccttacatggcaaaaggatcttgcagatgtcattagattaatcatgtcttgagatggggagatgattgtggattatttggacccaatgtaatctcaagcatccttataagggaaagaaggagttagaagaatgaaagaatgatatgtgagggtggatatagaggtcagaggtttgaagatgctattctgctggctctgaagatg

SEQ ID NO: 742486 - DNA, 605 bp, Homo sapiens
atcacacatataatgcagaatcatagagtacagacctgaaggaatgaagcgttgactaggaatactgtgccccaaatcaaatgacatctcatcatctggaaagacccccagagttttcttcaggtgaacttccccccggcctggcacctccagccaggtacatgtgctcagatggagcccagcacctccactccagtctagactcgggactcagccaggcccgatcagagcgccagagacacttggcctcagtgactgaaggaggcatggcacgtgacccagtcagagcacygaggtgaggtgcaacccaaggtggacaggactattaagagagagacatgcgctcttttttacccctctactctccctgaacctggaagaaaatgggtttgggattgcagcttgccatttgccatcacaggaacctgggagagtaaagccacacgaaggacagtgaagctgagaactggcaagatattgtgtccttatgacactttttggaggcccaggatccagctgtgtgtctgaattttcaggttatgttagccaatagatcccatttttcttagatttaagttttctttcacttgtaatcaatagtccta

SEQ ID NO: 742487 - DNA, 547 bp, Homo sapiens
tatagaatgctgggatggtggggttattttccaacattttaagtcttttactccactctcttttgcttgcatggtgtgcaatcagaattttttttataattattattcttcgtgttctatagataagatttttctcctgttttttttccatatttttctttttgtttttggttttayacaatttgaatatgatatgcttagtccatttttggtgtttgcttggtgtttcttgagcattcagaatttgtggtttggtgtctgtcattatttttgagaaaatgtcagccattattactccaagtatttttttctactttactttcttctttttcttcttctaatatttcatttacacacgttatgccttttgcaattgttctacaatttttttgaatgttctgttctcctttttaaattatcttttctcagaaaccattgtaccaaaaggataccttcactcatgtttatcacagtactattgacaataccaaagtggaattggccttagtggccattagaagatgattggataaagaaaatgtggtgt

SEQ ID NO: 742488 - DNA, 500 bp, Homo sapiens
gccagtataggatgatagcagaaagaattagaatagagaggaagattgcatggtaggaaactgagtctggggggcaaagagaaaatgaaaagagaaagaaaaaaagggaacaagaagacaagtccaggagcagaaagcaagctgcctgtgtaaccggaattcctgcactggggcctcagctctgccacacacaggctggtgacttgtgatttgtggtacaaatcatataaccacagtttcttaatctgtaaaatgaggttagtaatgaaatgggaagagttcccttatccccctcgcagggcatrtgatgggggtgcggttgcttctttggtgccccgctgctcaaaacccctaggggaagaagacagtcgggcaagttgtggggctccgatcccacggcagggtctggggctcaatgctcacagctcctgaggccccagtgggcatgtgttacagggtgctcttttagcatagccgtccgtaggccgcttatgtttatc

SEQ ID NO: 742489 - DNA, 539 bp, Homo sapiens
ccccttgctactgctgacatcccattgagcagaaatcagtcacatgggcctgacttgtataaatgccagtgaaattgggattggaattggaaatgtcatttccctgtgtacccaggatgaagacattgcagtgaaattagttatcatgtgacagtcccaacaattgattactttggttttagctactgaggtttgatcaaaataaagcatacttcctatttttgtagcctgtgcatatatcaataccctttttttctcagagactaatgagagtgatgacccacagtggttcttaacttttgcatgtcatgaagaggatgtctttcatttaaatcccaactaaggccaggcatggtggctcatgcctgtaatcccagcactttgggaggccaaagcakgcggatcacttgaggtcaggaagttcgagaccagcctggccaacatgctgaaaccccatctctcctaaaaatacaaaaattagccaggtgtcgtggcacacgcctgtttatcccagctactcaggaggctgaggcaggaga

SEQ ID NO: 742490 - DNA, 602 bp, Homo sapiens
gagggaaaaggatacaccaggaattaaaaaaaaaatcagggaaaaatatctgcctaacaatctgtccttctacagcagtcgttctcaactgatggttaattgtccctcccccaccaggggacatttggcaatggctgaggaccattttggttgtcacacctggaggagggggcttgtgccactggaatctggtggggagaggctggggatgctgtcggacatcctacaatgcacagcagagcccctacagtaaaaattacctggtccacgcatcaagagtgctgtgacagagaacacttctataagaatttgttctatttttatttttaytttattttatgctttaatgtattattattttttgagatggagtctcattctgtcacccaggctggagtgcaatggcatgacctcggctcactgcaacctccgcctcccaggttcaggggattctcctgcttcagcctcccgaatagctgggattacaggcatgtgccaccacgcccagctaagttttgtatttttagtagagatggggtttcatcatgttggcctggttggtctggaactcctaacctcaagtgatccacccgccttggcct

SEQ ID NO: 742491 - DNA, 578 bp, Homo sapiens
tacacacatatacacaaaccagacacacacaaactagatagaaacatacacacatacatacaaactagaaacatgcacacaagatggtctaggttcttgaaaatggaaagaggcagattcgtgaaactattaaccagtaggactcctcctaatcctagaatagccaagtgggttgatggtttaagagcacttaggtgaaaaaaggaaatagaatctttaattgaaagcattgccatagcagttgttcctataatccgtatctgtgaaacaaaccacccaagctttgtaggataaaacaacacaatcgtttattattattattattattattattrttgttgttgttgttgttgttgttgttgttattctctgtcatggtcctggtgccagctgggctcagctaagtggttcttgtttggcaggagtgagaaggtctgtcatacagttacagtcagaagttgtctggggctaagtcatctccaaggtttgcgcactcccatacctggtggtcagtgtggactgtcagccagaccactcaaatgtagcctctccaagtggcctgggcttcctcacaacat

SEQ ID NO: 742492 - DNA, 579 bp, Homo sapiens
cacacatatacacaaaccagacacacacaaactagatagaaacatacacacatacatacaaactagaaacatgcacacaagatggtctaggttcttgaaaatggaaagaggcagattcgtgaaactattaaccagtaggactcctcctaatcctagaatagccaagtgggttgatggtttaagagcacttaggtgaaaaaaggaaatagaatctttaattgaaagcattgccatagcagttgttcctataatccgtatctgtgaaacaaaccacccaagctttgtaggataaaacaacacaatcgtttattattattattattattattattattrttgttgttgttgttgttgttgttgttattctctgtcatggtcctggtgccagctgggctcagctaagtggttcttgtttggcaggagtgagaaggtctgtcatacagttacagtcagaagttgtctggggctaagtcatctccaaggtttgcgcactcccatacctggtggtcagtgtggactgtcagccagaccactcaaatgtagcctctccaagtggcctgggcttcctcacaacatggt

SEQ ID NO: 742493 - DNA, 618 bp, Homo sapiens
aaataaaacaattaaggcagcacacaatatacatcacattgttacaattttgtaggccttaaaattagtaaaaatatttactatatttaagaatttccatttaccaatcccttgcccattgtgtaaatttaacgtattcattcactgtcttaaaacaatactcttaaatgtgctctgctttgtgttagttacggctcttttagccaccagctcaacatttaatgagttctgactgaatcactcagagttgttgaccctttgtcccaggctttttccaaagccctttgtctgtgctcttgacacaagtctcacacgttgctttttcccaagcgtaacattgtatgtatgcctctgaggctagcaggtctattctctatgtctatgtgtgtgtgtggatgtgtctatctttccctttctctctttctgtctctctctctctctctctctctstgtgtgtgtgtgtgtgtgtattttttccttcaagacttcatggggagagtgtgagagatgcagacctcttatttgttctctgtctttcatcatttttagaaatgagagtcaatagctcttgtttcaattatctccaactgtaaagactaggcatttaagcatatttga

SEQ ID NO: 742494 - DNA, 670 bp, Homo sapiens
aagatactgtagaatatgaattattatagtcacaagcaacagaaataacctctctgttaaatatggaactgcttttgatccttttatggccattatatttgtattattaccacttaagtttttatttatttatttwttttttttttgagacagagtctcactctgtcgcccaggctggtgtgcagtggtgcaatctcggctcactggaaactctgcctcctgggttcacgccattctcctgcctcagcctcccaagtagctgggactacaggtgcccgccaccacgcccagctgattttttttgtatttttagtagagacggggtttcaccatgttagccaggctggtctcaaactcctgacctcgtgatccgcctgcctcaggctcccaaagtgctatattaaactaaatatttaaagttttatgtcattgtggccattcctattttttcaaacaaaatgagttcatttacattaattacatatgccaatcaagtataattatgtaatattttcaagagtcaacaaataaaaatttaatcttgtctgaatcagatatcactagatattttgaagatgtagatttttagtaagaaatagtttagcaaaatgcggagaatgttgaatcagcatcatcttttagtttgctaataataaagtaattatcttat

SEQ ID NO: 742495 - DNA, 670 bp, Homo sapiens
aagatactgtagaatatgaattattatagtcacaagcaacagaaataacctctctgttaaatatggaactgcttttgatccttttatggccattatatttgtattattaccacttaagtttttatttatttatttattttttttttgagacagagtctcactctgtcgcccaggctggtgtgcagtggtgcaatctcggctcactggaaactctgcctcctgggttcaygccattctcctgcctcagcctcccaagtagctgggactacaggtgcccgccaccacgcccagctgattttttttgtatttttagtagagacggggtttcaccatgttagccaggctggtctcaaactcctgacctcgtgatccgcctgcctcaggctcccaaagtgctatattaaactaaatatttaaagttttatgtcattgtggccattcctattttttcaaacaaaatgagttcatttacattaattacatatgccaatcaagtataattatgtaatattttcaagagtcaacaaataaaaatttaatcttgtctgaatcagatatcactagatattttgaagatgtagatttttagtaagaaatagtttagcaaaatgcggagaatgttgaatcagcatcatcttttagtttgctaataataaagtaattatcttat

SEQ ID NO: 742496 - DNA, 637 bp, Homo sapiens
ccattattactatcatctggaagaagaggcagatcattcttgattgtgcatagccaagaacaactaactcccagagacacagtcccagccattcaattctcctctgtccatagacaggatcctggagagaaggacacttccttctccccattctttcccacacaaaagttaccaggagtttgggagtttgcccagtgatcgtgatgaaataagaataattattattatatgtatagatttggaggttatagcataagtatcaaacctggttcttctattcaaggaactcatgatctggtaaggggaagcagtggggaataaggaactgtttattccataattcaagcattgtgacgtgttgttctgtgaaatgctgataataatagtatgaggtttcgragaaagaaggtctcaatattctcaatatttacctaactctttcatcaaagatttattgggagtcttgaactaaatatttaaaataaacaaagaagagaataagaatggaacagagtcaagtgtaccttagaagagttctgataggatgtgaatgccctcaggataggaatattattttattcatttgaaaaccctaatagaaatacagttcctggcatatagaataaagtttcctagt

SEQ ID NO: 742497 - DNA, 637 bp, Homo sapiens
ccattattactatcatctggaagaagaggcagatcattcttgattgtgcatagccaagaacaactaactcccagagacacagtcccagccattcaattctcctctgtccatagacaggatcctggagagaaggacacttccttctccccattctttcccacacaaaagttaccaggagtttgggagtttgcccagtgatcgtgatgaaataagaataattattattatatgtatagatttggaggttatagcataagtatcaaacctggttcttctattcaaggaactcatgatctggtaaggggaagcagtggggaataaggaactgtttattccataattcaagcattgtgacgtgttgttctgtgaaatgctgataataatagtatgaggtttcgaagaaagaaggtctcaatattctcaatatttacctaactctttcatcaaagatttattgggagtcttgaactaamtatttaaaataaacaaagaagagaataagaatggaacagagtcaagtgtaccttagaagagttctgataggatgtgaatgccctcaggataggaatattattttattcatttgaaaaccctaatagaaatacagttcctggcatatagaataaagtttcctagt

SEQ ID NO: 742498 - DNA, 526 bp, Homo sapiens
tggtagtgcgctcatctgaaattgttctcgtcagcaagggagccagttatgaagctaagcctgtttggagggaacccaactctggtgttttccaagtaaatcagcttggaattaactttcctttagcaagataataatggtcatgtctagttttgattaaaaggggcttttgggtttgcaacaaaggaagaaactattgatatctcacgaggattttaaggtttatgtaagttaacttttctgctgccatcacttcrttactcaaaaagagcaattaatgcattgataaggttggctttgatttctgatgaagctcatttgctttactgagttttttcatcttcttgcttgcttgcagggctttttccgcagaagtattcagaagaatatgatttacacttgtcaccgagataagaactgtgttattaataaagtcaccaggaatcgatgccaatactgtcgactccagaagtgctttgaagtgggaatgtccaaagaatgtaagtggagtctcaaaaaacttttt

SEQ ID NO: 742499 - DNA, 610 bp, Homo sapiens
cgatcttttggatgttactgtcagcttgtgtgaactagccagctttttgcctgattctggcagagcaatccggccttttttttttgagatggtcttgcactgtcgcccagactggagcgcagtgacatgatctcagctcactgcaacctccacctcccaagttcaagtgattctcctgcctcagcctcctgaatagccatgactacaggtgtgyggcaccatgccctgctaacttattttttgtagagacggggtttcaccatgttacccaggctggtcttgaattcctggactcaagtgatcctcccaccttggcctcccaaaatgttaggattacaggcaatggccaccatgcccaactgcaatctggcctttggctgttaaatttggtgtgtccccccaaaacgatcaagtattacatcaaaacagttttcaaagcacacgcctgttagataaagaagaatgcatgtgcacaggatacagcacttcatactgaagaagccagtttgtcagtttatgcaacttgttttgtatgcacatggattatagaaacagaaatgtatcaaagatggtatcttacttggtgagtggttggttagaaagcaactgc

SEQ ID NO: 742500 - DNA, 656 bp, Homo sapiens
aacaaatacttcaaaagtttaacgaattgggctatgcagtcatgcctcatccaccatgttcacctgacctcttgccaactgaccacttcttcaagcatctcgacaattttttgcagggaaaacgcttccacaaccagcaggatgcagaaaatgctttccaagagttcatcaaatcccaaagcacggatattttacgttacaggaataaacaaacttatttctcattggcaaaaatgtgttgattgtaatggttcytattttgattaataaggatgtgcttgagcctagttatgatttaaaattctgtccaaaaccacaattacttttgtaccaacctttaaacacgtaagtatggttttgttccaacacaattttatttataaaaacagtcagctggacagatttggcctgggggccatgtatgcccacccctggcctagtcaagtaaaatgcaacagcagtgacaagtgacagagtgacttttgagcagaggctaaaaaaggcaatacagcttccatctcctctctctctctctctctctctctctggtaacctggtaacacactctgggagccctgaggcaacatataaaaagtttagctagcctgaagctgcctgactggtgagaccaaatgaaagaccacacagagacagaa

SEQ ID NO: 742501 - DNA, 656 bp, Homo sapiens
aacaaatacttcaaaagtttaacgaattgggctatgcagtcatgcctcatccaccatgttcacctgacctcttgccaactgaccacttcttcaagcatctcgacaattttttgcagggaaaacgcttccacaaccagcaggatgcagaaaatgctttccaagagttcatcaaatcccaaagcacggatattttacgttacaggaataaacaaacttatttctcattggcaaaaatgtgttgattgtaatggttcttattttgattaataaggatgtgcttgagcctagttatgatttaaaattctgtccaaaaccacaattacttttgtaccaacctttaaacacgtaagtatggytttgttccaacacaattttatttataaaaacagtcagctggacagatttggcctgggggccatgtatgcccacccctggcctagtcaagtaaaatgcaacagcagtgacaagtgacagagtgacttttgagcagaggctaaaaaaggcaatacagcttccatctcctctctctctctctctctctctctctggtaacctggtaacacactctgggagccctgaggcaacatataaaaagtttagctagcctgaagctgcctgactggtgagaccaaatgaaagaccacacagagacagaa

SEQ ID NO: 742502 - DNA, 627 bp, Homo sapiens
gtacaaaaaaattatacccaaggacaagtattcttgggcatttgaagaaacaactacgtaatagtagagttaatctattgggagtattttactttctgtaggataaaaataaagataaaataaacattacagcagcccatgagggatgaagtggggaacagccatgtttagtcctaatcctcaatcagaggacacctcttaggatagagggacagggtccgtaggcaggaaagagtgttatcacctgaatccattttattttattttattttattttttgagacagagtctygctctgttgccaggctggagtgcagtggcaggatctcggcttaccgaaacctctgtctcccaggttcaagcaattctcctgcctcagcctgccgagtagctgggattacgggcgcccgccaccacgcccagctaatttttgtatttttagtagagacagggtttcgccattttggccaggctggtcttgaactcctgacctcacgatctgcctgcctcagcctcccaaagtgctgggattacaggtgtgagccaccgtgcccagcctgttttattttttatttttttatttttgagacaatgccttgctccgtctcccaggctggagtgcagtgg

SEQ ID NO: 742503 - DNA, 648 bp, Homo sapiens
tcatcctagctctccagcaatggatccaaaccaagaagaaatctctgaattgccagataaagaattcagaaggttgattattaagctattcaaggaggaaccagagaaaggcgaaaaccaacataaataaattttttaaaaatacagaatattgacgaaaaagtctccaaagaaatagatatcataaagaaaagacaattacaacctctggaaatgaaagacacacttagagaaatgcaaaatacacgagaaagtttcaacaatagactcgaatgagtagaagaaggaacttaagagctsaaagacaaggctttgtaattaacccaatctgacaaagacaaggaaaagaagtgaaataatgaacaaagcctccaagaaacttaggattatgttaaatgaccaaacataagagtaattggtattctgagaaagaagagaaatctaaaagtttggaaaacttatttgagggagtaatcaaatgaaagttccctggtcttgctagagatatagacatccaaatacaagaagctcaaaaaacaccctgaaattcatcatgaaatgtcatcatctaggcacgtagtcatcagattatctaaagtcaaggcaaaggaaagaatcttaagtgccatgaggcaaaagcatcaggta

SEQ ID NO: 742504 - DNA, 432 bp, Homo sapiens
ttgggtagaactccacagggaaccatctaggccaaagttttctttgggaaagattttcattaatacatttcattgctaatggaaatagaattactagattttctacttcttcttgagttaatttgggtacttttttttttttttttcaagaaatttgtccattttagccaggtatggtggcccatgcctgtaatcccagcactttgggtggctgaggcaggaraattgcttgagtccagaagtttgagaccagcctgggcaacatagcaagaccacatctttacaaaaaagattttttttttaattagccaggcatggtggcacgtgcttgtagtcccagctagttgggaggctgtggtgggaggatcacttgagccctagggaggttgaggctgtagtgatttatgactgtgccattgcatttcagcctgg

SEQ ID NO: 742505 - DNA, 617 bp, Homo sapiens
actatcttatacctgagaaacaaaaggcatagaaagatcgagtaccttgtccaagaccacacagccaccatgccgtagaagtgggactggaatccattctgtcatacaactatagcccaggcaggagggggagaggtcattacctcttccttcccccttctccatggaactcttgaaagattttagctccatctgtcaccaagaccccagggcatctgtgatcaataggatctcagccatgtgcaacacccctgggggcatgcagccgtgtgggrcacccggtcctaaatgttctgtatgcatgtggccaccctcctttgccatgccttgaagagccactccacagtctccccaggttctcctaggttgtagccacggagctggggtgaatggctgctgttcagagttatgttcctcccctccttaatccagagagaccctgcctttgctcgccaggcatctgcactctgtagagaagacaccttgagataggaaaaatcccaggcagcatgagagcagtcaaaaatgccagccactctctcctggtacaggattctgttttccagagtgctcccggtgcttagcagtgaaagaggatggagcctaggagctgcaga

SEQ ID NO: 742506 - DNA, 630 bp, Homo sapiens
ctgcaggatctggccatttcaggagttcagccagctccttcctgaggatgtactgtggtgactcatggccagccccccgggagaataattcagaatctacttgccaaaatttaacaatagcagcaacattttaatcatctcctaggagtgacagacgtcactgcctccaggggaagaggaggtgatccacccagctgcatcctattcactgcctcccttcctctcagctgggtggcagtgttggcaggatggggctgaggtgtgggtgaaaggtggtgtcattttttcatgatcagagaatgtgaaaggatgctgcagttttaatgwtcttcttagccttggggcccttgtgtatcaactgaggggattggactgtgtgatccctatgtctcattgcagctcagaggttctgtggttctgaacattgcaaagcccctgcactaccctggaggtatttctgcccctgcagcatgagtagaacctgaaaccctaagaaaaggggtgattcttccaaggattttcccccataaataagctgtactgaaaacagcccttaagtccttacgctagccagctaaacttctcgtatttgctagtcatttttaattattggaaactaagaccaggaat

SEQ ID NO: 742507 - DNA, 588 bp, Homo sapiens
agagagcttcaagactgagaccataactcagaccgttctgggccaatgccagcctctgccaatcatgcactgatgtcatattgaaaaaaagaaatatgacccatgacttgggcccacctactgcacatctgtgtctgatgtttgcacacagagaatgcagtggtctcaagctgggatgggcctaccgtaaagtcaagagagacactgccatgtctctttcccatggttttcctttcaaattcccacagattttgcattctactccataatattctcaggagccgcagtacttacacatttaactttcctgaattcaactatatgaactgagcgaaaagagaaggtggatccgaatgtgaccttacttggaatatgattgctgcagatgtaattagttaagatgaggtcatactgaagtggggtgggaccctaatccaatatgamtggtgtctgtaaaaaggggaaattgggacatagacaaacacatagaaagaccaccacagggagatgaaggcagagatcgaggcaacgctcctacaagtcaaggaatggcaaacattgccagcccctgccaggaggtaggagaag

SEQ ID NO: 742508 - DNA, 620 bp, Homo sapiens
tccctgataaatggttgaggttttaaagttttttcccccaaaacacagacaaatgaacaaattatgaagttccagtcaggactgatggtttcttatgaatctgaaattttcaatgtacagagtgctactgggttttaggctcaaatttaaagaacttgtcttgaattaatatccagtatttcaaaaggttcacatggaaaaatcaataagctatagctacatgtatccacatggatgaattttactgttgtttatttttwaaaaaagcaagttactaaaaaacatatatagtaggatgctatcagaacaaaccttgaacgtgcaaaacaaaatcctgtattttgaggaatcctgtacatgcatacatattaaaaatatgaagaactacacaagatgaaaaccacccagctgcgaacagtggtaaagtaacctctaggaaagaaggacagaggtaagatgaggatgggatattccaggagcctctcctacctgaaccagcagcgtcttctctcttaagccgggctacaggtacatgggtgctcactgatttactctttgttccttttttgtgccttacatatttcacaatgaaaatggaaacatataagcatacagtttta

SEQ ID NO: 742509 - DNA, 608 bp, Homo sapiens
aagtcccataaaataactaccgaacaaacacctgttgtgtacaaggcagggcatgtattaaagactggcatcagggcattgcaaaaagaaaaacaagccttgcagagacatccacaagccaatctggtcaatagatttcacgactgggtaaaacaacagtgcgtgcgaagaacacagcttctggcacaaccttcttgtgaatggsagctgacttctaaacaaggattgaaaaatgccttagcacaaactgactgtaattaataagaataatttattaaagaaacaaagaacactgtctaattgtctttcctgactgccatgcactttcccccattgtacttcctctttgcagaataccagcctcgtagccctaactgtaagaacattatctatgggatgcaaaaccaaaacacttctagaaatcaaatattccttacaacatttatttttaggttagcgacacaagccaaatctgcttaatttccattaagcacatggtcacatgctcattgaaataaactacaaacgtcccaggaaaaaaaaaaaaggaaaaaaactatcatgcagaagataccccaaatttcgccaggtttgcccgtttcaggaac

SEQ ID NO: 742510 - DNA, 584 bp, Homo sapiens
cctaataaatatagaaattgagtaatcaaaatgacttacattcacatcgaaccaaaagcttttaaggaagtgtctgtgtttaagtgagtccatattctacatgggttttccaatgaagcccccagggtccattctgacagtgctaggatgatgcctggcttcagaaaaaaaaaaaagaaaaataataaagcgtcatcatctcagaggcaggaatcccaggctccagtacttctccagtgatgtcatagtaattgtggccccgggatttgaaggaagaccgctcctaaagcgtcatgccgtccatcttattcataaacgaagcatgttttcctcaaagcagcaagaccgcttatttatttcaytcccctcagcattgctcataaacgtataacagttgttttcaggtttacagcaatgttagcaggaacgttattaaatcaaagtcatcactagccatataaatatagattatatggtgtgtggccctacagttctgtagaaatacagctttaaaaaattattttaaagaaagatctaggcttctattaagcaggtggctgaaaagtattattgagatgccagaa

SEQ ID NO: 742511 - DNA, 556 bp, Homo sapiens
taggtacgtaccaaagaaaactgaaaacatacgaaaacacaaaaatatgtatataaatgttcagagtagtattaaccaaaacagccaaaagtggaaataagccaagtgtccaccaacagatgaatggataaacaaaatrtggtatatctatacaatgaaatattattcagccataaaaagaatgaagtactgattcgtgttacaacataggtaatccttgaaaatatcctgactgaaagcagacagacacaaaaggccacagagagtttcattccattcatatgaaacatccagaataggcaaacctatagaaacagaaagtcgattagtggttgcctggagctgagggagttggaaggaaatggggtggagagaggatgagtgctaaaggtaatcatcagctaaagggtttcttctgtgggacataaaaatgttctaaaattgactgtgatgatgttatacaactatgtgaatatactaaaaaccactgttgaattgtgtacttttttgtttgtttgtcttctgagacagagtgtcactctgtcacccaggctgg

SEQ ID NO: 742512 - DNA, 621 bp, Homo sapiens
ctgtgctataagtttaaaaattaatcctctatagttggaccttgagattatttgcaattcgccaacatgacattgcaagcatctttgactggacagctttgcatacctttcttactgctcttttaggacaaatccctagatgtgctatttttgggttaaggcttttcatacacattgtgtttgccctccaaaaagtttgaacctgtttatgttccagccattatggaatgtgagtgctacacctgtggttgttccatgtaatgaatgcaaagctggagagaagcaggcaggctgttgagtgcatgaattcaggaataaacaccaagataagtgtgttcagactatgggttgtcaatgacagcaattaatttggcaaaacagagaattttggaaagaaatggtattagttcagcaagtcrtatgtagaaaaaagtgcaattgatacggcttggctgtgtccccacccaaatctcatcttgaattgtagctcccataattcccatgtgttgtgggagggactggtgggagataattgaatcttgggtgcggtttccctcatactgttctcgtgttagtgaataagtctcatgagatctgatgattttataaggggtttcccct

SEQ ID NO: 742513 - DNA, 606 bp, Homo sapiens
ctgcttcttgtctctttatcctcatctcatattcaaccctcagcccactgcaatctggctgcagcccacataattctaccaaaattgttcctgccaactttgtgatgacctcctttttgttacatccagtgggtgtttttagcctttatctttactttatctctcaacactttgaccctgttcaccactcttgtacccgctattttcttatagaatttgtaatgtttttttctcccggttttccttcagtacctccagttgcttatttatagtcttctttctgggttcctctttctttgtccatcgcttatgttctgatactactcaggacactaagcaagatcctcttctcattatacttmagagtggggtcagaatatcatctccatcagaaccattgggtggggccctacttttcaacaagacaggtttgggaactacattctacacatactcaatgagacactctggagttggtacccaggattttgaattttattaggtttcctgggtaattaatctgaccccaaagtttgagaatcatttctttataaatcatccccaagtaatattatctactcccatatgtttaattaccatctgctt

SEQ ID NO: 742514 - DNA, 586 bp, Homo sapiens
tgtttgccgcaactctattcacaaaacggaaaatatggaaccaacattaaggcctatcaaaaggagatttatgaaatcaatcctggtttatcccttgcatatagttctacagttattaaaatggtgatgttcaggggacactaactcaacccgaggggtggttgcatcggctttttgcaagaaacaggccaagctaatggctaagctgtttggggagcacctgctcattgtagaggagacacctgcctttcagtttccatcacatccttgtaagactacagactcaatatcaccagattatcctcttcgcaggagaagctgcaaaatgtcctggcttttaaaaygttgtgcaggtcttggagggtagaaagaaagtatctgtgggctgcattttagctaacattcaggagtttcgcaaactttaatgtggaactaaaattattgtcaggtaataatgctcagtacttataatcagtcttaaaacataagattaaaacactatatttctatttaggtaaaattatgtacatatgtttgcatgtgtgtttatgtgatgttgacacaaatgaatgcacaaatgatatat

SEQ ID NO: 742515 - DNA, 586 bp, Homo sapiens
tgtttgccgcaactctattcacaaaacggaaaatatggaaccaacattaaggcctatcaaaaggagatttatgaaatcaatcctggtttatcccttgcatatagttctacagttattaaaatggtgatgttcaggggacactaactcaacccgaggggtggttgcatcggctttttgcaagaaacaggccaagctaatggctaagctgtttggggagcacctgctcattgtagaggagacacctgcctttcagtttccatcacatccttgtaagactacagactcaatatcaccagattatcctcttcgcaggagaagctgcaaaatgtcctggcttttaaaacgttgtgcaggtcttggagggtagaaagaaagtatctgtgggctgcattttagctaacattcaggagtttygcaaactttaatgtggaactaaaattattgtcaggtaataatgctcagtacttataatcagtcttaaaacataagattaaaacactatatttctatttaggtaaaattatgtacatatgtttgcatgtgtgtttatgtgatgttgacacaaatgaatgcacaaatgatatat

SEQ ID NO: 742516 - DNA, 636 bp, Homo sapiens
ctgtagagagtgtgagaatctacacacgatgttaaattgctgatagaaaggtaaggtagtgcaactcttccataggctcatacgtcaatatgtactcaaattgaaaagtggcccttcaatttctaaaaagtcattctaaggaaatgaataaatgcaggaagacatatgcacaaagatgtttttctcatttttctgtagtaccaaagaaaagagagaggtaaacctaaattttgagtggcaggaaactggctacgtaaataatgaaatgctgctgagctatttaagtttgtgatatagccttattaaatgacatggaatcatgctcattatatactaataagcaaaaaagatacaaaacatttttatagtttggtctaataattaaaagtattatatatttgcttgcattgtgcctgtgtgtacmcccacaaacaaaaaaatctcaagaatgttatgaagatcatttattggaaatgggataatgggattttaagttatttatactttttatttttttttggggaaacaaggtcttgctgtgttgtccaggccggggggcagtggtgcaactatagcccatggcagcctggaactcctgggctcaagcaaacatgcagccttaggctctggagtagc

SEQ ID NO: 742517 - DNA, 636 bp, Homo sapiens
ctgtagagagtgtgagaatctacacacgatgttaaattgctgatagaaaggtaaggtagtgcaactcttccataggctcatacgtcaatatgtactcaaattgaaaagtggcccttcaatttctaaaaagtcattctaaggaaatgaataaatgcaggaagacatatgcacaaagatgtttttctcatttttctgtagtaccaaagaaaagagagaggtaaacctaaattttgagtggcaggaaactggctacgtaaataatgaaatgctgctgagctatttaagtttgtgatatagccttattaaatgacatggaatcatgctcattatatactaataagcaaaaaagatacaaaacatttttatagtttggtctaataattaaaagtattatatatttgcttgcattgtgcctgtgtgtacacccacaaacaaaaawatctcaagaatgttatgaagatcatttattggaaatgggataatgggattttaagttatttatactttttatttttttttggggaaacaaggtcttgctgtgttgtccaggccggggggcagtggtgcaactatagcccatggcagcctggaactcctgggctcaagcaaacatgcagccttaggctctggagtagc

SEQ ID NO: 742518 - DNA, 517 bp, Homo sapiens
agatacatatctggtttaattacacatgattctttccaaatggagggaagtggggaaggtgtgaagaacattatttagggaagtacttagttttccaattttctcttcattggcagtaggacccagcttcacctaaacactgtctttatcaccttcygttttactgaccgtgctccacagaattcaagtgcatggccacttatataaaaggataaaaggatcaatgagcctgatgagtcctaagagtgaagatcagggaatagagttagtcctaagtggataaatatgccctgaacatcctaaaaggcagagaaggtgcccccaaatacttgtattctacatagattctcttcacttaaaaaaaagttgatctactagcgaacaatacagtcaggatggctaaaggtgacccctagaaaccaaacggcaagatgtctgcttatgccttcttcgtgcagacgtgcagagaagaacataagaagaaaaacccagaggtccctgtcaattttgcagaatt

SEQ ID NO: 742519 - DNA, 533 bp, Homo sapiens
agcaacaacaggaaactaagacaagaaccactgccaaaaaccatgtcaattttaatatccctttattgctaaacacaattcttcaagccagaacattaaggccctagaatttaacctgttcccaactgtggagggacacaaragcagccttccctgctggaaattttgctgcccctcttgccatttgtgttgagcacttctcccggtgttacactcccttgggaatgccacagctacctgaagaggcaaggcagcagtgtgggaccatggccaataactgcatccctcaagtttgaacatcaaaccacagaattcatcatacccctcctgtgtgatcagcattctgctagccactgtggggaattcagagaatcagaagaggccattcccctctctcctgctgagtactgacattgcacagtgattgcaaacacttagattgcatttccagcaatgccaaagctgaggcttccctggttacaaaggatattgtctcatcttgggacaggacaaatacatcattgcagtttaag

SEQ ID NO: 742520 - DNA, 599 bp, Homo sapiens
agagcagatagatttggctccatctgttccatattcataacaaaggagcacacttacaggagggccaacttccccggagccgcctggtaatgatcttttcacccgaatgaaagcatctgaacccagtggcttggccctgcaaaagcagctagcaggattgcccttcagaatcttgatttccttgtaactcaggttgacataaatttccccaatatatagagtgaaaagaatttactgatttctcatcttcctacagccctgtgtggttggaaagttcaaaatgtatgtgttttacstccccctcctgcaaccacagaagatttgtaattaaatagaatttgatagtatgggggaagtttgcacttgaagtatctgtaaaggtatcacaggggagaggctgttcttcaaacttttaagttgtttctattcagacttttttaatctttttaaaactggggttaatgaatagaaatatgagttacaccaaataagggaaaacccctgttgagttttgtaattagcaaacttcaaagccaatttcaattgagacctcttagattaaaaagataagttgacccaagagttttcttccactaagc

SEQ ID NO: 742521 - DNA, 546 bp, Homo sapiens
tcatagattgtacttacacaaacctggatgggataacctattacacacctgggctatatggtatagcctattgctcctaggctgtaagcctgtactcaatgttactatactgaagactgtaggcagttggaacacaatggcaagtatttgtctacctaaacatatataaatctagaaaaggtacagcaaaaatacagtataaatgattttaaaaatctctatagggcacctttatagggtatttaccatgaatggagcttgtagagctggaagttgctctgggcgagtcagtgagtgaatggtgtgtgaatgtggaggcctagaacattactgtaygctactgtaaactttataaacactgtgtatttaggctacactaagtttgtaaaaagaatttttcttccaaagtaaattaacattaacttcagcttactgtaacttttttactttataaaccttttattatttttgactcttctaataacacttagtttaaaacacatgttgtatgaatatacaaaaaatttttttctttgtatccttatt

SEQ ID NO: 742522 - DNA, 577 bp, Homo sapiens
actgtatgctactgtaaactttataaacactgtgtatttaggctacactaagtttgtaaaaagaatttttcttccaaagtaaattaacattaacttcagcttactgtaacttttttactttataaaccttttattatttttgactcttctaataacacttagtttaaaacacatgttgtatgaatatacaaaaaatttttttctttgtatccttattctacaactttcttctatcttagaaattatttttttacttgaaactaaaaaaaaaaaaaaaaacctaaaacacaaacatgcacattaggcttacacagagtcagtatcacaatatcactgtcttccacctctacatcttgtcccactggaaggtcttcagggacatggagctatcatcttctatgagaayaatgcctttgtatatggaaatacaaatgacttacaaaatcaaaacaattttaaaaagaataaaatttaaggatttatattctgtgatttcaaaatttactcaaattctatagtaatcaagataatgtgtcactgccttaaaaataggcatataaatagctggaacagaaga

SEQ ID NO: 742523 - DNA, 495 bp, Homo sapiens
cttgtagctgcaattactattattcttttaatatttttattaatctcaaaaacttaaccctgatcaacataatctgtgaggttgcattttaagatgccaattacctattttttcctggtacacattgtatttgtttattagggctgccataataaaacactacagattgggtggcttaaaaaacaaaaatttattttctcacagttcggaaggctggaagtccaagatcaaagtgctggcagggttggcttctggcaaggcctctctccctrgcttatgttggcctgttggccaccttctcgcgtgagttcgcttggctttttttttttttctttctgtgcgtgcactcccagtgtatcttcctcctcttatgaagacaccagtcctggtgaatccaagccctacccttatgacctcatttaaccttaattgcattcttaaaggttctattccctaaacaccatcacactgagggtcagggcttcaacatatgaa

SEQ ID NO: 742524 - DNA, 610 bp, Homo sapiens
attaaggttccacttgaggcaactggatggatggtctgtcacaaactgtacatggttactgtaatatccattctctatatttttgttggtactagaacctccagtgtttcactgggtaccagaaataggggctgtttcctagcatcccgggaaatagcagtgacatgtggttaagttctggacaatgggatacaggaagaagcatcatgtgtcagcttctggaaaatgtcgttaaaatagaactgggccatgtcatttgttccccttcccctccttcctcatactgctgtttagaatgcagatgagatggctggaactctgccttggaccaggagcatgagcccaaatcccaggggatggtgcaggaaaaagctgcagacagtctgtgtctaagaccaaggcacagccacactaactctggatggcttattttgaactcactgtatgtgagagaaatacsaagttctatgccaaatccatctcagtcaatggagttgacacagaactccatccttttagttgctctggctttaagcctttgagtcatccatgacttttttctctctcaaactccacttgcaatcttggtagctctactttcaaaatatat

SEQ ID NO: 742525 - DNA, 623 bp, Homo sapiens
gatcataaaaatcggcaccttccatctccacaccttatcctactggaaggcctttaagggcaataacacccagggagctgtcatgtcctgtgataacaatgccttcttcttctgggatacctcctgaaggacctgcctgaggctcttcttgagatgtcactcttttcagaaatgtgttcatggtggtttgtttggtttgtttcttttattcatcatagatttgcttgtaaatagataatgcacgatgaacattcctctctactaatgaaaatcatttcatgttggagtcaacattttcaaacrttttaaggagtttgttgaggtctgcaaaagcttctgcctaaacccatcactgtgaatatccttgggggcttttctttttttctcctgtagtttcctttcctcttgctatgcatttctgttctggttccagtaactcgtcattagtcaattcctcagtgaccacatctgtgacctcctcaatatcatcctcctccacatccagcttaaagttgtttgccatttcaactaaagccttgtgaatatttttttttgcaacatcctcatccttagcaatgttttgaagtcatggacaaatgtcttcaatatctcttcccagatag

SEQ ID NO: 742526 - DNA, 623 bp, Homo sapiens
gatcataaaaatcggcaccttccatctccacaccttatcctactggaaggcctttaagggcaataacacccagggagctgtcatgtcctgtgataacaatgccttcttcttctgggatacctcctgaaggacctgcctgaggctcttcttgagatgtcactcttttcagaaatgtgttcatggtggtttgtttggtttgtttcttttattcatcatagatttgcttgtaaatagataatgcacgatgaacattcctctctactaatgaaaatcatttcatgttggagtcaacattttcaaacgttttaaggagtttgttgaggtctgcaaaagcttctgcctaaacccatcactgtgaatatccttgggggcttttctttttttctcctgtagtttcctttcctcttgctatgcatttctgttctggttccagtaactcrtcattagtcaattcctcagtgaccacatctgtgacctcctcaatatcatcctcctccacatccagcttaaagttgtttgccatttcaactaaagccttgtgaatatttttttttgcaacatcctcatccttagcaatgttttgaagtcatggacaaatgtcttcaatatctcttcccagatag

SEQ ID NO: 742527 - DNA, 460 bp, Homo sapiens
atcaataaatttgatgatgtatatgcttccagtctttgttctaagcctagctatacaaatgtacataaatatatttgtaaatgaaaatagaattatattatttatactgttttggatccactgctgatacttttacaaatgttcccttgaacttacttttatgtatactgtgatacagatgttataattcctgtttgcccattggcctgattttatagtgttcaggtacgaaagaatcaccactcccggagagtctgaatcacaaggtctgagttggggtctaagaatctgcattttagcaagtttctccargtttttccaacacagatcgtccatgggccacattttgagaaataaggctacaaagatataaactttgtgtaaatcagagagaatccctccccctgccccttgctagtggatgaaaaagatgtttctatacttgccttgctgaaagcac

SEQ ID NO: 742528 - DNA, 595 bp, Homo sapiens
actgcactccagcctgggcaacagaatgagactccatctcaaaaaaaaaaaaaaacaacttgtccaagtttatatggcctggtacaggcaggatttaggcaactgaatccacaggtgctgctgaaccaccaggagacctgctgcccaagtaactgcaaacggggcaccagggactgtctaggaccacasgtcgagttccacctctgccaacctagtttgttagcccttccttccttccttccttccttcctccttccttttctgttcttgcctgccagctttcctctttctacatttcttcctcctccttccttctctctgtctcttctatcctacattaagtataagtttttcatgaactacattttgggaaagagttcatggagctacaggggatcttagagatgacctactccaactacttcatttttgaagatgaggaaatggaggtccagataagggaagggtgtcaccatcagcttgtgtcacagctaaggtgagaacccacttcctcttcctcctcatccatcagtctttcctctgtaccagctttatgctgccctataaacagtccacacttagcagagtctgcccc

SEQ ID NO: 742529 - DNA, 628 bp, Homo sapiens
aactccgtaagcagccaaaaacagggcccttcgtatgcctgggcttcactttccccatttataaaatgagggggttgggccatctgacctcagagggcccatctatctctgaagctccagaatctcataaggatcaagaatggcagaagaagaagaatcaaagatctagtaactgactccagattctagaagggctgggtttttttgctttgtcttgtttggggtaaatgcactctgaaaggtaactttgggcyggaaaatcagtcagatttgctgggataagaaggttcaggtgggacccaaggatggtcttcaagaacatggaggggatgtgcatctggaagcagggttaagctggttctgtgtgatctgaggttggaaggcagaccccatcccatttcagagatgaccaatctgacaagtaaaggagtcttccccccatgcttcagaatacattctctagcttcattcaggtttctattcaaatatcagctcctcaggtatctactcctaaccctcgccctaactcagtgcctgtctctaatgccagtcgaaaatgccacctctgtcactctctaggcccttacctgcgtttgcctttcacactgccctacagaccatcatatga

SEQ ID NO: 742530 - DNA, 416 bp, Homo sapiens
gcctttaattaacagcatatgtctctgggaagaaataaagtttcagttctatatgctctccccagacaatgacactgtttctgaactttgtacactgacggctgctctaagatagcataagcagaagacaggaatggtaatatggtttggatttgtgtccctgcccaaatttcatgttgaattggaggaggagcctggtgggaggtgattggatcatgggggcattttcgcccttggtgttcttatggtwgtgagtgagttctcttgatatctgatggtttaaaagtgtgtggcacttgccccttcaccctctctctcctgctctgcaatgtgaagaaggtgcttgctccccctttgccttctgccatgacagtaagtttcctgatgtccccccagtcatgtttcctgttaagcct

SEQ ID NO: 742531 - DNA, 510 bp, Homo sapiens
ttgctttgagtagtgtagacattttaacaagattgattcttctaatacataaacataggatgcctttacatttatttgtatctcctttaatttctttcattggtgtttaatggctttcagtatataagcctttcacctccttggttaagtttatttcagagtattacattatttttgatgttattgtaaatgagattgttttcttaattttctttttgaataattcattgtttatctatagaaatgcagttgatttttgttagtgtatagaaatatgtgttgattttgtattctacaactgtgccaaattgtttatcgattctaataggttgtgtgtgtgtrtgtgtttgtctgtgtaatctttaggtttttctacatataagattatgtcatctgcaaacagttaattttatgctgtctttttcaattagggtatgttttatttctgtttcttgcttaatttctctggctagaacttctaatactatggtaaatagaagtggtgagagt

SEQ ID NO: 742532 - DNA, 630 bp, Homo sapiens
agaggagagagcaggctgctatctttgctgttttgcagctttcactggtgatacctccatgtactagaaaatctgaggtgactagagactggagcgggccttcagcataccacagcagccttatggaaaagtggccaacctgttacatgggggccctttcccatatctcctcaccagacaagtcctccaggcctgggcctccagccacgccctgccaaagctattgagtcrgtagcaacttggcaactccctggaaagagcctccataggcaactgaaagtctctctgccactgcctctgcattggaactgcccttgctaccctcaggctaacaaatgagcaaagaccctgagagctttatccacacctccaacaagctgcagtcaacccaaggataggaagccagtccatctcccacaggtcaaaaacacaccccagtgctcatcaccagacagggagcccctggtttgggaccacaacacagaccctccctcctgggatgattgcactgagtgattgctgacctgcatctgtctggggtggagcccccaggagacaagcaaaagatccttggccacaaccactactaaggtccgttcctctgctcccttcaagatggggaagaaacat

SEQ ID NO: 742533 - DNA, 611 bp, Homo sapiens
agaagactgagaggcatacctctccattatagagagcagaaagatgagctatttatgcgaatcatgaggggttttaaaagtcctctggtcctgcggcctaatccctgccagagaggaagacagcattggggagtgagacactgggctagacctcagctctgataccatctgtggacctggcaaaggttactctacttctgttccttctgtcagtagaaagaagctgacattacttagccccatatagttttttggaggttacgtaaagttgtgaagtgagataattcacatgaagtggttagcagagtgccagaacatagtaagtgttcrataaatctattaacaggttattctaaaattgagttatcccttacagtaactgttccccagtttatgagattatagtttataattctatggaataaggcacctcatgttagctgcctatttattttatagacaatactaggaagtttattaattaaagacaaaattgctttctgaagagaatcctgtcatgtcctgtcaggtcagtactttctcggcacatttctttccatggtcaatgtcttcttaagcctttcccaaagctatctgcttgtcatttaatt

SEQ ID NO: 742534 - DNA, 586 bp, Homo sapiens
aacagaacccaaaaggacaatctgtcacttgagaggtggctcagagggctctcacctgcggcagaagtggtgagcacatttcaccaggatacccatgcagtgcacggccacgatgcctatgatcagcaggctgatgggacccatctggggacagatattgcaggcaaaagagagagagaaaagtaggtagaattaggagtgaacccaatggatactcagttcrcaaaggattaaaaagctactaaggcagttttcagtgacaaaactttgggcccagcattagagagagaaacgtgatcatggagattagctctgtgagatgggtgttatctgaactttagcacattttcgagagatttagtcacgtggagaagaaggacataagataagtctgttccaagactggtgcacatcagcagaatagaaggctcctgtgactgtgggaagagctgggctaagggatgtgaggtgagacgggtaagttatctttacagcaatgccagatcaagaaagactgcacttagctaagggcaacccacatctctgagtctctcttcaactccgaaagaaaccagaatggctttgg

SEQ ID NO: 742535 - DNA, 534 bp, Homo sapiens
cccaatatcgcaaggggcgtagacctccaccgtgacattgtctctaatatccaaaggtggagaggatatttcttccaatttcgcacggatgtacaccacccctgtgatacagttcctaatatctaggcggcgacaggakgatattagtctcaatatcgctggaggtgtacactccctagtgatgttgttcctaatatccagggacggagaggatgctatcactcccaatataacagggggtgtacaccccttctgtgacattgttcctaatagccagcgggggagaggaagatattactctcaatatcgcagggggtatacacccccttgtgatattgtttcttagatcccgggagggagacgatgatactagtggcaatatcgcaggggctgtacacacctcctgcgatattgttcttatccctaaggggagagcataatatgactctcaatatcgcagggggtggacacctcctttgtaatattgttcttaatatccatgatgggagaggatattactccctgtatcgcaag

SEQ ID NO: 742536 - DNA, 693 bp, Homo sapiens
tccagcatcttcagtgacagaggcaatgggatcctttaaaatgttgggccaagaaaattggccacagatttgcaatccaaaagaaataggaggttgctaaattgattccagctatgaaggacatcgaaaatttcttttgttatttgactgtctatcatggtctatttgcactcaatttaataggcaaatgaatttccgactttcccttagcagccttgagtaatgctgtctygtatttattattttgcattagaatggttggaaaagttaaaggaaaatttccctagcaagaattggcttcttaaaaaaataagtcatcttggacaacctaacatttagtaaaggcatttgtcataaataacctcaagtccaatttatggcaagggttttaatttgtaagggctttatttctccatacaaagggattggagaaacaaactagaaagccagaaaacagaccacaaacactgagctagtggttccaactggagtgttccctgagcagtgacttatgaatacttgtttagaagaatcaactcaaacaaatttaggaaagtcacatcctgcctttagagcttccagtgtttgttagcatattaaagtctctgaaatgacctacaatattgaaatctcagtcttctgctatttttaatatttatttcaaaatgaaataatttttgtgaaaaacatttt

SEQ ID NO: 742537 - DNA, 631 bp, Homo sapiens
gcatgtaatatacaaaacatcacatatgctatatattatcatagtttcaactctaagttttgcctgaggcttatggagtcaatcccattgctctatagtcatgtgtcaggctctgtgtacacttgtgtttgtttatattgtagataaaatttaccagatgggaaaaatccatcagtgctgcctagccaataagctggcctggtgaaagtgatcagaggakgtgggtaaatttatctttgaacaaatgaattaaatatgcacagtaaatggttcaatgcacagcaagagagtgccgcctaatcgttggggaagaaagcagagccagcagagcagcaagcctcacgcggtcattcctacagtggggtctgagaggtggccatagccaggaggctagcagagtgctttgtagcacagcacttgcccgagtgtgcaatatgttaactacagctgggtctggcataatcatccctgactaatgggtggagagaggagggggtgcaaagtgctgaataaataaattacttaattacatattatcggagagaagaacagatggtcagcttagcccatctcccagtgcctttggcttctgaatggagagtggatcctcagagactggaggaggttgggc

SEQ ID NO: 742538 - DNA, 631 bp, Homo sapiens
gcatgtaatatacaaaacatcacatatgctatatattatcatagtttcaactctaagttttgcctgaggcttatggagtcaatcccattgctctatagtcatgtgtcaggctctgtgtacacttgtgtttgtttatattgtagataaaatttaccagatgggaaaaatccatcagtgctgcctagccaataagctggcctggtgaaagtgatcagaggatgtgggtaaatttatctttgaacaaatgaattaaatatgcacagtaaatggttcaatgcacagcaagagagtgccgcctaatcgttggggaagaaagcagagccagcagagcagcaagcctcacgcggtcattcctacagtggggtctgagaggtggccatagccaggaggctagcagagtgctttgtagcacagcacttgcccgagtgtgcamtatgttaactacagctgggtctggcataatcatccctgactaatgggtggagagaggagggggtgcaaagtgctgaataaataaattacttaattacatattatcggagagaagaacagatggtcagcttagcccatctcccagtgcctttggcttctgaatggagagtggatcctcagagactggaggaggttgggc

SEQ ID NO: 742539 - DNA, 621 bp, Homo sapiens
caagaggaaaaaaattaaaatatttaatacatttattcattcagcaaatttgtattcagcagctgctctttgctgggtgtcattcctgtcactgtgaggacactggcaaaccaaagagatgggtccttgtctttgggactcctagagttgagracagataatgcataggaagaaacaggtgagttatctttcaacaattaaaatggaatgattgggggatgctgggggaacacttcaggttgggtggtcagggaaggccactgtgtcacatctgagagctctccaagatgattccagaagtccacccctttctcttttcaatttattgtatctgtctttcctccttctgtggcctttaccttcttgtaaagcacttactattattatttgctttgacggaggaactgtaaaactgaaataaagatgcagttaaaaaaaaagagcctgaaatgcattttttataaatcagaagctcaggtgcaccatccttttttcaactccaagaaaatcataaattattttattagagggaattaccacagctctagatcttaatgattgctgaacaggaggtttttttcttttctaaacatcaagttagctgccagttttaattttctt

SEQ ID NO: 742540 - DNA, 621 bp, Homo sapiens
caagaggaaaaaaattaaaatatttaatacatttattcattcagcaaatttgtattcagcagctgctctttgctgggtgtcattcctgtcactgtgaggacactggcaaaccaaagagatgggtccttgtctttgggactcctagagttgaggacagataatgcataggaagaaacaggtgagttatctttcaacaattaaaatggaatgattgggggatgctgggggaacacttcaggttgggtggtcagggaaggccactgtgtcacayctgagagctctccaagatgattccagaagtccacccctttctcttttcaatttattgtatctgtctttcctccttctgtggcctttaccttcttgtaaagcacttactattattatttgctttgacggaggaactgtaaaactgaaataaagatgcagttaaaaaaaaagagcctgaaatgcattttttataaatcagaagctcaggtgcaccatccttttttcaactccaagaaaatcataaattattttattagagggaattaccacagctctagatcttaatgattgctgaacaggaggtttttttcttttctaaacatcaagttagctgccagttttaattttctt

SEQ ID NO: 742541 - DNA, 614 bp, Homo sapiens
tttcttattctgaacacccattatgatgtttggcataccatttgctcccaatggatattaggcaggactgactgacagagaaggtactaaaatatgtatacatatagacatatatgtatatatatgaccatggctagcaccaaacatgagcaagagctatctgcaaatgcatctatttgcatatcaattgctaaaactagtggaagtgtttttaatgcttaccttgatcacaggctctaagaatatgaaagtaataacttaccaagcytaattccttactgtcaaaatatcagaggctcaatcattctcacaaaacccaggcacagttcaatttaaaatgacaactaggaaactttaggcttaaccacgtcaactgaacaattaacttctttatttgaaacatataaaatattttatgtatttgctaatcattctaccttgttacatatgagaagcttttgagttatgccagtgcttaatgtctctgtttttaaacttttctaaatataagaaatcacacactaatacaggaataaatgacataaaaaatccttgtgacccaaagggtatcactactaactttctgatgtttttcctccatatctttaatctga

SEQ ID NO: 742542 - DNA, 640 bp, Homo sapiens
gagtgacagtgagtgagcgagaaagagaaactagataggattttagcctataaaccattacccggattagctaatgcagcaagtctgggccaagccttaaacgtgataacaaagcatgaagcccctggggtttctttagtatctcatcccctcagttaatgagatggaaaatagttcactgtttatctacagtagattgagcagatgttgccaattccattttatggaatgtaatcttggtgagattgtcttctgcccattaccttttcctggccttagtctctcccatactcttcttgttccgggggttgcagataccctcttggccatggactagctggaaaaacttccaaggaaggacttaatggccttttcaagttcaaaacagwcacttctaatagggtgaagctggttggttgacaaagatttgcaaacagctccaaaaatgtgaagactgttgactctaaggactcccctcaaattactgtttatgaaactcttccagtttgggattttatttcattggtttcatttgcctcttttatatttcagtattctacaaatatattataattagagcattgtgtctaagaaatgtagtatgattctcattttagtaaaccatttcaattatccagaa

SEQ ID NO: 742543 - DNA, 635 bp, Homo sapiens
gggttgctatcagtggcaagggtgtgtttagctttatagaaaactatgaaactgttttccagtggctttaccagttttcctttctaccaggaatgtgtgagagttctaattccttaccagcattggtattgttggcatttttaattttagcaatttcaaaaggtgtgtagtaatgtttaattgtatttgaatttatctaatggccaatgatgttgaacatcttttcatgtatttatttgccatycttaaaacctctttggtaaaatgcctgttcaagtcctttgccccttttttaattggattgtatgttttcttatcaatgagtcttgatagttcttcatatattttgggcacgtagcctttgtcagatagatgatttgcgaatatattcttcaagtctgtagcttatttcttcattctcttggcagcatattaagcagagaaaagatttttgatgtaatgaggtccaatttgtcaattttttgtctttacagatgcaccttggtgtcagtcctaagaactcttcatctaaccttatgttataatatttttctctaagaaaataattttaaagaaagaaaatgctgtatgcataaggacatttcttgcaatactattagtgaatggtgaaaact

SEQ ID NO: 742544 - DNA, 641 bp, Homo sapiens
gttctcacaatttcatattgtaattctgtattgtttttcttagagtcccaaattatatatgtttcatgctgctcccacaaaaccttagttccccaggtgttaattttatgacagcatatctaactgcatcctctgagcagcagagcacctgtcagtctctgctagattgaacatgtctaggacaatagcaattgtttccaattgtacgcatttccaccaccttttctcccctggtttttctttaagygactgttgtatcaaagcgaaggaaggaagtgactaagagaaggaaattatgcctaagtcattttaaaagggcatttttcaaacgacaaaactttttcccaagcaggggtttcaggctaggctaaggacagtgtggatcgaaacacagatccttaaggagttgaatttcttctttgccgtgctcctactcctctgcatacaaattgttctttgagctttcactagttttcccattgtcttctctgcattcccaagctcacttaattcatggtctgtctgcctctctgtctccttttttccttagcctccagagatgtgcatgcctactttctgttttcacagcttcatttccatctctggcacgtgagagcctctgtgctggatgcagacatatt

SEQ ID NO: 742545 - DNA, 641 bp, Homo sapiens
gttctcacaatttcatattgtaattctgtattgtttttcttagagtcccaaattatatatgtttcatgctgctcccacaaaaccttagttccccaggtgttaattttatgacagcatatctaactgcatcctctgagcagcagagcacctgtcagtctctgctagattgaacatgtctaggacaatagcaattgtttccaattgtacgcatttccaccaccttttctcccctggtttttctttaagcgactrttgtatcaaagcgaaggaaggaagtgactaagagaaggaaattatgcctaagtcattttaaaagggcatttttcaaacgacaaaactttttcccaagcaggggtttcaggctaggctaaggacagtgtggatcgaaacacagatccttaaggagttgaatttcttctttgccgtgctcctactcctctgcatacaaattgttctttgagctttcactagttttcccattgtcttctctgcattcccaagctcacttaattcatggtctgtctgcctctctgtctccttttttccttagcctccagagatgtgcatgcctactttctgttttcacagcttcatttccatctctggcacgtgagagcctctgtgctggatgcagacatatt

SEQ ID NO: 742546 - DNA, 588 bp, Homo sapiens
tgcctcagcctcccaaagtgctgggattacaggtgtgacccaccgcgcatggcccactctttccttcttaagagttctagcttgtcaccaccaggctattgatggggccttgctatttctaagaatgccattaggctgaaaatgaaggccattctatttttcctcccaggaattctcatatctttaccttttatacctaaaccctcttcccctacagacaaaagctgcaggactgggccttatgatctgatcagaaatcagataacatcagagattcaaactctctccttcagctttcaacactacagttctgccctaaggcttgaagttgtcaccttttacctctgtcaccaaagcaaaaagtcactgataggawtgaaatgagagaaaaggcatttgagcactataactcttcagtggtcatttttgtctctagattttcagaaggggaaatataaggaaactcctaaactaagtctaggaagctggctcatttctccatgactaactgcaacaggccataggtttctagtgttgtggagagcagggcagggcaggcaaggtcagactctctcgttgtcagggtga

SEQ ID NO: 742547 - DNA, 640 bp, Homo sapiens
gattcaaactctctccttcagctttcaacactacagttctgccctaaggcttgaagttgtcaccttttacctctgtcaccaaagcaaaaagtcactgataggaatgaaatgagagaaaaggcatttgagcactataactcttcagtggtcatttttgtctctagattttcagaaggggaaatataaggaaactcctaaactaagtctaggaagctggctcatttctccatgactaactgcaacaggccataggtttctagtgttgtggagagcagggcagggcaggcaaggtcagactctctcgttgtcagggtgaggacatgtgccctgtctcaccttaggctgctcttccacaggtgggtcaggagcgggattctctgtgcagactgctcagtagggaaagggagaacacattggcccaggsgtctgcactgtcaggccttgcatttttctcactggctccagaatatctggaagagacaaacattctcccagtgggacattctgtgagtaaaaggacatacgaaactgcttctttctaaaaactcactgtattaggatgcactttaatttttcatgctatgtaccaacctggccagcttgagtgaagcctttgggaaaatgtcttttattcatcctc

SEQ ID NO: 742548 - DNA, 671 bp, Homo sapiens
tagtaaaggagactcaagggaagaaaagccatttctccttttcactggcctggttgggtctgcatatgatgctgggaaccgcttttgctatcttgtaattatgaagagaaacataagtcatcctgaggaaggcagggaagaaagatgacaccattggaattctccaacttcttgatatctcagggaggataaatacagtttctcaatrtttcggttttaaattatatgccctgttacttgaagcaataagatactgaaccgttttttcaataaactttttgagtatatgctaacaacttttctgtggtcagagcaagctgtataattttccatccatttaaacataacagaaagagcatacttctaaataaaaagattctggtcccacaaatttctaaaaactgattttcactgaatatcaaacatacacccacatattgctaaatcaggattaagtatgatttgaagggacaatgaagtttaagggttttgaaaataaaattgcttttgacacttgttttttgtttctatgaatgtcattcctgcttgaatccacttcttgtcaattaataggttcagagagttcaagtacgtaatgaaaggttaaaacagaaaatgcaagtttttttgttgtttgtttgaaacctatcagttcctatggtattttcatt

SEQ ID NO: 742549 - DNA, 721 bp, Homo sapiens
ggtatacttaattttataggatgacacattcacatcacaaggattttctcagattccagggtttgatcttaggacatatggaaaggaacactccacagacatttccttcctgcagaaagtgctaactgaggtgccttccactgctgaggaaggatgggtgttatgttgctctgccctagctatttgctttcctcagatgttacctggggtggaacagtgttgatttgcagcatgtttaccaggaatagatttgcaaatgctaaggaagaactagctggctctaggagaagcatgagctcagagctttggatgcgatatgcagatggtgtcagagaatgtaatcattcatgcagacttgacaaatcatcagtacaaatatctcatttgacagactatgaaaacaatgctccaaaactagtgcttgcgaaatcagytgtcaatactgctccctgcccaccaaattgtatgaatccaccaagactcgggtactgtcagaacaagggctttgttcagctgggctcatcaatattgttcccttcctatcaaatcatatggattcacccagcctctagtactgttcagaaaagggccttgttcagctgggttcatcaacctatgcataagatgttgccagaacattgtcttagacttcccagggagcttcctgacttggctttgtttccaatcatcctgtttctgaccctcactttgatgctttgga

SEQ ID NO: 742550 - DNA, 510 bp, Homo sapiens
aatatattccatactatgaatgtaccatagtgtgtttaaccattcacctgttgaatgatacacgggttgatttcagtttgaggctattttggatgaaattactatgaacattcatgtttacatttttgtgtaaacataggtttttrtttctctgggacaaaagtgcaagggtataacttctgggacctatttagttgcatacttagttttatgagaacataacaaactgtttatcagagaggctgtaatattttacattctcaccagcaatgcacaggcgatccagtttctctatattcttgcccacatttggtggtggtcctatattttttcatttttgccattctgctagaagtgtagtgatatcttattgtggttttaatttgaatttccctggtggctaatgattttgaaaatcttttgattttgatgtacttatttgccatttgtgtgtcctcttcggtaaaatgtctaatcattttcttcacgcatttcataattttattgctt

SEQ ID NO: 742551 - DNA, 603 bp, Homo sapiens
aattttattgctttttatagttgttgccttttttttttttttttttttgagaagtagttttgctcttgttgcccaggctggagtgcaatggtgcgatattggctaaccacaacctccatctcccgggttcaagcgattctcctgcctcagcctcctgagtagctgggattacggtgccaaccaccatgcccagctagttttgtatttttagtagagacggagtttatccatgttggtcagtctggtcttgaactctcaacctcaggtgatccacctacctcagcctcccaaaatgctgggatgacaggcrtgagccaccacacctggccattttttggttgttgttagttgcctttcttttcttttctttctttcttcctttcttttttaacttgtttactgcccaggcttcccagatcaggaggcttgctatagctggatcctccttgttgtttctgcccactatatctgagtctttcggtaggggaggagagttttgggcctgcaatcacaaagtggctcctcagaatgaactgctgtatctctcttgcgatttccactcacccacctgggtttctcttggcagaaagagagaatcttcaa

SEQ ID NO: 742552 - DNA, 603 bp, Homo sapiens
aattttattgctttttatagttgttgccttttttttttttttttttttgagaagtagttttgctcttgttgcccaggctggagtgcaatggtgcgatattggctaaccacaacctccatctcccgggttcaagcgattctcctgcctcagcctcctgagtagctgggattacggtgccaaccaccatgcccagctagttttgtatttttagtagagacggagtttatccatgttggtcagtctggtcttgaactctcaacctcaggtgatccacctacctcagcctcccaaaatgctgggatgacaggcatgagccaccacacctggccattttttggttgttgttagttgcctttcttttcttttctttctttcttcctttcttttttaacttgtttactgcccaggcttcccagatcaggaggcttgctatagctggatcctccttgttgtttctgcccactatatctgagtctttsggtaggggaggagagttttgggcctgcaatcacaaagtggctcctcagaatgaactgctgtatctctcttgcgatttccactcacccacctgggtttctcttggcagaaagagagaatcttcaa

SEQ ID NO: 742553 - DNA, 608 bp, Homo sapiens
gggatattttcgttgtgttaaaaaacacgtaacattaaatttgcatcttactcattttaaaatatatagttcagtagtgttaagtacattgacactattgtgtaacagattctaaaacacttatcttgcaatgctgaaactctatacacagtgaacactaattctgcctcctgcttccactagaccttgatagccatctttctgctttctgwgcctatgattttaactactttagctactttatacaagtggaatcatacagtatttgtccctttgtaactggcttactttgcctaagataatgtcttcaaggttaactaatgttgtggtgcatgacagaatgtctttctttttaaggctacataatatgccattgcatgtaaataccacattttctttatccattcaactgtcagtgaatatttgggttgctttcacctcttggctgttatgagtaatcaaccatatgatgaacatgaatgtgtaaatatatcttcaaagttctttgaattcttttggatgtatatgcaaaagtggaattgctgtatcatatgataattctatttttatttttttgagaaactgctaagatattaatgtgtcccctc

SEQ ID NO: 742554 - DNA, 622 bp, Homo sapiens
tctcatttcaatgactattagtggatcctttttaaacactaagaatttaatattgtaataaagaaacaatttattgaatgttttctctttgccacacatttcattagcattccactgtgtcatgatatctctttaccagattatctaactcctttaaatatgacaataataatcaacagcagccaggataacaatagctaacatttattgagtaattacacgtgctaggtactgctctaaagactttattaattacctgatcttcacaacaaactaatgagatagtatagcagktgaggtcctataaggcaacagatagcatgcctaaatgtggcaaatttaaaaaagtcttctaaaagagacaatttacaaaggtatggatactattaagaaaaatcaataggggttggtgaagagcaacattgatccattagcaacactaggctcatgggtctgaaaaaggagcagttattagaaattagagagaataggcatagatatagcagagggccactcaactgggaagttttcccaaataatcacctaccactactactctttacatgaggcaggaggagagaatgtatttataaacaaatgtagctgttgcaatttcagcttc

SEQ ID NO: 742555 - DNA, 622 bp, Homo sapiens
tctcatttcaatgactattagtggatcctttttaaacactaagaatttaatattgtaataaagaaacaatttattgaatgttttctctttgccacacatttcattagcattccactgtgtcatgatatctctttaccagattatctaactcctttaaatatgacaataataatcaacagcagccaggataacaatagctaacatttattgagtaattacacgtgctaggtactgctctaaagactttattaattacctgatcttcacaacaaactaatgagatagtatagcagttgaggtcctatraggcaacagatagcatgcctaaatgtggcaaatttaaaaaagtcttctaaaagagacaatttacaaaggtatggatactattaagaaaaatcaataggggttggtgaagagcaacattgatccattagcaacactaggctcatgggtctgaaaaaggagcagttattagaaattagagagaataggcatagatatagcagagggccactcaactgggaagttttcccaaataatcacctaccactactactctttacatgaggcaggaggagagaatgtatttataaacaaatgtagctgttgcaatttcagcttc

SEQ ID NO: 742556 - DNA, 615 bp, Homo sapiens
agcaaaatgctcaaaaaatgtgaaaaatgtagcactaaatagatccccaaaggacacttgtttaaagctaaaacaagaaggcaaagcattgccttgtgaaacctcagctgggaatatgcctgttaggcagctcaaattttatgccactcagaacacatctgagtgtgaccatcaaagcaccatgactatttgttttaggattacaaatatagtgagtgtgcaaattcacaaatatggaatctgaataatgaggaccaactatagactgtatgttgcacccattctcaacaggtttatgaacaggcaccatgctgggtactgatgatataagratgaataatacagaaggagcttaataagaaagacagacattaaactgatagtaacaatgtatactcaatatttaccagtgtatgactaaatgctgagtccctagcatatagtagcgatttaagagtatgtttcaatgtagctgtcatggagcatctccttggaaaaataatgtttaagctcatacctgagaatgagttagccctacagtttaatgaggtgagtgtttttcccaggaaaagaacaagttctagatgctagagagaacagagttaaaggcatgga

SEQ ID NO: 742557 - DNA, 642 bp, Homo sapiens
tgccagtctgtgtcttttaactggagcatttagcccatttccatttaaggttaatattgttatgtgtgtatttggtcctgtcattatgatgttagctggtgattttgctcgttagttgatgcagtttcttcctagccttgatggtttttacaatttggcatgtttttgcagtggctggtacygtttgttcctttccatgtttagtgtttccttccggagtgttttagggcaggcctggtggtgacaaaatctctcagcgtttgcgtgtctgtaaagtattttatttctccttcacttatgaagcttagtttggctggatatgaaattctgggttgaaaattcttttctttaagaatgttgaatattggcccccactctcttctggcttgtagagcttctgccaagagatcagctattagtctgatgggcttccctttgtgggtaacccgccctttctctcgggctgcccttaacatttgttccttcatttcaactttggtgaatctgacaattatgtgtcttggagttagttgctcttctcgaggagtatctttgttgcgttctctgtatttcctgaatctaaatgttggcttgccttgctagattggggaaattctcctggataatatcctgcagagtgtt

SEQ ID NO: 742558 - DNA, 642 bp, Homo sapiens
tgccagtctgtgtcttttaactggagcatttagcccatttccatttaaggttaatattgttatgtgtgtatttggtcctgtcattatgatgttagctggtgattttgctcgttagttgatgcagtttcttcctagccttgatggtttttacaatttggcatgtttttgcagtggctggtactgkttgttcctttccatgtttagtgtttccttccggagtgttttagggcaggcctggtggtgacaaaatctctcagcgtttgcgtgtctgtaaagtattttatttctccttcacttatgaagcttagtttggctggatatgaaattctgggttgaaaattcttttctttaagaatgttgaatattggcccccactctcttctggcttgtagagcttctgccaagagatcagctattagtctgatgggcttccctttgtgggtaacccgccctttctctcgggctgcccttaacatttgttccttcatttcaactttggtgaatctgacaattatgtgtcttggagttagttgctcttctcgaggagtatctttgttgcgttctctgtatttcctgaatctaaatgttggcttgccttgctagattggggaaattctcctggataatatcctgcagagtgtt

SEQ ID NO: 742559 - DNA, 585 bp, Homo sapiens
ggaaacgtggtggaaatatccagtggcaacaaaatattgacacatttgactacatgaagataataaaaatgcttagtaaaaacacaataaaatcaaatgactgggagaaaaatttatccagcctatataatagacaaacagttagtgttcttactatataaggaattaaaaattaagggacaaaggaccaaaaacttgatagaaaaactgggaaaagacatgaacatactcacgtaaagatataaaaatggctctttaaaatgaaatattcaaactaactcattagagaaatgtaaattgagataatactgagataccatttatcatctctaagactggtgaaagaaagaacaacacatttctgttaggcaaggctatagggaaacacactgtcatcactgttggtaggaatgcaaactrgtatgacttctggaggggaatttgtcagtacttaacaaattgcagaagcatttaccctttgacacaaccatttccactgtgggaatttcccttgaagatgcacctccaacagtacaaacatacagatgcacaagattactcattgcagcactgagactgcaaata

SEQ ID NO: 742560 - DNA, 625 bp, Homo sapiens
ttgaatattccacaaacttgccaaaacataaacctacagattaaagaagatcactgaactccaaagtaagcccaaagaaatccacacccagacaacatcatttccaaaagctaatgacacagaaaaggtgtagaatggaaccagataaaaatggtacactacrtatagggaacaacagcttgaataactgtgtgtttctcattagaaaccttagagaccagaagaaaaaaatttaaaaactgctggaaaatgttgatgttcataatgttgggttgaggtctaccattttaggatgtgttttctgtttgttctcgctgatctttatcctctgttttctctttcctgctttcttttggagtacaaaaccataacaaaaagcccagaatcccatatgcagtgaaaatatccttcaggaaagaagattaaatcgagacattctcagatgaaggacacttagaattcatcaccagcaaacctgctctaaaagaattgctaaaggaaattcttcaaatgaaaccagagggaaacttgaaacttgaaacttcaagaatgtaggaagagtaacagaactggtaaagacctaagtaaatacaatagactgttcttcccttgagctctttaaaat

SEQ ID NO: 742561 - DNA, 602 bp, Homo sapiens
  misc_feature 590, 591: n = A,T,C or G
acgtgtgagccactttgtccagcaaccccaccccccactttttaaatgtaaaatctctctttctcttttacacaaacacatgcacacaaatcaccatgcaagctaaacaaaatatttgcaggaggttacattgcctgtattccaggtagacaaataatgcaacaagggttatggaaaaataccatggaagcaaaagcagtgattaactctgtctgggagagtgaaggtcggggcagcttctccaaggatgtgatgtctgagctgagctgtgtagattaagcaggggttctgcttgtccacaaagtgggaagaacattttatgcccagtggcactttcaggggggcctcggaggctcagtgcagctggaatactgggggaatgcagagagcgaggaagatacagataggcagasgccttgaaggcctggccaagacatttttcctttatcccgtaggagtgggagtggtgtggtcagattggtggtatccaaggtcactctggggctcacgtggagaatggcgaggaagcgctgtgctgaagcagtcaagtatcctactggaattagttacatgagaagtgtgggtgaggnnatccccaaagc

SEQ ID NO: 742562 - DNA, 669 bp, Homo sapiens
ggcctatcatcattgctccataaatatttgtggaatgaatgttgaaggaaacatttagtggcaactatcctgtcctgcctttcttagtcatgacatgacctttcattccaaggggtaggaacccattcctaaaagctcaggtaaaggggaagtttattacagagctgcaagacatcccatggagctgccggcaggaagcgkaggctaggacgctaatggctcctttagtgagccggctcccgtgttgtgcctggcattgggttatgagctttacatacacgctctcgcccttgcaacatcctggagaggaaggtagaaatgcctccagttaaaagatgtggaaatttagactccaaaggggaaactggcctataaaatcacatggtaagtgtggcagagctatgatttccacccagggctgtttggctaaagctgtcattcacccatgtctctccaaagccatgcccttcactgctactccatactgcttttatagatagggaagtgggacttgatctgttcccttttccacagaccaacagagcccttagcccttagccctaacttctgcttggtcatggatcacagatctagatggtctggcctcaacccaaaacttaggatccagtgacagcacaaaacccccatatccccagccttttatacctt

SEQ ID NO: 742563 - DNA, 608 bp, Homo sapiens
agaactagaaaactctagagatcatctagttcagagtctgcaaactacaattaatcgatcaaatccagcctagtgcctatttttgcaaataaagttttactggaacacagcttgctgatttgtttgcgtgttgtctatggctgctttcaggttataatggcagagttgagtagctgcaacagagaccgtctgtccggtaaagcctaaaatatttactccctggacctttgcagaaaaaatttgttaacctttcatctagtctaatgctcttaatttgcatatgagaacacagaaggcccagaaagagggagaaatttgtctgaggtagagccagggtcactagccaggagatttgactccatgcccacaacttgcttttgccaccactttcatctgtttctgcagcatggcacagattctgagtttgaatcccggctttagttgacccaratgtgtgaccttgggcaagctacataaactctttcagcctctttattttcatctgtgcccagaggataatgctttctatttcttgagataatgcacattctaggtggttgtgaaaattaaatgaactgtatatagtctgtgttgctcaggctgggagc

SEQ ID NO: 742564 - DNA, 596 bp, Homo sapiens
acccaagaaccttcctctgctataactcacttttattctcaaattggattgtaggtaagtcttttcttctctttccaggttataatttactaggccagaattttctcttgtatccctacattgagagaatgccaatggatcttaaaagaagaatcgtagagatccattttccagtccaatgcttggctccccacccagagcccagtacaagactggctcacagtggcactcggtaaatgtctggcaactcaatcaagaggttggtcaaaaggctgactggggtttgccccgctcaaaggcagcttcaggttcttggctctatgtccttgattaggctagagctagagaagaccccagccattatctaataaacacatgcacacacaaaattgtaagctctrcaggacaggttagcatgtcccagtcccttcaagggccagcccctgagccaaggatacaagcaccagtagttcatttgggaggtgatcccagaaagcaccagtaggagatttggaaagtaggatggaaaggaaggcagccaaaacatgatgtgttaatgggcaactgagtcatattcccagtggggacctctgggt

SEQ ID NO: 742565 - DNA, 535 bp, Homo sapiens
ttttctcagccataagtaaccattagcaatattttaaaaaccgatatttaaaaggcttgttttgaggaatgcttgtaatgataagaggtcaatcctccttaaaaagatactacatttatattaactttctaatcctttttgtcttgactgacttctgcacctccgtaagcattactaaaccaccattgattatgattatttcatgcccctacygatttaaagtaacataattgagaaagcatcttgctttaaaaatactcaaatatttaatgagataactttttttggagggcaggggatctgcccatatatagttcagcatgctgatatttctttcccgttgctgggtcctcagccctgtgcaatccttggtatgagttgaattatctgtaccacaagtcagatatttttgacttgaataaagtaggctcacccttttacatggacctcatattattcaaggtactgagagtgcaggtggaaaccatcccattaatatcaggcctgagtttttctgcagtatctctcaatggtg

SEQ ID NO: 742566 - DNA, 586 bp, Homo sapiens
ttaaccaaaccaggggccagtggactttctgacttttggccctcaacttctgcttaactcctccagtggtggggacttcatttcctcctgcagtattaactcattctcattcttcatttgttcattccgcacatatttattgagctcctactacgtgccagacactgtgctaggcactggggaagcagtaatgagaaaggcacaaagccctgtgccccaaggaagctcatcacccagactggtgggtagaaaatgaacaagcaggcaggcaagaagcatgatatgtatagactttgctaagtaagttgcaagaaagaaacagattgatgagacagaatcactgggaagaggatcaactttagctggaggaagagagcttcgacggaagttcactytgaggaggtgactgaaacctgagacacaatggcagacaccctaatcattacactttcttttttttttttcttttaataataagaaagtggtctcctttaggcctgctcccagtcctaattacatattctggggccccagagatgcctattgctccctttccaatgacagcttctccaacatccaacatttg

SEQ ID NO: 742567 - DNA, 578 bp, Homo sapiens
gtattctggttcttctggctagaaaaatggtggattttctttggagttttagctgcttcatgttgtactactattgtggtctcacctaaggctaaaactacaaaaactagaaactcactctgtactggtcccttccttcaactttyaattttcctccaaaatatgtctgcttttgttcattttctgtggccttctgatggtttttctcccctcacatgttctccagagtttatagttgtttacagaagggtcagtctgttagcagtttaatttaccataccagaaatggaactctgaatgtattaactctttatacatatctcaaactgtttgaaagaatctaaaactcctgaatttatgctatgggacatcaactttatagcatattatgcagtcactaaaaacaatttagaccaaatagcaacgaagaaacatacttatgattaaataacatttgtatgctaccaaatcatgtattcactttcattgcagctgtgtaaaaattcgtgagtatatgtaaacaagaattggaaggaaacttggaaaagagtaaaaatattttttattttaaacatagt

SEQ ID NO: 742568 - DNA, 578 bp, Homo sapiens
gtattctggttcttctggctagaaaaatggtggattttctttggagttttagctgcttcatgttgtactactattgtggtctcacctaaggctaaaactacaaaaactagaaactcactctgtactggtcccttccttcaacttttaattttcctccaaaatatgtctgcttttgttcattttctgtggccttctgatkgtttttctcccctcacatgttctccagagtttatagttgtttacagaagggtcagtctgttagcagtttaatttaccataccagaaatggaactctgaatgtattaactctttatacatatctcaaactgtttgaaagaatctaaaactcctgaatttatgctatgggacatcaactttatagcatattatgcagtcactaaaaacaatttagaccaaatagcaacgaagaaacatacttatgattaaataacatttgtatgctaccaaatcatgtattcactttcattgcagctgtgtaaaaattcgtgagtatatgtaaacaagaattggaaggaaacttggaaaagagtaaaaatattttttattttaaacatagt

SEQ ID NO: 742569 - DNA, 578 bp, Homo sapiens
gtattctggttcttctggctagaaaaatggtggattttctttggagttttagctgcttcatgttgtactactattgtggtctcacctaaggctaaaactacaaaaactagaaactcactctgtactggtcccttccttcaacttttaattttcctccaaaatatgtctgcttttgttcattttctgtggccttctgatggtttttctcccctcacatgttctccagagtttatagttgtttacagaagggtcagtctgttagcagtttaatttaccataccagaaatggaactctgaatgtattaactctttatacatatctcawactgtttgaaagaatctaaaactcctgaatttatgctatgggacatcaactttatagcatattatgcagtcactaaaaacaatttagaccaaatagcaacgaagaaacatacttatgattaaataacatttgtatgctaccaaatcatgtattcactttcattgcagctgtgtaaaaattcgtgagtatatgtaaacaagaattggaaggaaacttggaaaagagtaaaaatattttttattttaaacatagt

SEQ ID NO: 742570 - DNA, 535 bp, Homo sapiens
atgctagcaatagacaactggatcctaaaacagggacatcagaagcttagctctgcaaactgagggactttacgcggtcagagaggagggtgataacacatcaaatatctaatgcaggagacgacaaataggctgcatgctccacacaatcaaggctaattatttgagcacgcttctagattgggaagggaagttaaaaaaaaaatgaaaaagtaaggaaaaaaaaaagcaagcttcttatctgaaattgcaatcctacccctgaagaagcacacatctggaattcattccctgagacagtgagccatagaccagctctgtaccaggacccggcccagctgccacgcgctagtgactgagcgcaggctgtgctttgyaaggggttgatagaatgtttcttggataaatattcctgccaaagttagtttttgagccatggctcgtaaatatacagtattccagggaaaaagtacagaatgtcctcctggggttgacaagcaaatagtttcataaataacccttttgacacgtgtaa

SEQ ID NO: 742571 - DNA, 514 bp, Homo sapiens
tgttgaagtagagcttacaagtcataggtagatttaaagactttatgatttgtaattggttagggaagaaaaactttgtttaaaaatttgaggtcagtggaagactgttaactggctagggggtgtgactttttctaagccccsaccccaggaagacacttagaataaagaatgctggttaaagtttagtcattattttctccttatctgagatctacatgtcactggatctgttcagtgggggttgagtttctgaaagacaactgaaggacacatgtgaagatattatcttgaggttctatagggaaaggaaacatctcttggactgtaactttcttagctattgttttaggctactattacttttgtgtttaagaaattatttctttcttggactagctaggtgcctgggatttcccctgaaggaaatcaggatttgggatctgcaggctcttaaaaaaggggatccctattctgtcttacttttggcatttatactcaatttcagatgcta

SEQ ID NO: 742572 - DNA, 585 bp, Homo sapiens
caacaaaaaaatgcaatgaggaaaggacaaccctattcaataaatgatgctggaaaaattggatagccatatgcagaacaatgaaactggacccctatctctcaccatatacaaaaatttactcaaggtggattaaagacttgaacataagacctgaaagttaaaatcctagaagaaaaccaaagaaaatgcttttggactttggcatatgcaaggaatktatgagtaagaccttaaaaacaaatgcaacaaaaacaaaaaggcacaaatgggacttaagtaaatgaaagagcttctgcacagcaaaagaaataatcagcagagtatacagaaaactaactgaatgggagaaaatattttcaaactatgcatctgacaaggactaatactcagaatctgcaaggaactcaaacaactcaacaaacaaaaaaacaactagccccattaaaaagtgggcaaaggacatgaacacacattcctcaggagagacacacaagcaacccacaaacatataaaaaatgcttaacatcactaatcgtccaagaaatgcaaattaaaaccaaaatgagataccatctcatacca

SEQ ID NO: 742573 - DNA, 581 bp, Homo sapiens
aaaaaaatcctgaaattcatacagaactccaaaatagcctgaatagctgaagcaatcctaagtaaagaacaaagctggagccatcacattacctgactttatgctacaaggctatagtaacgaaaatagcatggtactggtacaaatatagatacacagatcaagggaacagacaaaagaactcagaaacaaaaccacatacctatagccaactgatcttcaacagagtcaacaaaaaaatgcaatgaggaaaggacaaccctattcaataaatgatgctggaaaaattggatagccatatgcagaacaatgaaactggacccctatctctcaccatatacaaaaatttactcaaggtggattaaagacttgaacataagacctgaaagttaaaatcctagaagaaaaccaaagaaaatgcttttggactttggcatatgcaaggaatgtatgagtaagaccttaaaaacaaatgcaacaaaaacaaaaaggcacaaatgggacttaagtaaatgaaagagcttctgcacagcaaaagaaataatcarcagagtatacagaaaactaactgaatgggagaa

SEQ ID NO: 742574 - DNA, 525 bp, Homo sapiens
ccttcaccactgtatctttcaaagccttgattagggaatgccctctgggccctcttggggaatatatttaacaggtggatgaacataactatcttattaaaaccaatcttcctaaatgtatacctttctctatactacattgtagcaaagaagtctggcrtctcaactttgctcaatatgaaccactattgggcccagttttcagtcaaactgttagaattactctcagtcacatcaactaacacgttaaatccagaatctctacttaccacacacatatcaaaaaaaattcaagctaatccaagattgtatatcttccatcgtaatctaacatccataagaaacatccccacacagtttatatgactttgcaaaatctcataattcttttagaaccttaaagtacaacctcatcagtcacagtttttacctggtccccttggatcttccaggacttaagtctgagtatggatttagaagacatgacagatagggaaaggtcctgaggaaaatcagcagtacaat

SEQ ID NO: 742575 - DNA, 641 bp, Homo sapiens
gtaatgtacaaaagagttttccagactgaacacagaagcaaatatgagaatttgcctgttttgtgttcatccatacattaaagagggttccaaaaatttttaaaaatgctacacttgccactaaattatttgctcttcatacacagttatttattctaaaaatgttcacatgcaaaggctttactttttaatgaattaataaataactttaaggttcttaaatgctatgtggcaaaaatttacagatatacacaattataaagctctgtggggactcaataattgctaagactgtaaagctcttctgagaccaaaaatgttgaaaattctattctaaaatgagctaataacaaaaagttctgaacttaaactcaatacttgaccagtaggaactaatagacatccatagaactcactccacccaacaactaaagaatatacatccttcrcctctacagacagaacatactctaagataaaccacatgcttggccataaagcaagtctcaataaattcaaaaaaattgaaatcacaccaaccacactctcagaccacaatgcaataaaaatagaaatcaataccaagaagctctgtcaaaatgaacaattatatggaaacttaaaaaacttgctcctgaatg

SEQ ID NO: 742576 - DNA, 638 bp, Homo sapiens
gcatctcccccggtgactaatgacattgagcatcttttctcattttccattcacgttcatgttcctaggtgaaatgtctgtaaaaatctttgccccattttcattgggttgcttctctttttgagttacaaaaattgttctctttttwaatatagcctggatacaagttatttgtttatatatgctttgcaaatgttttctcctcttctgtgcactgacttcatttttttaaccgaggcttttagaagagcaaaaatgacttcttcctttatacttttgtgttctttttgtcatattttaaagtctttgacaaagtcaaaattactaagatatttctcctatttttttcttcaaacagtttctagaaatccatttgtttctgttgttgctgctgttatttttaatacatgtctgtactcataccatggtaagttgtaaaaaaagctctttcctttctttcatatcacctgaaaacttgttctctgtaatagagttaggccagaaggtgatcttcatttttttaataggatgaggaattctcctatccccttcttttgaaaaatttacacagaaaaagaagggggaaaaagtgcaacattgtataaaacatgtatggtcataaaaattgctgctgaatt

SEQ ID NO: 742577 - DNA, 623 bp, Homo sapiens
gaacttccttttcttcacctttgaaatatgaatgatgacatccctgtcttgggactcttaggaggattaaattagggcacatgtgtaggcacccaacagggtgcctggcacatagtaggagcttgataaatggtggttattaaagaaggaaaattttgaatccaggtggtacaaatgattctttgggggctttataccttgtcttccacatgaaaattgttcccccatgttgccatgaactgtgcttaatattctcctcaaccaaccagtcaagtattggagtgagaattagaattagagtatgggckctgagagttcaggaacttttctgtctcattaaatgctgcctgcacctgagattgagtaggtatgtcagtaaacattactggcactaattacttgtgcatctactattgtgcaagcctttatgatttagcactatgggtggcttaataaaatgattagcactagtcacttctctcaagtaacttagaatgtgagtttgatgagtaatggctgagctccttcaggtgccaaagtgttgagatgggctcaggttacctaagaggaagtgtgagaacgttcagagaattatctcagtaatgctagcaaggagctatggg

SEQ ID NO: 742578 - DNA, 616 bp, Homo sapiens
aatggaggtgaaagccaaggcccagggaggtaaagtagctttctcacatttgcaaattagaaactaagactattgtttgcgccctcaaccattcaacaaatattagggagggcatactatgtgcaatgaatgtccttttctgtgtgcagggaatayagcagtgaccaaaatagaccaaagaccctgccatcattggagtgagcatatgatgggggttactctgaacctctttttactggctcacattgcccatttttgcacttaattttttatatcaaagatgccagccaaatcaaactgttcaatgcaagacacaatcttttcctcaccaactttctaccaagggaaaactgtgtcttgctaaccaaaatgaactgctgtaataccctccagggatatttttcatccactgcccagaggtatttaggtatgccctgccaatttttaatagtccctctctcctaccccactcctcacacttgaagaaacactttttgtctcctgcaaaagactccagtcaagcagaaaaatgctttctttcgttttcacatgagccacccacagctgaaagatatgcaggtgtttccagcagtgatggagctgcatttaggatcca

SEQ ID NO: 742579 - DNA, 634 bp, Homo sapiens
tacccagacataaggcatatatggtacaattacagcagctctatgtagtttttcagcaaagtcgttaagtgaaaatacaatactgtttctataatattggaaagcttgatgatgagccaaacttactgctgaaagttaaatgggaaggctcccaggcatcgtggcagagaacggggcaggacttgctgggatttattgttccctgaggagagcagcagccccagcaccactaatcagattatacatcagcagagtaatcactgttgactcttccagacacagaaagacaaacaagtggcttgaaagtatacaaaagcagaggcctgtaagctccctcatctcgcacaagagagctgtgaatcacctcggtaaaggattcatcatcrttaggtgtcacccgggtcacagcagaggtgttaagttgtatacagaatggctcacagcaaagatacaaaaggcagaagccaagaagaatagaggtgctaataacattgaaaaactattagtgggagtgaagtctcttcatgggcatgtttccttgaatgatatggattggagagagctctgaatctggagtctagaaacctgaaatttagtcccagttctgccaataactaccctgtaggattttgct

SEQ ID NO: 742580 - DNA, 568 bp, Homo sapiens
taggagaagagggtgatattttcatcatgccatcttttccaaactggaaatgttcccctgaaaaatgcttataaccacagtaaaaaccaggcaattgttttttacccgcatttcttacctggctctttcttatgtagcacttcatggagagaggtacattccaaaaataaactgagctcttactccgtagtcatcactgacgtatatttaaggcccttaacctactcataggtcaagcatacctaatttgaacctattttccaaaatgaaattattaggtmttttaagtgcaagaatactcatgaaaacaacttgacaatattttaaataagtaccattctgtaaaatctaggctattgtctcattctaccaataagccattaaatgaagagcaaaacagtcaacaaatttttatatgatgatatccaatttggagaatttatattaaaaaatccatgctgagaattcacaagctgctaattctgctaattgacattggcaacagagagagaaggacttagatgttttgaagatattataggccctcaacttgctttcttatggattt

SEQ ID NO: 742581 - DNA, 634 bp, Homo sapiens
ttcttagacataataccaaaaacatgattgtcacagacagaaatacactgttaaacagcaaagataaaccacagattaggaaaaaactctatatctgttaaaagatttggaaccagtatacataaattatggtttcaaaactaagtaatatgaaaacaacccaatttaaacaaaaggcacaaaatatttgaatagaaattcagagtagacatgtggaggacaagtayatgaaaagataatctgcaccatttgacattagagaaatgaaaatcaaaaccataatgagatattgctacccacctatctaaaactaaaacattaaaaacaaaatttaaaaagctaaaagaacaaaaacaaaataaaaaaatagcaagtgctaaagagtatatagagaaactaaaactctcataccttgttggtgggaatgtaacataagaaaatagtttggcagtatgtatacttattgtataaccatataagtatttacccagcaatctcactcttagatatatactaaagtgaaatcaatacttacatttacacaaaaaccacagatgaatgtttatagtggctgtaatagccctaaacataagctctagtacgtccacataataagatattactcagcaccatt

SEQ ID NO: 742582 - DNA, 652 bp, Homo sapiens
aatactgcatatggaaattaaaataaactaaacattgctttatattgtttgggataaacatatatatgaaaagtataaaaattgatggatatataaaccctaccttctgaatattggttacttgtaacaagggatgagggaaaggagtacattcatcagactgtcaggaaattttcattctgttggcaatgtgttctttcttgaggtgggtcttttaaaaattattctctatatgttttccacatatttcatattatcttataatgaaaaatagatgtaatggcttcttaaaaattttagtgaaaaataaacgaaccgtacacttcaaacagttatcatagggttaaacacatgcagaacagagtttcaagaagtttctgtcctcttctttttctcttctatcttcttggtaggaatcacttcctcctrtattcttttcccttgtctctattttaataagtgaggaatgcggtggcaaatgtgtgtactctaacttatagcctagactcaaatttgtgatatcagtcatacctgacctgtcatctagtgtcaattattcaatctctttgtaacttaattttttccatatgaaaaataaaaagagaaattgtgtttatgttgcaaatttaattctatgttaatttaatccaga

SEQ ID NO: 742583 - DNA, 557 bp, Homo sapiens
gtgagatgctgccgtagggagtttgctctgggatatgtttctgaattggaagttgattttcaagtcattttgggaattcaggaaagtttttttttttaatacttgcatcaggcccattatcagagactcaatcataatcgacctgtgaatacagccacattgttcctaagcaaactcatgaataaaaaaagcaactatatttgcctgtgactgtgggggcaaaatttgataaggaaacagatggcatgttgtagcttccaggaattttcaataaataagctgatattgaaagagatttrcaaaaaaaaaatccaaataatattttagctgtgtgtttgtgcatgtgtgtgtatgttgaaaattaaatactagagttcaatgttgattaatgtcaatgtcaaagcttacaaacctcagaactgaataattctgaatacatattctatgatatgcagagctcattgttaaccttagccttcctttgcattgatacaccacttttgccaacttggaggcctgaacaccacattaattccataacaggtggcaaaactcct

SEQ ID NO: 742584 - DNA, 639 bp, Homo sapiens
ctgcctccctcccttgctgtgcttagccagcctggttctccctgcagatgcagtttcaggggatgctgtgaactgatcagaaaatcaatagaaggcaacttggaggggagggtgcagaggacattgtcattgtgacttggtccccttaagagctgagatgcttactcaagagctggaggttagagtagaggcaggctccactctctgacctcaaggtatgagctttgttaggaaatgagcagctcttcctgagaaattctcaggagacatgtcatacactgcatcttccatgaaaggccaagtcttggttatggcaggaggtggcaggaggtagaaggaaagttctgtgaccaagtatggatgaaaatgaatttttaattttaccrtgtgcctgggatttcagagggtctcaaataaaagactagtgacaagggagctataagagattgtgtcaggagagaggaagaatggccaagtacagggatgagaacattagtctgcaaagagggctgactgtgcctacaatttttgacagtgaccagggctaatagagaagtgacatgtggtaggattaatggcacataaattttcacacagggctctccacttacacattttcagcttcattttgtaacacta

SEQ ID NO: 742585 - DNA, 641 bp, Homo sapiens
atttttattttttactttttacatttttctttaaaaactaagacacaaacacaccattacccattagcctagacctatgtagggtcaggatcataaaaatcggcaccttccatctccacaccttatcctactggaaggcctttargggcaataacacccagggagctgtcatgtcctgtgataacaatgccttcttcttctgggatacctcctgaaggacctgcctgaggctcttcttgagatgtcactcttttcagaaatgtgttcatggtggtttgtttggtttgtttcttttattcatcatagatttgcttgtaaatagataatgcacgatgaacattcctctctactaatgaaaatcatttcatgttggagtcaacattttcaaacgttttaaggagtttgttgaggtctgcaaaagcttctgcctaaacccatcactgtgaatatccttgggggcttttctttttttctcctgtagtttcctttcctcttgctatgcatttctgttctggttccagtaactcgtcattagtcaattcctcagtgaccacatctgtgacctcctcaatatcatcctcctccacatccagcttaaagttgtttgccatttcaactaaagccttgtgaatatttttttt

SEQ ID NO: 742586 - DNA, 641 bp, Homo sapiens
atttttattttttactttttacatttttctttaaaaactaagacacaaacacaccattacccattagcctagacctatgtagggtcaggatcataaaaatcggcaccttccatctccacaccttatcctactggaaggcctttaagggcaataacacccagggagctgtcatgtcctgtgataacaatgccttcttcttctgggatacctcctgaaggacctgcctgaggctcttcttgagatgtcactcttttcagaaatgtgttcatggtggtttgtttggtttgtttcttttattcatcatagatttgcttgtaaatagataatgcacgatgaacattcctctctactaatgaaaatcatttcatgttggagtcaacattttcaaacrttttaaggagtttgttgaggtctgcaaaagcttctgcctaaacccatcactgtgaatatccttgggggcttttctttttttctcctgtagtttcctttcctcttgctatgcatttctgttctggttccagtaactcgtcattagtcaattcctcagtgaccacatctgtgacctcctcaatatcatcctcctccacatccagcttaaagttgtttgccatttcaactaaagccttgtgaatatttttttt

SEQ ID NO: 742587 - DNA, 641 bp, Homo sapiens
atttttattttttactttttacatttttctttaaaaactaagacacaaacacaccattacccattagcctagacctatgtagggtcaggatcataaaaatcggcaccttccatctccacaccttatcctactggaaggcctttaagggcaataacacccagggagctgtcatgtcctgtgataacaatgccttcttcttctgggatacctcctgaaggacctgcctgaggctcttcttgagatgtcactcttttcagaaatgtgttcatggtggtttgtttggtttgtttcttttattcatcatagatttgcttgtaaatagataatgcacgatgaacattcctctctactaatgaaaatcatttcatgttggagtcaacattttcaaacgttttaaggagtttgttgaggtctgcaaaagcttctgcctaaacccatcactgtgaatatccttgggggcttttctttttttctcctgtagtttcctttcctcttgctatgcatttctgttctggttccagtaactcrtcattagtcaattcctcagtgaccacatctgtgacctcctcaatatcatcctcctccacatccagcttaaagttgtttgccatttcaactaaagccttgtgaatatttttttt

SEQ ID NO: 742588 - DNA, 639 bp, Homo sapiens
gcacctgcagtcccaacttgggaggctgagacgggaggattgcttgaatctgggaggtcaaggctgcaatgagccatgattgtgccaaactggaatcccaggaaaaagggactgatagcttggaagggaaaaaaatctttgaagaaataaatttacagattcaaaaatcttgcatttagcctgagaaaaatggcagatttcatggcagaacattataaattttctctgacatctcattagaactaataggtgccagaagagaatggaactatatcttgaaagtgctaaaagtaaaatgagaaaggagagggaagaggggaaggggagggaaggggagagaaagaaagagagaaagagagaaagagggagaaagagagaaagaaagagaaagaaagaaaggaagaaagaaagagaaaaagaaaggaaaargagagagaaaggaaggaaggaagggagagagaaaggaaggaaggaagggagagagaaagaaaggaagaaagagaaaaaaaggggaaagaaagaaaaaaagaaaaattaaacttttaaatttaaaattctgtatcccgtaaaatcatcctttaagaattaagatgaaacagagatattttcggataaaataaaactagagaattcatcacc

SEQ ID NO: 742589 - DNA, 509 bp, Homo sapiens
ctctcaccacttctatttaccatagtattagaagttctagccagagaaattaagcaagaaacagaaataaaacataccctaattgaaaaagacagcataaaattaactgtttgcagatgacataatcttatatgtagaaaaacctaaagattacacagacaaacacayacacacacacaacctattagaatcgataaacaatttggcacagttgtagaatacaaaatcaacacatatttctatacactaacaaaaatcaactgcatttctatagataaacaatgaattattcaaaaagaaaattaagaaaacaatctcatttacaataacatcaaaaataatgtaatactctgaaataaacttaaccaaggaggtgaaaggcttatatactgaaagccattaaacaccaatgaaagaaattaaaggagatacaaataaatgtaaaggcatcctatgtttatgtattagaagaatcaatcttgttaaaatgtctacactactcaaagcaa

SEQ ID NO: 742590 - DNA, 422 bp, Homo sapiens
gcgtttcccaaacacatacactacagggaaaatcatctagaatttaatgtttgataaatgctcattatattgatatataggacttctttctcaactaagagctttagtaactaagagctctatattaactcagtattcaaaataacccatgatgctgctgatggcaaggcttacccaggcttcctggatatgctgcgagaacataggctgattctgcagaacatggaaatttcaggagttccagtgattgggggtggcctcaatcacsgcttctctaactttttcaagagaccccagatccctaccagcagaacagggctctggagcatttggcaatgtactgatcacaagtaattgtattaggctgaaccatatgcaattgccattctttggtatctccattacattcaaccaactataac

SEQ ID NO: 742591 - DNA, 536 bp, Homo sapiens
ctgagtttggagcagttcctgacagctgagagaagccaggcagcagggacaggcacttccaagcctgtgagtgcacaggggcccttcccaccccctggcccccaagagtgtagggaagccttggtttgcagtgtgctttgggcggttgcagctgtgcccatgggggcagggtttctacctgctccgtggagcaggaggcctgggtctgcagctgcagtttgggtggctgtagctgcgcgcaggcaggcggggctcccacctgcccctgggctcctgccagcttcatggagtgtgcagccctggccgtgcctccctgttgcagccagsagtgatggcagtggcaggccatttggagcagctgctgccatcattatcattaccattttatagttgaggaggcatagagaagtgagttgacttgcccaagatcaagatcgcacaggtggtgagtggtagaatccagatttaaactagacagtgggactcagactgagcacataattactaggctgcctggctttaaggtactgaaaatt

SEQ ID NO: 742592 - DNA, 561 bp, Homo sapiens
caatcagacaagattgcttttggccaggtgcggtggctcacacctataatcccagcactctgggaggccaaggctggtggatatcttgaggtcaggagtttgagaccagcctggccaacatggtgaaaccctgtctctactaaaaaaactacaaaaatcagctgggcatggtggcatgcacctgtagccctagctacctgggaggctgaggcaggagaatcagttgaatccgggaggcagatgctgcagtgagccgagatcatgccactgcactccagcctgggctacagagtgaractccaactcaaaaaaaaaaaaaaagattgctttctagccaaggatctgatctgctgttttaataatttcaaacattctgagcaagactgctgctccttttaaaagactgctgtaacttcaggcacttgtgacaaaacctgggtgaattattagacaatttcacgctggtttgcagagtgattacaacaagtggccttgaatgatagcatatgttataaagagatggagcctttcagttataaaagatgtatcaatcaggggaaa

SEQ ID NO: 742593 - DNA, 519 bp, Homo sapiens
aatgtgttagatgacaccagaagatcaatctgccaagtctagaatgtgagaaaattctttaggacaaatgatctatttcttcaacaaataaacgccaagggagaaaaaaaaagaagtaaaggatatttctataaagacttaagaaagatatcaactaaacgtaatgtataaccctgtttggatatagcgtcaaataaaccaggtacaaaagggcatttatgatacaattgagaaatatgaaaactaactggatatttcacaagsaatagtaaactgttacaaattttgggggggactgtgataatagtactgtgtgtatgtaggattttgtgtgtatgtatgtttaattcttatcttcaaagatacataagtttttacagatgaaatgctactatatttgggacttattctaaaacaatcatgtcattaagctgaattttgaggagcaataaaaaagaaaacaaaaataaaaactaaggccaggtgtgatggctcacatctgtaatcccagcactttga

SEQ ID NO: 742594 - DNA, 590 bp, Homo sapiens
gcacccatgcattggcggaggaagtcattgcattataggacccttgcatcttttcctttgggctttctttctaccctcagtgagcatcaaaccaaagaaaagcttcttaaaaaaaaagaacacaagttataagagccaccaatatttcaaaaacaatttcacatctgcactgaaactcctctacttacaaacattcacagataagaacaaagccatgcactaaaggaaaagtaggccagctccgcctgcttccccacagatggtgagcagcagtcatgcgcatccattttagtcttggccatcacgttagtcattagtgttggcccatgagctgtttaaagaagygtcttcttaccatgaaaagaagaaagtcaaagtaaaaacatctttggatacatttctgaatcgctgaaaagcaccaagtagagccagaatcaatgccagcacatcaccggtccttttgagaaactcaactttatacagacatgtatactgcagagacttagaaagaaatagacttaaacacagccttttggatatgatgtatttgtacatgaatgatttctaaatttctaacagcaaaaacaaca

SEQ ID NO: 742595 - DNA, 528 bp, Homo sapiens
acttaatcatgttttgaaggcctctggtggtgcaggttcttcccagggcagggtagactagaggttatgcacatagactttggggccaggttgcctgctttcaaatcccagcttccacactccacacactggtaccttgagcattgttttgtcacttaactattctgtgcctcggcttcctcgtctgtaaaatggaagatgataataccacttatttcatcgtggaactgtaagagctaaatgagttactgtaaataaagggtgtataacaatgcctggcacataaatgctcaagatgtgttagctatgatggtaatccatatcagctgacccctttccatggatccwccaagggggagagtgaggtttccagagattagatgactcgcacaagtttcatccaacccctggcagagctgacatccaaaccctgatcatttgacttcgctataaaacatgcctgcgggtgctcagtcttgctcatgtttgcattttttttgcctcaatttaaagttttttaaagaaagt

SEQ ID NO: 742596 - DNA, 659 bp, Homo sapiens
attaaagaccagacttttgaactaaaccaatctgacaaaaataaagacaaaagtttttgttttgtttgtttgttttttaaaaagacagcatcttcttctgttgccaggctggagtgcagtgacataactgtggctcactacaacctctgcctcccaggttcaagcatttctcctgccctcaacctcctgaatacctgggattacaggcaygtgccaccatgcctagctaatttttgtatttttagtagagaaggagtttcatcatgttggccaggctggtcttgaacttctgacctcaagtaatctgcccacctcagcctcccaaagtgctgagattacaggtgtgagccactgcacctggcaggaatttttttaaatgagcaaagacttcgagaaatatgggattatgtgaagtcaccaaatctataaattactggcattcctgagagagaagcagaaaaagcaaacaacctggaaagtatatttgaaaaaataattcaagagaactgaaggagaaataaaatattttccagtcaagcaagcactgagggaatttgttaccactagaccagtcttataagagacctttaagggagttttaaacatggaagcaaaagaatgatacctgttaccacaaaaacacagctaaacacatagcc

SEQ ID NO: 742597 - DNA, 536 bp, Homo sapiens
ggaattatgagggaagaatgatgttatcgcccaattcagataattttttcagaggtctcatcatgtccttaatcaggatctcaagtcctattgcactcatcagatacactcaaatgtttattgagctatttttctactctagactttattttggcaatatgggtatcaaattaatctttccccaataatttatactaataccacatatgtttcaattgacaggattccaagatagactaaatgcctggttactactctgtttcactgataacttatactgaaatacggagagctatcatagcaagsaaagtcgacaaaaaaaattaaatttcattggtgttaattacttggacaattcacatactgcctcttattctaaataaagtaactataactgtaatcaaatgcgttattcagcaaaagaatcagtagatatatgaaactgaagcattttctatttttctatagtaatatattctgacgaagaagagtaatgattgttgtgtggaaaggaaggagaaaaaataaatcagaaa

SEQ ID NO: 742598 - DNA, 562 bp, Homo sapiens
tgaagtgttgatggcagcttaatattagaggatgcttataaaatccctatagccaatgtcactgtcaactacttgaaattgatgtatttcttcatctcttttatataaattcagtgaccttcagtaatggaaagtgtgtctattttccccatagttaaaggacaggaactaaagaacaaatattatcagtcaaaaaaccctgatctgcaatttcctaaacttgaaaaaaccatgaaatattttattttrcttttaaagaaaattatctatcacctaaggtactttaattatttgttatcctaaaaataggtaaaatcaatgtatgtatttcttagttttgtttaatacctcctgacattcactatcaaggaactatatatataaatcaaatactttcttttttaaaattacctctttggaggctacaatcaatgctgattattatctcaaaatgaagtaaaaatatattttatgcattaagccagtaaaaaatataactacaaataatgtaccttagtatattatattatatatatattagtatattatattagttttagca

SEQ ID NO: 742599 - DNA, 614 bp, Homo sapiens
gcgatggttttcagctccatcaggtttaagaacttctatacacggtttattctagttagccattcgtctaatcttttttcaaggtttttagcttctttgcaatgggtttgaacatcctcctttagctcggagaaatttgttgttactgatcatctgaagtcttcttctctcaacttgtcaaagtcattctccattcagctttgttccattgctggcgaggagctgcgttcctttggaggagaaaaggcactctgatttttagaattttcagcttttctgctctggtttctccccatctttgtagttttatctacttttggtctttggtgacggtgacgtacagatgggttttggtgtgggtgtcctttctgtttgttagttttctttctaacagtcaggaccctcagctgcaggtctgttggagtttcctggaggtccactccagaccctgtttgtgtaggtatcaccagtgsaggctgcagaacagcaaatattgcaaaacggcagatgttgctgcctgatctttactctggaagctttgtctcagaggggcacccggctgtatgaggtgtcattcggcccctaatgggaggtgtctcccagttaggctactt

SEQ ID NO: 742600 - DNA, 549 bp, Homo sapiens
attgccccaaaatacgcagtatattttgacgtatttccttccaataattttaatgcaaacataatttgagatttttaaaatttgaatagacactgtacatgtaatttttattataatctttatatcaaaccctgagaatttcctgaagtgttaactattcctcaaaaaattcattttaatagctacataatattctaacctakgagtctagtctaattcatttaagtcccctcctattattaaatatttaagatttttccaatattttgcttttataaataacgttacagtgaccatttttgtatcatttgtgcatccaaatttatgactagttataagagacaaattcctaaaataggataaatcctagggttaaaatgtatatatttttaaagctgaggaatacctgtatataaaatgtatatatttttaaagctgaggaatactaagagcagtgaatgatgctgtagcattttatacatgtctagattaaaacaagattcagatttagattgcaagggagggataaactaattcatttattgcctt

SEQ ID NO: 742601 - DNA, 559 bp, Homo sapiens
ctgacattttaatgatcactattctcactggtgtgagatgttatctcattgtggttttgatttgcatttctctaatgaccagtaatgatgagctttttttcatatgtttgttggctgcataaatgtcttcttttgagaagtgtctgttcatatccttcacccattttttgaagaaaacaaactcttaagagagaagtattcattcttttgagtgtgagggatggagaaagagaaagatggagagagtattataagcagctgtatcccctttgccatggtgatagcagaccattcacatgggagcttctggtctctttgtaataataataagagccacattaccagtacttagagtatgctagttattttaacacattgtatcattaaatcttcaaaacatccctatgagttagaamcctaaaaaaaaaaaaaaaaaaaaaacctctgaggaaataaagtgacaggttatgtcaaagctcaaagtcacataactagtaggtagtccactagagtttgaatctgtgggacttagttttacccttctttctccagtcttggt

SEQ ID NO: 742602 - DNA, 632 bp, Homo sapiens
tcaaattccattgaagtcatagatctaaacaaccatcatcaatgactattaacagtgaaaaaagatagatgtttgtgccttgagatggtagcacactgcagttcctatgacataacattgacatgcacatgcacaaatgccaaatctaaccccagtccgacttaggcactagatcctactaccatgttgtaaaagtatagcggtcagaaaaacatgttaaatggttccacaggaagacaactcacagactataagaaatcgtacaggggctgggtgcagtggctcacgcctgtaatcccaacagtttgggaggctgaggtgggcggatcaactgaggttgggagtttaagaccagcctgaccaacatggagaaaccccatctctactaaaaatacaaaattagctgggcatggtggcacatgcytgtaatcccagctactctggaggctgaggcaagggaatcgcttgaacctaggaggcagaagttgtggtgagctgagatcgcgccattgcactccagcctgggcaacaagagtgaaactctgtctcaaaaaaaaaacacaaaacaaaacaacaactacaacaacaagagaaatcatacaggacaaacaacctggtttattaagcaacaa

SEQ ID NO: 742603 - DNA, 607 bp, Homo sapiens
gctggggagagcaaatgaactaaagcacatcctgttcttagcacagcgcctggcacacagcagggactcagtatttggtcatttgtttattttctaggacttgatctaggttttcagcctccaaagctggggttctctctcccaggttagtagaaactaggggtcagctcagctagaggatgaggttaggaatgaaaatacttagcaataattgaatatgggggccgtcggctggcagagtttcctcagaagtgtggtgagttcacgtctccaattctgaggatatttgtactggagctttgcccatcaaagcttcttctttctcagactatgctggagacacacaggcatgtcttttggtctcttctttttgccctctagaccacamactcacacagctgtcctgacaacaaccatgacctcagacccatcagagttcaattgcaaagaccacagtaccctgtgctattccaggcatggcttctggaggagaggcccagatttccagttggcctcaggtgacacaatgatgactgagtttacaagcttctgtggccatttccatttaaacaaaggaacagcatgtcgtgcctctattcactgtcct

SEQ ID NO: 742604 - DNA, 645 bp, Homo sapiens
tccaggccctgtagaaggctagcaaagcaatatcctggcatttctgtcacaatatagagctgggctccacagcaaagaagatgggaggaagaagagtagttgaataggcaatcagcaagccttgcaagatagtcttgagaaggaaatgtggggaaaagtgcaggaacactgtgaaataaccacttccactgtacctatgtaagacattgttctcagaaataatcatatcaatagcaatgcttctccctgtgggttagaggtagagtctatagaaatgcaggatgccccatctctactaaaatacacaaaaattagctgggygtggcggcatgcacctgtaatcccagttacttgggaggctgaggtaggagaattgcttgaacctgggaggtggaggttgcaatgagccgagatcgcaccattgcactccagcctgggtgacagagaaagactccgtctcaaacaaacaaaaatagaaatgcaggatgccaataattctaggttgtcctgttctttccccatggatatggcaggcaagggaaaaataaaaggaaaccgactgccctgacactaaaactgacgttgtatggcctcataataacccaggcctggaaaacaatagaccaccaacttcccctctcattt

SEQ ID NO: 742605 - DNA, 601 bp, Homo sapiens
acacaccatggcctgtcaagggttgggatgcaagggaagggagagcattaggacaaatacctaatgcatctagggcttaaaacctagatgatgggttgataggtgcagcaaaccaccatggcacatgtatacctacataacaaacctgtacattcacacatctatcctggaacttaaaataaaaaaaaattaaaaaaaaaaaagaaaatgtggaatatctatatacatkgaatactactcagccataaataagaatgaaatcctgtcttttgcagcaatgtggatggaactggaggccattatcctcagtgaaatgactcagaaacagaaagtcaaatactatatgttcttgcttatgagtgggagcatgacaatgggtacacatggacataccgagtagaataatggacactggagactacaaaaggtaggagggtgctgagggctgaaaaactacctattgggcacaatgttcagtatttgggtgatgggtacactaaaagcccagactttaccacaacacaatatatgcatgtaagaaacctgtacttgtacctcctaaatatattgtttaaaaagtcaactgactgtagatattaat

SEQ ID NO: 742606 - DNA, 598 bp, Homo sapiens
ttcatcacagtaagaacaatggaaaagtaccagtctaagggaagatcatggattcagtcctgatcatgttcaagtgagaaacttttatttcaagtagttaaatgtataagtctgggctaaatattatatttacataataatagtaactgaagctttgaacttggttgagattaagaawaaagtatgacatgagaaaaagatagactctaagagaagaatgtcaacatgtaatttctgggtagaaggagaagagcctgcaaaagatacagaacaaaatggccattgaggtaggtgaaaagcctagtgagttttaaaatgtatccgttgcatatagcattattgagcttattactgactatagcaagggctgtttcagtgagacaattggggcaaagtcatatggagtgaattggaaaaaagaccaggaaataaagaaataaaaatggtgaatatggacaattctttgaagaggtttagctattgtgctaatcaacttttgctgtgataataaacatcttcaggatccttgtagtttagagcaacaaacatttgtttcagtggaccagctatagttctgctgggtttgactgggctccac

SEQ ID NO: 742607 - DNA, 615 bp, Homo sapiens
gaagtggaacaaagtaagcacatacaagctgaaatacaactggcaaatagaattcacaacgtgcttcctttcagtgattgaaaccacacttctgtaggcaaaaacaaaagggtctcctctgtctctgcaagcaggcagagttcccttgaagaaagcaggaatstgcaggggcctggatgatgaggtaccaaggggaccacgggcccaggatattggaaaaatttctctaacatctctttctaagaactatagtccttacctttttttaaacaggaatcttgcattgaatggatagcacaaacagaagttaaaaatccctaagtttgagggtggagggatatgaagcaaggaaatatcaaattggaaagagctgcaaaatcaaagaatgagtgatgacatgaaatagatgctatgggggtgacttcacagaaagtggaggcccttatcatgtaggagaggacgggaaaagagaaagtcccaaacatcaggaaattgcagagataggtgagagctcagaagtatacaccatttccatctagttgtacagatccgtaaatgagatttggtctcagtttaggccgaggtcccaaggcaataggtagaaacaactgcttc

SEQ ID NO: 742608 - DNA, 603 bp, Homo sapiens
tgaagggggaggtgctacacacttttaaacaaccagatcttgttttttaaattacactacagttctttttaaaagatcttgtgagaactcactcactgtcactagaaccacaaggggaaaatcctcccccatgatcaaatcacctctcaccaggcccctcctccaatattggggattacaattcaatatgagatttggatggggacacaaatccaaaccatatcaagtacctaaaattacttacaaattaccagtatacaatattattaactatagtgcttatgttgtaattagaactctagacttattgatcctrcataacagccactttgtaccctttcacctataactacccatttcccaccactacccctgcctgcgcgtctctggtaatcaccattttaatctctgtttatatatattcaattttttttaagattccacctataagtgagatcatgtagaatattttttttccttgtgtggcttattttacttatcatagtgtcttctggattcatccatgttttccaaaatggtagaatcttttttgttaaggctgcaaaatattccatttcatatatatatatatatacatatata

SEQ ID NO: 742609 - DNA, 535 bp, Homo sapiens
gcttccacctttacccccttccttcctacttcaatacagcattttctcaatacagaagccaaaacctgggtcatatcatgttactcctctgcccctaatcttctgtggttcccaatctcatccagaataaaagcctaagtcctttcagcagttcacaaggcccagtgtcattatccccatgaatactttgatctcgtcttctaccactgtgcccttcctcataaccactccagccatactggcttcctggcttttccgtgaatatgtcaggcacgtttctgcctcaggacatttgcactgactctatgctcagttgaaacactttgcttccaratatttgcgtggctttctcccttaccctctttaggtctttgctcaaattccacctttttgtgaaggctttcctgcctcctcaattttaaatcacaactccctagcccccaccctacttaattttgctccgttacacctatggctatctgacatactatatgggttaattattgattaaccatttgttttcccttgttggaat

SEQ ID NO: 742610 - DNA, 638 bp, Homo sapiens
ttactctcaaaaatgggtccaaatagccaaaaggatacaaaatgtcccaaaactgtaatctaagtcacttacatgatttaatccaaattttcataaaaggctgttaggctattacattgatttatccatatgtaaatactggtattatgtggattttcttaataactaataagaattcatttctgcaccctctccccacttccacaaacactttttgttacaggtgttcwagtttattttgccttttctctatttttctatgttccctcatcactcatgtctccccacagctggtattcacagatctcgtttaacaaattttgggtttgctctcacttatgtggaagagtctatttccagcaaactactggacttgtatcttagggctaattattcaggaactggcctaagtccttacttaccattctctaaatattctctgtcacttcattacagccaagactttattgtaaatctactactttgacctgatacacacatgagaagcttttatgaaatgaatgaatgagaagatgttaatttgcctaaaggctcttcagctagtaagtcattatcttattgaaagctatcaaagcctttcttagttacttctcaaaccactcactgcccttccctac

SEQ ID NO: 742611 - DNA, 638 bp, Homo sapiens
cattggcaatccctccctaagtccacaccctctgtgtgttgagacctaaacaaccagtaggcactggccaaacaaaggaggacagggatggtaccagagacaccaggcagaaggaacagaaatattcagtggactgatgctgggaaacccattatccattagaaaaaatcaaaacagattcaggactggagcagagagcttatacacataggcaatgtgaggctggaggagctggcaggggccagagtccacagggctcagaaagccctatcaagacgtctgaacyttatcctaaaagggctagcagaaacgttcttgaaagcaactacactgtaatacttgagaactgttttagtgaaagcagaaggtgcctccaaagacttttttctgaaactcttgattcactttgcccaccaatgaaattcaaactgtttttaggaaatatatgtgggaattttaatagcagtacatcatctcttttaaccagcgattataatcacagaactacagaactagtaggaactttagcaatcatttactctaaccccttattttaaagataagagaactacggtcctaagagattaaataatttgctcaaagacagaggcaatttgtggcagagtcaatatttaaac

SEQ ID NO: 742612 - DNA, 547 bp, Homo sapiens
tggagggtaggaaggggaagtgaaggatttttccgtttgtgttacatttccacaggtttgggatgtttctgacagtacgttatggcaatcagtctgtttttccataattgtgatgacctctgagtgaagacttgacttttaaaattaatgatctgatcaatgcactctttaattaatatagctgtgcaggtggataaaaaataccggtcttcaaaaaatgttaccgatagtatcaattttcactgggrcaaaatgaccagactagcatggttttgtattttttctcccaagcagttcttgtgggagagacagacagacagatacacacacaaaatatgtagcctctgggagtcaagttcatctctttgccattgtaaatactttggccattgtgattagtcactcagccagactgcgccgtatccccctctctcagtttgtatcattttccttgatatctgattccacttacatgcctgctctcaaatctccatagctacgtgaaaatatgtatgagaggtatgttttttcagacaggcaaatatga

SEQ ID NO: 742613 - DNA, 632 bp, Homo sapiens
tacccagacataaggcatatatggtacaattacagcagctctatgtagtttttcagcaaagtcgttaagtgaaaatacaatactgtttctataatattggaaagcttgatgatgagccaaacttactgctgaaagttaaatgggaaggctcccaggcatcgtggcagagaacggggcaggacttgctgggatttattgttccctgaggagagcagcagccccagcaccactaatcagattatacatcagcagagtaatcactgttgactcttccagacacagaaagacaaacaagtggcttgaaagtatacaaaagcagaggcctgtaagctccctcatctcgcacaagagagctgtgaatcacctcggtaaaggattcatcatcrttaggtgtcacccgggtcacagcagaggtgttaagttgtatacagaatggctcacagcaaagatacaaaaggcagaagccaagaagaatagaggtgctaataacattgaaaaactattagtgggagtgaagtctcttcatgggcatgtttccttgaatgatatggattggagagagctctgaatctggagtctagaaacctgaaatttagtcccagttctgccaataactaccctgtaggattttg

SEQ ID NO: 742614 - DNA, 642 bp, Homo sapiens
gcatctcccccggtgactaatgacattgagcatcttttctcattttccattcacgttcatgttcctaggtgaaatgtctgtaaaaatctttgccccattttcattgggttgcttctctttttgagttacaaaaattgttctctttttwaatatagcctggatacaagttatttgtttatatatgctttgcaaatgttttctcctcttctgtgcactgacttcatttttttaaccgaggcttttagaagagcaaaaatgacttcttcctttatacttttgtgttctttttgtcatattttaaagtctttgacaaagtcaaaattactaagatatttctcctatttttttcttcaaacagtttctagaaatccatttgtttctgttgttgctgctgttatttttaatacatgtctgtactcataccatggtaagttgtaaaaaaagctctttcctttctttcatatcacctgaaaacttgttctctgtaatagagttaggccagaaggtgatcttcatttttttaataggatgaggaattctcctatccccttcttttgaaaaatttacacagaaaaagaagggggaaaaagtgcaacattgtataaaacatgtatggtcataaaaattgctgctgaattctaa

SEQ ID NO: 742615 - DNA, 647 bp, Homo sapiens
aaatcagcaatttcacacggtgctgggagatcattctccctgggtctgtcatgtttctgaatgtcttgagagcacaggcattgactgccttagttctgaactatcttttcaaggctgtctgtattgggaacagccttgggagacagcgatagtgtctctctcctgagtaaagggcaggtttacttattacccagtatagtaaagacaatatctccctctggaacaaagaataagcaagcttacttcccattctaagaggctcgggttcagtaagctcaggatttttctcctgcagtgcaacccatgacatatgyactggcatcacccgacctgagggaggccctgaggtgttactctgagggaactggggcttggggaacagaacatgtgctgacactctggatattgcattgctctgagtaataaagtcccttgtctctgacccatgagtctcatgtcttctgatggcatccatgaaactgtgtcaggctaacatgctagcttgcaattagggtaagatctcagatctgtcacattcttacatatgattcagtctactaactgagcacttattatatgcaaaacactatataacaaggcattggagaaccatggtgacaaagacagatatagccccctcatatgca

SEQ ID NO: 742616 - DNA, 629 bp, Homo sapiens
tggtaagaggggcaaataatttgaatatttctccacttctatctccctcctttgaaggtggatgtgatatgtggagctgcatcagacatccttagacaatgaggcaggaaacctaaggaaataaaaccaaagtgctgggaatggcaaagtggagatgggaagagccagtgtcctggatggcatcactgagcagcagaaacgatgccagggttgccaaccttggacatctagctagtaaggtcaggaaatcaagcctcaatataaaccactgttagggttttttttttttttttttttttttcagttgttcttgataacttacagctgaaaggtatccctaactgaaacactgccttggctgagcatcctgaraaggactttggaattgccccctcaccttcagtttttttttttgtttttttttttttgagacagagtcttgttctgtcacccaggctggagtgcagtggcatgatcatggctcatggcagaatcaacctcctgggctcaagctatcctcccacctcagcctctgaagtagctgggattacagctgtgcaccaccacacctggctaattaagaaaaatatttcttgtagagacaggggtctcattatgttgcccaggct

SEQ ID NO: 742617 - DNA, 629 bp, Homo sapiens
tggtaagaggggcaaataatttgaatatttctccacttctatctccctcctttgaaggtggatgtgatatgtggagctgcatcagacatccttagacaatgaggcaggaaacctaaggaaataaaaccaaagtgctgggaatggcaaagtggagatgggaagagccagtgtcctggatggcatcactgagcagcagaaacgatgccagggttgccaaccttggacatctagctagtaaggtcaggaaatcaagcctcaatataaaccactgttagggttttttttttttttttttttttttcagttgttcttgataacttacagctgaaaggtatccctaactgaaacactgccttggctgagcatcctgagaaggactttggaattgccccctcaccttcagtttttttttttgtttttttttttttgagacagagtcttgttctgtcacccaggctggagtgcagtggcatgatcatggctcatggcaraatcaacctcctgggctcaagctatcctcccacctcagcctctgaagtagctgggattacagctgtgcaccaccacacctggctaattaagaaaaatatttcttgtagagacaggggtctcattatgttgcccaggct

SEQ ID NO: 742618 - DNA, 521 bp, Homo sapiens
aaccgttagagaaaactgaaaagaaagcaaacagtctgttaaatgaaggattgaaatgtcagtggtcagtcctcagccacatagtgaagcagagacaaggctgtctccagaggtgctttcactcccaccactttactcccctgccyccacgtcccccaaacgcaagacacaaatcttcacttatttcttcccagttaaaacgtgtgcgggaaaccgaaaagcaatgtaaacctctcctggaaaggaacaagtgcctcgccaagagaaacgatgaactgatggtgtccttgcagcgcatggaagaaaaactaaaagccgttaccaaggaaaattcagaaatggtgtgtatcacagactctgcaaaactgcagcttccttgattatattaccttaataacctgacttattgccatttctcagcttattttaaaaatacagtgctatttggatttttccttatgtaagcaaggaagccttaatgaagaaagcaagagaaggttgctggctctgaattttatgag

SEQ ID NO: 742619 - DNA, 521 bp, Homo sapiens
aaccgttagagaaaactgaaaagaaagcaaacagtctgttaaatgaaggattgaaatgtcagtggtcagtcctcagccacatagtgaagcagagacaaggctgtctccagaggtgctttcactcccaccactttactcccctgcccccacgtcccccaaacgcaagacacaaatcttcacttatttcttcccagttaaaacgtgtgcgggaaaccgaaaagcaatgtaaacctctcctggaaagraacaagtgcctcgccaagagaaacgatgaactgatggtgtccttgcagcgcatggaagaaaaactaaaagccgttaccaaggaaaattcagaaatggtgtgtatcacagactctgcaaaactgcagcttccttgattatattaccttaataacctgacttattgccatttctcagcttattttaaaaatacagtgctatttggatttttccttatgtaagcaaggaagccttaatgaagaaagcaagagaaggttgctggctctgaattttatgag

SEQ ID NO: 742620 - DNA, 521 bp, Homo sapiens
aaccgttagagaaaactgaaaagaaagcaaacagtctgttaaatgaaggattgaaatgtcagtggtcagtcctcagccacatagtgaagcagagacaaggctgtctccagaggtgctttcactcccaccactttactcccctgcccccacgtcccccaaacgcaagacacaaatcttcacttatttcttcccagttaaaacgtgtgcgggaaaccgaaaagcaatgtaaacctctcctggaaaggaacaagtgcctcgccaagagaaacgatgaactkatggtgtccttgcagcgcatggaagaaaaactaaaagccgttaccaaggaaaattcagaaatggtgtgtatcacagactctgcaaaactgcagcttccttgattatattaccttaataacctgacttattgccatttctcagcttattttaaaaatacagtgctatttggatttttccttatgtaagcaaggaagccttaatgaagaaagcaagagaaggttgctggctctgaattttatgag

SEQ ID NO: 742621 - DNA, 618 bp, Homo sapiens
cttgtaactgccttccagtagcaggatcccgaggctcagagatttaatatgttgtctatgctaacaacatcacatatataccttgtttcccaggtctcaattcagtgtctagcacatagttacagttcaacaaatatttgttggatgaacagcaacaatataattacataacagagctaaaatttcagcccagattttctgatcattacttcagtacctactgagtgggtagagcagttattacttccatcagagtttggctgaggtttgtgttgctagtaaggatgcactaagacctctaggtgcctttgggttttcttctttgcctctccatctgtgttctgtgaatgacatcgktggttgctctcacttcaggaccaagtcaaggcctaaagacttgaattgcaaggagggagttaggcaatagtctccagagtgaggtgagaaaagtgattcactgccactgagacagagaaaggttatagcttctgtttataattacttatgattcatcctttttaaaatttctatgttgactatatgttacaatgaatacattagattaggaaggtaatttaaatatataattgtattagggctctctagagggacagaagt

SEQ ID NO: 742622 - DNA, 662 bp, Homo sapiens
tttttttcctctctctctctcttacttgttgagttctagtcaagaaaggtattgaataaccattttacttgctgagttctggaattttggtttcaccaggctcaagaacagctccaagcagaggtgctaaggtataaagccaaaattgaagacctggaagcgactctggctcagaaagggcaggtaggcatttggttgctagctcttctgcagatgcagacaattcaatctgaccttcctgtagctcacctgtgcatgggccgcacccaggacacagcttggctctccacagtgatctttctcgaactgcgttagaatgttcaactctgtacttctgtctctrgtgtttttctggccagagtatgaacccagccacaacagtgaatgagcttgggcaagagagagaatgccagaggaagaggaaccctgtacaaatagcctagagttgtcataagctgctaagaccaagacccacccctccagctgcgttctttgcctctatgctacatttatggttctgcattttaatgttttccatccatatgtatctagcctgtgtgcattctgacccttttcactttttgcctgtgtggtcacttctgagtccccagaaggctggtcctggattattcaaactggaaaaggtagaaatagggagtgat

SEQ ID NO: 742623 - DNA, 662 bp, Homo sapiens
tttttttcctctctctctctcttacttgttgagttctagtcaagaaaggtattgaataaccattttacttgctgagttctggaattttggtttcaccaggctcaagaacagctccaagcagaggtgctaaggtataaagccaaaattgaagacctggaagcgactctggctcagaaagggcaggtaggcatttggttgctagctcttctgcagatgcagacaattcaatctgaccttcctgtagctcacctgtgcatgggccgcacccaggacacagcttggctctccacagtgatctttctcgaactgcgttagaatgttcaactctgtacttctgtctctggtgtttttctggccagagtatgaacccagccayaacagtgaatgagcttgggcaagagagagaatgccagaggaagaggaaccctgtacaaatagcctagagttgtcataagctgctaagaccaagacccacccctccagctgcgttctttgcctctatgctacatttatggttctgcattttaatgttttccatccatatgtatctagcctgtgtgcattctgacccttttcactttttgcctgtgtggtcacttctgagtccccagaaggctggtcctggattattcaaactggaaaaggtagaaatagggagtgat

SEQ ID NO: 742624 - DNA, 647 bp, Homo sapiens
gtcttgttttatgtccttggaagcttgagcttgtgaccatatggcagtactttcttttagtctctgcttatccagaggacaggaatttaggggttcatgttgtagttagccccaaaaattacctcaagcagttaaaagcctttgcaagctcaaaattggctgctctagactccytctgggaagagcaatggaaattgcccagtgctgtggcttagtagctaaggctttgtcttttcacaatgacggcctgggttcagggttcaattcccagcttagggaatgggtcctttctggcttaatatctgtgtgacctttaccatttgttgattctcttctcctccatgaactacttctggcttcatttcttgaatcttcctttctctgagctacctgtggagattctaaatcttgtaaaaactgctaaccacctctttgaaaagaacttgtccattcatggtcaaatcataaccttagttaagccttattggtttcacctgtgagtttatttttggtaaagtttaaaagccagaaatattggctgttttgcccagctaaagtagggtgtatttgtctggttttacactgatataaagaacttccctgagactgggtaatttataaaggaaagagctttaattgactcacag

SEQ ID NO: 742625 - DNA, 504 bp, Homo sapiens
aaacatcaaatcaatttataagtatttacaaataatgattctaggagtgtaactgagttgcaactcagaggagaaatgcttgaggggatagatatcccattctccatgatgtacttatttcacattgcatgcctgtwtcaaaacatcttatgtacttcatttatgtatatacctactacatacccataaaaattgaaaattaaaaaaaaacttttcagaagaaaaaaatgtgatgaattcatgctatcaatcttaggttataatcctggttgtatactctgtgcaggaaagtaaaaatatcctagaaatactgttttgatgtccaactacatttttatttatttatttatttatttatttatttatttatttagtatggagtctccctctgtcactcaggctggagtgcagtggcacaatcttggatcactgcaacctcggcctcccaggttcaaataattctcacgcctcagcctcccgagtagctggcatcacaggcatgca

SEQ ID NO: 742626 - DNA, 573 bp, Homo sapiens
caaactcgtcccacctcagggccgtagcatttggctattctttcagacactgtgttcccaaacccttacagggacagctccttcatgtaattaagatttcagcttaaaggtcacctctttagggaggccttccctgactaccaacataactcaacttccctcccctaccaagtgtgttctggttcaccactacacactacacatttatacacacacacacatgcgtgcacacacacacacatacacatcagtatcttgtaaaggctcactttgccaccactatccccaaaacaaagaagagtgctgagacaaagcagcactcaaacatatttgaaygactaaatgaatgaatggattaattcttgattggctgccaactgtgtgaccatgggcaaaacatttaacctctctgggctctaatttcgtcatctgcaaaacgagtgggctgaattgtccatcgctaagattctatggtcttttctaaggcagtacaatattttaggggtttgagggcttttacagtttttccttttaagtcattcatttatcactcttcgctcaactaattattcc

SEQ ID NO: 742627 - DNA, 617 bp, Homo sapiens
ctgaaaattctaaaaatcagagcatctcttctcctcccaaggaatgcagctcctcaccagcagtggaacaaagctagacggagaatgactttgacaagttgagagaagaaggcttgagatgatcggtaataataaacttctctgagttaaaggaggatgctcgaacccatcacaaagaagctaaaaaccttgaaaaaagattagacaaatagctaactagaataaactgtgtagagaagaccttaaatgaccggatggagctgaaaaccacggcacaagaactacatgacgcaatcacaagcttcagtagcygatttgatcaagtggaagaaagggtatcagtgattgaagatcaaatgaatgaaatgaagcgagaagagaagtttagagaaaaaagagtaaaaagaaacgaacaaatcctccaagaaatgtgggactatgtgaaaagaccaaatctacatctgattggtgtacctgaaagtgatggggagaatggaaccaagctggaaaacactctgcaggatattatccaggagaacttccccaacctagaaaggcaggccaacattcaaattcaggaaatacagagaaagccacaaagatactgctcgagaaaa

SEQ ID NO: 742628 - DNA, 578 bp, Homo sapiens
tgctactccctattatgccatgattttccttagtgacaatgggacatttaaactctctggaccccccttttgtttttttgagacagggtcttgttttgtcactcaggctagagtgcagtggccccatcacaactcaatgcaccctccacctcccaacctcgatcaatcctcccacctcagcttcccacgtagctggaactgcaggtgcacaccaccatgcccggctagttttttgtattttttgtagagatggggtttcaccacgttgcccaggctagtctggaactcctgggctcaagcaatcctcccacctcagcctcccaaagtgctgagattacaggcatgagccaccgtgcccagmgtggatccattttttaaatctccaacaaacaatggctttctactgtgtgcctggctctgatctagacatggaagagacaaaggtgggttagataaggtctaattcaaggaatgccactctaaaggaaagaaaaattataaacaagaaaacatagtaggctgtacagaagataagcaggtgatttgatagaagcttctagaggtggggaagaggcaag

SEQ ID NO: 742629 - DNA, 591 bp, Homo sapiens
gccactgtacctggtgcttactattttcttgaaagaatcttattcaaatacatttcaacattgaatctaaagtagctaattaaaaaaaggaaagaataaaaattcctgatgtgcaaagcaatgaaaatggtaagacaaataggcgtgttaaaatggaaggtcttttttagtttttttaagcctgggagcagctcagggtagcctgtggggtacccgctgtaatatgaggttttgttgctyacttgcttcaagaaatgtctatgtttttaggtcattttgtggtaaggccagagtcttccatagtttaatctctgaccactgatggagatttcaaatttgcaatcttgggaacaaagagcaaggaccattttggatctagtggaggttactttaaatccaaagttatcaaaaatcctctttttaaagatcttcatactgaagtatgagagcacaaatcaaaagtgttttgtgttcacagaattatgacaaagtaaacacattggtgcaacaatttacaggaaaaaaacaagaatgttaccaaaaatcctgcttgcatctcctcaggatcactactcctgcctgtcaaaggtc

SEQ ID NO: 742630 - DNA, 541 bp, Homo sapiens
attgttttccccactttgcagatggagaaactgaggctcagaataagcagcccaagatcatagcattagtaagcagtaggtgtatccaaattctatgctcttcacctccatgcaatattgcccattctgaagaggaagaaactgaggttaggagaggctaactaatcttacataaggttgtatggctagtatgacctatgagattagggatttttaacctgtatcatttttgctgtagagatcaaacccttactatcatataacaatggcatccttagacaaggmtaaggcatttctaggagcaaggatgtattggtactcaggctgggagcttagggtgtgaaaacatgttcatgtatatgtatatatgtttctgtgtgtttgccagcgtgtgtcctctcagtgagtacatgatttaggttccactgtcttcttagattcctccattctctgcttctttttgatcaacagatattgcaaacccctcccccccacatacaggcacacatatgcacaatgtgctcagcattgtaaggcggcc

SEQ ID NO: 742631 - DNA, 609 bp, Homo sapiens
acaatatgaaatcagtgcaccctgaaaaagaacagaataacagcaattttcagggaacaagggagataaccataaggtctgactgcctgcggggttgggcagaatagagccatatttttcttctcacagaaagcctatagatggatgtgcaagtaggagaaatatcrctgaattcttttcccaacaaggaatattaataattgatagccctggggaaggaatgcattcctgggggaggtctatgaatggccgctctgggaatgtctgtcttatgcggtagagataaggactgaaatatgccctggtctcctgcagtgccctcaggcttgctaggactgggaaattccagcctggtgaattctagtcagaccagttgtctgctctcgaactctgtttcctgttaagatgtttatcaagacaatgcatgcacagcgggacacagactctcatcagtaattctaattttgcccttgccttgtgatcttttattgccctttgaagcatgtgatccttgtgacctactccctgttcgtacatcccctccccttttaaaatccctaataaaaacttgctggttttgtggcttggggttgccatcacagtcctacc

SEQ ID NO: 742632 - DNA, 602 bp, Homo sapiens
tttaagaaacaaaacacattacaaatacatacatgtgcttatcaaaaggtcccaatctggacctactcactcagaattcctggaagtaaagctaggaatatgcgtttttgcagattttacattccttcctcactccccttcccttacccacaaagtttttttttgttttttgtttttgtttttgtttttgttttttgagacagagttttgttcttgttgcccaggctggagttcagtggcgtgatctcggctcactacaacctccacctcctgggttcaaaagattctcctgcctcagcctcctgagtagctgggattacaggcacgtgccaccacactcagctaatgttttgtatttttagtagagatgaggttacaccatgttggccaggttggtctcaaactcctgacctcaggtgatccacttgcctcagcctcccagwgttcagggattacaggcatgagccactgcacctggccagtggtttttatacacagtgaatattgacaattactgatagtgccattttcaatcttctcatccaagtagttcttccttatagctaatccagggggtctttgctatgcatgagaatcccctg

SEQ ID NO: 742633 - DNA, 644 bp, Homo sapiens
cctactcactcagaattcctggaagtaaagctaggaatatgcgtttttgcagattttacattccttcctcactccccttcccttacccacaaagtttttttttgttttttgtttttgtttttgtttttgttttttgagacagagttttgttcttgttgcccaggctggagttcagtggcgtgatctcggctcactacaacctccacctcctgggttcaaaagattctcctgcctcagcctcctgagtagctgggattacaggcacgtgccaccacactcagctaatgttttgtatttttagtagagatgaggttacaccatgttggccaggttggtctcaaactcctgacctcaggtgatccacttgcctcagcctcccagagttcagggattacaggcatgagccactgcacctggccagtggtttttatacayagtgaatattgacaattactgatagtgccattttcaatcttctcatccaagtagttcttccttatagctaatccagggggtctttgctatgcatgagaatcccctggggaatttttttaaaatacagatgtccaggcccctccctaatctagtaaaccagactgggcagggatgttaggaatctctgccattaaaaccttgctggtggg

SEQ ID NO: 742634 - DNA, 627 bp, Homo sapiens
aatcatggaagaacaactgttgcatagcttaaaaaacaaaaattttaaggtcctggtccccaaacgtagggttccgttgaaggtttgggaagcattcaggagtgtgtcaggatgtgggatatactcagggtttgcatctatgctatgtgtgtacagggagacgaatgccccactctagcattgagacccacagcatccgccctaatttctcagggcacagatacaggtagmgaggggctaaggggctgcggtcactgcccacatacctcagtcacctctgccacagtttcttccaccacctctgtctcatcaggcagggcttcttgctgctgttggaaagagaaagtagcgttcagaggggtcaggaataaggccagcttcacctccaaagtgcctgtggcctcggatacaggctaggggagcttggagagcagcttactggagatccccaaagttgtgcctcatggactgccatggtgagggacagaacaaagaagaagccagtcatgtgagcaccgtggaacactcaagcagctcccattttatatattttatatcctaggtgtctacctaagatttagcttggaaaagtatttctgctgctttgaattcttataaagtctgaaa

SEQ ID NO: 742635 - DNA, 600 bp, Homo sapiens
ggaatgatgtctaatgacaatcttatttcctttcctatgtcagtgacttgagattttgactagttgcccaaatattttttcctttttctataaagcccagaagttgttttaggatatatcttgaccttgatcattctagattgattttgctaggtactcatgtcagtctcactctcttttttttttttttttttttttttgagatggggtatctctctgtcacccaggttggagtgcagcagcttaatctcagctcactgcagccttgacctcctcagctcaagcgatcctcccacctcaacctcccaagtagctgggactacaggcgtgtgccatcaggctcagatttttttttttttttttttgkattttttgtagagatggcattttgccatgttacccaggctgttctcaaattccgggtctcaagcagtcctcccacctcggcctcccaaaatgctgggattataggtatgagccacagcacccagcctccgtctcttttttattttaggaacgttttcttgagtgttagctttttgaatttaaattacttttaaatttccatttttattttttatttgtgacttttctatcata

SEQ ID NO: 742636 - DNA, 605 bp, Homo sapiens
aaaatacaaaaattaaccaggcatgatggcgcacgcctataatcccagctactcgggaggctgaggcgggaaaatcacttgaaccctggagacagaggttgcagtgaactgagatcacaccactgcactccagcctgggcaacagagtgagactccatctcagaaaaaaaaaaaaaagtgtaatctatagttatgaataagataaagttaataaattgtgtgtaacaacacwggaaacagtgcataatataccattaaatggagaaagaagcttcccaaagttttcatattatgatctcatttatatataaattttatataaaatatgtgtgtgtccagcctggccaatatggtgaatccctgtgtttactaaaattagccaggtgtggtgacacacacctgtaatcccagctactcgggaggctgagccacaagaatcgattgaacccgggatggggaggttgcagtgagccaagattgcaccactgcgctccagcctgggtgatagagtgagactctgtctcaaaaaaaaaaaaaaaatgtgtgtgtgtgtgtgtgtgtgtgtatgtgtgttagtattttttaaagtctagaaaaataaacaa

SEQ ID NO: 742637 - DNA, 637 bp, Homo sapiens
aagctgaggaaaatttaaaatattaactgattttaaaacaatagtatccaacccattacatgttaatataagtaatactttcattagaaagaactacacttcctaaaacaaaaacatttagtaagaagagtgaaattgttttatgtttttgcagatctcattaacatctggcttgacagaatggagctagattctcttatctgcttttgcattcaatctgttgcaatatcacatatcatgtatcctctagaaaactctactstacgctcatgagaatgaaaaaggcaaataacattttagtattattagaaaatggttttggccaggcacggtggctcatgtctgtaatcccagcactttgggaggctgaggtgggcagatcacctgaggtcaggagtttgagatgagcctggccaacatggtggaatcccatctctactaaaaaatacaaaaattagccgggcatggtgatgtgtgtctgtaatcccagctactcaggaggctgaggcaggaggattgcttgagcccaggaggcgaaggttgcagtgagccgagattgtgccactgcactccaggctgggagacagagcgagactctgcctcaaaaaaaaaaaaaagaaaatggttttgatcttgt

SEQ ID NO: 742638 - DNA, 614 bp, Homo sapiens
tgctaaatttgtgatattaatcacagatcttacgtattagctgactgattctttctgtaataatccaaataataaattcaaaaacaaattggaacaaaaccccaacttctcatgaatctcatatgcaccttcctgctcctagtggtttaggtgaacactgtcttagattactttctgtgatgrcggaagtgtcctgtatttccactgtctgatttgaagtgtggctagtgcaactgaggaactgaatatttaattttatttagttttgttttaaagctattggctaccctatcaaatagtacaggtacagattgcctggttgttaagaaagtatctgaggctgggcgtggtggctcacacctaatcccagcactttgggaggccgaggcaggcagatcacctgaggtcaggagttcgagaccagcctggtcagtgaaaccccgtctctactaaaaatacaaaaattagccgggtgtggccatgcctgcctgtagtcccagctacttgggaggctgaggcatgagaatcacttgaacctgggaggtggaggttgcactgagccaagatggtaccactgcactccagcctgggcaaaagagcaagactccatctca

SEQ ID NO: 742639 - DNA, 614 bp, Homo sapiens
tgctaaatttgtgatattaatcacagatcttacgtattagctgactgattctttctgtaataatccaaataataaattcaaaaacaaattggaacaaaaccccaacttctcatgaatctcatatgcaccttcctgctcctagtggtttaggtgaacactgtcttagattactttctgtgatggcggaagtgtcctgtatttccactgtctgatttgaagtgtggctagtgcaactgaggaactgaatatttaattttatttagttttgttttaaagctattggctaccctatcaaatagtacaggtacagattgcctggttgttaagaaagtatctgaggctgggcrtggtggctcacacctaatcccagcactttgggaggccgaggcaggcagatcacctgaggtcaggagttcgagaccagcctggtcagtgaaaccccgtctctactaaaaatacaaaaattagccgggtgtggccatgcctgcctgtagtcccagctacttgggaggctgaggcatgagaatcacttgaacctgggaggtggaggttgcactgagccaagatggtaccactgcactccagcctgggcaaaagagcaagactccatctca

SEQ ID NO: 742640 - DNA, 637 bp, Homo sapiens
tataaaattttattaaaacttaataaaatcctattattgaggctggacacgatggttcgtgcctgtaatctcagcactttgggaggccaaggtgggaagatcacgaggtcaggagttcaagaccagcctggccaacatggtaaaaccccatctctactaaaaatacaaaaaattagctgggcatggtggcgcatgcctgtagtcccagctactcaggaggctgaggcaggagaatcacttgagcctgggaggcagaggttgcagtgagccgagataaaataaaaataaataaaacaaaattctattatttaaaataagctttaatttcctagttatgaaaataaacttgaaacattagaaaaagtcattttcataaactgaaactaaaaagctcaaaaagccacaagggtggtcagaaaaaatcctttctttacctctgaaactacttaggtccyctttttccttatataccagaatcctgacctctctagaaatgcctggattggtaatacagtcagccctccatattcactgggttccacatctgtggattcaaccaaccaagaatcgaaaatattcagaaaaaaaaaaaaaactgcaattggagtaaacatgtacagactttttttgtcatttt

SEQ ID NO: 742641 - DNA, 558 bp, Homo sapiens
tatatgtacctatacggaaaagttacaggaaagaatctacgaaactagtcaggtcagagtatcctatctggtagcgaagccagctgagacaagaggaactttcagtttgaggctatatatttatgtatcacttgtttgtttgtttgtttgttttgagagggagtttcgctcctgttgcctagactggagtgcaatagcactatctcacctcaccgcaacctctgcctcccaggttcaagcgattctccagcctcagcctcccgagtagctgggattacaggcatgcaccgccacacctggctaattttgtatttttagtagagacggggtttctccatgtggtcaggctggtctcgaactcccgacctcaggtgatctgcccaccttggcttctcaaagtgctgggrttacaggtgtgagccactgtgcccagccatttatgtatcatttcagtattttacaagaatgtaccaatatactgtttatataacataatgcatgcaaagtgttttaacaacaacgacaaaaagcaaaacccaatcccaaaactgtacattc

SEQ ID NO: 742642 - DNA, 622 bp, Homo sapiens
gcaaagtgttttaacaacaacgacaaaaagcaaaacccaatcccaaaactgtacattcttgcaaaagtaatgttcttttttttttttcttttgagacagggtgtttgtctgtcacccagggtggagtgcagtgacacaaacatgactcactgtagcctcgacctcctgggctcaatcaattctcccacctcaacctcctgagtaggtggaacgacaggcacatgccaccagccaccacactcctgctaatattttttatattttgtggagacaaggtcccactatgttgcccaggctgttctgaaactcctgggctcaagcagtcctcctgtcttggcttcataaagtgctgggattacaggtgtgagctacctcacccagccataagtggaagttcttttacattcacataatgtacttcatttttcacagcctaattacartcatccttttctttaacccagaaagacagagagaaaagatagcagctgaagttgccaaaagctagactcggacatcaccaagcatctagaaagatggaagattatgaaataatgctttaataaacataaaagcgctataccacaaagcacatgttcttctacaaagaaaatacatccgg

SEQ ID NO: 742643 - DNA, 580 bp, Homo sapiens
aagccactgtgaggtcaccaccaggctatgggcagaaaaattcaagcaggagattgtatttcttttggagttgtacgatttcctttattatttgaactgcagtaaagaaagctgggatgggctcctctagggatacttccagatccctgggcggttgtagccctggctcctctttaaatggatttggtttcaaagaygatcatctccgtcttctcggatgtcatagtgccactgatcatctccagctcctggccaccctgggctttctccactttggcctctatgttttgcttctccaccgtcttagccacgatatctacctctctgtcatgtgatgtgacccttgtttttgaaccaggagtggccctgaggctccttaaaaaagagctgatcttactggctttcttttgtaaagctcctgtgctagatgcagattggttcttccccagttcctgagttgttctcgactcctttttggtggagctgtgggtggagctcttgcgagaggagccatgtcgcttgccccttacgttgctgtaccctttttcttttttgtcatctctcgtgtttttatggccag

SEQ ID NO: 742644 - DNA, 611 bp, Homo sapiens
tgtgctgattttcaggatatggaggattttctcacctagtctctcatttgaagcagttaatttttttttttaatggagtttcactcttgtcacccaggctggagtgcagtggtgcaatctctgctcactgcaacctctgccatccaggttyaagtgatcctcttgcctcaccctcccaagtagctgggattacaggtgcccaccaccacacccagccaatttttgtatttttagtagagtcaagggtttttcaccatgttagccaggctagtctcgaactcccgacctcaggtgatccaccctcctcagcctctcaaagtgctgggattacaggtgtgagctaccccacccggccggaagcaggtttattttttaaaacatcattttaaagtgagaaaaccaaggctcaggattgtcttacttgaggtcagagtccaaagctggattctaggtcagagctttttctcttcctcaagctgcatggctcactgataatctcattctgcatcagagctagtgtcattggtagttagtgatgtgtgtggggatttactgggaaccacaggaattcttggaggtcttgaatcaccgtaggatttcccacactgata

SEQ ID NO: 742645 - DNA, 657 bp, Homo sapiens
agtctatctctttatctaaaaatagtcttgtgcttcttaacatcactaataacaaaagcaacaggaataatcctaataatgtagtttggtagaaaaagcattggacaaagggtcaggagaccaaactctacttctcagtaggtgatccagtctgggcaaatgtctacctcctrtttcaggttctttcttcataaaatgaaaaaactggaaataacaaccttcaagatccctttcttcttcaaaacttctttgctttatgcagtggctcttgtttagccctatgctgcaatttttcaaagcatgtttgatttcttactgtatggttatattatttttacatcattagtggggtaggacaaggattatcacttatattttactgaagggaaaataatattaggtgcctgatggtcacttagaaacaaaagtgctccagttctttgttggagtctgacttagtaggtggtggcatgagtttgggattctttggtgtgccagggtttaaagcacttcatgagatggagctccagaggaggtcaggctgggtatagagcctatggatgcctcactttttaaagttgcaggtgttgcatgtcttttgtgaattaaaaaaatacagaaaacaaaaaagttgcaggcgaaatagctctgcctctt

SEQ ID NO: 742646 - DNA, 609 bp, Homo sapiens
ttgaaaacattgtgctaagtgaaagccagatacaaaaaagcatgtatcatatgattacttttacatgaaatgtacagaataggcaaatccatagaaaccgtagattaatggctgtcaggggctgtgggaaggaaggaatgaggattgaccactygtggtctggagttagacagtggcagtaattgcacaacactgtgggtaaactaaaaaaaaaaacaccaaattaccaagaaaaaaatcatgggggaaatactttcagattatacaaatccatcccttgactctaaaaaccattgcatgccattagaggaatccatctgcaacatttaccactgtggtaatcatctaatgggaatttgctacttccctccttctttacacatttattaattgggatttatttcactccaagaaaaaattgtcactcctctaattatttgtatgagtatgaactcatggatattttattctatgggtccaacactattattatttattttgttactcaaattgtttcagccttagcaatcagaagtgccttcaggttggctcttacattcctttgaaaaacccttcctccccaccatcattttctttttaaaagtattt

SEQ ID NO: 742647 - DNA, 609 bp, Homo sapiens
ttgaaaacattgtgctaagtgaaagccagatacaaaaaagcatgtatcatatgattacttttacatgaaatgtacagaataggcaaatccatagaaaccgtagattaatggctgtcaggggctgtgggaaggaaggaatgaggattgaccactcgtggtctggagttagacagtggcagtaattgcacaacactgtgggtaaactaaaaaaaaaaacaccaaattaccaagaaaaaaatcatgggggaaatactttcagattatacaaatccatcccttgactctaaaaaccattgcatgccattagaggaatccatctgcaacatttaccactgtggtaatcatctaatgggaatttgctacttccctccttctttacacatttattaattgggatttatttcactccaagaaaaaattgtcactcctctaattatttgtatkagtatgaactcatggatattttattctatgggtccaacactattattatttattttgttactcaaattgtttcagccttagcaatcagaagtgccttcaggttggctcttacattcctttgaaaaacccttcctccccaccatcattttctttttaaaagtattt

SEQ ID NO: 742648 - DNA, 671 bp, Homo sapiens
ctctgctcagcactcctgattaaacctcagagagaacaggtggatagaagcagaggaaggggaggataagggcttcagggtgcatgttaagcatacaaatgcttgttagaaagaggatggccaacagctgctctccatcaccacccaaatgcacagattgcaaactggaccctggcctgtcccatccgggtaatgaaggccaaagccagggcagacatgctttggtgtcagagcagaactcagccagccggctgcaaagtggcctcagtcttggcagtggctgccatggaggttgcagtccttcctggcctggcctccacctgctctcccagggggctgtgggatttagctgctgaggggcagtgatcagccatcctgagaggctagtgaagagacctccctacatgagaaatgaggtctctctgcaatgaagagatctaaatgatcctcatggagcctcctggggccttcctgtattccagcccaccatctttttttytctcccagtacaggataatttgaagcctcagaaactgctcctataggcctcaagagacctggcatccttccatcccccaagtggttctccctaacaagcttgtattaccaaggagcaaaggagatgctcagagtcgagaatgcttagcaaaggctgggaaggtggaagttat

SEQ ID NO: 742649 - DNA, 665 bp, Homo sapiens
tgaactacaacttcagacctcaatgtttcatgacttttattgatccatttgtttgcatttattcctcattatcctgtgcagttctctccctgagaacctcaaagctctcttccaagtgtatgcgtcctccccacttacccctcatcatgtttccctctcatttttggtatgtatctttctccaactgcctgaggaaaaaagcatgtaaggtctagaagggaaaaatcccatgagttattcacagaggcatttatacaaagcataaactacaaaggtgctccagctaccatgacctccttccacacatacactctttccctttgttcccaatatagacagttatcttggaggaataaaaatctggatctattttcagtttcctctaaacaagaaaaaaatcccagtgagagaacagcaaaagtcacagaaagagcaygtgtgcaggatgagagatcctagagctggcatttgaaaaacaggacttcatccagtgggaatccattgttcccaagctggtaaagaagaaaagcaaagcaaaaaagattacctaacactgacacagtatagtacaaaccactttacataaccaaaactcaaaagagctttaaatttaaggtatgatactgaactttgtaacatgactgctttcccttataaatttggtc

SEQ ID NO: 742650 - DNA, 653 bp, Homo sapiens
gatcatctgaatgctgacttaaattttcctaactgcaaaagaggcccattaattatttcctgcttacctccaaaaaagttagcaaaaccagaggatgaatttcccactctttagaagatatagatctcaatctatcaacagttttaactcaactttaaaactgaattttgtcaaaaaagacttctactttctcttagtaccaatgttatacattataaaaagaaaattattttacaaagacaaatgagacatgtcataattccaaatcacagttgtaatcatgctattttctaaaattatgcttgggtacttttcaaataacaacaaatactgtattaggtattatgcactcagtaccttctttagaaagttattatcagtattttttaaaaatagaaaatttcctcaaaaaatgacaaaaataacatggttactctatcatactaaagccacgattttgtattttctcgtraataggatcagcatcactggtctactaatcacagttaggatgtattctcttccagaatttgatctatcacctttataacgaaagattaaatctacataaaccgtgagtctgttatgaaaatacttcccaattaatcccattacagtgatgatggcctgaagaacagtctaacataggggta

SEQ ID NO: 742651 - DNA, 608 bp, Homo sapiens
aagtacttagaacagggtctgacacaggaaatgctgtccaagtgtgcaccaggagatagtatctgagaaggctcagtctggcaccatgtgggttgggtgggaacctggaggctggagaatgggctgaagatggccagtggtgtgtggaagagtctgagatgcagggatgaggaagagaaaggagataaggatgacctccaggtctctggctatggtgattgggtgcaggcagtggcagtcactggactcagaccctgaagcaaggcagcagctcatcggagtgkgagcaggctctgagacatttaggtctggccgtgcctcatgtgttgaatgttatgggagatggaggtggcgaggagcatgagaatcatgagcatcactgcccctagagtatgtgcaaggcactggacttgcagcagattgtgagctctgctgtggaccccaatctgcactgggagctttggcagggtaaaggggaagaagagcaaaagcacaagaattcagttacggcttctaatcctgtctgctttctagtacaggcatacagtcatcactcaagaaatgtttatgttcattcacactttgggccagacactgttctagacatc

SEQ ID NO: 742652 - DNA, 608 bp, Homo sapiens
aagtacttagaacagggtctgacacaggaaatgctgtccaagtgtgcaccaggagatagtatctgagaaggctcagtctggcaccatgtgggttgggtgggaacctggaggctggagaatgggctgaagatggccagtggtgtgtggaagagtctgagatgcagggatgaggaagagaaaggagataaggatgacctccaggtctctggctatggtgattgggtgcaggcagtggcagtcactggactcagaccctgaagcaaggcagcagctcatcggagtgggagcaggctctgagacatttaggtctggccgtgcctcatgtgttgaatgttatgggagatggaggtggcgaggagcatgagaatcatgagcatcmctgcccctagagtatgtgcaaggcactggacttgcagcagattgtgagctctgctgtggaccccaatctgcactgggagctttggcagggtaaaggggaagaagagcaaaagcacaagaattcagttacggcttctaatcctgtctgctttctagtacaggcatacagtcatcactcaagaaatgtttatgttcattcacactttgggccagacactgttctagacatc

SEQ ID NO: 742653 - DNA, 565 bp, Homo sapiens
agacacacacagatgcatacatacgtacccagagacacatatacatcacacttacacactgttacaaagatacacacaaagaaacacaattacacagattacacacagacacatatatacaaaatgccgcatagaaacacgtacagacacacagatacacgcccagacacgtacatgtgcacacatacacacacgtggatatcatgcagatatcatgcasatatccacataaacacaagattcacatacaaacatacacaatgaatacatatacacacagacagacatagacacagacacgcacacagacacacagcagaagaagctccaagctggaggacagatgctgggatggcgtgtttctgtagctacttctggttcaacctgctcccctctgccccaacaacttacacagtctcaaccccctcactgcagtaatacctactgtatactgggcactgccactgtcaggctctgttctaagctcttatattgtttcatcctcacaaccacccagtgaggtgggcactgtgattattcttgatttgtacatggagaagagggg

SEQ ID NO: 742654 - DNA, 576 bp, Homo sapiens
tgaacttgatacagtttaaataggctcatctgagcaaagtacagaacagccttcatttcccaggttctgtcagtcagcctgctggattgactggtgatgtcttgattgggtatgattccccttgactcatttctctgttgctggtaattaaaagctgtctagttttgttctcatttaacaataagtgaaagggtaatgtctgccagacttttccattcacttggtgtttgtaacagttgagagccttggagcaccatgaattctaagctgaaggtaactatcagtacagatagtgtattggtgttttgcacctgggagctgactataaacctcaaagccaatcggaaaacagtccccagggtaaatggatawattgtcatagatgaccttctcctctcattccagctttgaaaaacagaactttctgtgagtaggtagaataagctgtctgtcatttgcagtttccagcagtctctgagactagtgcatgtgcctaattttacactggaaggagaaaccatgtcgaaacgcagaaggcaaaataagagttaggctctctctaggctcagtatgttt

SEQ ID NO: 742655 - DNA, 622 bp, Homo sapiens
attctgggaaagattgcaatggttttatctcagtgtataagctatatttccatcaggcataaaatcctttgcagggaaaatttgaagtgtgtgtatggggttatatagaggaagggccttgggtagggttgaaatttcccacaaaaataaagtcaacacaatggtttgattttttttttcagatatggaaccccaggtttcctaaccagggattcatctctcaaatctctctatatgtgggtttcctgctatatttttaggcttctgttacagccaagtaaaaccctatctccattatagcagtctgtgagttttctagattaatcttcctactttcaaatggggccacagatagaccaaatattctacatagatggggtgttttaaaataactgctctgttctcagtttccttagctggaaagtgggaataacaatagaacctatgccaaaraaaaattatttgatgcagagaaagcactcaagcactcgggatatgcctaatacaaagcccacccttaattcattatagctgttattgttacttaatgtacttcctggttatattctggcaacaagtgggttccaccttccctcagaagcctttttaaaaaactgtcttg

SEQ ID NO: 742656 - DNA, 672 bp, Homo sapiens
attaggattagtccaaggcttataagtccacagaattcaccaagcctacaaaatatacagttttctctcttgttttgcttatggatactaagatattttatttccttctgtggctgacattacctattacgacgggttgcagtgggaatgtttacagrtaggagaaacaaggatgaggtatttgggagaagagatggtctgtgaaggtaggctgtcaataagtgctaagaaaaacagattaattatataaataattcacattaaacaaaaaactcatggcaattaaaattggcctctatggtaaaaatatttcaggaaaagatggataaattgggagactattttatctgaaatagctgttgagttgtgccttaatttaaacatgcagaaaaaaagagaattctcaaaccctgctgctcaggaaagcaagctgaaagggaaggtggcaaaagaaggaatgaactttgattaccttcaggctctgtatcatccaatccactcaccctataatctgtcagacaatgtttatttttgtagataggccataattcattattttgtgcatgtgctaatacaatggagaatgcattctgtttcaaccagatactaaaagtggagttgtagaattgtgaggccatttccactgctttaattcaaatctagatcataata

SEQ ID NO: 742657 - DNA, 672 bp, Homo sapiens
attaggattagtccaaggcttataagtccacagaattcaccaagcctacaaaatatacagttttctctcttgttttgcttatggatactaagatattttatttccttctgtggctgacattacctattacgacgggttgcagtgggaatgtttacaggtaggagaaacaaggatgaggtatttgggagaagagatggtctgtgaaggtaggctgtcaataagtgctaagaaaaacagattaattatataaataattcacattaaacaaaaaactcatggcaattaaaattggcctctayggtaaaaatatttcaggaaaagatggataaattgggagactattttatctgaaatagctgttgagttgtgccttaatttaaacatgcagaaaaaaagagaattctcaaaccctgctgctcaggaaagcaagctgaaagggaaggtggcaaaagaaggaatgaactttgattaccttcaggctctgtatcatccaatccactcaccctataatctgtcagacaatgtttatttttgtagataggccataattcattattttgtgcatgtgctaatacaatggagaatgcattctgtttcaaccagatactaaaagtggagttgtagaattgtgaggccatttccactgctttaattcaaatctagatcataata

SEQ ID NO: 742658 - DNA, 652 bp, Homo sapiens
cacctgtatgaaaccttaacctgcgcctcttttacataagtcagttttgctttgcaggactctttatatggtgtctctatgaaatgggccactgcaggtacttaacatacattctctgtttgccagaaacttccttaaagcatgacagcagagtgytccccatcacagccccaccttatctgtgcctcttgcctttagctgtgcttggcttcagaagaacaatgtgattttactcatgttgcaaatgaaacaaaatatgctgaacacttacccattttttaatatcatttttcattgcacacaagcatgcccattaatatttctatgcttaagcatataacccacatttctttggcaacctacaattgtactcccaccaaaatataatttagccattcaatttaccaatgagtcacagattaaaaaataggtttttttcttatttacttagcaggatattataattttttaaaaaacaagagttggtgttctttggcccataagaatcattcattaatgtaatgacattaaatatggtggtcatgtcacccttgtcttgcagtataattttcttactcttattagaataaagatgaactaaagccataatcactctaaatcacattaagcaggtttttttaaaaaatttttt

SEQ ID NO: 742659 - DNA, 636 bp, Homo sapiens
tgctaggagcacaaatcctttgaaataggagtgagaaacagcccaggccaattctggctgtggcccagagacaaggctcatctgagatggctcaggaagggctggcagtgatggcttgagtttcagtttggccaaagcccgcttctgtctgctctcctccctatccagaggagcaaatgctgtctagacagtccagcccatagattatttccacttcagctccactccttcacctgctcatgagcggcaagaactcattggtaagaagatccttggattctccgcatacaagatgaccagcagggagaggatgggcgggatgggaaggacctatcttttgtgctatgaaaagcgggcacagacaatgaatgactgtatgagtcattcctaccctccaggccctctttgagtgaaggcagctttgaaaaccaatcrggcaggtgacttttttaaaatggggaaatgggacaggcaggcatggtggctcacacctgtaatcccagcacttcgggaggccgaggagggcagatcacctgagcccaggagtttgagaccagcctggccaacatggtgaaaccccatctctacaaaaaaaaaaaaattacaaaaattagctgggtgtggtggcgcacgcct

SEQ ID NO: 742660 - DNA, 629 bp, Homo sapiens
atcacgtacagccagggggttaagcttccgccccaggcacttctagcacagtggagtccataaggaccactgaggttagaactggcggaccagcaggggaggtggctgtctcttgatgaggcttggggataccccttccttgatactatatgctgaatactgggattgacggtttacaaagtcagagtgggagacttactaggtacacgcagtgttctggtggaaatataaacccattgacaacaccaagtctttttctctgcatatgatttatgtaacaattctggagttagagatcttttttcctattatgactgattttctacagtatttgtagaaaaaaatcatagctagttagcatgtacaaaataaagtgagcaaattaattctataactttttcttagcctctctaccagtaattcctatgatacatccaaagaatgkattttattacagctgcccttagcaaatcttcttagtacccgtgatgatagcatctctaatctgtgatcaaagccattcagtactgccactatgactccaaagtagttcccttctataagctggagagtaatacacattactatcttgtaaaaccttgacaattccaatgaggaagttaagaact

SEQ ID NO: 742661 - DNA, 549 bp, Homo sapiens
aatcaaagcaatggctaccaagaggtggaaggggtccagtcagagcaaaggcagactggtcaacagcaaaagtcatggtgacagtgttttgggatgttccaggcaatttgcttgctgatgttctagggggccaaaaaaccataaagtgtgcttaatatggcagtgttatgagaaagttagccaaagttttagctgaaatacacccaggaaagcttcgccagagagcccttctccaccacaaccatgctcctgctcattcctctcatcaagcaagggcaatttttcaagggtttcagacggaaatcattaggcatccacttaacagtcctgatttggctccttctgacttctttttacttcctagtcttaaaatctgtaaagggccccyttttttcttcagttaatgtaaaaaagatggcattgatatggttaaattcccaggaccctcagttctttaggaatagactgaatggcaggtatcattgcttacaaaagtatcttgaccttgatggagttgtactgggaaataaactttattttgtatctttt

SEQ ID NO: 742662 - DNA, 599 bp, Homo sapiens
actgttctaactgcctcccctcatgccctaggcttggctaactttcttcttccttttaattgcagcttgagaactccttcagagaagccttcttgacctcgatgatcgggctgagatgcctcccaggctctcctatcaccaagcaggatgttctgctcattcttcacactcattttgactgttacttccccttagacatgtaatgcttcaatccatacctctttcccccagcagaccagaccatagttcctcaycaaaagtaggagccctgcttgtttttgccccaaggcatctgatacaggtttaatgtagctactcaaaagtagcacccagtagctactcaatgaacatgcagagtaaacaaaaagtcaaaagttctccagatggaaggcaaggaccaattattttcagacagtgggagacagtggaagagaagagtcttcagggtcaagcaacctgggttcaagtcctggccctgacatttggatgctggagtcaccacatttgagaatggatttctggcagatatagacagagctggcacagcatactccaaagaccaccagcacaatggatcacaggcatgtattctaccatgg

SEQ ID NO: 742663 - DNA, 659 bp, Homo sapiens
cattgctccataaatatttgtggaatgaatgttgaaggaaacatttagtggcaactatcctgtcctgcctttcttagtcatgacatgacctttcattccaaggggtaggaacccattcctaaaagctcaggtaaaggggaagtttattacagagctgcaagacatcccatggagctgccggcaggaagcgkaggctaggacgctaatggctcctttagtgagccggctcccgtgttgtgcctggcattgggttatgagctttacatacacgctctcgcccttgcaacatcctggagaggaaggtagaaatgcctccagttaaaagatgtggaaatttagactccaaaggggaaactggcctataaaatcacatggtaagtgtggcagagctatgatttccacccagggctgtttggctaaagctgtcattcacccatgtctctccaaagccatgcccttcactgctactccatactgcttttatagatagggaagtgggacttgatctgttcccttttccacagaccaacagagcccttagcccttagccctaacttctgcttggtcatggatcacagatctagatggtctggcctcaacccaaaacttaggatccagtgacagcacaaaacccccatatccccagccttttatacctt

SEQ ID NO: 742664 - DNA, 656 bp, Homo sapiens
caggaagacagctaccttgacaggaccacctggttgcggcttcggacatggaggtcctcattttcctgttgcagggtcgtaattttttcctccaatatcagatttttctctttctataacaatgagaatgagctcagaaagctgccaaactcacgctgcacgatgtgtgctgtcacctccctcttatctgtggtcactgaaagcactgattcattctagactagatgttacatttcatggagcaataaggtaacttagaaaaaagtaaaactaaaaagttaacaaagggctgcggctttttgccacaggagaatggtaaaaaaaaattacaggccctaccatctcatttcaccatgagttcatggaagaaagaatatgttttgttctccaaaagtcagaaggatatgatctatataaataaaattaagtttgtctgttatgtgtttccacaaaaatgagcgaacaaaatctatacsgaatgtttgagatgatctgattaacaataaagccctgtgagtgattccatgtcacgtgactcaagcccccagggctccctgggcacacaccctggctccccatctccctcctaccctctttccttcctgagaaaagaacggatggtgacatgagatggtagtgcctgtaagacttttttt

SEQ ID NO: 742665 - DNA, 656 bp, Homo sapiens
caggaagacagctaccttgacaggaccacctggttgcggcttcggacatggaggtcctcattttcctgttgcagggtcgtaattttttcctccaatatcagatttttctctttctataacaatgagaatgagctcagaaagctgccaaactcacgctgcacgatgtgtgctgtcacctccctcttatctgtggtcactgaaagcactgattcattctagactagatgttacatttcatggagcaataaggtaacttagaaaaaagtaaaactaaaaagttaacaaagggctgcggctttttgccacaggagaatggtaaaaaaaaattacaggccctaccatctcatttcaccatgagttcatggaagaaagaatatgttttgttctccaaaagtcagaaggatatgatctatataaataaaattaagtttgtctgttatgtgtttccacaaaaatgagcgaacaaaatctataccgaatgtttgagatgatctgattaacaataaagccctgtgrgtgattccatgtcacgtgactcaagcccccagggctccctgggcacacaccctggctccccatctccctcctaccctctttccttcctgagaaaagaacggatggtgacatgagatggtagtgcctgtaagacttttttt

SEQ ID NO: 742666 - DNA, 601 bp, Homo sapiens
gtatcctgattgtggcgatggttacaagaatctatacatgcggcacggcgcggtggcttacacctgtaatcccagtactttgggaggccaaggcgggtggatcacgaggtcaggagttgaagaccagcctgaccaagatggtgaaacactgtctctactaaaaatacaaaaattagctgggcatagtggcacgtgcctgtaatcccagttactcgggaggctcaggcaaagaattgcttgaacccgggaggcggaggttgcagtgagccgagatcacgccactgcactccagcctgggtgacagggcgagcctccatctcaaaaaaaaaaaaaaaaaaagaatctatacatgcattagaatttatgaaaatgcacatcccctcaaaaagagtcaattttactatatgataatttaaaaaatwaaaaaaagacagcaaagggtcatcgaatgtggaaaatcaccactagtctctcctggttatctgtgtacctctccccgtacatataaaatgtcatatatttccaccatcctgtgctttcattcattcattatagacttatgtagcacttagtatgtgccaaacaatttaaaaataactat

SEQ ID NO: 742667 - DNA, 531 bp, Homo sapiens
cagatatcgggggaaccagcccccaatatttcaacgtacgtcctttctattttccctaagtgtcggccggtctgagaaataaagagaaagaatacaaagagagaaattttacagctgggcctccgggggtgacatcacatatcggcaggttccgtgatgccccttgagccgcaaaaccagcaagtttttattagggatttcaaaaggggacgggggtacaaacagggagtaagtcacaaagatcacatgcttgaaagggcaataaaagatcacaagggcagagagtcagagcaagatcacaaggccagggcraaattagaattactgatgaggttccatgtcccacggggcacgcattttcattgataaacatcttaacaggaaacagggtttgagagcagacaatcagtctgactagaattcgccagcctggaatttcctaatcctagcaaccctgagggcactgcaggagatgagagtgtatttcatcccttatcttcaaacacataaggcagacactcccagagcagc

SEQ ID NO: 742668 - DNA, 598 bp, Homo sapiens
aggcctgggtaattttttgtgtttttagtagagagggggtttcactttgttagccaggatggcctcgatctcctgacctcaggatccacccgcctcggcctcccaaagtgctgggattacaggtgtgagccaccgcgctggccgactcagatatttttgatagactgtcttgtacattgttktactcaattaatacagggtcgaatgtatgatgtatatattagagggatgagatacagtataaggaacaattatttaaatcattctccattgtcatgtcatgtaatgacccaatctcagttgaagaggtaaaatttttctacaaataaatgaaaactcaggctttggctgtgtctaaaaaccgcaacagatttttcagaggaagaattcccacagtaaaatagatgggttataagcactttggaaaatatctaggaaattaaaatatattaatttcatcactaactgctgttttcaaaatagttacttgaatgaattcatttccctctcctttgtaatatactactatgtttggtattcttattaaatcactatgcattcatggccacagaatgatgcaatttctaatataccttcc

SEQ ID NO: 742669 - DNA, 598 bp, Homo sapiens
aggcctgggtaattttttgtgtttttagtagagagggggtttcactttgttagccaggatggcctcgatctcctgacctcaggatccacccgcctcggcctcccaaagtgctgggattacaggtgtgagccaccgcgctggccgactcagatatttttgatagactgtcttgtacattgttgtactcaattaatacagggtcgaatgtatgatgtatatattagagggatgagatacagtataaggaacaattatttaaatcattctccrttgtcatgtcatgtaatgacccaatctcagttgaagaggtaaaatttttctacaaataaatgaaaactcaggctttggctgtgtctaaaaaccgcaacagatttttcagaggaagaattcccacagtaaaatagatgggttataagcactttggaaaatatctaggaaattaaaatatattaatttcatcactaactgctgttttcaaaatagttacttgaatgaattcatttccctctcctttgtaatatactactatgtttggtattcttattaaatcactatgcattcatggccacagaatgatgcaatttctaatataccttcc

SEQ ID NO: 742670 - DNA, 620 bp, Homo sapiens
aggagacttccatgtgtaccatacaataaatcctcgtttaattaatttggcctgattgggtctttattcctatcaaatatgcttaaataacacaactgtaagttctttgttccagaactctatttcaactcagactaaattattgtacgctgagataaaataaaatgaaatgaaatgaaatgcatgctatgttctattcactcaaacatgaaagttaatttagaaaattggaaatttgcaaccagcatggataatcaactgaaaatggaagaggagtcaatacttttccatggtctcatgggaccttatatttgttggttaattaaaatgacctgaaatgttgaactttctttctctagaggatattctaaaaattcctatatttcccagaggaatagccatattgyttcactctcattttttgatagggaaataaggacacaagcaagccaattagcatttctggattcagagtcattggaattttagagtggacctggcctcccaccaactttatttcaaaggtgaagaagatgagacccagagagaaaaacgccttgctcaaatttatgcaccattagtttaggtctttttcctgtaataaaattgtgcttttctca

SEQ ID NO: 742671 - DNA, 581 bp, Homo sapiens
acagtggctcacgcctgtagtcccagcactttgggagggctgaggtgggcagatcgcttgagtccaggagtttgagaccagcctaggcaacatgacgaaaccctgtctttactaaaaatacaaaaaaaaaaaaaaaaaaaaatagctgggtgtggtggcrtgcacctatagtcccaggtacctgggaggctgaggtggcagaatctcctgagcccagggaggttgaggctgcagtgagctgaaaaatcacaccactgcactccagcctgggcaattggaacgagactgtctcaaaaaaaagtgcattatctctcttggagactcacaatgcaccattaaaataatagtctctgagaagtgttacatgaataaagttgcccttgtttaaacatttttcagaccttccctggaacccttttttgacatagcacctattatatcttccaggcaaagtatttttctcagaacatcatttagactactgttttaaaaaaattaaaaatgaaaatcttggaagttttaaagaaacataataagagaaatcagctggaaataaaaaaaagtttgagttggggctgtca

SEQ ID NO: 742672 - DNA, 457 bp, Homo sapiens
acaaaagaatgagaccccatcaaaaaaaaaaaaaaaaaaggtagcttttagtcttcttttggcctttaaaaaactatttaagttgatatcctaatctttacacaatatactaaaaaaatgccaatgaacctagatctggaaaagatctagtttatttcatcttcggtaagcaaaagcaaagaatatataaatagctaaatagtccgaaataaatagctgaagccttaatagccaaatgagttgttataaaggaaaattattaaagcaaatcacttttcaaacttgaagcttctttyttaaagaggtttatttcactctaaatgcaaaacatttgctagtttcaaaagtacactaatataaacatattctgttaagggctttatatgcaatacaatcccttaacccttaagcctcacaacaacattctaaggtaggtatcgttgcattttcattttgt

SEQ ID NO: 742673 - DNA, 696 bp, Homo sapiens
aagataaaatgtaatcatattcaaagggttccaaattcgaatatatttcatcaaaaatgtaattaaagtaaatgctaaaatactaaaaaattaaaaacatttcctattttgtcaaaaaagttatttttcttctgctaaaatatccaaaattattgattgaagcttaagggtaaaatacaaatggtaattaatgaatactaatatttaaataaaaatttcaaatgaagcttaatttttacttagttttaaatttagtttactcattacatattttcataaacattaagttatccrcaatttttatattcaatgtttcatgcttcaagcatgctatgtctagacaatgtataaaaaattaaaagtagtattttttaaattgcaaaagattctttagctgctatgtgtaactgctgcaaacactgcagtaatttgtgagtacttacccacaaactggaacttgaagaaagcaagaaaatggatgcttgttaccccgggatatgctgtgttattttctaagaatctatagcattcatgacacctgagaagaaagatttgacaagtatattaatttgtcttttacctaaatgcttccacagcttaaattctccttgcacacacattcctcagcagtgtccttttgtgatgctggcagcagcacaacctgtgattcttcacaacatttgggtggtcagcttg

SEQ ID NO: 742674 - DNA, 696 bp, Homo sapiens
aagataaaatgtaatcatattcaaagggttccaaattcgaatatatttcatcaaaaatgtaattaaagtaaatgctaaaatactaaaaaattaaaaacatttcctattttgtcaaaaaagttatttttcttctgctaaaatatccaaaattattgattgaagcttaagggtaaaatacaaatggtaattaatgaatactaatatttaaataaaaatttcaaatgaagcttaatttttacttagttttaaatttagtttactcattacatattttcataaacattaagttatccgcaatttttatattcaatgtttcatgcttcaagcatgctatgtctagacaatgtataaaaaattaaaagtagtattttttaaattgcaaaagattctttagctgctatgtgtaactgctgcaaacactgcagtaatttgtgagtacttacccacaaactggaacttgaagaaagcaagaaaatggatgcttgttaccccggratatgctgtgttattttctaagaatctatagcattcatgacacctgagaagaaagatttgacaagtatattaatttgtcttttacctaaatgcttccacagcttaaattctccttgcacacacattcctcagcagtgtccttttgtgatgctggcagcagcacaacctgtgattcttcacaacatttgggtggtcagcttg

SEQ ID NO: 742675 - DNA, 591 bp, Homo sapiens
gctcagcaacatgggcttccactcacgaaggctgacctggctatggccactgctgagtgcccaatttgccagcagcagagaccaacactgagccctcgatatggcactattccttggggtgatcagccagatgcttggtagcaggttgattatatcggacctcctctatcatggaaagggcagacgtttgaccttactggaatagacacttactctggatatgggtttgcctatcctgcacgcaacactttttccaagactaccatccatggactcaaagaatgccttatccaccatcatggtattccatccagcattgcctctgatcaaggcactcgctttttgcctaaagaagtgcaaaatgggctcgtgctcatggaattcactggtcttaccatgttccccattatcctgaagcagctggattgatagaaaggtggaatggcattttgaagtcacaatgccaactaggtaacaatactttgcagggctggagtgaagttctccagaagaccatgtawggtctgaatcactgtccaatatatggtactgtttctcccatagctaggattcacaggtccaggaatcaag

SEQ ID NO: 742676 - DNA, 587 bp, Homo sapiens
aatattatttagccacagaaagtaatgacgtctgatacatgttacaacatagataaaccttgacaacattatgctaagtgaaataagccagacacaaaaaggcaaatattgtatgattccacttatgctgagtatctataataggtaagcttagtcagatggtaagtagattaaaggttaatgggttctagagggagaggagacagggagttattgcataatgggtacagagtttctgtttaggatgatgaaaagcattgtaaatagtagcaatggttgcacaatattgtgaatgcaattaataccactgtatttattatacacttaaaaatggccaaaatagcaaattttattttaaacagtagtctataaggttttttcyattattattatttttttttttttttttactttttaaactattttgttaaaaactaagacacaaaccacacacattagcccgggcctacacagagtcaagctcatcaacatcattgtattccacccccacatcttgtcccactggaaggtcttcaggggcaattaataagcatggagctgtcatcttcagcctcccgagtagctgg

SEQ ID NO: 742677 - DNA, 608 bp, Homo sapiens
gactcaaaaaaggaatcatgacttccttgtgtctgtttttaagaatcatgaagccaggcatggtggctcgcgcctgtaatcccagcactttgggaggctgaggcaggtggatcgttgagctcagtagttaaagaccagcctgggtaacatggcaaaacctcatctctacaacaaatataaaaaaattagcggagcatggtgtgcttgagcccaggaggtcgaggatgcagtgagctgagatcacgccactgcactccagcctggctgacaaagtgaaacccttctcaaaaaaaaaaaaaaaaaaagaatcataaaacttctctagaaacatgctccacctccaacaccaccccacggaccytaatagttcattggccagaacatgatcacatgccgcgtctgaagccagttattggcacaggggatgcagttagcgtgatgggctataatgaatcaagactcacccgttgtttgggaggccgaggcaggaggatcacatgagcccagggtttgagactagcctgggcggcaaagcgagacgccgtatctacaaaaattttttaaaagattagccgagcatggcgatacacacctgtagtcccagttac

SEQ ID NO: 742678 - DNA, 621 bp, Homo sapiens
gttggcatttccccctttgcctatatggaaaggaaatgcccttcttttattcatattggaaaggattagatggagaagatgcaattattccctctcccttgggccttgccactcaaacacaagaacagaggcccaaagcagccaaggaaacaacacatctatgaggaattccagcccatcatcactgggagagaaactgcctccttcaataagctggtactgtaccttggcatggtttttttcttttgtgtaagggaagcaaggtgcytagggtgaaaattgtaaggaggtccccactctcagagtccattacaagtttcagatcatataaaccactggagatctttggtaattcaagggaggaggtgcccaggagggagatcttgggcttcctgtccatctatcatttgaagactcgacttgattttaatttctgttgaaaaataaaatacaaacctcaagtttgtgaattcagtcataatcattattccagggaaatttgaattgtcttttgtgttccataatacaaaccttaagtgtattgatggggacaaggtagattccaggatggaaaggggtgacttagtggtatagggtgacattagcaaagaaatatgtcta

SEQ ID NO: 742679 - DNA, 558 bp, Homo sapiens
aaatccataagaaagcaagttgagggcctataatatcttcaaaacatctaagtccttctctctctgttgccaatgtcaattagcagaattagcagcttgtgaattctcagcatggattttttaatataaattctccaaattggttatcatcatataaaaatttgttgactgttttgctcttcatttaatggcttattggtagaatgagacaatagcctagattttacagaatggtacttatttaaaatattgtcaagttgttttcatgagtattcttgcacttaaaakacctaataatttcattttggaaaataggttcaaattaggtatgcttgacctatgagtaggttaagggccttaaatatacgtcagtgatgactacggagtaagagctcagtttatttttggaatgtacctctctccatgaagtgctacataagaaagagccaggtaagaaatgcgggtaaaaaacaattgcctggtttttactgtggttataagcatttttcaggggaacatttccagtttggaaaagatggcatgatgaaaatatcaccc

SEQ ID NO: 742680 - DNA, 564 bp, Homo sapiens
ctgatttatttttttggaaggaatcattgtaactatcaggaagacagtgtgggcacatgggaaaaagagatttcatgatagccactgctcattgagagaacagaaggctttgaagatcttctcccaggaagctgtaaacacatacagagaagatatttaccaaaatgtctgaaataagaagtatggagattaataatgaaaaattgattgccgcccacacctacamtggcaactttggcttttgatgtttattgaatttctgaaggaatttgtaacttcaccagttttggatatttcactgttctctaatgtccagggacaggtatctatgggcaaagtggcagcagaaaggaggtggggaaaataaataccgccccctctgggtgagaattttggagggacaataggtgattgaaaatttaaaaaaatatatacaggctccattttaataatttgaatggggaaataataggtttccaaaggaaaataaactatggcaggtcttagccagtaggaggatgtgtgttcttacgtgtgtgctcacatgcatgtgtgcatttatat

SEQ ID NO: 742681 - DNA, 564 bp, Homo sapiens
ctgatttatttttttggaaggaatcattgtaactatcaggaagacagtgtgggcacatgggaaaaagagatttcatgatagccactgctcattgagagaacagaaggctttgaagatcttctcccaggaagctgtaaacacatacagagaagatatttaccaaaatgtctgaaataagaagtatggagattaataatgaaaaattgattgccgcccacacctacaatggcaactttggcttttgatgtttattgaatttctgaaggaatttgtaacttcaccagttttggatatttcactgttctctaatgtccagggacaggtatctatgggcaaagtggcagcagaaaggaggtggggaaaataaataccgccccctctgggtgagaattttggagggacaataggtgattgaaaattwaaaaaaatatatacaggctccattttaataatttgaatggggaaataataggtttccaaaggaaaataaactatggcaggtcttagccagtaggaggatgtgtgttcttacgtgtgtgctcacatgcatgtgtgcatttatat

SEQ ID NO: 742682 - DNA, 623 bp, Homo sapiens
aataccaaaaacatgattgtcacagacagaaatacactgttaaacagcaaagataaaccacagattaggaaaaaactctatatctgttaaaagatttggaaccagtatacataaattatggtttcaaaactaagtaatatgaaaacaacccaatttaaacaaaaggcacaaaatatttgaatagaaattcagagtagacatgtggaggacaagtayatgaaaagataatctgcaccatttgacattagagaaatgaaaatcaaaaccataatgagatattgctacccacctatctaaaactaaaacattaaaaacaaaatttaaaaagctaaaagaacaaaaacaaaataaaaaaatagcaagtgctaaagagtatatagagaaactaaaactctcataccttgttggtgggaatgtaacataagaaaatagtttggcagtatgtatacttattgtataaccatataagtatttacccagcaatctcactcttagatatatactaaagtgaaatcaatacttacatttacacaaaaaccacagatgaatgtttatagtggctgtaatagccctaaacataagctctagtacgtccacataataagatattactcagcaccatt

SEQ ID NO: 742683 - DNA, 617 bp, Homo sapiens
gttcatctttcttctgtatttctaaggttcctgtcggatttgttacccacgccgttgaatttgtgactaatttaacttgctctgtaatatgaacctcgactctctgtctcttaatcctagggaactctaagtctaattaaagtacaggttttgatcggcttgttgacttccctttaaaatttgttcagagttcctttcttggttcctggcacattattacaatttagtaagtttgatctttattctagttacaaagatggttctatcaatatttttttgaaggtcccacgtcctttctcttttacctgawtttttttttaagtttttgaataacatgcttgatttctaggattagggagtttgagtatagaaaaaataatacttaggcttgccatgtcattacagtggcacattgatcaatacgaaatgtccaaaatagctaattttcaaataaacactctgtacatttttatcatcgtttttaaaaataaaattttaaatgtaaaaaacgtttaaaacactttactgccaatttcttctgatattagagttcgtagttaacagaccctcaatttttgctgttttctgctttgctttaacattgaaaattacatgaa

SEQ ID NO: 742684 - DNA, 617 bp, Homo sapiens
aattacaatgagattttgagtaagaagagcaatgcctagcagggtgtcaggctcactggaggccttaagaaagtcttactgaattatgttaaccaacttacttttaactcattaataaaagtttttctaaagctaattttaaasagtttcaatttaatgtcttttgggacttaaatcaaatgaatatatgtaacatatgtaatttttttttaaaaaaagaaaccagcttttattttttaaagaccgaacaaagaaacaagtttttctttggatttggctaagctgggatgctaataagatggctgtttgcaaatggaccagtttgtgtccacagagtgatatatataggctctcatataaatatgcatacacatatgtatgtacatgtattattttctccctctttctttttctccttctctctttcatttgttctttttttaaactcttctatcttttggaactatgagggcaaacctaaatatgttgcaaggtaacttatttttatctaatgaacatgcaacagccaattgaacaaaataataaatggtacgttttaagtattaacgtctatttgatctgaagtgtggaaacaaagtcatttgagctacttattg

SEQ ID NO: 742685 - DNA, 550 bp, Homo sapiens
aattggagggtcaaatatccaaactatagcaggtactaaccttaatagataaaagttctcatgaaccatttaaaaaatatctatgtggttgtttgtcagctctccctgctttgctggcagtgagagtgtctccgtgtgcaccagccacacgaggaacattctcagtgcagctgctttaaaaaaataaaaataaaaatatttaaaaatacccaataatacaactttatamattacaatgaacatagaaaatggtgctaacatttaataatacataaagaaatgcacactttaaatgcattcagtgcttgaatgtggaaacaatgacagttttcaaacatcaaatatataaaaaaaaactaattgataatcaccatcataataaataataaatgggggattataaaatacctttattaaaggcttttcattcacaatatctttcagtaataaaaaatgagaatcagtgcctatgtcatttagagactgagtagtctataaacagattataatagacattgaaagttagaattttaattttattgatatgaga

SEQ ID NO: 742686 - DNA, 603 bp, Homo sapiens
ataccaaagtttcatctgatacaaggcaagtcccttctgtctaagagcctgtaaaataaaaagcaagttagttagttcttagatataatgggggtacaggcattaggtaaatacacgtgttccaaatgggagaaattggccaaaatgagggggacaaggacctatgcaaacccaaaatttagtggggcagtcaaatcttaaagctccaaaatgttctcctttgactccaagactcacatccaggtcacgctgatgcaagagstgggttcccatggtcttgggcagctccacccgtgtggctttgcaggggacagcctcccccccagctgctttcatgggctggtgttgagtgtctgcagcttttctaggcacacagtgtaagctgttggttgatctaccaatctgggtgctggaggatggtagccctcttctcacagctgcactaggcagtaccccagtggcactctgtgtagggttcccaccacacatttcccttccacaccgccctggcagagattctccatgagggctctgcccctgcagcaaacctctgcctggacatccaggtgtttccacacatcctcttaaatctaggtggaggtt

SEQ ID NO: 742687 - DNA, 587 bp, Homo sapiens
tataacttataaccagattgaagtgtataattataatatgttattattctggggttctataaaaaataaaatctttgaatctatgattttttgtcattagggtatactttgggacatgtggcgccatagaatatcaacactatttactacatgttgaccatgttaaatacatttaacacatytcttttttcaacagccctacaaggtacatggttcttgcccaaagtcacagtcacacgagaacttgtgtggtgctgaatgaatctggctccaaaagtactgtttggtttaggagctttcatgtatagtgccctcaagtcttgtaaatttctgcttcttcaatcatcaacctcgttcaatctaacatcttgaaggaactactcaaatgtcttacttacagattcttacaactatttcaaatgccaaataccttgtttcagatggtcaacatcttggctactcttgctgtagtgtgcagtgggttctgtttgtcctaacagaacaaaacatagtcttttagatttttaaaaaatattcctctggaaagccttaatgaatgccacattctaatccctagtcttgcccca

SEQ ID NO: 742688 - DNA, 587 bp, Homo sapiens
tataacttataaccagattgaagtgtataattataatatgttattattctggggttctataaaaaataaaatctttgaatctatgattttttgtcattagggtatactttgggacatgtggcgccatagaatatcaacactatttactacatgttgaccatgttaaatacatttaacacatctyttttttcaacagccctacaaggtacatggttcttgcccaaagtcacagtcacacgagaacttgtgtggtgctgaatgaatctggctccaaaagtactgtttggtttaggagctttcatgtatagtgccctcaagtcttgtaaatttctgcttcttcaatcatcaacctcgttcaatctaacatcttgaaggaactactcaaatgtcttacttacagattcttacaactatttcaaatgccaaataccttgtttcagatggtcaacatcttggctactcttgctgtagtgtgcagtgggttctgtttgtcctaacagaacaaaacatagtcttttagatttttaaaaaatattcctctggaaagccttaatgaatgccacattctaatccctagtcttgcccca

SEQ ID NO: 742689 - DNA, 636 bp, Homo sapiens
tgaacacatctaattcaagctttctccttcaatgaatatttgtttcctttttttttaagtcttacattttacaaaatttatcttaggtcatattttgcagtgattttttaagcaaacaaatagaaatccccagtcatctctgtagatttgtcatcctgaaaagaaatgtctctctgcttgggtccagatgacagagaaggtggaactgtaagtgtcagggagtataagtgttgcttctttatgtgactttgaaggactcataaacatcagagatctgactttccagttcctttacatttttatgtttaaattgcacgttaacttcttttgtttctccttgtgtttgggcattgcaggattctgatagttagcagtcttatagaaagctgataatccttaactgtagyactacaaacaactgccgtaatagtgtataatttttctgatgtgtttatgtgcttaagttgggcggaggagtgaaaatcaaaggttattgccattgcccttgtttactctagcatttaaattcccagaaagtgcctctgatattcaactgcctacgcctttatcattcataactcagtttgcaactggggtaaagatgtgtctcagtaccgtgtattcagttgggcccag

SEQ ID NO: 742690 - DNA, 502 bp, Homo sapiens
cccaaagggacccctagagttaatgaggccacccaggcccctagtcaaaggcaacaggctaagcaattcatcagactgagggggctgaaaccagggctcctcaggggtgggagagacctcagcagccttcccacctagtgctggggctcacgccttagcccacccaggacctccaccctgacccacaccgcaggccccacggaacccaccagctaygagcctttccctcagcctcccctccattaaacataccgtgtcccccaagtgctctctcggggccagaagaggtttcctggtaccactcctgacccctggagggttgagaactgaggaccctgggtcccaccatgctcagggaatggaagctctttggtcagtcccagcagtcagaggccctccccacaggagaccacttctgcaggtcccctggatagctctgcctcaggcaagggccttactatggcttgagagatggtgtagtccctgtacaacagcctggctt

SEQ ID NO: 742691 - DNA, 620 bp, Homo sapiens
aaaacttgccagctccccagacccttactggtgtcaatgaactttctcagagagcaacatgtaatatttctcttttttcttttaaacacagggtcttgctgtgtcacccaggctggagtgcagtggcacagtcatggctcactgtagcctcgaattcctgggctcacgtgatcctcytgccttggcttcccaaagcactgggatgacaggcatgagccaccatgcccggcctcatttctcttttttataaaaccgtctaccttctcttttttctttggacatactgaagactacttagtctgcatgtatgccccaaattgcaagtcttcctttgccccaaaacattaaatatagagattcgtctctgcgttttaattttgactttgataagtgcaagaagaaagagataaagacggctgccagaatctagggagatggggaagtggtcaggaggttcccatcccatttaaaatcacagccaaccagccatcctccctgcagggtgcatctctatgtcatggccccatttctccttcatgcctaccactcagctgttctctttgctgtgtcgtcacttcagacctaccttctcatcatgtttcatgaccccaaactaactc

SEQ ID NO: 742692 - DNA, 591 bp, Homo sapiens
cgtctctactaaaaatacaaaaaaaaaaaaaaaattagccaggcatggtggtgggtgcctgtaatcccagcgactcaggaggctgaggcaggagaatcccttgaacccaggaggcggaggttgtagtgagccgagatggcgccacggcactccagcctgggcaacagggcgagactccatctcaaaaacaaaaacaaaaacaaataaacaaacaaaaactatccttttgccagtgaattgtcttggcacctttgtggaatatcagctgatcaaacattttgtaggattttatttctggactctcaatgttgttccgctgatctacatgcctatttttgtcagtaccatactatcctgattactgcaccttgtaggcagttttcaaaatgggtaatatggctcatctaacgttgttctttttcaaaagtgttttgactattctggatyctttatatttccacatacacttgaggattggcttgtcaatttctataaaaaagcctatagaaaagattttgacagggattgtattgaatatgtagattcattctgggaggagttccattttaacaatattgagtcttccaatcc

SEQ ID NO: 742693 - DNA, 646 bp, Homo sapiens
aagtaaaagaaaccaatctgaaaatgctatatattttatggatccaactacatgacattctggaaaagacaaggttatggagtccataaaaagattagtgactgccaagggcctgtatggagggatggatgaatagcagagcacaaaggaccttttaagggcagttgaaactactatgtatactgcaatggtggatatatgtcattttacatttgtcaaaacctatagaatgtacaacttcaagagtgaatcctaatataaactatgaactttgggtgataattatgtgctaacgtaggttcataaattgtaacaaatacaccatggtggtgtgggatgttactaggcggggaaattttgcatgactgagaacaggcagtgtacagaaatctgggaagaatttctatactttctgctccacttttctgtgaactcaaaactgctctaaaaataaagtttattattttttawaaaagaaataaagtattgatacttgctacaacatgaatgtaccttgaaatggttttgctaagtgaaagaagtccattatcggagttcacatattatatgattccattcatatgatagtccagagtagggaaatctatggaaacagaagagagtggtggagaatagtgggtaagag

SEQ ID NO: 742694 - DNA, 646 bp, Homo sapiens
aagtaaaagaaaccaatctgaaaatgctatatattttatggatccaactacatgacattctggaaaagacaaggttatggagtccataaaaagattagtgactgccaagggcctgtatggagggatggatgaatagcagagcacaaaggaccttttaagggcagttgaaactactatgtatactgcaatggtggatatatgtcattttacatttgtcaaaacctatagaatgtacaacttcaagagtgaatcctaatataaactatgaactttgggtgataattatgtgctaacgtaggttcataaattgtaacaaatacaccatggtggtgtgggatgttactaggcggggaaattttgcatgactgagaacaggcagtgtacagaaatctgggaagaatttctatactttctgctccacttttctgtgaactcaaaactgctctaaaaataaagtttattattttttaaaaaagaaataaaktattgatacttgctacaacatgaatgtaccttgaaatggttttgctaagtgaaagaagtccattatcggagttcacatattatatgattccattcatatgatagtccagagtagggaaatctatggaaacagaagagagtggtggagaatagtgggtaagag

SEQ ID NO: 742695 - DNA, 602 bp, Homo sapiens
aaagtaatactcagtgttgtttttgctgttagaaatttagaaatcattcatgtacaaatacatcatatccaaaaggctgtgtttaagtctatttctttctaagtctctgcagtatacatgtctgtataaagttgagtttctcaaaaggaccggtgatgtgctggcattgattctggctctacttggtgcttttcagcgattcagaaatgtatccaaagatgtttttactttgactttcttcttttcatggtaagaagacrcttctttaaacagctcatgggccaacactaatgactaacgtgatggccaagactaaaatggatgcgcatgactgctgctcaccatctgtggggaagcaggcggagctggcctacttttcctttagtgcatggctttgttcttatctgtgaatgtttgtaagtagaggagtttcagtgcagatgtgaaattgtttttgaaatattggtggctcttataacttgtgttctttttttttaagaagcttttctttggtttgatgctcactgagggtagaaagaaagcccaaaggaaaagatgcaagggtcctataatgcaatgacttcctccgccaatgcatgggt

SEQ ID NO: 742696 - DNA, 635 bp, Homo sapiens
ggcgtgcgccaccacacccagctaatttttgtaatttttttttttttgtagagatggggtttcaccatgttggccaggctggtctcaaactcctgggctcaggtgatctgccctcctcggcctcccgaagtgctgggattacaggtgtgagccaccatgcctgcctgtcccatttccccattttaaaaaagtcacctgccygattggttttcaaagctgccttcactcaaagagggcctggagggtaggaatgactcatacagtcattcattgtctgtgcccgcttttcatagcacaaaagataggtccttcccatcccgcccatcctctccctgctggtcatcttgtatgcggagaatccaaggatcttcttaccaatgagttcttgccgctcatgagcaggtgaaggagtggagctgaagtggaaataatctatgggctggactgtctagacagcatttgctcctctggatagggaggagagcagacagaagcgggctttggccaaactgaaactcaagccatcactgccagcccttcctgagccatctcagatgagccttgtctctgggccacagccagaattggcctgggctgtttctcactcctatttcaaaggatttgtgctcctagca

SEQ ID NO: 742697 - DNA, 645 bp, Homo sapiens
ttagctgagggtgataaagaagaatattattctgacacttgtgaaaatggtgagaaaggctattcaagactattgcaataggggagagagatctgactcaactctgaatatagcaaggatgagaggggatttataggcaaggagcagggtgagggatcagggatgaaaaatgmtgaagaggagagatcaagtgtaggaggattctcaccaaacttgcctaacaggattcttgctaaaggcaggccaagaaccttcacatcaaaggtggagataaggaacttgaccaggtatcatgggtggtcagatattaagggatgaggggattcattctaaactgacttagcaagattctggctaagactggactcaaaaaacgtgcagagatggacccagaagcccaaagttgaagcctggtcaagaagagggctcagaggagcctaaataaagtttggtcaaagagagagtctttgtcaagggccatgcctaggatgtgagccattggccagtgtgaggaatgagttgttccttggtctcacaagtggcctcaggtctaccagtgtctgatgttaaatttctctttgcctgttcactggttgtgtgggtgatcactttctgcccttcacatttccctagtaaacacaatct

SEQ ID NO: 742698 - DNA, 453 bp, Homo sapiens
caggtgtcctttgtgcttcttgtatttggatgtctaggtctccagcaaggccagggaagttttcctcaattattcccctaaatatgttttccgaacttttagattgctcttctgcctcaggaatgccaattattcttaggttggtatcaggggaaattcagccagatattgggcgaaattcacccccgatatttcacgtaggttcttttctatactccctaagtgtcggccggtctgagaaataaagggacaaggtacaaaagagagaaattttaaagctgggtgtccrggggagacatcacatgttggcaggttctgtgatgccccccaagccgtaaaaccagcaagtttttattagtgattttcaaaaggggagggagtgtacaaatagggtgtgggtcacagagatcatgtgcttcacaaggtaatagaatatcacaaggcaaatggagg

SEQ ID NO: 742699 - DNA, 563 bp, Homo sapiens
catctacaggaagatgcctaaggactcaatgctctaccctgctgaagacagctaatttatctaaaattgattgaataaaggagctatgattcatgcatttgatgaattgctcttagattatgtgcaggacaccgtgcctagctttctgaatactgtcatttctccatgctgtccatccactgattcttcaaaaataaacacaagatagatagcagaaattagaatgtaaagggacctttctatagtttcctctttcaagacttaaagtttatgacctctacagtcctagcattgcttcacacaacagacagagggatttttaaaataaatacctaatcacatcttgcccatgttctcttcactattctccaatcttacaaccaagaaaaatatattgaaaataatctataaaagtagccyttcattattggtccctgactataactgttgctacctcaagggagcatgaggaagattacattagaccttgcatatattgcgtctggaacagagactgccggcagtaattagtcacccttttgacctctccagcccaccttgca

SEQ ID NO: 742700 - DNA, 500 bp, Homo sapiens
actttcagtgtacccaataaatataaacagaatgattaaatagaatagtcaatctagaaaaataaattagagaaaagatgatatacagcaggtgaaaggaaattaaaaatactaataagacaggtttcagatatcagtaatgacactatatataaatawcttttttttagtaattaggtcagatttttaaattatatttatatttttctctttattattaacttttaggttcaggggtacatatgcaggtttgtaatatagataaattgtgtgtcacgagggtctgatgtacagattattttatcacgcaggtaataagcatacccaatagacagattttttacctactccctccttccaccctccaccctcaagtaggccctagtgtctgttgttcctttctttgtgtccataggtactcaaggtttagcttccattcataagtgagaatatgcagtgcttggttttctgtctgtgcactagttcgcttaggataatgg

SEQ ID NO: 742701 - DNA, 586 bp, Homo sapiens
agatagacagggacttgcaggaactcacaggaactaacaggtatcatagggacagacagggacaggcagggatagatgaagactaacaatataaggtcagtgccctaaagagatactgatcagtgccctaaagatgtacaaaagcaaagactagcaatatacggtcagtgctctagagaggtactggtcagtgccctaaagaggtacaaacgtagagactagcaaagactagcagagatttgcagggacagacaggaatattstgaattatggaaattagctatggctcaaagtccagtcaaaatctgagagggaaagtataaaatgaacagaggggagggaggtaaggataaaaatgctctttcttttctctccagtgggaccttttggattcacagttgtgctagcaataggaaatgttactcttgatataaatacacactttattacatgccctgaatgttgcttgtttacctgccttgattcaacctttgataaaaatcaaactgtcttgataattaaagccagggaaggagtttggatccctgtgtctctaaatagaccatgggagacatcaccatctatt

SEQ ID NO: 742702 - DNA, 631 bp, Homo sapiens
tgtttttaaataataaataataaaaataataaataataaaataacaaaactttattttcaagttaatagttatctttggtgagggaaggagattataaggattgagttttcattttttgttaaaaagtcagttgtcagttttattgttggttcatgaaagtaatttttttctctctgctattaagatttcttcttagctcctggtttacctcagttttatttagatgagtttaggcggtttttttgtattatcctycctggggtttgaggctctctgtaaattaatagattaagattttttgacaatttagaaaaatacttgattattacattttaaaatacttctgcaatatcctttactctttctctgagccaccccttataggtataaataatcatatacatatataaatatatataacataatatacatataaatacataatatacatatacattttaaacctttcatcgtgttttgtcttttatacagatagtccccaacttaacaatggttcaatttctgatttttccactttatgatgctgtgagagtgataaccatgcagtagaaaccatactttgagtacctatcaaagcattttgtttttcacttttcatgcagtacaatc

SEQ ID NO: 742703 - DNA, 609 bp, Homo sapiens
gaatgaaacaacaatggtctagaaattagatagatgtgtcattaaatccaggcctcatcatttgctagatgtgtaagctgagtaagttacttctgtaaactctactacttcatttgtaaaatgaaggaaatattgaagaatgtaaataagtcatatagaggaagtgctggtaaattgttgttccttggtacatggtaattctttttatatacattattgtgtccaggttttcttctctgaattttttaaaacagatattgacaggcttttgaaatttgaaatcctcaattgtttctctgctttaratctacttttatttgttgtaaaaccttggattctaaaaaataattgtgctttctcctttccatttgagcaagcaagaacaagactatactaagaagcagaatgaagaaggccatcagaaccttagcacccaagaactaggtttctttcttcctggctcctgttgccctccaaatgaggaatttctcttcttgaattgaaatgcaaattgtatatgactctaaagatcctttatctgacagatctgaggaacacagctcttctctgctatctgtggggtgggccacttctcttaactctaaagct

SEQ ID NO: 742704 - DNA, 495 bp, Homo sapiens
atcatgccttcccattagtcccccaaagtctcaactcatttcagcattaactcaaaagttcacagtacaaagtctcatccaaggcaagtcaagtgtcttccacttatgaacttgtgaaatcagaagcaagttagttacttcttagataaaatgggggtacaggcattgcataaatacagcyattccaaataagagaaattggccaaaacaaaggggctacaggccccatgcaattctaaaatccagcagagcagtcaaatcttaaagctccagaatgatctccttcaactccatgtctcacattcaggtcatgctgaagtaggtgcccgaggtcttgggcagctctgcccctgtgactttgcaaggtacagcctctctcccggctgccttcacaatctggcattgagtgtctgcagcttttccaggtgcacagtgcaagctgtcagtggatctaccattctgcggtctggaggatggtggcctttttctcacagc

SEQ ID NO: 742705 - DNA, 495 bp, Homo sapiens
atcatgccttcccattagtcccccaaagtctcaactcatttcagcattaactcaaaagttcacagtacaaagtctcatccaaggcaagtcaagtgtcttccacttatgaacttgtgaaatcagaagcaagttagttacttcttagataaaatgggggtacaggcattgcataaatacagccattccaaataagagaaattggccaaaacaaaggggctacaggccccatgcaattctaaaatccagcagagcagtcaaatcttaaagctccagaatgatctccttcaactccatgtctcacattcaggtcaygctgaagtaggtgcccgaggtcttgggcagctctgcccctgtgactttgcaaggtacagcctctctcccggctgccttcacaatctggcattgagtgtctgcagcttttccaggtgcacagtgcaagctgtcagtggatctaccattctgcggtctggaggatggtggcctttttctcacagc

SEQ ID NO: 742706 - DNA, 654 bp, Homo sapiens
cttctgaaaagaaagaaaagcttaaattatctttccttctatagtttgccagccagagggtaacttgtccttaaaaagcactgaaacatagatgacttagctgtttaatctatagatagctcttatgtgctcctctgtcctgcggcctcacttcgtcaagcaatggtgcaagagctgtcaagtgaacatgtatataggtgctcctggcatgcccctaaaacaacagtttcttcttccagtccctgccttttcccagataatgtggctgccagctaatacctgtgacccatttttcatgtattaggcagrcctgtgctttctcagaaatatctaagttaaaagaattacattcgaaattaaatggaaaataatcctgtcataatgctgagaagaaaataatggaaaaattacatcatgttctaaattgtatatagatcactcattttcttaaaataaattctggcatattagagtttaaaatgtcaagtatggtcaaggttctgtggaaactagtgaagaattgaagatcaggtgcgttagcatcaggaagtgacttgaatcatgtggtctccatggtaacagccttggtgcttacatcagagggccttctcttacacgcaccacacgccatgatatttctgatgagtgcttggg

SEQ ID NO: 742707 - DNA, 654 bp, Homo sapiens
cttctgaaaagaaagaaaagcttaaattatctttccttctatagtttgccagccagagggtaacttgtccttaaaaagcactgaaacatagatgacttagctgtttaatctatagatagctcttatgtgctcctctgtcctgcggcctcacttcgtcaagcaatggtgcaagagctgtcaagtgaacatgtatataggtgctcctggcatgcccctaaaacaacagtttcttcttccagtccctgccttttcccagataatgtggctgccagctaatacctgtgacccatttttcatgtattaggcagacctgtgctttctcagaaatatctaagttaaaagaattacattcgaaattaaatggaaaataatcctgtcataatgctgagaagaaaataatggaaaaattacatcatgttctaaattgtatatagatcactcattttcttaaaataaattctggcatattagagtttaaaatgtcaagtatggtcaaggttctgtggaaaytagtgaagaattgaagatcaggtgcgttagcatcaggaagtgacttgaatcatgtggtctccatggtaacagccttggtgcttacatcagagggccttctcttacacgcaccacacgccatgatatttctgatgagtgcttggg

SEQ ID NO: 742708 - DNA, 611 bp, Homo sapiens
tatttgaccacaatatttttcactgcttctacaatccaatagattttgtttttccaagaacacaatcatatatgcaaataattatttcattttatccttttctattttattctatttctatgtcatgtcttattgccctgaatcaggctagcaaaattatgttaactaatagtggtaatggagtcatttttgccgtatctttgatattactgaagatgctgatgtttggtgttgatttaaatcattaacctggtaatgtattgtggatggtgttgttgctgctgttgctgctgctgctgctgctgctgagaggtggagaagtggggaaagaagagggggatgctgcagtttagtctaagtgatacatttctaggtttagatatatttgcttaaagctttggcagccagaatctactggtacaaagaactaaatttttttctcaggatagcatcaggcaatamtctgtgctttgggagtaacaaagggttttcaggggagacaattctgaagttagcagcatctcagtcacttaattatccctggtcctgaatacttagtccaaagtctgactcacagcaagtgaagggttgtaaaaattgggagcagtttt

SEQ ID NO: 742709 - DNA, 643 bp, Homo sapiens
agggaggatgaataaaagacattttcccaaaggcttcactcaagctggccaggttggtacatagcatgaaaaattaaagtgcatcctaatacagtgagtttttagaaagaagcagtttcgtatgtccttttactcacagaatgtcccactgggagaatgtttgtctcttccagatattctggagccagtgagaaaaatgcaaggcctgacagtgcagacscctgggccaatgtgttctccctttccctactgagcagtctgcacagagaatcccgctcctgacccacctgtggaagagcagcctaaggtgagacagggcacatgtcctcaccctgacaacgagagagtctgaccttgcctgccctgccctgctctccacaacactagaaacctatggcctgttgcagttagtcatggagaaatgagccagcttcctagacttagtttaggagtttccttatatttccccttctgaaaatctagagacaaaaatgaccactgaagagttatagtgctcaaatgccttttctctcatttcattcctatcagtgactttttgctttggtgacagaggtaaaaggtgacaacttcaagccttagggcagaactgtagtgttgaaagctgaaggagagagtttgaatc

SEQ ID NO: 742710 - DNA, 591 bp, Homo sapiens
tcctcaccctgacaacgagagagtctgaccttgcctgccctgccctgctctccacaacactagaaacctatggcctgttgcagttagtcatggagaaatgagccagcttcctagacttagtttaggagtttccttatatttccccttctgaaaatctagagacaaaaatgaccactgaagagttatagtgctcaaatgccttttctctcatttcawtcctatcagtgactttttgctttggtgacagaggtaaaaggtgacaacttcaagccttagggcagaactgtagtgttgaaagctgaaggagagagtttgaatctctgatgttatctgatttctgatcagatcataaggcccagtcctgcagcttttgtctgtaggggaagagggtttaggtataaaaggtaaagatatgagaattcctgggaggaaaaatagaatggccttcattttcagcctaatggcattcttagaaatagcaaggccccatcaatagcctggtggtgacaagctagaactcttaagaaggaaagagtgggccatgcgcggtgggtcacacctgtaatcccagcactttgggaggctgaggca

SEQ ID NO: 742711 - DNA, 591 bp, Homo sapiens
tcctcaccctgacaacgagagagtctgaccttgcctgccctgccctgctctccacaacactagaaacctatggcctgttgcagttagtcatggagaaatgagccagcttcctagacttagtttaggagtttccttatatttccccttctgaaaatctagagacaaaaatgaccactgaagagttatagtgctcaaatgccttttctctcatttcattcctatcagtgactttttgctttggtgacagaggtaaaaggtgacaacttcaagccttagggcagaactgtagtgttgaaagctgaaggagagagtttgaatctctgatgttatctgatttctgatcagatcataaggcccagtcctgcagcttttgtctgtaggggaagagggtttaggtataaaaggtaaagatatgagaattcctgggagraaaaatagaatggccttcattttcagcctaatggcattcttagaaatagcaaggccccatcaatagcctggtggtgacaagctagaactcttaagaaggaaagagtgggccatgcgcggtgggtcacacctgtaatcccagcactttgggaggctgaggca

SEQ ID NO: 742712 - DNA, 639 bp, Homo sapiens
aaaagcaaagaaaagtgacaaagggcccatggatttaattccaactataaacgatggtgtttccttgccctctgtggtgatggtctttctgctgcccagtgggtctaagagtagccactggctcaaaggcattctaacagcagtgccctaaaaccaacatccttgaacctctcatagaaaacaagaagtgatctgagtattatttatgtatgccttcctcatagagatttgcaacaaattttaagcatttataaatagaaatattaggaatttttaaaaatgagattgctaaacaaaaatacatttcaaataacaataaaagtaaaatataattattaaagagcataccgcagtaccctggggttccacatactgtcttcatgagcacttgatgttccacaattttagagagtccaaaatcagctaayaacacaagaaaaaaatttaatgaagcacgtcttctcagcttttatgacaaaatatttgttattcaaaaataaaactaacttatttatctatttgctttcttttgtatttgatgatggggtgaaggtgggtgggaacaagtcacccaacaggaagctaaagaaaacaatccatgtgtttctttaaattggagaaaaatatgacttccaaata

SEQ ID NO: 742713 - DNA, 582 bp, Homo sapiens
acttttaagcttttaagattttcaagcataaaaaaatagagaaacaacgtaatggatcctaagtatccattacccagtttcaagaattatcatctcgtagtcagtattgtttcatgtgtgctgatatccacttcccttatcacatgtcattttttagcaaaccacaggcataaaaatcattatcggctgggcacggtagctcatgcctgtaatmccagcattttgggaggccaaggcaggcggatcacctgaggtctggagttcaagaccagcctgaccaacatggagaaaccccgtctctactaaaaatacaaaattagctgggtgtggtggcacatgcctgtaatcccagctactcaggggactgaggcaggagaatcacttgaacccaggaaggggaggttgcagttagctgagatcgcgccattgcactccagcctgcacaacaagagcgaaactccgtttcaaaaaaaaaaaatcattatcatttaatttgtaaatattgtatggtattacagctttaagacttttttatttaaaaaatgaccacagtgccagtaccacacctcaaaaaaaaatttc

SEQ ID NO: 742714 - DNA, 622 bp, Homo sapiens
tgacccagcctagggattctggaccagacactttctgaaaagacccaagatgtgatggcttgttgtcaaaaacaattacagaaaaggtggcatatcccaagccagatggtatatccgatgtgacagttgggtctatgagatgcagttttaatatacagcaggcaaaactgcagtgacaattatataaagcagatgaagctgcttcttgctggtcagcaaacatcagctcagaaccactttacagctctttaccagcaactaagtgcctttatttacagagtgcctgtcacttccctttggctggagagctggtgtattatttagcacgcatttatctggggaaaacatttcaatttaaatcagctggtacaacagtggctcttgccagactgtttccctgtggttcaaaaagatgagaactgagtctgatcttggaagaaagggtgagcagagggaggcartgtccgctctctgagctgcttcagttcatacctgaaaagagggagcatgccatggcatttcccattctgctttcatattgttttgaaatgatgatcttgtagttgcttcctgcttacccttccatgaaaggtaactcctaaggaaaagaaaaaggaataaa

SEQ ID NO: 742715 - DNA, 622 bp, Homo sapiens
tgacccagcctagggattctggaccagacactttctgaaaagacccaagatgtgatggcttgttgtcaaaaacaattacagaaaaggtggcatatcccaagccagatggtatatccgatgtgacagttgggtctatgagatgcagttttaatatacagcaggcaaaactgcagtgacaattatataaagcagatgaagctgcttcttgctggtcagcaaacatcagctcagaaccactttacagctctttaccagcaactaagtgcctttatttacagagtgcctgtcacttccctttggctggagagctggtgtattatttagcacgcatttatctggggaaaacatttcaatttaaatcagctggtacaacagtggctcttgccagactgtttccctgtggttcaaaaagatgagaactgagtctgatcttggaagaaagggtgagcagagggaggcaakgtccgctctctgagctgcttcagttcatacctgaaaagagggagcatgccatggcatttcccattctgctttcatattgttttgaaatgatgatcttgtagttgcttcctgcttacccttccatgaaaggtaactcctaaggaaaagaaaaaggaataaa

SEQ ID NO: 742716 - DNA, 566 bp, Homo sapiens
gggaggctgaaataacagagaactaggaagcctgaaaactctctctgggccctgttcttttaaagcccctttgctttgtaaccttggcctgatcacttccatctcagaacttcagtctccttaactgccaaatcaagtggatgttcaaagacctgtcagacccttacagatgaaccagctgtgtccatccatcatgttcatcagctgctctcaacccatagagatcacatgaggtttcgagatttcagggtctttaacatcaatttataatttaaaaaatttttttcattacataaataaaatgtgtttattttaraaaatttagcaattatagaaaccaaaaagaaaatgcacattccctgtaattttactgctcagacataagaaagttgacatatttgtcttatttccatagatataaatacttttaccctcaaaaaaatggatcatacatgtcagtatgttacctgtggtttttcacaaacattttatcatgaccatttttctgtcgtgaaatgtttttctgcattatttttagtggatgcatacttaaccaatttccctaa

SEQ ID NO: 742717 - DNA, 566 bp, Homo sapiens
gggaggctgaaataacagagaactaggaagcctgaaaactctctctgggccctgttcttttaaagcccctttgctttgtaaccttggcctgatcacttccatctcagaacttcagtctccttaactgccaaatcaagtggatgttcaaagacctgtcagacccttacagatgaaccagctgtgtccatccatcatgttcatcagctgctctcaacccatagagatcacatgaggtttcgagatttcagggtctttaacatcaatttataatttaaaaaatttttttcattacataaataaaatgtgtttattttagaaaatttagcaattatagaaaccaaaaagaaaatgcacattccctgtaattttactgctcagacataaraaagttgacatatttgtcttatttccatagatataaatacttttaccctcaaaaaaatggatcatacatgtcagtatgttacctgtggtttttcacaaacattttatcatgaccatttttctgtcgtgaaatgtttttctgcattatttttagtggatgcatacttaaccaatttccctaa

SEQ ID NO: 742718 - DNA, 609 bp, Homo sapiens
agtcccagattcccgtaaagcagctattggcttgagctgagcagctgctccctttagccacagtccacactactctctattgtatcccaccaggcctgcttcattcatgtcccttccctgcttggttcatcccactgtcctggccttaccagcytcctgcgttttgcttctaatcttatgtgtctgcattgcaatgtctgtggtcagacagcatccttggccttccggtcacttgcttgtcctctgagttaggaggttgtgcacatgatgtccattttccttgagccttggacctttcctaaacagataccaatcacactgaaccatcgttattgaaggagcagtgaggagccacctccttctgaggagaaaaaggggaaccctactacaagagctaatgagttccaatgcacacaagttgggagtgttgtcgttttttttttagaaaacaagatttaatgaagctttaggtttgcagggcctacctaatctggaaaaataaagaaaaagcatattataacagtgttaagagaaagagcagagaaaagcagaggccccttttgctagtgtacgatacatctgagaagcgtgaatgccagcctatggaga

SEQ ID NO: 742719 - DNA, 455 bp, Homo sapiens
catatgtatgatagtgtgcatgtggttgtcatttttatttcaccaccataaaacccttgagcacaacagcaaataagcagacggaccaaaagttatttatgattctgggggaaaaataacccaaaggcatgctccagacataaatagctcactgcaggaacgagttcacagattagaagggagcacttgtgatcaacgtcagttaggcagagcaagtttatttaatgtaaaagaaaagttgattctgatttatcaggattatcagggtgctttgggttttgattttgttgttgttgttgttttcctttctttctttttttatacacacaataagttagcacatgtttatttgaaacaagcaacmaaacagcaatgaaaacatattgattgtttccagtctctgggccgaagtattgcgaagcatttgaaaagctttcacgatttgtgtagatgat

SEQ ID NO: 742720 - DNA, 638 bp, Homo sapiens
atgtcagaggttgcagtgaactaagataacaccactgcacaccagcctgggcaacaaagaccccttgtctcagaaaaagaaaatattagccacgatctttcaaaaaatagatttatagttgatttttatgaagaatactgcagtgcttatcaaacttcttagtgatatgtgctattcaaggttgtcaggcaagaaactctcattccaaggacatcacccactttaactcccctgcaccctgatactgcccactactctctgggcgtagaacttggctccattgcctggcttgcctgatcctagctgtgcttaatagctcagcctcgtcgatggacacatggcattccccaccacrggatccatcccgaaacagcagtcaagtgctcctttacaggaatcatactaccaaattcacagtatgggttgttcagctggcatgtattattatttttgtggttgttttcccatcatcgcttaaggaaacaaccacaccctcttacccgtctggttcgtgtgagaaacagccaggcaccattccatcctccaatccagagactgcgctcttgtggccatgccgtaagactttgagagttaacttgcacaaactttctggtgaaagtcttaaacagtcatatcag

SEQ ID NO: 742721 - DNA, 638 bp, Homo sapiens
atgtcagaggttgcagtgaactaagataacaccactgcacaccagcctgggcaacaaagaccccttgtctcagaaaaagaaaatattagccacgatctttcaaaaaatagatttatagttgatttttatgaagaatactgcagtgcttatcaaacttcttagtgatatgtgctattcaaggttgtcaggcaagaaactctcattccaaggacatcacccactttaactcccctgcaccctgatactgcccactactctctgggcgtagaacttggctccattgcctggcttgcctgatcctagctgtgcttaatagctcagcctcgtcgatggacacatggcattccccaccacgggatccatcccgaaacagcagtcaagtgctcctttacaggaatcatactaccaaattcacagtatgggttgttcagctggcatgtattattatttttgtggttgttttcccatcatcgcttaaggaaacaaccacaccctcttaccmgtctggttcgtgtgagaaacagccaggcaccattccatcctccaatccagagactgcgctcttgtggccatgccgtaagactttgagagttaacttgcacaaactttctggtgaaagtcttaaacagtcatatcag

SEQ ID NO: 742722 - DNA, 605 bp, Homo sapiens
atgtgtgttctcagcttaattataaatgagcattaacagccaatacagtatcaagctggaggctgtctcagaggtgggaaagttgcaggcaagagcacagaaagtcagaattcttagcaaacagcygttgtccaactgaccaggagtgcaaattgttctactcgcaaagctgcttcacgtatgtacattctttttgttttgttttgtttttttgagacagagtctcgctctgtcgccaggctggagtgcagagccctatcagctcactgaaacatctgcctcccagattcaagcgattctcctgcctcagcctcccgagtagctgggactataggttcgcgccaccatacccagttatttttttgtatttttagtagagacagggtttcaccatattggccaggatggtctcgatttcttgagctcatgatccgccaaccttggcctcccaaagtgctgggattacaggcgtgagtcactgcacccagccatatatgtacattctgatgtattcatggcacttttgccctggtggcctaaatttagcctgatgttaccacttgtggcaggtcacaggctggatgccgtatctgggacctagggtt

SEQ ID NO: 742723 - DNA, 615 bp, Homo sapiens
tttttttttttttttggagacggactctctctctcatcaggctagagtgcagtggcgcaatctaggctcactgcaacctccaccacccgggttcaagtgattcttctgcctcagcttccagagcagctgggattacaggtgcacaccaccatgcctggctaatttctttttktatttttagtagagacgggattttaccatgttggccagactgatctcgaacttgtaacttcaggtgatctgcccttgtcagcctcccaaagtgctgggattacaggagtgagccaccgcgcctggcctacattctttttattttattttattatttcttttttatttagctagctaggtagcaaggacggggagagtgtctcactttgttgcctatgctggtcttgaactcctggcctcaagcgatcctcctgccttggtctcccaaagtggtgggatttcagccctctttttaaaaattaacagataaaagtgtatgtatttaacgtgtacaacacgatgtttgaagtatatatacattttgggatgactaactctagctaattaacatatgcattacctcacataactatcatgtttgtgtctgctttattcttttttgca

SEQ ID NO: 742724 - DNA, 615 bp, Homo sapiens
tttttttttttttttggagacggactctctctctcatcaggctagagtgcagtggcgcaatctaggctcactgcaacctccaccacccgggttcaagtgattcttctgcctcagcttccagagcagctgggattacaggtgcacaccaccatgcctggctaatttctttttgtwtttttagtagagacgggattttaccatgttggccagactgatctcgaacttgtaacttcaggtgatctgcccttgtcagcctcccaaagtgctgggattacaggagtgagccaccgcgcctggcctacattctttttattttattttattatttcttttttatttagctagctaggtagcaaggacggggagagtgtctcactttgttgcctatgctggtcttgaactcctggcctcaagcgatcctcctgccttggtctcccaaagtggtgggatttcagccctctttttaaaaattaacagataaaagtgtatgtatttaacgtgtacaacacgatgtttgaagtatatatacattttgggatgactaactctagctaattaacatatgcattacctcacataactatcatgtttgtgtctgctttattcttttttgca

SEQ ID NO: 742725 - DNA, 607 bp, Homo sapiens
tgcctcagcctcccaaggtgctgggattacagacgtgagccactgcgccctgcccaagcgtgtattctttgaccagctttgcgctggggcccagcgactgaagggtgaacccaaacaacaggcagccctccccgagctcagtccrgtgggaacacagacctcgactgcagagcaacagaaagataagccgggctggaggctcccggcccccatcttcccacagtgaccccattttgggaacaggaacccccatccctcgtcttgtttcgggattaggcttctccaaatctggcaccctatcaccttgactcctctcttgcccccccgccacatccaaagtgtctggaaagcctgtcactctacatgacaatgtaacctggtgctgcgggctcctcttccttgtcactccccttcctcgtcatcccccttcttcgtcaccccccttcctcgccacccccttcctggtcacacctcttcctcgtcacccttcttccttgtcacccctcttcctcgtcaccccccttcctcatcatcccccttcctcgttaccccccttccttgttacccttcttcctcgtggccccctagttcaagccaccctcatctc

SEQ ID NO: 742726 - DNA, 611 bp, Homo sapiens
cccactcagtcatccaggggccctggttcctggcagttctgtgctccacagtccccgggacagggctccctcatcatcttcacccaccggacctcacggcagccttgaaaagcctacggacccttctcagaaggaaagaacacgtgcaggacaaaggaatccaactctgattgtaatacagtgatcaaaatattttttcacactgtgacatagcaattcatgtgcttcttcatgaatgcattaagtaaaaaatcacctgtggcagctttaataaccactgtgacttagaagcagagatgagcataaatgayatttcaaggtgcctgctggaagataacgtgataggaaatgcctgtgatttcttttggtaacagtcacaagttctgctaacactgctgtggtgtgttgctgcatttgtaatggattcgtgctagatgcaagactggtccccagagatgttcctgattcctggacctgggaatatgttatgttccatggcacgagggactctgcagatgtgagtaagttaagggtttgggatgggggcgttatcctgggttgtccacctggacccaatgtcatcacaaaagtccttctaagaaggaggccgg

SEQ ID NO: 742727 - DNA, 611 bp, Homo sapiens
cccactcagtcatccaggggccctggttcctggcagttctgtgctccacagtccccgggacagggctccctcatcatcttcacccaccggacctcacggcagccttgaaaagcctacggacccttctcagaaggaaagaacacgtgcaggacaaaggaatccaactctgattgtaatacagtgatcaaaatattttttcacactgtgacatagcaattcatgtgcttcttcatgaatgcattaagtaaaaaatcacctgtggcagctttaataaccactgtgacttagaagcagagatgagcataaatgacatttcaaggtgcctgctggaagataacgtgataggaaatgcctgtgatttcttttggtaacagtcacaagttctgctaacactgytgtggtgtgttgctgcatttgtaatggattcgtgctagatgcaagactggtccccagagatgttcctgattcctggacctgggaatatgttatgttccatggcacgagggactctgcagatgtgagtaagttaagggtttgggatgggggcgttatcctgggttgtccacctggacccaatgtcatcacaaaagtccttctaagaaggaggccgg

SEQ ID NO: 742728 - DNA, 611 bp, Homo sapiens
cccactcagtcatccaggggccctggttcctggcagttctgtgctccacagtccccgggacagggctccctcatcatcttcacccaccggacctcacggcagccttgaaaagcctacggacccttctcagaaggaaagaacacgtgcaggacaaaggaatccaactctgattgtaatacagtgatcaaaatattttttcacactgtgacatagcaattcatgtgcttcttcatgaatgcattaagtaaaaaatcacctgtggcagctttaataaccactgtgacttagaagcagagatgagcataaatgacatttcaaggtgcctgctggaagataacgtgataggaaatgcctgtgatttcttttggtaacagtcacaagttctgctaacactgctgtggtgtgttgctgcatttgtaatggattcgtgctagatgcaagactggtccccagagatgttcctgattcytggacctgggaatatgttatgttccatggcacgagggactctgcagatgtgagtaagttaagggtttgggatgggggcgttatcctgggttgtccacctggacccaatgtcatcacaaaagtccttctaagaaggaggccgg

SEQ ID NO: 742729 - DNA, 624 bp, Homo sapiens
gaagaagcacatgaattgctatgtcacagtgtgaaaaaatattttgatcactgtattacaatcagagttggattcctttgtcctgcacgtgttctttccttctgagaagggtccgtaggcttttcaaggctgccgtgaggtccggtgggtgaagatgatgagggagccctgtcccggggactgtggagcacagaactgccaggaactagggcccctggatgactgagtggggccatcctgccagggggagcgctcaccttgggaggaggagctggtggagaatgacactctgtggtttgtaattcatgatcactgtatttgggggactctttgttccagcagctcagccamctctactcagcaggggtccctgatccaagttgtccccctcatttgtgggggccgatccagggttagtgagacctcatgcttgcttatacaattcaggggcttcttggaaagagaatgggctggacccggtgactcaagcctgtaatcccagttcggggaggggctggagagggtggaggatggtgccgaggagagagaatcacttgagcccaggagtttgaggctacagtgagatgtgatcacgcaagagacaggatcttgctgttgctcagg

SEQ ID NO: 742730 - DNA, 618 bp, Homo sapiens
ctggtttttcaggttaactttggaatgcccttggcggagaggacaggatccattcagatggttgcggggggccttagaattttaattttggtttacaccctgaatactcccccttctcttctgtttttttttttgtttgtttgtttgtttgtcttttyttttctttcttcttttttagagacagggcttcactgtctctgggcccagcctggagtgtggtggtgagatgacagttcactgtaacctcaatcctgtgggctccaaggatcttcctgcttcagctttaagtagtccctaagcagctggagctgcaggcacccaccaccatgcccagataattcttctatttttttttttgtagagatgggggtctcactctgttgcccaggctggtcttaaattcctggcctcgagctgtcatcccaccttggcctctcaaagcactgggattacaggtgtgggccactgcacctggccccctctctctggtttttgttcatctgtgtctcagacgagctatctctggctttcatattgttatatgaatataatatttatttgtttaccacttaataaagtattgttagtttgctgttgaaaattggaattacagacatg

SEQ ID NO: 742731 - DNA, 618 bp, Homo sapiens
ctggtttttcaggttaactttggaatgcccttggcggagaggacaggatccattcagatggttgcggggggccttagaattttaattttggtttacaccctgaatactcccccttctcttctgtttttttttttgtttgtttgtttgtttgtcttttcttttctttyttcttttttagagacagggcttcactgtctctgggcccagcctggagtgtggtggtgagatgacagttcactgtaacctcaatcctgtgggctccaaggatcttcctgcttcagctttaagtagtccctaagcagctggagctgcaggcacccaccaccatgcccagataattcttctatttttttttttgtagagatgggggtctcactctgttgcccaggctggtcttaaattcctggcctcgagctgtcatcccaccttggcctctcaaagcactgggattacaggtgtgggccactgcacctggccccctctctctggtttttgttcatctgtgtctcagacgagctatctctggctttcatattgttatatgaatataatatttatttgtttaccacttaataaagtattgttagtttgctgttgaaaattggaattacagacatg

SEQ ID NO: 742732 - DNA, 609 bp, Homo sapiens
tatatgctgttctcacacaaaatgaaactgctgaaatccaaatttagaagcaaagaatagacttaaattgttaaacatagaaaatataaatatatactttgaagaacaggattaggcaccttgatacgtgaaagaaaatattaggaaataaactattttattcttcagatacaggctgaagaaagtagatgaaaaccctgtaattcctttttgcctgcagcaaacttaaatttataagtaattattttggtaaatatggagtgcctactaattatgtaatttacttcatgcataacatgcaaattctagcatattgtcataaataaatctaaaattacagacaaatttgaaatagaaaatagtcaaaatgtagagggmgagtgacatcagtaagatgaaagattaaaagttccctaattttatatccccttacagcaaaaaacatcggccatccctgacaaaaatgcctttattggctgggcacagtggctgatgcctttaatcccagcactttgctgagatctgctgagacgggcagatcacgaggtcaggagtttgagaccagcatggcaaacatggtgaaaccctgtctctacaaaaataccaaaa

SEQ ID NO: 742733 - DNA, 505 bp, Homo sapiens
ttgttttttaatatgcagaaattttgatgtctagtgtagttaaacttttctgttatttcatttattgctcatgcatttaatttcttatctaagaaaatggtgccatgaccaatgtgatgtctttttcctatatttttttgaaaggatttgttagttattttatttctcagtattttrtttaaatactgagatctctgtgcctcagcctcccaaagtgctgggattacaggcatgagccactgtgcctggcctcctttatttttgagatagggtctcactctgtcaaccaggctaacttgcaaggctcagtgctacccaaacctcccaaattcaggtgatgatctcatttcagcctttcaagtagctgggttacaagtaggtgccatcaaaccctgctagcttttctgtattttttgtagagacagagttttgccatgttgcccaggctggccttgaactcctgggatcaagtgatcagcctatcttagccttccacagtactaag

SEQ ID NO: 742734 - DNA, 433 bp, Homo sapiens
tcacaatgttggccaggctggtcgcaagcttctgaccttgtgattcacccgcctcatcctcccaaagtgctgggattacaggcatgagccgatgtgcccagtcgatttattcagattcacatattgttttttatattctataaaaaagaactttaaaggtttcatgtataataattttgattttttttttttttttgagactgagtcttactcttgcccaggatgaagagcagtgaagggcagtgggcacyattgcacctggcctttttattattattatttttttgagatggagtctttctctggcacccaggctggagtggcatggcatgattttggcaaactgcagcctctgcctcctgggttcaagcaattctcttgcctcagcgtcctgactagctgggactacaggtgtgtgccaccacacctgggt

SEQ ID NO: 742735 - DNA, 649 bp, Homo sapiens
cttgtactgcaaaagcaagaacagttcagtgcataaactgaacagtgcagtctgtagttgtaccttgctttctattacttcataacaattagtatagttatgtgtaatgtttgcagactacctgcattcatataaattaaacagtattttcttttcttttttttttttttttttttttgagacagagtctcactcttgcccaggctggagttcagtggcgtaatytcagctcactgcaaccgctgcctcccgggttgaagtgattctcctgcctcagcctccagaatagctgggattacaggtgtgcccaaccatgcctgtctaaattattgtatttatagtagggatggtgtgttatcatgttcaccagcttaatcttgaatccttgacctcaggtgatccacccgcctcagcctcctaaagtgctgggattacaggggtgagccataaacagtattttctacaatagtatgagtacaaagctgcactacttactttgaattaatcacttaaatggttattttaatatcattatttacacttctgaaatataaaatgttttaactgaagtatagttttaatttttaaaactataattttaaactatacacatactatatacatactatatacattatgactagttcat

SEQ ID NO: 742736 - DNA, 610 bp, Homo sapiens
ctatctgcttgaagacttgcactattgaatcgggtaatgtggggatgggagagagaaggcggtgggctcctccttctcatcaaatagtctgggtcttcaacctcctcccttttgggaaccagggcactcatcctcccttctgcctcaaggcccctcccacctacctccccaccatccccggtccagttttggaggtggaacttgggagagggggattgaaaagtaggggcttaccatctcaaagaaagaaagaaaaaatattttatttcyctcttagtgtgtttccctctctctctctctctctctctctctctctctctttctttctttcttttttgacagagccttgctctgttgcccaggctggagtacagtgtctcggtcttggctcactgcaaactctgcctcctaggttcaagcaattctcctgcctcagccttctgagtagctgggattacaggggtgcaccaccacgcccagctatttttgtatttttagtagagacagggtttcaccatgttgccctgtctctagacagtctcgagacagtctcgagagtcacatgtagccctgtctcgagagttgctggtctcgaactcctgacctcatg

SEQ ID NO: 742737 - DNA, 610 bp, Homo sapiens
ctatctgcttgaagacttgcactattgaatcgggtaatgtggggatgggagagagaaggcggtgggctcctccttctcatcaaatagtctgggtcttcaacctcctcccttttgggaaccagggcactcatcctcccttctgcctcaaggcccctcccacctacctccccaccatccccggtccagttttggaggtggaacttgggagagggggattgaaaagtaggggcttaccatctcaaagaaagaaagaaaaaatattttatttctctcttagtgtgwttccctctctctctctctctctctctctctctctctctttctttctttcttttttgacagagccttgctctgttgcccaggctggagtacagtgtctcggtcttggctcactgcaaactctgcctcctaggttcaagcaattctcctgcctcagccttctgagtagctgggattacaggggtgcaccaccacgcccagctatttttgtatttttagtagagacagggtttcaccatgttgccctgtctctagacagtctcgagacagtctcgagagtcacatgtagccctgtctcgagagttgctggtctcgaactcctgacctcatg

SEQ ID NO: 742738 - DNA, 618 bp, Homo sapiens
tgctagagtacacgtcttggctctgcctcttgctggctacgtaattttgtagaagttaaatggcctctcttgcctcagtctgatcttccttttttttttttttgagacagagtctggctcttttgcccaggctggggtgcagtggctgatcttggctcactgcaagctccrcctcccgggttcgcgccattctcctgcctcagcctcctgagtagctgggactacggcgcccgccaccgtgcccggctaattttttgtatttttagtagagacggggtttcaccgtgttagccaggatggtctcgatctcctgacctcgtgatctgtctgcctcggcctcccaaagtgctgggattacaggcgtgagccaccacgcctggccatctcagtctgatcttctgtaaactgtggatgaattttataataagctgcctgatttggtactgtaagaatcaaataagtgaatgcatctactcaaatatgataagacaagatttagtggtacttagtaagattaaattagtcctaggtaatgatattttaaagaaaactcatctgtatgcaaatcttctaaataaaatttctagcaaaactaatccagttatgagaaaaaatagt

SEQ ID NO: 742739 - DNA, 618 bp, Homo sapiens
tgctagagtacacgtcttggctctgcctcttgctggctacgtaattttgtagaagttaaatggcctctcttgcctcagtctgatcttccttttttttttttttgagacagagtctggctcttttgcccaggctggggtgcagtggctgatcttggctcactgcaagctccgcctcccgggttcgcgccattctcctgcctcagcctcctgagtagctgggactacggcgccygccaccgtgcccggctaattttttgtatttttagtagagacggggtttcaccgtgttagccaggatggtctcgatctcctgacctcgtgatctgtctgcctcggcctcccaaagtgctgggattacaggcgtgagccaccacgcctggccatctcagtctgatcttctgtaaactgtggatgaattttataataagctgcctgatttggtactgtaagaatcaaataagtgaatgcatctactcaaatatgataagacaagatttagtggtacttagtaagattaaattagtcctaggtaatgatattttaaagaaaactcatctgtatgcaaatcttctaaataaaatttctagcaaaactaatccagttatgagaaaaaatagt

SEQ ID NO: 742740 - DNA, 618 bp, Homo sapiens
tgctagagtacacgtcttggctctgcctcttgctggctacgtaattttgtagaagttaaatggcctctcttgcctcagtctgatcttccttttttttttttttgagacagagtctggctcttttgcccaggctggggtgcagtggctgatcttggctcactgcaagctccgcctcccgggttcgcgccattctcctgcctcagcctcctgagtagctgggactacggcgcccgccaccgtgcccggctaattttttgtatttttagtagagacggggtttcaccgtgttagccaggatggtctcgatctcctgacctcgtgatctgtcygcctcggcctcccaaagtgctgggattacaggcgtgagccaccacgcctggccatctcagtctgatcttctgtaaactgtggatgaattttataataagctgcctgatttggtactgtaagaatcaaataagtgaatgcatctactcaaatatgataagacaagatttagtggtacttagtaagattaaattagtcctaggtaatgatattttaaagaaaactcatctgtatgcaaatcttctaaataaaatttctagcaaaactaatccagttatgagaaaaaatagt

SEQ ID NO: 742741 - DNA, 618 bp, Homo sapiens
tgctagagtacacgtcttggctctgcctcttgctggctacgtaattttgtagaagttaaatggcctctcttgcctcagtctgatcttccttttttttttttttgagacagagtctggctcttttgcccaggctggggtgcagtggctgatcttggctcactgcaagctccgcctcccgggttcgcgccattctcctgcctcagcctcctgagtagctgggactacggcgcccgccaccgtgcccggctaattttttgtatttttagtagagacggggtttcaccgtgttagccaggatggtctcgatctcctgacctcgtgatctgtctgcctcggcctcccaaagtgctgggattacaggcgtgagccaccacgcctggccatctcagtctgatcttctgtaaactgtggatgaattttataataagctgcctgatttggtaytgtaagaatcaaataagtgaatgcatctactcaaatatgataagacaagatttagtggtacttagtaagattaaattagtcctaggtaatgatattttaaagaaaactcatctgtatgcaaatcttctaaataaaatttctagcaaaactaatccagttatgagaaaaaatagt

SEQ ID NO: 742742 - DNA, 601 bp, Homo sapiens
cagcagcactagaggaataaagacatagacagaaatagagtgcaaagtgggatcagggggctaacagccttcagagctgagagcctcgaacagagtttgacccacctatttattgacagcctgtgataaacatcgtttctgtagtttgtagattaactgaaagtattctttaaggagaacaaagggacaggctctggcttgttatctgcagcaggagcatgwcattaaggcacagattgcttatgccattgtttgtggtttaggaacaccttgagcagttttccgccctgggtgggccaggtgttccttgccctcattctggtgaaccagcaacctccagtgtgtgcatcataaccatcacgagcatgtcacagtgctgcagagatcttgtttatgacttttcttatggcttgtttatggccaggcttggggcctattcccagcatgtccccctttttgttttaccagggcaataaaagcaaaggcggctttatcacagtgagctacttcttgcaggagtcaggatccgcatctgcagactacacaaagacaaacaacacagattaatagcacaaccatcatagaaatcacagagcctcca

SEQ ID NO: 742743 - DNA, 596 bp, Homo sapiens
tgtcacccaggctggagtgcagtggcacgatcttggctcaccgtaacctccacctcctgggttcaagtggttctcctgcctcagcctcctgagtagctggggttacaggtgtgtgccactgtgcccggctaatttttgtattttttttttttttttttagtagagacggtgttttgccatgttggctaggctggtcttgaattcctggcctcaggtgatccacctgccttggcctcccaaagtgctgggattacaggcatragccactgcgcctggctgaggtttttttttgagacatggtttcattctgttacccaggctgtagtggagggacaccatcatacctcactgcagccttgacttctgggttcaagcaatactttaacctcagcctcctgagtagctggggccacagggcatgtaccaccatgcccagcaaatcttttcattttttgtagagataaggctttgctttgttgcccaggctggtctcaaactcctgggttgaagtgatcccctcatctcagcctcccaatgtgttgggattacaggtgtgagccaccatgcctggcctagatccattaatttttaataaa

SEQ ID NO: 742744 - DNA, 596 bp, Homo sapiens
tgtcacccaggctggagtgcagtggcacgatcttggctcaccgtaacctccacctcctgggttcaagtggttctcctgcctcagcctcctgagtagctggggttacaggtgtgtgccactgtgcccggctaatttttgtattttttttttttttttttagtagagacggtgttttgccatgttggctaggctggtcttgaattcctggcctcaggtgatccacctgccttggcctcccaaagtgctgggattacaggcataagccactgcgcctggctgaggtttttttttgagacatggtttcattctgttacccaggctgtagtggagggacaccatcatacctcactgcasccttgacttctgggttcaagcaatactttaacctcagcctcctgagtagctggggccacagggcatgtaccaccatgcccagcaaatcttttcattttttgtagagataaggctttgctttgttgcccaggctggtctcaaactcctgggttgaagtgatcccctcatctcagcctcccaatgtgttgggattacaggtgtgagccaccatgcctggcctagatccattaatttttaataaa

SEQ ID NO: 742745 - DNA, 620 bp, Homo sapiens
cttgcaggagtcaggatccgcatctgcagactacacaaagacaaacaacacagattaatagcacaaccatcatagaaatcacagagcctccaagtgtttttatgcatttcataggatttatggctgccaatccatctgcaactccttcaagcactccagttcctggcattaaggtcaggtgtgcctgggatgcttgaaatatttgttctcttaattttgcaacatccraagacaagtttgtagagtgtccttccagatacttttttttattctttcccattcatggtctaattcattataagggtgaggagtgatacaaaagtcagaagtattccagtcgcatttcagctgcattccatattccaaactagctacttgatctcccacccacattacagttggttggagatcattgatttgattaactatcttttggtctattttagtttgagagttccacagcagagtagaattcttttgccattatttacaaaatctgctgtctgcactgatgaatgtagtgccactccagctactgcagcagtagctgtgacagcaatcagtcccataataatcaagattaaagtagcaatgaaacactgagaacttcttagaatttt

SEQ ID NO: 742746 - DNA, 633 bp, Homo sapiens
tttttgtttttttgaaatggagtttcgctcttgttgcccaggctggagtgcaacggtccaatctcggctcactgcaacctctgcctcccgggttcaagcgattctcctgcctcagcctcccaagtaggtggggttacaggcatgtaccaccatgcccagctaattttgtatttttggtagagatggggtttctccatgttggccaggctggtctcgaactcccaacctcaggtgatccgcccgccttggcctcccaaagtgctggrattacaggcgtgagccaccgcgtctggccgagaacgtgttatttttctaaattctccaagtgttgtcatattgcgtcaatatggtgcctccagaaaccaaaaaaaccgaccaagcattgtgctgtttgtgattagtagtacaaattgcagcaattctcctttcaccttagagggaatatcttgacaagcgccagacaactgaacccctagaaacttcaggtggttagcctgaatgtttgggtgtattccccaacaaacattcacgtctgtcttacgaaagaactcataaaggcatcaatagagaggacaagttgtgggatgtaaagatgaccatacctgctggatgttattgcaagcaacagtataa

SEQ ID NO: 742747 - DNA, 580 bp, Homo sapiens
gcatcagagccagacttgggtggatccaactgtgggtttccaacaccctgggatgatggagaactgggcgcctgccccgcccacggtcttaatactccttgcaggtggggaccctggcccccggccgagctctcccagctgacagacgggctcagaagtcaaggatgtgtttgtgaaagtccctcccctccaagctgccccccacctgcagggtcacttaccagtttgagtgagaacttttgcttctgtggtcctgagtcacaggtgagggtggaggtgggtgcagctgtgggggaacaaacaagggagtgaggttataaccacgcggaaggtcagggtcatcatccccaaacttcccagcaatgagaagcggctctggtgccctggttccaacaaggtcaagcgcactcttggctctcacgacytgctgcttcctagttttaaataagcttcttcttcctctttctctctgtcactatccagccatgcaggaagggctaatgcagcaggcctgagacggctctcctggcaaggtctgggaccctggattccgggagggctcccagaatcccctaagtga

SEQ ID NO: 742748 - DNA, 487 bp, Homo sapiens
gggcagctctcccaagtgcaccgcagtgagcagccgcacggattcatgtgactgatgacggatggtggttctcccctatagctcagcgaggcccgggatatatgacattatagttcagtactggacagagacacaagagttaataaaatgcttagagcatggcgcagagagtggggtaaagtgtccactgctcgaataaccataacrattcagcttgttcttgttgttttactgttattgctttaaattacgggacatacaactccaccatctcttcttgactggtgcaaactggcagaagaaaagggcgatttgctctggggcgatgtcacccaatggtggtgtgtccccaaatgcaagctccgcatcagcagggccttcaccagccccgctctccctgcactgtctgtgctggcaccgcggccagacacatgaaatggtaggtgctgcttaaggatccactgagcaaccgggcacagtgctcacg

SEQ ID NO: 742749 - DNA, 487 bp, Homo sapiens
gggcagctctcccaagtgcaccgcagtgagcagccgcacggattcatgtgactgatgacggatggtggttctcccctatagctcagcgaggcccgggatatatgacattatagttcagtactggacagagacacaagagttaataaaatgcttagagcatggcgcagagagtggggtaaagtgtccactgctcgaataaccataacgattcagcttgttcttgttgttttactgttattgctttaaattacgggacatacaactccaccatctcttcttgactggtgcaaactggcagaagaaaaggscgatttgctctggggcgatgtcacccaatggtggtgtgtccccaaatgcaagctccgcatcagcagggccttcaccagccccgctctccctgcactgtctgtgctggcaccgcggccagacacatgaaatggtaggtgctgcttaaggatccactgagcaaccgggcacagtgctcacg

SEQ ID NO: 742750 - DNA, 516 bp, Homo sapiens
ctacaatctattttcaacccagtagcttgacggatccacttaaaatctaagtcagaccctgtctgtgtccctgccctggcccatatggtgggtcggacacggtggctcacgcctgtgatcccagcactttgggaggccgaggtgggcggatcacgtgaggttaggagttccagaccagcctggacaacatggtgaaaccccgtctctactaaaaaagtacaaaaaaaaaaatcagccgggcgtggtggygggcacccgtaatcccagctacttgggaggctgaggcgcaagagtcgcttgaacctgggaggcagaggttgcaatgagccaagattgcaccgctgcactccagcctgggcaacagagcaagactcagtctcataaataaacaaataaataaataaaatgtaagtcagaccctgtccctcctctactcaaaaccgtatggtggatttcattttagacagaataaatgctgaaattcctaccatggcccaggagccccctgtatgatct

SEQ ID NO: 742751 - DNA, 568 bp, Homo sapiens
tgtattgtacgcacaaacaacctccaggatagaccacaggttaggccataaaagctcctcaataatatttgaatagaaaaacacaagtacggtgggtctcggcggctcatacctctaactgcagtacttaaggaggccaagtcgggaggatcacttgagctctggagttccagtccagcctgggaaacatggtaaaccctgtgtgtacaaaaaatacaaaagttagtcaggtgtggtggtgcatgcctgtattcagctctttaggaggctgaagtggraggtgggaggtggaggttgcagggagccaattgcaccactgcactccagcatgggcaacagagccagatgttgtctcaaaaaaaaaaaaaaaaacaccccaaaatcccaaaaaacgcacgcaaacaaaaaaaccccaaagtgatatcagtattctctgtgtacagaagagtattttgtgtgtgtatgattatattatcaatatcagacattataataaaatgtatatgatatatttttgagacccggtgtcaaaaaaagaaagctctctatgttgtttgctcacaggaag

SEQ ID NO: 742752 - DNA, 567 bp, Homo sapiens
catgtcccctgtacacagtgacacccaaattcaccatgggtcccatatttaaaattaggaaatacagaccgggcgcataggctaacgcctataatcccagctctttgggaggctgaggcaggtggatcacctgaaatcaggagttcgagaccagcctgaccaacatggtgaaaacctgtctctaccaaatgcaaaaactgagctgggtgtggtggtgcatgcctgtaaccgcagctactttggagggtgaggcaggagaatcacttgaaccttggaggcagaggttgcagtcasccgagatcacatcattgcactcccgccaggcaacaaactgagactctgtcaaacaaacaaacaaacaaacaaacaaacaaaaaaacaaggtgtgatcagtgcatggaatagtctggaaatcaaaggaccctcccaccccgggatctgcggtggctgggactgtgtgccccatgatgcctggccatgtcaactatctttgaaaagggtcagcaggagaatgtggctcacgcctgtggaatccttgagctcaggtgttgagaccttcctgagcaa

SEQ ID NO: 742753 - DNA, 456 bp, Homo sapiens
gactccatctcaaaaacataaataaatgaattttaaaaaatgaaaatattatccaggtgtggtgatgggcacctgtaatctcacctacttgggaagctgaggcaggagactcgcttgaacctgggaggtggaggttgcagtgagccragatcacaccactgcacttcagcctgggtgatagagagactctgtccgctaaaaaaaccatttgaatccaaaagacctaggttggatgtgccaccgcactccagcctgggcaacagagatcctgtcttagaataaaaaagcaaaaccaaaacagaaccccgccatcgtccaagcctcatgataagcatgctctacaaatgtattaccgagataagcatcaacttcaacgctgcttttctcaaaccgtaacactccaaagggaagcgccttcttttcctttggacaagagaaagtgcttccctttgtagg

SEQ ID NO: 742754 - DNA, 642 bp, Homo sapiens
accaagagaattgggctggatttctagagaacagcaatggattttgagccaagcgttcacttgagttccagcacagggacacacagtcccgatgggagcattcaaaactgaatctcccatgttgaaaaatatacattgttggccgggcgcagtggcttatgcctgtaatcccaccactttgggtggctgaggcgggcggctcacatgaagtcaggggtttcagaccagcctggccaacatggtgaaaaaaaaaatacaaaagtaaccgggcgtggtgacgggtgcctgtgattccagctactcaggaggttgaggcagaagacttgcttgaacctgagaggcaaaggtttgagtgagccgaggtcctgccactgccctctggcctgagtgacagtgagaytccatctcaaaacaaataaatacatgaataaataacatgcaaatattagccaggcatggtgtcaggcacctataatcccagctactcaggaatgtgaggcaggagaactgcctaaaactgggaggtggaggttgcagtgagctgagatcacgtcactacactccagcatgggtcacagagcaagactgtccgaaaaaagaggaccatttgagcccaagacacctaggttggaagtgccaaca

SEQ ID NO: 742755 - DNA, 602 bp, Homo sapiens
acactccagcctgggcaacagacaccctgtattaaaaacaaaacaaaacaaacatgaaacaccaacatcatccacgtctgattataagcattctctgcaaatttattaccaagataagcatcaacttcaacgttgcttttctcaaagagtaatcctctaaagagaagcgctttcttttcttttagacaagagaaagtgcttccctctagagggtcacagcatgagatcttcttgctccaacactctgggttttttgttggaattttccttcacccggttaaaatggacacaaaaayaaagatgcatttattggccctgtttgcatgttttctggaatccagaatataaacccctaaaaggaccatctccagttccttgcttcaaaggatcagcaggttagctttgttcatcaaagagcaatcctcctgagttttgttctcaaagagcaaaagcaatgcctcatagacatatgtaccttatatttaaccaagagaactgggctggatttctagagaagagaaatggatattgagccaggtgttcaccagagttccagcacagggacacacagtcccgatgggagcatccaaaatggaatctac

SEQ ID NO: 742756 - DNA, 520 bp, Homo sapiens
tttctttgctttttttttttggagacagagtcttgttctatcaccaaggctggagtgcagtggtgcaatctcggctcactgcaacatccacctcccgggttcaagcagttctcctgcctcagcctcccaagtagctgggattacaggtgtgcgccaccacacctagttaatttttgtatttttagtagagacarggtttcaccatgttggccaggctggtctcaaacacctgacctcaagtgatctgcctgcctcggcttcccaaagtgctgggattgtaagagtgagccatcgtgtccagccattttcattgctcttgagtagatacttaggagtagaatttttgagtcacatggcaggtgtatatttaacgttacaagaaaatgcccagcagttttccagcatgattgtgccatctgcattcccaaaaattctatatgcattgcagttgccagcacctggtattggtattgtcaatcttataaaaagtttacacagaatggtttccttttcatacctt

SEQ ID NO: 742757 - DNA, 492 bp, Homo sapiens
aatttactttctgtctctatggatttgtctagtctggacatttcatattgtagggtccagccctacggggcttagcaggtgttctccccgtgtgcagagatgagagatggtaataaataaagacacaagacaaagagataaagagaaaacagctgggcccgggagaccactaccatcaagttgtggagactggtagtggccccgaacggctgggcgcgctgatatttattgcatacgagacaaggggggcagggtaaggagggtgaatcctctaagtgattgataaggtgaagcaagtcacgtgatcataggacgggggtggggggcccttcccttttaggtagccraagcagagagagaaggcagcatacgtcagcgttttcttctatgcacttataagaacgatcaaagactttaagactttcactatttcttctaccgctatctactaccaacttcaaagaggatccaggagtacgggaggaacgtgaa

SEQ ID NO: 742758 - DNA, 446 bp, Homo sapiens
taaaaaaattagctgggtgacagattgacaccttgtctcaaaaacaaaaaaaattgttacaatgtacataatatgggaggctgaggcaggtggatcatttgagcccaggagttcgagaccagcctgggcaacatggagaaaccctgtctctacaaaaattagctgggcatggtggcacatgcttgtaatcccagctacttgggaggctgaggtkggaggattgcttgtgcttgagcctggaagtctcacggagcctgagaggctgccatgagccaagatcatgccactgcactccagcgtgggtgacagagtgagaccttgtctccaaaaaaaaaaaaaatttattatttttttgaggaactgccatacggttttccatggcagccgtaccactttatacacattcccaacagcaatgcacaacgattccgacgtttccacaacac

SEQ ID NO: 742759 - DNA, 588 bp, Homo sapiens
gtagtccttgttttccccccttttttttgcttttgcaactgctgtttcagggagagattcattctttccactatggcttgtccttgagaattatatgggataccagtaatgtgtttaatattccgtatagagaaaaatgtagctagagctyggctagtgtagcctggggctttatctgttttaatagaagctggaatgcccatcactgcaaaacactgcaaaaggtgacgcctggaagaggtgtatgagccctaatgtgagtgatgtaaaaagggtgcattctactcctaactgctgtttgcagttgggtaaataaaatcatcagttgttcatctgcaggaaattgtaactgagcattttcagttaattgtgtggaatgaatcacgtatgaagagtcagaaatcacattaataggcatatgaaaagcagtcactacctcaattacagctacaggctccactttttgagctgaagtatagggcatctgaaaaactttactttttgagccagaataagaagctttaccattactagacccatctgtaaaaacattttcagcaccttcaattggtttaaatttagttattt

SEQ ID NO: 742760 - DNA, 588 bp, Homo sapiens
gtagtccttgttttccccccttttttttgcttttgcaactgctgtttcagggagagattcattctttccactatggcttgtccttgagaattatatgggataccagtaatgtgtttaatattccgtatagagaaaaatgtagctagagctcggctagtgtagcctggggctttatcygttttaatagaagctggaatgcccatcactgcaaaacactgcaaaaggtgacgcctggaagaggtgtatgagccctaatgtgagtgatgtaaaaagggtgcattctactcctaactgctgtttgcagttgggtaaataaaatcatcagttgttcatctgcaggaaattgtaactgagcattttcagttaattgtgtggaatgaatcacgtatgaagagtcagaaatcacattaataggcatatgaaaagcagtcactacctcaattacagctacaggctccactttttgagctgaagtatagggcatctgaaaaactttactttttgagccagaataagaagctttaccattactagacccatctgtaaaaacattttcagcaccttcaattggtttaaatttagttattt

SEQ ID NO: 742761 - DNA, 526 bp, Homo sapiens
catcattagaaaaacagaggaattaaaatggtacatgaaaaatttttgtttaacacagaaaagggcaaaaaaaaggagggacaggaattaaaaaaaagtgagacatattgaaaacaaatagcaaaatggcagatgtaactatatcaataattatattaagtactgaaraactaacctctctaaacaaaaggcaaagattatctgaaggataaaaaagcaaaatccaattatattttatcaataagagacacgttgtagactcaaagacaaataaatcaaagtgaaaagacaaaaatagatataacatacaggcattaacaataagataactagagtggctacattaatatcaagcaaagttggttttgagaccagaaatttttctagagataaaaagaaatatttcatattaataaagccttaatacatcaagatggaatgagtgttgtcaatgtgcattatgaatctaataatatgtataataatatgtgtattatgaatctaataatagacttcaaaattcaat

SEQ ID NO: 742762 - DNA, 586 bp, Homo sapiens
ctttcagatgaggaacgtgggacagagagaggctaggttgcttgcccaaggggatcactggtgcaaatgaggccccggcagccaaggggaatgaggtgtgaagctacacacagagtgaggggccatggcaaacccaagggctgagctgcggctgctgtggccatatctccrcatttcaagagaaccgcacatcctgatttcaatttgcaaacattaaaaacgtgatagacacagatgaaacacagctccaggcccacagccaatcctctgggcaccatttggccaactctacaccctcttcctttgctcctgtgctgtttggatggcttgttttttcctcccccacgaagttgtagagttctgagaacaaggaccgtatctcacacagctttcatctccttccaggtaacaccagtgctggctgggagtatgcgatggtacgctggggacagatggtacccccaaccccaggatccaaatcctgcccagtttgccttcttggacacaggggctcatttggagtctcagcgtccatgtcttgctaccttttacgtagcaactgtgctctaaaatgaagaagcaaagc

SEQ ID NO: 742763 - DNA, 542 bp, Homo sapiens
ctccacatttcaagagaaccgcacatcctgatttcaatttgcaaacattaaaaacgtgatagacacagatgaaacacagctccaggcccacagccaatcctctgggcaccatttggccaactctacaccctcttcctttgctcctgtgctgtttggatggcttgttttttcctcccccacgaagttgtagagttctgagaacaaggaccgtatctcacacagctttcatctccttccaggtaacaccagtgctggctgggagtatgcgatggtacgctggggacagatggtacccccaaccccagkatccaaatcctgcccagtttgccttcttggacacaggggctcatttggagtctcagcgtccatgtcttgctaccttttacgtagcaactgtgctctaaaatgaagaagcaaagccaggtgactcagtgggcatgggggtgcttgtgactgggggccagagctgcagggtctgtttcaggggcggtggggccctgtcagccacatgctcagacacccagatctaaacaccttgcagt

SEQ ID NO: 742764 - DNA, 475 bp, Homo sapiens
atcagggtgccagcatggttcttggtgggattctcttctattttttgttttgttttgtttttttgttttagatggagtttttgcccaggctggagtgcaatggcaatctcggctcaccacaacctctgcctcccgggttcaagcgattctcctgcctcagcctcccgagtaactgggattacaggcgcccaccaccacacctggctaattttttgtatttttggtagagacagggtttctccatgttgctcaggctggtctcgaactcccgacctcaggtgatctgcctgccttggcctcccaaagtgctgggattacaggygtgagccaccgcgcccagctgagattctcttcttatcttatatcctctcacctgccttcctttcttttttttttttttttctcacagtctcactctgttgccagtactggagtgcagtggcatcatgatcttggctcactgaagccttgacat

SEQ ID NO: 742765 - DNA, 592 bp, Homo sapiens
ctctctaagtgtgaggagcaaacaatggaggtgtcaaaagagaatcaaaggagtgggtggagagtcttctgttgcagctgtctttggagcttgaggagctggctttattttcaccaaaatatctgggaagccaggcatggtggctygtggctgtagtcccagctacttgggaggctgaagcgtgaggattgcttgaggccaggagtttgagaccagcctgggcaacatggcaagatcctgtctctaaaaaacccccaaaacaaaacaaaaagctcttacatatctggaacgcagctcctattctagcactcatagagtctcctaggactgagattcctctgttggtgtccacagaacagacacagagaggaaccacccgagacctttcctcatagagaaggttcttggccttgcccgagaactactggtgttaaatctctgagaaatgtgtgaggtatgagaatttttaataagcacttggagagatgctgataacctctgaagcctgacactcctaactttaatattaggagaacatgagaaaacatatttagggttagaatatgaagggtctttctttaatcatacttgt

SEQ ID NO: 742766 - DNA, 583 bp, Homo sapiens
ttggggcacactggcacctctcatatcctgatggtaggagtgtgaaatagttcaactactttggaaaacactttggcagtttttaacaagcacactgactatctgatccaacaattctgctcctagatatttatataagagaaactgtaaacaatttatatccacaaagactcgtacaaaaatgtctgtagtagtctgattcctaawagccaaatactgtaaacaatctaaacatctatcaaccagagaatggatatacaaattgcaatgtttacagaatggaatactactcagcaataaaaagaaactatgcagacacactacatggagaaatccctacgatgctggccaaaagaaactggacacacaagaaacgctctgattccaacaatataatgtccatgaataggcaaaacgtaattaagttgatagaattgaaaaaaaaaagggggtttcttcaatggaggataagacagggatagactgaaagaagcaaagggaactttctaggatgatagaaacttacctattttcagatgtacagtgtacacaattgtcaaaaattcaaactgatcacctaagt

SEQ ID NO: 742767 - DNA, 645 bp, Homo sapiens
tttcaccatgttggccaggctggtcttgaactcctgacttcaggtgttccacccacctcagccacccaaagtgctgggattacagatgtgagccaccgcgcctggccttttccttgcagtttattttggaaagaaaccaggtcacctgtccttagagcttcccccttcctggctttagctggcggcctccccatggtgtcctttagcctattgctccaccactggtattttctgtaaactagagtcaaagatggaagcttgcttaggccccaatgggatgtctttcggccgcagcactcctaggtatgcatctgtgagaaggcactgcgtgcctggtctccccctgcaagtgacactaggggcaagcagaggcttcagacagcggcacctggccatcaccacatgtcccctycagtcctgtttcacagcccagcagccactgctaggccctgcctagatccatcatttcatgacggtttgcagacgagtgccatcttcattctgtcattccttcttcatatattggctggaatgcttctaaaaagagctttctttcagtaaccgtttagttaccctgaggtataatttgtacagagaagacaagataaatacagttttcagaataatgagttggtccctagcaac

SEQ ID NO: 742768 - DNA, 648 bp, Homo sapiens
atcgtccgatggaaagatctggcaagccacgtatgtaaccttaaactttcttgcagccacgttaataaaaagggggaaaaaaccaggttgaacttggtttgaagagtctattttgctcaatacatctaaaacagtatgattccaacattctgttttcatgctaggtcttcaaaatccaatgaactcactgcacatctcaagttggacaccagattttcatcggcaacatgatctgtgtaggtttcataaaatgtacagctattcacataccaaagctgttccaaaatgatgtggaaaaagtgcaaagtctttacgcactgaatcacatattagctttcaaatgtaaattcaactgaaaggatctaacatgaaagattcagctcccctgtcacactcaccacgctaaagcgctcaataggctagaccggacggcaagggctcacactgccccgcattacgaatgggtctctcgccctgttcttmccccacagcaaacattccaagtcccccttaggacaaagacgctgttccccaagctggttttccaggaccttctcacctcattgctcaccatccccaatcctgcgctctacacgccagcacaccaggccctcagcagcccccaggccttctcaatttctatgttcc

SEQ ID NO: 742769 - DNA, 600 bp, Homo sapiens
tgcattatctatctacattgattagtacttggaattttttaaagaagtctcttttctcctatgttttttctttttaaaattattattatttttttgagacagagtctcactctgtcgcccaggctggagtgcagtggcgtgattttcaagcaattcttctrtctcagcctgacctcctgttggccaggctggtcttgaacgcctgacctcaagtgatccacctgctttggcctcccaaagtgctgggattacaggtgtgagccaccatgcccggccattttgggtaaaatttaaaggagaaacaatgtatttatgcagactcaaaggatctgcctccaaatatttataaataccattttatcttaattttttatgactgtttaaaaaaattataacagtactgtgagatatataatgtacagatgtaaaatttatgaataatataaagaattaaaaaagtaattaaaactctccaacagcaagttcttcacattttagctttattaaaatagtacagtgttaactttaagtagattgtaatatgttaaagatgtatatggtaatccctgaagaaaccactaaataatgtaaagaggtgtc

SEQ ID NO: 742770 - DNA, 592 bp, Homo sapiens
attttgttcggtcggccacccccaaatcacaaatcaaattaaaggtaatctccaagaactaggggaattaaccttcaaaaaaaaaatgcaggctttaaaaatagccatgcaagaagtccrtgactgggtatgggaaaaaatgcctataagtctaacagacccagcacacccctttaaacctagtaactctgtttcagttaaaaagtaaaacccaacttctctaagacccatgtgggatgggccccatacagtaatcttgtccactgccactgctgttaaagttacaggaatcatgccttgaatccatcacaggcagctaaaaccggcagctcaggacaagtaaaccaaccagcaggacccagaacattcaacccggctaatcttgagacgagaccaagctgctgctgaggacaacaaccctgccctggtcactccggaggctgaccagtctacacacggctgaagcttgaggaaacaagccctgttctaatcacacattggaagctgactagtctacgcacggccaaagcttgaggactcgtcaagcaagtaaatgtaattaaaaatcttaaaactaatagtttttctgtaa

SEQ ID NO: 742771 - DNA, 592 bp, Homo sapiens
attttgttcggtcggccacccccaaatcacaaatcaaattaaaggtaatctccaagaactaggggaattaaccttcaaaaaaaaaatgcaggctttaaaaatagccatgcaagaagtccatgactgggtatgggaaaaaatgcctataagtctaacagacccagcacacccctttaaacctagtaactctgtttcagttaaaaagtaaaacccaayttctctaagacccatgtgggatgggccccatacagtaatcttgtccactgccactgctgttaaagttacaggaatcatgccttgaatccatcacaggcagctaaaaccggcagctcaggacaagtaaaccaaccagcaggacccagaacattcaacccggctaatcttgagacgagaccaagctgctgctgaggacaacaaccctgccctggtcactccggaggctgaccagtctacacacggctgaagcttgaggaaacaagccctgttctaatcacacattggaagctgactagtctacgcacggccaaagcttgaggactcgtcaagcaagtaaatgtaattaaaaatcttaaaactaatagtttttctgtaa

SEQ ID NO: 742772 - DNA, 592 bp, Homo sapiens
attttgttcggtcggccacccccaaatcacaaatcaaattaaaggtaatctccaagaactaggggaattaaccttcaaaaaaaaaatgcaggctttaaaaatagccatgcaagaagtccatgactgggtatgggaaaaaatgcctataagtctaacagacccagcacacccctttaaacctagtaactctgtttcagttaaaaagtaaaacccaacttctctaagacccatgtgggatgggccccatacagtaatcttgtccactgccactgctgttaaagttacaggaatcatgccttgaatccatcacaggcagctaaaaccggcagctcaggacaagtaaaccaaccagcaggacccagaacattcaacccggctaatcytgagacgagaccaagctgctgctgaggacaacaaccctgccctggtcactccggaggctgaccagtctacacacggctgaagcttgaggaaacaagccctgttctaatcacacattggaagctgactagtctacgcacggccaaagcttgaggactcgtcaagcaagtaaatgtaattaaaaatcttaaaactaatagtttttctgtaa

SEQ ID NO: 742773 - DNA, 592 bp, Homo sapiens
attttgttcggtcggccacccccaaatcacaaatcaaattaaaggtaatctccaagaactaggggaattaaccttcaaaaaaaaaatgcaggctttaaaaatagccatgcaagaagtccatgactgggtatgggaaaaaatgcctataagtctaacagacccagcacacccctttaaacctagtaactctgtttcagttaaaaagtaaaacccaacttctctaagacccatgtgggatgggccccatacagtaatcttgtccactgccactgctgttaaagttacaggaatcatgccttgaatccatcacaggcagctaaaaccggcagctcaggacaagtaaaccaaccagcaggacccagaacattcaacccggctaatcttgagacgagaccaagctgctgctgagracaacaaccctgccctggtcactccggaggctgaccagtctacacacggctgaagcttgaggaaacaagccctgttctaatcacacattggaagctgactagtctacgcacggccaaagcttgaggactcgtcaagcaagtaaatgtaattaaaaatcttaaaactaatagtttttctgtaa

SEQ ID NO: 742774 - DNA, 594 bp, Homo sapiens
gcactgtttttcctgcattcacaagttttggtatgttctattttcattttcctttgttttgagatttttaaaatttcccttgtgatttctaatttgacatattggctgtttaagagtatggtccttgtttgtttgtttttgttttttgagacggagttacgctcttgttgtccaggctggagtgcagtggtgcaatctcggctcactgcaacctccacttcctgggttcaagcgattctcctgcctcagcctcccgagtagctgggattacaggcatctgccaccatgcttggctgagggtttcactatgttggccaggctggtctcraactcctgacctcaggtgatccacctgcctcagccacccaaattgctgggattacaggcgtgagccaccacaccggcctaagagtatgttgtttccacatatttgttgataatctaattttcttctgctgttgatctctagttttattttattatgatgggataagttatgctttacgattttagtctttaaaaagtttaaaattttttttcttttccgatatttcttttgaaaaatgtttcatgtgcagttctgaaaaatttgta

SEQ ID NO: 742775 - DNA, 594 bp, Homo sapiens
gcactgtttttcctgcattcacaagttttggtatgttctattttcattttcctttgttttgagatttttaaaatttcccttgtgatttctaatttgacatattggctgtttaagagtatggtccttgtttgtttgtttttgttttttgagacggagttacgctcttgttgtccaggctggagtgcagtggtgcaatctcggctcactgcaacctccacttcctgggttcaagcgattctcctgcctcagcctcccgagtagctgggattacaggcatctgccaccatgcttggctgagggtttcactatgttggccaggctggtctcgaactcctgacctcaggtgatccacctgcctcagccacccaaattgctgggattacaggcrtgagccaccacaccggcctaagagtatgttgtttccacatatttgttgataatctaattttcttctgctgttgatctctagttttattttattatgatgggataagttatgctttacgattttagtctttaaaaagtttaaaattttttttcttttccgatatttcttttgaaaaatgtttcatgtgcagttctgaaaaatttgta

SEQ ID NO: 742776 - DNA, 609 bp, Homo sapiens
tccatctcaaaaaaaatattttgttcgcagtattggtttggtactgtgggcacacagaactctgtacaggaacagcaataacagaagggtgacagggcaaggaagatgagcactgagaagtgaccaccgatttggcaaagtcaaggtcactggaaatggggatgagcagtttcagcaggggacagaagccttccgagagggggtttaagagagcctggggctgtgcrtggtggctcacccctgtaataactttgggaggccgaggcgggtgggttgcttgaagccaggattttgagaccagcctgggcaacatggagagatcctgtctctacaaaaaaaatttaaatattagctgggcatggtgctgcacacctgtagtcccctctactagagaggctgaggtgggagaatcacttgagggacagacattgaggctgcagtgaaccatgattacatctctgcattccagcctgggcgacagagcgagaccttatctcagaaaaaaaaaagaaaaataaattagccaggcatggaggtgcgtccctgtagtcctagctactagggaggctgaggcaggaggatcacttgagcccaggaattcgaggctgc

SEQ ID NO: 742777 - DNA, 697 bp, Homo sapiens
tgatgccatcaccacaacggaggtggctaactagttctttttttcttttttttttttttgagacagagtcttgctttgttacccaggctggagtgcagtggcgcaatctcggctcactgcaacctccgcttcccaggttcaagcaattctcctgcctcagcctcccaagtagctgggattacagatgtgcaccaccacaccaagctaattgttatatttttagtagagacagggtttcaccgtgttgcccaggctggtcacgaactcctgagctcaggcaatccrcccaccttggcttcccaaagcgctgggattaccggcgtgagccaccacgcccgaccggctatttcttctacattcagtcagtccataaggaggggcccgttctgtgcaacatggaattcagaactgagttctcagcttaacatccctagtcgcaccatctttcacaaatcacgtaacctctctaaagtttagtttcaggtctacaagggagagcatacgacattttctccttagaatggctgtgagaattaatcccatgaaattctcagcccattgcttgtcacatagtacgcactcagtaagcaggagcgaataataactatcacaataataggagagaaaatatatctgataatggccaggggccatgtgatgcctggtggcttatttcaaggaaggggccagtggttca

SEQ ID NO: 742778 - DNA, 610 bp, Homo sapiens
attgatttctcactgctctgggggctggaagtccaagatcaaggggttggcagatttagtgtctggtgagggcagcttcctggttcatagagagcaccttcttgctgtgtcctcctcacatggaggaaggggtgtgggaactctctggaggctctttcataagggctggagtcccaatcatgagggctctggccccatgagttaatcacctcccaaagtccctgccttcttctaccgttaccttggtggttagagtttcagcctgtggattttggggggacgcagacattcagttcataacacagtccttctggatttactcactgaaatatcccagtgtcaaatattacgccaaactctctrtttttggcactggggatacgttggtgagcaaaagatacacaaaaaattgttgtcctcatgtggctaagatttcagtgaatgaaaataaagtgtaggggaggaaaagcttttctctgtccctttattgatcttagattcattggctggaggcttgtacattggggtcatgaaagacagattcacaaaatcacagcaaacagaagtttatttatgtgtgcatgcccatgggagcacactgatgcgatgg

SEQ ID NO: 742779 - DNA, 608 bp, Homo sapiens
cccagtctcagggagacccagagacagagcttgtgggagaaggaaaactcaccagcagagagtacaagggagggggcgttgggaaggactggcttgaggaattttcttttaaaaaaattaccactagttggctgggcgyggtggctcacacctgtaatcccagcactttgggaggctgaggcgggcgaatcaggaggtcaggagatcgagaccatcctggctaatgcggtgaaaccccgtctctactaaaaaaaatacaaaaaattagctgggcgtggtggcgggcacctgtagtcccagctactcggaaggctgaggcaggagaatggcgtgaacccgggaggcggagcttgcagtgagctgagatcgcgccactgcactccagcccgggtgacagagcgagactccgtctcaaataataataataataataataataataataataataatagtaataatcacctatagttgaaggggagaaaccccacaagataaccaactttaccaagtttgcatcaactcaggatagaatatcagcggtttttacataggagttttaatttttttcaattttattttatttgtatatttttgagacagggtct

SEQ ID NO: 742780 - DNA, 608 bp, Homo sapiens
cccagtctcagggagacccagagacagagcttgtgggagaaggaaaactcaccagcagagagtacaagggagggggcgttgggaaggactggcttgaggaattttcttttaaaaaaattaccactagttggctgggcgcggtggctcacacctgtaatcccagcactttgggaggctgaggcgggcgaatcaggaggtcaggagatcgagaccatcctggctaatgcggtgaaaccccgtctctactaaaaaaaatacaaaaaattagctgggcgtggtggcgggcacctgtagtcccagctactcggaaggctgaggcaggagaatggcgtgaacccgggaggcggagcttgcagtgagctgagatcgygccactgcactccagcccgggtgacagagcgagactccgtctcaaataataataataataataataataataataataataatagtaataatcacctatagttgaaggggagaaaccccacaagataaccaactttaccaagtttgcatcaactcaggatagaatatcagcggtttttacataggagttttaatttttttcaattttattttatttgtatatttttgagacagggtct

SEQ ID NO: 742781 - DNA, 488 bp, Homo sapiens
gattgtcgtactgggaacaatttgagtgcagcacagatttcatgttagcttatgcatggttttgcccaagagaaacactaagaaaccacaacaacccccgccctgcccccgcaacccaccgaccctgcactcagccgagcagagccatgtaggattgtacacaatgcacacaggcaygtacctcaaacatctacccgcttcctcagtacgagccttgcccattctacactttctgtctgatttcagatcattgttctttcacttcacaaaaactcacaagctgcgacacttcccatattcacaagcaaagttcatgttttactcagggtaaagtttcatgccacatcttctgtggcattgcaagacctgctgaggtgttacagggctgattgtggtgttgtaggatcgtgcagtgtttattgtggtaataaagtgttttgtaattaatcagcaagtataaaaccatgctgtttaagcttctggttaaa

SEQ ID NO: 742782 - DNA, 483 bp, Homo sapiens
accaaagacagaaaaaagaatatttgaacaaagcctccagaagtctgggattatgttaaatgcaaacctaagaataattggtattcctgagaaaaaagaattctaaaggcctggaaaacatatttgggtgcataattgaggaaaacttccctggcctttctagagaactagacatccaaatacaagaagcacaaagaacacccaggaaattaatcacaaaaagatcttcacctaggcacattgtcatcagcttatctaaaattaagatgaaggaaagaatcttaagaackgtgagacagaagcaccaggtaacctatgaaggaaaacctatcagattaacagatttctcaacagaaaccctgcaagccagaagggattggggccctatcttcagcttccttgaacaaaacaagtatcagccaagaattttgtatccagcaaaactaagcattttatatgaaggaaagatagtctttttcagac

SEQ ID NO: 742783 - DNA, 478 bp, Homo sapiens
cttacaaaacaaaaatataagttaaaaagcaaaaacaaaaaacaaaacccaaggtacacaggcaacaaagagaacgatgaatgcaatggtacctcacatctccatcctaacactgaatgtaaacggtccaaacgctccacttaaaagatacagaatgcagaataaaaaactcaccaaccaaccatctgctgccttcaggagactcacctagcacataaagactcacataaagtaaaggggtrcaaaaaggcatttcatgcaaatggacaccaaaagcgagcaggggtaactattcttagatcagatgaaacaaacgttaaagcaacagcagttaaggagacaaaaagggacattatataattatataatccttgtccaacaggaaaatatcaaaattctaaacatacatgtgcctaacactgcaggtcctaaattcataaaacaattgctaatagacctaaaaaatgagatagatagc

SEQ ID NO: 742784 - DNA, 567 bp, Homo sapiens
tcagccccccaaatagctgggaccacaggcatgcgccatcatgcccaggtgatttgtaaaacattttttaatgtagatggggactccctatgttgcccaggctggtcactaactcttgggctcaagcaactctccaccttaacctcccacagtgctgagattacaggtgcaagccactggcctggcccccattgttctctgagcattgtcttacttctggcacaagatgttccaagcccattctgtacattcccagcaccaactgtggagtcagctctttctctgaagattcttggttcctttaatgaggaacggtacttagaaaacaatacctgagcaccagtgtgctgtttctatgataccattgtttctacacttaagtttctttttcatggctgaatagtactccattgtgcrtaagtaccacattttctttatccattcatctgttgatggacacttaggtgcttccaaatcttggctattgtgaatagtgctgcaataaacatggaagtgcagatatctctctgatttactgatttctttggggtatatacctagcagtgg

SEQ ID NO: 742785 - DNA, 627 bp, Homo sapiens
taagaccctctctaccaaaaatttaaaaattagccgggcatgggccgggcgcagtggctcatgcctgtaatcccagcactttgggaggccgaggcaggcggatcacaagatcaggagatcgagaccatcctggctaacggtgaaaccttgtctctactaaaaaatatataaaaaatwagccaggtgtggtggcaggtgcctgtagtcccagctactagcgaggctgaggcaggagaatggtgtgaacccgggaggcggagcttacagtgagccgagatcgcgccactgcactccagcctgggtgacagagcgagactccatctcaaaaaaaaaaaaaaaaaattagccaggcatggtggcatgtgcctgtggtcccagccactcatgagtctgaggtgggagaatgacttgagcctgggaggttgaggctgcagtgagctggtgatcacaccactgcactccagcctgggcaacagagcaagaccctgtctcagaaaacaaaaaaaacaaaaacaaaaaacagaacagcttccagggagccagtgccccctgggctgccaggggaaggagagagctcagccatggagtaggatctcaccccgagtgggcccccaagacctcctttcc

SEQ ID NO: 742786 - DNA, 627 bp, Homo sapiens
taagaccctctctaccaaaaatttaaaaattagccgggcatgggccgggcgcagtggctcatgcctgtaatcccagcactttgggaggccgaggcaggcggatcacaagatcaggagatcgagaccatcctggctaacggtgaaaccttgtctctactaaaaaatatataaaaaataagccaggtgtggtggcrggtgcctgtagtcccagctactagcgaggctgaggcaggagaatggtgtgaacccgggaggcggagcttacagtgagccgagatcgcgccactgcactccagcctgggtgacagagcgagactccatctcaaaaaaaaaaaaaaaaaattagccaggcatggtggcatgtgcctgtggtcccagccactcatgagtctgaggtgggagaatgacttgagcctgggaggttgaggctgcagtgagctggtgatcacaccactgcactccagcctgggcaacagagcaagaccctgtctcagaaaacaaaaaaaacaaaaacaaaaaacagaacagcttccagggagccagtgccccctgggctgccaggggaaggagagagctcagccatggagtaggatctcaccccgagtgggcccccaagacctcctttcc

SEQ ID NO: 742787 - DNA, 627 bp, Homo sapiens
taagaccctctctaccaaaaatttaaaaattagccgggcatgggccgggcgcagtggctcatgcctgtaatcccagcactttgggaggccgaggcaggcggatcacaagatcaggagatcgagaccatcctggctaacggtgaaaccttgtctctactaaaaaatatataaaaaataagccaggtgtggtggcaggygcctgtagtcccagctactagcgaggctgaggcaggagaatggtgtgaacccgggaggcggagcttacagtgagccgagatcgcgccactgcactccagcctgggtgacagagcgagactccatctcaaaaaaaaaaaaaaaaaattagccaggcatggtggcatgtgcctgtggtcccagccactcatgagtctgaggtgggagaatgacttgagcctgggaggttgaggctgcagtgagctggtgatcacaccactgcactccagcctgggcaacagagcaagaccctgtctcagaaaacaaaaaaaacaaaaacaaaaaacagaacagcttccagggagccagtgccccctgggctgccaggggaaggagagagctcagccatggagtaggatctcaccccgagtgggcccccaagacctcctttcc

SEQ ID NO: 742788 - DNA, 621 bp, Homo sapiens
gcttactatatacacccatatttattcaatcagtacttactgggtgcgttattgggtgtatatccctatatctccagtcaacatttattgaatgctttctgtatatgcttatgttcatccaactaacttttagtaggtacctattgtatacctctataattattcgactaacatgtttgggtacccactgtattgttggcatyggggatatagccatgaatagagagacccagtccctgccttcagagttcactagcggaggagagacctctctactaggaacgtataacccagacagagtagtgccatgatgaggtgctggtaattgtccctcacacggtcctcagtgtcccagccaccatggctccttacaccaggacattgtgggcacccgaaagaggtgcctgcccaggcctcaggggtcagggaggacttcctggaggaagtgttggctaagctgcaatcccagctactccggaggctgaggcaggagaatcacttgaacctgggaggcagaggttgcagtgagccaagatcacaccactgcactccagcatgggtgacagagcgagactccatctcaaaaaaaaaaaataagcttctatatatggacacctacta

SEQ ID NO: 742789 - DNA, 548 bp, Homo sapiens
tgtagccgcccagagccaccccgcgagcactttggacaaaggatcttggtcaagtgtctgtcgctcaagtgagtatactgacatgtctctcttcttagatgcgtgaagcaaccacatgggttccggcggggtacacactacatgagtagtgccattaccgtgtgcggccctgtcacctatgtggccacctatgtatgggcttttatgggggaaggaagacttcctttttcattatcccgagtctccaatccttaagtgccaattgtatgccaggatcagttctcagcctttcatgtatatgaacccgtcttatattcaccacaacctcatgaagtgggcacaggtggggaaactgaggcacagagtggtracatgacgccaagaccatacaacttgtaaggctggagtctggcgcttgcctgctctgctgctgggatccagggtttggccgggaggctttggggcgggtgctagtgaccctgggcctggctctcagccgcccagggcccctccacaccagcccccggggagcagcagaagtgcgtggg

SEQ ID NO: 742790 - DNA, 623 bp, Homo sapiens
catgatatcttctaggttaactgctattgctgatctctgcatgtaggccaagctcactatgggaggaatttcatttatagtttaaagcaaagacgatcatggtctcttcccaacactcacccccaaggagataaggagggcatcccacgagcaacaccacgtgttcaagatgcatccctggaacctgaacacgggcagaagattgcacarcctccctggacccttactggagcaggctgtccgcggtcctcagtcactttttttttttttttttgagatggagtctcgctctgtcacccaggctggagtgcagtggcttgatctcagcttattgcagcctctgcctcccgggttcaagcaattctcccacctcagcctctcaagtagctgggattacaggggtgagccaccatgcccggctaatcggctaatttttgcatttttagtagagacagagtttcaccatgttggccaggctggtctcaaactcctgacctcaggtgatccatccgccttggcctcccaaagtactgggattacaggcgtgagccaccgcacctggcccttggtcactttttcatcccaacctcccccgcttcccctttcccttaacatcaaaacag

SEQ ID NO: 742791 - DNA, 623 bp, Homo sapiens
catgatatcttctaggttaactgctattgctgatctctgcatgtaggccaagctcactatgggaggaatttcatttatagtttaaagcaaagacgatcatggtctcttcccaacactcacccccaaggagataaggagggcatcccacgagcaacaccacgtgttcaagatgcatccctggaacctgaacacgggcagaagattgcacaacctccctggacccttactggagcaggctgtccgcggtcctcagtcactttttttttttttttttgagatggagtctcgctctgtcaccsaggctggagtgcagtggcttgatctcagcttattgcagcctctgcctcccgggttcaagcaattctcccacctcagcctctcaagtagctgggattacaggggtgagccaccatgcccggctaatcggctaatttttgcatttttagtagagacagagtttcaccatgttggccaggctggtctcaaactcctgacctcaggtgatccatccgccttggcctcccaaagtactgggattacaggcgtgagccaccgcacctggcccttggtcactttttcatcccaacctcccccgcttcccctttcccttaacatcaaaacag

SEQ ID NO: 742792 - DNA, 616 bp, Homo sapiens
gcatgtatctttataatagaatgatttatattcctttgggtaaatacccagtaatgggattgctgggtcaaatgatatttcttgttctaggtctttgaggaatcaccacactgtttcccaaaatggttgaactaatttatattcccaccaacactgtaaaaacacttctatttccccacagcctttccagcatctattgtttcttgactttttaataatcaccattctgactggcgtgagatggtatctcattgaggttttgatttgcattctctaatgatcagtgatgttgagctttatatatatatacatatatatacatgtttgttggctgcataaatgttttcttttgagaagtgtctgttcatgtcctttgcccagtctttcatgaggttgtttttttcttgtaaatttgyttaagttccttgtagtttctggatatcagacctttgtcagatggatagattgcaaaattttctcccattctataggttgtctgttcactctgatgatagtttcttttgctgcacagaagctctttagtttaattagatcccatttgtcaatttttgcttttgttgcaattgcttttgacactttcgtcatgaaatctttg

SEQ ID NO: 742793 - DNA, 649 bp, Homo sapiens
cactttggcaggctgaggcaggaggatcccttgagtccagagttcaagaccagcctggcaatatagggagacactgcctctattattattgttattatagtagagcctgagccacaacacctggcctatctctattatattaaattaaaaattcaaaacaatgaaatggccaggcacaggggctcatgcctttattggcagcactttggaaggccgaggtgggtggatcacctgaggtcaggagttcgagaccagcctgaccaacagggtgaaaccccgtctctactaaaaatacaaaaattagccgggcacagtggcatatgcctgtaatcccagctagtcagggagctgagacaggagaatcgcttgaacccgggaggtggaggttgtggtgagcagagatcactccatcgcactccagcgtgggtgacagagcaaggctctatcgcaraaaaaaaaaaaaaaaaaaaaaaaagtcagtggaccttagaggattaaataatttgcccaagattactcttactcatcttagaactactaaatagaggaactaaaataagaaactaggtcaatgggcttcaagacctacactgagatacaatactgcccttgcaatgaaggctcaatccctccacagccttgttaacct

SEQ ID NO: 742794 - DNA, 539 bp, Homo sapiens
cctttgccacctagaataatcaggaaaggtgacccatgccctgtgcctccttaacagactttcaggtacttgggaatttgaaacaaatctccttgatgcacaaagtaaccttttcttcccccattgtaccccaggttgaaaatmgatgactttaatgatgaactcaataagctgctggaagaaatagaagaaaaaaacccacaactgattattgatactgagaaacatcatccctgggcagaaaggccttcttctcatgacttcatgatctgaatccccccgagtcattcattctccatgaagtcatcgattttccaggtgttggtgaactgcctgtgactcctctcctccccggcccctacccctcagggataatgagttcattgctgggctagatgttttagccatgattctgcctctgttttatacctgcacacatccttatctttgttacatatgaaatatctgtatcacgggtatattgagagaaataaaggtgagagcattcacaaatgaagctgttacttaataatgggctt

SEQ ID NO: 742795 - DNA, 415 bp, Homo sapiens
gcaaaaatttttgggggtggtatggagagataatgggtgatgtttctcaaggctgctttgagcaggattaggggcggcgtgggaacctaaagtgggagcgattaagctgaaggaagattttgtggtaaggggtgacattgtgggattgttaaaagaaacatttgtcatttagaatwattggtgatggcctggatacagttttgtatgaattgaaaaactaaagggaataaggaaaggagaaaaacaggtattaaaggtctaagaattgggacgactcaggacatctaattagaaagtgcctaaggaggttcagcatagccttgccagcaaagattatttatttattttaagagttaacagtggcggtatggggatagtaccaggagataccagctgtgctggcttggagaaacag

SEQ ID NO: 742796 - DNA, 612 bp, Homo sapiens
cctctggccagcctggcgttgcaccgtttgtccgcctgctggggcctggtctgtgttcccgtgctcccataaactccctgatgtcactaggaaaatacgcatcaaaaccacagtgagatatgacttcacaccttctggaatggctgtattttttttttttcttttgagacaaagtctcgttctttttgcccaggttggagtgcagtggcgccatctcggcccactacaacctccacctcccaggttcaagcgattctcctgcctcagcctcccaagtggctgggattataggtatgtaccacaccaggctaatttttgtatttttagtagagatggggtttcactgtgttggccaggctggtcttgaactcctgacctcagttgatccacctgcctcggtctcccaaagtgctgggattacaggcatgagccactgcacccgaccggctataattttttttaatggaaaayagcagatattggtgagtatgcagagaaattgaactgcgcgtgcattgctggcagggacgtaacatggcgcccctgctgtggaaaacagttccagcagctcctccagaagttaaacgtgggattgccataaaatccagcaat

SEQ ID NO: 742797 - DNA, 607 bp, Homo sapiens
agtgagtcaagatcgcgccactgcactccagcctgggcaacagtgagactccatcccaaaaagcaaaaaccaaaaaggccgggtgcaatggctcacctctgtaatcccaccactttgggaggccgaggcaggtggctcacctgaggtcaggagttcaagactagcctggccaacatggtgaaacccctctctactaaaaaattagccaggcrtggtggcaggcatctgtaattccagctacttgggaggccaaggtgggagaatcgcttgaacccaggaggtgggggttgcagtgagccaagatcgcaccactgcactccagcctgggctacaagaacaaaactccgtctcaaaaaaaaaaaaagaaaaagaaaaaaattagctggacatgttggcatgcctctaggcccagctactcatgaggctgaggcaggagaattgcttgaacctgagaggcagaggttgcggtgagccaagattgcgccactgcactccagcctgaatgacagagcacgactccatctcaaaaaaacaaaaacaaaaaacaaaacaaaacaaaacaaaaaacccatacctgagtatcttcaaggatccagttctttgtctt

SEQ ID NO: 742798 - DNA, 607 bp, Homo sapiens
agtgagtcaagatcgcgccactgcactccagcctgggcaacagtgagactccatcccaaaaagcaaaaaccaaaaaggccgggtgcaatggctcacctctgtaatcccaccactttgggaggccgaggcaggtggctcacctgaggtcaggagttcaagactagcctggccaacatggtgaaacccctctctactaaaaaattagccaggcatggtggcaggcatctgtaattccagctacttgggaggccaaggtgggagaatcgcttgaacccaggaggtgggggttgcagtgagccaagatcgcaccactgcactccagcctgggctacaagaacaaaactccrtctcaaaaaaaaaaaaagaaaaagaaaaaaattagctggacatgttggcatgcctctaggcccagctactcatgaggctgaggcaggagaattgcttgaacctgagaggcagaggttgcggtgagccaagattgcgccactgcactccagcctgaatgacagagcacgactccatctcaaaaaaacaaaaacaaaaaacaaaacaaaacaaaacaaaaaacccatacctgagtatcttcaaggatccagttctttgtctt

SEQ ID NO: 742799 - DNA, 607 bp, Homo sapiens
agtgagtcaagatcgcgccactgcactccagcctgggcaacagtgagactccatcccaaaaagcaaaaaccaaaaaggccgggtgcaatggctcacctctgtaatcccaccactttgggaggccgaggcaggtggctcacctgaggtcaggagttcaagactagcctggccaacatggtgaaacccctctctactaaaaaattagccaggcatggtggcaggcatctgtaattccagctacttgggaggccaaggtgggagaatcgcttgaacccaggaggtgggggttgcagtgagccaagatcgcaccactgcactccagcctgggctacaagaacaaaactccgtctcaaaaaaaaaaaaagaaaaagaaaaaaattagctggacatgttggcatgcctctaggcccagctactcatgaggctgaggcakgagaattgcttgaacctgagaggcagaggttgcggtgagccaagattgcgccactgcactccagcctgaatgacagagcacgactccatctcaaaaaaacaaaaacaaaaaacaaaacaaaacaaaacaaaaaacccatacctgagtatcttcaaggatccagttctttgtctt

SEQ ID NO: 742800 - DNA, 607 bp, Homo sapiens
agtgagtcaagatcgcgccactgcactccagcctgggcaacagtgagactccatcccaaaaagcaaaaaccaaaaaggccgggtgcaatggctcacctctgtaatcccaccactttgggaggccgaggcaggtggctcacctgaggtcaggagttcaagactagcctggccaacatggtgaaacccctctctactaaaaaattagccaggcatggtggcaggcatctgtaattccagctacttgggaggccaaggtgggagaatcgcttgaacccaggaggtgggggttgcagtgagccaagatcgcaccactgcactccagcctgggctacaagaacaaaactccgtctcaaaaaaaaaaaaagaaaaagaaaaaaattagctggacatgttggcatgcctctaggcccagctactcatgaggctgaggcaggagaattgcttgaacctgrgaggcagaggttgcggtgagccaagattgcgccactgcactccagcctgaatgacagagcacgactccatctcaaaaaaacaaaaacaaaaaacaaaacaaaacaaaacaaaaaacccatacctgagtatcttcaaggatccagttctttgtctt

SEQ ID NO: 742801 - DNA, 571 bp, Homo sapiens
caggctgagaggcctaggccagtggatccctaggggccaggagtttgataccagcctaggcaacatagcaagatgccatctcttcaaaaatatttaataattagccatgcataggctgggcgtggtagctcatgcctgtagtcccagcaatttgggaagccgaggcgggtggatcacctgaggtcaggagttggagaccagactggccaacgtggtgaaactctgtctctactaaacatacaaaaaattagccaggtgtggtggcaggtgcctgtaatcccagctactcgggaggctgagacaggacaatcayttgaactagggaggtggagggtgagtgaggcacgatcacgccattgcactccagcctgggtgacaagagcaagactgtctcaaaaacaaaaacaaaaaaattagccatacatgatgggctgcacctgtaatcccagctattcaggaggctgaggtgggaggatcacctgagctcaggagtttgaggctgcagtgagctgtgactggccatctcactccagcctaggccacagagtgagacccagtctcaaaaaaataa

SEQ ID NO: 742802 - DNA, 457 bp, Homo sapiens
aggggctgggcatggtggttcacacttgtaattccaacacttcgggaggccgaggcagacagatcacttgaggtcaggagttcgagaccagcctggccaacgtgacaaaaccctgcctctactaaaaatacaaaaattatccaggcgtggtggcaggcacctgtaatatcagctacttgggaggctgaggcaggagaattacttgaacccaggaggcggaggttgcagtgaaccragatcctgccactggactccagtctgagtgacagagcgagactgcgtctcaaaaaaaaaaaaaaaaaaaaagaaaaagaaaaaaagggccgggcacaatggctcacgcctgtagtcccagcactttgggggcccaaggtggggggatcacttgaggtcaggagttcaagaccagcctggccaagatggtgcaagaccctgtctctacgaaaaatacaaaaat

SEQ ID NO: 742803 - DNA, 457 bp, Homo sapiens
aggggctgggcatggtggttcacacttgtaattccaacacttcgggaggccgaggcagacagatcacttgaggtcaggagttcgagaccagcctggccaacgtgacaaaaccctgcctctactaaaaatacaaaaattatccaggcgtggtggcaggcacctgtaatatcagctacttgggaggctgaggcaggagaattacttgaacccaggaggcggaggttgcagtgaaccaagatcctgccactggactccagtctgagtgacagagcgagactscgtctcaaaaaaaaaaaaaaaaaaaaagaaaaagaaaaaaagggccgggcacaatggctcacgcctgtagtcccagcactttgggggcccaaggtggggggatcacttgaggtcaggagttcaagaccagcctggccaagatggtgcaagaccctgtctctacgaaaaatacaaaaat

SEQ ID NO: 742804 - DNA, 651 bp, Homo sapiens
ctttcctcattctattgctgaccatctagttattaacataaccaagtcaattttgcctcaaactattgcatttaatgcttgccttgttataccctgtggggactctcaagtgaaagacagctctccacttcagaaaagtacctctgtcccccctgactctcctcagactgggcattagtaaattaggactatttaatctggggaaattttgataaagactccagtgtcaaccaggagtcttgctccccaaygtagagcttttatgctgtagttggtccaacattctgtggaccactaaagagcaagtgtggactgccccaaatggtttttgtaattccctaaaatcatgcattcattttactagaggatcatataagttaaagacttaaaacgaactttggcaattaagacaggataccaacatgcaaatgcctggttggaatggatcaaatattccatcccacgttaaacaaaagcaattgttatgcttgtgcacatggcaggccagaggcccagattgtcccctttccactaaggtagtcctccagttgaccaggcatgggctgcatggtagctctttttcaggattctacagcctggagtaataagtcgtgccaagctctccctgctatatcccaaagtccggcaccc

SEQ ID NO: 742805 - DNA, 647 bp, Homo sapiens
cctgagacctgcccagtgcactgagggtgcacctggggcctgtcccacctgatgtccccaagtgccccgcaaggtctgatctctcagcctccatctacctcccccggggggtgggggcttgctttgagctgtccccacctttctggatagaactaatgtacttcttacatatattgattgatgtctcatgtctccttaaaatgtataaaagcaagctgtgggccaggcgcagtggctcacgcctgtaatcccagcactgtgggaggccgaggctggtggatcacgaggtcaggagatcgagaccatcctggctaacacatagaaactccatctctactaaaaagtacaaaaaattagccaggcgtggtggcgggcgcctgtagtcccagctacctgggaggctgaggcaggacaatggtgtgaacccgggaggtggagcttgcagtgagccgagatcgcaccactgcactccagcctgggcgacagagcgagaygccgtctcaaaaaaaaaaaaaaattatctgggcatggtggtgggtgcctgtaatcccagcctttcaggaggctgaggcatgacaattgcttgagtctgggaggcagaggttgcagtgaactgagatcgcgccactgcactccagcccgggtga

SEQ ID NO: 742806 - DNA, 528 bp, Homo sapiens
taggaagtaccattctagacacagaaactggcaaacacttcatgatgaagctaccaaaagcaattgcaacaaaagcaaaaattgacaatgggacctatttgaactaaagagcttcttcacagcaaaggaaactattaacagagtaaacagacaacctacagaataaaaaaaatttgcaaactttgcctctgacaaaagtctaatatccagaatttattaagaacttaaacaagtttacaagaaaaaaaaaatctcattaaaaaataggccaaaaaaacatgaatagatgcttttcaaaagaacatatacatgtggctagcaagcatatgaaaaaaaaaaagctcatcrctaatcattagagaaattaagagaaaccacaatgagataccacatcacaccagtcagaatggctatttttaaaaagtcaaaaaataacagatgctggcaaggttgcagagaaaagggaatgcttatactctacctcataattgggtatatacccaaagaaatataaattattgtattata

SEQ ID NO: 742807 - DNA, 633 bp, Homo sapiens
ggatgcagagccaggtggatcctacctagaatctgcagataaggtctggcctctgcctgggatttacaaaaaagggctggtctttggattgtgaatgtacagagaactaacaaatggcattttctgccttgtgagatgtcagcaaagacagcttacagcccccatttgggaatgtggctctgtgagatgtttcacatcttgttcattgacctgctacagtgatgtgagaggttccaggaggaaatagaatctgatggcagaatctgtaagtgtaaataagcatctttggagtgagagatcaaggccacaaagtatccagagccawgaccacaactatatttacctgtaaaatgtgatactggagtagagtatttttgttctttcttttacccaagagctagcaaatcagaacgggtgatccaagttctggagctccaccagtgcagttccattttctatttagaaacagcccgagtctgcagcctggcttatcattgggccatcagcccaatgatatctaataatctcacaataacctaggtgtctttgaggcatttgaggatgtccagaacagaattgtgtcaggttgacaaaaatggttaattctgcttctgtctcagtgtaagagaaatg

SEQ ID NO: 742808 - DNA, 635 bp, Homo sapiens
tgattcacgtgcaaattaatttttcagcaagtggctgggagagcaataaaagggagcctccccgtggcaccagcctggcctcacctaaagccctgggtgggtgtttctgctgaccttggcccagtagcaagtcctgacagtgacccagactgagcctgggtagcagtcgcagcccctaagataggaagagcaggcagaagggaggtcggctgtgccaaggagggctttctggagaacagaggatttttcaaagctcctctctcagcagaagctgctggcagggtctgcgggccagggctgaaacggaggcccagccctgctcttgttcctgcccggggtctcctttctcttccaggaaattcatgctcttgcatgcccaggcacacacagccatgcaaatgcaggacrtgtgcacacacgcaggtacacaaacacacacacacacacacacacacacacacgggatacttcctggagaatgaggattgggttgctttatttactgatgtatcctgccttccaaatccattatgttggtgcaattacttttgcaatcacccgcaattacttttgcaccaacctaatagaaagtgcctgagatatatgagttgctcagtcaatattgttcaatgaat

SEQ ID NO: 742809 - DNA, 613 bp, Homo sapiens
acctccagtgtgggaagctcactgctttactgcatgtgggctgtatttgtgtaagaggaaagggtagggtgagatgactcattagagctgtaataaaatgaaaccaaatgggcgtggtaactggccaggagagatccacactgccggtgccctagccacccattcattcaggcacgaatgaagcaaacacatattccctgagcagttctgtgcctgccgtgggcttggcagtgaccatgactgacggccctgctctcctgtggctctcagtccagtgggggaggcagacttgtccccagacagtgatgacccagagtgagcaggtctgagacagggaaacccagggtggggcatctggcctactsttggagggaatcagggagggcttcctggaggaagagacatctgagctaggacctggaggatgaggagttactttccagggcagtgaagaaggaaagcagtctcttggcaaagggaatagtacatacaaaagcccacgcgtgacacagaacttggcatttggagaaatgcagggaggcagggtggccaaatcattacagagtttaacaggagcactgatgagggatgaggctggagcagtgcatggggc

SEQ ID NO: 742810 - DNA, 624 bp, Homo sapiens
ctgttttcttctgtccctctgcctccgagaatctctcaattacccatcagcactccatcatccaggaatttctctcaaccccttcctgacattgtttatatgattttactccctgctgggtaagaaaggacagtctgggacatgtccttaaatttatttctgaactagctccctggggamcctacctcctaatgaaggaagttgggttgcttgagaacgggtatggttttattggccaagatgccaggctatcaacctctgcaggaaccttgtgccaccccctgccctgctctgggcctcagtttccttgtcagttacttgggaaagggttggattcgctgcttctgggggtgaaatgcaccctcaggctggatttagcattaataatgcaatcatgacctgtatagtaagaagggctatttactgagcgcttaactatatgaatggcaccattctaaccacttcccatggtccactgttttacactcaagattagcatagaagcctcacaacaacccaaagaggcaactgctattaggattcccatttggtagacggtaatactgaagtccagagaggttatgccactcatctaatattacacagcgaggaaatggcagagct

SEQ ID NO: 742811 - DNA, 530 bp, Homo sapiens
tgtgcaaaaatcacaaacattcctatacacaaataacagacaaacagagagccaaatcataagtgaactcccattcacaattgctacaaagagaataaaatacctaggaatacatcttccaaggaatgtgaaggacctcttcaaggagaactataagccactgctcaatgaaataaaagaggacacaaacaaatggaagtacattccatgctcatggataggaagaatcaatattgtgaaaatggccatactgcccaaggtaatttatagattcaatgtcatccccatcaagctacctctgactttcttcacagaattggaaaaaaaaactactttaaagttcayatggaacgaaaaaagagcccacattgccaagacaatcccaagccaagagaacaaagctggaggcatcacactacctgatttcaaactgtactacaaggctacagtaaccaaaacagcatgatactagtatgaaaacagagatatagaccaatggaacagaacagagcctcagaaataacaccaca

SEQ ID NO: 742812 - DNA, 530 bp, Homo sapiens
tgtgcaaaaatcacaaacattcctatacacaaataacagacaaacagagagccaaatcataagtgaactcccattcacaattgctacaaagagaataaaatacctaggaatacatcttccaaggaatgtgaaggacctcttcaaggagaactataagccactgctcaatgaaataaaagaggacacaaacaaatggaagtacattccatgctcatggataggaagaatcaatattgtgaaaatggccatactgcccaaggtaatttatagattcaatgtcatccccatcaagctacctctgactttcttcacagaattggaaaaaaaaactactttaaagttcatatggaaygaaaaaagagcccacattgccaagacaatcccaagccaagagaacaaagctggaggcatcacactacctgatttcaaactgtactacaaggctacagtaaccaaaacagcatgatactagtatgaaaacagagatatagaccaatggaacagaacagagcctcagaaataacaccaca

SEQ ID NO: 742813 - DNA, 603 bp, Homo sapiens
agacaatcccaagccaagagaacaaagctggaggcatcacactacctgatttcaaactgtactacaaggctacagtaaccaaaacagcatgatactagtatgaaaacagagatatagaccaatggaacagaacagagcctcagaaataacaccacacatctaccaccayctgatctttgacaaacctgacaaaaataagaaatggggaaaggattccctatttaataaatggtgctgggaaaactggctagccatatgtagaaagctgaaactggatcccttccttacactttatacaaaaattaattcaaggtggattaaagacttaagtgttagacctaaaaccataaaaaccctagaagaaaacctaggcaataccactcaggacataggaatgggcaaggacttcatgactaaaacaccgaaagcaatggcaacaaaagccaaaattgacaagtgagatctaattaaactaaagagcttctgcacagcaaaagaaactaccatcagagtgaacaggcaacctacagaatgggagaaaagttttaaaatctacccatctgacaaagggctaatatctagaatctacaaagaacttaaaca

SEQ ID NO: 742814 - DNA, 480 bp, Homo sapiens
ttttctacatttaatgaacttgcaataagtttgtaaaatatattggcttctgtttcacgtataaatctcactgaaaggcactatccagtagctatttttctgagtcatttttgggattttctgttgcttgagtcccaactaacgttatttgaatcttagtgatttctttttctttttctttttctttttgagatggatttttgctcttsttgcccaggctggagtacagtggtgcgatcttggctcaccacaacctccacctcccaggttcaaatgatgctcctgcctcagcctcccgagtagctgggactacaggcaggtgccaccacgctgggctaattgtgtatttttagtagagtcagggtttctccatattggtcaggctggtctcgaactcctgacctcaggtgatctgcctgccttggcctcccaaagtgctaggattacagacatgagccaccatgcctggccgaatcttag

SEQ ID NO: 742815 - DNA, 486 bp, Homo sapiens
actgcaacctctgcttcccgggttcaagcaactctcctgccttggccccccgaatagctaggattaccggcacctgccaccatacccagctaatttctgtatttttagttgagacggggtttcaccatgttggccaggctggtctagaactcctgacctcaggtgatccacccaccttggtctcccaaagtgctgggattacaggcgtgagctaccrcaccggaccacatcactcagttttcaaaaagcagaaaatattctaacaactacacagataaatcttgatgatattttgcaaagtgacataagccagccacaaacagacagagattgtatgagatatataaagaagttacaccactaggaagagaaaacagagtggtgtttcaaaagtgccataatactggaaaaattggtagttgtataatgtgtattgagatttagctttgcaagataaaaacacttcagcaattatgttgcataaca

SEQ ID NO: 742816 - DNA, 603 bp, Homo sapiens
acagtagcagaggtactgctctttgcagagcagggctaccccataggcattgagcacaaagtagcagctcagggccagttctgtagtcatatttagtcccattttcaattacatgcaaattaaggggtgggttattcagaaatttctagaaaagggctgataaattttgggtgttgtcatggcagtggcaaactgtcatggtgctggtgtgcacrtcttatggagatgtgcttttggtgccttttccctgttccagctgtcttcaatctagtccagagttaaaccccgcctcctccttcactaggatctttagaaaatagtctcatgaaagagaatctgattcatctagctcaccttttcttcttcagccacatcattggtcactgaatggccaatcatttgatggcatcccagtcaggtgaccaaatcttagccaatcagtggctacttggagtcatgtgatatgaaacatggccacttagtgctatgggaaggcaattctccacaaggggcgtgggtgtgtgagataccttgcattcatcaatctccctgatgctttatgacagttcccccataccagaaatcctgaggaagtctttcaag

SEQ ID NO: 742817 - DNA, 547 bp, Homo sapiens
cgtgagccatcgtgcccagctagacgtcttccttttttttttttttttgagacggagtctcactctgtcgcccaggctggagtgcagtggtgcgatctcagctcactgcaagctccgcctcctcccgggttcacgccattctcctgcctcagcctcctgagtagctgggactacaggcacctgccaccatgcgcagctaattttttgtatttttagtagagacggggtttcaccatgttagacaggatggtctcsatctcctgagtttgtgatctgcccgccttggcctcccaaagtgctgggattacaggtgtgagtcaccgcgcctggccttttttttttttttttttactggatttctttttctcctgattttcggcctcagctcctagagtggcctcagctaggtaaccaacgggagtcgacttatctatgccaggcctgcagtttcacatctgtgacgggatgggacaaatgacaccgtggtattcgatgacagctcccaggtacttcaaggttggcccttactcattcagggggtatgttt

SEQ ID NO: 742818 - DNA, 600 bp, Homo sapiens
cctgtttctcttatccttcacgaggaaaggaagaaaccaaaatcccaacccaagccattgcatgggcactgtccgaagcctgttctgcctcccagatgaataaatatataaaacaaagctctggcaggcaatgctttggtcttctctgtctttgaataaaacaaggcyggcgaggtctcaggaagggttctgggcagggacgggactccaggcagatgttcacgccacgtcatcctccagactgaccatctgtctctgccaacaaatggtaaacagcggaaactatcagtccagcattcaggaaacacggctggaggccacctacttctcacctcctgggcctggcagcctcccccagcctgatccccaagcatgttcccccaggagccgccagagggagacggtgagtaccggattcagtcacttcccaccgctctcagggcaaaagccaaagtcctccccagtggcccacaaggctctgcacaacctgcctggtagcctcctgcctttttacccctctctctgtttgctccagctacaacggcctcaaacccaacaggcacggtccagcctcagggccttcgcacaggctgttctcct

SEQ ID NO: 742819 - DNA, 600 bp, Homo sapiens
cctgtttctcttatccttcacgaggaaaggaagaaaccaaaatcccaacccaagccattgcatgggcactgtccgaagcctgttctgcctcccagatgaataaatatataaaacaaagctctggcaggcaatgctttggtcttctctgtctttgaataaaacaaggccggcgaggtctcaggaagggttctgggcagggacgggactccaggcagatgttcacgccacgtcatcctccagactgaccatctgtctctgccaacaaatggtaaacagcggaaactatcagtccagcattcaggaaacacggctggaggccacctacttctcacctyctgggcctggcagcctcccccagcctgatccccaagcatgttcccccaggagccgccagagggagacggtgagtaccggattcagtcacttcccaccgctctcagggcaaaagccaaagtcctccccagtggcccacaaggctctgcacaacctgcctggtagcctcctgcctttttacccctctctctgtttgctccagctacaacggcctcaaacccaacaggcacggtccagcctcagggccttcgcacaggctgttctcct

SEQ ID NO: 742820 - DNA, 600 bp, Homo sapiens
cctgtttctcttatccttcacgaggaaaggaagaaaccaaaatcccaacccaagccattgcatgggcactgtccgaagcctgttctgcctcccagatgaataaatatataaaacaaagctctggcaggcaatgctttggtcttctctgtctttgaataaaacaaggccggcgaggtctcaggaagggttctgggcagggacgggactccaggcagatgttcacgccacgtcatcctccagactgaccatctgtctctgccaacaaatggtaaacagcggaaactatcagtccagcattcaggaaacacggctggaggccacctacttctcacctcctgggcctggcagcctcccccagcctgatccccaagcatgttcccccaggagccgccagagggagayggtgagtaccggattcagtcacttcccaccgctctcagggcaaaagccaaagtcctccccagtggcccacaaggctctgcacaacctgcctggtagcctcctgcctttttacccctctctctgtttgctccagctacaacggcctcaaacccaacaggcacggtccagcctcagggccttcgcacaggctgttctcct

SEQ ID NO: 742821 - DNA, 600 bp, Homo sapiens
cctgtttctcttatccttcacgaggaaaggaagaaaccaaaatcccaacccaagccattgcatgggcactgtccgaagcctgttctgcctcccagatgaataaatatataaaacaaagctctggcaggcaatgctttggtcttctctgtctttgaataaaacaaggccggcgaggtctcaggaagggttctgggcagggacgggactccaggcagatgttcacgccacgtcatcctccagactgaccatctgtctctgccaacaaatggtaaacagcggaaactatcagtccagcattcaggaaacacggctggaggccacctacttctcacctcctgggcctggcagcctcccccagcctgatccccaagcatgttcccccaggagccgccagagggagacggtgagtaccggattcagtcacttcccacygctctcagggcaaaagccaaagtcctccccagtggcccacaaggctctgcacaacctgcctggtagcctcctgcctttttacccctctctctgtttgctccagctacaacggcctcaaacccaacaggcacggtccagcctcagggccttcgcacaggctgttctcct

SEQ ID NO: 742822 - DNA, 621 bp, Homo sapiens
tcctggcctgtaggttgaactgcacagtccaatataaaacctgccaggccgggcgcggtggctcacgcctgtaatcccagcactttgggaggccgaggcgggcggatcaccaggtcaggagatctagaccatcctggctaacacggtgaaatcccgtctctactaaaaatacaaaaaattaaccgggcatggtggcgggcgcctgtagtcccagctactcaggaggctgaggcaggagaatggcgtgaacccgggaggtgragcttgcagtaagctgagatcatgccactgcactccagcctgggtggcagagcgagactctgtctcaaaacaaaacaaaacaaaacaaaacaaaacaaaacaaaacctgccaaagaccaggcacagtggctcacgcctgtaatctttgcactttggtaggctgaggcaggcagatcacttgaggtcaggagtttgagaccagcctggccaacatggtgaaaccctgtctctactaaaaatacaaaaattagccaggcatggtggtgcacgcctgtaatcccagctactcgggaggctgaggcaggagaatcgcttgaacccgggacgtggaggttgcagtgagccgagatggtgccattg

SEQ ID NO: 742823 - DNA, 617 bp, Homo sapiens
cagccttacagctccagcccccgcgtgatccgcgtttctcaggcctctgggttactgagaggctgttgggggtggaggtgcccagcggttgttcactgggaagaagaactcaccaccagcgtcccttcatttttcccaaggagtcacaggcagaggtttttccgaacaggctcagcagccagaagtccccgcctgggcttccaactgcctacagaggtagctgcagccctcccctcaggctggcctgtgtcactgccctattctatgtccaggcctcccggcacccagccgctgtccccatgagtgcccaggggagctcccagtttagcagggggagagggttccccagtgcagagtgggtgggaagcccggggcctgtgacctgtgtcacagggcatytgaggatgttgttcctggaaggcaagtgtgtggccacggagctgactttgggctctcatttaggaggctgactctgaaggtcatagtggctcagcagtgaaagaggaggatccccacagtgtgtggtctgtgtggtcactcagggatgtgacctttctgaccctcctcttctttgtcttgggttgggggtcccggccatatccccttcccagggatgt

SEQ ID NO: 742824 - DNA, 493 bp, Homo sapiens
tgcacctggtggcaggtggttgacatagtgtgattcatttcaccctccagacagccctaagggaccaatattatttattttttattttttatttttttgagacggactcttgctctgtcgcccaggcaggagtgcagtggtgtgatctcagttcactgcaagctccacctcccgggttcacgccattctcctgcctcagcctcccgagtagctgggactacaggcacctgccacctcgcccrctaattttttgtatttttagtagagatggggtttcaccatgttagctaggatggtctcgatctcctgacctcctgatccgcccgcctcggcctcccaaagtgctgggattataggcgtgagccaccacgcccggcagggaccacgattattattatccccatttacagacaggcaaactgaggcacagctagagtagggagacacgcaggaaacacacaaaccggccaaaatataaaatcattccaaatca

SEQ ID NO: 742825 - DNA, 493 bp, Homo sapiens
tgcacctggtggcaggtggttgacatagtgtgattcatttcaccctccagacagccctaagggaccaatattatttattttttattttttatttttttgagacggactcttgctctgtcgcccaggcaggagtgcagtggtgtgatctcagttcactgcaagctccacctcccgggttcacgccattctcctgcctcagcctcccgagtagctgggactacaggcacctgccacctcgcccgctaattttttgtatttttagtaragatggggtttcaccatgttagctaggatggtctcgatctcctgacctcctgatccgcccgcctcggcctcccaaagtgctgggattataggcgtgagccaccacgcccggcagggaccacgattattattatccccatttacagacaggcaaactgaggcacagctagagtagggagacacgcaggaaacacacaaaccggccaaaatataaaatcattccaaatca

SEQ ID NO: 742826 - DNA, 562 bp, Homo sapiens
tcgtggaagcttgtgaatggctgctgaatcccaggtgtagagtcttagaactgccacccaatcatagagtcagaaagaaaggagtctcaggatccccctactccaattcctgcatcattttcctggcatggttttacagattgtcttggttacctcctgtgatggggacctcactaccacttagggcaatccattcaggctttggacagttccacaggtgttgaaaaatccttccttaagaattgagcatgcatttttcactttggaattctctctgatcccagaacctgcccttccctgcctccaatccttccgtgttggccataatcagttccttctgcctcgtgggggtcartggggtggaggcgggaagaagaggagggatttgaaagcaagaatcctgctttctgaggctcagttctccatttttcagcttgtcctgaaattttctgacaaagatgctagctgaggtgttagctgataagtaaagtgttagctgataacttaggtgttagctgacaactaaagtgtaggctgataactaaaaggttaactgataaga

SEQ ID NO: 742827 - DNA, 569 bp, Homo sapiens
actgccagttgtttgtttgggaggtaagtccaggaaacaccagtaggacagctgaaaactgagacaggaaaggaaatgtagcaattaaaaggaacttatttaaaatagtttccaccatgggcagccaaggctcagccctccatggcacctctgggagacagcatagaacatgcacctcagagtcatcccactcagggaaaaggagctggggcatttacccaccaatactcaccacccattgttgagggctgcttccaaggacatgagaatgtgctgcctgcactgcaagggtcagacatgggatcaagggcatgaaaatgtgctgcctgcactgcaagggccagatgtaaggtcragggcatgagaatgtgttgcctgtattgcaagggtcagatgtggggtcaagggcatgagaatgtgctgcctgcactgcaagggtcaggcctggggtcaaggacagtggctgtgatagtggctccagtcatgaataggaacacagcctggtgtagacagctacagtggctcagtgacaacaacatacacacactcacacatgcataccacactca

SEQ ID NO: 742828 - DNA, 567 bp, Homo sapiens
acccgtgcacttccctttctccttcaagtctaggcaatcactaatctattttctatctctatagatttgcctgttatggatatttcacacggatggaatcatacagacttttgtgtctggcttgtttcacccagcataatgttttaaaggctcatccatattgtggcatgtatcagttatgtatttcttttcattgatgaataatgttccatttaccacataataccacattttgtttatccagtcacccatcgatggacaytgtttccacttttcgacctttatgaataatgctgctattaacattcatgcacaaagttttgtgtgaacatacatttttaattcttttggctatatacctaggagcagaattgctgggtcatacggtaattccattttaaacattttgaggaactgctaaactttatttcagtgggtttcaacatggtatgaagtggttgtaccattttgctctcccaaccagtgatgtatgagagctccagtttttccacatactcactaacacttgcttttttttgttgttgttgttttgtttgctttttagag

SEQ ID NO: 742829 - DNA, 567 bp, Homo sapiens
acccgtgcacttccctttctccttcaagtctaggcaatcactaatctattttctatctctatagatttgcctgttatggatatttcacacggatggaatcatacagacttttgtgtctggcttgtttcacccagcataatgttttaaaggctcatccatattgtggcatgtatcagttatgtatttcttttcattgatgaataatgttccatttaccacataataccacattttgtttatccagtcacccatcgatggacactgtttccacttttcgacctttatgaataatgctgctattaacattcatgcacaaagttttgtgtgaacatacatttttaattcttttggctatatacctaggagcagaattgctgggtcatayggtaattccattttaaacattttgaggaactgctaaactttatttcagtgggtttcaacatggtatgaagtggttgtaccattttgctctcccaaccagtgatgtatgagagctccagtttttccacatactcactaacacttgcttttttttgttgttgttgttttgtttgctttttagag

SEQ ID NO: 742830 - DNA, 644 bp, Homo sapiens
gggaagctaaggcaggaggatcccttgagtccaggagatgagaccagcctggccaacatagcgagaccctcatctctataaaaaattaaaaatagaggccgatgcgggtggatcacctgaggtcaggagttcaagaccagcctggccaacatggtgaaactacatctgtactaaaagtacaaaaatcagccgggagtggtgacggggacctgtaatcccagctactcgggaggctgaggcaggagaatagcttgaacctgggaggcagaggctgcagtgagccaagattgtgccactacactgcagcctaggcaacagagcgagactctgtctcaaaaaaaaaaaaaaaaaaaaaaaaagcctgtaatcccagcactttgagaggccaagacrggtggatcacccgaggttgggagtttgagaccagcctggccaacatgctgaaatcccgtctctactaaaaatacaaaaattaactggaagtggtggacgggcacctgtaatctcagctccttgggaggctgaggcaggagaatcacttgaacctgggaagcagggctgcagtaagccaagattgcaccactacactccagcctgggtgacagagggagaccctgcctcaaaaaataataataataaaataa

SEQ ID NO: 742831 - DNA, 644 bp, Homo sapiens
gggaagctaaggcaggaggatcccttgagtccaggagatgagaccagcctggccaacatagcgagaccctcatctctataaaaaattaaaaatagaggccgatgcgggtggatcacctgaggtcaggagttcaagaccagcctggccaacatggtgaaactacatctgtactaaaagtacaaaaatcagccgggagtggtgacggggacctgtaatcccagctactcgggaggctgaggcaggagaatagcttgaacctgggaggcagaggctgcagtgagccaagattgtgccactacactgcagcctaggcaacagagcgagactctgtctcaaaaaaaaaaaaaaaaaaaaaaaaagcctgtaatcccagcactttgagaggccaagacaggtggatcacccraggttgggagtttgagaccagcctggccaacatgctgaaatcccgtctctactaaaaatacaaaaattaactggaagtggtggacgggcacctgtaatctcagctccttgggaggctgaggcaggagaatcacttgaacctgggaagcagggctgcagtaagccaagattgcaccactacactccagcctgggtgacagagggagaccctgcctcaaaaaataataataataaaataa

SEQ ID NO: 742832 - DNA, 644 bp, Homo sapiens
gggaagctaaggcaggaggatcccttgagtccaggagatgagaccagcctggccaacatagcgagaccctcatctctataaaaaattaaaaatagaggccgatgcgggtggatcacctgaggtcaggagttcaagaccagcctggccaacatggtgaaactacatctgtactaaaagtacaaaaatcagccgggagtggtgacggggacctgtaatcccagctactcgggaggctgaggcaggagaatagcttgaacctgggaggcagaggctgcagtgagccaagattgtgccactacactgcagcctaggcaacagagcgagactctgtctcaaaaaaaaaaaaaaaaaaaaaaaaagcctgtaatcccagcactttgagaggccaagacaggtggatcacccgagrttgggagtttgagaccagcctggccaacatgctgaaatcccgtctctactaaaaatacaaaaattaactggaagtggtggacgggcacctgtaatctcagctccttgggaggctgaggcaggagaatcacttgaacctgggaagcagggctgcagtaagccaagattgcaccactacactccagcctgggtgacagagggagaccctgcctcaaaaaataataataataaaataa

SEQ ID NO: 742833 - DNA, 474 bp, Homo sapiens
catttcaatcatttctctacagcactggccatctgtgtggccaattcaacctgctcaatttaacatagttggagttggtaaagcccctgaagtatatcaaagtagttatattttgcattgtgaagggcccgatggacaagttgggactattcaaccaattgtaatttctgtacctataaatttatgtgggagagatttattacaacaatggggagcacaagttctaattccagaacaattatatagccctcaaagtcaatgtatgatgcatgaaatggrgtatgtccctggtatgggactagaaaaaaatttgcaaggtttgaaagagccacttcaaggagaaaagcaaagttctcaccaaagattaggatatcatttttgatggcggccattgtcaagcctccagaacctatacctttaaaatggttaacagataagccaatttggatagaacaatggtggctaagtaaagag

SEQ ID NO: 742834 - DNA, 474 bp, Homo sapiens
catttcaatcatttctctacagcactggccatctgtgtggccaattcaacctgctcaatttaacatagttggagttggtaaagcccctgaagtatatcaaagtagttatattttgcattgtgaagggcccgatggacaagttgggactattcaaccaattgtaatttctgtacctataaatttatgtgggagagatttattacaacaatggggagcacaagttctaattccagaacaattatatagccctcaaagtcaatgtatgatgcatgaaatggagtatgtccytggtatgggactagaaaaaaatttgcaaggtttgaaagagccacttcaaggagaaaagcaaagttctcaccaaagattaggatatcatttttgatggcggccattgtcaagcctccagaacctatacctttaaaatggttaacagataagccaatttggatagaacaatggtggctaagtaaagag

SEQ ID NO: 742835 - DNA, 573 bp, Homo sapiens
tctgggaggatcccaaggaccccctggttgcagccatgtcaagactgacactgagaaggaccccaactgtcatgagcaacacccattgaacacagccacccacttggggacagatcaagaagctgtcacagatggtgraagaaaacctgaggaaagtgggacaaccagtcaccatgagtaatttaatggcagctatgatagcaatgatcaccactgccatgagtattccttcaacaaaggctgacacagagaacaattatacttattaggcatatttatcaatcttagctggaaatgatgcctggatgtaatcactctatggcacagttacacatgctttctgatctcagtatttaccataataaatctgctgctacattgaggcatactgccctcaaaaacctatttgtaacaaaattgacctggccagaaaatatgaatgtacttgtttaggaagattgcattgcagaacaggcagaggtgctgcacaatgattcctatggaatcattggtcccctaaggggatgtttggcttgaattgcacttctcagtctgcgtgccatggccacacta

SEQ ID NO: 742836 - DNA, 573 bp, Homo sapiens
tctgggaggatcccaaggaccccctggttgcagccatgtcaagactgacactgagaaggaccccaactgtcatgagcaacacccattgaacacagccacccacttggggacagatcaagaagctgtcacagatggtgaaagaaaacctgaggaaagtgggacaaccagtcaccatgagtaatttaatggcagctatgatagcaatgatcaccactgccatgagtattccttcaacaaaggctgacacagagaacaattatacttattaggcatatttatcaatcttagctggmaatgatgcctggatgtaatcactctatggcacagttacacatgctttctgatctcagtatttaccataataaatctgctgctacattgaggcatactgccctcaaaaacctatttgtaacaaaattgacctggccagaaaatatgaatgtacttgtttaggaagattgcattgcagaacaggcagaggtgctgcacaatgattcctatggaatcattggtcccctaaggggatgtttggcttgaattgcacttctcagtctgcgtgccatggccacacta

SEQ ID NO: 742837 - DNA, 584 bp, Homo sapiens
aagcagtgaggactctactatctggacccagccaattggagagatgttgactctaatatctgggcatagggccataggtatggttgtggttgcatacaaagatgaagatctggccagacacggtggctcacgacttaaccccagcactttgagaggccaaggcgggcagatcatgaggtcaggagttcaagacatcctggccaacatggtgaaaccccatctctactaaaaatacaaaaattagctgggcatggtggtggatgcctgtaatcccatctactcrggaagctgaggcaggaaaattgcttcaacccaggaggcagaggttgcagtgagctgagatcgtgccactgcacaccagcctgggcaacagagcaagactccatcttggtggggggggaaaagattctcccttggggaaacaaagatgaagatctcagactgaattgtgattctcattgacactgtataaagcctttgggtagtatagagagtgtactaacagggcccagctcacagggaaaattgtgacagttgtatgcacacccacacacagtatacattgtcattttcccacatgaaca

SEQ ID NO: 742838 - DNA, 584 bp, Homo sapiens
aagcagtgaggactctactatctggacccagccaattggagagatgttgactctaatatctgggcatagggccataggtatggttgtggttgcatacaaagatgaagatctggccagacacggtggctcacgacttaaccccagcactttgagaggccaaggcgggcagatcatgaggtcaggagttcaagacatcctggccaacatggtgaaaccccatctctactaaaaatacaaaaattagctgggcatggtggtggatgcctgtaatcccatctactcgggaagctgaggcaggaaaattgcttcaacccaggaggcagaggttgcagtgagctgagatcgtgccactgcacaccagcctgggcaacagagcaagactccatcttggyggggggggaaaagattctcccttggggaaacaaagatgaagatctcagactgaattgtgattctcattgacactgtataaagcctttgggtagtatagagagtgtactaacagggcccagctcacagggaaaattgtgacagttgtatgcacacccacacacagtatacattgtcattttcccacatgaaca

SEQ ID NO: 742839 - DNA, 584 bp, Homo sapiens
aagcagtgaggactctactatctggacccagccaattggagagatgttgactctaatatctgggcatagggccataggtatggttgtggttgcatacaaagatgaagatctggccagacacggtggctcacgacttaaccccagcactttgagaggccaaggcgggcagatcatgaggtcaggagttcaagacatcctggccaacatggtgaaaccccatctctactaaaaatacaaaaattagctgggcatggtggtggatgcctgtaatcccatctactcgggaagctgaggcaggaaaattgcttcaacccaggaggcagaggttgcagtgagctgagatcgtgccactgcacaccagcctgggcaacagagcaagactccatcttggtgggggggraaaagattctcccttggggaaacaaagatgaagatctcagactgaattgtgattctcattgacactgtataaagcctttgggtagtatagagagtgtactaacagggcccagctcacagggaaaattgtgacagttgtatgcacacccacacacagtatacattgtcattttcccacatgaaca

SEQ ID NO: 742840 - DNA, 584 bp, Homo sapiens
aagcagtgaggactctactatctggacccagccaattggagagatgttgactctaatatctgggcatagggccataggtatggttgtggttgcatacaaagatgaagatctggccagacacggtggctcacgacttaaccccagcactttgagaggccaaggcgggcagatcatgaggtcaggagttcaagacatcctggccaacatggtgaaaccccatctctactaaaaatacaaaaattagctgggcatggtggtggatgcctgtaatcccatctactcgggaagctgaggcaggaaaattgcttcaacccaggaggcagaggttgcagtgagctgagatcgtgccactgcacaccagcctgggcaacagagcaagactccatcttggtggggggggraaagattctcccttggggaaacaaagatgaagatctcagactgaattgtgattctcattgacactgtataaagcctttgggtagtatagagagtgtactaacagggcccagctcacagggaaaattgtgacagttgtatgcacacccacacacagtatacattgtcattttcccacatgaaca

SEQ ID NO: 742841 - DNA, 594 bp, Homo sapiens
agttactgcacagtaagtaattgatgcccgctggggatttccaagtttgggggatttttcaacctagggtttcatcatgagacaacagtaatcagctcaacagcaacagtatataaaagtattgaaacaactgcttaaagctagtgaagcctyggtttcaaaggctcaattaagggccctaatgcaaactgttattttctgtaaccaataattcctagaagaaggcacactagacctagagctctgggaacaagtgggaagaaatcttaaatgacattatgcacaaggacaatgagtcccagtagcatctttaatgttctttaatgttatgggccttaagttaggactgctttggccccactctacacagaagagcataaaatgggaagggaggaagaatcatcacctaccttactatctcctcctctctcagccccgccattaccgagtgaaggtgccacagaggagacatagattttccctgagcccctcccccagtaaattgagaaaaagacaagggatacactacagttatgggaccctgtcttaggcaagcagcattagagggggagctcttggcttgcctgatgatgg

SEQ ID NO: 742842 - DNA, 444 bp, Homo sapiens
attatgacatattttgtttatcacctaggtgatttaactgtccttttctacttgagccctgtataaaggggggattgtaaaatcactggccccagcatcgagtgatatccctctttctttctttctttttttttttttttttgagatggagtctcacactgtcrcccaggctgcagtgcagtagcatcatcttggctcactgcaaactccacctcccaggttcaagtgattctcctgcctcagcctcctgagtagctgggattacaggtgtgcacacccacaactggctaatttttgtatttttagtaacggcagggtttcaccatgttggccaggctggtctcgaactgctgacctcaagaaatctgcccacctcagcctcccaaggtattgaacttatgggtgtcagccattttgccaggccttatcactctcatctttcaa

SEQ ID NO: 742843 - DNA, 645 bp, Homo sapiens
cccagaatctgagtgatttgaccctcttgcctgagtctatgctccagtggagattatgacatgtcatttttttccatacttagctgatgtgatctattctcctgtcttggctgtctccatagaagacattatgatatatttacaggccctgcacccagtttatgtgatttctggctatcgcctgcccacattggctattttgacatattgcacagtccaacacccaggtgattttactcttctgcctgggcccttcctataggggacattattaaatatttttgtgccctttatctgtatgtctgtgtgtgtgtggtgtgtgttttgagacagagtctcactctattacccaggctggagtgcagtggcatgaccttggctcactgcaacctgcacctcccaggttcaagcaattctcatgcctcagcctcccaggtagcygggattacaggtgcctatcatcacgcctgactaatttttgtatttttagtagacagggtttcatcatgttggccaggctggtctcaaactcctgacctctggtgatccacctgcattggcctcccaaagtgctcagattacaggcatgagtgaccgcgcctcatcatatacatgtgttttgactctcttctcctacgtgatttc

SEQ ID NO: 742844 - DNA, 626 bp, Homo sapiens
ctgggataattggctagccacacatagaataaaactggatcctcatcttttactttatacaaaaatcaactcaagatggattaaggacttaaatctaagacctgaaactataaaaattctagatgataacattggaaaaaccctttcagacattggcttagccaaggatttcatatacaagaacccaaaagcaaatgcaataaaaacaaagataaattagggagggttctctctstatcttgtggaatagtgtcaaaacgggaacttaatgaaactaaagagcttttgcaaggcaaaagaaacagcagagtgaacagacaacccacagagtaggagaaaatcttcacaatctatacacctgacaaagaactaatatctggaatctacaatgcactcaaacaaatcagcaagaaaaaaaacaatcccatcaaaactgagctaaggacatgaatagacaattttcaacagaagatatacaaatggccaaaaaacatgaaaaaatgctcaacatcactaataatcagggaaatgcaaatcaaaaccacaatacgataccaccttactcctgcaaaaatggccataataaaaaaaaaatcaaaaaaacagtagatgttggtgtgtatgtg

SEQ ID NO: 742845 - DNA, 612 bp, Homo sapiens
actgcactttagcctgggcgacagagtgagacttcgtctcaattataaaaaaaaaggtagacaaaaaacatgaacaaatgtttttcaaaataagatatatatgtggctaacaagcatatgaaaaaaatactcatcactagagaaatgcaaagaaaaaaccacaaccagattccatctcacaccagtcaaaatggctgttattacaaagtcaaaaaataacatgctggcaaggtttcagagaaacggctatgtgctgctggcatgagtgtaaattagttcaaccattgtgaaaagcagtgtggcaattcctcacagaactaaaaagagaattaccatttgacccaacaacctcataattgggtatatacccaataaaatataaattattctgtcataaagacacctgcacatacatgttcattgyggcactattcacaatagcaaagacatggaatcaacctaaatgcctatcaatggtaaactaaataaagaaaatatggtatgataaggtgtggtggctcatgcctgtagttccagcactctgggaggccgaggcaggtgaattgcctgagctcaggagttcaagacaggcctaaacaacatggaaaaacc

SEQ ID NO: 742846 - DNA, 611 bp, Homo sapiens
ctgtgtccaaaaccagagcacaacctaaacccttcctatgcccctagccttcccttccaccgcccacccccatccccaagtctttctctgcccccagacatctttctgtaccttcacacacagttgactcagagccctcctcagttcccacacctcccaccattcagaacctgagtagcccctgtcctgtccctgtaacttatcacctgccctgtctccctgcattctccagtgtctgccttggggcccctcctagtccacttagcacctctgagtgaattagaaaaagatagaccttcctcaaaatgcttgtgtaatcaggaaagtcccttcataaacacgcaagcttacmccatgtatgtgaatggtgtctcttaaacagtgcgtaacctgcacaactgttacctagtgatcataataacctttaagctctactcccagaccacctgcccagagctcaccgggagtgccattgctgttggcactggggagccccggaagagggggtggccctggaactgcagccgcgggggccaagggcggcccatctggggtggaagtgtcttttggcccagcaaggggtgggtcatcgagggcagagatggcggagg

SEQ ID NO: 742847 - DNA, 611 bp, Homo sapiens
ctgtgtccaaaaccagagcacaacctaaacccttcctatgcccctagccttcccttccaccgcccacccccatccccaagtctttctctgcccccagacatctttctgtaccttcacacacagttgactcagagccctcctcagttcccacacctcccaccattcagaacctgagtagcccctgtcctgtccctgtaacttatcacctgccctgtctccctgcattctccagtgtctgccttggggcccctcctagtccacttagcacctctgagtgaattagaaaaagatagaccttcctcaaaatgcttgtgtaatcaggaaagtcccttcataaacacgcaagcttacaccatgtatgtgaatggtgtctcttaaacagtgcgtaacctgcacaactgttayctagtgatcataataacctttaagctctactcccagaccacctgcccagagctcaccgggagtgccattgctgttggcactggggagccccggaagagggggtggccctggaactgcagccgcgggggccaagggcggcccatctggggtggaagtgtcttttggcccagcaaggggtgggtcatcgagggcagagatggcggagg

SEQ ID NO: 742848 - DNA, 530 bp, Homo sapiens
cccgatgaggttcccagaccctcgccagccttgggcacagacagcttgatctagacatgggagtggcgggccgtgagggcccagtagcctgggcccccagtcccatcctccctcagcccccaaaaatccaaatttacaggtgctcagcctgtgaatttatagaattcaaacctgcagaccccttgtcttagattctaggaggacaagactggagttcctccctcagaagaccargaacttggactcactgagcctcttcacttacagcccagttcaggtccctagacccgcttcccatgagacccaggaatgtaggatccctgaatgcccatcctttgggatatagaaactaaaagcaagcagaccgggtgaggtggctcgtgcctgtaatcccagcaccttgggagactgaggcaggcaaatcacttgaggtcaggagtttcaaaccagcgtaagctccaacctcctgcctctctccctaaacccagaatttcctttatctcttgagacagggtctcactctgtggccc

SEQ ID NO: 742849 - DNA, 486 bp, Homo sapiens
tccattcctttcttttcacatgtaaaatgcgaattcactgagtgctaatcaaagcctcccaagaatgtaactgtttgcctcactgcctaccctcccctttctttttctttcctcctcctcctcctgcctgttctttctcctttaaatattgaagtcctcggctgggcacggtggcttacgcctgtaatcccagcactttaggaggcygaggggggcggatcacgaggtcaggagattgagaccatcctggctaacacggtgaaaccctgtctctactaaaaatacaaaaaaaaaaaattagccaggcatggtggcgggcacctgtagtcccagctactcaggaggctgaggcaggagaatggcgtgaacaagggaggcggagcttgcagtgagccccgagatcgtgccactgcactccagcctgggcaacagagcaagacgccatctcaaaaataaataaataaataaagacaaaaataaaatagt

SEQ ID NO: 742850 - DNA, 624 bp, Homo sapiens
cttcctctgtggatcctctgcctacatgtgtctacctgctaattggacaggcacatgcacactagtttaccttactcccaaaattcaatttgcgaatgggactgaaaagcttcctgttcctctcatgacaccgacatgacaaaaaaaaaggttattccactaattcccttacttgtcggtttaggactttctgcctccgctattgcgctcagaactggaatagcaggcatttcagcctctgtcacgaccttccasagcctctctaatgacttctctgctagcatcacagacatatcacaaactctatgagtccttcaggccaaggttgactctttagctgcagttgtcctctaaaaccgccgaggccttgacttactcactgctgaaaaaggaggactctctatatttttaaatgaagagtgttgcttttacctaaatcaatctggcctagtatatgacaatataaaaaaaaactcaaggatatagcccaaaaactcgccaacaagcaagtaattatgctgaacccccttgggcactctctaattggacatcctgggtcctcccaattcttagtcctctggtacctctttttctcctcttattcgggccttgtgtcttccgttt

SEQ ID NO: 742851 - DNA, 583 bp, Homo sapiens
atgagaaagagatcccggggctgcccaaaccagcatcccagccacaatagccaggcatcaggtgccctctggcctactgggcgcacagccaggggcagggcccagctctgccttggtgcagggcagtctcccctttaaaatgtccgtccccgggagggcagaggcctcccctgtcttggtcactgctccagcccagtgtctagcatgcagtaggaacttggccagtacagagtgaacagaagaacccgccaatcccttgccttggcctcctatggctccatttcctctaatcctgtgtccccattgtatttttttttttttttttttttgkattttgtttagtagagatggggtttcaccatgttggccaggctggtctcaaactcctgacctcaagtgatccacccaccttggcctcccaaagtactgggtttacaggcatgagccactgcacctggaccccactgtctttccttaactgcctgtctgctctgtcagacgctgtctctccctgcccccgtggtggctggctggtcctatgtctaggcctcagtctccctctctgactgtctttctgcctcag

SEQ ID NO: 742852 - DNA, 531 bp, Homo sapiens
tgcatccacgtgctctgtcccgctccccacatcatctcagcaactaaaccggcagactgggccgggtcccaattttcagttggcatgagccccggctcagtgtgtaggtcattggtccgtgtgacgcagggggctgctgagggaccctgctgtgcagttgagggtggggggtggtgggtggagctctgggctgcctgggcaggtggcccgaatcctgacacatggccctgggctgcccttctgttcacccgccctcrtctgggcagcccagggaggtgcgggtggcagccctgcttcccaggccatgggtggctctctgggtgtggccgtgtgtgatggctgtgccgagcgtggatttgtgccccaatcttttccaggtcttagggtacgtactgttctcagcctctccatgctgggacgctgttcgcagtcagcagggctggttctgggaaacccccagagttccagctatgacttctcccctcccccggtaacataggtggataggtgggacctcggggaggggcaggg

SEQ ID NO: 742853 - DNA, 634 bp, Homo sapiens
cccaacctctctgacccactctagttaaactgggtgcacccttctttccttgtggttagggatgataaacaggcactcactgcccccgaagcacagtaactctgatgtggtgctgggcacatggggctcagggcgctattttccgggtggggaaacatgggttccacatgttgacagggagcaagagcagtgtttgggaggaccaggggcggggcactgcaccccagctgggagaggcagctgctgcatcaaatcagtggagaggggtggggaaggaggccgtccagggcctggactactgtgtggagcatgaggagaccccaaaggaacatctgagggacacaggggttcccaggggagggctgatmagcaaaggccctggaaaactgcttgcatagtgacacaaccagatagtaccttcccgccccgatcattttcaggctggggagctccggttccctctaaggctgctcaggtgaccagggaaaggcactgctcacacagggcttgaacaaagaatgcatccagcaaagctctgtgtgggggcctcctgtggccccagctccaatgcactgagcttcccacggcgccaagccgcctccacagagccaggggaactatgcacatgacacac

SEQ ID NO: 742854 - DNA, 433 bp, Homo sapiens
cagccaggctggagtgcagtggcgtgatcttggttcaccgcaacctctgcttcccaggctcaagcaattctcctgcctcggcctcccgagtagctgggattacaggtgtctgccaccaagcccggctaatttttgtatttttagtagagacggggtttcaccatgttggcaggctgstcttgaactcctgacctcatgatccgcccgcctcggcctcccaaagtgctgggattacaggcgtgagccaccgcgcccagctgagtcttggttcttataattaaaaaaaagtcttctgcaactgttttcattttctacatcttaatttttttggtggtcataattatttttcttatcatcatgactttcttccacatcaatttcgattatttttatattttgaagcacctaccattcttttttcagactaaaattt

SEQ ID NO: 742855 - DNA, 508 bp, Homo sapiens
tggatccaagagaataaaatttgttaaggcttttaatttaaaataccagtttttacttcatattcagtctggaagtcatcacatttttattttgctatttattttcttggccttataaatatgcatatatgcatacataaaatgtacgtgctattggaattatactgtagttcaggagtgtgaaaaccatggcagttagagggctaagaatgctttttaccttttaaaaacggaatgtcttgcctgtctgtgatgataagaacacttacaccctctsacaccaagctgagaaaaggcaatggtgagtgcactttgtgcccacagagaaactctgttcagcagggtcctggctccagttgctcacagaggaatctgggccagacttaaactgaaaggagggctcccatgagagggaagtttctcccggaatctcacggctttttggacgaggctgtaagaatgtcaacattcagccaagtgccagataaatcaacctacttggaatttt

SEQ ID NO: 742856 - DNA, 508 bp, Homo sapiens
tggatccaagagaataaaatttgttaaggcttttaatttaaaataccagtttttacttcatattcagtctggaagtcatcacatttttattttgctatttattttcttggccttataaatatgcatatatgcatacataaaatgtacgtgctattggaattatactgtagttcaggagtgtgaaaaccatggcagttagagggctaagaatgctttttaccttttaaaaacggaatgtcttgcctgtctgtgatgataagaacacttacaccctctcacaccaagctgaraaaaggcaatggtgagtgcactttgtgcccacagagaaactctgttcagcagggtcctggctccagttgctcacagaggaatctgggccagacttaaactgaaaggagggctcccatgagagggaagtttctcccggaatctcacggctttttggacgaggctgtaagaatgtcaacattcagccaagtgccagataaatcaacctacttggaatttt

SEQ ID NO: 742857 - DNA, 616 bp, Homo sapiens
tctatgggttcttgttgtttagctccccctaataagtgagaacctgcagtatttgactttctgttcctacattaatttgctaaggataatggcctccagctcccttcatgttacagcaaaggacatgttttccttcttttttgtggctgtgtagtattccatgttatataggtaccacattttctttatctagtctaccattgatgggcatttacatggattccatgtctttgctgttgtgaatagtgctgcaataaacatacgcatggggcttttaggaacagatttccgtcgatctcttcccagttctttgtytaggttgccattcaccttcacgcctcctccaccctcagattactctgtatcttgtcagaaatgcacacatgaggcatttgacagcacagactcactctccaaccctgccaagagagttgctctttcaggacctccatttctccactttggacaggggataagaatgattcccacctcccaggctcccccaaaggttaaagtaggaaatggggttaccatgctcggcatgtggctgggagttgtgtgtcttagagtgtgtgtgaatgtgagtcggtgagaggtgatcctaattactgaatgg

SEQ ID NO: 742858 - DNA, 604 bp, Homo sapiens
gtagcaggcaaggcgggggagagcatcaggacgaatacctaatgcatgtggggcttaaaacctagatgacgggttgataggtgcagcaaaccaccatggcacatgtatccctgaacttaaagcaaaataaaacataaaaaattacaactacctccrccaaaaaaaaactgggggtttccacggccccctcctcaggtttgataatttgctagaacggctcacagaactcagggaaacactttccttactattaatggtccataataaaggctgcaactcaggaacagcccaatggaagatgctgaaggaaaggtgtgcagagagggtgcggcgtttccctgcctcatcaggtgtaccacccgtgttcacctacctgaaaactccccagatcctgtttaggtttttatggagattccattatgtaggcatggttgattaaatcattgcccattggtgatcaattcaacctccagcccttttgccctccctggaggtcaggagttggggctacaaattccaatcctctaatcagatggttggttcccctggcaaccagcccccatcctttggtgtttttcaaaagctacttcattaacataaactt

SEQ ID NO: 742859 - DNA, 604 bp, Homo sapiens
gtagcaggcaaggcgggggagagcatcaggacgaatacctaatgcatgtggggcttaaaacctagatgacgggttgataggtgcagcaaaccaccatggcacatgtatccctgaacttaaagcaaaataaaacataaaaaattacaactacctccaccaaaaaaaaactgggggtttccacggccccctcctcaggtttgataatttgctagaacggctcacagaactcagggaaacactttccttactattaatggtccataataaaggctgcaactcaggaacagcccaawggaagatgctgaaggaaaggtgtgcagagagggtgcggcgtttccctgcctcatcaggtgtaccacccgtgttcacctacctgaaaactccccagatcctgtttaggtttttatggagattccattatgtaggcatggttgattaaatcattgcccattggtgatcaattcaacctccagcccttttgccctccctggaggtcaggagttggggctacaaattccaatcctctaatcagatggttggttcccctggcaaccagcccccatcctttggtgtttttcaaaagctacttcattaacataaactt

SEQ ID NO: 742860 - DNA, 503 bp, Homo sapiens
agatgtcggacagcgaggacagcaacttttccgaggaggaggacagcgagcgcagcagtgacggcgaggaggccgaggtctgtggctggggcgctgggggagacattgcgtctggggacaggactccgggcagaaaggcccctgtgggaggctcgaggggttcayagcgggctctggcttctgggaactcccagattgtctcaagagatagagaattaggcaagtcgaagtcaagcaaagggacaggttctggaggccagaaatgggtcaggtccagtgagataacaggtgatgttttgaaagtttactctgtgtgcatatagtaagcacttagcattagtttttttttttagttatgtctagtcattccataactatatttgtagtgcctactatgtaccaggcgcaattctttgctcttagggtacaccagtaaacaaaaagattttaaaaatgtctgccttcgggaatgtaaataaatatagccaaggaataaactatat

SEQ ID NO: 742861 - DNA, 616 bp, Homo sapiens
aagaaacttcaggaggccaggaatggtggctcatgcctgtaatcccagcactttgggaggttgaggcaggtggatcacttgaggtcaggagtttgagaccagtctggctaacatggtgaaacctggtctctactaaaaatacaaaaattagctgggtatggtggtgcacgcctgtaatcccaactactcagctcaatcaggagaatcgcttgaaccttggaggctgaggttgcagtgagccaagatcgcaccactgcactccagcctgggtgacaaagcgagactctgtctgaaaaaagaaaaaaagtaccctgtgttctagtgttttttttctttacagcaaagctaagtagtaatgacgtgcagattctctttgcattaggattgcagattctagttggaaaataggttgcatccaagagatgcaactgacaaacttkggggagagaagtgatgaagagctcgccattccatttgtggagactttgcattttctgggggtggtatcccacctatggttccctgggtttatgaggtggggcaggctcactgcttcctgattactggatcccagcagaagcagcatgctgctgaagtccaggtcactgggggccat

SEQ ID NO: 742862 - DNA, 573 bp, Homo sapiens
caggctgagaggcctaggccagtggatccctaggggccaggagtttgataccagcctaggcaacatagcaagatgccatctcttcaaaaatatttaataattagccatgcataggctgggcgtggtagctcatgcctgtagtcccagcaatttgggaagccgaggcgggtggatcacctgaggtcaggagttggagaccagactggccaacgtggtgaaactctgtctctactaaacatacaaaaaattagccaggtgtggtggcaggtgcctgtaatcccagctactcgggaggctgagacaggacaatcayttgaactagggaggtggagggtgagtgaggcacgatcacgccattgcactccagcctgggtgacaagagcaagactgtctcaaaaacaaaaacaaaaaaattagccatacatgatgggctgcacctgtaatcccagctattcaggaggctgaggtgggaggatcacctgagctcaggagtttgaggctgcagtgagctgtgactggccatctcactccagcctaggccacagagtgagacccagtctcaaaaaaataaat

SEQ ID NO: 742863 - DNA, 634 bp, Homo sapiens
atcatcgtgtacacggaacttccaaatgctgagccctgatccaaagttgtctcctgcccatgagcaccacagtcaggccttgaggggatcttctagggagacaacagccctgtctcaaaactgggttgccagctccaatgtaccagcagctggaatctgaaggcgtgagtctgcatcttagggcatcgctcttcctcacaccacaaatctgaacgtgcctctcccttgcttacaaatgtctaaggtccccactgcctgctggagagaaaacacactcctttgcttagcccacaattctccatttcacttgacccctgcccacctctccaacctaactggcttacttcctagtctayttgaggctgcaatcacactgaggaactcacaattccaaacatacaagaggctccctcttaacacggcacttagacacgtgctgttccaccttccctcatgctgttccacctcccctcagactagctttcagccttctgtcagcagtaaaacttatatattttttaaaataatttcaatgtagttttccctccttcaaataaacatgtctgccctcatggtttaggtaatgggactcttttcttgcctaaggcttccggtgttatcagtaccatgtcca

SEQ ID NO: 742864 - DNA, 508 bp, Homo sapiens
atctgggcctggagcctgggtctctccacagctgagagccctgttcttggcagcaggtagcagggaggctaagtttaccttcagcccagcaagggcctggctgccaagacacacagtgcagtgggggcagcagggtgccctggtttgcctgcagttggatcgtctatcatgatctttctttccagggttcttcttgctgcagggggcctggccactcatgggtgagtccgtccccaaaccttagggtgtcatctccccacataagaggatttttctgaaacaggagggaagtcctgtcggggagtctctcataaactaggaagaggggacccttggatactcggcccacatttctgacctcgccctcccyggcctttctttccctttcctgagtcaagctctgtgaagactggggtgagactggggtgctccaagctggggtgtgcagggaggaagtggtgtcagcagcagagaaagagagggaagcagtgctaggaacagcaggtcc

SEQ ID NO: 742865 - DNA, 634 bp, Homo sapiens
tttcacacctatctcaacataaaagaatttatactagagagaattcctacaaaagtgaagaacatggcaaagcctttaactggtcctcagcccttacttataagagaattcatactggagagaaaccctgcaaatgtgaagaatgtggcaaagcctttagtaagttctcaatccttactaagcatraggtaattcatactggagagaaacattacaaatgtgaagaatgtggcaaagccttcacccggtcctcaagccttattgaacataagagaagtcatgctggagagaaaccctacaaatgtgaagaatgtggcaaagcctttagtaaggcctcaacccttactgcacataagacaattcatgctggagagaaaccctacaaatgtgaagaatgtggcaaagctttcaaccggtcctcaaaccttatggaacataagagaattcatactggagagaagccctgcaaatgtgaagaatgtggcaaagcctttggtaacttctcaacccttactaaacataaggtaattcatactggagagaaaccctacaaatgtgaagaatgtggcaaagccttcagctggccctcaagccttactgaacacaagagaattcatgctggagacaaacctta

SEQ ID NO: 742866 - DNA, 599 bp, Homo sapiens
agtgtttttacctattctatttttgagaaaggttaagtactatcaacctcatgcttttcagttttaaattttgaatgcttggaatacttaccagacatttttctgagactgatatttgtagcatatgtgttaatttctactgatctagcatctagtttactggttctgtcttgtacacataagttcaaatgtrgtgagttttttagttactgtattattcattttacaacttatttttagaatctttatatagtttcttctttcctgcagatactttcatttgtcttttttagatatggtaagcatagttgttttttattctttgtgtctgataattctaatattggatgtctttgcagatttgtttctgttatgtttttctctggtgtctttcacatgatgttatttattgtgaactttgtcatatttgattgcttgctagtcattgcacataatggaaaattgtttgcaagtttcatcaaggtccagaatagatgtgactttctttgggagagtttgcttttgcttctttctgtttcctggggattctacaatttgaaggaattatttgtaccacttcaggtaatgcagttcattca

SEQ ID NO: 742867 - DNA, 599 bp, Homo sapiens
agtgtttttacctattctatttttgagaaaggttaagtactatcaacctcatgcttttcagttttaaattttgaatgcttggaatacttaccagacatttttctgagactgatatttgtagcatatgtgttaatttctactgatctagcatctagtttactggttctgtcttgtacacataagttcaaatgtggtgagttttttagttactgtattattcattttacaactyatttttagaatctttatatagtttcttctttcctgcagatactttcatttgtcttttttagatatggtaagcatagttgttttttattctttgtgtctgataattctaatattggatgtctttgcagatttgtttctgttatgtttttctctggtgtctttcacatgatgttatttattgtgaactttgtcatatttgattgcttgctagtcattgcacataatggaaaattgtttgcaagtttcatcaaggtccagaatagatgtgactttctttgggagagtttgcttttgcttctttctgtttcctggggattctacaatttgaaggaattatttgtaccacttcaggtaatgcagttcattca

SEQ ID NO: 742868 - DNA, 506 bp, Homo sapiens
ttgttcccctaaccacagaaccatggattttaacattaccacttcagtttgtaactcagtgttaattttacactgaagtagccatgcttagttggctgcatgcttccagtcctctacatactgagccatttgaacagaactatgcaaagctacagaggacattacagcagaagtgattagtgtgaccaaagaamcaatagcaaaaattatgatgcctgaggctctacaggcatgatgagtaagtttagttagaagaagtttcacaaagtgccaaacaggggtggcatcacaaggctcagacagattaatgagaatccatagcccaggaatgtgacccagatatcaaagtagagatattacatgtttgcaatgtgctatgattaatgcagtgatataaccagcaagatttaaggtcaattgagtattgcttacctggagctggtccgccttagctgccaaaaagacataaggattaaaaccacaaaccataaattgagtggtgatat

SEQ ID NO: 742869 - DNA, 580 bp, Homo sapiens
taaaaccaggcaaaagagtatttaaagtacaactgtgaggagcatgtgaaccagggaaactgaggcagggatgtgccggcttgcagagtgcctccctaaagagacatgcaactccaggaaaggccggatcctcttgtctgactgttccccttggaagacggctgagttgctgaaagcattgcccaggacaagaaagcctccagtccccacgtggaccaggtggatttgcaggaagaaaactccacaagcctcactgtgagcacccagtcccctgggactggacactgtgggctgcagaggraagtgaggcagggggtatggatggtgcatggcagtgggtccccatgaccaggaacagaacctggctgtccagcccacagtatcagacatgagcgccactagcgtagaagagcacagcctatctgcagcttctggacagctgtcaattccccaggaggtcagaaagaagtcaataaagaagacagagggaaaagattgaagttcaaccatgaaactggggctcccaagatgtcaaggacaggggtggggctctggagaaggaggacccaggtggggcttg

SEQ ID NO: 742870 - DNA, 639 bp, Homo sapiens
cttgaattcatctctccaactgaaatttgtacccttagacctatatctccccaacccccatcccagccctggtaaccaccattctactcactgctactatgagtccactaggcttttaaaattattattcatgtcatctacttcttttttaattttttaaatgattttaacttgtattttagattcgstgggtgcctgtgcagatttgttacatgagtgtattgagtgatgctgagatttggggtatgactcaacccgtcacccaggatgtgaggagcacccgataggtagtttttcaaccctccctccctctatccctccagagtttcactgttttggagtccacgtcctgatttcctttcctctgtgtacctgccccggagcgggattgccggatcatgcagttgttggactttcaattttctgaggagcttctatactgtctcccatatcggctgctctaatttacatcccagcacggggcgcagaggacccctttcccccgaatcctcaccaacactcgttccatgtgtctttttgggaacagccactctagcaggcgtgaggggtgccttgtggtttggatttgcatgtccctgatgatgagtgatgacgagcaccttttcctagacctgctgg

SEQ ID NO: 742871 - DNA, 639 bp, Homo sapiens
cttgaattcatctctccaactgaaatttgtacccttagacctatatctccccaacccccatcccagccctggtaaccaccattctactcactgctactatgagtccactaggcttttaaaattattattcatgtcatctacttcttttttaattttttaaatgattttaacttgtattttagattcgctgggtgcctgtgcagatttgttacatgagtgtattgagtgatgctgagatttggggtatgactcaacccgtcacccaggatrtgaggagcacccgataggtagtttttcaaccctccctccctctatccctccagagtttcactgttttggagtccacgtcctgatttcctttcctctgtgtacctgccccggagcgggattgccggatcatgcagttgttggactttcaattttctgaggagcttctatactgtctcccatatcggctgctctaatttacatcccagcacggggcgcagaggacccctttcccccgaatcctcaccaacactcgttccatgtgtctttttgggaacagccactctagcaggcgtgaggggtgccttgtggtttggatttgcatgtccctgatgatgagtgatgacgagcaccttttcctagacctgctgg

SEQ ID NO: 742872 - DNA, 617 bp, Homo sapiens
atattgttcattacatttccatatcaaaataacaaactgtagagcaaaaggctcatggcattctgttgacttaaaagttaaagcagagggaagtgcccatcaatgcagtaagagagcaggtttagccagaatgagcacaggccagccaatgccaggaacttagccatttagaattgggaggcaggtgggtggtgccatggcagcgaccatttaattaggtacacttttctaggctaaccttggagcggaggcctggtgtcgggtggggggtgctgtgtacccccacttcctgcacttcaggtctgagaaccattagcaagtcctgttttttctccaaactcccaccttttgctgcctttgtggcctggcagaatgttttgctgccactttcttgagtgacarcttcaaagctaagcagtgagatgctttaacctacacatcccctcccactgcttggacccaaaggcttcctctgcaagtgagggcctcaaaggagacctggaacctttattcttgtcctgactttctgttttagaatcaggaccttttcaaaaccccaggagcagacagagggggtgtggcatggactctatgtgagggtctctcgcatgccaagg

SEQ ID NO: 742873 - DNA, 591 bp, Homo sapiens
agccattgcaagcagacctctgtccccaagaattgccctcaacacagagacagactctagcctcccttttcattccgtttggttttgtgtggatgaaggcagaagtggccccagagggtgttttgctcttctttttcttttttaattaagtctgtgacgcgctagaaatgctgatgtctcatgttactgttttttcccccagtgctgccaggttgccagatttctaagaaggagtttgaagaggagaaaaggatttttgcatgtttagaaatcaaggttcaggtgaggttttttatacatactttttaaatacatacacatacaattacctttgcttctaggtcaygagaacattttctttccttggcctgaaatatcttgactgggttttcccagttacatgacccgccatgctggtacatatttcctcccagtggccccctattgttcttctccacaattcttacccacctgttcatatggcaaattgttcaaatacttcagtgcattatgatgcactgaagagttatagaaaggcacctcttgtagattgctattagagcattattttatactatgattatttgaaga

SEQ ID NO: 742874 - DNA, 591 bp, Homo sapiens
agggctggagctgtcagattttttcaaactctttttgcaaattgtatattccttattgtatgtggtcactgaaatttctgttccatcatctctacagtcagttagtaccagacaaagatttacttaaatatctggctgtaaaaaggggaggaaaaaaaggtccattagccctttaaatcttccaatagatacttctggggaaagctgctgtggctgatggggctaaaatcaaggcagtyatctgtgctggtccctcaaggtaacacaaaacccaccaaactgcacaaccctgaattttttggaagacaaggtcacgctgcccacccaggtcccaaccggctgttccaggaatacaggctgctctccccacagctgtggtggagctgaggagtgaaggaagtgattagttggtacacagcattccaggcacataggcctgtcatcccatagcattggctggactgagaaatgggggatggtggcttgcacgagccactctttcacctaagaatagtagcctctttattcatccagcactccccttgttgttatggaagtgcctgataagattccagaattaagagtttgtgg

SEQ ID NO: 742875 - DNA, 598 bp, Homo sapiens
gatttattgagtgttagcacagttcctttaaggagccttcatagccatgtagtactagccaagatccgcataaaagacgcatcccagcatggcccctaaaatccttcattatgtgctcttaagaataatgtgttgggaagtcagaacttccttatagggctgttatgatcatacttgtacatgtcttttggagcacacgtgtacacatttctttctgtatatactgggagtggaattgctggggtgtggtcatggatacacatctgttcaactttttagtaagtttaaattcttctgaacagttttccaaacaaatgaaccgtcttatactctcaccagcagtatatcaatgttctgctttctccacatctttgawaatacttgacatcatcagtttaaagaatattttcattactctcataggtaatatagtggcatttgattgttgataattgtggtttaattttccattttctgattgctgcctatttgtatattcttgcaatttctcttcgctccttgctccgggcattggatgcattcgatgtgtctgttttttacagagcctctgttcagtttgcaggacaacaattaacac

SEQ ID NO: 742876 - DNA, 593 bp, Homo sapiens
cgtagaagttcctggtgatcttgggcagggtgaattccgctccttccagctccggtgtcagcacaatctggcagcccagccgcgagttctcctggaggaggggggccatgtctagcatgtcgtcttccctagggtggtgacacgggcagtgttagccgagggcaagctagctgggtgggtggggggccagaggtsggggagggaggaagctgactgagcgcagggggtagtggtgggggaggcagctcccattccaggaactggaagtggggaggatggtgggggctgctgaatgctccagggtgaagctgccagctagacagggctgacccactcacctctcctcgggaggaggcaggagatccaggtggtcttcactcacatacacatggcaggtggagcaggccagggaggcttcacaggcccctaggggtgggaagtgaagggggcgcaggtgagtggcagagtcaggaaggggctgctatgcgaatggcgtagaggagtagacctctcttccaccacgtgcctcacgtctccctcctgggcctgcagctccactgtgtgtaccaggcactgtgtcatgtcctcaatgt

SEQ ID NO: 742877 - DNA, 511 bp, Homo sapiens
agtttaaaattagggcatacttttacatttttgtattgcaaaatatttgtattataaaattcacaagtgaatgtgtttatatgcatgtacatatacatgcacacacagttcccccaacagctggtagggaagggtcatcctggccagaagtgaaccttcacacagaccctccrtttgctatgaattgctcacacttggcaggacccaggaagactgaataataagactaaaattcccagcgattaatattgaatcagcacttacgtagtctaccaggctctttagataactttttctttttcaattttttttttttaatagagacagggtcttactatgttgcccaggctggtcttgaactcttgagctcaagcaattacaggcatgagccactgtgcctggggctttttgtttttgttgtttgttttttgtttttgagactgagtctcgctctgtagcccaggttggagtgcagtggtgcgatctcggctgactgcaagctccgcctccc

SEQ ID NO: 742878 - DNA, 641 bp, Homo sapiens
gccctgagctccccttaaatgctgcctgccctcaccctggctcttcacaggtcccctgccctggcctccccaggatccagttctaaaggggtcacactagccactggactggccctcaggaccgcactgcaacactgctatgtgactagtcagtgccttatctggcctttccaggtgtgaaatatttgcaacatcacccaggtctgtggggcgggggcatctggctcagtagccccamgtctctatctggggtcacccagtggcctctccatgaacccctctgccctggcctggttgttggtccacccccaccctcagaccaccgtgttgccctccagaaacgtgggtgacgtgggcatgtgcatgcccctctccagggagctggagctgcggagtggcaggaggtggtggcccggggtcccgccccgcctccgtccttgcacccccacccccggcctccagcactgcagcggccgaagcacctcccgccgcaggtcccggctgcgccacgtgtagatgacggggttgagcagggaattcagggtggagacggcgaaaaagtagtgggctttgtagaggatcgggcaggagtggacgggacaggcatagtccagaaggaggatgctgaaggcgggcagcca

SEQ ID NO: 742879 - DNA, 641 bp, Homo sapiens
gccctgagctccccttaaatgctgcctgccctcaccctggctcttcacaggtcccctgccctggcctccccaggatccagttctaaaggggtcacactagccactggactggccctcaggaccgcactgcaacactgctatgtgactagtcagtgccttatctggcctttccaggtgtgaaatatttgcaacatcacccaggtctgtggggcgggggcatctggctcagtagccccaagtctctatctggggtcacccagtggcctctccatgaacccctctgccctggcctggttgttggtccacccccaccctcagaccaccgtgttgccctccagaaacgtgggtgacgtgggcatgtgcatgcccctctccagggagctggagctgcggagtggcaggaggtggtggcccggggtcccgccccgcctccgtccttgcacccccacccccggcckccagcactgcagcggccgaagcacctcccgccgcaggtcccggctgcgccacgtgtagatgacggggttgagcagggaattcagggtggagacggcgaaaaagtagtgggctttgtagaggatcgggcaggagtggacgggacaggcatagtccagaaggaggatgctgaaggcgggcagcca

SEQ ID NO: 742880 - DNA, 620 bp, Homo sapiens
cgacaattattttgattcttccttccttaaagcatttgcaatcagctaccatccaaaattgcttcttcattgaggatatttacagaaaatactccgacatgtactcttgaatacaagtttctgataacattaaaatcataccattagactatttaagaatttccaaaattttaacaaactgatagcttcatgaaactgccaaccaagagcaagcagagaattcatttcatgagactaaaagataataatgaaaataatatttttatgattttttatttgaaattttgtggattctttgttttgtttcccagatttcaggaaacattttttctttyaagctatctagagcttcaacaattttgcgaacaaaaattgaaacatctatattttctccctacctgactgctccagaattcggaaattattcatgaatatttatatgtttataataatatcgttatttgcacaaaaaatatagttattaatattgttataaaataattattattgataaacaattatttgatgatcattatttaataatttattaatatttattaataaattaataattattatttaacgactaattgtaattgttaattaatattaatattata

SEQ ID NO: 742881 - DNA, 623 bp, Homo sapiens
atgaaaaagccctttttaatatgcatttttaaaggcctacagaaaaccagggccaaacctctcaattactctaaactgtctataatggaacaaaagccaaataaaaatcttgtagcctttataaaaaggctaaaagaggcactaaaaaagtatatctttttattctctaatccrgttaagtaacagctcatcctgagggacaaatttattacacaggcagctcccaatattaaaaaaaaaaaaaaaaactacaaaagaaagctacaggaccaaatagcaccttaaaaaacctcctgaaggtggccactttggtcttttataatatggaccaggaggagtcccaaaagaaagaaaaaaagctcaggagaaggacaaagtctctagcagcagctttgaaggctcgcaaagtcccagatcaccaagatgcatcctctagttgctattagtgtagcaggccagaatgtccagtcagcaaaatgaagcaacctccactctgtccagcctgtggcaaaaaccactgaaaacagaactgcccccagacatggaggtcactgagttcaaaaccagtctcacagatggtccagcaaaactgatggatcctggtgcttgaacctaggctccag

SEQ ID NO: 742882 - DNA, 616 bp, Homo sapiens
gaaaattcaaatctttgaattcatcctcttctttccccaactttgtccagtgacaacccagccaatctcattatgctcattagttttcaaaaacattcaaaagtattatgtacatgatcactcagattctttttttttttttttgagacggagtcttgctctgtcgcccaggctggagtgcagtggcatggtctcygctcactgcaagctccgcctcccaggttcatgccattctcctgcctcagcctcccaagtagctgggactacaggcgcccaccaccacacctggctaattttttagtattttttttttttttaggaaagatggggtttcaccgtgctagctaggatggtctcgatctcctgacctcgtgatccacccgcctcggcgtcccaaagtgctgggattacaggggtgagccaccgcacccggcccactcagattcttataaatgtttgttaggcgtttccaatgatgacatttggtgtatccctatggccacatcatgttatgcactatcaacactactggaaatggagtcattagtgtttttaaatctaatcaaattagaaagccgatttcagaaactttggatccaattcagaaaactcatcc

SEQ ID NO: 742883 - DNA, 616 bp, Homo sapiens
gaaaattcaaatctttgaattcatcctcttctttccccaactttgtccagtgacaacccagccaatctcattatgctcattagttttcaaaaacattcaaaagtattatgtacatgatcactcagattctttttttttttttttgagacggagtcttgctctgtcgcccaggctggagtgcagtggcatggtctccgctcactgcaagctccgcctcccaggttcatgccattctcctgcctcagcctcccaagtagctgggactacaggcgcccaccaccacacctggctaattttttwgtattttttttttttttaggaaagatggggtttcaccgtgctagctaggatggtctcgatctcctgacctcgtgatccacccgcctcggcgtcccaaagtgctgggattacaggggtgagccaccgcacccggcccactcagattcttataaatgtttgttaggcgtttccaatgatgacatttggtgtatccctatggccacatcatgttatgcactatcaacactactggaaatggagtcattagtgtttttaaatctaatcaaattagaaagccgatttcagaaactttggatccaattcagaaaactcatcc

SEQ ID NO: 742884 - DNA, 616 bp, Homo sapiens
gaaaattcaaatctttgaattcatcctcttctttccccaactttgtccagtgacaacccagccaatctcattatgctcattagttttcaaaaacattcaaaagtattatgtacatgatcactcagattctttttttttttttttgagacggagtcttgctctgtcgcccaggctggagtgcagtggcatggtctccgctcactgcaagctccgcctcccaggttcatgccattctcctgcctcagcctcccaagtagctgggactacaggcgcccaccaccacacctggctaattttttagtattttttttttttttaggaaagatggggtttcaccgtgctagctaggatggtctcgatctcctgacctcgtgatccaccygcctcggcgtcccaaagtgctgggattacaggggtgagccaccgcacccggcccactcagattcttataaatgtttgttaggcgtttccaatgatgacatttggtgtatccctatggccacatcatgttatgcactatcaacactactggaaatggagtcattagtgtttttaaatctaatcaaattagaaagccgatttcagaaactttggatccaattcagaaaactcatcc

SEQ ID NO: 742885 - DNA, 543 bp, Homo sapiens
ggaaaaaggattgccattttaaagtgaaaagcccaagagattttataaacaagctgatcgggagaggtgcttcatttacataaggtgcgacaaaccagtcaggactaggtatgtcattgtgtcctttgcataaggtgcaaacttctgacagtccccactccaacgtgtttttttgagacggagttttgctcttgttgcccaggctggagtgyaatggcgcaatctcagctcactgctgcctccacctccctggttcaagcgattctcctgcctcagcctcctgagtagctgggactacaggcacgtgccaccacacccggctaatttttttatacttttagtagagacaggggttcgccgtgttagccaggatggtctcgatttcctgacctcatgagccacctgcctcggcctcccaaagtgctgggattacagccttgagccaccgcacccgaacaagccctaactcttaaatgagaccatacgtctttttattttagccccagttcggttcatggcatgtttttaattttgggggaatgc

SEQ ID NO: 742886 - DNA, 543 bp, Homo sapiens
ggaaaaaggattgccattttaaagtgaaaagcccaagagattttataaacaagctgatcgggagaggtgcttcatttacataaggtgcgacaaaccagtcaggactaggtatgtcattgtgtcctttgcataaggtgcaaacttctgacagtccccactccaacgtgtttttttgagacggagttttgctcttgttgcccaggctggagtgcaatggcgcaatctcagctcactgctgcctccacctccctggttcaagcgattctcctgcctcagcctcctgagtagctgggactacaggcacgtgccaccacacccggctaatttttttmtacttttagtagagacaggggttcgccgtgttagccaggatggtctcgatttcctgacctcatgagccacctgcctcggcctcccaaagtgctgggattacagccttgagccaccgcacccgaacaagccctaactcttaaatgagaccatacgtctttttattttagccccagttcggttcatggcatgtttttaattttgggggaatgc

SEQ ID NO: 742887 - DNA, 657 bp, Homo sapiens
aaaagagcaaactgagtctcagagagggcaggcctctagcccaagttacagagctcacaggaagccaggtttgtgagatcctcaagcccaaacctttttcctctgccatgctgttctgcacccattcattagggtcaatgccatattaatacagggacwtgtataaatggaggaatctcaggcaatgtcatggtcccagaggggaaatatcttgaggtctttgaatcagcacctggctcctcctcccacaccccggatgctccacccagcagacccagggctcccctcctggccctccttgtatcctgtccagaattgccctgccgggtggacttgggtgagggggtgcttgaaggatggggctcctagcacagctgctaagcaggagggcagggaagacagtgctcctgacactggctgggtgttggggagccccaaagcctcccccaccccaccaccactgccagctcaatcaaccaggggattcaggctcctggccctacagcctcagtggggtagggtgcatcccccaaaatccctactccctctgcaaggacagacctcacctactggcagttccatccctgttaggctcagggagcaaagccagagtttgatgaacaggcggggttatagggacacagaagaaagcgctcc

SEQ ID NO: 742888 - DNA, 657 bp, Homo sapiens
aaaagagcaaactgagtctcagagagggcaggcctctagcccaagttacagagctcacaggaagccaggtttgtgagatcctcaagcccaaacctttttcctctgccatgctgttctgcacccattcattagggtcaatgccatattaatacagggacatgtataaatggaggaatctcaggcaatgtcatggtcccagaggggaaatatcttgaggtctttgaatcagcacctggctcctcctcccacaccccggatgctccacccarcagacccagggctcccctcctggccctccttgtatcctgtccagaattgccctgccgggtggacttgggtgagggggtgcttgaaggatggggctcctagcacagctgctaagcaggagggcagggaagacagtgctcctgacactggctgggtgttggggagccccaaagcctcccccaccccaccaccactgccagctcaatcaaccaggggattcaggctcctggccctacagcctcagtggggtagggtgcatcccccaaaatccctactccctctgcaaggacagacctcacctactggcagttccatccctgttaggctcagggagcaaagccagagtttgatgaacaggcggggttatagggacacagaagaaagcgctcc

SEQ ID NO: 742889 - DNA, 644 bp, Homo sapiens
ctgcatggtgggggttgggagggcagatacttgaggacaatgtcctattgagactactatggggtgtaataatggatgggtccatcgagaaccaaggatttcagaaactcttgtagcaatatggctcacattattcataaaaatatttttgttttcttttatggtagaattcaggtgcagaggattcagactgtgatatttcctgtttgaggcttttgattgacattggtttgtgcaagatccttttcttatttcatttgtttatcccctttctttcactgtttccattyttttctgacaggagttttcacatacttaatatgcactttttgatttgtatatgcttttgtaagatacacattgcattctatctgcacatattttttatgtgactattttaaaatggtaaattaatgggcttaattttattagagaagttttaagtttatagaaatattgatcagaaagtatagagagttctcacatacgcctcacccctgcatgtggggcctcacccctgcatgtggggtcatctctcctattcctgacatcttgcatttctgtagcacctgtgctacaatcgatgaaccaatatggacacattattaaccaagttctagagtcgtctttccttttgttgacat

SEQ ID NO: 742890 - DNA, 641 bp, Homo sapiens
ttcctgcaatggtaatgggttggaattttgaacccaccttctgtgacttctaggatgagcaagtgaatccatgtattgaggataatgggaactgggtttctcactattggggaaacatgcagaggaggaggttagaaatgtagccagtgttagccaggcatggtggcacatgcctgtagtcccactgctccagaggctaagatgggagaatcgctcgaaccaagaaggcggaggttccatcattgagccgagattgcaccactgctcttcagcctgggtgacaatagtgagactccgtctcaaaaaaaaaaaaaaaagaaatgtaccttgttgtgctgaattggaatcaaaaggggcagatgaactcatrgtttttaatatctatctatcatctatctatctatctatctatctatctatctatctatctatctatcatctaccatcatctatagatacagaaataaatattaatgcctatttaatgtgtgtgtacatgtgcatgtatttcccagctctgtctgctgagaggtcctagaaacaatgacacgctagtaacaatgagcacgtcttgtgctaagatcctgatttttatttactaatctcaattaaatttttaaaaagtttatccttcttttgtg

SEQ ID NO: 742891 - DNA, 550 bp, Homo sapiens
cgggattatggactctgagggaatatgtataatttttatgcactatgtttattggcacatttgtgctaatagccaataagatgatattgctgtcttaataccatgcgagtctctgtgactctgtggctaatgagtgggggcctctgagtacctgactgaggcggggaagggggcaacatgggctccgggatatggggtacgatgctgagaatccaaatactggcttggcagattgtacccttataatatggaatatgtaatgcagagaggaaatcygggtctaaccagggaatggaaccaccagggaaacactgacattgcctttacagcaaagtgaccgtccttgggagacaaacaacaatcccaaagatatttagtcctcaattaaataaagccatgtcctcctgattggcttccagcgacccttctgctcccaggagccggagattttgctttttgcgtgaatttatggctacttctggacagataacaagatgttagacagctgaccctccaacttggttctagcttctctctgtgaatttcatgt

SEQ ID NO: 742892 - DNA, 419 bp, Homo sapiens
tgaccatttttctccaattaagctgaaattgaaggatcctcagacgtagacatccaagggaaataattagtgcttaaaatgttaattgtgctcagatatgcctgtgctgtggcggcagcttgccagtgagcaggcataggtargtcaccttctgccctcaagcagcccccatcaggcaggctggtctccccagggacccagtgtgggcagcccaaggccaagaccctggcagcttttctgatggtggacactggcttaatgatagtgagacgttctgtgaaccccccagcctcctgcctgaccggcccaccgtccccgggcactggcaggcagcatcagagagtggttacagcaaggacatggaatcagacagctcgggcctggacccaccactctgccagcctacctgggcagcagtg

SEQ ID NO: 742893 - DNA, 649 bp, Homo sapiens
tgacccacttaacctctttgagactcagtgagtgccctcatgccaaacagggatagtaaaacctatcctgctgaagcccccacgggagcgggatcatttctctgtccagcctttaacacccctcagcatggggcctgcggcaccagctcccaaatgaacaatgacagaatgagtgttttccctccaacggcgccaggaggggtcagggatcggggtagcakcgtggtgtttcccccttctgggcagcggaggggccctgcttggccagccattcagaccccaccaaccctgcacctaggattggatgagatttcctgcccaggggttggagtgagatttgctgccacagctgcctgagccccaggacgaaggggaggctccgcctagcgggtattggacgccccagctgcctgagcccgggagccctgggatgaagtaggggctgcccatgccaaccgcagttcccccaacctgcccgccgcctagggggaagcaccaccccctgcccggggagaggaattcactcccacagggattctcctgctcattactcgacccacgcgtgagccaggcttcgctctctgccaagatgacacgtctaagaggcttagtcttctttatgctgtggatcctgaggaaatccacttag

SEQ ID NO: 742894 - DNA, 649 bp, Homo sapiens
tgacccacttaacctctttgagactcagtgagtgccctcatgccaaacagggatagtaaaacctatcctgctgaagcccccacgggagcgggatcatttctctgtccagcctttaacacccctcagcatggggcctgcggcaccagctcccaaatgaacaatgacagaatgagtgttttccctccaacggcgccaggaggggtcagggatcggggtagcagcgtggtgtttcccccttctgggcagcggaggggccctgcttggccagccattcagaccccaccaaccctgcacctaggattggatgagatttcctgcccaggggttggagtgagatttgctgccacagctgcctgagccccaggacgaaggggaggctccgcctagcgggtmttggacgccccagctgcctgagcccgggagccctgggatgaagtaggggctgcccatgccaaccgcagttcccccaacctgcccgccgcctagggggaagcaccaccccctgcccggggagaggaattcactcccacagggattctcctgctcattactcgacccacgcgtgagccaggcttcgctctctgccaagatgacacgtctaagaggcttagtcttctttatgctgtggatcctgaggaaatccacttag

SEQ ID NO: 742895 - DNA, 654 bp, Homo sapiens
cagagtggctgaaacagagcaagggagggaaagaagggcaggattatttagagacggagctgtagacagggccagtttacataaagtcttacaggccatggtaagcatttggaatttacttccaaatgtaacaaagccattgcagggctacaaacaagcaccggcttgttccaatkaatgtttacaaagacttctccagtgaacaacaaaaattaacagtgattgcctatagggatgagggttatagacagatgtgggtcagggctatgggaacttaaaaagcgttgttgtttttttaaaccacgtaattattagctatgcgcaaaaatgttcagtgaaaacagtgctggttgctgtgaggagaatggcctgcaggggcggaagcaggagatgagaaagctggtgtccttgcctgggcaagaaaggatagtggttctggaagagggtggtgctaatagatgagttgagaagggtcaggaactgggatcttttttgaaggtagcgccaagaaattaaacatggggtgtgagaggaagcatgaatcaggggtgacttgaaagtcatcctagagatctgttgtacaacagggtgactctcattcataacaatgtgttatatgcttgaaacttactaaaataatagattttaagtttt

SEQ ID NO: 742896 - DNA, 654 bp, Homo sapiens
cagagtggctgaaacagagcaagggagggaaagaagggcaggattatttagagacggagctgtagacagggccagtttacataaagtcttacaggccatggtaagcatttggaatttacttccaaatgtaacaaagccattgcagggctacaaacaagcaccggcttgttccaattaatgtttacaaagacttctccagtgaacaacaaaaattaacagtgattgcctatagggatgagggttatagacagatgtgggtcagggctatgggaacttaaaaagcgttgttgtttttttaaaccacgtaattattagctatgcgcaaaaatgttcartgaaaacagtgctggttgctgtgaggagaatggcctgcaggggcggaagcaggagatgagaaagctggtgtccttgcctgggcaagaaaggatagtggttctggaagagggtggtgctaatagatgagttgagaagggtcaggaactgggatcttttttgaaggtagcgccaagaaattaaacatggggtgtgagaggaagcatgaatcaggggtgacttgaaagtcatcctagagatctgttgtacaacagggtgactctcattcataacaatgtgttatatgcttgaaacttactaaaataatagattttaagtttt

SEQ ID NO: 742897 - DNA, 471 bp, Homo sapiens
tggataagcctgcgtcgggctggaaggactgaacgcccagggcattgaagggggctttgtggtaggggccactggctggcccacgtccctggaaccagaggtgaccctgatggggccattgttattgggtcctcaggtgtgggcagctggtgcgggggtggcccacagccycccctcgacgctggtgtggaagggccagagcagctggggcacgggcgagagcttccgcaccgtcctggttaacgcggatggcgaggtgggtgtgtgtggcttggggggtgctcggctggagtcctgggcagggtctgggcaccctcggggccgccacagcagctctgggcccgatcccgggacatgccgccgtgtcctgtcccgcacaggaagtggccatgaggactgtgaagaagtcctcggtgatgcgtgagaatgagaatggggaggaagaggaggaggaagccgagtttggcgagg

SEQ ID NO: 742898 - DNA, 514 bp, Homo sapiens
ccatcagagaagctggtctctcattccagaccccaaagcctccaggactgctggtttcctgtgccccatctgccaatattggataggaagccacctttcaagtccacatggcacagcaggagctagagtgtaacgttccttggttttgtctttggttttgtggatctccccttgtgtcyttagctgtctgtccctatttacagcaaagagaaggtgatcatgttaaggagccagtccagtgtcccctgccactgggcacttatgttttccattagatctctcctctgaacagaatgcttgacaggtatctccggacacactagggtgagggcttgtttacttgctacatggcttcagggtaactgggaaaagacctgccatcagacatgggggccctgacatgccagtatcaacaggaaacatccctgggccattggtgtcacacagtagcccaggttcacacacacacacacacaaacacacacacacacacacacagctataagcaagagta

SEQ ID NO: 742899 - DNA, 635 bp, Homo sapiens
tcacattttaatgtctttgaaaacgagatgtgtcttataattgatgacttatcatggcttaattggcagcacttttgtctttctttgtggtacatcttataattgagagcattttagatttagtctaaatacctagactataaactgagcttcagtagcaaaaaagacccaacaatccagtggcccagatgaggtcgaagtttgttcctctctcacgtaacaaccctgataaggagactgctgttccatgtgatcattcagggacccaggattctcccacactgttactctggcatctctgcatggtcgaagtgggtcgtggggatgtctgaattgtagctcatgagaaggggaaaagagaggaagtggacagcaagcactttccttttgagtaagtgaggcagaaaggacacgcctcataccttactgttgagaacgtagtcatatggtcagggctggcttactggttgttgacagtggtgtccattctgattggytggacgtctattggaattagctagacgtctattctgattagctagacgcctattctgattgactagacgtccattccgataggctagacgtccattcctggctagacgtccattctgattggctagtgcctgtgcagc

SEQ ID NO: 742900 - DNA, 641 bp, Homo sapiens
ctagacgcctattctgattgactagacgtccattccgataggctagacgtccattcctggctagacgtccattctgattggctagtgcctgtgcagcgccgattgctacatattttgaatattactcctgcacatggcctggccaactgcaaggaagagtgggaaatgtcagtcctagctggacaggtgtgtgcccaacttacgcactattattttagaagaggcgaacagagtttgttggaaaatagcatctccacggtaggaagctctgggagtggaaaaattgrtaagtttggtgacagaacagtgaaaagagagacctttaatcctgaacgaggatggggtgaatttgggaagagatgatggttggggaagaagacctaagagagggtaattgagaactggtgacttgggaatcaggatccccgaaaaagaggatgagaaaagcatcccttcttcataaatacttactgagcacccgctaggaactagggctcatgctgggcgctgggaacatagatgaataagaccatgaacttattcttcaaagaacgcagggtcctgtaagagtggcagacagggacagggataatggcaacgcagcatgatgcttgcagtaatggaggtcatgcgggcatggc

SEQ ID NO: 742901 - DNA, 638 bp, Homo sapiens
aaaaaacttatctcaacatataaggatttttcttttctttttttttttttgtttgagacggagtctcgctctgtcgcccaggctggagtacagcggcgcgatctcggctcactgcaagctccgcctcccgggttcacgccattctcctgcctcagcctccggagtagctgggactacaggcgcccgcygccacgcccggctaatttttttgtatttttagtagagatgggtttcaccgtgttagccataatggtctcaatctcctgacctcatgatccgcctgccttggcctcccaaagtgctgggattacaggcgtgagccaccgcgcccggctgtttttttttttttttacttgcctttttccaaatgagaaaaccaaggctcagagaggtcagtggtgcaatctcggctcacagcaacttccgcctcccgggttcaagggattctagtgcctcagcctcccaagtacctgggatcacaggcatccgccatcacacccagctaatttttgtatttttagtagagacagggtttcgccatgttgtccaggctggtctcgagctcatgacctcaggtgatccgcccaccttggcatcccaaactgctggggtaggattttcttttttacttccctttt

SEQ ID NO: 742902 - DNA, 638 bp, Homo sapiens
aaaaaacttatctcaacatataaggatttttcttttctttttttttttttgtttgagacggagtctcgctctgtcgcccaggctggagtacagcggcgcgatctcggctcactgcaagctccgcctcccgggttcacgccattctcctgcctcagcctccggagtagctgggactacaggcgcccgctgccacgcccggctaatttttttgtatttttagtagagatgggtttcaccgtgttagccataatggtctcaatctcctgacctcatgatccgcctgcctyggcctcccaaagtgctgggattacaggcgtgagccaccgcgcccggctgtttttttttttttttacttgcctttttccaaatgagaaaaccaaggctcagagaggtcagtggtgcaatctcggctcacagcaacttccgcctcccgggttcaagggattctagtgcctcagcctcccaagtacctgggatcacaggcatccgccatcacacccagctaatttttgtatttttagtagagacagggtttcgccatgttgtccaggctggtctcgagctcatgacctcaggtgatccgcccaccttggcatcccaaactgctggggtaggattttcttttttacttccctttt

SEQ ID NO: 742903 - DNA, 558 bp, Homo sapiens
gtcgtatccaattaatgtccctagtaatttttgaaagtcattaaatgttttcagttgatccctatgtatggttactttctgtggcacaatggtagtgtcatttactaaggtccccaagtaagagtaaagattagtagtctgaattttgtcaggagctataattaaaccagcatgagaaattgaattttgcaagtaatcataacattggaataatatttcttgagtgggggcaccacaaaatatatcatccatctgatgaataatgtaacactgaaagttttttaccagtaggttcaattgcttgccctacataagtctggcaaattgttgaactgtttaacatgccttgtggcaacactttccagtgaaaatkcctagcaggctgcaggttgtttacaacaggaatcatgaatgcaaaccattcacagtcttgctcagctaaggggatagaaaagaaagtcttttaaatctatgattattaaaggccaatttttccaaatcatagcaggagaaggcaatcctggctgcaattcccccataggttgtataactgaatta

SEQ ID NO: 742904 - DNA, 472 bp, Homo sapiens
caccaaagggcaggggagagattgggatcccaggggcagggacagagagcagagttctgagtctcacgcacggagacctcaccaaggcaggacattggatatggggacccctcttaactggaagatcaggatttctrggggtatagtctctgatgtgggaatcccccagactaaatctgggacacagccacccccagggctcatttcttagggtgaagagcagagaactctcctccccctaaggataagagaatgggagctccagcaccaaggagtgggggctaagactctcagggctgatgagcaggataatggggactcccaggaatggggggtatatcactcagcatctagtcgagagacagaaagcgtatggccatttgaatgaggaaagtttaattaaagaatcacttacttattaataggagattaactattaagggtaaagagggtctggtgccgtggctcacac

SEQ ID NO: 742905 - DNA, 464 bp, Homo sapiens
gccacggcaccagaccctctttacccttaatagttaatctcctattaataagtaagtgattctttaattaaactttcctcattcaaatggccatacgctttctgtctctcgactagatgctgagtgatataccccccattyctgggagtccccattatcctgctcatcagccctgagagtcttagcccccactccttggtgctggagctcccattctcttatccttagggggaggagagttctctgctcttcaccctaagaaatgagccctgggggtggctgtgtcccagatttagtctgggggattcccacatcagagactatacccccagaaatcctgatcttccagttaagaggggtccccatatccaatgtcctgccttggtgaggtctccgtgcgtgagactcagaactctgctctctgtccctgcccctgggatcccagtctctcccctgccctttgg

SEQ ID NO: 742906 - DNA, 536 bp, Homo sapiens
agcttgtcttccctctctgctttggtatttaccttcggatcctgggacagccccaagagagaaggagcagaggtcagcagaaaccccctgcagctgttgagaatccagacacgctgctcactgcagaggctgcaccacatctggtggctgcagggggacttgccgtggctccttctagggaggtgcattagtcagggttctccctagaaatggaatctccttagatgggaatttcttcttacctctaatgcatgtatgtatggagacagaaagagacagagagaatttattatgggaattggataatgtgatgatggaggccaggaattcccakgatataccatctgcaagccagaaaccagggacgctggtggtgtaaattcagcctgagtccaaaacggcctgagaacctggagttctgagggcaggagaagacggatgtcccagctgcagaagagagagcaaattccccctttcctctgcctttttgtcctgttcatgccctcaatggatttgatgacacccacccacataag

SEQ ID NO: 742907 - DNA, 505 bp, Homo sapiens
gtgagatactaacacagagaaaacacagatgtggctgtgttttcactgaacttttggcacttaatcctgttttaaattaatgatggcttccattttttagtctttcgagggaaaaaatgcaagaaaactgattatttctacctgccgcaagatactttgtcagttagcaccaaacctggaatctagactcctcttgccaaaagccagtgtcttctaatacccccaataatgcaaaccagcaatgcaaagaggaatggaagatttcatgccccaatctctgaagaaaaaaaaaagagtagatgcaaggttcctggggtccgggtgtgcttggtttactgccgggacagcagggagcccaytgggctatagggtcaaagaatgaatttggggatgaagtatagacctggccacgcagccctgatgatcacactagagtctatactgtatcctaagagaaacagaaggtttaagtagagggatgatttttcagagtttccctttagaa

SEQ ID NO: 742908 - DNA, 572 bp, Homo sapiens
tgaggtcaggagttcgagaccagcctggccaacatggcaaaaccccctctctactaaaaatataaaaattagccaggtgtggtgctgggcgcctgtaatcccagctattggggaggctgaggaaggagaatcgcttgaaccygggaggcagaggttgcagtgagcagagactgtgccactgcactccagccaggtcaacaagagtaagactccatctcaatagaaaagaaaggaaaggaaaggaaaggaagggaagggaaaggaagggaagggaaaggaagggaggaagggagaaagggaagggaagggagaaaggaaaatgagcatggcgtggtgacgtacacctgtggtcccagctatgggaggctgaggtgggaggatcacttaagcccggaaatttgaagttgcagtgagccgagatcgcaccacagcactccagtatgggcaacagagagactctctctctctttaaaaaagaaaaaataaaaatcaggggtggggtgtgaaggtcaggagcactttgggttttaggctgctggagggattttagtgtgtgtgtcgcagggatgatg

SEQ ID NO: 742909 - DNA, 482 bp, Homo sapiens
acaatcagaagagagtgtcatcttctacatgctgggccatgagatatgtcacaacatcccctatgggcaaagcccaggtaagagaagagatacacatcaaatagttgatgggctaagagatacttcacaatgccccctgtagaaagagatgaggagaaataaatcagattgcctgtgtgctgagcccagggataagtcactatttcatctgcggacatggcccargcaggcgaggagagttacatcacttagatgctgggaacagagatatgcaacaatctcttctataagcaagaccctggtaagaaaataaagatacatcaaatatttatggacccacagatgccccctttttgacagagtcaaggcaagaaagtcacatcaactttgtcctgggcccagcaatatgtcaaaataccttctgaagacagggccaaggcaaatgagtaacaccttggagctgggcccaggatatatgtaac

SEQ ID NO: 742910 - DNA, 475 bp, Homo sapiens
gcggccctggcttctctggaatttccctcggggccgggcagcggatccgaggtgaaggtccaggaagtccccacacaggtgacatcagcactgggctgaccactgcgtacactcagggcagccatggtggggcctggagcccgttccccctcctgggacccttgccctgcactcacgtggcaggggcctgcctgsgaagggccaaggtgtctgtgtcctaggctgctccagcatccggcttcttcgtggcctggggaccccctcagggtgtgtctgttctctgtagtggccctggcacctgcaagtggggcctggccctgggtggcactgagaaattcatctcggatgaatacatggccccaacctgccctccccaccttgcagccccatccaacgatccaacgcccctgccctgcccccggccctttgctctggccccagccctggcagagcaatctcctctggtgccctactt

SEQ ID NO: 742911 - DNA, 586 bp, Homo sapiens
tcccctgagtctttgtccccgctgagactttgcatgtgcagtgccttctccctgtttatcctccctgcacagggcgaccggcagattgctgatcttccttcacccagcctgccctgggtgccccaacctcaggacacagccctgacccagactaggctgctgcagcctgtacccagcctgaggtgctatgtcaggggtgtcactgggccccttcaacccagctgtcctagcgtcagtgcggaggtgagaaagcctgtcccatgtggaatctcaaacccgtcagacaggtttgttgttccctaaagttgtcttggcacagaggctgccccgacctggcctggtaggatctcactctgggcctggccctggtcaagcaggtggctgcagggcccgggaacacgccggccagcaccgrcctgaggacaccctggagcaggtggccctgaccacagggagggtatggtgctgacacgtgagggcggccacgggagggggatggtggcaaaagaagggactgagacagagatagacagagatagagaaacagagacagagacaaagagagagctagagaaacagacagagg

SEQ ID NO: 742912 - DNA, 452 bp, Homo sapiens
ttcatcctcagtacctttgcacagtccctgtttcttttttctttttcttttcttttgtgtgtgtgtgtgtgtgtgatggattcttgctctgttacccaggctggagtgcagtggcatgatcttggctgactgcaacctccacctcctgggtgcaagcgattctcatgcctcagcctcctgagtagctgggattacaggcgtgcaccaccacgcccggctaatttttgtatttttagtagagacgggtctccctatgttgcccgggctggtctcgaacccccggactcaagcratccgcccgtgtcaggctccgagtgttgggtttacaggtgtgagccactgtacccagcctgcactgtccctgtttctgtgtggtacgttctctcttcagagagacgtgaaagatagttctacttcagagtggatacactgggaggatccttgatgccttg

SEQ ID NO: 742913 - DNA, 568 bp, Homo sapiens
atgctttcacgttgtcccatttttttaccctggttcttccaagccctcaactttcccgccgacgttcttttaaacgtcctcgggttacctttggcgatgcgtcctctgctttcacatgctctagtgttccttcaccrgggtctttgtcaccccacattgggcgaccaggaatgttggggtgatcagacccaacaccaggtcatgggagtgacaaagtccagcagagtcaaaggactgagaaaaagactttgagagcgaaaaaggtgggacaccagggggccatcgctaattgaggaggctgcgaaggccctgagctctgggaacccaccgattttattggtaatccaacaaagaaacaggtggtgagaacgtggaggtcaaaagggtgggcccattatctacagttgtgacggtttagcatttatatgtaacatgttctactacttgagataatgggaatggagcctaggaaggctagaagcaaggagccagcaagtctagtcacatttcagaggactttatgcaagtcctgcctcagtttgcctcccaacactcagctttttcccaa

SEQ ID NO: 742914 - DNA, 585 bp, Homo sapiens
ctttaagaaatttaaataagcagaatgctttcacgttgtcccatttttttaccctggttcttccaagccctcaactttcccgccgacgttcttttaaacgtcctcgggttacctttggcgatgcgtcctctgctttcacatgctctagtgttccttcaccggggtctttgtcaccccacattgggcgaccaggaatgttggggtgatcagacccaacaccaggtcatgggagtgwcaaagtccagcagagtcaaaggactgagaaaaagactttgagagcgaaaaaggtgggacaccagggggccatcgctaattgaggaggctgcgaaggccctgagctctgggaacccaccgattttattggtaatccaacaaagaaacaggtggtgagaacgtggaggtcaaaagggtgggcccattatctacagttgtgacggtttagcatttatatgtaacatgttctactacttgagataatgggaatggagcctaggaaggctagaagcaaggagccagcaagtctagtcacatttcagaggactttatgcaagtcctgcctcagtttgcctcccaacactcagcttt

SEQ ID NO: 742915 - DNA, 585 bp, Homo sapiens
ctttaagaaatttaaataagcagaatgctttcacgttgtcccatttttttaccctggttcttccaagccctcaactttcccgccgacgttcttttaaacgtcctcgggttacctttggcgatgcgtcctctgctttcacatgctctagtgttccttcaccggggtctttgtcaccccacattgggcgaccaggaatgttggggtgatcagacccaacaccaggtcatgggagtgacaaagtccagcagagtcaaaggactgagaaaaagactttgagagcgaaaaaggtgggacaccagggggccatcgctaattgaggaggctgcgaaggccctgagctctgggaacccaccgattttattggtaatccaacaaagaaacaggtggtgagaacgtggaggtcaaaagggtgggcccattatctwcagttgtgacggtttagcatttatatgtaacatgttctactacttgagataatgggaatggagcctaggaaggctagaagcaaggagccagcaagtctagtcacatttcagaggactttatgcaagtcctgcctcagtttgcctcccaacactcagcttt

SEQ ID NO: 742916 - DNA, 585 bp, Homo sapiens
ctttaagaaatttaaataagcagaatgctttcacgttgtcccatttttttaccctggttcttccaagccctcaactttcccgccgacgttcttttaaacgtcctcgggttacctttggcgatgcgtcctctgctttcacatgctctagtgttccttcaccggggtctttgtcaccccacattgggcgaccaggaatgttggggtgatcagacccaacaccaggtcatgggagtgacaaagtccagcagagtcaaaggactgagaaaaagactttgagagcgaaaaaggtgggacaccagggggccatcgctaattgaggaggctgcgaaggccctgagctctgggaacccaccgattttattggtaatccaacaaagaaacaggtggtgagaacgtggaggtcaaaagggtgggcccattatctacagttgtgwcggtttagcatttatatgtaacatgttctactacttgagataatgggaatggagcctaggaaggctagaagcaaggagccagcaagtctagtcacatttcagaggactttatgcaagtcctgcctcagtttgcctcccaacactcagcttt

SEQ ID NO: 742917 - DNA, 645 bp, Homo sapiens
tcattcaactaatacacctccccttctttttttctttgtgatttttaaatagctttatttagagaaaatccatgtatcatataatccatccatttaaaggttacaatttgatggcttttagtatattcacagagttgtccaactattgccattatctaattctagaacatttcatcatcccaaaaaagaaagcccatgccrgttggcagccccagcaaccactcagtttcttctttttctacagatttgcctattatggttatttcatataaatgaaatcatacaatatgtgggcttctgtgtctggcttctttcacttagcataatgttttaaaggttcatccatattgtagcatggatcattatttaatttcttgcagttattttttggagaaaccaggtcattttctcctatagcttttccacattctgaattctgctgactgcatccatgtggggtttcttaatgtattcctctgttccctgtttatcctgtaaactagtatttagaactagaagctcaatcaaatttaaatctcactctttggcaagacaactttacagatggtgcagtgagcttccataaggtgtctgtaagccattgatagttcctgtgatcactccatatttatagcagctatttga

SEQ ID NO: 742918 - DNA, 529 bp, Homo sapiens
cccccatctgagctgtgtggggagctcacacacagctccccaaggtgggatcctccaacattccatccccaaagcatagagtagggctggcacacaggagatgcacaattaagtagtttattaactttttttttttttgagatggagtcttgctttgtcacccaggctggagtgtagtggcgcaatctcagcttactcctgcctcagccccccaagtagctgggattacaggcgcccagcaccacacccggctaatttctttgtatttttagtagagatggggttttgccattttggccaggctggtctcgaactcctggcctcaggtgatccrcctgcctcagcagcccaaagtgctgggattacaggcatgagccaccgcgcccggccttatttattttagaggcaggatctcactctgtgcccaggctgcatcagcagcacaatcacagcttactgcagcctcaaactccagggtacaggcaaacctcagtctcggcctcctgagtagctatgactacaggtatat

SEQ ID NO: 742919 - DNA, 588 bp, Homo sapiens
ttctaaattatagtgagttgtagaattatttcattatatattacaatgtaacaatacagaaattaaatgcataataaatgtaatgtgcttgaatcatcccaaaaccatccccccaattctagtccgtggaaaaattgtcttccacgaaaccggtccctggtaccaaaatggttgaggactgctgacagagagggtatgcaggcctctatatgatcccagggtttcagagtcccttggctgctggtgcgtgatgacattttgtaccaacacactggtgtgccagggctygtactgactcagagctgcagcgtgtcacttctctgcatgactcttacacctgaagcaatgatctgggtgctatgtctctctgggtgcctgtccaaaagtactgccagtaatgtgctcagggaggggctgcagtccccttggtcatgctgttccaaagcacacatcaatggaattcaatcacagggaaggagaaaaggccagtccctccctttccaaatagtccatcactgagaaataaactgcatcaatttgatcaaacctcaacatttgtgaaagcagaggtcccaaactcaaaaagcc

SEQ ID NO: 742920 - DNA, 537 bp, Homo sapiens
acacttacttctcctctgacaaatggcagcgatgcaaacacatagcttataatgatgatcttttaaaagaaatcttctgcattcaatgaaacattacaggacagatcatgaaatttaaatacccagcagatgatataagatactcaagaacagaagtttgaaagccttaacaattaagggatttgtcgatttttcaggaataccatgactaggtagaaaattgccatcattttactctggtattttgtatgaaattggaaggtattaacacttaaaatcaaatctctttcaayaaaatccttcactgttcaacactctgactttttaggctgttattaccttttcatttatgctacatcttttcttgcttacaatgaagttgctttgttggttgtctttctcttctgaaatatcttgtttatgggtttttaaaattaattttctttcatctgcttaaataaagtaaaataaatgataaaagtgtgtgcatatatatgtgtatgcgtgtgttttctcccacaatatgagattactcaa

SEQ ID NO: 742921 - DNA, 662 bp, Homo sapiens
cagaggaagagttccataagggatccacaatgatgtcacctgtctagtatcttaaaaggatacctctatttgctctgtcacgggaaaaggatgaaaggccagaggccagtgaggaggttcttcaaggacccagatgaaagatggtgatggctttcacaaggacaagtaaagagaagaagtggtcaagtgaatattttgaaggtgaggccaagagratttcctggcggcttgtacacaaggtgtgagagatgtctcaaggttttggcttaactaaatgacaagatgagtttcgctgagatggaaaacactgggaggactagatttgggaaaagggagagaccagaagctttgattcagacatgttaagtttgagatacttattgaagagctagctagtaagcagttggatatatgatctagaattcaggagaatggttcataatagagatataaatctggggattattgctgggtatatagatggtattggaagtcatgagagtgcagaccacatcaagggagtaagggtagacagggaggaggaaaagtcgacaactgggctttgagagcccctagtgttaagatattaggaaaacgtagataaatcagcaaagaagcctacaaaggagtagtcagtgaggtaggaaaaaaccagaaaggtg

SEQ ID NO: 742922 - DNA, 517 bp, Homo sapiens
agctgtatcctcatctggggcatgtctactggtctaacatggaaaggtcatgattccatgagcattgggatttcgtctttcaatgggattctaaacaggaagaggctctccaacaaagagacattaaaatactctgccttccaaaacattcagatagatgcaatcactagaagagaataagattggttcttctcaggaaaaaaacataaacataactaagtcaggttaaagtagtggttttctcattttcttgactgtgacccacagtaagaagtgcagttttaattaggacaagaaacaaatacaacacacacacacacacacacacacacacacaygattttgcctgtacacacaaatagaaataaaagtttcattaaaaaatactaaatccaattacacagtaaacactagaacccaggtctctgaccctctgatatttttacaatgtttaattttatttcatttgtacaaaaaggcttgactcaatccatttttaattttctcaacttactgt

SEQ ID NO: 742923 - DNA, 592 bp, Homo sapiens
taggcacatgctgctattgcagcactctccatatttgggagctcctttgagacaataaccaactggttaatgttcatccatcctacttaatatctactatagttcttaacactcagtaacacacagttggcaaacatctgttaattgttgtcatattgcaagatgtaaaygctatatctttagtcacatcaattttcatattttgtgtctagactccttatgtcacaggagatgttcttataaatcctaaaaatatgaaaaaaaagggaaccccaaaggtagttaaccagtcttttgagatagaacaaacaataaaacaaatatggaaaatgcaaatttttacagccctcatagcaaatgtccagctctaggactggtagagtcacgggcagttaggtagacatatattcatgtgttataccctttgctcagagactctgagcactttttcaaagccattttttacgtaataaaataactgatattggtacacctgatttcagcatacgagtcatgaaatcactatcagaaaaataggtttccatttccatgttttatttttttaattgtacatcgacaaattacagttgta

SEQ ID NO: 742924 - DNA, 592 bp, Homo sapiens
taggcacatgctgctattgcagcactctccatatttgggagctcctttgagacaataaccaactggttaatgttcatccatcctacttaatatctactatagttcttaacactcagtaacacacagttggcaaacatctgttaattgttgtcatattgcaagatgtaaacgctatatctttagtcacatcaattttcatattttgtgtctagactccttatgtcacaggagatgttcttataaatcctaaaaatatgaaaaaaaagggaaccccaaaggtagwtaaccagtcttttgagatagaacaaacaataaaacaaatatggaaaatgcaaatttttacagccctcatagcaaatgtccagctctaggactggtagagtcacgggcagttaggtagacatatattcatgtgttataccctttgctcagagactctgagcactttttcaaagccattttttacgtaataaaataactgatattggtacacctgatttcagcatacgagtcatgaaatcactatcagaaaaataggtttccatttccatgttttatttttttaattgtacatcgacaaattacagttgta

SEQ ID NO: 742925 - DNA, 636 bp, Homo sapiens
ataaatacacatgaagacagtattaagaatgatatgatcgggaggccaaggcggatggagcacctgaggtcaggagtttgagaccaacctgaccaaaatgttccccgtctctactaaaaatacaaaaattagccgagtttggtgacacatacctgtaatcccagctactcgggaggctgaggcaggagaattgcttgaacccaggaggtggaggttgcagtgagccgagactgtgccattgtactccagcctgagccacaagagtgaaactccatctcaaaaaacaaagaaaaaaacaaaaaacacaaagaatgatatgttcatgggtgtttaagaagatttggtggactaatgggctacccaatcttaatgagtcaaaccgaaagataacgcgagtgagcaaaatcagcctcatctcctgcacacccttcttatatcaccatttgcagggggttgttattcatcattaagtgagggaaaaagggatattctgyttgagtgtaaaagttgacttatgtaaattaaatcatgcttcctaagtgaaaataattctatacccatttttaaatttaggcttcaaatgggaaagtgaaatgatgcaatcatagtatttaatgacagtaggattaaaaatga

SEQ ID NO: 742926 - DNA, 595 bp, Homo sapiens
gtgattcatgcctgtaatcccagcactttgggaagccgaggcaggcagatcacttgaggttaggattttgagaccagcctggccaacatggtgaaaccacatctcaactaaaaatacaagtattagccaggcgtggtggcacgccctctagtcccagctacttgggaggctgaagcaggagaatcgcttgaacctgggaggcggaggttgcagtgagccaagatcgcttcgctgcactgcagcctgggtgacagagtggaactccatctctaaacaaacaaacaaacaaacaaacraaaatgctactgatttctgtacgtggattttgcatcttgcaactttattgaatttgtttctcttttctaataggtttttggtggagtctttaggtttttccaaatgtaagattatatcatctgacaacaaggataatttgatttcttcttttccagtttggatgccctttctttctttttcttgcctcattgctttacccgggtcttccagtattatgtaaaataacagtggtgaaagtcagcatctttgtcatgttccaggtcttagagaaaaggccttttatttttcaccatacagt

SEQ ID NO: 742927 - DNA, 556 bp, Homo sapiens
acaacagagagtcacaaccaatgagataaaaaaatgataagcctgggaggagagaaattccgtatcatagttgctgacttcagtatcccttcgtcagtaattaatagttcaagttggtaggaaattattaaaggtatagattatctaaacagcactatcactctaattagtgaattcaatttatagaataatcctttcaacaasagtgacgatacattcttctttacctcttatagaacttccaccaagataaagcatattctgaaagctggttgccagagaaaccaatcagcgataaaagaattgggactttcagcttcaccttctctacctctggggaggaaagaaagggcagatattgagctcaatctccagtggctactggtttaatcaataatgcttacatactgaagcttccttaaaaaccctaaatgaaggagttcagaaaaccccaggttcaccacaatgatgaagacattcatgtgcctagagagtagcccaccctaactcagtggggcagaaactcctgtggtcagaacccttctgtgtcttgctt

SEQ ID NO: 742928 - DNA, 491 bp, Homo sapiens
ctaattagtgaattcaatttatagaataatcctttcaacaagagtgacgatacattcttctttacctcttatagaacttccaccaagataaagcatattctgaaagctggttgccagagaaaccaatcagcgataaaagaattgggactttcagcttcaccttctctacctctggggaggaaagaaagggcagatattgagctcaatctccagtggctactrgtttaatcaataatgcttacatactgaagcttccttaaaaaccctaaatgaaggagttcagaaaaccccaggttcaccacaatgatgaagacattcatgtgcctagagagtagcccaccctaactcagtggggcagaaactcctgtggtcagaacccttctgtgtcttgcttatgtacccttcttctgactgtctatttgtatcctttatagtgaactaataaatgtaactttaagtgcttatttgggttctgggagttgttctagcaa

SEQ ID NO: 742929 - DNA, 661 bp, Homo sapiens
aatggatgacagatggcaggagcctgatttctcactgttgcagtggaaagttacagatgagcaaagagaatttgctagaaaagtacatgtggtaatagactagaattggagatatcgatatgaactcatttttatactattatagatgttgatgacatatagaaatatttatatgtatatatatatggattggtaaacacacatatatttccttctttgtcagctgagtgggcctagaagaaatgacacccagagcaatgagtgtacacctaacactaacatctcggtttctaataccatcctccaacaaaaagaaccagacttgtaagaaaatggctgagtttggctggacacagttgctcacatctgtaatcccagcactttgggaggccgagggggaccgatcacctgaggtcgggagtttgagaccagcccgaccaacatggmgaaaccctgtctctactaaaaatagaaaatttgccaggcattgtggtgcatgtctgtaatccccgctacttgggaggctgaggcaggagaatcacttgaactccggaggcagaggttgcagtgagcaaagatcacaccattgcactccagcctgggcaacaagactgaaactccatctcaaaaaagagaaaaaaaaagaaaatgactgagttta

SEQ ID NO: 742930 - DNA, 505 bp, Homo sapiens
cgaaaatcaaagtagtatgccacagaaaaagttaaaataaaaatgcagaaaaagataaaattcaatagttatttttaaaaacctctcagcaaagtagaaatagtagggagcttccttagtctgatgaaatgtacagctaaaatatttaatgttgaagtactgctggttttccccatgatattgggaacacggcaaggaagcctgttcctactgcttctattcaatgttgtgctgaaggtcatggctagcataaggcaaatcaaccacacaatcagaaaaatgrcaatatgaatgtgtacatagaaattctatgggatctacacaaaataaccctacaaccaacacattaatttagcaagaccaccaaatacagggtccacatacaaacatcaagtgcctttctatgtaacagaagcacataatttgctaatcatattgaaaaaaaattaaagacattaaaaattagaaataaaataagatgtgcaaaaactcacagaaaatttaa

SEQ ID NO: 742931 - DNA, 656 bp, Homo sapiens
ttcctgaatttgaatgttggcctgtcttgctaggttggggaagttctcctggatgatatcctgaagtgtgttttccaacttggttccaatcttcctatcattttcagatactccaatcaatcgtaggtttgatctttttacatagtcccatatttctcggaggttttgttcattccttttcattmtttttctctaatcttgtctgcatgccttatttcagcaagagagtcttcaaactttgatatcctttcttctgcttgttgatttggctattgatacttgcgtatgcttcacaaacttctcatgctgtgagctccgtcaggtcatttatgtttccatctaaattggttattccagttagcagcacctgtatatttttatcatgttcttaccttctttgcattgggttagaacatgctcctttagctcagcagagtttgttattagccaccttctgaagccaacttctgtcaatttgtccatctcatcctctgtccagttctgtgcccttactggagaggcactgcaatcatttggaagagaagaggcactctggccttttgggttttcagcattttttcattgattctttctcatcctcatgaatttgtctagtatcgacctttgaggctgctgacccttggatgggattttgt

SEQ ID NO: 742932 - DNA, 656 bp, Homo sapiens
ttcctgaatttgaatgttggcctgtcttgctaggttggggaagttctcctggatgatatcctgaagtgtgttttccaacttggttccaatcttcctatcattttcagatactccaatcaatcgtaggtttgatctttttacatagtcccatatttctcggaggttttgttcattccttttcattatttttctctaatcttgtctgcatgccttatttcagcaagagagtcttcaaactttgatatcctttcttctgcttgttgatttggctattgatacttgcgtatgcttcacaaacttctcatgctgtgagctccgtcaggtcatttatgtttccrtctaaattggttattccagttagcagcacctgtatatttttatcatgttcttaccttctttgcattgggttagaacatgctcctttagctcagcagagtttgttattagccaccttctgaagccaacttctgtcaatttgtccatctcatcctctgtccagttctgtgcccttactggagaggcactgcaatcatttggaagagaagaggcactctggccttttgggttttcagcattttttcattgattctttctcatcctcatgaatttgtctagtatcgacctttgaggctgctgacccttggatgggattttgt

SEQ ID NO: 742933 - DNA, 630 bp, Homo sapiens
gagcttaagaacgactgcaacactactttatgggcagggccctggaagagtgagcccagcaacacagagaagctctgatggtacagatcagcactaacgttgaacagctaatgaaggcaccaagtctgaaggaagcagaagggaaagaacctgagctcttcctaagatccaggcctgtggcagccaaggccaagcaggcccatctcaccaccctgaagcatatacaacccacgccggttgaagaagcttggggaagaatctggagatgagattgatgttccaaaggatgagcttagtgtggaattagaaactttattcattggtgtaaccaaaccacctagtgagttaccctaagaattgacacaaatctcatattttaggagattatattggttctgcctctggcatgctggtagactagggccatctcaacttattrttttccagaggttctcctccagacaagatttgcagtaagcaaagagttatactctacctgtctctaaattttctttttcttttctctgtatccttgtcattggccacacacacacagatttgtgtggcttttattgtagaactaaacttagcatagtgttctgttgtttacatgaagtgtgagttttcttt

SEQ ID NO: 742934 - DNA, 571 bp, Homo sapiens
aaaaatgatgagttcatgtcctttgtagggacatggatgaaattggaaatatcattctcagtaaactatcgcaaggacaaaaacccaaacaccgcatgttctcactcataggtgggaattgaacaacgagaacacatggacacaggaaggggaacatcacactctagggactgttgtggggtggggggaggggggagggatagcattagaagatatacctaatgctaaatgacgagttaatgggtgcagcacaccwgcatggcacatatatacatatgtaactaaactgcacattgtgcacatgtaccctaaaacttaaagtagaataataataaaataaaaaataaaaaataaaacaataaaaaaaaataatggaatagaaacaaaataatctttattacattgttgctatgtaatatactcttcaatgtaattacatacataatttaattcttatgatagtcctataagatatttactttaccatgcctatttcacagataagaagactgagaacacagcagttaaatatgttgaataaggtcatatacctggtaagggtagagccatg

SEQ ID NO: 742935 - DNA, 627 bp, Homo sapiens
ttacttttatgcctgtaccgtgctttctttataactgtagttttgtagtaagtttggaaattaggaagtgtgagtccttcaactttgtccttcattattaacattgctttgactattttgtgtctcttgcatttctatattagttttaagatcagcttgttgatttctgcaaaaaaacaaaacaaaaaacaagaaagccagcggtgattttgttagagattgcattggatctatagatcaatttggggagttttgtcatcttaataatattgttttccaacccatgaacatgggatgactttccatttatttaaatctttcatttctttctacaatgttttatagttttcagtgaacacgacttttacttcttttaacagaggtccaaaagaggtcaaacctctctactgactgcaaggctgccagagtttgaatacgatgccactgagcttgggatccccaagttaaaatatcacagacmcctactagcttactaagattcagcagtttctcttggatagaccatttaagtttgtttgttctgtgccttagctttatttccaaagttccagaaaagacaagtcacagatcgggagaaaatatttgcaaaacatatataccatgacc

SEQ ID NO: 742936 - DNA, 633 bp, Homo sapiens
tttaaaattgagataaaatttacatacagtgaaatgcacatatcttgaatgtgcaattcaatgagtctagagaaatatatatacccaaataagaccacccaaatcaggatattaattattcccctctttcccaaaagtgttcttgtgcccccatccagtcaatctgtatcccacataggtaaaacctgttctgattctgatcaccatagaatagatttaccaggctgggttgggaattccatataaatggaatctaaatatatacataaatctatgatgttgtatgcactagtagttttttatattgctgagtaacatactattgtatgactatgccataacttgtatattatgaataaagctgctatagcatctttattgacaaattttggggacaaatattcatttctcttgcacaaatacttattagtggaattgctgtgtcttaggcagatacatgttyaccttcacaagaagttgccaaataattgtacaaagtgattttaccctcttatatatcctccagggttagagttccagttactccacatcctcgcaaacatttggtgttgttttaaattgtgtctattctacaggaaataaaatgtcatatcattttgatatctcactgtg

SEQ ID NO: 742937 - DNA, 628 bp, Homo sapiens
atctctatgccttctccaaactgcataaattcacatttgtagcctgtcttatatctaagcacaggctttctgaccacaaaatcaatttatctattgtttaggaggaagtttcataatgttcagaataaagacctgtaaccccacagtctggggttctggggtgctgccagggcttcagggcatgagaatatttcttctagatctgtgrccactgtggaaaatgtatctggcctaacccagtgttctagaaaatccccaaatcatgacacaacatgaagttcttttcataattatagtatttagtctctcacatgagactgaagaatgtgatactaatatagtatgaaaattatattgtatgcatattataagcattagaaaaataagcaggtacttaaaaatcctgtataagaagtaaaattattcaccaaaagtaatgatgagataaagaatttaatattatactaatgcacactacacattagaacacaaaaatcctgagctgtacagaacaaatattccaaataagtgagtgaaataggtaaaagactggccaaaggagcctctctttttttagtgatgctggatataatctatactttcatatgttctttcttttaattgttat

SEQ ID NO: 742938 - DNA, 628 bp, Homo sapiens
atctctatgccttctccaaactgcataaattcacatttgtagcctgtcttatatctaagcacaggctttctgaccacaaaatcaatttatctattgtttaggaggaagtttcataatgttcagaataaagacctgtaaccccacagtctggggttctggggtgctgccagggcttcagggcatgagaatatttcttctagatctgtggccactgtggaaaatgtatctggcctaacccagtgttctagaaaatccccraatcatgacacaacatgaagttcttttcataattatagtatttagtctctcacatgagactgaagaatgtgatactaatatagtatgaaaattatattgtatgcatattataagcattagaaaaataagcaggtacttaaaaatcctgtataagaagtaaaattattcaccaaaagtaatgatgagataaagaatttaatattatactaatgcacactacacattagaacacaaaaatcctgagctgtacagaacaaatattccaaataagtgagtgaaataggtaaaagactggccaaaggagcctctctttttttagtgatgctggatataatctatactttcatatgttctttcttttaattgttat

SEQ ID NO: 742939 - DNA, 634 bp, Homo sapiens
tatattttatgatgactgcttctagtaaacttgatcatttaagttagtcaagctttttaaaattatttaatgcaggtgtgagagagtaagaaaaaattatcaagtgttatcacccattctgctttatacttgctttaaaattttttgctttttaaatatataaatgtattgacagatttaaattattttccgaatttttgtcaaaattagaataactatacttttatgcatagttcctcttttgatgtgaacctccagatccaggtgtgacaaaaaacccaatctgcttgtatattttgatatatctaacaaagtctatcactatgttttgaaagattttgtacgccagactacatttattaaattggtattttccttccatatttagaagctacatccccaractgtaaatggcttgagattagaaaaaaaaatttttttttactttatactctaatatcaccattctgtggctggcacacagtattcaataaaggtatgtataagggactgtataacttccaattaacgtttctgatcagcatgagacaactgtggtaataaacttagttgatatcattcaattagaaagcaaataaatttgacattttcattagcttgtacggccctagag

SEQ ID NO: 742940 - DNA, 480 bp, Homo sapiens
actgcagtggcacgatttctgctcactgcaagctccgcctcccaggttcacgccattctcctgcctcagcctcccgagtagctgggactacaggggcccgccaccatgcccggctaatttttgttttagtagagatggggtttcaccgtgttagccaggatggtctcgatcttctggcctcgtgattcgcctgcctcggcctcccaaagtgctgggattgcaggcgtaagccactgcgcccrgcctgatttttttatgactacagatattgctacaatgagcatcttagtgaatgtgggcaagcattttgcgagggttgtgttgttcagtaaagtagccactaaccacatgaggctacttaaatttaaattaattaaaatcaactaaatacaactaattgaaattaattaacttaataaaattaaaatttcaattcctcaattacaccagctgcatttcttttctttctttctttttctt

SEQ ID NO: 742941 - DNA, 548 bp, Homo sapiens
agattttaaaggttctggagctatgaccacattatataagtatttaattttcacaacattttctaagtgatttcatttgtggaagatgaggcttagattaagtaacacgaagctgatacttgaaagactgctgtgttgaaagcaggtctgtttgaatataccatgctctttaaacttcattatagaaacattttctcagactagtacattggtgttttatgatttccaatagcataacaaatattttagttatakatgccataactaatgtggtagttcaagatattactgctaaaggtcatcagaaatatttctaaacacaatttatcgcatttcataaagaccatgggaaccttaaactggacggcgtatgccttaaagtataatatctgcaaactgtaaatccctttttttaaacaaataggagttgtgtcctaaaagggatggtaaatcataaacaaaacaataaattaactatataagaaagcagagaccatactcttgacattggaagtgattaccatattacaaaaacactgacatgatgt

SEQ ID NO: 742942 - DNA, 650 bp, Homo sapiens
atattgaattttatcaaatgctcttcagcatcaattgaaatgatcatatggttttcattctttattctgttgatatgacatatgacattgattgatttgcatatgttgaactatccttgcattgctaggataaatcccactwggttctgatgaatctttttaaggtgttgttgaatccagtttgctagtactttgttgaggatttttgcatcgatgttcaccaaggatattagtctacagttttcttttttatacgtgcctttgtctagttttagtatcagtgtaatactagccacgtagaataagtttggaagcatatattttttgtctgttattcataacagtttgagtaggattggtatttattgtgtttttcttttttttaagtttggtaaaattcagcaatggaagccatcagttcctgggcttttctttacttggagacttttttcactacatctttgatcttgttgcttcttatttgtctgttcagattttggatttcttcatgcttcagtcttggtaggttgtatgtgtctagaaatttgtctgtttcttctaggtttttcagtgtattgacatgtagttgctcatagtagcctcttatgattctttcaatttttgacagtattggttctaatgtctccttt

SEQ ID NO: 742943 - DNA, 650 bp, Homo sapiens
atattgaattttatcaaatgctcttcagcatcaattgaaatgatcatatggttttcattctttattctgttgatatgacatatgacattgattgatttgcatatgttgaactatccttgcattgctaggataaatcccactaggttctgatgaatctttttaaggtgttgttgaatccagtttgctagtactttgttgaggatttttgcatcgatgttcaccaaggatattagtctacagttttcttttttatacgtgcctttgtctagttttagtatcagtgtaatactagccacrtagaataagtttggaagcatatattttttgtctgttattcataacagtttgagtaggattggtatttattgtgtttttcttttttttaagtttggtaaaattcagcaatggaagccatcagttcctgggcttttctttacttggagacttttttcactacatctttgatcttgttgcttcttatttgtctgttcagattttggatttcttcatgcttcagtcttggtaggttgtatgtgtctagaaatttgtctgtttcttctaggtttttcagtgtattgacatgtagttgctcatagtagcctcttatgattctttcaatttttgacagtattggttctaatgtctccttt

SEQ ID NO: 742944 - DNA, 599 bp, Homo sapiens; identical to SEQ ID NO: 742378

SEQ ID NO: 742945 - DNA, 608 bp, Homo sapiens
tttaggtctacccaagaactccaacaactgcctgctgggaaaagaaaaagagggaaatgcttaatgagcaaagatctatgtaaaagtcctaaagctaaatcttaataggaaaggctttatttcaaccacttggaggcatgcatgaaaatttagcacaaaataagggattggaaaataggcttaccatattgatgacagtggtggactttagcagacagagaatatgcaaagatgcaacaggtatgcaaataactccaggcagtttcagcatgtcacgaatatattttataggcaatagttactctggttcttggttaatccaaatattttccagtgaatttatttgagaaaaataattgagtgaaataaatgtaatgtttcagattaagcacaagttctaaagtaaatattaatttcaatccttcaatcttattcacatygcctatgaagcgcaaaagctggctagtgtttatgaggtgtttaagtgtgtatgtatgtgtgtatgtttcagatggaagaggagggagaataagaaaacgttaagaacaaatgacacaacttttgaccaagcatattttcacataaaattgaaattaaagtcccatgtt

SEQ ID NO: 742946 - DNA, 551 bp, Homo sapiens
gccagtaattagggatggattaggaatcttggaatttgtgcacctccagcatgctgcagtgccctatggaaaagaggcaagactgccttcccctgccctcctgctcttcaccagtcatgagcccctagcttgggcctgcaatgcaaccacctttccccagctgattattctaattggcagtggctctgagtggcatgccaaggtccctgcccctgctgccaccaagctggggagagagaaaaaatcctaagcttgtctcaggcctgcagtgcacagtctgggagtgctaagctgagatctatgaccagcacttgagtgggagaggatcacacactctcagagcactgaggggragcatggctacaaatgtgaggaaacacagaggggctgcatggctgggtaagagcctatctaccagtcattatgtttaagcactatctattaaattgcaaaccaaacttcaacaccaaaaatactttggtaatatactcctctgtaaaaccaaggacaagaactcaactgcaaataaagaccctgcacaaagcctcagc

SEQ ID NO: 742947 - DNA, 612 bp, Homo sapiens
catccctatcaaagaacttgccttcaccaaccaaaccaggaaagagctggttacaggtctccgccacttgtaccactccccacaccccaccacacacaccatatcatgctctccccagaacctagcaaaccaccaacactgccatcagcaacacaacaccacctaatctctgccagtttgggccactrcccttttcgtacttgggacatagaagtctccatctcttgctcttttatagaccaatatcgaaagttgttcctacactgcagagaaaaatgcaaaatactaaaccaaaggcttggctacctttcctatgaagaagtggcaaatggtattcattcattctttcttctgatgcctattcattcttctccctgatgagtagaaagcagcaaagctttaaagttgcccataaattttttaattactcacattgtcaccccaagcaacagatcttgaactgtatcccatcagtgatagggtacagttaaggactttaatcagaaaaggaatatgagatttgtgcttgatatacaccagtgtgtgtttaatttggaagactcattcaagaagagcaagatcagaagcagagaagtcagaggctattgcaat

SEQ ID NO: 742948 - DNA, 609 bp, Homo sapiens
aaggataatgtcctccagcttcatccatattcctgcagaggacatgatctcattcttttttatagctgcatggtatttcatggtgtatatgtaccatatattgtttatccaatttgtcattgatgggtcatttaggttgattgcatgcctttactcttctgaatagtgctgcaacgaacatatgtgtgcttcataatagaatggtttctattcatttggttatataccaagtaatgggattgttaggttgagtggtatttctgtttttaggtcttaaagaaattgccatactgtcttccacaatgtttgaactaatttacactcccrccaacaatgtataagccttcctttttctccacaacctcactggcacctgtttttttttttaacattttagtaatagccattctaactggtgtgagagggtatctcattgtggttttgatttgcatgtctctaataatcactgatgttgaactttttttatatgattgttggctacatgtatgtcttctttttaaaagtgtctgttcatgtcctttgcccatgttattgggcatggggttgttttttcttgtaaatttaaattccttatagatgcggaatatt

SEQ ID NO: 742949 - DNA, 506 bp, Homo sapiens
cagaccctgtggctccagtcttcccatctccagggctctccccttgctgactggccatgtgctctgcagtctcaccccacagaatgcagcctcggctatgtccagtaaggtgcagagggatggaaggggctgaccaggaacacatgtgtgcaaatgtgggcaccagaccctgttgtgactgtgaccgcggcagacataagaacagctttggacccttttcyccttttagttgaggctttcttcatgtctttcattgccctcaaccctcctgtgctacccactgcttctagtcacctacagagagctgcgttgctgtctgtctgaagctacgagggcaatgaagctttgctggaactctctctgtatagtgcactgtacactccccagcaatcttgccaacattgcccaagcttagctcttctctgcctgtttctacagaatgtggctgccactggattctgcttcggttatggtctgaccctgtaagttgctccacattgcaaatt

SEQ ID NO: 742950 - DNA, 590 bp, Homo sapiens
agatggcttttgagccccttttctgtatgagttctatgccatgttacacagttcccaacctcaagaaattcactcttcagctggagatatcaggcataaatatgaaagcatttcagcacaagtgggcagtatgtgatgaaggcgtccggcctcatcttcgactgatgccattgctagaatgccaagctgggagatgattctccagacaagaaaggcagagaaagagaaggctgagtgaaagayggaaggaaaaggagcaacctgaagcacattttggaccttgaactacttcatgtagtttaaacattttaaacttaaagtcacatttgaaggaagatagttagtcattactacattcagactcaaagtctcatttttaaaaaattattctcacattggggcctacaaaatggaaattaaggtgagctatacagagcaggaggtgcagtggagagagtacttcagcctatggaaagtccacataaaactcagaatgttaacatgacttctttcacctcaggtgaatgtataaatgaaacttttttttctttttaaggctacaaattcattagtatatccttgggaatgac

SEQ ID NO: 742951 - DNA, 535 bp, Homo sapiens
agatatcacctcaccctagtcaaaatgccttttctcaaaagataagcaataataaatgctggtgaggatctagagaaaagggaactctcctacattgttggtgggaatgtaaattagtacaaccactaaggagaagagtgtggaggttcctcaaaaatctaaaaagagagctaattatatgatccttgcagaatatataccaaaaagaaaagaaatcaatatattgaagagatagctgcactcccatgtttatggcagccctgttcaaaatagccaagatttagaagcaacctaaatatccatcaacaratgaatgaaaaaagaaaatgtggtacttatacacaatgagttctattcagccattaaaaaaagaacaagactcaggcttttgcaataacacagatgaaactaaaggtcgttttgttacatgatataagccaggcacagaaagacaaacatcgcatgttctcacttatttatgggacctataaatcaaaacaatcgaacccacagagatagtgagcaggacggttac

SEQ ID NO: 742952 - DNA, 607 bp, Homo sapiens
ctgtaaagttaagcgattaggctgtggggaaaaaaaaaaaaaaactcatccattcaaggataaacatgtactgagatcccaacatgtgccatctgggctctgtgctaaaaactggggacacaacattggtctatcctggcaggcaagaaggactgtggattggtaaagrgaaatagagttatgctcattttttcacactaaattgcagttttaattttcaaaggcattttcaaactgtcctaagcacagggaggatggtgggtattgtgtatacagaggcaagcaggatgcggtaatcatttcacttcttggccctgcctgttaaggtcctgtaggccagctggagggtcctccatttaagaagatcatgagtactcaccaatcacacacatgcatttcagctacaacagtctgaaaacacactgaatttattgataagtaagtgaagaaaatgtgacttaagccaaattggcaaggcaatcagatccagaggaaggagctgtgaggctggtacaggaagttgaagaatttgggtgaggaatggcgttactggatgaagcagagcagtgcataaatcacgactgaaaattgctgacatcccccggga

SEQ ID NO: 742953 - DNA, 633 bp, Homo sapiens
gcacagcaacttcctgtctaaccttggaccggcaccacccttgttatggatccttatagctaacaataattatcacaaaacaattttataatcttcttcatttttcctttaaaaatatttgtcttcctttacctacctgagctgagcatgcatgtagtttgckatggtatgtatattgctgttacaatgcccatttttgaataaatatccttttctttcagagagcctctctctgttttctaatgtgacaaactcaattcttaagctaaagcttaaggaagtattttacagcttcctcaaacagtcatcggttctgttaaatattctgacttccaggtccagtgcagacatgctgaaggggtgttagattctactatacctaagaataagacacttgttgaaaatgcaatttttgggaccttatattcaaacaccgcttgtccacagattttggtgagttggtttagacagagaagtaatgtagcagtgatggggcaggtggcttaaaagagaggcactccctgggccctctgcagaggttaggaattgaacaagaaaacaggcttgggaaggcattaaagggcatttaagcaggagaataaggtagatttgtatgtaagcattttagaaaga

SEQ ID NO: 742954 - DNA, 640 bp, Homo sapiens
tcttagagtgaaagaaatcagtctggaaggctacacactatataattcttattatatgatattctataaaaggcaaaactgtggaaagattattgatgtcacatctatatttgcagtgacaataaaataatgttttccaacataaaaatcagatatgcaagataattaaggcaactatgcagattttttatcatttggcaggaagtcataagcaacatcttatgcaacctttcttctttcattattttgcctcacttcaggagataaactttaacataagttgttcacattttccttgctctttgagtaagtatgggttgtgtcctaaactttttactgctggttgtccagactctgggtgctgttttgatcctccaggcaaatttgttttagcattcaatcatatcaataaggttcagaatgtaaattctgtcttaccttctttgtacggtgatccaartcttagtttctttttctgtatttttactacatggcttgtatcagtcctactcatgcatgtctctcaagttaggctgtgacttctgtgaatttatgcataaaaacaagagatccctttctctagttatcattccaagatttgctcctcattccttaacctgcagtggttcttctgagtttt

SEQ ID NO: 742955 - DNA, 628 bp, Homo sapiens
aatttaaccaatttttttctttcttttcagtaggcagaaatgttttatctttctcttgtgtaattgcactattttggacttccagtacaatgttggatagaagagattgtgagacttcttattgattttaaaggcaatggtttcaacatttttacaggttttttaaatatgatttctattaagttttatatttaacatatttcaattaactttattagtaattagagaaatgcaattgaaattctcaattaaaatatatcaggatttggtttggtttactgctaaagggcatattttatttaaatgcatgagttaattttttttcactgcaatgagaatttggccattggcatgagttagtggctcaaggatatcaggtcargtttttggtgattcccatcgtcttttcatcacgataccaagtggactcctggaactccaacaatcacttctacatttcaagcagcagcattcagaaaattcaactggtaaaatgtttttgtattcttggtagtactaccaaataattctcactgacaaagcttataggtaaaacagacttgaaaaaaatggtttttcatttgggggttattactgtgtattttatatgacagggatatatatatat

SEQ ID NO: 742956 - DNA, 615 bp, Homo sapiens
gccaatttcataacctgaataaataaaaagacatgctattgttgtaatccatgtgtctttgatgacaacagaaggcaaatattttttagatgtttattggccttctgtatttacttgttttaatgtgtgtgtgagactgtccagttctaagcccgttttttattttttcagtaggtgcaggtatctttttcttattgatggataaagctatttatatatgaaaaatttaactcttgcctaggcttattgcaaactttttttgcaatttgcactttgccttttacttttgcatatggtgtttttttttyaatgagcagaagctttaaatgttgacagggtcaaattttgcaatgtttttccttagtattatgctaaaagaaaaatataagccctacctccaaattatccctctatgttttctttctgttcttttagattttgttttaaatgttttactgttaaaaggaaattgtccctcaggtctctgcttgtgttttttctgatttccccagtcaggtaaaatgcctcctgaatgccagatacctgctgtcatagcactttgcacaatggcagtattttctgcttgtgtgattctttgattaatgtttgtggcct

SEQ ID NO: 742957 - DNA, 614 bp, Homo sapiens
aatcaatgctatcagtttcttaccttagagacactttatacaggccagaccagtggctcacacctgtaatcccaacactttggaggccgaggttggcagagcacctgaagtcaggagatcaagaccaatctggccaatgtggtgaaagcacatctctactaaaaatacgaaaattagccaggcayggtggcatgcacctgtaatcccagctactcaggaggctgaggcaggagaattgcttgaactgggaggtagaggttgcagtgagccaagatctcaccagcctgggctacaagggcgagcgaagctctgtctctaaattaaaaaaaaaaaaaaaaaaaaaagactctttatacacatgaagcagacacacacacacatatacacacgtatccttctcattataactataacaagtaatagttcttctgtgccttgcttttgttcattttgcaatgtatcttggagatcatcccatattagccgctaaggattcctttttttgttttttaactagattctccatctggtgtggataccataatctatttaatcattgcactggtgactggcatttagaatgtttctaatcttttgctatttcaaaaacagcg

SEQ ID NO: 742958 - DNA, 361 bp, Homo sapiens
gcaggccaaggaacaccaaagtttgtcagcagcaaacaagccaggaggaaacagacttcctccctcagagcctccagaaggaaccaaccttgtgggcatctagattttggacttctggcctccagaacaatgagagattacatttctgttttgttttttttgtttttgytttttgtttttttttaatgttttaagccattctgtttgtggtactttgtttcaggagccccaggaccctaacacaaaaggtttattcttaaaatttatttattattattattttttgagatggaatctcgctttttcacccagtctggagtgcagtggtgcggtcttggctcactgcaacctccacctcccc

SEQ ID NO: 742959 - DNA, 452 bp, Homo sapiens
aagagtagtaagaacacagaggccagtaaataaatgatcagagctttcgggtttaaaaatgatcccagttgagaacttcagctgtggtaacgtgaatatgtaaccatctagaggcaaatagaacagaaacttttgaggggttggcgccaaaraaatgaaaagtctggcttgtagtagcctctcgttacttgacttctgaagccatggctaagcttcaaaaccagattaatagaaagcagtcgccaagacgtgacttcaaagtctatggcatatgtgaccatggaggaaaatggacaagaaagactatcatggacagtaaagtccagaacaacaaaaaagaacaggtaagggggctcctttcatagaataaaccgagaactgagtatattccaactccaagccaggacactttgtcacagttttctcttttctactccataattgtattttgg

SEQ ID NO: 742960 - DNA, 606 bp, Homo sapiens
taattgaagcttaacacatatacatatagtaaagggaagaaagtatactggttgtaaatacgcaagtcattaatttaaacctcagggcatttttacacatacataagcttatataactccatcaccctcttatgttctgttctgctacttccatgtcattaactacctttcttcactcccaccaatgaggtwacctctattctgacttttattactatagacaagttttgtctgttcatgaattttgtatatgtgaaatcatagtttgtgtcattttttggtgagtagcttcttccactcaacataatgcttgtaagcttcatcctttctggtgcatctatcaatagtttttatctttctttttaaaactgcaatgtagtagcccattgtatgaatatatcactaaattatttaaattgaaaatggaggacaggaccttgtatgtgctcagtcagctatcttgcatgaaagttgtatggttctcataatacagtacatcaaatgtgtcttatgttgtatgtggttatactgtcaccctcaaaagactgagtgacttgagtagagaaatatggactgttatattttctatgttttaaaagtgtctta

SEQ ID NO: 742961 - DNA, 606 bp, Homo sapiens
taattgaagcttaacacatatacatatagtaaagggaagaaagtatactggttgtaaatacgcaagtcattaatttaaacctcagggcatttttacacatacataagcttatataactccatcaccctcttatgttctgttctgctacttccatgtcattaactacctttcttcactcccaccaatgaggtaacctctattctgacttttattactatagacaagttttgtctgttcatgaattttgtatatgtgaaatcatagtttgtgtcattttttggtgastagcttcttccactcaacataatgcttgtaagcttcatcctttctggtgcatctatcaatagtttttatctttctttttaaaactgcaatgtagtagcccattgtatgaatatatcactaaattatttaaattgaaaatggaggacaggaccttgtatgtgctcagtcagctatcttgcatgaaagttgtatggttctcataatacagtacatcaaatgtgtcttatgttgtatgtggttatactgtcaccctcaaaagactgagtgacttgagtagagaaatatggactgttatattttctatgttttaaaagtgtctta

SEQ ID NO: 742962 - DNA, 642 bp, Homo sapiens
ggtggatcacttgagtccaggagtttgaaagcagcctaggtaacatggtgaaactcttgtctctgtgaaaaaattataaaaaattaagcaggcatgttgacgtgcatccatagtcccagctcctcagggggctgaggtgggaggatcacctgagcccaggaggtcaaggctgcagtgagcagtgaacatgctactgtactccagcctgagtgatagagcaagaccctttctcagtaaaataaaacagaataaaataataaaataccttgctggattaggtcatgcccatacagaataagttccttttttagtaatttaaatctactgattagggaccttaattacatctttcccataagatataacctawtcatgggagtaagatctaattatgttattaagtcccacctacagtcaaggggaggggattatttggggtttgtacaccaggagacaggaatttaagaattctgtctgctgtactccttctaaaccttcttctctcatctctacaacgtcttggtgctccagagccccagggctcagtctttggttctcctttctcctctatctttgtttactccctaggtgatcatatcattctcacctatttaagtactatttgatgctgatgaataccaa

SEQ ID NO: 742963 - DNA, 494 bp, Homo sapiens
tctaagtgacattattggatttttgtgttagactatcaccctgggagcagtgtggagacaggtttgatgcaagggagtaataatagagcccagaagccttgaaagccagttagagacttagttcagtagatgattaatgcatgaattacagtggtagtaataataacataaataatatttataagtaacataaataatatttataagtaayataaatattctttgtaatattagtattattgtaattgtaatatttgtattatttctaatatttgtaaataacaaaacactggataaaagacagtcctctgctgaggacaacttgaaaaactggattaaacaatacaaacaaaggccttctatttaaaaaggcatcagagtgttaatgaagaaataccagcccaggattcaagaagagaacaaaaccaagattggcaaattctagcacttgggctattttccccctagattattgataatcccggggcagttga

SEQ ID NO: 742964 - DNA, 526 bp, Homo sapiens
aaggcactgggctagcataaagaagtctagattgagtaagccctcctggggcttagaagctgatagagagaatcatgtttggaacatgacataacaaaatttgttataaaaacagagaggagtctggaaatcaggctgcatatgtaatacacattataaagatatcatatgcctagtacaaaaataacacaaacaggaaaagttctgaatggaacctactacatactaaattaccacatgatataagaagcatcatcaatcaacccaaaaattgtcgattattgaagaaattgggctgggaaaattgagtactagggaaaaaaattgagtttgacactgctatcaaaaattggtttgaatagttgwgaaaagttaaatgtggaaattctgataaaatggcaatgtaggaaaagcatgtgacactcatgaccaaacccccactataactccaactccccccgaccaccaccaatgcttgaggaaaacaagtgaatataaaaataagtaaaaccttatatcagcactg

SEQ ID NO: 742965 - DNA, 610 bp, Homo sapiens
aacagccataaaataaacataacttttgatccagtgactacagttataatgtaagaaatgatgaaggatataaacaagggggttggctgcaaagatttacagtgcaccactgttttctcctccattggatacactgcccactgttcccatgatgtaggcacactgaaagctcagacttcactactatccaaagtatccctgtaaccataaaccacttgtacctcgaaagctattgaaatccaaataaacttttaaaaaacattgttttcaatggcaaaatgttataaacaaattaaattatctactaagacagaaataagtgaattatggtcatagaaaactcaataatcaaattctagacatctattaaattgaaattattaaagaatagttaaaaaacattcgtcaaaatatattaaatggaaaaagcrtatcatcctacccaatctgaattttatgaaagacatttcctaagtaggatccatgaatttctatgaaaaatgagatttaagactttgtggggaggagccaagatggccgaataggagcagctcctgtctacagctcccagcgcgagcgacgcagaagacgggtgatttctgcatttcca

SEQ ID NO: 742966 - DNA, 589 bp, Homo sapiens
ttccacagtgccttggtcttcatagcaaagttgggggcactggggatacagttaaaaagcagaaaaataaaaattaaaaaaatttttgacctttggaaacctgtgtgcctgtgtgtgtgtgtgtgtgtgtgtgttgtacctacttaattctggcagtaaactttcctcttctctgtgttcctatggtaactttaactcttgtaaattgtgctgattgctaatgtcattgaagattatttttcctattgtctttccttcttcccacttcacaccccatagagtatatgtctgatccacatctgaaaggactgaactatcaatcctccagagagaaaaaagcagttacaaagcttccagccaagcattttccggtaaaaatcagaacaaaggagtgatctcttctacttcactaagttccagtaatattacatcaagatayagaagggatcactccactgattgcagcccccaaaactgtgctctagcaaaaacatattactgaacaaatactatttttacacccattcacaactcctttgctcccagaaaagacaaaatgtcctattaaaagctgtaagatgtctctttg

SEQ ID NO: 742967 - DNA, 617 bp, Homo sapiens
ccaacgccggtgaggctgcctcttctttcaagggtggttcttcgtccttcctgagccactcaagctttgcctctgagtcccgcagctgcagcctggacccggtgttccacgtattaaatgtcccccactgaaggctgtgcatcatcatcaggagatataaacgccatcactcactggattcttcctggcagtgctcagctccccgtgcagcgcctgctgccatccatccagtgcataccttcgccactccagggatgcttgcagtgcggcctccccttggaggctgtcctctgtgcccctcctcactctactctttaattagaatccaatattttggccaggctcgatggctcaggtccttcttatagactcactgaatattgaaatcggtaggacacacctttttgcttatttattgttctcattkagtgcttatctctggtctttcctgtccttttggagtcaccaaaatttgataacagaaactttgacttccatttctgatcccatgtgatcttcccagtaagtctaaccctaggatgtgatttgtatatctgttaccctctcacccacatactccctactaagataacctgaagcataactgagttgtccat

SEQ ID NO: 742968 - DNA, 656 bp, Homo sapiens
tttcccagggctgctccttgctgaaaaaaagaattcagtgatatttctcctatttgcttttgcaagaagagaaatatgcctctgttctgcccagccccacaggcagtcagaccttatggctatctcccttgttccctgaaaatcgctgttatcctattcttttaggatgcccagattgcayattgttcaaagacacatgttttacaaacaatttgcacatataacacaatcatcacagggtcctgaggtgacatacatccttagcttacgaagatgacaggattaagagattaaagtaaagacaggcataggaaattataagagtactggggaagtgataaatgtccatgaaatcttcacaatttatattcagagattgcaataaagacaggagtaagaaattataaaagtattaatttggggacttaataaatgtccatgaaatcttcacaatttatgttcttctactgtggcttcagttggtccctccgtttggggtccctgacttcccacaacagtttgtagacaacatggtcttttatatacagaaacacttaaaggattccactaaaaagctggtagaactagtaaacacatttggtaaattttcaggatacaaattatcgtacaaaaatcagtagcattttaatacacta

SEQ ID NO: 742969 - DNA, 603 bp, Homo sapiens
aagagtactggggaagtgataaatgtccatgaaatcttcacaatttatattcagagattgcaataaagacaggagtaagaaattataaaagtattaatttggggacttaataaatgtccatgaaatcttcacaatttatgttcttctactgtggcttcagttggtccctccgtttggggtccctgayttcccacaacagtttgtagacaacatggtcttttatatacagaaacacttaaaggattccactaaaaagctggtagaactagtaaacacatttggtaaattttcaggatacaaattatcgtacaaaaatcagtagcattttaatacactagtagtaaactacctgaaaaagaaaaaaaatgccatttacaaaatctacaaaaaataaaatacataggcataaatttaatgaaggaagtggaaagttctctatgctgaaaactgtaaaacattgaggaaaagttaaagacacaaagagttcatgaccaagaacccaaagcaaatgcaacaaaaacaaagggacttaattaaactaaaaagcttctgcacagcaaaagaaataatgagcagagtcaacagacaacccacagagtagga

SEQ ID NO: 742970 - DNA, 538 bp, Homo sapiens
atggataacttaacgtacttcattgcaatcctattcaaaatctcaaattttttgtatatcaacaaattattctaaagtttatatagagagacaaaagacccagggtagtcaatgcaatattgaaggagaacaaaggactgacactctgtaactgcaagatttcayatagagctatgataatcaagacaatatggtattggtgaaataatagatcaatagagattaatggaacagatgatacagtctagaaatagacctatgtatatatagtcaactgatcttgcaatatcatgtcaaaggagcaaaagcaatacagtggagaaaagctagtcttttctacaaaatggtgctggaccaactggacatgcaaacaaacaaacaaaaaaaaggaagaatctagacacagactttatacaatttgtaaaagttaattaaaattgatcacacacctaaagataacaatctaaatttaaaatatctataaaatactatagtagaatatctaggtaaaacatcaaaggcattttctatgaaatga

SEQ ID NO: 742971 - DNA, 600 bp, Homo sapiens
cagctctggatttgtagtagtcaaatctgaagcacgttcaaaaagtgaaaagaaacaagtacacacttctttggttaattcatcctaaagaaaagctttgtgaatagctgatttcttgtcctgccacttggagggtttatgttatggatttccaggacagaggtatgagacccagctcctcaacttctaacacctcaaagcccaatgcagtcaaacccagcataacataaactgttaaccaaaatgcatctcaccttccacttttaaaaggaaaaggaatgatgycaaaatgtcattagggattttctaatcaatagaaaagatatgtcccaagatccggacacatatgttcaagctaaccttttgcttccagagatctgtgcaatgagaaagaatgaccagaacacactgaatgatgcttaaagacagactgagtcttacacttactgaagcagcaaaagcaccactgcattttagcaagatcgtctcctagcaaaggttgagaaagaaatagcttttcatgtagaaaaaagaagaaaagaaagtttgcatacgtagcccacctgcctcagaaaagagttagtttatgtcatcacatcc

SEQ ID NO: 742972 - DNA, 540 bp, Homo sapiens
cacttataaaatgggattataattaaccatgccaaccacataagatattggtgagagttgaaacattattcgtgtcctgtcctcagcacaaagcttggggcagaatttaaaaatcaaaaatcacccattattattgtaacaatgtttatcagcgtatgcaaaatagtctctctcacaacctaccacacatgaagggttccaattcctctgaccagtgtgcttccattcatcccaagaagcctttgctgtgtggaggccgattagcaattacctcccaccccccttaaagttatattccagraagacctgatgcagagactgaaactatttgcatcagtcatggttggttgtaagtgactggaacccacacttaaacagaagaggagtgccccagaatgctgaggatagctccagatcccagaatcaaaaaagaaggccgtggagcctggcttagcacagggcagaaccagagcaaatctgtgcccctgacagcagagaccaatccatgccactgttggagtatgatctctggaattagtt

SEQ ID NO: 742973 - DNA, 642 bp, Homo sapiens
ctaaagtatcattcaatcccagaagaaaatggaacaatatttataaaattctgaaagaaaaagtaaaacaaaaaattgtcttttagcccatcacaaacaggttgttttattaagaacagattagtataattcagcaagrttggctaagggttttaggacataataacaatgtattgtgtgcttagaaaccactaagagatattttaattgttcttaccacaaaaaaatgataaatatgtgggcaatgcatatgttaattaatttgatttagacatttaataatttatacatgtttcaaaacattatgttgtatacattaaatacatgcaattttgtcagttaaaaataaataagtgagttttaggacgtagtctggttacaataatggaagacagtcatagctgctaaaatagcagctcatctttcctgtagtttttgattgcctaatattcaatctcaagtacatggtaaacatggatccttcttatggagatgaatggaattttttattttagtgaactttccttacataagtttacctcctaagagtttacaacatgatatccaatccattgtttcaactgatgaggaattatagtccaaagtgtactatggagttctgagattttgacttacatggag

SEQ ID NO: 742974 - DNA, 642 bp, Homo sapiens
ctaaagtatcattcaatcccagaagaaaatggaacaatatttataaaattctgaaagaaaaagtaaaacaaaaaattgtcttttagcccatcacaaacaggttgttttattaagaacagattagtataattcagcaagattggctaagggttttaggacataataacaaygtattgtgtgcttagaaaccactaagagatattttaattgttcttaccacaaaaaaatgataaatatgtgggcaatgcatatgttaattaatttgatttagacatttaataatttatacatgtttcaaaacattatgttgtatacattaaatacatgcaattttgtcagttaaaaataaataagtgagttttaggacgtagtctggttacaataatggaagacagtcatagctgctaaaatagcagctcatctttcctgtagtttttgattgcctaatattcaatctcaagtacatggtaaacatggatccttcttatggagatgaatggaattttttattttagtgaactttccttacataagtttacctcctaagagtttacaacatgatatccaatccattgtttcaactgatgaggaattatagtccaaagtgtactatggagttctgagattttgacttacatggag

SEQ ID NO: 742975 - DNA, 642 bp, Homo sapiens
ctaaagtatcattcaatcccagaagaaaatggaacaatatttataaaattctgaaagaaaaagtaaaacaaaaaattgtcttttagcccatcacaaacaggttgttttattaagaacagattagtataattcagcaagattggctaagggttttaggacataataacaatgtattgtgtgcttagaaaccactaagagatattttaattgttcttaccacaaaaaaatgataaatatgtgggcaatgcatatgttaattaatttgatttagacatttaataatttatacatgtttcaaaacattatgttgtayacattaaatacatgcaattttgtcagttaaaaataaataagtgagttttaggacgtagtctggttacaataatggaagacagtcatagctgctaaaatagcagctcatctttcctgtagtttttgattgcctaatattcaatctcaagtacatggtaaacatggatccttcttatggagatgaatggaattttttattttagtgaactttccttacataagtttacctcctaagagtttacaacatgatatccaatccattgtttcaactgatgaggaattatagtccaaagtgtactatggagttctgagattttgacttacatggag

SEQ ID NO: 742976 - DNA, 642 bp, Homo sapiens
ctaaagtatcattcaatcccagaagaaaatggaacaatatttataaaattctgaaagaaaaagtaaaacaaaaaattgtcttttagcccatcacaaacaggttgttttattaagaacagattagtataattcagcaagattggctaagggttttaggacataataacaatgtattgtgtgcttagaaaccactaagagatattttaattgttcttaccacaaaaaaatgataaatatgtgggcaatgcatatgttaattaatttgatttagacatttaataatttatacatgtttcaaaacattatgttgtatacattaaatacatgcaattttgtcarttaaaaataaataagtgagttttaggacgtagtctggttacaataatggaagacagtcatagctgctaaaatagcagctcatctttcctgtagtttttgattgcctaatattcaatctcaagtacatggtaaacatggatccttcttatggagatgaatggaattttttattttagtgaactttccttacataagtttacctcctaagagtttacaacatgatatccaatccattgtttcaactgatgaggaattatagtccaaagtgtactatggagttctgagattttgacttacatggag

SEQ ID NO: 742977 - DNA, 545 bp, Homo sapiens
gacaaaacgctttgttatttatttaagaaatcatttcattgttttccacttccaacctcaaggttagatggagttagagaaaaatttcttttgtttcttgtctttattttggaagatctactttctttttctttcttttttttttttttttttttttttgaagaagagactaagtatttttcaagagcgtatagatagacgggaacaaagcaacagcattgggatagagagtcaaagcaggcagaggcatatggatgtgatcatggtagtaaggkggtttaggagtcacttggatctgatggatagaataacagaagtaagcttttgtggagtgaaacctatattccacttaatatcacacttgttgcaaggctcctatgacattagtcctaatattattctctttgattagatgaggaattctgatcatagagaacttaagtaacttgtttaaatctagtaaagagtataattactttaatcctataattttgtcattatattacctcttaatatgaaacgaaataaaatatgaagtagattgt

SEQ ID NO: 742978 - DNA, 480 bp, Homo sapiens
ttcctacaaaaatgttcattatagagtttttgtaacagtaaatcatcaggaatattgcttattcgacaatagcagattgagtacattatgacacatttaagcaattaaatgacatgccacatttaaaatgctgtagaagaaaatgtttatatacaaagagatgtagagagtttcattttttttttrtatagcatacaggttacaaaattatatgtcctgtatgaaactgtttatttaaaatctataagagttaagtgcaaatatattatcataagtatagtcaggaaaattatgaaacaaatgagtaattatgcagaatgggtcctaccagttatcaaaacatattattaaagtaatttataaatcttttaaaacattatctgtggataatgtaattacaagtttattttttctttttcgtgcttatctgcagtcatatttttctagttactatttattgttctgtaatttaaaaaataa

SEQ ID NO: 742979 - DNA, 480 bp, Homo sapiens
acaaaagctattaaaaaaaacaaagtttgtttttgtctcatgtattacttttttattgctgccataataaattattacaatcataacaacttaacctctcatttattttctctgtgtttccatggatcagaaatcagggtacagcatgactaacctggttcacagcttggttccacaaggctcaaatctgtgggctgacyggaccgtgatctgctccagagactctgggaaaaaattcactcccaagctcatttagcttgttggcagaatttagttccttgtgattatctagctgagatcctctatttatttactggctgttactagaaacctctctaatctccaaagtgtgcctgcattccatgtcacattgcacatctcaaatcagcaatgatgtgtggagtccttctcaagcttctagtctctttggcttccacttagccacatctctctgactccagttggaaaaaaatttctgtt

SEQ ID NO: 742980 - DNA, 480 bp, Homo sapiens
acaaaagctattaaaaaaaacaaagtttgtttttgtctcatgtattacttttttattgctgccataataaattattacaatcataacaacttaacctctcatttattttctctgtgtttccatggatcagaaatcagggtacagcatgactaacctggttcacagcttggttccacaaggctcaaatctgtgggctgaccggaccgtgatctgctccagagactctgggaaaaaattcactcccaagctcatttagcttgttggyagaatttagttccttgtgattatctagctgagatcctctatttatttactggctgttactagaaacctctctaatctccaaagtgtgcctgcattccatgtcacattgcacatctcaaatcagcaatgatgtgtggagtccttctcaagcttctagtctctttggcttccacttagccacatctctctgactccagttggaaaaaaatttctgtt

SEQ ID NO: 742981 - DNA, 577 bp, Homo sapiens
tttgggaggctgaggcaggaggattgcttgaggtcaggtgtttgaaacaggcctgggcaacatagcaagaaatttaaaaaattagctggatatggtgttgcatgcctgtagtcccagctacgtgggaggctgaggtgagaggattgcttgascccaatagttcgaggctccaatgagctattgatacaggagatagaaacaaattatttaggcagataatgagggcaaaagattccttagcagaacttcctttctaacaaacagcagcgcccaaaattatttttttctaacaaaatcatcttgaaacattgagctgcaaacatagatcaggaagctggaatctcgcatggggaatgttggcagctgcatcaatagaaaagcattacctgggggccaggcatgtctaccatggaagctccattttccctttttcattagcacatgtacagtaagacaaatgggcaacatggcgcagctcaggctgaaaacccgcctgtataataaaagactgtggtggcggctgccagaaattctcaccctatgcaaatgacacacctgtttctaaccagtttttaat

SEQ ID NO: 742982 - DNA, 626 bp, Homo sapiens
tgtcagtctccttttctgagagtccatctatgctgatttctcttcctgatcaaagttcctaccaacctgtcacaaagggcaccctattacatcaggtggtgtctcacctatgtgaaactagaaagggtgctaaacataccaaggcagtattttaagccaactgtaacctcttgaaacacacatgaggcaaatctagaaccagagacttaaaaagtgagtcagagtctatactgggaactttatatgcaaacaaatttcatgtacatgggcatacaattcagatgtacttacattcattatattattccaatcacagaaccgaaggagaccatgtactctttcaaacacacaaatcccacccttcttatctgcatgccttagcttatttcctatctacagcctgaaatgccctttctctgaatctgtaaatayacaaatacaattattatgggttgaattatatgcaccaaaaaatgctcaagtcctaacccccaggacctgtcactatgaccttatttggaaattgagtctttgcaaatgctcacatttagatgaagtcattagggtgggccctaacacaatatgactggtgtcctcacgaaaaagggaaatttagagataaagac

SEQ ID NO: 742983 - DNA, 502 bp, Homo sapiens
tgtctcaaaaaggtataggtgttttaagattaccttgtacctttcaactccaaactgacatggcatccattactgctccaagaaactttggctcctttgggagaaaactaacactagaaaccaaaatcttagcattaagatgcattgtggaggtgacatttctcctgggccrtttcagtggaaaaaagtcaaaatatttttaatgtcatgtttcataaagacatgacttcatattaatatgtttgattcagttccaacagtgccctgttcttagtcaaatttgggatcctaaaattagccttccttgtcactaatcctaaaatctagattcttatcaaaatatacaaaatatatattatttacttgctttatctgataagataatagttgcaaaaatacactatcaatacaaagggataaatactcaataaagtttttgttttagactacatacacctacggatttgttgccaaattactttgttctagaatctctcataat

SEQ ID NO: 742984 - DNA, 565 bp, Homo sapiens
tttttaaaggtttcattagagttagaagagttctttttctccttaattttgaggaactcaagaatagtaagttcattataactcaaagaaaatccattggagaccttttatttagcttttatcttcagttagcaaacatttatagaaggaatttgtgtttcagatcttttttgcgccctaatgtgacaactaatgtgacaacttctggcttccagccagaagatwttgggacttgaaattgggagatcgcttgctatggtttgaatgttctctccaaatctcatgttgaaatttgatccccatgttggaagtggggcctaatgggaggtgtttgggtcgtgggagtggatccctcataatatattactgccatccctcttgagtaagtgagttctcactatattagttcctgtgggagccagttgttaaaaagagcctgacacctccccattctctctcttgcttcatctctcgtcatgtgatctgtgtacatgctggcttctctttgccatctttcatgggtggaagcatactgaggttctcaccagatgaagatgcccaatct

SEQ ID NO: 742985 - DNA, 598 bp, Homo sapiens
agagatgatttagggtgtctggtagaaaaaatttctaagcagcaaagcattcaagaagtgacttgggtgctgttaaaggcattcagttttacaagggaggcagagcataagtttggaaaatttgcagcttgacagcgtgatagaaaagaaaatccccttttctgaggagaaattcaagctggctacagaaatttgcataggtaatgaggagctgaatatgaatccccaagacaatggggaaaatgtctgcagggcgtgtcggaggtcttcatggcagcccctcccatcacaggcgtggaagccttggaggaaaaagtggttttgtgagccagacccaatgtccctgtgctatgtgcagcctagggacttggtacccwgcattccagctgctccagccgtggctgaaaggggccagcgtagagcttgggctgtggcttcagagggtgcaagccccaagccttggtgttgatgctgcaatgtggtgttgatgctgcaagtgcacagaagtcaagaattggggtttgggaacctccacctgcatttcagaagatgtatggaaatgcttggatgcccaggcagaagtttgcagcaggggtag

SEQ ID NO: 742986 - DNA, 666 bp, Homo sapiens
aggccccaggcctgatatccagagtctaaatcccacctcagcccaggggggagccttgagaggagctatgtccctcatggaccccagtttcctctgcatacgggctccgagccctgcactgcctccagggtagttcccaaggtcttttcccattacctcctacgtgagcactcagtaaaccaatacacatacacaagggtgacattaattccagccacagaatcccaggccacgcgtggcctggccctccctgagaagttgctcttgctcaggaaccccctgtgcagttcctacccctcggttctggcccacgaggcygggaatgacccatattatagatggggacatggggacagagccggcagcatgggcatgactgcctctcttcatcgttcctccccagggaggctcagagcagccaggaagggtttcccctccttgagatgctggtaaaaaggatttcaggttgatctggaataaatgatgagttttctcatgtaacatacaatgccctaggcagttttaaaaaatatctatcactaggaaaagaggaaagataaaatggtaagaataagtgttcgtttataggtcccagttggcaaagcaagagggggatgtgccagcccagtggtgcagctggatcctgaacatcaggggtcccaggac

SEQ ID NO: 742987 - DNA, 552 bp, Homo sapiens
ggggtaggtccagaaacatctcacatccatctcccttccctcaacgggaaaatttccaccctgcaggctggcaggaacattcctgcagatcggctcactcctgcaacctgcggccatctgtccccaaggtgggagraacatgacagcatttgggaagagggaggacggagaaggttggagcatgcagtccacagatctgacagtcacagagctcttcaaggcagggagccccgaatcccagggattcaggatcttcatccagggctgggcagaagtgaaccccccacccccgctgctccgttccaactgtggaactgcaaagccgtcaacactctgactctaaatctcaggaccacacagtcttcaagtctggggactttattttcttttagctgaagcttcacattttaaagaaatgaaatcctaactgcacaaatgataagaaaatgtattctctttaaacaaaataaagccccctttacctcccaccctcctaaatcttattccccgttccaatctctgcagaggtgaccgctgtcatctgtttggagt

SEQ ID NO: 742988 - DNA, 628 bp, Homo sapiens
aactgcccccaggccgagagagtttggagcctggggtactgtcaccaacagaccaggactcccgcagctgggccctcccctagagtgttcctgcagcagggctctcctcccaaggggctgtgaatgtttccccagggtggggctgaagccagaacccagaggtttgcccctggggcacggattccccaggtcattcgcctcccacgggctgcagtgaaggaggctctgaggggaggatggccagcttttcccctgcaaggatatgagccccagggaaggcatttctgctctggggactgcctccctcccctacatcagagccagccctcaaaagcttggccaasctgaccactctgtctgtgatctctgccagagaggctgaaagaacatccagccccacctgtggccccttcccacctcaggctatatgacagtatgacaccccacctattttttttcatttccactggaaacactagtaaaacaatttttcaccctctaccccagggagcgacccccactaaaccagctgacttgtgacccctgggtcaattttggccagaagatgctgctgacaccatacagagagcctgggcacctgggccccctacaagcctggtcatggtgc

SEQ ID NO: 742989 - DNA, 610 bp, Homo sapiens
caggaggtcgttgaacaggaagatttctcgctggtgtagtccgagtttctggggcttgtttgggtctggaacctcaaagagccggcagtagcagaccaaccgacggtggggcagagagagcacctgtgtgggaagaggctgtcctgccacggccgcccagctctcctctaggagccctgggggccgcagtggagaagtctagcccttcaagctagaaacccggcaygtgggccttgagttaaaaaatgccttccctcacagacattgaagagcagatacgtcttttggctcatggcagtttcccgtactctgttctcaggagccactatttaaaatcccgtatctctgctctcctgaaggactagggacgtgccccagcttctgctgagacctcctttccattcttttgggcaggtaccaggcttcttaaactatcacgttcacctgggagcctctggccagacagcgagtcacattttgagtccccacaagtgccggtcataaacatgaggccactcagccctgcaaaagtctttacagagagaatctgctctagatgaggaaaaactgaggcacagaagtaacgacaaaactaggaagtggcagagcc

SEQ ID NO: 742990 - DNA, 347 bp, Homo sapiens
ctgcaggatcccagtgacagcatcccctgcctcccttctgcagtagctccagcaggtggatgggacccgaggctgctgggccccaggggctgggcgccgagtgtaggggaggccaggtccacagaagggggctgcctccaggtacagggccctgtgctggaagggcctcagaggcccctgtggaaagctyttagccaagtagtccaaccacactgtcacaccaggtggccacccaagccctgcgtacatgtttctcagagacaagcttctcactcctttttgagggtgcccgtgtcatcatgaagcagctctggggccaaggatgctcttgcagaggtgggagaggt

SEQ ID NO: 742991 - DNA, 548 bp, Homo sapiens
aagctttcaatggacggaggttaggcccctgtaatgcaggccggggcacagaagggggccccgtctcaaaaaaaaaaaaaaaaaaaaattgtatatactgctaataagcaggtctacttgtatttttataactgcaatgaaacattcctccactaaatgactttatgcaaaaataattgtatcacctttacattagtactaaatagctggaaacaatcctaaagactgtcaatggaataaactgtacacaattgcacgttatattcattcagtggattattactcagcaatacaatggaactagctactgatatacttacatcatgaatgtacctcatagatactatcctgagagaagaaaagcaaacrtaaaagagtgtagccgtgtttatgcatgtgaagttctgggcacagacaaaaatatttgtgggtaagaaccaaataaaaaatatagtggttatctttggggaggttttactgattagcagcaccaggacactttctgagtgctatgaatactctttatctcaataagactgtgggctaca

SEQ ID NO: 742992 - DNA, 630 bp, Homo sapiens
aacaatggattacaattcagagttaaaaaaatgacctatcaagatcatgcaaaaaggcatggaaaaatcttaaatgcatattgctaagtgaaataagtaagtctggaaaggctactaccatgtgattgcaactatatgacactggaaaaagtgtatatagtgtatatagatggtacaaagacggtagttggcaggagtttatggtaaaraagaaagatttgaataggtgaagtgcaaaaggcttttttagggtggtgaaactattccatatgatattatactggtggttatgtgacagtatgtattttcttatagtcatagaactttagagcataaagaatgaacattaatgaacacaaattttaaaaaatccctttggagactggaggattccaacatggaatgaagaatgtaacatgtcaatctgacttatatgtgaatgaaataacttttctgaagtggttaggggaaataagtactagcctgagtttctttagaagtgtgtagaatttgtaagtataaaagcaaaacaaacaaaaaagccacaaaggctgtacataatcactataagagtttttcccatggtgtatggggttaacaatcctgatactaatatgcatctatactaaa

SEQ ID NO: 742993 - DNA, 571 bp, Homo sapiens
cccccttggtacaattgatgagcctcactgtcgcataataatcacccaaagaccatattttaccttagggtttatgcctgatgttgtacagcctatgggtttggacaaatgtctaatgacaagtatctattattatagtatgatgcagagcatttttcactgccttaaaaatcctgtgctctacctcttcccttttcatccctccaagtaccccaacccctggcaaataatgaccttttactgtctccctagttttgccttttccagagtgtcatctggttggaattatacagttataatacttttagattggcttttctcacttagtaataagcatttaaaatttttccttactgttttatagcttgatagctctttttgttgttattgtttcttgtttgcactaaatgacattccattgtttggatatactgcwgtttatttattcatttacctactgaagaacatcttggttgcatagagttttgggcaattgtaagtaaaggttctataagcatttatgtgcacattttggtggtcataaggtttcagcctttggatgaataacaag

SEQ ID NO: 742994 - DNA, 612 bp, Homo sapiens
gtctctagagagggtgaaaaaaaagaaagggaaatgagaagaaaatccaataatattatacagaaagaaagtaaaagaaaaaattctacctggataaagatacttacaatgattagaagcaccagtatctccagataagaaagaataagtgcaagagttctggcattatgaaaaatctgaatttaatgacaccaccaaaggagaacaccagctctccagcaatagtccctaaccaaaatagacactcagaaatgacagaaaaggaatttaaagcatggagtcatggaagctcagtgagatgcmtgcaaggttaaaaatcaacacaaagaaacttctaaggcaatccaggaaagaagaaagagataaacatttaaaaaaaaaatcattagagctaaaggaattgaagaactccgttaagaatttgaaagcccaattaaaaactttatcaatagattggccgaatcagaaaaaaaagaattttagatcctgaagaacagtatctcaaattaaccaagtatgacaaaaataaagaaaaaataattgtaaaaaatgaacatttttcaagaactgtaggattatataaagagaccaaatctacaaaatgttggcatt

SEQ ID NO: 742995 - DNA, 617 bp, Homo sapiens
aatgtggtctgatggttctctctagctgaatttaataaattttttttcttttacattggccttggtgaatctgatgactctgcgccttggtgattatcatcttgtagcgtatctagacagggttctctgtatttcttaaatttgcttgtcaacctctagagagattaggaaaattttatggagtatatcatgatatataatttccaagttgtttattttgtctcctctcaggaataccaattaaatgtaagtgcggtgtctttacataatcctataktttcagaagttttgttcatttcataattattttttatctgactgagttgattcaaagaaccagcctttgaactctaatattctttcctcagcttggtctcttctgttagaattaacataatctttaagtgtgagactgatgaatgagtacacatgtcttaaaaccagaatacatattttagaaatgaactcaatacacatgaaaatttagtatataataaacatggcataatacattttgaagaaaacatattatttagtcaatggtgatgagaacaatttctataaaaataaattttgtatagtcaatgattaaaagtaaaataagtaaatataaaaag

SEQ ID NO: 742996 - DNA, 639 bp, Homo sapiens
aagtgggagccttaaaattggattgaatgtagttgggaagattctaataattatttaacacttaaactcttaacaaaggtaatctttcctcctctgtttgtggtggtttgcctctctgctcttgaataccctgaaaakacttgacttgtgaaggttacattggagcagggtgataaatcctggggattatgtatgagaatggattctaaaagtgttagaacagggaggaaattgcacaacacttgatcaggctgaatttataatgatggcttaaattaaatgaagatacaaggccaaaatataaaagaatttattgaatcttaggtgggtaggaatctgagcatttgccacatgtgacaggctcaactgtagcccaacaatgtaaatttgatgacttgtaagatagccttatcaagcatatatatatttctatatataaatatatagaaataaagagagctccagcatttgtagaaaatacaaaaaactgctatattatgaaaggcaaacattttggtggagatgtcagcattgaagtgaattttctgggctttagggtttgagggtgatgagatcctggaatcatagagtacaagtgacagcaccctataaaataatagggaacagggcaaattatgg

SEQ ID NO: 742997 - DNA, 639 bp, Homo sapiens
aagtgggagccttaaaattggattgaatgtagttgggaagattctaataattatttaacacttaaactcttaacaaaggtaatctttcctcctctgtttgtggtggtttgcctctctgctcttgaataccctgaaaatacttgacttgtgaaggttacattggagcagggtgataaatcctggggattatgtatgagaatggattctaaaagtgttagaacagggaggaaattgcacaacacttgatcaggctgaatttataatgatggcttaaattaaatgaagatacaaggccaaaatataaaakaatttattgaatcttaggtgggtaggaatctgagcatttgccacatgtgacaggctcaactgtagcccaacaatgtaaatttgatgacttgtaagatagccttatcaagcatatatatatttctatatataaatatatagaaataaagagagctccagcatttgtagaaaatacaaaaaactgctatattatgaaaggcaaacattttggtggagatgtcagcattgaagtgaattttctgggctttagggtttgagggtgatgagatcctggaatcatagagtacaagtgacagcaccctataaaataatagggaacagggcaaattatgg

SEQ ID NO: 742998 - DNA, 518 bp, Homo sapiens
caacagagtcattttattcctggctttaattagctttacattggttgcaaacatctctggtattgggtcaaatagaaaaatcactttaaagcagtgaagacactttgggccatctttgtttttgagacggagtctcgctctgtcacccaggctggagtgcagtggcactatctcagctcactgcaaggtccccctcccgggttcacgccattctcctgcctcagcctcytgagcagctgggactagaggcgcccaccaccacgcccagctaattttttgtatttttagtagagatggggtttcaccgtgttagccaggatggtctcgatctcctgacctcatgatccacccgcctcggcctcccaaagtgctgggattacaggtgtgagccacagcccctggcccactttgggccatctttgggtagttctgtgtaaacagaaaaataaccatgactcttaaaatataatggatcaacaccataggaaaggttaaaaaaaattaatggaaaaccatgt

SEQ ID NO: 742999 - DNA, 518 bp, Homo sapiens
caacagagtcattttattcctggctttaattagctttacattggttgcaaacatctctggtattgggtcaaatagaaaaatcactttaaagcagtgaagacactttgggccatctttgtttttgagacggagtctcgctctgtcacccaggctggagtgcagtggcactatctcagctcactgcaaggtccccctcccgggttcacgccattctcctgcctcagcctcctgagcagctgggactagaggcgcccaccaccacgcccagctaattttttgtatttttagtagagatggggtttcaccgtgttagccaggatggtctcgatctcctgacctcatgatccacccgcctcggcctcccaaagtgmtgggattacaggtgtgagccacagcccctggcccactttgggccatctttgggtagttctgtgtaaacagaaaaataaccatgactcttaaaatataatggatcaacaccataggaaaggttaaaaaaaattaatggaaaaccatgt

SEQ ID NO: 743000 - DNA, 637 bp, Homo sapiens
gatcatagctcactgcagtctcaaacacctgggctcaaggtctcctcccaccttagcctctccagtacttgggattacaggcacaagccacaataattaaaattaattttaattattattaaaattaataagactcttattaattttaagagtcttaaacatatggaggttccctttaatggtaattagtaaggttatatgagagcattacaactaagacaataaagtcagagaagataaaaaggtgagctgaaagagaaaaatagtggcatggagaatcatgtgtgacctctcttaggagcagaagaaagtatgataattatagcaatgtaatttgctgatataamaatatatgacaatcggaataacaaaactaatgtgctccaacaatgtattgtgataaaaatgttaacaaattttaaatcattcagggttgccctgatctgaatgtttgtgtcagccccaatattcatatgttggaaccctaacatcacaggccatggtattattatattaggagttggggcctttgggaggtaattaggtcatgaaagcagaacccttgtgaatgagattagtgcccttttaaaggagaacccagaggggtctctggcttcttccaccatgtgagcttaca

SEQ ID NO: 743001 - DNA, 637 bp, Homo sapiens
gatcatagctcactgcagtctcaaacacctgggctcaaggtctcctcccaccttagcctctccagtacttgggattacaggcacaagccacaataattaaaattaattttaattattattaaaattaataagactcttattaattttaagagtcttaaacatatggaggttccctttaatggtaattagtaaggttatatgagagcattacaactaagacaataaagtcagagaagataaaaaggtgagctgaaagagaaaaatagtggcatggagaatcatgtgtgacctctcttaggagcagaagaaagtatgataattatagcaatgtaatttgctgatataacaatatatgacaatcggaataacaaaactaatgtgctccaacaatgtattgtgataaaaatgttaacaaattttaaatcattcagggttgccctgatctgaatgtttgtgtcagccccaatattcatatgttggaaccctaacaycacaggccatggtattattatattaggagttggggcctttgggaggtaattaggtcatgaaagcagaacccttgtgaatgagattagtgcccttttaaaggagaacccagaggggtctctggcttcttccaccatgtgagcttaca

SEQ ID NO: 743002 - DNA, 634 bp, Homo sapiens
ttgttcatggacccattgggctatgacaggagtggctggaaagaggctgagtggtgtccacagaatgggtcatcctattcagctgattattaaaatcctcctctgctgaggtcacccattggtgagcagtcacatgggatacaaatatcttcacagtttttgaccactaagagacattcatccacatccctcttccccaaaattctttgtccctaatttttcaatcatgattcttccaagtcccttagtatccagccaaaccattggctacagctcatgaawctttatgtaatcacacatctaaccatttcccttccatgaaaagcgcacaaccaggtgcactgctcaaagttttgcccactatgaagatttcccttgaccactgtcctttagggatgtcctagaaaggggttgtagtgctgcagctgtccacttttgggtggtacctgcacatcgtgcagaaccatctgtgaaccaggcctagtctcctcttcttctgtcaactggtcataaggaaatccctatgaggcgattggtgcaggctgggagagacaaggcagagtggcaggagtagagcgtttgagccacttccttatgtaacttacttgtaccttcaggacctactcgagcctga

SEQ ID NO: 743003 - DNA, 574 bp, Homo sapiens
ccaccaaaacccagtaacaggccaagagctgcctctcaaaaagagagaagttatctgcagaagatggcatggctttgctccaaaaccctagaggcctccactgtgattcacctatgggggccttccaaaggctccaaatggcattcctctctgccactgacayctcactcactattggatctgggtcatatgacctaagtggcagagcagcttgcacagcagcctggacctgttgcagagccatctttgcagccttttgggtcactcaataaataggccacagtaacactcccaaatgaggaatgtgtgttctcctaaatccaaataggcccacgaggcactgtgcctctttcctgttgtaggaagggccaaatgcagcaatttacccttcaccttagaaggaatatcttgacaggtcccacaacactggacccctagaaattttactgagttagcatgtccctgtattttagttgaatttatttcccatcctctggcacacaaacatctcaccaataagtccagtgtgtttgcactccttgatcactggatccaatcagcatcatgacgttaa

SEQ ID NO: 743004 - DNA, 649 bp, Homo sapiens
tactaggctgtagtttttttcttctagttttagtatcagagtaatattgccctcataggatgagttggaaactgtttccagctcttctatttgttaaaagaatttgtgaagtatttatagtagtttttctttgaatgtttgatagatttcaccagggaaaacatatggtacttggcttttctttcaggaagttttaaaatgaycaattcaattttttgcttattatagacctatctggaatttctatttattctagagtaagagtcagtactttgtgtcttccaagaaattaattcgtttcatgcaactcatcttgttggtttatagttgtttgtaatagcattcccttataatctttttatttcaatacaacaatagtaacattcctttttcattcttgattttagtaatttcagacttctctttgttttttattcttggttagttcagctaaaattttgtcatttttttttttatatttttaaaagcatcaaatagctactcctgctttcctttcatttatagttgtgtgatatatcttcttccatcctattactttcaaactatgtctcttccagacaaagcattattggatcacagtctttaaaatccaatttaaaagttcttgggttttggtgagattgtataa

SEQ ID NO: 743005 - DNA, 572 bp, Homo sapiens
gctaaaattttgtcatttttttttttatatttttaaaagcatcaaatagctactcctgctttcctttcatttatagttgtgtgatatatcttcttccatcctattactttcaaactatgtctcttccagacaaagcattattggatcacagtctttaaaatccaatttaaaagttcttgggttttggtgagattgtataacccacatgcatttaatattattgatatgtttaraattatatctgccattttgccttttgttttctatgtgtcacatgtcttttttctttttctacttttttttatactaagcagcttatgtttaatgtagcagtttaatttttagtaaattttaaattatattttgaaatatttattagtggttcttctaggacttacaatgtatgtcttaacttatgaaagtctaatttagatttatactgattttatacccataaaatatagaaactttattcctatatagctacattccctccttatattttgtgctattactgtcatacatactacttctataaagcttacaaactgaacaatacattgttataatta

SEQ ID NO: 743006 - DNA, 633 bp, Homo sapiens
atttacgagctcattcttgttcatcactcatcagcaccaatgactataagctctatctccatcctctcaccatcaagccttaccttccctcaattgataaggagatgtaatttttaactagcctttagtttttttattttgctaaatgtatttatattcattgtgaatctttaaaatgttatttcattaatcatttatttatrttacattatgttataaatcctttgcagtaaaaaaggataatgtaacttgtacctactaccagatagtaccattgaatttctccccaaaatatacctacaaatgacttaattgttatataaataattaattaaattttaaatcattgatcttttaattttttatattatacggaaaatagaattttacatatttatttgagttgttctaataatatctggaaaagttttaggggatttttatagcctcccattatttatatataaatgcaaaggtaacggaaagatttggtttgtcagagtcaaggaagagtggaacacaaaggttttctaaaatatatttctcatgtaagtttaaaaccatatttccactgaaaattgtgttagtctacataactctttagctttcctcacactcattaggcattagatg

SEQ ID NO: 743007 - DNA, 590 bp, Homo sapiens
tacctggaaccccattatgctttcacctccttgactactgagctcaagggtcacaaaggtgagggacatgaagagtcaacttctatatgtaaggaagtctggactactacagaaatgctgctagtatacctccagcttctgaaagtgctgtgacaaaaccccagaaagtttgcacgactgatgcttttagtggagtggtgaggaaagaagtgatcggaaggcagcaaagtcagtcagaagtggccaaagaatagaaaacatttactgagcgcctactccacatccagcacaatccttctcaaccatcctgtcacggaggtatcattatccccagatctagctggcttctaagccaaatcatcatcgcctattttgttgatggtgaaaggtgctgcaattgggaggtgttgcatggccaagtgaatatgcccacctgctgcaccaagatggtgcrcattgccgcttgaaggcaagtcatggattttttttttttttgagagttaggaggggcctcaaaggaataaagataataaagggaggaagtgagggttgagaggtaagcctcaagcctagaaagttacttacaggat

SEQ ID NO: 743008 - DNA, 649 bp, Homo sapiens
tgttactacagaagctatggggatgaagtatggttttattttggagatatcacccagagaaaatggagccaagactgttgatgctagcagatgaaaattgttgtgatcccttctgggttcctaaataacaatggcatttccaaatgttcccacttgagggagcacagaaatggttctaagttttgtctagtcaaagcactctctaatctcagactatcttgggaagggaaacttggaaaaccagcatcccctggctatagcagcctttgactcacaagggtgctgagtggactcaagttcccagtttcagwacattcgtgttccttatccacctctcagtcattcaggttttgactggctgacagtcagctactgggatcctccccagttgtggctctctctctgccatggagctagacaatggtggaaccagtgtctgtggttctagtgcctacaactatgcctagtgagtgtctgtgtttggggaagacaatgctgtctctctggcttccatgttttaataaagtagatctgtgagaatcttgtaggggttagccctaagctcagatctttagtcttagcttttaggacctagtgtttcattaggcagtatagtgtacaagaacatgagctttgcagataatgctcg

SEQ ID NO: 743009 - DNA, 585 bp, Homo sapiens
cagaacagccccacacagccactgctcctttcccagtgggtaccataggcccattcccctgaggctggtccatggcaacagggactctagcaggagggagggaaatcaaagtacctgtggtgaactcagcaggcttcttgaagcgggtcargaagatgtggcagaggatgtacagtgttgcaaacagaagtgttgatatctgtagcagaatatgagctgggatgagaagctctaaccttcagcacactccacagccccaagggcctctctgttaattccaggccatcacttcctcaagataaggctccatacttccaagggttccatctggaagtatgttctgttctgatcccccaggtacttccttctagtcagggccccaggggcctcaaagaagggccagacaggggctgccccatgcacctggggaaacagcaacatgcccagccctacaaggacttcattgggagaaaatagcttcagcccaactctggttggtaaatgggcaaagaaaactcctagaaatgcacatgcacacgcatttcaaaccagctacagaaccagagggaatttactccgagcaca

SEQ ID NO: 743010 - DNA, 567 bp, Homo sapiens
tgcatagtttttctggcctttatccttcttggtgttttttgagcttcctggatctgtggtttggtgtctgacattaattcaataaaaattttctgtacttattatttgaaatctttattttgttcctttcattttccccttcaagtattttcattataaacacttgtgtagtccttccaatgttcttggttattctgttttttctttcttttgtcttatttttctttgctttttttattgatataaacttagagattgtttcctcagcartgctctatctaataataaatccatgaaggcatttatcatttctgttacagttttcttatctgtattctttcattttggttcttagaatttttatctctttacttaaattgctaacctttcttacattctgtctacattatccattagaccacttgacaaattaataatagttgttttaaatttccatccctgatattccctgacatatctgggtctggttttaagtcttattcttttcagactgtgtttattgtcttttagtatgtgacttgcaaatttttcttgacagccagacaa

SEQ ID NO: 743011 - DNA, 445 bp, Homo sapiens
tttagtgatgcctgagacttttgtgtacctgtcacctaagaagtgtacaatgtatgcaatatgtagtattatatccattatatccttcaccaccctcccaaccttcaaccacccttggtgggtttttatgttcaggaactgatccatttcttctagatttttcatattgttggcatatcattaattgtgcatagtagtttcttatgaacatttgtatttyagttgcatcagttgtaatgcctcctttttaaactgattttatttatttgactcctgtcttttttttcatggttagtcttgctaaaggtttgccaattttgtttatgcttttataaaatcagctctgcatttcatttatcttttgtgttgtttttaggtctctactgtactctgattttattattttccttctaatgtgagtttattttattcttgcttttctatc

SEQ ID NO: 743012 - DNA, 534 bp, Homo sapiens
ctataaacttgcttctaaggaccacttttgctgtattccataagttttagtatgttgtgttttcatcttcatttgtctttagaaagttttaaaatgtctcttttaatttcttcattggcttacaggttgtttagaaacatgctgtttaatttccatgtacttgcagcatttcagaactcctccttttgttgaattctagttttatttcattatggtgaaaaaatgatwcttgatatgattttagtttttttgaatttttaaagacttttttggtaaactaacatatagtctatcctggagaacatactatgtgcagtatagaagaatgtgcattctgcagctgttggatagaatgttctgtaaatgtctgttaagtccatttggtctagagtgcaatttaaatctgattttttttgcttggttttctgtaaataatctgtccattgcaggaagcagggtgttgaaatctcctactattattgtattactatgtatctctccctgtaaatctattaatgtttcctttatgtattt

SEQ ID NO: 743013 - DNA, 591 bp, Homo sapiens
catgaccctactgattcacgtattttgaaccattcttgcattccttggatgaatctcactcaatcatggtattattgcttggtatgttgttggattagtttgctattattttgttgcatatttttgcagctatatttatcagaaatacttgcctgtagttttttctttttatttcctcatgttctaattggttttaattttgcagtgttttgctggccttgtagaatgagttaagaaaattcccttggtttcccatttttagaattgtttcagaataatgagttttaattcttgttaaaaagaattgtaccagtagaattatacccatagaatttaacagtgaagccatacagtcytcaacttgtatttgttggaagactttttgttactgtttcaaccatgttacttgctattggtctgtcagattttctatttcttctttattcaatcatgatagattgtgtgtcaggaatttatcaattttctctaggttttcaaatttaaaatagtgttcagagtatctcctaatgatcctttgtatttctgtagtagctgttgtgaaatttccttgttaatttctgattttattta

SEQ ID NO: 743014 - DNA, 646 bp, Homo sapiens
atgtggggtataatcactacaagcatttatcctttctttgtattaaaaacaattccattttactctttcagctatttttaaatattcaataaattactgctgactatggtaaccctcttatgctatcaaattctaggtcttatttattacttgtaactattttttgcatccagtaaccatccccacattcccctaccatcaccccacaaccattcctagcctctggtaaccatccttctactctgtctatatatgagtgcaattgtttcgatttttacctcccataaatgagaacatatgaagtttgtgtgcrtcactaaattcacttaacataatgacctccagttctgtccatgttgttggaaaagccaggacctcattcttttttatgactgaatagtattccattgtgtataagtatcacattttctttatccattcatcttttcctagatgcttaggttgcttccaaatcttggccgttgtatatagtattgcaacaagcatgggagtgcatgggagtgcaagtatctgatttctttggttacatactcagcagtaggattgctggattgaatggtagctctatttttagttttatgaagaacctccaaactgttatctatagcggttgtactattttaca

SEQ ID NO: 743015 - DNA, 636 bp, Homo sapiens
gacagtgtgtcaattcctcagggatctagaaacagaaataccatttgacccagcaatcccattactgggtatatacccaaaggattataaatcattctactataaagacaaatgcacatgtatgtttattgcagcactgtttacaatagcaaagacttggaaccaactcaaatgcccmtcaatgatagactggatgaagaaaatgtggcacatatacaccatggagtactatgcagccataaaaaacgatgagttcatgtcctttgcaggtacatggatgaaaccggaaaccatcattctcagcaaactaacacaagaacagaaaaccaaacaccacatgttctcactcacaagtgggagttgaacaatgagaacacatggacacagggagaggggcatcacacactggggcctgttggggggtgaggggctaggggagggacagtattaggagaaatacctaatgtagatgacaggttgatgggtgcaacaaaccatcattgtgcgtgtatacctgtgtaacaaaccggcacattctgcatatttttcctagaacttaaagtacaataaaaaaattttttaaaaaatgctatatatttttaaaaattcattttaaaaatatgacctatggggcta

SEQ ID NO: 743016 - DNA, 561 bp, Homo sapiens
gatggaagccactgacaaaaagtcaaaagagcaggaaactctgacatggagtcaaagatcaaggctggaatttccagaaccatgacaggagtacagaacagtggtcatgagctaatcagtcagcctttcttgcagctgttgccatgttatatgtgtgtgtttgttgcagataaagtaaatattaataagtttatatgcatagtatgctttatagaaatcatatgattgctcttccaaaaaaaataacaagttttttaagcaaaataagtcctttaactggcagtttccacatatgactctgggaagtgatgttaattttattaggagatctgaatgtgaggttattcgtatattacccaataatatttgtcagcatttttcagtgtttgaatatttkttataaaacataattcttggtaaaaaaaaatagtaaactgaaaattcctttttattacatcattttaatgtccataataataagatatgaagaatggtggaagtatttaaagaataacatatgacttagaataatttgtgaaatttccaagaattccagtatct

SEQ ID NO: 743017 - DNA, 622 bp, Homo sapiens
gttgcattagtggggactctgacatacaaattggaggcattcaaatgaaaccagtttaagcaataagaacagaaagatttatttgggttcttataaataagaatccctagatatttggtcttttgaggggaacagatgatttaatcatgcttctctaattctatacaataaatgagatggctgctggtggcccctatgttacaatctgaggaaaaaaagaaatatttttaatagctgtagtaaaaatcccagggaagtctctgattggtcaatgggtcatgtggccacctttgggtgaaggttgggggtaaygaactgaatatattaatatgaaataggatgagggatggagctcaaagaaaatattgctgatcagaccacaaaacaaatggtcactatgcatgaacaaccaggcaccccgtttccaggagaaggttcttcataagggtctttgacttcactggaaaagcaaagctacgtaaaatgcaagaaattatgattttattgacagaattgaacatcatgcagattccagtctttctggattacggggaggaaaaaggtagaagataagtattgaaataatgcctcgtgattagccattgaatatatgtgtcataca

SEQ ID NO: 743018 - DNA, 632 bp, Homo sapiens
cttctgtcagatcagcggtggcattagattctcagaggaacgcgaaccctattgtgaactacacaggaaaggaatgtaggctgtgtgctccttatgagaatctaatgcctgataatctgtcattgtctcccatcacccctagatgggaccattgcaggaaaacaagctcagggttcccaatgattctacattatggtgaatatgtgtattagtcagagttctctaaaaggacagaactaataggataggtgaatatatgaaggggagtttattagaatgactgacatgatcacaagatgaagtcccacaataggctatctgcaagctgaggagccaggaagttagtccaagtcccaaaacctcaaaagtagggaagccgataatgcagccttcggtctgtggctgaagrcccgagagcctgtggcaaaccactggtgtaagtccaagagtccaaaagctgaagaatttggagtctgatgtttgagggcagaaagcatccagcacaggagaaagatgaaggccagaagacttaaccagtttagtccctccatgttcctctgcctgcttttatcctagccgcactggcagctgattaatggtgctcacccagattgagggtgggtctgcctctc

SEQ ID NO: 743019 - DNA, 612 bp, Homo sapiens
atccaatcagcataatgtcatcagtgtaatggaccagtgtgataccttgcgaaagcaaaaagtgatcaaggtccctccaaataagattatgacacaaagccagagagttgatatgcccctgaggtaggacagtaaaggcatattgctggccttgccagctgccgacaaattgcttctggtgagccttataaacagaaatggagaaaaaggcatttgccaagtcaatggctgcatggcaggtaccaggagatatgttaatttgctcaagcaatgaaatcacatctggtaagcagccgcaattggagttaccgcttagttaagcttatgataatccactgtcattctccaagatccatctgtcttctgcacaggccaaatgggaaagttgaatggggatgtggtgggaatcaccacccctgcrtctttcaagtcctgatggtggcaataatcttcacaatccctccaggaatgtgatattggttttgatttactatttttctaggtagaggcagctgtaatggcttccatttggccctttgtcaccataataaccctcaccctaccagccagggatccaatgtgggggttctgccagctgctaagtatgtctat

SEQ ID NO: 743020 - DNA, 575 bp, Homo sapiens
catatatatacacacacattatggaccacatatgctcaaaaggccactcaaaaagcagagtatcgaatctagaataagggggtttgtgcgtctttatcgatcataatcataattatttcactagcctgggagatcaggaattaaatttagaagcttggaagtaagctttgagtcttttccaaacatccccatgaacataggtttgtggaatgaaaatattattcttcttcctgaaaagaattccccagccattaattagtcccagtgwtgtttctctttgagaaaaaattatctcagtcatttataaccaaaaacaatacccagagagaaattcaataacagtatacattaaatcagtgattccctagtcacaaataaataattctggttccgtatctagaaagtgaaaccattgcccagaacatttcacctcccattgtccatttgcggtctgcatcctgccaaagttacaggatttgggtgtgagaatttttagaatccaaagaggtatttacatattctgtagctcattgtagcagaacatttttctatctctctaaagattatgtacacaa

SEQ ID NO: 743021 - DNA, 566 bp, Homo sapiens
atagacctatcctgagattaaattatatctcattttcacataatactttagatcattattttactttattctttcaagtaaatggtattagaaaattagactagttttcaaagacccaaagactagggagtccgggagatcttgctgaaagtgagttacttgctctaataaaggatggactcttgaaaaaatcctgttttaggggaagtgagttccagagcagcctataacttggcaaattgtcattttgacagatggagtgaaaagccagcagttaggagacttgagctatgcatcctcttaggtggtgtgctcagaaagccagcagctaatatgctctcacagctstctgcccaggcatcattaccatttcctacacaagcgtgccatgtgctcttagcctggtaaaatataagattattattccaggctgcacagcacgttagtgtttgaggcttgaaggaagaaggaaaagagtagatatatagagattaaagagccttcatctttacctccaattttttttgcataaataactgaattattttaaccacaaactatcaata

SEQ ID NO: 743022 - DNA, 642 bp, Homo sapiens
taatataataatatatatttatatctatatatatactatagatatagataaagatatacacatacatagtatcatagcaagggcagggcttttagagtcagaaaagtggccaaatgttgtgggatgtgtcatccaacttctctgtaatccagtcccctcacctttaaaatggccatgtaaatgctgatccatcgagttctgagcagtgtcagtgagatcatgcatgtgccacatccagtagagtttttggtccttaaatgcatcagaaatgttaggtattcttttttttcttccttttctttttcttcacttttwttttaaagtctctctccatcacccagtctggagtgcagtggcgagatcttggctcactgtaacctccacctcctgggttcaagtgattctcctgcctagcctcccaactagctggggttacaggagtgcaccaccacacctggctgatttttgtatttttagtggagacagggttttgccgtgttggctaggctggtcttgaactcctgacttcaagtgatccatctgcctcagcctcccaaagtgctgggattacaggtatgagccaccatgcccagcctcatgttaggtattctcatttccaaaagatattcccagaattatact

SEQ ID NO: 743023 - DNA, 642 bp, Homo sapiens
taatataataatatatatttatatctatatatatactatagatatagataaagatatacacatacatagtatcatagcaagggcagggcttttagagtcagaaaagtggccaaatgttgtgggatgtgtcatccaacttctctgtaatccagtcccctcacctttaaaatggccatgtaaatgctgatccatcgagttctgagcagtgtcagtgagatcatgcatgtgccacatccagtagagtttttggtccttaaatgcatcagaaatgttaggtattcttttttttcttccttttctttttcttcacttttattttaaagtctctctccatcacccagtctggagtgcagtggcgagatcttggctcactgtaacctccacctcctgggttcaagtgattctcctgcctagcctcccaactagctggggttacaggagtgcaccaccacacctggctgatttttgtatttttagtggagacagggttttgccrtgttggctaggctggtcttgaactcctgacttcaagtgatccatctgcctcagcctcccaaagtgctgggattacaggtatgagccaccatgcccagcctcatgttaggtattctcatttccaaaagatattcccagaattatact

SEQ ID NO: 743024 - DNA, 616 bp, Homo sapiens
tgaaagctattttggagctttcatcgtcagctaatggagtcttacttgaacggggtcacatttaaacttctaataatttttatgttgtagcctgtgaacatacaaatttcaggtaaattgaagctaattcctgcaggaggtaaggtcatatgtagaattagtcattattcatattctgaaaagtgatgatgtcattatgggagagaatttcttgggtcaagaccatgcatttaaaacgattaaaattcaaaaaatgggatcaccattactgaataattagtatctataagctactttactaaaattagagaccagtgaacttactgccctaagtcaagagattaatggaaattgagagtgttctcacttatttggctatctagttattcttgttccctatttcagaggtgagatgatgttaaatattaatctggaaatacgatctcctagtagcataatacttkggaaagtcttgctccttacaaataaaaggcaactcataaaacacatacatgagatgctcttaaagccatcagcattgaaaactaatggaaccgagtattaaataataactagattgcaagtaaagattgatatataataaacaatgacttta

SEQ ID NO: 743025 - DNA, 602 bp, Homo sapiens
tatatatatataattatatatatatatataaaacgaatagctgggtgtggtggcttatacctgtagtcctagctacttgggaggctgaggcagtaggatcatttgagcccaggaggttgaggctgcagtgagccatgatcatgccactacattccagcctggcactggcatcaaatttactggtagtcaggtgatatttaatgtccatatactcagagtaaaaaactctcaaaacaaagcaaaacaaaaacagttttgcttatgattataattgttgaagcacttaaaaattattaatgttattaattatctaccttggaatacatactttctawcattctagtgaactgggaagtagatataaaataattctgctatgcgtcaaagtattatgacaatctctatttcttaattgcatcattgcttgagtcctgagctggacatcatctttactttaaagttatgactgacaaattatggttgttcagatagatataggtcagatattttcctgaaagtgaaccaagtgagcccattcatttcaagataaacaactgaccatatataaggtcattgattaaatgtgagtgttcaagaaaaca

SEQ ID NO: 743026 - DNA, 559 bp, Homo sapiens
ggcagaaagtgcccattgttcaggattctaatagctacatctacttaatatcttcatttctaaattgactgcttttacctttttctcatgtttatataatggtatgcttgcatatatttcatgaatacattgtacatattatgttaatatttacacaatttaaaatatagatgtgttttattttgaagtgagaaaatgaacattaacaggcatgtttgtacagctagaatatattagtaagatactgtttttcgtcattccagagctacaactaataacacgaggttccaaagctgaagactttgtataaagtatttgggttttgttcttgtattgctttctttcaacagtttcaaaataaaatatcatayaaatattgagggaaatgttttcatatttttcaaaataggtttttattgttgaatgtacatctaccccagcccctcaaaagaaaaactgtttacatagaaattcctacacatacgtttgcgtatatgttattttaaacatctttgtggtgagaattttttccccgatattctccttctgtcaaagtcag

SEQ ID NO: 743027 - DNA, 577 bp, Homo sapiens
agctcagcaaaattcttttttttttttctgagacggagtcttgctccgtcgcccaggctggagtgcagtggcgcgatcttggctcactgcaacctctgcctcccaggttcaagcgattctcctgcctcaacctccagagtagctgggactacaggtgcccaccatcatgcccagctaatttttgtattttcagtagagatggggtttcaccatattggccaggctggtctcgaacccctgaccttgtgatccacctgccttggcctcccaaagtgctgggattacaggtgtgagccaccgtgcccagctgagctcagcaaaattctgattgatgaatttacyaattgttcttccctactcaggtgttagtcttcgttcaggccaaaccaaaaatgcttcagaccctaagtcacctacaaccttctttctttttcttccttttgatgcatgttgaaagaaatgctatttctcaaggaaatgaccccccaccccccagactgatttctgacctctcattacatggcacattagttggctgtcaaaaaaggaaacttaagcagaaatgcccagctgtgat

SEQ ID NO: 743028 - DNA, 557 bp, Homo sapiens
tcgccatgttggccaggctggtcttaaactcctgacctcaagtgatctacctgcctcccaaagtcctgggattacaggcatgagccgccatgcctggcttattttctattttttatgttagcatttcataaactttgtgaatattatgagcatgctgacatgctaaaagatggtctacttcaggggttggcagacaacagccctgagccaaatcatgatgtcccctgcccattcatttacttgtctatggattcttctrcactacaatggcaggggcgaacagttgtaatagacagggctggcttcacaggcgtgagacctgtatggtcatagaaagccccagcctttagaatgatctcctgcttggtttaacgctcagctgcaactatcttgcagatattaataatttttaaaaaggggactctgcatttttattttacactgggccttacaaattatataactggtcctggtgacagagactgcaaagcctaaaattctttagacctataaaacctaatatatttactgtctggccctttacagaaaaagtttgc

SEQ ID NO: 743029 - DNA, 577 bp, Homo sapiens
gtaaaggaaagttagatgcttcccaaagacagacagtcaaatctttttttcccttgacatccctgattcatggaggtggctaggtttatgtctagttatactcagataactaattgtctcaagtgtcttaagtgtctggttgatggttgaaagtaagctctagggataagcagtctctcaaggagtagattgtgggatggggaggcagaaggccacaaaggtactatagctacatctatgcaattcatatgatctctaccaccttacacctccatgcccactcacccatgaggcagggrgcatttatattgaacagagacctatctatagctgcaaaggtttatctcaaatatgtaccttggcagacaaaggcgaagagagacttctggaggaagccattgtaaaaacacataacagaactcaccacttattcctcctaagcttgtcttgaatgtagacatgaaaaagaccaacccagccctcagtactacgtgaggttgctgatacaaattcagctaacacttattatcttattatctgccttgcattgtggcagaggcttttttaatcaatcatc

SEQ ID NO: 743030 - DNA, 625 bp, Homo sapiens
tagccaaaattcccagagcaaagaaatatgtgacaagggttgtggccttgtaacttttgaaattgatcttaaatcacacaaagattttttgctcaaaaattctcctgtggtgcctcagtaacagaggaggatgaaattatcattcaaggagactttacagatgacataattgaggtcattcaggaaaaacagacagaagtagatgatgacagcatcgaagatcttggagaagaagtgaatttgaaaatttgtctgtagttaatggcctgaactgacagtagatatggccaaagggagagaggcctwcatatatatatatatatatatatatatatatgtattctacagtaaaactgtagactgccttcgttcttggcattttccctgttctgtacaaggctgcttatttttttattgccaaagtcaaataaacaggagagactgtcatgctcatacatgaacagaatttagtcaaataaaaaattttggttatttggtactttttttttttttttttgagacggagtctcacactgtcgcctgggctggagcgcagtggtgcgatctcggctcactgcaacctcgacttcccgagttcaagtgattctcctgcctgagcctcccg

SEQ ID NO: 743031 - DNA, 537 bp, Homo sapiens
acataaggtatgtaaaatatctagcctgttagaacacacctaataagatacactcatggcaccaactttctctcatggttctcccttcaagcattttatatattcccttttaacgagtactttgtaaaggctgtaaaaattggcttgcaaaatagcataagattgcatgacggcaaacatcgttgctttcctccagaaagcatgagctagtgaacctagcatggcagcatatcagctgtgcttcccatccagaggtaagactgggcccagccagaagggaaaggcagaaatttactctgattaacaccaacccttccttttgactacctcccaacaactttgtctccattaccaactaggcagtatcttccaggcctttaacacacgcgcrcacacacacacacacacacacacacacacgcacacacgcacagagagagagagagacctacattttatttatccccctcttttcttcacataggtaggagtatgtactatgatgtggtagaaatggcctgaactttgaggccagac

SEQ ID NO: 743032 - DNA, 580 bp, Homo sapiens
aggagatcgagaccacggtgaaaccctgtctctactaaaaatacaaaaaattagccgggcgcagtggcgggcgcctgtagtcccagctactcgggaggctgaggcaggagaatggcgtgaacccggaaggcggagcttgcagtgagcggagatcgcgccacagcactcccgcctgggcgacagaacgagactcygtctcaaaaaaaaaaaaaaaaaaaaaattttaaaggtacaaaaataaattatgaaagtactaaataaaatttgggtaaatatatattttatacattaatattgtatatatggggtgggcaaagcttttctaaacatgtagcaaggacagaaatcataaaggaatacactgattaatgatataataagggaaaacttacacatttttttgaacattaaaattgaaggaaaaatgataaatttggacaaatgtttgcaacatggtggggaaatgattaaaaagtcaacatatgaagtactcttagcaataaaagaccatctcttcagtaaaatactaggcatgaacatgcgtaggcagttcagtaaagaattacaaataaaaacatga

SEQ ID NO: 743033 - DNA, 624 bp, Homo sapiens
ttaaaaagatgcaacatttctacctccaagaagtttgaaatatataaaatgtattctgtgtctcattatcaggtctctgactcagagtaacttttacaaaggtttttatctttttttcccctctatgcttcccaaagcatgactaatgaggctgatgaatgtcatcataggagcgccgcgtttctggcaggtagaaaaagatcacattagggcttggacttccaagtgacatctagaagcaatgagaaattcaaacaagactaccctgagtctatgcaggaattggtagtgtttgaaatttgggagaaatgttttaatttttgtgaaagtcagtggtgttaaaggtcagaaatgtaactacctccagagttctagcattcagggtagtgaagatgtggygagagttaatgaaataaaatcaagaaaggaaaaacatacatgttggtgtcaggagatgtgtctggttaaatgtcagttcttgttcacagcaagtagaaatgttcagtctttcagagtcactgccaaaggcaccatatacatttctccacatcaggaacctgagaatcgttttctcttttcccaattctacaagggtttataattcacagaaccgtgcagggatcg

SEQ ID NO: 743034 - DNA, 600 bp, Homo sapiens
actaacaagttacaatattatgaatggatattgctctaaaatttcttaaaggcctatttgcatatatgtacatgtgtatatacaaagaggccattatgaaattttgcagtaatgtgtttttatgtctttattcacaactaatgtatacagaaagacatttaaccccgctttgctgaagtagctttaattttatgtgatcctttaaaawtatattttagaaaaagccaatttactatttatacatatttctcaacattactgtttttacaaacccaacataaaatgccagcaactgttaaaaaaaactcaaactgatatagctataaaagacaaaattttaaaacatttaaaaagacgtcaaaatataatgcccctgtatttatctagtacccctggagccaggtgtggggatggactatacattctaataggtttttttttttttaaagactgctaagagttttatcattctcatacgaaacaaacaaacaaaaccactgtggataaactttttttagaaatgtatatttcctgagtttttattcagatcataggaattataaattttttaataatccaggataattatcatagacagca

SEQ ID NO: 743035 - DNA, 549 bp, Homo sapiens
cctgtaatgaagttactgaaacagccatgtccaaccctttgaataagaggactttttggcttatctgtggtggcagatatcacaaaaattatacacggacctttatttatttattttagctcatcagttatcattagttttattttattttattatttatttatgtatttatttattttgagacggagtctcactctctcgctcatgctggagtgcagtggtgcratctcggctcactgcaagctcggctcactgcaagctccacctcccaggttcacgccattctcctgcctcagcctcccgagtagctgggactacaggtgcccaccaccacgcccggctaatttctgtatttttagtagagacggggtttcaccgtgttagccaggatggtctccatctcctgacctcgtgatccacctgccttggcctcccaaagtgctgggattacaggcgtgagccaccgcacccggccagtgttagtgtattttatatgtggtccaagacaattcttccaatgtggcccaaggaagccaaaagtttggacac

SEQ ID NO: 743036 - DNA, 549 bp, Homo sapiens
cctgtaatgaagttactgaaacagccatgtccaaccctttgaataagaggactttttggcttatctgtggtggcagatatcacaaaaattatacacggacctttatttatttattttagctcatcagttatcattagttttattttattttattatttatttatgtatttatttattttgagacggagtctcactctctcgctcatgctggagtgcagtggtgcgatctcggctcactgcaagctcggctcactgcaagctccacctcccaggttcacgccattctcctgcctcagcctcccgagtagctgggactacaggtgcccaccaccacgcccggctaatttytgtatttttagtagagacggggtttcaccgtgttagccaggatggtctccatctcctgacctcgtgatccacctgccttggcctcccaaagtgctgggattacaggcgtgagccaccgcacccggccagtgttagtgtattttatatgtggtccaagacaattcttccaatgtggcccaaggaagccaaaagtttggacac

SEQ ID NO: 743037 - DNA, 475 bp, Homo sapiens
gtgttgcaggaagtcagggaccccaaacggagggacaggctggagccgcggcagaggaacatacattgtgaagatttcattttaatgtggacatttatcaattcccaaataatacttttataatttcttacccgtgtctttacttcaatctmtgaacataaattgtgaagatttcatagacatttgtcacttcccaaataatactcttataatttcttatgccttattttaatctcttaatcctgttatcttcataaactaagaatgtacatcacctcaggaccactgtgacaattatgttaactgtacaaattgattgtaaaacgtgtgtttgaacaatatgaaatcagtgcaccttgaaaaagaacagaataacagcaattttcagggaacaagggaagacaaccaaaagatctgactgcctgcagggtcaggaaaatagagccatatttttcttcttgcagagagcctataa

SEQ ID NO: 743038 - DNA, 635 bp, Homo sapiens
aacttgttttgaactttttagagttttactctatttgttagagcagcaactggcctgccctaagtagttgtacctgagcttttgaaagagggttgtaatcgatagacaccatctccatagctcagtctaagcatctacttcaccttctacacatgatgtgggggctgtaaacaaagagatttacagagtgcaccaacaatagcatgtgtggtgcaatcaaattgatggtcagatgcttcwgaagcagctgggaggccaaaatgctacagagactgtagaggacagaaacaaactgcagcactcccatccaccacccttgaatctacagaaagaacttaggtgggcagcaatgcgccagcaaacagccatgatttgacttaccctcttatcgagtccccagttgtaaatggcctttctccattagaaccatctcgggttttttcccctgcaactttttcccaaacttagtatcaagctttattttttctttctgaataattctaaattattctaactggagtgagcaaaaatgaattaaaaatagctttataaaaccttctttatctgtatccattgagtcacaaaagcaggacatacacacaaggcagaattataatgaaagagaaaatctatgt

SEQ ID NO: 743039 - DNA, 607 bp, Homo sapiens
tttagttatagttttgtttggtgtgctggttatgctaacagtgatattgttgtgtggacagactcaggacctctggttagccagtatgttgaaggtggtgtgattagatgttattttctttttcctgggatcagtattattctgtcgtgagttgctgtaatggcctgagttcattggcctccagtggcactgtcgtgagtgcaccagctgtagtagtagtagtagaaggatctaagcttgccttaaattggccaggataagtattttgttttctcaggtgatgggcagggccataaagctcccaaaaatttctgtcttttttgttcagctacaagaatgggtagagaaatrccatcaggtgggggcagggttagggaggtccgggctcacgctttcctttggcagggcttgctgtggccactgggctgggcggtggttctcaggccaatgggatcagttccagaggggatctttgctgcctctcctatgtcatatagtttgccatggtagtagaggatagctggtagtgagaggtttcaacacagttggtggggctggtctctccttcagtgcccctactcagaccttgccccaggccatgagcttc

SEQ ID NO: 743040 - DNA, 577 bp, Homo sapiens
catgattctcgcatacctcagtttccaactgacacattcaatctctgaccatctcacatccacctttcaaactgaacactcttttcatagaaaaagagtatcttcagcattcctgaatcttggcttaaattttctattccttgatgttgacctttgctggttcttgctaagtatcttgggacccgattctgactctctgactcctggctcttcctcgatttgatttttcyggtttgggatttttatgcctatatattagccatggttttcagtcttcctgaacacaagatttatctccatctggactgaaaatttgctttgtccatatatgaaaattttttaaaaacttattgagaaagatgaccagttaagtacattgtctacactcctccatgtgtaaaaaataaggaaaaataaaaagtaattttcattgtttacagatgacataactatattcctagaaaatctaactctacgaacaaaaaatgcaataaaacaaagagagtttcctaagttggcctgaatgcaatattaacttatgaaaccaatagctctttaatacaacacacttcctaca

SEQ ID NO: 743041 - DNA, 447 bp, Homo sapiens
caaatgcttccctgaatttctcatgagaagaggaaacagggcattcataccctgtttcctgccacaccttttctgagggtcacccttggagttctaagttctccacatttctgggcttcacttacacaatgactgagtgagttctcaggacttcagagagggcagagaaaagcacggctcacactgaaggtagtattacgtcaatgtgtgtctgagcttgcacagagctcttggcactcagtggctgaaattggatgtgggccaatgggayggacgtgactccacacaatgaagcactgactacagtccaccttttgcacaactcttctccactagtgtcctacattaaaaccaccctgtcactgaattttcaaattgatgaccagccagtctttaaaaaaaaaaggctgattcagacggtttagtggaataagctacagtaaccag

SEQ ID NO: 743042 - DNA, 544 bp, Homo sapiens
gagaaactgaaaaccagcactgtcaggtgtgttaaaacccttaagattggttctcggctgggcgcggtggctcactcctgtaatcccaacactttgggaggccgaggcgggcggatcatgaggtcaggagatccagaccatggtgaaaccctgtctctacttaaaaaatacaaaaaaattagccgggcrcagtggcaggcaccctgtagtcccagctactcgggaggctgaggcaggagaatggtgtgaacccaggaggcggagcttgcagtgagccgagattgcaccactgcactccagcctgggtgacagagcaagactccatctcaggaaaaaaaaaaaaaaaaaaaaaaaaaaaatttgttctcatgaacttcctggcttagccaaccacatccacccttccatgtgtaggttaatattcccaatctgccacctgctcctccttctatgtgatttctcgagcagatgcaaagagacttgtctggggcaactcacaccccacaccatcttgatttttgtctctggggtcttcaaagccctc

SEQ ID NO: 743043 - DNA, 500 bp, Homo sapiens
gttacaacaggtaatgaataaaattttggtttattaattgaatcactttgaattgaattggattggattggtggcaaaccactggtttatgatcagatgtcaagacttttcaaatcccttttctaagaggtaaaaattagctggttggctggctggctagaccaatagacactgattaggcatacacaygaccttataagttaacttgagctcacacccctggctctactcattcctgtattgtccagttggatggctttgcttctttctccacagttctcctggcctcttactcagatccatgtgctttgggcttttggttcttagtaagctggtaacttggcccctgactacattcaactgtgcaccttgaacaacccaaattaaaacaatccaaagcctagtcaggtcaagacaatgaagctggtgccaccatgtccacattcagaagtggactcagaaggcaggaggaaccatgttctccaaacccccaactcaat

SEQ ID NO: 743044 - DNA, 676 bp, Homo sapiens
gagctcatcaaaatcagggattgtacctttcatttcttatataaccatggttgtacctggtaagatattaatgttacaacaggtaatgaataaaattttggtttattaattgaatcactttgaattgaattggattggattggtggcaaaccactggtttatgatcagatgtcaagacttttcaaatcccttttctaagaggtaaaaattagctggttggctggctggctagaccaatagacactgattaggcatacacatgaccttataagttawcttgagctcacacccctggctctactcattcctgtattgtccagttggatggctttgcttctttctccacagttctcctggcctcttactcagatccatgtgctttgggcttttggttcttagtaagctggtaacttggcccctgactacattcaactgtgcaccttgaacaacccaaattaaaacaatccaaagcctagtcaggtcaagacaatgaagctggtgccaccatgtccacattcagaagtggactcagaaggcaggaggaaccatgttctccaaacccccaactcaatcagtgtttcccactgcagatgatccatttcagggaaaccatgcccaaagagatgaacggacagatcctggtcacatggcaccagctctactcccataaaggggt

SEQ ID NO: 743045 - DNA, 614 bp, Homo sapiens
tatattttaccaaattgccattgtgaaaagctgtactaatttgttcctatgagtaggatttgagaatatgtttcttccagccagttgctgcttagtgtgttatcaatttttgaacttttgccatagtgattaaaaactctgtattttactatctcatttctatgactataaaaaactggaatatttttgttaataattttatttctatatgttactatatagtgaaccatatttgctattatatatacagaaatataaattttgatatatactgcatactgtgttatttatatcttagctttatatataattatawttatatataattaaaaatttttacgttaaatttttacgaagtcaaggtaatctttttctttttttttattttatttatagagatgtggtctcactgtgttgcctaggctagtctcaaactcctggcctcaaactatcatcccaccttagcctcccaaagtgccgggatcacaagtatgagataatctttttctttatactttgtggcctttaaatcggcatcttaatgttatgtaaataataacacttattaacaatattataataatttacatcgtgttttatagtttagcaagtgc

SEQ ID NO: 743046 - DNA, 629 bp, Homo sapiens
taaacatattcaacgtgtgagacaatataaaattcctagaaaccactattttggttcatttggaccaaagtatctcagtaggttggaaagtttagttgtctaattcacaaacttagcacttcatctactcaacagagacttccagaattaatcatctaggaagctggccaggatgcaattggaataacaacaggaaaaccaaaaatgattttctagtttatacactcatrtatacagtgtacatcactactatagaaagaagagtcaaaaattaatatcctctgcaaatggaagagtccacacagaaaccaaatacatttctggaatgccaatgacaattaaagttacattgaatgtaaaggcattaatattctttagccagtgtataccctgctaatgtctggtgacaactctctgatgttctctctcactttttcattaaaaaaaagacaaagttcctgttttacataaattgaagagcctttaaaattactttttctcatcctcctctttcataaatgtttttcaggcatcgacctagtttatatgacaacacatccttttgagaaaatcataaggtatttacttattgggtacctactgtgtgcattattagagcagttatgact

SEQ ID NO: 743047 - DNA, 629 bp, Homo sapiens
taaacatattcaacgtgtgagacaatataaaattcctagaaaccactattttggttcatttggaccaaagtatctcagtaggttggaaagtttagttgtctaattcacaaacttagcacttcatctactcaacagagacttccagaattaatcatctaggaagctggccaggatgcaattggaataacaacaggaaaaccaaaaatgattttctagtttatacactcatatatacagtgtacatcactactatagaaagaagagtcaaaaattaatatcctctgcaaatggaagagtccacacagaaaccaaatacatttctggaatgccaatgacaattaaagttacattgaatgtaaaggcattaatattctttagccagtgtataccctgctaatgtctggtgacaactctctgatgttctstctcactttttcattaaaaaaaagacaaagttcctgttttacataaattgaagagcctttaaaattactttttctcatcctcctctttcataaatgtttttcaggcatcgacctagtttatatgacaacacatccttttgagaaaatcataaggtatttacttattgggtacctactgtgtgcattattagagcagttatgact

SEQ ID NO: 743048 - DNA, 584 bp, Homo sapiens
tctgagtaggaaaatacttggggtgttcaagaaggtgacagaaaatgatcattgctcatgaagctcagtgggtagcaaaacatgaagttggaaaggaaggcagaatttgggttatgtaggttcatgtagtctggtgaggaattttaacttatttacaagagcaattaagccactgaggttttaagtaagatgttattaaattaaaaattaatttaaaaaactgattctcttgtgtctacaacatattggaaaataagtaagaataaaactaggaaaaaacaaatcagatactggcaaagaaatctaggcargaaatgatggtggcttggaaattctgtggtagtagtggagacaagtggacaaatgcagaatattttgggagttaatttaaaaggtctattgatatttggaatatgagtaggcagatgagataagcagaggaattaactagatttttaatttaataattaatgataaaatgggaaagaacagggaaggtagagagatggagaggaaagaatcgagaactccatatttagtcttactgaatttaagatggtttcacctaacatcccagtggagac

SEQ ID NO: 743049 - DNA, 624 bp, Homo sapiens
aaattaatttctatcattgaacccacacagtttgtggtattttgttatggcaaccctcacaaactaatacattcaccatttaacaattctaagatataaatgaataattttgcaaaacaaaaatacatctttatgggatactgttgtaggacacgtaaataagttgttatgcttcccggaaaacctattagtgctatggtgagatatggggaatcataggaagtacaagtcactgcatagttatcatttattgcatagtctgttctgatcatattagtctggattaataagaataaaakttattctggaatcgtatcaaggtcgaccttggttacataaaacacagctgtggaaatattaattatcctataatactggattgtgttataaaatcaagccagtcagaaaatcaagatattggaaacatacttcattcaaatctctgcctctttcttgtaagagagtctagtttttaaagcagtgcttatagaaggcatatttggcaagcaccctgcataatgacaaatatgcttacctcttcaggaggacgtgacagccagcaggggctttggatagcctgcaatttgtgagcaggtaattttttttcacaaaccttataaccca

SEQ ID NO: 743050 - DNA, 662 bp, Homo sapiens
ggactgcagtaaccaaaacagtatggtactggtacaaaaatagaaacatagaccaatggaacataatagagagcccagaaataatgctacgtatctacaaccacctgacctttgacaaaataaataaaaacaagcaatgaggaaaggactcgctattcgataaataatgttgggataactggtcagccatattcagaagactgaaactggacccctttcttacacaatacacaaaaagcaacttaagatggattaaagacttaaatgtaaaacctcaaactataaaaaccctggaagataatctagaaaatattattcaggacataggacctgacaaagatttcatgacaaagaygccaaaaataattgcaacgaaatttgacaaatggaacttaattaaactacagagcttctgcagagcaaaagaaactataaacagagtaaacagacaacctacagaatgggagaaaagtttcacaaactatgcatttgataaaggtctaatatccagaatctataaagaacttaatgtacaagaaaaaggcaaacaataccattaaaaagtgggtaaatgacatgaaaacttttcaaaagaagatatacacatggccaaaaagcatctaaaaaaggcttatctttaatcattagagaaatgaaaatga

SEQ ID NO: 743051 - DNA, 612 bp, Homo sapiens
attcaaatatatattccttgagttgaaaaatcaaatcatttttaaaagtgttagctgatgttaattagatgcacctaatgacatatgtaaacttggcagcatttaattgtttgtaaaattagttatgaaaccactaaattcttctaataatgtaacaaagacattaatatgtatactcactcactttgttatatatgtacaagatatttggaattctaaattaccaaattgtgtttagaaaaacagtcttctgattaaaatggaaagtcatggttcttaaaaatgatgttaacaagatattatgaggttacatcttttttgagcacagtcttctgtaacttgtgaacatggcactgatgcttcctcacagatttgtttcttttgaatttcatgtgattggcaacatcactatgatcaaatggtgggtsgtaaatgtcaaaaaatatttttgcaagttgtgtatttaccttgaaaaacagaaattcactatcttaatttatgattaaaaatgcattttcatttgtatttagttcggtattgctgaaagggttattgcattaaaaaatttttaagtgttatcaaaaagtaaataatagccacttgatttgcacc

SEQ ID NO: 743052 - DNA, 609 bp, Homo sapiens
ataggaaatatttgggacaaatgccaggataacaggcccaaaacaagaattatggtcccttcactttactttactgtggcagtaactgtttgagattacccttcatttttttcagtcttttattcttcagcttgtaacaggcccaactcatctcttttattataaatgtaagcatggggcccaaacctggccaatcacaatcaccagggttggtaatgttattcttgctgggtcaatcagaatcttccatgagactttgtgttacacttactgggaaagactctccagtcccatgcggctgagaggaggggagagacagccrgagagagctaacattatttgaatcctgaatccaatcatgactggccctagtttcagggatgaaaaatgatgtgtcctttcatgttacaactagtttgtatttggtctttttttatttcgaaatgacacctaaatacaaatagagagttgtaattcccccttttgcaagtaaagttactaaaaaaatgggaacaaaaatagactccagcatacatttccttgtaaactgaacttatataaatggaacacttttttctagtttatgtgttttataaaatcaaatgcatc

SEQ ID NO: 743053 - DNA, 618 bp, Homo sapiens
ttcttacagcagctctagagggccctatgtagagtataactttcaacttaattgaaagcaacttgtactggcctagaattattttgctttttaatgtactttggccatctctactctgatttattagtaacatttcaactctcagaaagtgtatgtatcagtcagcatcccagtaagaaacaggcaacactcacagmtgagatgtttgtgaaaatgaaagatctatctgcaagagatatagacaagtttaaggaaaaccacagatgtgttgagacacccaagaagtagcaatagcaatcagctgataccacccccctagcactgatagagaaagaagagaaaatggaatcactaaagtctgggtcataatataaatgctaccaggcagaagccgccccttggcaaggcatagccagaaccacattgaatcagaaatacagttgtaggaaaaaactactctgagctacaggagtctcccgttaggctgatgcccaccagataccacagggaaaggagttccaggtgatgcagatcatacgagcaagccttgctgggcacagagcaagacagagatgggcagagaacagatgtgagggcaaagggaagagaacaggatcc

SEQ ID NO: 743054 - DNA, 524 bp, Homo sapiens
ctgacaaaggtctaatattcagcatctataaggaacttaaaataaatttacaagaaaaaaaaaccccattaaaaagcgggcagaggacatgaacagacacatctcagaagaagacatacatgtggtcaacaagcatatgagaaaaagctcaacatcactgatcattagataaatgcaaatcaaaaccacaatgagatacaattccacacctgtcagaatggctattactaaaatgtcaaaaaataacagatgctggcaaggtygtggagaaaaaggagtgcttatacgctattggtggaagtgtaaattagttcaaccattgtgaatgatagtgaggtgatccttaaagactaaagatcatttgacccagcaatcccattactgggtatatagccaaggaaacataaatcgttcttttataaagacatagacacacgtatgttcattgcagcactattcagaatagcgaagatatggaatcaactgaaatgtccatcaacaacagactggcttaaaaatgtgga

SEQ ID NO: 743055 - DNA, 524 bp, Homo sapiens
ctgacaaaggtctaatattcagcatctataaggaacttaaaataaatttacaagaaaaaaaaaccccattaaaaagcgggcagaggacatgaacagacacatctcagaagaagacatacatgtggtcaacaagcatatgagaaaaagctcaacatcactgatcattagataaatgcaaatcaaaaccacaatgagatacaattccacacctgtcagaatggctattactaaaatgtcaaaaaataacagatgctggcaaggtcgtggagaaaaaggagtgcttatacrctattggtggaagtgtaaattagttcaaccattgtgaatgatagtgaggtgatccttaaagactaaagatcatttgacccagcaatcccattactgggtatatagccaaggaaacataaatcgttcttttataaagacatagacacacgtatgttcattgcagcactattcagaatagcgaagatatggaatcaactgaaatgtccatcaacaacagactggcttaaaaatgtgga

SEQ ID NO: 743056 - DNA, 592 bp, Homo sapiens
attatcaagtaattaataaattattgacttctactattaattgaaaattcacgttttactctatttttattaaaataatcttattatgaattaattataatatttcccttcaaatttcttcttgtagaaatctatttacaaacttctcagtaagttttattgtattaacagtaattgtttctatgtccttttttctggttttggtgctcatcacattttttcaaatctgcatcataaacttcccttcttgagaaatttattttgttggckgttctaattagctagatatatcttcaaattgttttagtgtgaactcttaggaggtataattttcatgtccttgaatgtcagcaaatacctttctcctgcccttgcaactaaatgatggcttctctggggatacagttcttagaccttaatctttttttctttttaaagctgctgatgttgccatattgatttctgacccttagtgatcaggaggaaaaaatctaacaccaacctaattatatcctttgaaggcaacatgtcttttctgctggatatatggggtgtctattttcactaaatttgcttggtactctgtgacctc

SEQ ID NO: 743057 - DNA, 592 bp, Homo sapiens
attatcaagtaattaataaattattgacttctactattaattgaaaattcacgttttactctatttttattaaaataatcttattatgaattaattataatatttcccttcaaatttcttcttgtagaaatctatttacaaacttctcagtaagttttattgtattaacagtaattgtttctatgtccttttttctggttttggtgctcatcacattttttcaaatctgcatcataaacttcccttcttgagaaatttattttgttggcggttctaattagctagatatatcttcaaattgttttagtgtgaactcttaggaggtataattttcatgtccttgaatgtcagcaaatacctttctcctgcccttgcaactaaatgatggcttctctggggatacagttcttagaccttaatctttttttctttttaaagctgctgatgttgccmtattgatttctgacccttagtgatcaggaggaaaaaatctaacaccaacctaattatatcctttgaaggcaacatgtcttttctgctggatatatggggtgtctattttcactaaatttgcttggtactctgtgacctc

SEQ ID NO: 743058 - DNA, 662 bp, Homo sapiens
aaaccctcataaatagtaaactggcattgtactgaatatatttattctttaactcctagtggaatggatggtaattaaactaggtggttgaacaaaacgtaagtcactgggcatccaggacttgcaaactttcttttctaccccagagcaacatctccttcttctgtgctgctactttctcatcactattagtgtacatttttgtgtaagtggataactatcagaatagactctgagcgccttaagggcacaggtgtgtgggtgcttgtgtgtgtgtgtgtgtgtgtgtgtgtgtrtatatatatatatatatatatatatatatttatgtatgtgtgtgtgtattctttgtttaggccattcttcaaactgtttgcagttttgcatttgagaatatatactgttttctatttgtcatttctaaatgtatataggtataagactgaatattttcaggagtggaaaagtatttttagatatatatcacagtatcatgcagtagaatgtagtaatcttcttcagttcacatctattaacttggttgggaattgcggcaaggtgtgggtaagtaccagaaagcagatacaggccttggaaatattgattcccttctaggttttcctttttggacttttacattgttacccatctgcaagacttct

SEQ ID NO: 743059 - DNA, 624 bp, Homo sapiens
ggaactgggtaacaggcaaaggctgcaacaaattggagggctcagaacaagacaggagaaaatgtgggaaagtttggaactctctagagacatgtcaaatggctttagccagaatgctgataatgatatggacaatgaaatccaggctgaggtggtctaagagagagatgaggagcttgttgggaactggagcaaaagtgactcttgttatgtttttgcaaagagattggtggcattttgcccttgctctagagatttgtggaacctkaaacttgagagggatgatttagggtatctggtggaagtaatctctaagcaacaaaacattaaagaagtgacttggaggctgtaaaagcatgcagttttaagagggaaatgtggcataaaagtttggaaaatttgcagcctgaccatgcaatagaaaagaaaatcccattttctgagcagaaattcaagctggttgcagaaatttgcataagtaacaaggagcctaatgttaatcaccaagacaatggagaaaatgtctccagagacctttgcagcagccgcttccatcacagtcccggagatttaggagaggaaaaaatgatttcccaggctggatccaacgtccctatgccgtgt

SEQ ID NO: 743060 - DNA, 569 bp, Homo sapiens
ctggttacctaggctggcactgtttttctaagtccttaaagacaatctatgaagaaaactttggtagaattctttccacatgaatgtcaaaactactctattaatctatggactacatatctatagtattccccctttatccaagactcccccaccctccacagtgaatccttgaaacaatgaatagcacggaaccctatattcactatgattttcctctgcacatgtacctatgataaagtttaatttacaaattaggcacagtaagagattaacaaccataaccaataataaaatagaacaattatgacaatatactgttcataatttcmcagttacatttgttcttactctagatcttagcaacctcagcatactatttttttttcttttcttattaagttgagaatactcacctttcacttaaagtaagcactttacagattctctttggtatatccgaattgccaacatcaccactcttgctctttgaggccattatgaagtgaaataaaggtgacttgaacaccagcactgcataccccaacagttgatctgataacagaagg

SEQ ID NO: 743061 - DNA, 569 bp, Homo sapiens
ctggttacctaggctggcactgtttttctaagtccttaaagacaatctatgaagaaaactttggtagaattctttccacatgaatgtcaaaactactctattaatctatggactacatatctatagtattccccctttatccaagactcccccaccctccacagtgaatccttgaaacaatgaatagcacggaaccctatattcactatgattttcctctgcacatgtacctatgataaagtttaatttacaaattaggcacagtaagagattaacaaccataaccaataataaaatagaacaattatgacaatatactgttcataatttcacagttacatttgttyttactctagatcttagcaacctcagcatactatttttttttcttttcttattaagttgagaatactcacctttcacttaaagtaagcactttacagattctctttggtatatccgaattgccaacatcaccactcttgctctttgaggccattatgaagtgaaataaaggtgacttgaacaccagcactgcataccccaacagttgatctgataacagaagg

SEQ ID NO: 743062 - DNA, 631 bp, Homo sapiens
gaagaggtccgggattgaatcatttcaaacaaaatatcaggttctcttttatgttgcagagtggggctagtaatattgcccaacttcaaaggtgaggagagtctcttcctgaacatgcagaaagagggtcacccaaaatcatttggagtagtgacaatgacattggatttggagtcagaaagaaggcctagattacctcctcaaatgattaccatctctttgaccttctaggggccaatagtctctgagtttcatatttgagcctcagatttgtgtaattgcaataatagtctctatctcatagagctaaggtaatgattagatggaatgttcagtggaaaaaaacgacttctaagcacaaatatggcttcaaacattaagctttgattgctccaaaacttacaawtaattgcttacatcgcattttgcaatggatagaaatggccagggggattatcgcatagggaaataacacaatgctctttcaaagttttctatcaaattaagactcttggaagcaaaatgatcttaggccccgtgactacaccatgtaactaaatttggtctgattttcatcttaccctggcataaaaatgagggaaagcagactcaatcaactcttcagccacct

SEQ ID NO: 743063 - DNA, 617 bp, Homo sapiens
tttttcaaagtagattgttttccatttttttctctctttttttttttttttcctggagacagagtttcactctgtcgcccgggctggagtgcagtggcgtgatctcggctcactgcaacctccgccccgctgggttcgagcaattctcctgcctcagcctcycaagtagctgcggttgcaggcacctgccaccgtatctggctaatttttgtatttttagtagagacagggtttcaccatcttggccaggctcgtcttgaacacctgaccttgtgatccacccgcctcagcctcccaaagtgctggggttacaggcgtgagccaccacgcccggcctgttttctttttatgattgagttaagtgtccttcatatagttgggagacaagacctctctcatatacatataggtgcaatatttttcccagttagtggcttgcttttttattttaacggtgtcattaaaaaaatatccatttacaattcacagtgcaatgagttttgacagacacatacacttgttaaaccaccactacaatatatacaaaatacttccatccctgcctccactcctggctggtcacagacaaccgatgatctgccttctgtcaaaatagg

SEQ ID NO: 743064 - DNA, 617 bp, Homo sapiens
tttttcaaagtagattgttttccatttttttctctctttttttttttttttcctggagacagagtttcactctgtcgcccgggctggagtgcagtggcgtgatctcggctcactgcaacctccgccccgctgggttcgagcaattctcctgcctcagcctctcaagtagctgcggttgcaggcacctgccaccgtatctggctaatttttgtatttttagtagagacagggtttcaccatcttggccaggctcgtcttgaacacctgaccttgtgatccacccgcctcagcctcccaaagtgctggggttacaggcstgagccaccacgcccggcctgttttctttttatgattgagttaagtgtccttcatatagttgggagacaagacctctctcatatacatataggtgcaatatttttcccagttagtggcttgcttttttattttaacggtgtcattaaaaaaatatccatttacaattcacagtgcaatgagttttgacagacacatacacttgttaaaccaccactacaatatatacaaaatacttccatccctgcctccactcctggctggtcacagacaaccgatgatctgccttctgtcaaaatagg

SEQ ID NO: 743065 - DNA, 624 bp, Homo sapiens
ataatgattcattcatggagatccatctatgtggttgcatgttttagtagtatcctaattttattgcaaaatagtagtacattgtgtagatatgctatattgtgtttttccattctcttaatgatgggaatttggattatatctggtttttgcttaytgtgaataaaacctctatggacattcatgtacaatgctttgtgtaggcatctattttcattgctcttgggtaagtatctggtaatgaaatgtctggttcatatggtaggttgtgtttaacttaatcaggaacttcctaatgatttcctcatagttgtatcattttacacccctaccagcaatgtatgagaatttcagttgctttatatctcatcagcatttggcatcgtcagcctttttaattttagtttagtaatgtgtatgcagtgacatcgtattatggttttaatttgctttcccctgatgactaacgctgctaagcagcttttcatatgcttatttgccatccttaaaacttctttggtgatgtgtcaattcaagattttacccatgttatattgggttgtttgcgttctcatttaggatttgtaaaaattttttgttccaattttttttttatcagatttg

SEQ ID NO: 743066 - DNA, 613 bp, Homo sapiens
aatttcagttgctttatatctcatcagcatttggcatcgtcagcctttttaattttagtttagtaatgtgtatgcagtgacatcgtattatggttttaatttgctttcccctgatgactaacgctgctaagcagcttttcatatgcttatttgccatccttaaaacttctttggtgatgtgtcaattcaagattttacccatkttatattgggttgtttgcgttctcatttaggatttgtaaaaattttttgttccaattttttttttatcagatttgtgttgtgtcaatattttcttccactctgtggcttaccttctcattgtcccagtggtggtattcaaaggaaaaatggttttaattttaacgaagtccaacgtatcaacattttcttttatggtttatattgttgctgttgtatctaaactgtatttccatatttatttctaagagttttatagttttagcttttacatttagtcccatgttccatttcgagttcgcttttgtatgcaatgtgaattgtcaaagtttatttttttatatggatagcaatctttttttttttttttttttgagacagagtttccctctttcgcctaggctggagtgaa

SEQ ID NO: 743067 - DNA, 550 bp, Homo sapiens
gtcttgggtgtgtcttaatcagcagcatgaaaagggactaatacactaactaagacaaaaagagagaagacaataattacaaatatcagctgggcacggtggctcacgcctgtaatcccagcactttgggaggctgaggcrggtggatcacgaggtcaggagatggagaccatcctggctaacacggtgaaaccccgtctctactaaaaatacaaaaaaattagccggacgtggtggcagatgcctgtagtcctagctacttgggagactgaggcaggagtatggcatcaacccaggaggtagagcttgcagtgaactgagatcgcgccactgcaccccagcctgggcgacagagcgagactccgtctcaaaaaataataataataattttaaaaaaataataattacaaatatcaggaatgaaataagtaacattgctataaatactacagacattaaatagataataaggaaaaactagctttatatatgcccataaattgacaactgatatgaaatgaaccaattccttcaagtacataaactttct

SEQ ID NO: 743068 - DNA, 550 bp, Homo sapiens
gtcttgggtgtgtcttaatcagcagcatgaaaagggactaatacactaactaagacaaaaagagagaagacaataattacaaatatcagctgggcacggtggctcacgcctgtaatcccagcactttgggaggctgaggcaggtggatcacgaggtcaggagatggagaccatcctggctaacacggtgaaaccccgtctctactaaaaatacaaaaaaattagccggacgtggtggcagatgcctgtagtcctagctacttgggagactgaggcaggagtatggcatcaacccaggaggtagagcttgcagtgaactgagatcgcgccactgcaccccagcctgggygacagagcgagactccgtctcaaaaaataataataataattttaaaaaaataataattacaaatatcaggaatgaaataagtaacattgctataaatactacagacattaaatagataataaggaaaaactagctttatatatgcccataaattgacaactgatatgaaatgaaccaattccttcaagtacataaactttct

SEQ ID NO: 743069 - DNA, 621 bp, Homo sapiens
cttcctcaatacagtttgagaagagagttaggtggggacacagggccaacccatctcactcactgtggctattaggaacttgaatgtctcccagccctgtaagaaatctggaagttgttagcacatagtttcccggcaattgttctttttaggtttcatagaagattactctttccctgtagagagtaatatttagccggagactcaaaagggcccctgcagatttctgtggctctccctgtgagtaatcctttgttctctggtgctcttctttcacctattctagttacccctgactttccaagattttttctctgtcttctcttatcagcaaaaccttcaggctctgattaaatttcttcttcctttgctaatggactctaggcagaaaactgggatagtgrtttagaccagctctttaatttccattttcttagggatcacagtcttatcctacctgttgtccaatgtctgaaaaatatatgtgtgtatatatgtatgtgtatatgtatatgtatgcagtatgccactttaatttttttctcattgccatctgtgtgtatcttaaaagatattttctgagtggttccactcagaaattagtctgaatgatacaaatat

SEQ ID NO: 743070 - DNA, 643 bp, Homo sapiens
tactaacatctaaacttccatgttgagtgtcaatgtgaatctagttaccggtcgatgtatgctgggtaataccataattcataagacatggctgattagctgaatttataagagaaaaaagggttaaactgagatcacagatatgtaaaacaaaagatcacattgaaaaagagatgtaaacagaggtacatgtacagttgaggacattgtaccttgcaaaatcctggttacgmatcttatttcacatagtcttctgtgtgaatagtaagacttgcagctgtgtagggtacagactgagtggctgtggaagatattctcagaaaagttgaccaaaagtgacacaggagttttgaggacgaggaagatcccaaaatttgggttctttaccaattaattaccagattaatacagaaggccaacaacaacaaatgggagttcaagaatgagagatcaacaacaacataaaaatagatggattaaaaaatgctaaagaaatactcctgggaaatatcctaggactgaataacgtgagtcttcatattaaaaggacgttggaactgattaccacccccatcaccaaaaagttgagattatgattgattagggaaatgttcattgaaatatttagaagatgaaacaaggt

SEQ ID NO: 743071 - DNA, 584 bp, Homo sapiens
gaaacagactctgtagcaataaggcacaaattccaacctgattctatagcttcacatgacagatagcagcaggccctgaaagaaattgaagtgttttaccttaaaatatatttctttgacatattttgaaatggccctgcaaagctgtcttatgtgggaaaaaatctgaattccatagagaatctccttcccttaccagktctttttttttgatccaggagagaattaactgagtctggcacttttttaagtcagacaagaaacacttacaatctgttctctctgaaatgggctacctggaggcttcctctgcataataagaaatatagtctccacaccccttatcttagccattcccttcaattgattccagggcttcagataaactatttcaaccaattgcccatcagaaaatctttgaagccacctatgacctgaaagtaccctcatcctcagctttgaattgtcccagtctttccagaccaaatcaatgtacactttacatgtattgattgatgtctgcatcttcctgaaatatatagcatgaagctgtagcctgagaccaccttgggcacacgttctca

SEQ ID NO: 743072 - DNA, 601 bp, Homo sapiens
aaaaaaaaaattatatatatatatatatataaaatataacatttaaaaagaaaaatttaaacaaagtttgcaataatttatcccccatgttttacaggttattatacttttccaaattaaattcaggattcaactgctaatcttggcttgagcaagacaaatctattagcatgccccaggcaggtttatcaaaaacatctttttactattaaagcctcaacctacttcagctacaaatccctgcagacttacttagcataaggcactatcatttctatcttcattacracacagtttaattatctgccttagaaataaggttcttcctcttaatgaaagtggttagtctggtggctccaaagggcacaaggcagtttcaaggcttaattctgattatatatgcaattacaagttagaaaatatgcttgaaagtcaatgaaagttctttcatctatttctccagttagaaaacataaacattggttggaacgaagattttgttgttgatgttttacttgtctagagcattgcttttcaaatttgaagatggcgcttccaggtgtcacttagtgtcatctgatgtcagttccatcgttactgg

SEQ ID NO: 743073 - DNA, 632 bp, Homo sapiens
attgagtgctgtgtcactgtgttagacatgatgtttagtactttatagactttttgtcttctcccatttattcctcacagcacatttatgagacaggcactgtattgtgccccagaggaaggcagtctcctgtatgcaagtctttagacctcttgcttatctgtaaaagtaggccttgggtctggaacacttccttaccaagagatagagtcctcatgacctgcgctggacttaccaccttgtgtggaataactttccctgttttgttctgctggagcctgtgcatcatgtggcacctggtcaaccccactgttatatctatcctcttccaggaggggatgaggtgcttctkctgcagcacagaaagggcacctataggccaattgttctgcatcagcctccagggagggaccttctggctttgggggactgacatgcagtactgacactgacctggcgctgtcctttctctatctgaggagtaaagtactgacactgatctggcgctgtcctttctctgtgtgaggagtaaagtactgacactgatctggcgctgtcctttctctatgtgaggagtaaagtactgacactgatctggtgctgtcctttctctttgtgaggagtaaaaaaca

SEQ ID NO: 743074 - DNA, 579 bp, Homo sapiens
atgcagtcttatctccattttatagttgaagaaattaaggaacagagactcagcaacttgcctgaggtcacacggttaataagtggtacacagctggtgtttgaagccaggcggtctgtctcccagtccatgctcctaaccactctgagggcagcttctcaaatcccgctagattgggcttcaaagccctatggttaatcactgtacaaatggcctctttgtgytatcacctgaacagaaacaaatataacatccgtgacatcgagagagctgctaatccaaccatctgcattcaggttctgcctctgtgctcagccagcctgcctctgtaaggcactaacacacattctttctaccactgacctgcactttggcattctcatcctgtggctttaattaaatgttaacattcatttgcccttttccattgtgttaaagataacctttgcttcctgtcgcgtctagataagcttcactccatgacaggtaccaaataggttcatcttgatataaagtaaagaatggagactctttgatcctctctgctgacatattttaaaatgccagtatgaatatttg

SEQ ID NO: 743075 - DNA, 563 bp, Homo sapiens
tatagcacttggtcactgctccctaagaagaagctctttctttctttctttctttttttttttttgtgtctcactctgtcacccagctggagtacagtggcgtgatctcggctcactgcaacctccgcctcctgggttcaagcgattctcctgcctcagcctcctgagtagctgggattacagggatgtgccaccatgcccggctatttttttttttttttttgtatttttagtagagacagggtttcaccatgttggtcaggctggtctcgaactcctgacctttgatctgcccacctcggcctcccaaagtgctgggattacaggtgtgagccaccacacccagccagaaraaactctttctaaagtaaatgttcttaaaacatacaggccttagagagagtagaccagtaaccagaaaataccacagaacctggcattttggtttattgtcatataaattatttaagttattcccaggggagtaaggtatgactttatttagtgatttatgggttgaatggtgtgaaagaaactatcctagccaggttgtaatatcaaat

SEQ ID NO: 743076 - DNA, 620 bp, Homo sapiens
tcacaccaattagaatgattattactaaaaagtcaaaaaagtaaccgattctgatgaggttgcagagaaaagggaacatttatacactcctggtgagaatgtaaattagttcaaccattgtggaaaccagtgtggcgattcctcacagaactagaaagagaactaccatttgacccattactggctgtatacccaaaggaatataaatcattctaccatgaggatacctacacwtgtatgttcattgcagcactattcacaatagcaaggacatgaaaccaacctaaatgcccatcaagggcaaactggacaaagaaaatatggtacatatacaccatggaatactatgcagccataaaaagaacaaggtcatgtcctttggagggacatggatggagctggaggccattatcgtcagcaaatgaacacaggaacagaaaatgaaatactgcaaattctcacatataagttggagctaaataatgagaacacatggctacaaagaggggaacaaagcacactggggcctatttgagggtggaggttggaaggagggagagaatcagaaaaaataactattggatactaggcttaatacctgggtgatgaaataatctgta

SEQ ID NO: 743077 - DNA, 608 bp, Homo sapiens
agtttcattcttcaacatgtgggttgccaattatcccaacatcatttgttgaatagggtgtcctttccccactttatgtttttgtttgctttgttgaagatcagttggctgtaaatatttggttttatttctgggttctttattctgttcgattggtctatgtgcctatttttataccagtaccatgctattttggtgactatgtccttatagtatagtttgaagtcggataatgtgatgcctccagatttgttctttttgcttagtcttgctttgactgtgtgggttattttttggttccatatgaattttaggattttttttttagttctgtgaagagtaatggtggtgttttgatgggaattgcattgaattgcagattgcttttggcagtatggtcattttcacaatattgattctacccatccgtgagcatggcatgtgtttcctttrtttgcgtcatctgtgatttcttttaacagtgttttgtagttttccttgtagaggtggttcacctccttgtttaggtatattcctaagtattttattttattttttgtagctattgtgaaaggggttgtgttcttgatttgactctcagcttggtc

SEQ ID NO: 743078 - DNA, 620 bp, Homo sapiens
caattatctcataccaatgcaggctaaaatgattttctaaaaatctattggcagcattttttgcttatattgagaatttgacaactaaaattctaaaccagaacagacatatatttcatagatatttgtatggttttttttgggggggggtgtttttgtaaacagaggtaaaaccatgctataagtaaaatttgactctagctattgttgtattagccagttaatttgtactggtctttgagttcttagagtttttcaataagatgtattaaaatgttcttttacagatgagtaatmttgaatgatttcttctaactgatctttagaataaattgaatcaaaatgatagaaacaaaaaatggaaactgttagaccatttgaatattttggtctaaattccaagtacacaatgattaaaatgtatattttattgaactgtagcctggtaccatagggaaatttagaaaggggaatatttttcttaagttgtatgttaatccagaaataaatcacaaacctattgtaaaaaaataataataatttcccaccctagttcttatatatcctattatatattttccaagagcacagagagttacacagtttagaatttgggttct

SEQ ID NO: 743079 - DNA, 620 bp, Homo sapiens
caattatctcataccaatgcaggctaaaatgattttctaaaaatctattggcagcattttttgcttatattgagaatttgacaactaaaattctaaaccagaacagacatatatttcatagatatttgtatggttttttttgggggggggtgtttttgtaaacagaggtaaaaccatgctataagtaaaatttgactctagctattgttgtattagccagttaatttgtactggtctttgagttcttagagtttttcaataagatgtattaaaatgttcttttacagatgagtaatcttgaatgatttcttctaactgatctttagaataaattgaatcaaaatgatagaaacaaaaaayggaaactgttagaccatttgaatattttggtctaaattccaagtacacaatgattaaaatgtatattttattgaactgtagcctggtaccatagggaaatttagaaaggggaatatttttcttaagttgtatgttaatccagaaataaatcacaaacctattgtaaaaaaataataataatttcccaccctagttcttatatatcctattatatattttccaagagcacagagagttacacagtttagaatttgggttct

SEQ ID NO: 743080 - DNA, 567 bp, Homo sapiens
atccagccttcccaaatccttacactcatgtcttggcctgagatcggcaaattactggaacataataacagcagttacaacataatgaataacagtcttttctttgagaaactgtgcaatgtaggttgaggggatgaagggcagaaggagcccgacacttcttgatgttgtttggcagcttacrtgttctcatccatctgaagttggcagatggaaactaatctttccttaccagggaagaagttgaggccaggacatgtcaactgatttttctacagacctcaggatgatggagatgcatcttcatgtagtttcttattcagggctggcccccctttacagagccccaacacccctttcaaacatgggctgggtgccaagcaagcaaaacccagacttaatccagaaaccttggaagccaggaggatctgggagcagggaaaccagtagaggagggaagcaagcatgagaggcagaggcagctgtcagtgggtactgatgctgccatgtccggggacaaatgcccacaggatggcaggtaggctccaagcttcgatggagggtgga

SEQ ID NO: 743081 - DNA, 604 bp, Homo sapiens
gcctcagcctcccgagtagctgggattacaggcacccgccaccacacccggctcactttgtacttttagtagaggcgggatttctccatgttggtcaggctggtctcgaactcccaacctcaggtgatctgcccgcctcggcctcccaaagtgctgggattacaggcgtgagccaccacgcccagccgtgactgattcctttcactcagcatcatgtcttcaggttcatccaggctgctgcatgtatcagtactttcttctttttaattgcataataatattccattatttagatacgtcaccttttatttatctgttcatcatctgatgaccatttaggttgtttccacgttctaggctattataaataaygctgttatgaacatttatgtacaagtttgtgaggtgtatattttcattcctcttgagtagatatttaagattggaattgttgggtggtatggtaattctaagtttaacattttaaagaattcaaacttctaaagtgattgcatcattgtacatttccaccagcaatatacaaaagggcattttgattttctcaacttctctacatcctcactaatatttgagattgtctttt

SEQ ID NO: 743082 - DNA, 604 bp, Homo sapiens
gcctcagcctcccgagtagctgggattacaggcacccgccaccacacccggctcactttgtacttttagtagaggcgggatttctccatgttggtcaggctggtctcgaactcccaacctcaggtgatctgcccgcctcggcctcccaaagtgctgggattacaggcgtgagccaccacgcccagccgtgactgattcctttcactcagcatcatgtcttcaggttcatccaggctgctgcatgtatcagtactttcttctttttaattgcataataatattccattatttagatacgtcaccttttatttatctgttcatcatctgatgaccatttaggttgtttccacgttctaggctattataaataatrctgttatgaacatttatgtacaagtttgtgaggtgtatattttcattcctcttgagtagatatttaagattggaattgttgggtggtatggtaattctaagtttaacattttaaagaattcaaacttctaaagtgattgcatcattgtacatttccaccagcaatatacaaaagggcattttgattttctcaacttctctacatcctcactaatatttgagattgtctttt

SEQ ID NO: 743083 - DNA, 516 bp, Homo sapiens
ctttgaagaggcaaagcaccatatagggtctaagtattattactttttttttcctctgggaaggaaacttttaatatgcttctttggagttcagaagccaggaaaggcccccagtgggtgagggtccctcattggcatcagacaccccatttaacacgaaagtggaggaggcagcagcggatggacttgggcagtctggatgcatctcagcctcctggaagagtcctccagaccccatccctgtrcccagatcctgctccatgctgccactccacctgccagcccttgctctcaatctggggtccagatgtctcctgtgctcgcatctcgtccttgaccctctggctcttctgacactctcacttccagacttagccgaccctccgctgctgtcaacactcttgttctagaacacacaggacgctaaatgtgaagcaattggcagggtgcttctcctgggcttggaaacccgggaaggaaacatctaccttcagatcacaagagatgtcagctctg

SEQ ID NO: 743084 - DNA, 669 bp, Homo sapiens
gactggactaataggatagatgcatgcatgaaaggaagtttattaaggagtactgactcacacgatcacaaggtgaagtcccacaataagctgtctgcaagctggggagccaggaagccagtctgagtcccaacacctcaaaagcagggaagccgacagtgcagccttcagtctgtggccaaaggcccgagagcccctggcaaaccactggtgtaggtccaagagtccaaaagctaaagaacttaaagtccgatratcaagggcaggaagcatccagcacatgagaaagatggaggccagaagactcagccagtctagtccttccacgttcctctgcctgcttttatcctagctgcagaggcagctgattagatggtgcccacccagattgagggtatgtctgcctctcccagtccacagactcaaatgttaatctcctctggcaacatcctcacagacacacccaagaacaatattttgcatccttcaagccaatcaagttgacacttaatattcaccattgcattggtgcatggaattccaccaaatcacaagtatggaataaacacccaagtccttcagagtcaccccagacccactcgaaagcaggctgatggcacaagtgtgaggagaggggagcagaggcctgcggttgtgaaaagcagataa

SEQ ID NO: 743085 - DNA, 669 bp, Homo sapiens
gactggactaataggatagatgcatgcatgaaaggaagtttattaaggagtactgactcacacgatcacaaggtgaagtcccacaataagctgtctgcaagctggggagccaggaagccagtctgagtcccaacacctcaaaagcagggaagccgacagtgcagccttcagtctgtggccaaaggcccgagagcccctggcaaaccactggtgtaggtccaagagtccaaaagctaaagaacttaaagtccgatgatcaagggcaggaagcatccagcacatgagaaagatggaggccagaagactcagccagtctagtccttccacgttcctctgcctgcttttatcctagctgcagaggcagctgattagatggtgcccacccagattgagggtatgtctgcctctcccagtccacagactcaaatgttaatctcctctggcaacatcctcacagacacacccaagaacaatattttgcatccttcaagccaatcaagttgacacttaatattcaccattgcattggtgcrtggaattccaccaaatcacaagtatggaataaacacccaagtccttcagagtcaccccagacccactcgaaagcaggctgatggcacaagtgtgaggagaggggagcagaggcctgcggttgtgaaaagcagataa

SEQ ID NO: 743086 - DNA, 607 bp, Homo sapiens
ttccaccaaggggcaaggcagccgcgggctcaaccccactcctacctggcctgtgcctgcgcctctccgtcagctcctgcatgcccctgcccagccacagttctcctatgcatgggcccatttaacgcaggtcgtctcacaccaatgcctactcagggactcagggacttgtgaggcagataggatgtgggatgaacaagtgaaaatctacttaacaaaggagcaaagaaggtggtctcactgtgtcacttctctaaaacagctgcagaagctgaccctaagaaagtccagtggcratgaactcagccaagagcagtgtggcctggagatggggtctgggcacagggaaggggaagcccctagcagacaggggaccagcctcacttggagaagcagcttgcctgctgggctctgtcccaagcacatctatggatgtggccatggagcttctgtttctccctccaaggagcctggggaaggtcccggtttgagggatcgatgctgttcttttgagcaggagctgcccccaggagtgcaggggccacaggccttgcatgtgagatgatggtcgatcacacctcgcgagccgaataaaagacagaaaatt

SEQ ID NO: 743087 - DNA, 617 bp, Homo sapiens
tctcaatttatcctcaacaaaaatgtttagtttcacaatttttcaagacaacttagtgtcacgttgctccagtagacttagtgccttcctgcttgtcttcaccctttgttctgtcttcttggggtacgggtgagcagactctccagtgtgacacagaacctcagctctcagattgagtaaagttatgcagacactgtcacagcacagaagtctcctggctctgcattgcaccaacgtctacctttgcttttggcctgaactttcagtcaaacaattctaccyacatcaaaattccataaagaacctgcttttgacgatcagtggcatgaggaattctgaaatgggcatccctacgcctcctgtgaccatgctctctcataaacaatcccaaccataaccactgagcagtgcacttgctcttggctaccgtgctagtcctgtatccctagaacatcccaaaagccatcagaatgtcacgcatgataaactgctctgcaatatccacagctactggacgtacagtgtcctggctgtgtgcatagtcatgttgccctggttccacagtgagaaccctcacgtcctgcccagggatcctttggccgtccacatggagaaac

SEQ ID NO: 743088 - DNA, 613 bp, Homo sapiens
aagacaaggggtctgtggactccccaagcccactagactggctgcctctgcagggaagcagcgggccctgctggggctcctgccttgcgcaggtatgctaggtgcccccacgcctccctcccttaattctcaccatcaccccagaggcagctttagggggggctcgcccagtgtgctgaagatggtccctgggggagtggaacctcacagtcctttcctctgacccgggccttgtgaacccttccccattcaattccgagaatcaggacgcactgcgctcctttgacaaccctgggggmatctgtaccaagtgacacaactagctcaggaatcccaggctggagaaggaggtttgatcccagtgctggctccaagaccagggacacctgccaccagggcctcgcggggctgtagagaggctgctcagcaggatgcctgctcactctgttcttctgattattgtaaaaccacctttaaaaccatgattcccaatgggttggacgcattagcaagtctggattcatttttggacaaggaaacaattccactatttcctgtaacacaaactaacgtattctatgacattccttagatcggacgtctaaattggaaa

SEQ ID NO: 743089 - DNA, 613 bp, Homo sapiens
aagacaaggggtctgtggactccccaagcccactagactggctgcctctgcagggaagcagcgggccctgctggggctcctgccttgcgcaggtatgctaggtgcccccacgcctccctcccttaattctcaccatcaccccagaggcagctttagggggggctcgcccagtgtgctgaagatggtccctgggggagtggaacctcacagtcctttcctctgacccgggccttgtgaacccttccccattcaattccgagaatcaggacgcactgcgctcctttgacaaccctgggggcatctgtaccaagtgacacaactagctcaggaatcccaggctggagaaggagktttgatcccagtgctggctccaagaccagggacacctgccaccagggcctcgcggggctgtagagaggctgctcagcaggatgcctgctcactctgttcttctgattattgtaaaaccacctttaaaaccatgattcccaatgggttggacgcattagcaagtctggattcatttttggacaaggaaacaattccactatttcctgtaacacaaactaacgtattctatgacattccttagatcggacgtctaaattggaaa

SEQ ID NO: 743090 - DNA, 557 bp, Homo sapiens
cgggtactcctctgagacaaaacttccagagaattcgtggttcacgaaaaaccgctgttctgcagacactgctgctgatacccaggcaaacagggtgtagagtggacctctagcaaactccaacagacctgcagctgagggtcttgtctgttagaaggaaaactaacaaacagaaaggacatccacaccaaaaacccatctgtacatcaccatcatcaaagamgaaaagtagagaaaaccacaaagatggggaaaaaacagaacagaaaaactggaaactctaaaaagcagagcacctctcctcctccaaaggaacgcagttcctcaccagcaacagaacaaagctggatggagaatgactttgatgagttgagagaagaagacttcaaatgatcaaacaactccgagctacaggaggaaattcaaaccaaaggcaaagaagttgaaaactttgaaaaaaatttagaagaatgtataactagaataaccaatacagagaagtgcttaaaggagctgatggagtttaagccaatgctcgagaactatgtgaagaatgc

SEQ ID NO: 743091 - DNA, 557 bp, Homo sapiens
cgggtactcctctgagacaaaacttccagagaattcgtggttcacgaaaaaccgctgttctgcagacactgctgctgatacccaggcaaacagggtgtagagtggacctctagcaaactccaacagacctgcagctgagggtcttgtctgttagaaggaaaactaacaaacagaaaggacatccacaccaaaaacccatctgtacatcaccatcatcaaagaasaaaagtagagaaaaccacaaagatggggaaaaaacagaacagaaaaactggaaactctaaaaagcagagcacctctcctcctccaaaggaacgcagttcctcaccagcaacagaacaaagctggatggagaatgactttgatgagttgagagaagaagacttcaaatgatcaaacaactccgagctacaggaggaaattcaaaccaaaggcaaagaagttgaaaactttgaaaaaaatttagaagaatgtataactagaataaccaatacagagaagtgcttaaaggagctgatggagtttaagccaatgctcgagaactatgtgaagaatgc

SEQ ID NO: 743092 - DNA, 557 bp, Homo sapiens
cgggtactcctctgagacaaaacttccagagaattcgtggttcacgaaaaaccgctgttctgcagacactgctgctgatacccaggcaaacagggtgtagagtggacctctagcaaactccaacagacctgcagctgagggtcttgtctgttagaaggaaaactaacaaacagaaaggacatccacaccaaaaacccatctgtacatcaccatcatcaaagaagaaaagtagagaaaaccacaaagatggggaaaaaacaraacagaaaaactggaaactctaaaaagcagagcacctctcctcctccaaaggaacgcagttcctcaccagcaacagaacaaagctggatggagaatgactttgatgagttgagagaagaagacttcaaatgatcaaacaactccgagctacaggaggaaattcaaaccaaaggcaaagaagttgaaaactttgaaaaaaatttagaagaatgtataactagaataaccaatacagagaagtgcttaaaggagctgatggagtttaagccaatgctcgagaactatgtgaagaatgc

SEQ ID NO: 743093 - DNA, 557 bp, Homo sapiens
cgggtactcctctgagacaaaacttccagagaattcgtggttcacgaaaaaccgctgttctgcagacactgctgctgatacccaggcaaacagggtgtagagtggacctctagcaaactccaacagacctgcagctgagggtcttgtctgttagaaggaaaactaacaaacagaaaggacatccacaccaaaaacccatctgtacatcaccatcatcaaagaagaaaagtagagaaaaccacaaagatggggaaaaaacagaacagaaaaactggaaactctaaaaagcagagcacctctcctcctycaaaggaacgcagttcctcaccagcaacagaacaaagctggatggagaatgactttgatgagttgagagaagaagacttcaaatgatcaaacaactccgagctacaggaggaaattcaaaccaaaggcaaagaagttgaaaactttgaaaaaaatttagaagaatgtataactagaataaccaatacagagaagtgcttaaaggagctgatggagtttaagccaatgctcgagaactatgtgaagaatgc

SEQ ID NO: 743094 - DNA, 492 bp, Homo sapiens
gcgttgagacctgctggtgactggcttggtaattcaggaatgaattggaaagagttcgagtgcttgtttcatgcccctgtatgacctccatttcttggcaatcctcctttgtcttttctgcttccacttagttttacccacctgtcaccttccagactcagcttcaatgcagcctcccctggaaagctcccataactcttatgccctcctgatggctgccaatgtgttgtatatggtttctatggatgcccttttcacactggatggtaatgtactctcttgagtatctttcttttctagtacacwgagttccttaagggtagagataactacctgtgggttccagaactgggttgagcatatagtagacattcagtaaattgattctgatttatgttgaataaattaatgacggaagaatggaaagaaaagtgaattaaggatacatttggaggacataactgataatatttactggataatttaaggaaa

SEQ ID NO: 743095 - DNA, 522 bp, Homo sapiens
ctcaacaatctctttcaggaaatagaaacagaagggaatattttctaacacattctatgaggcagcattatcctaatacccaaatcagacaaagacaagaaaactacagatcaatatctcatgaacatggatacaaaaattctcaacaaatattagcaaattaatctaacaatgtacaaaaaaaaagaattatacaccacaatcaagtggaatttatcccaggtatgcaattcttgttcaacattcaaaaatcaattaatataatctaacacatcaataggctaaaaaagaaraaatatataataataatagatacaaaaacagcatttttacaaaatccaacacctactcatgattttttaaaagaaactcttaagtaggaatagagggagggggacttcatcgacttggtacagaatatctaccaaaaaacctacagctgccatcacacttaatgagcttctcactgaggtcaggaacaaggcagggatattcctcctcaccgctgcttttcaagatcat

SEQ ID NO: 743096 - DNA, 536 bp, Homo sapiens
atattagcaaattaatctaacaatgtacaaaaaaaaagaattatacaccacaatcaagtggaatttatcccaggtatgcaattcttgttcaacattcaaaaatcaattaatataatctaacacatcaataggctaaaaaagaaaaaatatataataataatagatacaaaaacagcatttttacaaaatccaacacctactcatgattttttaaaagaaactcttaagtaggaatagagggagggggacttcatcgacttggtacagaatatctaccaaaaaacctacagctgccatcacacttaatgagcttctcactgaggtcaggaacaaggcagggatattcctcctcaccrctgcttttcaagatcatattcaaaagtcctaactaatgcaataagacaagaaaaggaaataaaaattgtacagattgggaaggaagaaacaaaactgcatttttctcacgcgtcacatgattatctatgtggaaaatctgaaagaatcaaccaaaaaaaaaaaaaaaccctttgaactat

SEQ ID NO: 743097 - DNA, 547 bp, Homo sapiens
aacagtatccccctcatctgggatggcaaacacgtactctctgaagaggcagctgagaactggcctgccagccagagcccctctttaatgagccattccaaggtttcccagtccccaggcagtgggagctgcacatcactttttccatttacaagagataatactgacccgtccacatctttgtagactctcatcaagtcaccagagaaagtctgaatgacaaaacgtggcatcctgaaatcaccccgtgaatacttagcaatccctttytgggagagaaaaaacatcatcagagcatgaaaggaagtggaaagtgattttgttatttttctcccactaagctcagtaataggcacttttccagccatttctctgctgacctaaatgaccttccaagcacttgagttcctccactgtgtaatgaaattccaaatcctcgttaagctattgaagtaagcaaattgaaggggtaagttcagttaaaagagatcctggaggaagagaaacagaaaaggcaagtctgattaaatcggttcatttgaaacac

SEQ ID NO: 743098 - DNA, 585 bp, Homo sapiens
tgagagctgttatctaactgcagtttaataaatttcaacctgtaatcccagcactttaggaggctaaggtgggtggatcacccgaggtcaggagttcaagaccagcctggtcaacatggcgaaatcctgtctctagtaaaaatacaaaaattagctgggcgtggtggtgcacacctgtagtcccagtgactagggaggctgaggcaggagaatcgcttgaacctggggggtggaggtscagtgagccgaggctatgccactggattccagcctgtgggacagagtgagaccctgtctcaaaaaaaaaaaaaaaaattcaaccagatttatctaatttctgttggccaaactccatgcaatatttttttctctagtttatttttcttgtttagatacagacttgctctattattatagttttcattctaaaaattagcttagcaaaacctgctgattaatgagggcattgtgtgcactgagaatgctgtgtcatgcagaaacatctcacttttcctattttttccatatacagatgttcatcttaggtataatcacatttatagtgttttggaatcactaatgtgt

SEQ ID NO: 743099 - DNA, 641 bp, Homo sapiens
cactggcctatttagccatatgtttttctaccagttaatctataaacataacttcctagaagcatgaagcagggtgtacttttttaggtaatatgtagcaagggttttttttatagtgaggttatcaatacacattttaaaataatacttataaattaagaatgataagtttaatactgttatgtatattcagttactgatttaagaaaggactgcttatgtttattttaatcygacttttactatttaacagactcgacctgaatttgatttatatgtaccaaaaaaaaaatattttaggaaaatattaatttcaattttgaattttatcattcaaaatctgttttctctcagttacacttgtattatatcgaggataccaaaatagatactaacttcctttccaccaaattattcactgtcttttcatgttattaggtatcatctgttgaagggcccccatcttctcatgcttggggtgcagtctccttgtgtttggttttgacctcaccgtagttgcttctgtgctctgcagccagcatgatctttaagaaactcaaatctgatcacgtcattccttgctttcaaatatttcagtggctccctgtttctgtctgtaaaaagcatgaaatattccttac

SEQ ID NO: 743100 - DNA, 641 bp, Homo sapiens
cactggcctatttagccatatgtttttctaccagttaatctataaacataacttcctagaagcatgaagcagggtgtacttttttaggtaatatgtagcaagggttttttttatagtgaggttatcaatacacattttaaaataatacttataaattaagaatgataagtttaatactgttatgtatattcagttactgatttaagaaaggactgcttatgtttattttaatctgacttttactatttaacagactcgacctgaatttgatttatatgtaccaaaaaaaaaatattttaggaaaatattaatttcaattttgaattttatcattcaaaatctgttttctctcagttacacttgtattatatcgaggataccaaaatagatactaacttcctttccaccaaattattcactgtcttttcatgttattaggtatcatctgttgaarggcccccatcttctcatgcttggggtgcagtctccttgtgtttggttttgacctcaccgtagttgcttctgtgctctgcagccagcatgatctttaagaaactcaaatctgatcacgtcattccttgctttcaaatatttcagtggctccctgtttctgtctgtaaaaagcatgaaatattccttac

SEQ ID NO: 743101 - DNA, 585 bp, Homo sapiens
gcttatttttactctgttttattaggagtacctggaagccaatgtccatgtcttattcccagtgacatctccagctcctactacatggcctggctcggtgcaatagtaatattgggatgttatcgttgagtattctgtaaacaaattagtgtgcccagaaaactcagaggtgaattagttcatggcccaaatcttacaacccatctgtttaggttctacagtttacgatgatattgtctattgctcctctgtaattaattttaattttatattattttgagtgaagtttcatttacccagttccttaccaaaccaggacaaagccaaatctcagtagagtgtgtgtatctactcatatgccactagacaagacaaatctgcctttacatctggctgcggtagcaattcccagatgcacttaattctgacacatggccattmttgaaccaaaagcaattgcctggcatgattatagttcttatttgttttcgttttaaggggcctcatccaggctgccaaatgtacaacaggtgccttagttttatacttgccaatctgttgttattcaaatgaccgccctaacag

SEQ ID NO: 743102 - DNA, 585 bp, Homo sapiens
ctactgtgttacagacgtggatccaggcactgaggatgcagcaggccatccaaatataaagttacttccttaggaagcttccattctaatgggagagtgttgttaaagagatatataataatatgtaaaatgaatccataatggtgagtattatgaagaataaaattgccaggtgaagtggctcatgcctatggtcccagcactttgggagtctgaggagggaggatcacttgagcccaggagttcaagaccagcctgggcagcatagagagaccctcgtctctacaaaaaataaaagtaaaaataaattagctggatktgtgacacacacctgtggttccagctactcaggaggctgaggtgggaggatcacttgagcctgggaggttgaggctgcagtgaaccatgattgtgccactgcactccagcttgagtgacagagtgagacctgtctcaacagcaacaacaacaaaacaaaagtaaaacttgtcagggcaaagggctgtaaggaaatcagtctatcagtgtatgcggtgaggttgaatcactgttgctttaattaatgtggtcaagggagactctaag

SEQ ID NO: 743103 - DNA, 624 bp, Homo sapiens
ttttctgcctcactgatctgtcagtgaagtgttgaagtcccccacttttattgtgtggctaagtctttttgtacttctagaaatacttattttatgaatctgggagctccaatgttatttgtgtatatatttaggatagttaagtcttcttgttgatatgaatcctttaccattatgtaatgcccttctttgtcctttttgctgttgttggtttaaagtaaggaagattccttaaaatcrtaagtgtcatctatgacaaacccacagttaacattataccaaatgggcaaaaactggaagcattccccttgagaactggaagaaaacaaggatgcccattctcatcatctctatctaacatagcatcagaagttctagccagagcaattaggcaagataaagaaataaaaggcgtccaaataggaaaagaataagtcaaattatttctcttcactgacaatatgatcctatagttagaaaaccctaaggactctgacaaaagactatgagaactgataaacaattttagcaaggtttcagaatacaaaatcaatgtgcaaaaacaagcaacatttctatacaccaataatgatgaagctaagagaaatcaagaatacaatccca

SEQ ID NO: 743104 - DNA, 624 bp, Homo sapiens
ttttctgcctcactgatctgtcagtgaagtgttgaagtcccccacttttattgtgtggctaagtctttttgtacttctagaaatacttattttatgaatctgggagctccaatgttatttgtgtatatatttaggatagttaagtcttcttgttgatatgaatcctttaccattatgtaatgcccttctttgtcctttttgctgttgttggtttaaagtaaggaagattccttaaaatcgtaagtgtcatctatgacaarcccacagttaacattataccaaatgggcaaaaactggaagcattccccttgagaactggaagaaaacaaggatgcccattctcatcatctctatctaacatagcatcagaagttctagccagagcaattaggcaagataaagaaataaaaggcgtccaaataggaaaagaataagtcaaattatttctcttcactgacaatatgatcctatagttagaaaaccctaaggactctgacaaaagactatgagaactgataaacaattttagcaaggtttcagaatacaaaatcaatgtgcaaaaacaagcaacatttctatacaccaataatgatgaagctaagagaaatcaagaatacaatccca

SEQ ID NO: 743105 - DNA, 624 bp, Homo sapiens
ttttctgcctcactgatctgtcagtgaagtgttgaagtcccccacttttattgtgtggctaagtctttttgtacttctagaaatacttattttatgaatctgggagctccaatgttatttgtgtatatatttaggatagttaagtcttcttgttgatatgaatcctttaccattatgtaatgcccttctttgtcctttttgctgttgttggtttaaagtaaggaagattccttaaaatcgtaagtgtcatctatgacaaacccacagttaacattataccaaatgggcaaaaactggaagcattccccttgagaactggaagaaaacaaggatgcccattctcatcatctctatctaacatagcatcagaagttstagccagagcaattaggcaagataaagaaataaaaggcgtccaaataggaaaagaataagtcaaattatttctcttcactgacaatatgatcctatagttagaaaaccctaaggactctgacaaaagactatgagaactgataaacaattttagcaaggtttcagaatacaaaatcaatgtgcaaaaacaagcaacatttctatacaccaataatgatgaagctaagagaaatcaagaatacaatccca

SEQ ID NO: 743106 - DNA, 592 bp, Homo sapiens
tatctggattgtgtattccagacataaacaaatatctggactgtgtagtccttcagatcccgcgcaactgttagtgctgttcaccagatgatcctggttttctgcttcctggggatctgttaggattgcactctctcaaagtcttcttttgatccatgaaatgtgagtggaagtgacacatgccacttccaggtagatgccttaggagctaatatgttatttgctatgtgtcatgccctctgctgtggtgaccatggaacaccttttaaaatggataatctgggccggtcatggcggctcacacctgtaatcccagcactttgggaggccgaggcgggtggatcacctgaggtcaggagttcgagaccagcctgaccatagtgaaaccccgtctctactagaaatacaaaaaaattagccaggcgtggtggcacatgaatgtaatcccagctacctrggaggctgagacaggagaatcacttaaactcggaaggcagaggttgcggtgagccaaaattacaccactgcactccagcctgggcaacaagagcgaaaatccatctaaataaataaataaataaataaataaaat

SEQ ID NO: 743107 - DNA, 638 bp, Homo sapiens
ctccagtgatctttccacctcagcctcctgagtaactggaactacaggcacacatgctggctgattgttatatttttggtagagaccatgtttcgccatgttgcccacgcccgtctcgcactcctgggctcatgtgatcctcccacctcgacctctcaaagtgctggaactacaggtgtgagccaccatgcccaggcctctagctgagggaraaaatgtactcatctgctgatgagagcattctagtctgctagacatttgcatttcttgttataaacaaaaaaatcaacccaaaagtaaagaaatggaaacaacactaacctgtgggcctacatatattttttgttttgttttgtttagagacatggtcttcctctgttgttcagaggtgtgcagtggtgtgatcatagctcactgtatgtaacttctaacttctgggctcaagcgatcctcctgcttcagcctcccaaagtgctgggactacaggcgtgagtcactacacccagtccacatgtgtatgtttatgtttctgcaagcttggttagaataagttggtcctgtgagaaagatatgcttatagtctgtttcatctgatgaagtttctttgtggctactcccctagtgtggtggtattttgc

SEQ ID NO: 743108 - DNA, 480 bp, Homo sapiens
tttacttgaccatatattgagaaacttgcttcagaatctgattccaggtcaggggctatagcttgttcataccactctgtgagaggactgcttcactctcaccaccaggctgactagtgctctgtggtcttgatcaattgtcccagcagagttggtgcatgggaaagcctttcttggccttatcagcagctcagcctgggaggttggcccgggggctgaccaagcacaaaatagaaaagccactaataagatccagctggaacaaatagcctctatttattttaggaaactaatgatatgtcatcatgacacatatctaaccttagtatttctgattggacargccagttatgtgggctatgattcaagccatggttacagctctgctgctggaagaaggattcacctggttttgtggtctcgctcttcaagtattccttgcattaagtaatcatgttctacaaaatttcacatctcaag

SEQ ID NO: 743109 - DNA, 625 bp, Homo sapiens
aaaccattcatgagggatccacccatgatccagtcacctcccactaggccccacctccaacactgggaataacatttcaacatgagactcagagggaacaaatattcaaaccatatcattccacctccagccccccgcaaatctcacatccttctcacatttcaaaacacaatcgtgcctttgcaatagtcgcccaaagttttaacttgttccagyattaactcacaagtctcaagtccgaagtccaaagtcttacctatgatgatgagttccttccacctacaagctgtgagatcaaaaacaaatgatttatactctcaatatacaggagtggtacaggtattaggtaaacgttctcattcccaaaggaagagattggccaaaagaaaggggtaataggctccatgcaagtctgaaacccagcagggaaggcattaaatctttaagctccaacacaatccttgattccatatcctgcatcctggtgtgagaggtgggctcccaaggtgtaccctgccactgtgttttgcaaggtacaacccatggtggctgctgtcacaggttggagttgagtacttgcagctcttccaggaagaagttacaagctgctggtgaatctaccatt

SEQ ID NO: 743110 - DNA, 496 bp, Homo sapiens
ttggctgtttgaaggggtttgattgggacaagacttagagaaagtgagtgaaaagccagggctctatttcttagggaccatgggctgggcactataattttctttcctgagcaactcccatttataaactgaggtcctgatctccaatacttgtgtatatgctccactgagtaagcatcaaaagatcagaacagatggacaattacacagctgcgttaagtrtgaccacagttagcagtgttaggaaatttctgtttcagacatgtgacaagagtccataactctaacttaaaatgtagaattaagtgtgctggtatgtgtgtatgcccaggggtgctcctgttaatttttatccatcttgcaatttctgttctcttctccactgcgtggtctggttgttaatgataatactaatgatataaaatataacctaatataaagaagtaaaacttgttacatgcttactatgtttcaggtactatattaaagaatattt

SEQ ID NO: 743111 - DNA, 631 bp, Homo sapiens
ctgcctggcaggatattgataagatgtgctcatgatgaggcagtttggtccttgtttctgtaggatgtcatcgtggtgttcaatggacctttgcgcagcaagatatgatagggatgttgctttagttggacctttgtctgccttgtggtcaggtggttaggcaggatgtttctcacagcctgaacccccgtgaaatgtttcactttgaccaaggtstgcaaaatagtgggaagtttacaaaatggtgcagtttggactaacaataaggtagtgaattaactaggatagtggatttccaggtatgatctccaaactgacagcattagcatcacctggaaacttattagaaattagagattttaacccaacggtagacctactgaatctaacacccttggaatgtcgggcagaaatctgtgttttaacacgccctccaggtgatcctggtgcagattctggtgagaatcactggactgggaaaatgcagttagaattactaagacggtaattaaatcttttggtaataagtttaaatgaaactagtcagcacagctgtatgccggtttttgcctaaacagagactaggtgaagagttgagtatcaccatgataagttaactaggcaagtatta

SEQ ID NO: 743112 - DNA, 567 bp, Homo sapiens
taggatgtcatcgtggtgttcaatggacctttgcgcagcaagatatgatagggatgttgctttagttggacctttgtctgccttgtggtcaggtggttaggcaggatgtttctcacagcctgaacccccgtgaaatgtttcactttgaccaaggtctgcaamatagtgggaagtttacaaaatggtgcagtttggactaacaataaggtagtgaattaactaggatagtggatttccaggtatgatctccaaactgacagcattagcatcacctggaaacttattagaaattagagattttaacccaacggtagacctactgaatctaacacccttggaatgtcgggcagaaatctgtgttttaacacgccctccaggtgatcctggtgcagattctggtgagaatcactggactgggaaaatgcagttagaattactaagacggtaattaaatcttttggtaataagtttaaatgaaactagtcagcacagctgtatgccggtttttgcctaaacagagactaggtgaagagttgagtatcaccatgataagttaactaggcaagt

SEQ ID NO: 743113 - DNA, 643 bp, Homo sapiens
acatggaaatattagctattgttatatctgggtagtaaactaacaggtgatattactttttttttactatctgatagtttctatttttctaatagaaatttattattttactattttactattaccaaatatatgacagtaatttgatggaattcattttgttattaaagggagtgatgaaaattttagactttcattagaaccactttaattaatatccccaacttctagaggagtttactcagtatcttytaatgaataactaagaatctagttttttctgttggaccagttccaggctcatgaatcacctggagttgtcctttgatttttaaaaataagctgggcagtctgctattgattactatcacttgaaatattggttggtgccataaattggcatagcagcaattacggagttacatttaccgaagaatagaaatgtgtgcacagcaatatgtgattgtcctttattccatattaaaacatttccctaatatttcttaaagagccaaggcatttttcctattcacgaagatcaacttggcaaataatatctctgatgtgatgtctcaagcttttaaaatggaagaagttatgtgtgtgagctcagacttcatagacaagcaaccaagaagtctag

SEQ ID NO: 743114 - DNA, 602 bp, Homo sapiens
ctctttggggtataaaaaatgatctggaattagtagtcatagttgaaaaacctagtgaataaaccagaagccactgaattttacactttaaaaaagtaaattttatggtgagtgaattatctataaaaaaaagaaagaaaaactaagttaagcctggcccagaaaaatgagtcatcttaattttgaaagattctgagacagattgatacaatttattgtaccctgaatactagtctttactatttctgccctggttctaatgttattattttcttcttaccccttaatctatattcttgaaagcattgccattgtcatttatttmatctttaaagtcctttcgtattcattgtttcaattaagcactcacaataaccttacatactctctctctctctagtactaactacaatttgatactcttcgaagcctcccctagctataccagatgaattatttatctggattctggactcacagcaagttgcactcactgctgtattgtgattaatggtaactgttcatggtaaggagacatgatttcttcaactattgacctcaaatgctgacccaatgaagggatcaatcaagaattgtcaaat

SEQ ID NO: 743115 - DNA, 657 bp, Homo sapiens
cctccttatctcagctcacttctttcacttcccaagctcatcgggccatgtgcacctggggtgacctcagctcagttcatcaaaacctgaacaagtgctctcaggggccaagagcaccactctccttgtcctgagaccmcaaccctctttccttagcatttctctctctgccccaagcctgtatgaagcaaagatggctttatagtgccttgtaagtcctacaaagggagcagcaggggcttctcagagctaccacctcctcgatcaatatctcttcttccaccctcgagggctcaataggactcattcagcaaactctggagggccgacatcacctggacagtgtcactcgtgggcctgctgtttattttcctcccactttctcttggtgcctccagctctcaccgctaacctgcacccccatccccaggtggcagccagtgtgactgctggcctccctgcagccgtgacctcggcaggcatgaggaggagggcgggctggggctctgccacccttcagctggctaatgtggaggtcttaatgaatatgaatcgcctccttctccacggagctggccccatcagattccttcacacctcgccgagcccagaaaggttactcagaattaaatgtaaatcacatatttactggtatga

SEQ ID NO: 743116 - DNA, 540 bp, Homo sapiens
atgcttatacagaatttggaaactcaacaggatgtgtaaaagacaaaagctgttcctcagctcccatcctggtaaaaaccacccattcattcattcattcattccataatccctactttcaggcactatgctgggtgctgacattacagtaaggcacataggcctggaaaccaattattgtgaactgtatgacaaatgacacatgagaaatgatatatgaaaaataggggctccaggagcccggaggtgtctggggaagtctgggaagactttctggaggaggtgacacctggcagaaatggggcatatcccaaggtgagaacggcagaaaaaggcctagggaaaggtatgagagtcakgtcacatgttcaaggcatcaggaagtagagtattgaagggatggccggggcgggggcaatggggctaggtttgggattgtattagccaaggtgaacgttggaattgtatcacagcaataggccatgaagaaggtgaatgtggggctggctgttttagattttttttaaaagaaattttaat

SEQ ID NO: 743117 - DNA, 596 bp, Homo sapiens
agtgtctgaactggaaggccagagctgtggtggatctgctggtagccacctatagctgtctggatctctgcactgcccagggcaccacgggcatgttatatcacagcacagtgcaaccagctggttcctgggcatgactacaagtcgttatgaaaaggctgaggacaagatgatagggaaatgtgaaaaggaaaattctagaagtaattttcatataaattaatttaaataacaaaaaaaccaaacatttaagtttctccaggtaatctggcaactctctggtactgtgctaascaggcaaccattggttagggagcttccaaaactccgtgtccactcccaggccccgctccagccatctggccaagcacactcagcttcaggacacaatgagcatagccagtccctctttgatgtccttggtaccagaaccttcccattttaccccacaggactcccaggattcctttctagggaagagtttgatgatgatgatggtgaagatggtaaagaagagcagttacccctgattgagtgccttctgtgtgccaggcattgtgccagagcctctaaacaaaccatctctaatcttttca

SEQ ID NO: 743118 - DNA, 632 bp, Homo sapiens
ttagaggattgtcatgaatatatctctttagtcctctcttttccttggactgagacatggtccacgaagagcagaaccagtgaaaatccgaatcacaaatctcttactgggctcagaatccctctcctccttggacatccagggacaaccaggaaaccactcccaggagaagctctgacttggtggcgattggacagttggtgggtcagtactggcatcattkgtcaaatcctggcccagcagccagtgtgcttaagccatgtctttagacttgtgacacagagagggcaaaggctttggaattctgacctgcatttaaatcttatttctgtcatttactgattttagacctccagcaggttgtttagcctccttaacccttaatttctaatctgtaaaatggaagaaatataaatcgacctcaaagagtttctccatgtattcattccttccctgagtgtttttgagcactgcccacatgccaatgtcctaggcactaggatatatcagcgaaaagcaaatgagtcttagagaggagtgtgcgttcaatcaatgccagcttccttcctctccatttacgtcagttgtaacctcctagaggtcaggaagccaggtctggggaagtccaggca

SEQ ID NO: 743119 - DNA, 627 bp, Homo sapiens
ctccccaccccaccgccagtcttgctcattctttttaggagtacctagcaatagggcgcctagccagggcaccccacatgccaccgtgtgctactcagatggctgtgcttaggcagtcccctgtgttttcagctcccagtgggcttagcagatcactgcctccaagtgcatgctagcattccctgtctcacatcaccttggcacacctctggcatagcttagctcctttgttaaagttcaccttcctatagctgatgctcagtcacgaatgagatactttctgaagagcagaaactgtctttttaaccagactatggttggtagcacatattaggtggtctgtgtgtgtyggaagcaatctgtgacctcttgtatctaactgacatcctgaacacaggcatagctggaaagggcagtttcttgattggatgaagacctgggagcacagtatctttccctgagcttcatgtatttgatacttattgagtgaccatttagagcaaggccccttgtaaatcagtcagagtgaagagtgaattgtgctgatggaagaatttatagtgaataccatagggctccctgcattcatttttccttcttctaaaaaggaaagcaaatactgtgatt

SEQ ID NO: 743120 - DNA, 604 bp, Homo sapiens
aatttcttttttcttcacaatttcactgataaaatcttgttcttatggtagattttagcaacctcaatatacaatgtttttatttccttactaacttgaaaactttcacctttttgcttaagggaagcacctcacagcttctctttggtgtatcagaattgccattgtcactatgcttgtgctttggggccattatttagtaaagtaaggattccttgaacatgagcactggataccatgacagtagaatggataactgagacractaataagtcactagcgagcatgtagtgtagacagtgtggatactcgtgataaagggatgattcatgtcctgggtgggacagagtgggatggtgcaagatgtcatcgtgctactccaaacagtgtgcaatttaaaacttattatgtgtttatttctggaattttccatttaatattttcaaaccatgattgacctcaggtaactaaaaccagtggggttgtggggtatactagtaattgctattttgatttcttttttgtgtatctgatactttttatgacaaaagtgttcaatcatacagaaaatttcagagagtaacacagtgtaacagatactttc

SEQ ID NO: 743121 - DNA, 597 bp, Homo sapiens
agaatgaaatctctcaccatgtacaaaaattaactcaagatggatttaaggcttaaatgtaagacctgaaactataaaattactagaagaaaaatctaggaaacactctctggacattggcctaggcaaagaatttatgaccaagtcctcaaaagaaaccacaacagaaacaaaatcagacaaaaggggacttaattaaactaaaaagcttctgcacagtaaaaaaatgaaatagagtaaacagacaaccaacagaatgggttaaaatattygcaaacagtgtatctgacaaagggctaagatccagaatctataaggaactcaacaggaaaaaaaacacataaccccattaaaaagtgggcaaaggacatgaacaggtatttttccaaaaaaaaggcatacaagtggccaaaaaacatgaaaaaatgctcaacatcactaatcatcagagaaatgcaaattaaaaccacaaatgagatgatatcttacactggtcagaatggctattattgaaaagtcaaaaaacaacacatattggggaggatgcagaaaaaaggaaatgctgatacagttttagtgaggatgtaaattagtaca

SEQ ID NO: 743122 - DNA, 616 bp, Homo sapiens
aagtttttcccattcttctctgccctttccccaggcagaggagcctctcttgtggccatgaccaccatggttccacagggagttctgccaggcctccactgatgttcacttaaagattaagagctcttcagtcagcttgtgatgaatgctgccagacstagaactcattcttcaaggcagtggatttccctccagcccaggacaggctcagaaatactgaccaagagcctaggcctggattcagggactccaagatcctgcttggtgctctaacctactgtggctaaattgggacctaaggtggaagacaaagccccatttacttttcctcttgcttttctcaaaccataaccaccacagctggagatgtgctggatcacacctgaagccaacatgtctcagagcccaaactgcagcatattacctggatatcactgttggttattcagggcccgggggctctttagtcagtaggtgatgcatcctgtcaggtctccacttttacagagcagcactgagttcaatgtaaagtccctcaatcactgcactctccttctctcaaagaaattgatttctccacaatgtgtggctgctttcagggggtgtgggcagggtg

SEQ ID NO: 743123 - DNA, 583 bp, Homo sapiens
ccgcgctcgctctcggcacctcctctgcctgggctcccactttggcggcacttgaggagcccttccgcccgccgctgcactgtgggagcccctttctgggttggccaaggccggagccggctccctcagcttgcaggcaggtgtggagggagaggcgcgggcgggaaccgggggctgcgcgcggtgcttgcgggccagcgcgagttccgggtgagcatgggctccgcgggtccgcactcggagtggccggccggccccgccggccccgggcagtgaagggcttagcacctgggccagcagctgctgtgytcaatttctcgcaaggccttagctgccttcccgcggggcagggctggggacctgcagcccgccatgcctgagcctccccgcccttcgtgggctcctgtgcagcccgagcctccccgacaagcgccgccccctgctccacagcgcccagtcccatcgaccacccaaggcctgaggagtgcaggcacacggcaggggactggcaggcagctccacctgtagccccggtgcgggatccactgggtgaagccagctgggctcctgagtctggtggggc

SEQ ID NO: 743124 - DNA, 583 bp, Homo sapiens
ccgcgctcgctctcggcacctcctctgcctgggctcccactttggcggcacttgaggagcccttccgcccgccgctgcactgtgggagcccctttctgggttggccaaggccggagccggctccctcagcttgcaggcaggtgtggagggagaggcgcgggcgggaaccgggggctgcgcgcggtgcttgcgggccagcgcgagttccgggtgagcatgggctccgcgggtccgcactcggagtggccggccggccccgccggccccgggcagtgaagggcttagcacctgggccagcagctgctgtgctcaatttctcgcaaggccttrgctgccttcccgcggggcagggctggggacctgcagcccgccatgcctgagcctccccgcccttcgtgggctcctgtgcagcccgagcctccccgacaagcgccgccccctgctccacagcgcccagtcccatcgaccacccaaggcctgaggagtgcaggcacacggcaggggactggcaggcagctccacctgtagccccggtgcgggatccactgggtgaagccagctgggctcctgagtctggtggggc

SEQ ID NO: 743125 - DNA, 678 bp, Homo sapiens
ttaaaacctagatgacaagttgataggtgcagcaaaccaccatggcacatgtatacctatgtaacaaacctgcatgttctgcacatgtatcccagaacttaaagtaaaatttaaaaagcagaataaaattttaaaggtagtgtcaatataaattcataccaagattagctgaagggaaagtaactcccataagacatctcattttgtttccactgagcctgttctgactccttgaaatggcaraaacaggggtaataacaatatcttttatcatgtattaccttatgcttttcaaaaaaagtttcaaaaacacaataaatatttgaataaatgcacttagataatcccaaatcagagtcaagaaaatatataaaagttaaattcaaatgatagaatttgtccatttttccattcaaattacaatttaagtcaagtaaagaaagacatacaaaagctgcatgattaggagggagtgcagcgctcatcctcctgtccccaaggccgattagccagctgggtgagagatgagatcatgagttctgggccaatgagtcactgcccttcaccattgcccccagacacaaacagctgcaggtctcccaaagcgtgtgtccaccctacggagctgccaccctacagaggagaaaatgtgggtgaaagtaagcaaaagcaacatca

SEQ ID NO: 743126 - DNA, 397 bp, Homo sapiens
agtttgaagttgggtagccatgatgcctccagctttgttctttttgattatgattgtcttggccatttgggatttgttggttccacatgaattttaaaatagttttttctaattctgtgaagaatgtcaatggtagtttaatgggaatagcattgaatctataaattgctttgggcagtatggctattttcatgatattgattcttcctgttcatgagcatggaatgtttctccatttgtttgtgtccygtacgatttctttgagcaatggtttgtagttctccttgaagaggtccttcacttcccttgttagctgtattcctagttattttattctttttgtagtaattgtgaatgggagttcatttatgatttggctctttgattgcctgttgtt

SEQ ID NO: 743127 - DNA, 732 bp, Homo sapiens
gagatgatcctggaatatctgggtggtctcaacataaagaaaaggatccttataaaggaaacagagaggtttggttacagaagtaggagacaggaggatggaagcaagagtttggagcagtgttaggaagggccccgagccgaagaatgtaggtggcctctagaagctggaaaaggcaaagcaacagcttttgccctagagctttcagaaggaacacagccctgccaacatcttgattttggacttctgacctccagaactgtaagaggatacatttgtgttgttttaggctatccttaccgttatcgtggtaattttttacgccagcaaaagagaactaatacaactcctgtacctgaaaagcctagggcagcaatggcttcaggcttggctgggtctaggagctctaatggggtggccttgatgctgtycctcctcatgccttaactgctttcttttgcaatggccgtattcactgatgggctttcgctgggttgtggccaagctgaaaacagtagcctcaggcttttgcctcaccactggagcaatcccagtagcgcaaactgcacccctttcctagtaatgtctgcaaatgtcccagggctgacctgcatgggccgagcttgtgccctgaatgatcaccatgattctgattggccaggtctcatcattgtgtctcaaggtaagcggggggatcagccctacctgaacctcagtgactcttaaggtaga

SEQ ID NO: 743128 - DNA, 618 bp, Homo sapiens
tgaaaactacaaaacagtgctcagggaaattaaagatgaccttaataaatggaaagatgtaacacactcatgggtggtactacccaatagtagtaagatgtcaattttcttcaaattgatttatatattcaatgcaatcccaatcaaaattctagcaggcttttttttcgtagaaattkattagttgatcctaaaattcacatggacatgcatatgacgtagaacagacaaaacaactttgaaaaatgtgggaggacttacacttgacttcaagacttataaaaccatagtgatcaagatactagtattcctgtaaacatagataaatagatgaatgggacagaatagacccatatataatatatagaataaacccatgtatatatgggcaattcattttcaacaaaagttgaagggcaattcagtagggaaaggattgtcttttcaacaaatggtctagaacaaacagccatcaatatggaaatatgtgtacttcgatccatactttgcactacagtcatgccctatttaacaatgtttcagtaactaatggactgcaaacacaaaggtggtgtcataagattaattataatggagctgaaaaattcctatcacctg

SEQ ID NO: 743129 - DNA, 550 bp, Homo sapiens
atctattagtttacttgtatgtccatgtgtacgcattgattaagtccaacttataagtgagaacatgtaatattcaacttctgtttcagagttatttcaatgaggataatggcctccagttccatccatgttgctgcaaaatayataattttgttcttttttatggttgagtagcatacacacacatatatgcacatgcatatacacacacacacacacacacacaccatgggatactactttttatttatccaatcatcaacagaggattggataaataaaatgtggtatatatgtatgtatcatgtatacatatacatatatacatacaatgtgatatgtatatatacatacatatatacatacaatgtgatatgtatatatacacacatatatgtgtgtgtgtatatatatactttatatatggatacaacacatatatatgtcacattttatttatccaaccctctgtttctgttgatgaacacttaggggatttcatgtcttaccttttttgaatagtgctgtgataagcatacaggtgcagatg

SEQ ID NO: 743130 - DNA, 550 bp, Homo sapiens
atctattagtttacttgtatgtccatgtgtacgcattgattaagtccaacttataagtgagaacatgtaatattcaacttctgtttcagagttatttcaatgaggataatggcctccagttccatccatgttgctgcaaaatacataattttgttcttttttatggttgagtagcatacacacacatatatgcacatgcatatacacacacacacacacacacacaccatgggatactactttttatttatccaatcatcaacagaggattggataaataaaatgtggtatatatgtatrtatcatgtatacatatacatatatacatacaatgtgatatgtatatatacatacatatatacatacaatgtgatatgtatatatacacacatatatgtgtgtgtgtatatatatactttatatatggatacaacacatatatatgtcacattttatttatccaaccctctgtttctgttgatgaacacttaggggatttcatgtcttaccttttttgaatagtgctgtgataagcatacaggtgcagatg

SEQ ID NO: 743131 - DNA, 551 bp, Homo sapiens
aatgcagacaaaatacataaaatgatggtttctaagataatgaacatcaggcaacaaagaacaatgattactgaaagaaggcaaacaagtgaggtgtgtgtactgtgattgccacagcccaataccaagacagagtttttaggcagtaaaagagaatagaatctaggtgaagcttagtaatcttactgagttgaagacacaaagctggaagtttgaagagaacaaagagagagacagaattagagaaagagagagtgatatctgaggaacttcacagaatcttttttgagmcttcagctaaatacttattagagcacatgtctaagaaaattaacagaggctagcaaaataactacctgaaaggattagagggagaaatgtcccaaactctcagaggggtgagaatatttcctgacatcactcttgagggtgaaaaaaattagtaattcatgcagtatcaggtatagtatgtggaagaattactcttctgtggtggtgaaaattagtttaagaccaaatgctattctaatcctacctaatcaaaatgcctg

SEQ ID NO: 743132 - DNA, 587 bp, Homo sapiens
atgattttgactaaaactgtactgctttcttcaggggcaagcacttttgtttgttcttcttaaacccaatgctattacatgttagcattatcagggtccaatataaccaccagatccttttcttgtaataaatgtttatatgggtaaagggacagaactaataacacatcataatttcataatattttatggctagtttagtgatccatataaattgtcctagaggtctaatcatattatttagagagcagatgctgcacaaaaagtgcgacggtttttttttcacagtaagtctccagtgaagctgacttattgtcatagggttcatctctagggaggtctggcattcagtttcaaaacsatttagagtcctaacactgtctacaagggcattaataatttgcatgctgtgggaacttgtctacagtgaactagactgaaaccattctgtatttcacattagtactagagcagctgttgatgttagcagtattaatcacaagcaacttggactggaatcaaagtgacctagaagagctactttctacatcttgctatgaattccctagggcaaagacattatgtgg

SEQ ID NO: 743133 - DNA, 587 bp, Homo sapiens
atgattttgactaaaactgtactgctttcttcaggggcaagcacttttgtttgttcttcttaaacccaatgctattacatgttagcattatcagggtccaatataaccaccagatccttttcttgtaataaatgtttatatgggtaaagggacagaactaataacacatcataatttcataatattttatggctagtttagtgatccatataaattgtcctagaggtctaatcatattatttagagagcagatgctgcacaaaaagtgcgacggtttttttttcacagtaagtctccagtgaagctgacttattgtcatagggttcatctctagggaggtctggcattcagtttcaaaacgatttagagtcctaacrctgtctacaagggcattaataatttgcatgctgtgggaacttgtctacagtgaactagactgaaaccattctgtatttcacattagtactagagcagctgttgatgttagcagtattaatcacaagcaacttggactggaatcaaagtgacctagaagagctactttctacatcttgctatgaattccctagggcaaagacattatgtgg

SEQ ID NO: 743134 - DNA, 639 bp, Homo sapiens
ccatatgtagaaagctgaaactggatcccttccttacaccttatacgataattaattcaagatggatcaaagacttaaatgttagacctaaaaccataaaaaccctagaagaaaacctaggcaataccattcaggacagaagcatgggcaaggacttcctgacgaaaacaccaaaagcaatggcaacaaaagccaaaattgacaaaagtgatctaattaaactaaagagctcctgcgcagcaaaagaaactaccatcagagtgaacaggcaacctacagaataggagaaaatttttgcartctactcatctgacaaagggcttatatccagaatctacaaagaactcaaacaaatttacaataaaaaaacaaacaaccccattaaaaagtgggcaaaagatatgaacagacacttctcaaaagaagacatttatgcagccaaaaaacacatgaaaaaatgctcatcatcactgcccatcagagaaatgcaaatcaaaaccacaatgagataccatctcacaccagttagaatggccatcattaaaaagtcaggaaacaacaggtactggagaggatgtggagaaataggaacacttttcactgttagtgggactctaaactagttcaaccattgtggaa

SEQ ID NO: 743135 - DNA, 643 bp, Homo sapiens
tttaaaaccaccactcctatccccacttcacccctttcacacatttgtcattcctaaagtatctgcccctctttgcatctgttagtcactgtcatagtgtctggaatagtaagtatttatagtgttttcaaaggaaggaatgaatgaatgaacagagggaacacgtattgaattttcaaggaagtataaatcactatgaaactgagtattgagagaagtttytaaagacactataagacacaaaaagatttataggatttccataattagagaagaaaagacaagggatttgaggtatgaacaagggtatggaggtgaaaatgtgattgcatctgaagaaaatgagcagataaatttgactggattagacacagacatgggcagtatatggtcctaccaaattttacatgccagaatgggaggcaatggatgggaacagggaaacatcgataatgatttcaagtttccatagtaggttactggaaggatagtattgctcatgttaaaaactgagaaaaccacaggataatttggctttgaagaaataattttgactttaaaaaaaaaaaacatgttattcggtgagacaagacacctcaatagaaatgtctggtaggtaatcagaaatgtgagactggcgctt

SEQ ID NO: 743136 - DNA, 585 bp, Homo sapiens
tgaatcacatttatttatttgcatatgttgaaccatctctgcttcccaggaataaagcccacttgattgtgggaattaactttttgatatgttgttggatttagttcgctagatttttgttgtgaacttttgcatcgatattaatcagggctattggcctgtagttttggttgttgttgttgtgtccttacctggcgttggtataagagtggctttgtagatgagttggggaggattccctcctcctcagtttttgggaacaattttagtagggttggtattcttccttttacrtctggtagaattcggctgtgaatccatctggtcctgggctttttgttgttgggagaatctttttttaattactgattcaatttaattatttgttattggtctattaatgatttctatttcttcctggttcagtcttgggatgttgtatgtttccaggaatttatccatttcctctaggttttttagtttatatgcatagagatgctcatagtaatctctgacaatcttttgttatttctgtggtatcaactgtaatgcaacctttattatttctgattgtgggtgttctaa

SEQ ID NO: 743137 - DNA, 487 bp, Homo sapiens
ccaaatgcaggtgggataccggattccattttagcactctattacttgaggctgtcattcagttcttgttgctgtccctttgctatacaagacttaagtttttaaaagtccttttataaagtgcaaattacttacatagaaatgcttcattcattcataaatactgaacagcctggcactgctctcagaaaatgtaattggcatctatcttgtataaaaaaaggatagtggtttgtcatttcttaatatttaacgagatttcytaagtgttgcattaggtcctgtgtttttattccttaaatggggccatggaatagcagaagtgattccttacactgaaaactttgaaagggcaagctctggtatagattctacaaaatatgctaagatgtaagatgtcaggtgaccagaacattcttgccctccttcttggcctaacattacgcatttcagtctcttgcagataaagttattttcatgatgatgg

SEQ ID NO: 743138 - DNA, 619 bp, Homo sapiens
aatacaagtagacagaaaacaaagatatggaagaactcaacatcatcaaccaataagagctaagtaacttttatagaatacctcactgaataacaacattatacactctcttttcaagtgctcagcaaacataagcagatacatcatatcrtaggtcagagcaacaatccctaagacatttaaaagaatgtacatcacacagaatgtgttctcttaccatgatgaaatcaaactaaaaatgaataacgtaaaactaagaggaaaatcttccaacacttggaaactaaacaacacacttctaaataatccttaaaaaggaagtaccaagggaaattagaaaatacacaatacttaatgaaaataaaaatacaacatattaaaatgtgccagacactccctgttgatagggaaattaataacctaaatgcatatattaggaaagaggataagtatcaaatcagtaataaaagctgccaactcaagaactctgagaaataagggcaaacaaaaccaaaaatatccagaagaaaagaacaatgattcaagtatagatcaatgaaatttaaaacaggaaaccaataaaggaaatcaatgaaaggaagagctgggtcttcaaaaa

SEQ ID NO: 743139 - DNA, 642 bp, Homo sapiens
ggcaatgatgtatttttaactccagatgatactattgtgtagtttgagatgcaccggtacaaacaaacagctcaagtttctgagtcagccggtgctgggttcagatagtggccctgcccctgattaattgtgcaaatttgagtgttgtttcctcatctggaaatgggagatggtaatacctacttcacaaggtaattgtaactattaaatgaaaaaaatatatggagaatgcttgggaaatagtggccactcgttcatgccaggtcctcccctttatatmtttcatgttttgtgtgctctaaaacaaatctagttttgctaaattatttcaagacagtcgctcagatattcaatgtcttttcattctgccccaagaaattgagctttcaaaactgtgggattgctggctaggcagctcacaggtagcattgtggaacaacaagcaaagtctgagcatcgctttgggagcaatgcgtccatcttcaataatactgtcacatgccacgccatgaaaggaatagaaaggtctggctgttgtctgtatctgatcagatttaacgtttagattccaccctcgatgcagccaaagcatgcctgcaaatgttcctcattcgtgactcactaaataataaggatgctgat

SEQ ID NO: 743140 - DNA, 629 bp, Homo sapiens
atttcatatctggaggaggggcgaatgagcaataaggggaagcaaaaagattagatcagtccccatggaagctctaagcattgcatagaaataagtgcaggatgataactgaagagattcaagcacatgagtttcctctcatctctttttgttagtgatggcagagtgttactcaaaatcagaagactaaatatattgccttggctgctaaaaatgaaaatacctaaaaaytctttctgcagatactacacacaagccttatagcctgtgaccatctttcgtcttggccagtatgagaaatcatccatgatatctgcccattgtacatgtctattgcatttgccagctaatgtttagtaactagggctgtttgttcttctcaaaaatttgaactttctccatttgtgtttaccttcacatccaaactcgaacaactctgctctgagttaattccccaatttcattatggccacactggggaaggggagaggaatctgtgtacaaaccaccagacagaaaacaatgggaacaggcagcaatccaagagctttggcatgatttgcaagagaaaaccagctctgattaatgctatcaaaatgcttgtctttcctgtgattgatattccagcc

SEQ ID NO: 743141 - DNA, 620 bp, Homo sapiens
ataatttgatcagtggatgaataaatgaacacataatagctaaatgtattgactgttttacagtattatcagtgctttttatttaatcttcaaaataacttgataagtactattattattcccattttatagaggaggaaagtgagccccagagaagttaagttacttgctcaaagtcaccattccaacaagaaaaggaacyagactttgaacccagacatcatgctcaatctataaaggggtcccttcaatactcaccctcttttcagcctagctctgaacaatttgagaaataaaacaaaagaacaataacggggatggaaatgttatctttataattgatggaggccaagttggaagacattgagcattaggcctttcaggaaagtagacgttaacattgaactccagatctggcagtcctgtgctctcagccctgggaagcagtacagaggggtcctgccggaggggcttacatcaatgagggagcagagcaacatgcccaaaaggaaagaaggaaccaagcaagcccagctcttcttctcaaattgaccaatcaaataagccatcccacctctctagggcagagttggtaaaagggcacagggaggtcacaagtt

SEQ ID NO: 743142 - DNA, 566 bp, Homo sapiens
tcaacagtaactttaattccatcttccctacagtctttacctgcctatttcaccaacatagctgaggcctcaaatcatgcctggcacagagtagatatctcagaaaaagcaaacaaacaacaaaaaacctacattacttgttgccactgaataaatgcgtggaatttttggcctatattggtgataatagaaactttgctaactctgtgcttttgtttttcttttctcagttgttcagtgatctacaaccaaataaaccaatcacaggtgtcagcttatattacaatagtgacttttacaaatcttaaaactattgaagyctttattactatgtaaaattataaaaaatacaagaagcaaattagggtgcatttatttttaagagcacgaagaacacaagtgcttaaaactcctcttatgtactgaataattctgaattaccacaagcaagcaagagggtcctgaatagtttcgaaataactctttaaactctggacaaaccagttcaaaaagccctgctaagtagcatggatagagtcataggcttttattttgttatatacagc

SEQ ID NO: 743143 - DNA, 599 bp, Homo sapiens
aatatttatattatatgagtaaatatatatatataatatttatatattccaatgcagtaattgcctgagctctttgagaaatttaagcatagttactgagtgctgcttgctatgatgtttggccctgatcttccttctgaactgaagcactcatccccaagtggctggaaaaaaaaatgtgatgctgagttcacagacygatttgagacattcctcatcacttcttcatagctgcacctcctgagtgtattcctcaagaaatgttctgcaaaaaactgttttacattctgtatctgtgaacccaatataagcaaacatatatatatataatatgcttatatatatacatgtttatatatatatacatgtttatatatgttatctacaatatataaacattatatattatatataatatataatatatatttttatatatttatataaatatactacatataaatgttttatatacaatttttttacttaatgcaaatgattatattggacttttgaaaagagaattaaagtaattatccatttgggttattccttagctagggcttttaaacaccctctagtctctctattcttgcccg

SEQ ID NO: 743144 - DNA, 611 bp, Homo sapiens
tcagtttatgttgtacaatgtagatggcctcttactaatgtaaaatgatttgtagtggaaacatttatatttttataataaacataatgaaaatattttttacagattggaatacagaagtggtctttgaagttttttaaaaatatataaaactatgtgcttatttaaacagcaaaataatgaaatttacataagtcacaaaaatatgcttctgggcttttattctccattagtgaggagggatttacattgtataatccacatgtttttggtctacatctcattatgaataagccagaaaaataatcagtaaatgttatttcaaagttaataaacacaactgtaatagrcagttctcttttgattgcaaataacagaaaacaaataaattggattaattttctaaaaaagaaaatgtttagaataagtgacagaattatctggggataaactccctagctaagagatcagacacagattgaaccaggaattcaaacaatgtcaacagggttaattctctcattctttgtcttcttcccttggccctattttttttccaactgggttgatttgcaagctatacctttctacaaggtaaaaaatactactct

SEQ ID NO: 743145 - DNA, 649 bp, Homo sapiens
ttataaataatgctgctataaagacacatgcacacatatgtgcattgtgatactgttcacaatagcaaagacttagaaccaacccaaatgctcatcaatgatagaaggataaagaaaatgcaccacatatataccatggaatactatgcagccgtaaaaagggatgagttcatttcctttctagggacatgartgaagctggaaactatcattctcagcaaactaacacaggaacagaaaaccaaacaccacatgttatcactcataagtgggagttgaacaatgagaacacatggacacagggaggggaacatcacacaccgggtcctgtcagggggttggggggataggggagggatagcattaggagaaatacctaatgtaaatgatgggttgattggtgcagcaaaccaccatggcatgtgtatacctatgtaccaaacctgcatattctgcacaagtatcccagaacttaaagtataataataataataataataataataataataataataatgattggcaaatgtgacctacacatttgcaaagaaaaggacaaatatccttttaaagctttatttaaaaaaatgaaaatctattaaatggcttcttctatttgaaaataaaagtaattaaataaaaaaaa

SEQ ID NO: 743146 - DNA, 649 bp, Homo sapiens
ttataaataatgctgctataaagacacatgcacacatatgtgcattgtgatactgttcacaatagcaaagacttagaaccaacccaaatgctcatcaatgatagaaggataaagaaaatgcaccacatatataccatggaatactatgcagccgtaaaaagggatgagttcatttcctttctagggacatgaatgaagctggaaactatcattctcagcaaactaacacaggaacagaaaaccaaacaccacatgttatcactcataagtgggagttgaacaatgagaacacatggacacagggaggggaacatcacacaccgggtcctgtcagggggttggggggataggggagggatagcattaggagaaatacctaatgtraatgatgggttgattggtgcagcaaaccaccatggcatgtgtatacctatgtaccaaacctgcatattctgcacaagtatcccagaacttaaagtataataataataataataataataataataataataataatgattggcaaatgtgacctacacatttgcaaagaaaaggacaaatatccttttaaagctttatttaaaaaaatgaaaatctattaaatggcttcttctatttgaaaataaaagtaattaaataaaaaaaa

SEQ ID NO: 743147 - DNA, 601 bp, Homo sapiens
acatggtgaaaccccgtccctactcaaaacacaaaaattagctgggcatggtggtgcatgcctatactcccagctactggggaggttgaggcaggagaatcgcttgaacctgggaggcagaggttgcagtgagctgagattgagccaccgcactccagactggcaacatagcaagactccatctccaaaaaaaaaaaaaaawaaggagtgcctggccaatggtagttactcactagatattttttgaatgattgagtatatttcaaagtctaacttcacagcaactttattccaaacatcctcactatgcatgtttctactttcaaggagctctgttgagctagtgtcaaaaagttgattgtccactaattacattagataatcagatccagaagcagctaccagtgatacgagttcttgtgtcaacattgaactctgagctttcagtggacttgacagagatgagtgtccaagtgccgtgggaagagcctgtactaagcaggtgtcagcatgtaggcttccaaatgccctctattcctggatgactgggagacctgatttgggctctgccagctgctctcctactttatgtggctcctcc

SEQ ID NO: 743148 - DNA, 601 bp, Homo sapiens
acatggtgaaaccccgtccctactcaaaacacaaaaattagctgggcatggtggtgcatgcctatactcccagctactggggaggttgaggcaggagaatcgcttgaacctgggaggcagaggttgcagtgagctgagattgagccaccgcactccagactggcaacatagcaagactccatctccaaaaaaaaaaaaaaaaaaggagtgcctggccaatggtagttactcactagatattttttgaatgattgagtatatttcaaagtctaacttcacagcaactttattccaaacatcctcactatgcatgtttctactttcaaggagctctgttgagctagtgtcaaaaagttgattgtccactaattacattagataatcagatccagaagcagctaccagtgataygagttcttgtgtcaacattgaactctgagctttcagtggacttgacagagatgagtgtccaagtgccgtgggaagagcctgtactaagcaggtgtcagcatgtaggcttccaaatgccctctattcctggatgactgggagacctgatttgggctctgccagctgctctcctactttatgtggctcctcc

SEQ ID NO: 743149 - DNA, 622 bp, Homo sapiens
cgagttcttgtgtcaacattgaactctgagctttcagtggacttgacagagatgagtgtccaagtgccgtgggaagagcctgtactaagcaggtgtcagcatgtaggcttccaaatgccctctattcctggatgactgggagacctgatttgggctctgccagctgctctcctactttatgtggctcctcctcagtgctcactttctactgctttaattactatgattgttctcctccccagttacacccaattagcactttatttcttttctcacctcctaycctatgcaccacttcatgtgttcaattgagtctatcagttatcctgtgacctggccagtgcgctccctatgtaatagtgaagagactaagactagtttttaattatatagatatgcagtggccgagttgagctttgagctccaatgtcagtgcccattttatggtttctggagggtgcagacccttcctacatatcattgtcacctgtcatgctcagggcatgtggtaaatacttctcattaggtaaaagtcagtaaagaaattcagatgttcgaaacaagagagaatggtctttctactttatgttaatccatttaatgtggtttcttaaagactgtg

SEQ ID NO: 743150 - DNA, 646 bp, Homo sapiens
acttctattgttctaagtcagacccacttggtaattagatttggaatctaaaatagtgatcatgcctacattgtttagaattgtatcataccttcttacattagaggtaccaaccttagtattaatattttcctcagagcaagtcagacctaaagccattacatggggtagatcagagctagaaaatatattgagcctgctttgtgaggaaacaattggctgccttcttgctctgtctcctcacaatgaggctggcttatccaaggagggaaaatacactgtatcttgcttgcctagagtgttgtgttgcaaagaattctgaaacaacttttgagtcatttattccatttattcaacaattatttattgagtgcctacratgtgatattcaaggtactattctaggtcctgggaatatagcaacacacacaagagcaaaatcagttaaccaatcaatcaatacttgccccccaaagagctgacattggaaagaatggtgtgatggattatagatgtcttccataaacatgggagggaggaattgaggcatcttaccatatatttgccatccttccagattaaatctagtcatagcatcagattttcaggcagttccacaattgtgtgtatcttatctttggagctc

SEQ ID NO: 743151 - DNA, 679 bp, Homo sapiens
gggtttgggggagaaaaattacagaagtaaagtgcccttttcattgtacatactatcaacaagattgatcactgatgatgttgaccttgatctcctggctgaagtagtttttgtcaggtttgtccactatgaggttaccctttttccccctttcccatgtgctctttggcaagaagtcgcaatgcacagaacatcctaaggagtgtagagttacgtttccttccctgtagagtggaatatctacataacttacttgaaattcttttgtatgagaaacttgtgtcctctctcattaattaatttatgaaatcrtttatgtgtatcattatggtctcatgaatatctattttatattttagattataatccaatactactttattttttgctcaaattgttccagctttggctactaagagttctttcagttgactcttgcattcttttaacatacatcaatgtgtttgtcatttttttaaaaaaaaaaatttgagcacttctttgtttttgacactacaagttgctaggctgctcaggttcatattgcatattttcttccccagtcctagaaatggccatttcttttctagactcaatcccctgacctcctaaatgatgtttttaatttgcatacatgaaggtttgttctttatgttgtaaagctctacaggttttgaca

SEQ ID NO: 743152 - DNA, 657 bp, Homo sapiens
ttaatttatgaaatcgtttatgtgtatcattatggtctcatgaatatctattttatattttagattataatccaatactactttattttttgctcaaattgttccagctttggctactaagagttctttcagttgactcttgcattcttttaacatacatcaatgtgtttgtcatttttttaaaaaaaaaaatttgagcacttctttgtttttgacactacaagttgctaggctgctcaggttmatattgcatattttcttccccagtcctagaaatggccatttcttttctagactcaatcccctgacctcctaaatgatgtttttaatttgcatacatgaaggtttgttctttatgttgtaaagctctacaggttttgacaaacacatcaggtcatgtattcaccattatagtattatacagaacagtttcactgccccaaaaatccactgtgtttcacctattcattcctgtctcttcccctaaacctctggcaaccagtgagtttttacgtttgtatagttttttccttttccagaatgtcacataattgaaattacacagtatatagccatttcagactgatttctttcacttagcaatattatttaagctttctcggcattgttttagagcttgatatctcatttccgaat

SEQ ID NO: 743153 - DNA, 679 bp, Homo sapiens
gggtttgggggagaaaaattacagaagtaaagtgcccttttcattgtacatactatcaacaagattgatcactgatgatgttgaccttgatctcctggctgaagtagtttttgtcaggtttgtccactatgaggttaccctttttccccctttcccatgtgctctttggcaagaagtcgcaatgcacagaacatcctaaggagtgtagagttacgtttccttccctgtagagtggaatatctacataacttacttgaaattcttttgtatgagaaacttgtgtcctctctcattaattaatttatgaaatcgtttatgtgtatcattatggtctcatgaatatctattttatattttagattataatccaatactactttattttttgctcaaattgttccagctttggctactaagagttctttcagttgactcttgcattcttttaacatacatcaatgtgtttgtcatttttttaaaaaaaaaaatttgagcacttctttgtttttgacactacaagttgctaggctgctcaggttcatattgcatattttcttccccagtcctagaaatggccatttcttttctagactcaatcccctgacctcctaaatgatgtttttaatttgcatacatgaagstttgttctttatgttgtaaagctctacaggttttgaca

SEQ ID NO: 743154 - DNA, 657 bp, Homo sapiens
ttaatttatgaaatcgtttatgtgtatcattatggtctcatgaatatctattttatattttagattataatccaatactactttattttttgctcaaattgttccagctttggctactaagagttctttcagttgactcttgcattcttttaacatacatcaatgtgtttgtcatttttttaaaaaaaaaaatttgagcacttctttgtttttgacactacaagttgctaggctgctcaggttcatattgcatattttcttccccagtcctagaaatggccatttcttttctagactcaatcccctgacctcctaaatgatgtttttaatttgcatacatgaaggtttgytctttatgttgtaaagctctacaggttttgacaaacacatcaggtcatgtattcaccattatagtattatacagaacagtttcactgccccaaaaatccactgtgtttcacctattcattcctgtctcttcccctaaacctctggcaaccagtgagtttttacgtttgtatagttttttccttttccagaatgtcacataattgaaattacacagtatatagccatttcagactgatttctttcacttagcaatattatttaagctttctcggcattgttttagagcttgatatctcatttccgaat

SEQ ID NO: 743155 - DNA, 600 bp, Homo sapiens
atggtgaaactccacctctactaaaaaatacaaaaaaaattagccgggtgtgatgacgcatgcctgtgataccagctacttgggaggctgaggcaggagaatcacttgaacccaggagatggaggtcgcagtgagctgagatcacaccactgcactccagcctgggaaacagagcaagactccatcttaaaaagattaaaaaataaaataaaatacaatgtttatgaaaccacctttgcaaagattacaacagtgagaaaagtctagtatggctgactccatcttgcttctagcctcacaggctggctgtcctcattcattcccaggtgtaggccaarctgtccatgggaggaatttagtgtatagtttaactttgaaacaaggatcataatagtacctacctaaaactgatcctctccttgttcaggggctgaaactgcctttgcaagactaatgaaaagccacatgattaggattatggaaggggcctggattctgctaaggtataggcagagtttctatcatctcttactgctaaggagtcatgtggccagaggtcacaagatttatgacttccccaattgctcctatagataacat

SEQ ID NO: 743156 - DNA, 608 bp, Homo sapiens
cccccctgggaggcatgagagaaccctcactttgcttccatggtaccccaaggagaatagcagctagcattcactgaacaatttggtttgctacaactagtaatactactgaggtatcgggtactgaggctttatttgaggatgaagctaatagcctaagccaagatgtacctgctaggcaggatgaagccctttagaaccattgtttcatttaccttaaagacaactcaggacaggggtattattactatagtcccgttctacagatgcggaaaccgaggcttccacagcctgggttacttgtcccaggtacacagcgactaagtgcctgagccacacttcaaccaggtgtgtgtctcacaccaactccttctatagatgttacctaagggccctccaggagctaggcaccaactgggtgctgggtttcctcttctccmaggagctccagaggaccaagagagcaggaggagggtcatgggggctccaggggaaggttccgagggcagggaaagcggagcatgctcccagggtgagtgggcacagggcacctgccagcggcagactgacagatgttcagaagaggaactgcagaaccagggaggtga

SEQ ID NO: 743157 - DNA, 582 bp, Homo sapiens
gtgcatttcaaattttaagaaagacgtttttctaaatgtattactttgaagtcacacttcagttcaaattctgtattcacagaatggctactgagacacggctggacctggcggaggaaatccagaggagaaggttcagttccttcactgagggagggcttctgagcctgccaggaaatgggctgcaaacagcgagttcctgccacccgggtgctggcacgtgggaggccctcaggaaatgctgggtgcccagctcggcacccaaagctccaggaaacgagcgtaatggacggatctaagtgtaagcaaagcacagggaracagaaaggagagacatgatcagagcagacagctgagactccatcaagggaacacctgggagggtaagaaatcaagcgaagcagggagccggggggagaaaacaggtcacaaacaaggtctcccgtggccctgctttctcccagtctcccaagtctgtattctaagcatgcctgcacacgagaaactgaaaacaagaaaaggtggtaatttcttggtggtggggacaccagcgttgcttcctaacaagacgcaggtccttga

SEQ ID NO: 743158 - DNA, 548 bp, Homo sapiens
gcagcaggatgtgcacgcttgcagctctgcgatgcctttctctgtagctgtcttatatcccacaatgaaacctgtaaaataagtcaacacgatcagacaccgactttgtccaggtttgagggcctcagcacttgacctctttcctggggacgtcttcgagcggccagatgggggtcttaaagagctccttgaggcccgtgtgtggggcatatggggyggggctgagaaattggatctagagcctagtggggcagtggctggctagtgcttgttcagctgggctggtcagggcccagataatgatgcggatcagttaccacagggctccaaagccagctgggcccccgcctgatcaaagtaatctcgtgttgacagcagccctgcgctgggtgccattagattccccatctgctagaagaggaaactgaggcacagagaggggaggtagctggcctagggtcacgtatcgagtcagtgactgtgccagggtttgaacccaggccatctggctctgagtcctcgtgcccccttccacaaggtcacagggc

SEQ ID NO: 743159 - DNA, 525 bp, Homo sapiens
catcttacaaacatgaagctggcattctcaaaactttgggggaaatgtgtgctcttgaaaaactcattggtaccttccatattataaatctgtttaaagtgtgcttgatagaatttgttttttttaaagaacagttgaaagtgagggraaaaaaaaaagcttggtccctgaaacccaatgggttaattctcccctgtggcagaggaaatgccaagcagcctttggcagcgttcttccttctttgtataacaacactttcaagagctagagctgggatcatccagtaatgcttttaatttgtgtgtggttgcgaagaggccaggatttaatcgaaattgttagaatggctttgcttggagtagctgagtgcttgcagtagggctaggaggcaaggtagcgctggaataattaaaagaaatacctaaggcatcatcattgcctgagttattccagataccaggctgcagagtaaaaatagtgaaataaaatttgtgcacagttacttttctattatacctcaatttt

SEQ ID NO: 743160 - DNA, 724 bp, Homo sapiens
ttttacaggaggagttaatcctcaaggattggaacctaactgtctttggcaaatggatgtcacacatgttccttcatttgggagactagcttatgtacatgtatgtgtggacaccttttctcactttgtctgggctacatgccaaacaggagagtcttctgccagtgttaaacatyaccttttgcagtgttttgcggtgaagggcattccagcttctattaaaacagatgatgccccaggttatgctagccaagccctagctacatttttctctatgtagaatattaaacacattactggtatcccatacaattctcaaggaccagccatagtagaaagaatgaatctctccctaaaacagcagttgcaacagcagaaaaggggagacagagagtatgggaccccacagatacaactgaacctagcattattaactttaaattttttgagcctgcccaaaggatagatgttatcagcagctgaacagcatctacagaaaccagctgcaaagacagaagcagaacaactgatttggtggagagatctgattacaaaaacttaggaaataggtaaaataataacttggggtagaggttatgcttgtatttctccaggcaaaaatcaacagctgatttggataccaccaagacacctgaaaccttattatgagccagatgccaaggaagagattccgggaggatcccaagtactccccggttgcagc

SEQ ID NO: 743161 - DNA, 631 bp, Homo sapiens
acatgtatgtgtggacaccttttctcactttgtctgggctacatgccaaacaggagagtcttctgccagtgttaaacatcaccttttgcagtgttttgcggtgaagggcattccagcttctattaaaacagatgatgccccaggttatgctagccaagccctagctacatttttctctatgtagaatattaaacacattactggtatcccatacaattctcaaggaccagccatagtagaaagaatgaatctctccctaaaacagcagttgcaacagcagaaaaggggagacagagagtatgggaccccacagatrcaactgaacctagcattattaactttaaattttttgagcctgcccaaaggatagatgttatcagcagctgaacagcatctacagaaaccagctgcaaagacagaagcagaacaactgatttggtggagagatctgattacaaaaacttaggaaataggtaaaataataacttggggtagaggttatgcttgtatttctccaggcaaaaatcaacagctgatttggataccaccaagacacctgaaaccttattatgagccagatgccaaggaagagattccgggaggatcccaagtactccccggttgcagccat

SEQ ID NO: 743162 - DNA, 638 bp, Homo sapiens
gattagttcaaatggtgcccatgccactgaatctcagtcatagatcaaggcaaaaactgtcttgagtttgcagccaaatatagtaaaaagtactgaatatatcgccttcccacaccaatatggtactgctttagcaagtctatttctttcytcactccttgatttagtggcttcccctggtttatgaaatatttttttacccatggcccactgaaaacatctttataaaatagagttcatctttgaacgggtcactttcctattgaattttaacatttcaagaaggaaaaggggagtatttctgaccagatagtctttgagtaagtattaaagtaggtttctaaatgccaggatttaagctctgttaacagccaatataatcatcagtttgtaaaacaaaatcttaagtttatgcctgtacaaagcacagtgaaaagaatttgctccaatcactccagtgatgtggcataaacaattttcatttctgttcatggccatggtgccagtcttcacttcacatggttagtaggtggcaaagccaagacttgaaccagaccagcctgaatttcaagtccatgctctttcaaccacattgtgcaattcaacaaatttttattggacatctattatgtgtgaat

SEQ ID NO: 743163 - DNA, 607 bp, Homo sapiens
gattgcaaaaggaaaacattaatggcaggaaatgctggagtaaaaatattctctatgctttgggtcacattatggaaagacatattttataaggacagtattacactgggtgtttgctgttgcttgcaaagtagtgtgagtttgtttagaagttaactcttaccatgccccagaaaaaaaggtggtggaaatgaagtagaccctactactactactactactactactamtaataataataataatcagctggagcacagaggtcagtcacccttctgacctctgtgactaagtgttactgaagggtaaagatccagactacatagcctttgcttttctgtagcccccgacttccaagttggcaaagataccactctcccagctaaagagccttcacaggagggtgctcaggatggagaggtgtgactgggacaatggtaagcaatgaatgagccagggactggagatactgattctggagaagaggggcctaagatggcatggtagcgaagggaggaaaaagatttgtttttaattaacttaaggggtaggaccaaaatgatgaaggaaagaaacctatagaagacaaactctgtctcagtaaaac

SEQ ID NO: 743164 - DNA, 633 bp, Homo sapiens
attaggccccatctcacaacactattgcattgaggattagattcccgactcaagaattccggggtacatattcatgctatagcagtagccaaataaaacataccaaataattattagcatagcatgaatatttgataacagagcaatatgaaagagactatagaataagaaggtttgacattaaaatggataaaagaaaggaaaaacatcatattgaaaggagatgtagatatccatgctaaattttaaactatgggttaagtggtagtttacagaacatgttcaaatttataaattgaaagacagtgggtgtggcaagtgcctgtagtcccagctaattgagaggctgcagtgggaggatcactagccccagaggyggaggttgcagtgagccatgatcccgccactgcactccagcctgggcaacagagtgagaccctgtctcagaaaaaaaaaaaaagaaaaaaagaaaaaaatatatatatagtcacataggtgcagcattaaaaaataaatggggggttgatgtaacagggagaaaaagtcatatgaatacagaatgaagcagtacaacctagacctagcaggagatctggaaaaggaggaaagattatcagagaaaggcaatattca

SEQ ID NO: 743165 - DNA, 601 bp, Homo sapiens
aaatttgtaatgatcaaatcagggtaatttagggtatccatcatatcaaacatttttcgtttatgttagcttcattccaattctactcttcattgttttaaaatatgccataaaattttctttaccatagttgccctactgtgctatcaaacactagatcttattctttctgtctaactgtatttttgtaaacgttaaccattctttctttattcctaactcccactacccttcccagcctctggtaaccaccattctactctctatctcaatttattcatttttttagctcccacatattaatgagaacatgtgatatttgtttttctgttcctgacttattagccatattttacaactagtaattctaaaatgaaagcatttrtagtgtgttggttttctcatgactctattttgtgacaacacatgaaaatctaaaagtgactattgtcactaaaagtgacaatagtcacttttagattggcctttttgagagaaaaataataagtatttgagaataagagttttacttataagaatattcagtatactgattttcatccttttgggtacagacccaacattgagattgctgtatgac

SEQ ID NO: 743166 - DNA, 555 bp, Homo sapiens
atctttaatccaagttaagacagcagtctactaacaggtctcctgcctccattcccttcccttgctattatcctcctccagtacgctttcaaaattagccctttaaaattcacgttggatcatatgactttctatttgatgtccttggtgattcattatctgtggcaatataaaatttkaatttcctggtatagcacagaaagctcttcacaacatggcccctgaccatatctctgcatttttacccttagtcaactggcaaacttcttagtattccttaagactcaactcaaatatccctttatttgatttcagtacttaatatgatgctgaccagaaaaattcccattttattttctcaatttccctaaatataatctcataatattagctatactcttcttttggaagatgataaagagcatttgggatttagtgtatacacaaattacacaaaaaggcaagtacattggaatgagctgtatgagaaaaatcagcacataatacacaaaaaaggaaagaagagataggtttaaaatggaaatgagttgaaaa

SEQ ID NO: 743167 - DNA, 642 bp, Homo sapiens
atcactagcccactcttcttcccctcctttattctgcatcaaacacaacagacccttctgttctcaaagacaatatacccactatcatctcagatattgccacttgctaaaatattcttttctcagatacaatttacagctatcctccaaagccaccctatctgacatcgcaactctatgttttcgcgattttattttttcctttgcactcacmattatctacaattgttttgtccctgctctaccctctgcatctaaaatagtgcttggcacaaagtaagaacccatgaattcttgttaaataagtgaatgaaaaatggcccgaatgaaaatctcttgttaacttctattaaaaaatatctagtccaatttatttcacagcaaacaaatctacatacgaagtgagaaataaaaataataccctaagtctctaagccaaggggacctagagtaaccttaaaaattgagttcctggccgtgatgggataggtgctcaccatgcctcagtattctcttttcatattaacctttaaccaaaattatttccgaaggagtaaggagaagccagctctgaaaacaagagacggatgatgcattcctttattgcctttagctaaccatcatctcgacctccactgaact

SEQ ID NO: 743168 - DNA, 661 bp, Homo sapiens
aatttcaatggacatattaaaaaagagcatccatatgccacagacaatatgaattgtgttaaattagtttctgttggaagtctttcttcgcatatttttcccatgctatcaagtccatccaggccttaggtttatgttctttaaactgagacatttttctgcttatcaacttacatgttctttactggaaaaactgtgacagcactttctttgaagacatcagtagggtggatgtaacagaatattgtttgatcacaatataaaacctgtttttgtcacttaattactcatgctatgaaagatgaaggtaataaatgtgacaaaataataattagtgcaattagygacatgtattgagttacttagcaatgtttccttaaatatcctttacttatgaattcaaagagaattttaaaacttttgcatttgtgttttattgtggctttgatttttaagctttttcttttttgagctaaactaatttaatgaggtagattatcctcttgaacaaattcctttttgggaagcatacactggaatttcattaactaatttacgatattatcaaggttacagatatttgtaggatatgggctgaccacagcatagctaatttgtccacaaagttgtttcaactatgaatccttatcacacataagat

SEQ ID NO: 743169 - DNA, 456 bp, Homo sapiens
agaaagaaatgcacaggctgctgctggacaatttctaggaatcatcatcactccttcatctttttacttccaagggtatctctcccaactaagatgactttatggatacctcaggtcactgtagttatcaccattatcttccctcctacacaaggagaaacaaaggcacagggaaaaggccaggggcactagtagaagactctaggaggatgtccgaagtgtcyaatcttaccacccagtgaaggtcttccaagaatcaagggcaaagtgtagatcagaattgttgtgtcatgtgacaatgcatgtcagagtttctctaggtcaccctgcctcatgtccatggcatcacctggcctcaaggacagagtcatggctggtcaatatcaaaagcccaaggccaaccaaatcttgggtcaaccatgccataggactgctcccgtgatattgctgacatcc

SEQ ID NO: 743170 - DNA, 550 bp, Homo sapiens
tgtaccctgcagggaactgtcactctagaaatgtcattgattatgtcaatacggttggaaggaaaaaggaagagaagtattggagagtgaagatgtggcaatagggttgagggcaaaggagaaactaattggctggctttgatattctcattgtgcattgacrtggcacaatgtgggggatagatgaatgacatctcatctctctctagctttaaggatcctaagcatccatgtaacaaggatcaccccacaacacccaccgcaaccacccttagcaatgccaggcccaccaccacccaccactcctcaatagggtcaacaccattgttactcccccaagccaaacacacacacacacacacacacacacacacacacacctccctttgagttgactttgcaaacacacatacctctctttgcgttgactttgatatccagattttctttcctctgagttaaaaagacactcttttcctccaaagacattagcctagagggaagcgtgatcaggactgggtgatatgcaggagtattttgagttttactc

SEQ ID NO: 743171 - DNA, 437 bp, Homo sapiens
agatgatagaaagataaatagaagatagacaataataaagtatgtaagcattcactatatatataaatgatttattgagtatatattgtatgccagtgcttggcgtacattacttctgatcctcatataactctgcaaattgggtttgcaaactgcttttacaaataaraagacaaaagctacggaaagttaagtaagggagtaaagatatagtcaataaattgtggagatgggatttgagcccaggtcactttgatgctaactcctgtgtgctttcggggtcagggacgtgctgctgcccctacttccacaaccccaatatcccatccccttcctcctgcctcccccgtgctcccatcacccctcttccagtgatgttcttgtgaaattctagaatgttaaaagcacagagaaggaaagtgaattgctcatggctg

SEQ ID NO: 743172 - DNA, 636 bp, Homo sapiens
ctcaaaagagaatatccacaaggccagtaaacatgaaaaactgctcaacttcagtagtcatcaggaatatgtaaattaaaactgcagtgcaatacttttacacacccagcagaatggttagaatgagagattccttcttagtgttcactagaatgtggaaaaactgaacttatgctcattgytagtagaaatataagttgttatagttgcatttgaaaactctggaagtttcaaagaaagctggatgtaagcatagccagtggttctactcccaactatgtatccaacagaaacccattctttgttcacaaatgatttgcacaagtatgttcatagcagcaccaatcctaatagctttcaaaccaggaagtaagcaaatgttcatcagtatgaaaataaacacacttattgtggtacacaaatacaataaaatgtagtaaagaatcatttagaatgcatatgacatagtagaagtatctcataaacaaaattttgggcaaaaaaatggcagatccaaaagaatacatactgtataattctatttaaataaacctcaaatacaagtaagcataatctacaagtaaatgtaaatcagcatcttgattgctcttttgaaaggagcaatagtgcctgggc

SEQ ID NO: 743173 - DNA, 619 bp, Homo sapiens
tacttataatctgtaagttatatttcgataaaagctttatctaagaatataaacaataaacagatagctgattatgggcaaaatatggctcaatgttgaaatctttaattttttttaaagaatgtgtatcttatctgtgcatgtgtcggtgagatccatgctgctattctcatcctgcagtaactagaagcagtgtaattactttttgaaaattttgaacatactcttctggaagcatgcagaatccactgttggaaaatacttatttgtagaggtcacaccttaattatttggggccaaaatccactgtacttttggtattatttaataataatattgcttttctgttgagaaaggttggacactgctaattaaatagaattagactcaatgtttccccatctctgctgtcaaaatccattcactctctatgaaaagaytcatgaaacagcaactagtcttcactaacttattttgttcaattaaaattaaattacacaattgaactttttcttgtctttttaatataacattttagttaattgcttaattaaaactgaagcctgacatttgtttcttcctctttagaaaaaaagaaaaaaaaaagaaaacatgttta

SEQ ID NO: 743174 - DNA, 626 bp, Homo sapiens
agtaatgtttatccatcaaaaatatgagacaacggggactagaccttagagtaaaacatacgaattttaatttcatactatgtaacggagaactgttgaatagttcatgagaatgtatgttagttttgataagctactgcaatttacattgtattttatttgggacttctcagtattcaaaaatgactccttactgargctttctgtatgagtgacatcttttctggaacattcactccataacctttaattaatgtgtccttttgtcacttaaaatataatctaaatggttttttttgtttgtttgtttgtttgcttttttggtggggggatagtttaaaccaaagaggaacaaaaataaacactggactcatttttatcatcttgccaagagacacaactatagataagcatccatgggtatgataagcaagaactgaatctcaaatcccattcagggtgctgaaaattccacccttaatatatttgtaaacacattgtcataaaatcaaacggcttgcctgatgttgatgctacaccacttggaaattgtgcaggggacctgaatctaggaaatgtaatttccctgttgcttaccttgtgaaaaaccctatttttaatatcat

SEQ ID NO: 743175 - DNA, 638 bp, Homo sapiens
aaggcttagttggaataagaataagaaggaagaaaactagttccaaagtatcagtatttctttgggagggaagagaggttgtggtatcaatagttcccagctatttaccagaatctacctaaagaggtagcatctcaccagccttttgattaagcattagtgtgatggttaatttttggtgtcattttgactggattaagaaataacctagatagatgaaaaaccattatttctgggtgtatttgtgagggtgtttccgaggagattggcatgtgcctcagtggactgattggaaagattcaccctcaaggtgatcagaaacatccagtaggctgggggtccctgtggaacaaaaaggcaaataaaatatgaattctgttgctcctggagtggggacacccttcttaccctgcccttggacattaaaactctaggctctttggtctttggactctgtgacttgtgccagcagcttctaagsctctcccaccttacttagccttggacagagagttatacctttggcttccctggctctgatgccttcagacttggaccgagccaggctacctgcaacccagggtctccagcttgcacagagcctatcatgagactgacttctcagactacgtaatact

SEQ ID NO: 743176 - DNA, 616 bp, Homo sapiens
agagaaaatgagatttgatctgggcccttagaaataattagcacttgtcttggaacagaaaagataaaaaggcatcacatgtggaagtaacatggataaattttgagccctaagtgtttgtgaagttctaggtatttcgtatgataatttatgtacctgttataacaccagtatgagaatggtaataatatctctattttaaatcaaaaataaaatagagagctaatttaacatgttcaaggtaatagacctattaaacaatgaaacgaaatataaccgaggccastaatagcacacgtctctcacccatcccaagctccccaggtattgggggctatataatttattatcagttaggtctgttggaggacatttgttttcctaggatccagtttactttgttatcctcgttcttattattcagtcagaaaaagaaaaagagagcgaaaaagaaaagagaaggaagaaagactcaccagcagtgaacttagtgcaaggcatggctctatacactgtgataaagtatatataacctgtgattatgggtgctttattatatccctttattcaagaagcaggaacccagccatggtggccctgttaaccatgtagaaaa

SEQ ID NO: 743177 - DNA, 616 bp, Homo sapiens
agagaaaatgagatttgatctgggcccttagaaataattagcacttgtcttggaacagaaaagataaaaaggcatcacatgtggaagtaacatggataaattttgagccctaagtgtttgtgaagttctaggtatttcgtatgataatttatgtacctgttataacaccagtatgagaatggtaataatatctctattttaaatcaaaaataaaatagagagctaatttaacatgttcaaggtaatagacctattaaacaatgaaacgaaatataaccgaggccactaatagcacacgtctctcacccatcccaagctccccaggtattgggggctatataatttattatcagtyaggtctgttggaggacatttgttttcctaggatccagtttactttgttatcctcgttcttattattcagtcagaaaaagaaaaagagagcgaaaaagaaaagagaaggaagaaagactcaccagcagtgaacttagtgcaaggcatggctctatacactgtgataaagtatatataacctgtgattatgggtgctttattatatccctttattcaagaagcaggaacccagccatggtggccctgttaaccatgtagaaaa

SEQ ID NO: 743178 - DNA, 525 bp, Homo sapiens
cttggacaaatgatctcacaattttaaatgtcggatcttactgtagaaaatccttctaaagattacttttaaaggataaatggtagaattttaccttgtcaagacaataaaaatataccttcagaataatttttaaaattctagaatgatatgtgaacaggtacttgcaactggagataaagtttgtactgacagtgtcatatatgagttcaaaatgaattcaaacaactttgatagaagctgtgctatggaagattgaggaagatgactcttaaggggactctggtgatggggatgtcacaagtgttrgagatcatgtgaagagtgataaaagtatttcataaaattcatgtgtgggaaaatcttataaattcacatgattttgtaaattattgaatgtaaattgtatatcactaaattaaatattatagtgatttgactctttaatgtacttgcttcaaagtttatatattcaaactgtcccccccatccctcaaactctttcaactgggaaaatgaggagtt

SEQ ID NO: 743179 - DNA, 425 bp, Homo sapiens
caccattcaacccatcttcaagcctgctgcctgtgtgctctttcaagtgcccatcaatatcccctcaactcctgctcacccaatttctatgccttttgattccctaagaataaaacaaaactcttagttcagcgtttcaaactcaccaaattctgatcccaattyacttttccaactttggttcttactactagcataatagtagcctgaactcgactaagaaatacctgtagtgttctttaatataattgttaatcatattactttgttgtaatttatgtattcttggggatactttaagtcttgtctagaatggatagagtgaaaaagtaaaaatagctgcattttgaaacattatgtttctcagctctctatttctgttcatgctgttctctctggagtattctcccatcctgatatttgct

SEQ ID NO: 743180 - DNA, 617 bp, Homo sapiens
gtgtgtatatcatttcacacaatttctgagagttaaaagttcaggagtggcttggcttgatggttgtggctcagagtctccacagggttgcagccaagctgttggccaggaatactgtcatctgaaggcttgacaggggctggagctctttccatgctcactcacttggttgctggaaggcgttctcagtttcttgttagctattgtggcatgagacttacgccatatgcagtctgtgctcgtcacctcttcaagattttrcagacaataagagggtacttcatttagcattaattgccctgggattagggccaaagtcaggaaaaattataaaatggacaaaggttatgtattacttctttaagtctagtttgttgttgttgagtttctaatattcatctttattaattttatcagcaacgcacacatgaaacattatggatcagagacagatttcttatgaattacctcacagtaaataataagtgcattggtcttcttgcctcaggacttatccctgggacacagtgatgaaaaccaagtcaaataccctgtgtgagtagccagacactccataggttagaaatgaggcaaaaggatttttctgtgcttataaa

SEQ ID NO: 743181 - DNA, 617 bp, Homo sapiens
gtgtgtatatcatttcacacaatttctgagagttaaaagttcaggagtggcttggcttgatggttgtggctcagagtctccacagggttgcagccaagctgttggccaggaatactgtcatctgaaggcttgacaggggctggagctctttccatgctcactcacttggttgctggaaggcgttctcagtttcttgttagctattgtggcatgagacttacgccatatgcagtctgtgctcgtcacctcttcaagattttgcagacaataagagggtacttcatttagcattaattgccctgggattagggccaaagtcaggaaaaattataaaatggacaaaggttatgtattacttctttaagtctagtttgtkgttgttgagtttctaatattcatctttattaattttatcagcaacgcacacatgaaacattatggatcagagacagatttcttatgaattacctcacagtaaataataagtgcattggtcttcttgcctcaggacttatccctgggacacagtgatgaaaaccaagtcaaataccctgtgtgagtagccagacactccataggttagaaatgaggcaaaaggatttttctgtgcttataaa

SEQ ID NO: 743182 - DNA, 617 bp, Homo sapiens
gtgtgtatatcatttcacacaatttctgagagttaaaagttcaggagtggcttggcttgatggttgtggctcagagtctccacagggttgcagccaagctgttggccaggaatactgtcatctgaaggcttgacaggggctggagctctttccatgctcactcacttggttgctggaaggcgttctcagtttcttgttagctattgtggcatgagacttacgccatatgcagtctgtgctcgtcacctcttcaagattttgcagacaataagagggtacttcatttagcattaattgccctgggattagggccaaagtcaggaaaaattataaaatggacaaaggttatgtattacttctttaagtctagtttgttgttgttgagtttctaatattcatctttattaattttatcagcaaygcacacatgaaacattatggatcagagacagatttcttatgaattacctcacagtaaataataagtgcattggtcttcttgcctcaggacttatccctgggacacagtgatgaaaaccaagtcaaataccctgtgtgagtagccagacactccataggttagaaatgaggcaaaaggatttttctgtgcttataaa

SEQ ID NO: 743183 - DNA, 604 bp, Homo sapiens
tccctattaatgtataagatcaatacctccacaggtgttcagacctcatcttcctttacctcttcattgacttagctcattccatttcctccattctctccagcaccatcaatttcttcctctctactatgataatatgcaaatctaaaatacaaacatgacttgatatcatctatcttgaaaagaaaacattcttgggctcttgtcccagctgtaggtactgacccatttatctgcccccattactgcaaattcctccaaagaattgtctaaatgttatattcactgtttctgctttctcatttattttttgtttgagatggagtctcactctgtcgtccagtctctgtcacccagtcttgagatggagtctccctctgtcggctcactgcaacctctgcctcccagrttcaagcaatcctcccacctcagtctctcaagtagctacgattacaggcatgtgccaccatgcctggctaattttgtttgtattttttagtagagacggggtttcatcatgttagccaggatggtctcaaactcctgacctcaagtgatccgcccacctcggcatcccaaagtgctaggattacaggcatgagcc

SEQ ID NO: 743184 - DNA, 628 bp, Homo sapiens
tcacagacccactagggagggcccactatgtcctctcacccacagctggggaggggagctctttggaggaaaatcaggcagagatcccactaggatctattcctgggaaaacaataatgtcagcaaagatgctctttacgtgaacacaacagaaataacctcagtgtccaacaatagggattgattaaaaataagtgggggtataatcatcccagactctgcgatcattaaaataacaaaatacaaatacagatatcaatgtagaaagatgttcgcactatatagttaggtgaaaacaagcaagttacaaaagaataggaccacatttttataaaaaagaaatatgggcatggaaaaaagtctgaaaggccatttattaaggtctaagtggtgaaattaggaatgatttttcttttcttcccttgsctattttcaccttctgttttcacaagtgcatattctcatttgtttgtagaaaggtacccattcaaggctgtgctgtgaaggactggatagcagctcaagtcagaacactgccctctggaaaacctctctcagtggcagttctgggtgacatgggctccggttcaggacatataagctgttgacatttataattcccatgcag

SEQ ID NO: 743185 - DNA, 636 bp, Homo sapiens
  misc_feature 1, 2, 3, 4, 5, 6, 7, 8, 9, 10, 11, 12, 13, 14, 15, 16: n = A,T,C or G
nnnnnnnnnnnnnnnntagccctcccctgggggtctagaaaatccccttaagctgcaaaactggtagtaatttgttatgcagaaagagaaaactaatacaaggctgggtgcaatgactcacgcctgtaatcccggcactttgggaggttaaggtgggcagatcacctgagccgaggagttaragaccagcctgggcaacatggcaaaaacccgtctctacaaaaaatgcaaaaactagctgggggtggtggtgtatgccagtggtcagctacttaggaggcagaggtgggaggatcacttgagcccaggaagttgaggctgcagtgagccatgaccgtgccactatactccagcctgggtgacagagtgagaccctgtctcaaaaaaaaaaaaaaaaaaaaaaaaaaacaccaaaaaaaccccaatattagtgtttctgctggtggataaatcactcagtttttttctaaaaatgtcttctcacgtttactcttgaaggatattttagctggctgtagtattttaggtgagcagttttcttttgcactttgaagattactgttttctggcttccactgttcctgttgtgagaagtcagccgtctgttgctcctttaataataatcttttttttgcc

SEQ ID NO: 743186 - DNA, 636 bp, Homo sapiens
  misc_feature 1, 2, 3, 4, 5, 6, 7, 8, 9, 10, 11, 12, 13, 14, 15, 16: n = A,T,C or G
nnnnnnnnnnnnnnnntagccctcccctgggggtctagaaaatccccttaagctgcaaaactggtagtaatttgttatgcagaaagagaaaactaatacaaggctgggtgcaatgactcacgcctgtaatcccggcactttgggaggttaaggtgggcagatcacctgagccgaggagttagagaccagcctgggcaacatggcaaaaacccrtctctacaaaaaatgcaaaaactagctgggggtggtggtgtatgccagtggtcagctacttaggaggcagaggtgggaggatcacttgagcccaggaagttgaggctgcagtgagccatgaccgtgccactatactccagcctgggtgacagagtgagaccctgtctcaaaaaaaaaaaaaaaaaaaaaaaaaaacaccaaaaaaaccccaatattagtgtttctgctggtggataaatcactcagtttttttctaaaaatgtcttctcacgtttactcttgaaggatattttagctggctgtagtattttaggtgagcagttttcttttgcactttgaagattactgttttctggcttccactgttcctgttgtgagaagtcagccgtctgttgctcctttaataataatcttttttttgcc

SEQ ID NO: 743187 - DNA, 650 bp, Homo sapiens
ttagtaatttgtatttttcaaggaattagtacattttatctgttattggatttatgtaccaagaatggtttgttgaatttctttattatctttttaatgtctgcaaagtctgtagtgatatccatttatttattcctgatattggtaatctgtgtctttttttccatttttagtcagttcttattaagcagtatctgtgtacttttggcayttttcaggttttctacaataaacatttgttatttcataattagaaaaatgttataataaaattttaaatatcattttaattttaaacttgcttgtttctgcatttaaattaatttaaatgtataataaattttataacatgaggctgatatatggactaaaagtgataatgcacataaaaatactgtgtaatttatacacatgttagcattataattacagataagcaaaggaagacagttgtataattgaaatagaaaaatataagagttttctagcaataaataaatggcaacatttatattgtgacttggggaatttagaagaacctaaattttaaaacatgttttctgacaacatttagagcaagattgcccacaattagacatatgacttttatttatttagaaattgtaatcagttctggaaatcactaatta

SEQ ID NO: 743188 - DNA, 604 bp, Homo sapiens
cagctaacttgatgtttagaaaagaaaaaaacctcctgttcagcaatcattaagatctagagctgtggtaattccctctaataaaataatttatgattttcttggagttgaaaaaaggatggtgcacctgagcttctgatttataaaaaatgcatttcaggctctttttttttaactgcatctttatttcagttttacagttcctccgtcaaagcaaataataatagtaagtgctttacaagaaggtaaaggccacagaaggaggaaagacagatacaataaattgaaaagagaaaggggtggacttctggaatcatcttggagagctctcagrtgtgacacagtggccttccctgaccacccaacctgaagtgttcccccagcatcccccaatcattccattttaattgttgaaagataactcacctgtttcttcctatgcattatctgtcctcaactctaggagtcccaaagacaaggacccatctctttggtttgccagtgtcctcacagtgacaggaatgacacccagcaaagagcagctgctgaatacaaatttgctgaatgaataaatgcattaaatattttaatttttttcctcttg

SEQ ID NO: 743189 - DNA, 604 bp, Homo sapiens
cagctaacttgatgtttagaaaagaaaaaaacctcctgttcagcaatcattaagatctagagctgtggtaattccctctaataaaataatttatgattttcttggagttgaaaaaaggatggtgcacctgagcttctgatttataaaaaatgcatttcaggctctttttttttaactgcatctttatttcagttttacagttcctccgtcaaagcaaataataatagtaagtgctttacaagaaggtaaaggccacagaaggaggaaagacagatacaataaattgaaaagagaaaggggtggacttctggaatcatcttggagagctctcagatgtgacacagtggccttccctgaccacccaacctgaagtgttcccccagcatcccccaatcattccattttaattgttgaaagataactcacctgtttcttcctatgcattatctgtyctcaactctaggagtcccaaagacaaggacccatctctttggtttgccagtgtcctcacagtgacaggaatgacacccagcaaagagcagctgctgaatacaaatttgctgaatgaataaatgcattaaatattttaatttttttcctcttg

SEQ ID NO: 743190 - DNA, 611 bp, Homo sapiens
cttattctgaacacccattatgatgtttggcataccatttgctcccaatggatattaggcaggactgactgacagagaaggtactaaaatatgtatacatatagacatatatgtatatatatgaccatggctagcaccaaacatgagcaagagctatctgcaaatgcatctatttgcatatcaattgctaaaactagtggaagtgtttttaatgcttaccttgatcacaggctctaagaatatgaaagtaataacttaccaagcytaattccttactgtcaaaatatcagaggctcaatcattctcacaaaacccaggcacagttcaatttaaaatgacaactaggaaactttaggcttaaccacgtcaactgaacaattaacttctttatttgaaacatataaaatattttatgtatttgctaatcattctaccttgttacatatgagaagcttttgagttatgccagtgcttaatgtctctgtttttaaacttttctaaatataagaaatcacacactaatacaggaataaatgacataaaaaatccttgtgacccaaagggtatcactactaactttctgatgtttttcctccatatctttaatctga

SEQ ID NO: 743191 - DNA, 401 bp, Homo sapiens
ccatctttttttatcctaattactcattcttatcctagttatccaggaaatcataaattgctttgtcattaacagtaatcatatgattttctcaaatggaatgtggtaagggtgaacaaaaatgccacaatattttaaagatacatatggacaaaagttttatttcatgactaaaaccccaggatttctctgatttgttctaatttcaatatacatcctctttattttaaaccaatatgataagacagatwtttttaaaaaaacatcttttctttacagtgttgagtgtttacaacatggtgccagatatttggaaagaaataagtgtggctgaagtacgaagaggggattatttcatctattaaattgtttaatgacaactcagtcacaccccaaggtca

SEQ ID NO: 743192 - DNA, 376 bp, Homo sapiens
aaagacatgcatgacatataaatgaatcagtcatgagttacagaatatgttcactgtgatgttattaatatatattttatatctatatctacataattagaaataatattcaacaaacttttttaaacttaagacaggatctctctatgttgcccaggctggtttcaaactcctsagctcaagtgatcttcctgagcctcctgagtagctgggactgtagatgtataccatcacccctggctaaacacaaacttttaataatagtcatctctatgaaaattggtaagtggaggaggggttttcattctcaacttgtgttttaccattgtttgaggttttaaaaatttagcaattttactatggctttttaacattt

SEQ ID NO: 743193 - DNA, 595 bp, Homo sapiens
ccttctgtgggcatgccccaggcaaggagaggagtcacatcatcccgggtgatagatccagggttatgtaacaatatgtgttatgggcaactctcaggtaagagaggagagttgcatcaaatagatgatggacccagaggtatgttacgatgccttctgtgaactcgatccaggcagaagattcacatcatcaacttggtgctaagcccagcaacgtgtcacaatccgttgtgtgtaaagggaccaggcaggagaagagaatcacattaccaggctgatgagcacagagatatgtcacaatgcccctgtaaggcagggcccaagctgttgggttacatagcctgagtagtggacccagcaatataacacagtgtcccatatgggcagtgcacaagccggagagtcacataacctggatgygaggccaagctatatataacaacgcttcctgagggcagcgccaaggcagaagaggagactcacatctccgggtgcaaggtctagcgatatgtcaaaatgctcactgtgggcagtgacaaggaaggagaatagagttacaccctcaatgtgctggatccagcaatatgttaatatc

SEQ ID NO: 743194 - DNA, 454 bp, Homo sapiens
gtgctggatccagcaatatgttaatatcccatctgtgggctgggtccatgtgagaccatcaagtcactcaggtgctaggcaccggcaaatttcaccatgaaagctgcagaatggtccaggaattagattaacaatcccacaactgtctcagttgtaggcatgacattcaacacctcctgtatgttgggtctaagctcacgaataaccctctcaacaccagactggatttgtgcatgagagtctcaattcctctgcagamtgacctgtgttcccgtgagaggatgacaatagttactgttggctgggtgtgcatatgagtgtcacaatctcacctgtgtgctcggcccagttagcacgctctgtgtactacccaatggccctatacactatgcatgagagtcgtaatcaactttgacaccttcctaatggtagggacccatgatcgtacttgtag

SEQ ID NO: 743195 - DNA, 454 bp, Homo sapiens
gtgctggatccagcaatatgttaatatcccatctgtgggctgggtccatgtgagaccatcaagtcactcaggtgctaggcaccggcaaatttcaccatgaaagctgcagaatggtccaggaattagattaacaatcccacaactgtctcagttgtaggcatgacattcaacacctcctgtatgttgggtctaagctcacgaataaccctctcaacaccagactggatttgtgcatgagagtctcaattcctctgcagactgacctgtgttccygtgagaggatgacaatagttactgttggctgggtgtgcatatgagtgtcacaatctcacctgtgtgctcggcccagttagcacgctctgtgtactacccaatggccctatacactatgcatgagagtcgtaatcaactttgacaccttcctaatggtagggacccatgatcgtacttgtag

SEQ ID NO: 743196 - DNA, 458 bp, Homo sapiens
atgttatctcagactacgagagactgttacatcttggtgcactgctgagactacgacacttggtttctttgagtttgactaaatattttacatgagtgtaattatacagctttcctttttgactgtcttattttacttaacagaatgttttgaagatttgtccttattgtagtacttttcaagatttccttatttttaaggctgaatgctatcccagtgattgtacgtgccctgtttgctgaatctactcatccttaagggtacatttgyttccaggtaacatgtttgtgagtaatactacaatgtgcatatatctattccatgttctgctttgtctgtttgggatatttttcatacactgattcagtaccatgtgtattcccttgcttttgttgtctcatccgttgatgttacatcccccaaattattgccacgaccagttgtaatgaagcttcacc

SEQ ID NO: 743197 - DNA, 390 bp, Homo sapiens
tctgtaatgaacatgggaatgcaaatatctttttgacacagtaatatcctttcttttggatatacacccagaagtaaaattgctggatcatataatagatatatttttaatttctttcagaaacctccatagtattttctataatggccatactaatttacaattccaccaacaaggtatacatccactcttttttatatcctcattagttcttgatttatttatttatttatttttattatagccaytctaatgggaatgaggtggtacttcattgcagtttggatttgcatttccttggtgattagtaatgtagagcatctttttgtgttccagttagccatttttgtatctctttttgacaaacatctattaagatcttttgtattt

SEQ ID NO: 743198 - DNA, 560 bp, Homo sapiens
aagacatagaggactctctaacactccaaaagagattcagctatacatgcagctgaggacctgcctgctctgtagagggatggcagagcagcagccaccagctttagtagctttaagctcctcctctcatagggacaggccacccccacacaacccccctaacttcataggctctagctgtcaggtgcacctgggggactgtcttcctcccatctcattagctctcgaagacagtccagctcaatctaaaacctaccttaggatggcgagwtgtaggctctcctccattctcccagtgtagtgtgacttctagagagtgcttctccatcctcttacctcagatgatgtgaaaagagccgtttcccgggcagttagatgttcagtgacataacaggcccagcatgcgcagggcctggccccacagcctggcacctctcccctacctggccttcacgctggacttttctcttctgccacaaatatcaggtgatgatcacctctgccacactctcatgagcttggtaagtagcaggggtgtaaacctcaacagatttcctgtg

SEQ ID NO: 743199 - DNA, 587 bp, Homo sapiens
tggttgttagtggcagccgggagctggatgggcctggccccatagcctagtgaaaagtgggaccctcttcttccagagcatggaagtctcagaggctggaaaaaggtgcctgagtggcctgccaaaaagcataaggctagaagggctggaaggaaccccaacagtcttcaaggtgcctgagagggctgggytcattccagctttctttgctttcatcctgatagcaagaaaacctgctcacacatggcaggcgggcctgaggctgccattccctcatcaggggctataggcacctttaatgtggctctttcttgaagcagctgctcaggccggttctcgaagagaagttccctcattatccacaggtccttgttccagccccgtgtctgcagagggactagggagggagaaaatctctcagcctgtgccccacaacctgctctgagatatctcttttgttacttcctcacggacagcatcaaacttccaaatgaacagaccagcatggagcctccagaaaagtgcacagaattctgtctagtacccagatggaagggggttcccagtgagggcagggccaggctgca

SEQ ID NO: 743200 - DNA, 654 bp, Homo sapiens
tgcacatggggaattctccaggatgggctgtatagtagatctcaaattaaatcaataacagatgaaatgctagaaagtttacaaaattgtataaattaaacaactacacaattacaacttaaagaattacaaaattgtataaattaagtaaaggaaagaaatcacggaagaagtaggaacatacagaggaagaaaaatgraaacaaaacatatcaaaagttatgggaaacagcaaaaacagtgttaagatgaaaagtttgcagctaagatacatttaaaaagagcaaagatttcaaataaataataactttatcacctagtaaattagaaaaataacaccaaattagatgcaaagcaaagagaaagaagaaagtattgaagattttagcagagataaatgcaatagagattacacaaacaacagaattccaaaaaaccaaaagttcactctcagttcttcaaaaattaacaattggcaaaacttcagctacacacacgaaaaattaacagcatattcacatactaagatgagtaatgaaagtgggacattactactaattcaaagaaataaaatgtttaaaaaagtgtactgtgaactatgataggatgataaattggaaaacctagataaagtgggcagattcctacttatgc

SEQ ID NO: 743201 - DNA, 565 bp, Homo sapiens
gtggtgggtcttgtggagatgcagaaaggatccatcccaggcacttggctgggcttgagtcagcatagcctttaggccacaagacctgttggtttgggtactggtctggacataagtccccatcttcccagaaatatcatcttttgtctgcaacaactggctggagaaatatttcagaaagatrtgtgtctggaacacccaaagacatacttttcctttctccttggcataggccttgcagcactgaagaaagaccaggtttgcaatggagccttcaacagtcttcatccctatggaactcagggtctcatagggtgacaggagaggagacaaagctaacttgggaagagtctctgtccttcagcttctcccctactgaaacactatatattgggcccacagttcatcacaaaacacacatgcatctctttctttctctcacacccacatcttgggaacccaaaaacttgatggcaggtagctctgggtatccttggtctggcattcacccactgggaatctaagctgtcctaaagctcttttcaatcacttctcactgtttcca

SEQ ID NO: 743202 - DNA, 525 bp, Homo sapiens
  misc_feature 29: n = A,T,C or G
aggtgtagtgccctgtgcccctcactgtnatgggggtgaatatgggcttcgcaggacatgaaattcatcaaacagttgctggttgaaggtggaaaaatcttgcgggaccgacctcaagagcagattttgtggtgcactgttttatactgtagccctggaaagaaaacctggctgtgccrtgctttatgttcgcctgcattggccctgttcagaggcctgagcacgcgtggacacctaagtctgcccaaactttccccatcccaatattctctgtggtattgagtatgacaccctgtcttcactgagcatgtgctcatacagttttgtagccaactcttcattttacaacaggaagactgagacccccaaaaaaggcaaagacttgtccagatcccagaaattgggcagagcacagagtattagggagggatccagcttcctaggccttgcatgcaccccacccatcaggtttgctttggaaatgagagcccctgagtcctggaaaaccctgtgctctactttcta

SEQ ID NO: 743203 - DNA, 552 bp, Homo sapiens
agatgataacaatttagagtattctgaatttcagtatgtatttaccatttttagtgacatttatactttagtatttttcatattgttagttagcatttcgtcatatcaatgtgaagatttcttccagaccatggctggagaaggaaagaaggtgtgttttgcctgattcagggactatagagagaaccaagttctgcaggcctgtcacctaagtctcagatgagtatgaattctyttgtgtttttcacagatttttgcagtggcaggaccaagttcaaatgagttatagccaagtctacagtaagatgtggcagtattctgttttgaaccgaggaccatgattggcaagcttgccacttggtcaagtgcttaccctctaaagatgtcttccttggtctttgcctccagctgggtgtcacaaactctgaactggattccaaggctttcatgaatgcacttatgtttcctgtggcagctgcattatgttgtgggggatgtggatgcagaacctcccattctgtcatcttgcttatgttactctcctttatgttt

SEQ ID NO: 743204 - DNA, 551 bp, Homo sapiens
atccctgggcccaacacttaggggataaaaggcttattcctctaccttatgcacagagaaacttgtgacgtttttctgcattcatcaccaaggagatgtgactctcctacctgcatcctgaccacagagaggattgtaacatattgctagatccagcacccaggtgatgtgactctgctgcctggttcctaatttaaggagtggattgctacatacccatgcctgagcattcaggtaatgtgtctctgttccctggtccctgttctcagggaagmgacatatccctggcccagcgtccaactgattttactctcctgctctcttcctatatgaaggtgtaattgtgacttatatcttggaacacaacacacaggtgcaatgatgactttcatatgtcacaccagccaataggagagatcctgcttctcctaccgacacttaggagaaatgaaaaaaaaaaaatccctgggtctcctcgttaagatcatccactctctcacatattacagaaagccctcgggtggtagagagtcttatcacagggcccagca

SEQ ID NO: 743205 - DNA, 515 bp, Homo sapiens
tattcctggcatattgattggctgaggagatagaattgcttgaggccaggaatttgataccagccttgtcaacatagtgagaccccatttatacaaaaaacttgaagcattaaaaacatttagcctggtgtgatagttccaaactgttgtctcagctatgctggacattgaggcagaggattacttgagccaggagttctaggctacagggagctatgatcgtgctgctgcactccaaacagggcaactatgcaagatgtttcaaaaataaaatcttttattattcttcacccctatagtctctccagaacttgtgcactatgtagcagaaagaatcaaactccccaagagtttggttcttgcttatgattyggttttctgctgcttggctgccccgtcatgtccccattttgtataaataagaacccccaggtgaagtggagtttctccccagcagagggtctcaccaaggccccaggactggcactttaggtggaggcttgcctttgagcctc

SEQ ID NO: 743206 - DNA, 596 bp, Homo sapiens
attctcctgcctcagtctcccaagtagctgggattacaggcatgcgccaccacatctggctcattttgtatttttagaagagacggtggtttcaccatgttgtccaggttggtttcaaacccttgacctcaggcgatccacacgtctcagcatcccaaagtgctgggattacaggtgtgagccaccgcaccctgtcaagatttttttaaagctctaatttttctcctactgggtttttctcgtttgcgccctccatctttctctctgtctctttttgtgtaaacctttttgtctaattctgtctattgtattcctcaaacacaggaagcaagctccaatgctatgagatgctccrtgtagagacccacataacaaagggtgaggcggtgctcagacgagtagagagaaggaaagtcaggctctctgtccacactaaaccctgtcaattttcacatgagtcagcttaaaggctcatgctttcccagtccagcttcagttaagaccacagcccccagtctcataaaagacctgaaggcagaggtagccagctgaactgtgtccagattctggtccacacaaattatgagatattatat

SEQ ID NO: 743207 - DNA, 596 bp, Homo sapiens
attctcctgcctcagtctcccaagtagctgggattacaggcatgcgccaccacatctggctcattttgtatttttagaagagacggtggtttcaccatgttgtccaggttggtttcaaacccttgacctcaggcgatccacacgtctcagcatcccaaagtgctgggattacaggtgtgagccaccgcaccctgtcaagatttttttaaagctctaatttttctcctactgggtttttctcgtttgcgccctccatctttctctctgtctctttttgtgtaaacctttttgtctaattctgtctattgtattcctcaaacacaggaagcaagctccaatgctatgagatgctccatgtagagacccacataacaaagggtgaggcggtgctcagaygagtagagagaaggaaagtcaggctctctgtccacactaaaccctgtcaattttcacatgagtcagcttaaaggctcatgctttcccagtccagcttcagttaagaccacagcccccagtctcataaaagacctgaaggcagaggtagccagctgaactgtgtccagattctggtccacacaaattatgagatattatat

SEQ ID NO: 743208 - DNA, 614 bp, Homo sapiens
agcattatacaaaatacccatgtaaaaaacctgtgtaagtacctcctaaatctaaaataaatttgaaattctaaaaagaggtcttactctctcacccagacaggaatacaataccatgattatagctcaatgcagcctcaagttcctggggaactcaaggaataatcttacgtcagcctccaacttcctgagactacaggaacattccacaatgyctgagtaatctgtgaaaatattttttaccaatagcttctcacaatattgcccggggtagtctcaaactcctggctttaattaattgatagggtttcgctctgtgtccccaatcaaatctcatcttaaattgtaataatccccatatgtcctgggagggaccctgtgggaggtaattgaatcatgggggtgggattttcccatgctgttctcatgataacaaataagtctcatgtgatctgatggttttataagtggaggttcccctgaacagtctcttgcttgttccaataatggtgagacctccctaaccatgtgaaactgagaggccattaaaccttttttcatgataaattatgtagtcttgtttatgtccttattatcagcatgataatggatta

SEQ ID NO: 743209 - DNA, 614 bp, Homo sapiens
agcattatacaaaatacccatgtaaaaaacctgtgtaagtacctcctaaatctaaaataaatttgaaattctaaaaagaggtcttactctctcacccagacaggaatacaataccatgattatagctcaatgcagcctcaagttcctggggaactcaaggaataatcttacgtcagcctccaacttcctgagactacaggaacattccacaatgcctgagtaatctgtgaaaatattttttaccaatagcttctcacaatattgcccggggtagtctcaaactcctggctttaaktaattgatagggtttcgctctgtgtccccaatcaaatctcatcttaaattgtaataatccccatatgtcctgggagggaccctgtgggaggtaattgaatcatgggggtgggattttcccatgctgttctcatgataacaaataagtctcatgtgatctgatggttttataagtggaggttcccctgaacagtctcttgcttgttccaataatggtgagacctccctaaccatgtgaaactgagaggccattaaaccttttttcatgataaattatgtagtcttgtttatgtccttattatcagcatgataatggatta

SEQ ID NO: 743210 - DNA, 598 bp, Homo sapiens
aattcaaatataaattaaatatcacattgtcataatgtgtaccgagttaaaaaattatcattcaactcatgatatcaagctttaaaagcaaaaatacaattaactgctctgagaaaacatacccccccagaaaagaaacacaacaacacagaactgaaaataagaagagagattttaatgcataaaatcctgaatacaacataaatatacaatgaaaaataagccctttttgtttttttttgagacagtctcaccctgtcgcccaggctggagtgcagtggtgccatctcggctcactgcaagctccgcctactgggttcacgccattctcctgcctcatcctctckagtagctgggaatacaggcacccgccactatgcccggctaattttttctatatttagtagagactgggtttcaccgtgttagccaggatggtcttgatctcctgacctcgtgatccacccaccttggcctcccaaagtgctgggattacaggcatgagccaccgtgccgggctgaaaaataaccctttagatatctacagctttaaactgtgtgcagtcatgaaaagcagacattagaagtcattggcatt

SEQ ID NO: 743211 - DNA, 530 bp, Homo sapiens
aacaacagatgctggtgaggctgtggaggaatagaaacacttttacactgctggagggactgtaaattagttcaaccattatggaagacagtgtggtgattcctcaaggatctagaaccagaaataccatttgatccagcaatctcattactggrtatatacccaaaggaatataaatcattctagcataaagacacatgcactcatatgtctattgcaccactgtttgcaatagcaaagacttggaaccaaccctaatgctcatcattgatagattggaaaaagaaaatgtggcacatctacaccatgaaataataagcagccataaaaagaatgagttcatgtcctttgcagggacgtgaatgaagctggaaaccattaacctcagcaaactaacacgggaacaggaaagcaaacaccatatgctctcactcatatgtgggagttgaaaaatgagaacacatggacaccgggaaccaaagatcacacactggggcctgttaaggggttgaggtcaaggggagggagaa

SEQ ID NO: 743212 - DNA, 530 bp, Homo sapiens
aacaacagatgctggtgaggctgtggaggaatagaaacacttttacactgctggagggactgtaaattagttcaaccattatggaagacagtgtggtgattcctcaaggatctagaaccagaaataccatttgatccagcaatctcattactgggtatatacccaaaggaatataaatcattctagcataaagacacatgcactcatatgtstattgcaccactgtttgcaatagcaaagacttggaaccaaccctaatgctcatcattgatagattggaaaaagaaaatgtggcacatctacaccatgaaataataagcagccataaaaagaatgagttcatgtcctttgcagggacgtgaatgaagctggaaaccattaacctcagcaaactaacacgggaacaggaaagcaaacaccatatgctctcactcatatgtgggagttgaaaaatgagaacacatggacaccgggaaccaaagatcacacactggggcctgttaaggggttgaggtcaaggggagggagaa

SEQ ID NO: 743213 - DNA, 530 bp, Homo sapiens
aacaacagatgctggtgaggctgtggaggaatagaaacacttttacactgctggagggactgtaaattagttcaaccattatggaagacagtgtggtgattcctcaaggatctagaaccagaaataccatttgatccagcaatctcattactgggtatatacccaaaggaatataaatcattctagcataaagacacatgcactcatatgtctattgcascactgtttgcaatagcaaagacttggaaccaaccctaatgctcatcattgatagattggaaaaagaaaatgtggcacatctacaccatgaaataataagcagccataaaaagaatgagttcatgtcctttgcagggacgtgaatgaagctggaaaccattaacctcagcaaactaacacgggaacaggaaagcaaacaccatatgctctcactcatatgtgggagttgaaaaatgagaacacatggacaccgggaaccaaagatcacacactggggcctgttaaggggttgaggtcaaggggagggagaa

SEQ ID NO: 743214 - DNA, 179 bp, Homo sapiens
aaggacctgcacaaactgtaaagttccttgtcatcctatggaatgcagggaaacagtccattttaccaaaggctaaggctaaaatackagaatttgcagccctaccactgaaaaggaggtccaaaattgtattggtttgtttggattctggagacatcatattccccacttgggtaaca

SEQ ID NO: 743215 - DNA, 703 bp, Homo sapiens
agaactagtcagctggggcttggatccggtaaaaacccaaatcctatctcaaggatgggaagttaaccctagtaaaattcaaggacctgcacaaactgtaaagttccttgtcatcctatggaatgcagggaaacagtccattttaccaaaggctaaggctaaaatacgagaatttgcagccctaccactgaaaaggaggtccaaaattgtattggtttgtttggattctggagacatcatattccccacttgggtaacattttacaacctctgcatgcggtcactagaaaacgctatgactttcactgaagacagaaagtgagcgtggcttttcaaccagccaaacaagcagagcaacagtatggcccttacaggatgggmcagtagaactgcaagtaactgtcttagatcaacacgctcattggagccttaggtagaaacaagatgggaatagatacctttggggttttagacccagaagctgtcagaggctagcaaagcttatactctttgagaagcagctgttgacctgctactgggctttacaggaaacagaacacctttgtcttaatcatgatgtttttatgaggccccaaattcctaatatgacttgggtcatgagctccctcaaacctcattggatagggtacactcaagaaagtaaatggaaatggcacatacaagaccaggctaagccggaacc

SEQ ID NO: 743216 - DNA, 703 bp, Homo sapiens
agaactagtcagctggggcttggatccggtaaaaacccaaatcctatctcaaggatgggaagttaaccctagtaaaattcaaggacctgcacaaactgtaaagttccttgtcatcctatggaatgcagggaaacagtccattttaccaaaggctaaggctaaaatacgagaatttgcagccctaccactgaaaaggaggtccaaaattgtattggtttgtttggattctggagacatcatattccccacttgggtaacattttacaacctctgcatgcggtcactagaaaacgctatgactttcactgaagacagaaagtgagcgtggcttttcaaccagccaaacaagcagagcaacagtatggcccttacaggatgggacagtagaactgcaagtaactgtcttagatcaacacgctcattggagccttaggtagaaacaagatgggaakagatacctttggggttttagacccagaagctgtcagaggctagcaaagcttatactctttgagaagcagctgttgacctgctactgggctttacaggaaacagaacacctttgtcttaatcatgatgtttttatgaggccccaaattcctaatatgacttgggtcatgagctccctcaaacctcattggatagggtacactcaagaaagtaaatggaaatggcacatacaagaccaggctaagccggaacc

SEQ ID NO: 743217 - DNA, 648 bp, Homo sapiens
gcctcatcctttcttaaagcccaggacacacacgcccttgccataagctgcctccctggacccccacagacccagcattatttgtctgttcatccttcccagggattattttctaatgagcatcagagccttgcttcccagaagggtgttgaggaagccaagtgatgctcgccatacttcagagaaagggccagttacgaccaaattaagttagaggatcctggattctacagccttctgggagagtaaacaagatacagcatatttacagctaaagattcctacaataatgaaacatgctcgacctcctttgactcagcatttccyaggctctctgaccacagaatcctttgttcccataacatctattaatcgtccccaggcgtggtgggtggtgtctcagggacccacttttgaaaagctccatgaggctctggtgtgcagcacatccaccctcccctggccggtccttggggtgcaggtaggggtggatccaggtcttacatctggtctgattggccttttccttggcaccatgacctgtatgttgctgatgacagcagtgactggggtcactctcactcactcatgcagaacagacttggggagatggcagattgtgtgctgacatacaaagaagacacgagc

SEQ ID NO: 743218 - DNA, 540 bp, Homo sapiens
  misc_feature 9, 10, 14: n = A,T,C or G
tttttaatnnatcngccaagggacttgggggggggcgcatcataaagatgcttcaatgagcaattttgaattcccttaaagcaaataaaaaaaaattgaaactctcggcagagaaatagaacttataaaagaagaactaaatgaaaattatagaaaggaaaaatacaataacacataaaaataccagctggatggatgcaacagtagagcagaaatgacakaagatagaattagagaacttgaagaaacatcaatagaatttacccaacccaacctggtcaacagagagaaagtagactgaacaaattaacagagtctcaggatctgggcaacaataacagaagaactaacatgtgtataattggagctccagaaagaggaggcagagactggtccccaacaacactgaaaaagtaaaaactaaaaactttctaaatttggcaaaagatataaacctagagattcaagaagcagagtgaatcccaaataggataaagccaaagaaattcatgacagacacatcataattaaacttgtgaa

SEQ ID NO: 743219 - DNA, 591 bp, Homo sapiens
atgagcctataaaatcaaaacaagttatttattcacaagatacaatggtggtacaggcattggataaacactaccattctgaaagtaagaaactggccaaaagaaaaaggctataggccccatgcaagtctgaaacccagcaggatcggcattaaatcttaaagctccaaaataatctccttgactccaygtcccatatccagggcatactggggcaagggttggattcctaaggccttgggcagccctatccctgtggctttgcaggttgcagcccctgtgactgctatcacgggttggagttgagtacctgtaacttttccaggctcaggatgcaagctgcccatggctatgccattctggagtctggagggcagcagcccccttttcacagcttcactaggcagtgcactggtggggagaactctttgtggggactccaactccacatttcctttctgcactttcctagtagagtctccctgtgagggttctgcctctgtggaaggcttcttcctgggcacctaggcttcctcatacatcctctgaaatctaggggaaagattccaaacctccttcactcttgcattc

SEQ ID NO: 743220 - DNA, 594 bp, Homo sapiens
caatacacaggtactatttctgtcttattgaaacattttaattacaaaaataatagtgcatacattcatgatacaaaaaaaaatctgacaatatggctaaatcacaacccctttccttactgcattcctccaaaattcagttcccctcagaaataaccacaattcaaattcttgtacatattattttaaaatatattttaggcttttccttaaatcgatatactagacaaaatacattgtatgtttttaatgtacctggacaaagatgtacatattcttttgcctcttgcacttgtcacttaatgaaataaatgctgaatcattctgtgagagcacctatagayatgtctcattcttttaactacttcctacaattctaaaatgtgtatgtgtcataattgatttaaaaattctcctcctgatggacatgtaagttgttttccattttttgctatgactaataaaattgatatcaacatcactgaacataaattattgggcaaatgtgggtgttttcttgtaggaaagacatggaaaactgagaattgaattaaagtggaaatagtgtgatgattgtaagcttttatgaatatt

SEQ ID NO: 743221 - DNA, 563 bp, Homo sapiens
atgtgggtttgcaaatgtatctataataatgttcaaagttgcaaagtgagctttgttgattggcagttgccgtaacagtgtgtctgtgagaacagcacactcggttcgtgctccggaatgctgggatgagcagtggcggggcacagtcagagccctgtggccgccatgatgttttggtgacccacacggktgggcactctcctgatcctcccactctgacctgtggctgcccctgtccctgacgattgcctctgcagtccaggtggatgcatctgtggtcccctgacctccctgcgaggagctctcccaggcactttgcatcccccaagcacaggtggacgacctcgtctccccccaccctcagcaggtcacgacacatgccacaggtcactcaacaccgcagcccctcaggctcccgcccacagtgctgaggcttgaacgtgcaggcgcccctggctgtttgccctggacaggcagggcccgtgggctccgtctgcagaggccacccctttgcatggccatcacttcctaagagctcccaccgccccctctgaggctctcac

SEQ ID NO: 743222 - DNA, 563 bp, Homo sapiens
atgtgggtttgcaaatgtatctataataatgttcaaagttgcaaagtgagctttgttgattggcagttgccgtaacagtgtgtctgtgagaacagcacactcggttcgtgctccggaatgctgggatgagcagtggcggggcacagtcagagccctgtggccgccatgatgttttggtgacccacacggttgggcactctcctgatcctcccactctgacctgtggctgcccctgtccctgacgattgcctctgcagtccaggtggatgcatctgtggtcccctgacctccctgcgaggagctctcccaggcactttgcatcccccawgcacaggtggacgacctcgtctccccccaccctcagcaggtcacgacacatgccacaggtcactcaacaccgcagcccctcaggctcccgcccacagtgctgaggcttgaacgtgcaggcgcccctggctgtttgccctggacaggcagggcccgtgggctccgtctgcagaggccacccctttgcatggccatcacttcctaagagctcccaccgccccctctgaggctctcac

SEQ ID NO: 743223 - DNA, 628 bp, Homo sapiens
caagacctcagggcattgtgggctatgccgtggaaatctttgtaaataacttctgttactatcaaaaggctgaagagccgctggatcactcgaagaatccgggttggaggcatttgtgccatgagaatatccctatccgcactgggacgcctgtggacctcctagggcctctccaaggaactgagagcttgcaggagagacggccctgccatctgaagccagccactcatcagttacttttaagagaagtttgaatatgtaattaagcaaggtgttctgtaagtagtagtcatccccggagaggttcactaattgcactggagttctccctgctgggcggggagaccctgcagccagctcacagctcgtgtttcctcctgggctcagccctgtagggggttgcggctgtcagagccggatctcactgttktggggctgagcagccccaacaggggcctcccatgatgtccgcaggacccttttttatatgtctgtacctcagtcatgtgtgctttcctgggattctccacggtggaattttgaggaaggacttcggaagtcacaggccactcggctgcatcaggccttccctttcaaaggcagatgtgaaatctctcttttgggggat

SEQ ID NO: 743224 - DNA, 565 bp, Homo sapiens
atatatatttgtgtatttacacacacgcatgtgtgtatgtgtataccataatgtcaaaagacaaatgaaaaactgggaggccagtcacagtggctgatgcctgtagtcccagcactctgaggcgggagaatcactggaaccaggctgcagtgacgcgggatcacagcactgcactccagcctgggtgacagagtaagaccctgtctcaaaaaaaggggggggggattatctgcagtatgcatatcagtcaaagggccaatgtctgttttttkttttgttttgttttgttttgtttttgagatggagcctcactgtcgcccaggctgaagtgcactggtgcgatctcggctcactgcaacctccaccttccgggttcaagtgattctcatgcctcagcctccctagtagctgggattacaggtgcgcgtcaccacatccggctaatttttgtatttttaatagagatggggtttcaccatgttggccaggctggtctcaaattgctggcctcaaacaatccacccaactcagcctcccaaagtgctgggtttacaggcatcagcca

SEQ ID NO: 743225 - DNA, 584 bp, Homo sapiens
tcatgatattccttttaatctttttattagccatgttaccagtagtgatgcccctcctttatttctgatgtttggaatttgtgtctcttttcttttcctcttgtttagcctggctaaagttttattgattttattgatttttttttttcaaagaaccagcttttgatgtttaaaattttctctgatttcctgttttcaatttcattaatttctgttctaatgttgattattaattttttgttaagtttcctaatgttgaagcttgtagattttggatctttcttcttttctaatctatgtagtcaatactataaatttccctctaagcactgcttttcctgcatcccacaagatttgataagttatattttttgtttagcttaaaatatttttatgcctcttgagacttctttggttcatgtgttatttagtagtgtttygtttaatctccaaatattttgggattttccagttaactttgttatttatttatttctagtttaattctactgtggtctgaaagagtacttggtatgatttctattctttgaaaaggtgctaaggtgtattttatggcccagaat

SEQ ID NO: 743226 - DNA, 531 bp, Homo sapiens
ttcacctgtcctcacatgtcctctgtgtatctgcaaagcctctgcctcagtctcctcttctggaaagtgggattggaaaccacatctgcttctctcccaggacttctaggaagacaagattagatggcaggtgagagctctttgaaaatgaaaacattctgctatttgaatgcaaagtgttcttctttgyctgtgatgtttcctaatctgtgaaatcatactggacctcgaagctgtgtattaaaaaaaaaaaaaatagcaaagtggctgggcagggtggctcatgcctgtagtcctagcactttgagaggctgagggggttggatcacttgaggccaggagttcgataccagcctggccaatatgtgaaaccccatctctactaaaaatacaaaaattagccaggtgtggtggcatctgcctgtagttccagctactcaggaggctgaggcacaagaatcatttgagctcaggaggcagaggttgcagtgagccgagatggcaccactgcactccagcctgggcgacaga

SEQ ID NO: 743227 - DNA, 531 bp, Homo sapiens
ttcacctgtcctcacatgtcctctgtgtatctgcaaagcctctgcctcagtctcctcttctggaaagtgggattggaaaccacatctgcttctctcccaggacttctaggaagacaagattagatggcaggtgagagctctttgaaaatgaaaacattctgctatttgaatgcaaagtgttcttctttgcctgtgatgtttcctaatctgtgaaatcatactggacctcgaagctgtgtattaaaaaaaaaaaaaatagcaaaktggctgggcagggtggctcatgcctgtagtcctagcactttgagaggctgagggggttggatcacttgaggccaggagttcgataccagcctggccaatatgtgaaaccccatctctactaaaaatacaaaaattagccaggtgtggtggcatctgcctgtagttccagctactcaggaggctgaggcacaagaatcatttgagctcaggaggcagaggttgcagtgagccgagatggcaccactgcactccagcctgggcgacaga

SEQ ID NO: 743228 - DNA, 383 bp, Homo sapiens
acagggatccgtggtcgatgaggtggaagtgtctgtgtccagcccgtcacaggcacgatatcaggacacaatcactctgctcactccatggaatggcgtcagcgtacaggtgacaggagatacctatgtattcgacraggatgatgatgtaatggaggtgctagagagggctagtcaagaagagtgttgatttctatgaaggccctgattctttcaagtatgaaagacaatggcttcaagtgctaaaaacccaggtttgttctcagtccagggtggggtttcttcacatctttgtggggctggcgtctgtttaagctgaaattggacattcaccgtaagtttatttcttggtactactgccccttggcaagctcttggagcag

SEQ ID NO: 743229 - DNA, 383 bp, Homo sapiens
acagggatccgtggtcgatgaggtggaagtgtctgtgtccagcccgtcacaggcacgatatcaggacacaatcactctgctcactccatggaatggcgtcagcgtacaggtgacaggagatacctatgtattcgacaaggatgatgatgtaatggaggtgctagagagggctagtcaagaagagtgttgatttctatgaaggccctgattctttcaagtatgaaagacartggcttcaagtgctaaaaacccaggtttgttctcagtccagggtggggtttcttcacatctttgtggggctggcgtctgtttaagctgaaattggacattcaccgtaagtttatttcttggtactactgccccttggcaagctcttggagcag

SEQ ID NO: 743230 - DNA, 607 bp, Homo sapiens; identical to SEQ ID NO: 742173

SEQ ID NO: 743231 - DNA, 546 bp, Homo sapiens
cccggaagaagagcttgtagcacaaagaacttggctacactagtgtcccttttcattgcttctcatgaaagattcataagaagaactttaattttttatgaccccctttttggtatgactatattagttgtgtcaacttccatatacaggttctctttaaataccaaaaggtctgttgtgaaattgttttcaaagagcaaagggggcagaatygattctggccatcctgtcggtctcttcctccaaaagaaactgctataagagacacagagattgcctttaaatatggttcccttcagccttgaagttgtcatgaacactacaatgtagttattttaaacctctgtgatttactagttcaactgctctcctcggaagaacgattatatttgtttttcttggcttcaccctatttaacaggaacagtagtataatgatcattaatagacggttctctttttcctacccttctcaaatagctctctccacactgcatctttattttgtatctcagccaaaaattggggggtgcaggaagacaaaatg

SEQ ID NO: 743232 - DNA, 541 bp, Homo sapiens
ttagaggttgcgtttgtataagcattcactcctatgcaagtctatgttgtttaattaggtcaaacataaatgtctaccttgttttgtcagaaaactataaatgccttgagggtaaggatcaatgttcctcttgcatcagttaggaattatatttgactgtcaagaacagaggstcctaatcagaggcttaaaaatcaagggttttatttttatcatattgtgagatgtatggaggcaggtaatcccaagctgattgatgtggcaaatcttggtaagagcagagactcactcagcctctccccaccttctcatttagccctccttagcatggatttgtcacttcaaaatcacaatctggccgatcctcttcaagcacagcatctgtgcaatagacagagaaaagtgggaaggcaaggggcaaacggggcttgcagactgaatcagcctggctttttaacgtgctgccctagaagctccataccatgatttctgctcacctttcatgggtcagcagttagatatagagccacccctatttgca

SEQ ID NO: 743233 - DNA, 541 bp, Homo sapiens
ttagaggttgcgtttgtataagcattcactcctatgcaagtctatgttgtttaattaggtcaaacataaatgtctaccttgttttgtcagaaaactataaatgccttgagggtaaggatcaatgttcctcttgcatcagttaggaattatatttgactgtcaagaacagagggtcctratcagaggcttaaaaatcaagggttttatttttatcatattgtgagatgtatggaggcaggtaatcccaagctgattgatgtggcaaatcttggtaagagcagagactcactcagcctctccccaccttctcatttagccctccttagcatggatttgtcacttcaaaatcacaatctggccgatcctcttcaagcacagcatctgtgcaatagacagagaaaagtgggaaggcaaggggcaaacggggcttgcagactgaatcagcctggctttttaacgtgctgccctagaagctccataccatgatttctgctcacctttcatgggtcagcagttagatatagagccacccctatttgca

SEQ ID NO: 743234 - DNA, 541 bp, Homo sapiens
ttagaggttgcgtttgtataagcattcactcctatgcaagtctatgttgtttaattaggtcaaacataaatgtctaccttgttttgtcagaaaactataaatgccttgagggtaaggatcaatgttcctcttgcatcagttaggaattatatttgactgtcaagaacagagggtcctaatcagaggcttaaaaatcaagggttttatttttatcatattgtgagatgtatggaggcaggtaatcccaagctgattgatgtggcaaatcttggtaagagcagagactcactcagcctctccccaccttctcatttagccctccttagcatkgatttgtcacttcaaaatcacaatctggccgatcctcttcaagcacagcatctgtgcaatagacagagaaaagtgggaaggcaaggggcaaacggggcttgcagactgaatcagcctggctttttaacgtgctgccctagaagctccataccatgatttctgctcacctttcatgggtcagcagttagatatagagccacccctatttgca

SEQ ID NO: 743235 - DNA, 590 bp, Homo sapiens
acaccaggatgctttctcatggttacggtgggggaagggctgcagggatccctggcagcttcttgcctggtttcccttatgcttgggggaaagggaaaggcctggggccatggaatatggaaagatgatcctccgatttgaaggtgatcagtggattataccttgagaaamaatggattagagagatttctcaacaagatacctgaactagggcccttgtaggcttctggctatgttggactagtcatactccttctcttaggaatttgaacccagacataataccaaatgagaggagaggatttatggcagaaatgaaacctgaatgaaccatgatacagagtgtccagggcagccataatggactctgagagatctgaggttgtgagtagaacaaccatgactaatcaaaggaaggcttttcttgagagaggaagcaagagcagagacacagagagaagaaaggtcatggcaagttgagatagagtcaaccccaagtccttagagctgtttcagcaaccaaggtctttgtgttccagtcatgatgcaaggcatgttgatcttgccattacaagcttaccccttcagtt

SEQ ID NO: 743236 - DNA, 625 bp, Homo sapiens
atgtttgcctttatgagtcatcatttaaaataatattctagtatgaagagataaatctccagtaaggggcattatttttaaatatatgtaataagcaaaatacataagaaaaatagtatctatattgcttataccagctgccatacacgtttcatgatatgaggtcatgggttcgttttataagaaaagtaaaaaatacacaataaggaaaacaattaygtctctacacaaaaaatacaatggcccaagtgtcctgtacttttaaagattttcccatgataagcacattaataaattctgcctgtattgaaatttctggtttcttcttggtagtttaatttactgagagctgagttgatttccttgatatttttactaacattattgaacccaacacaaagtgatgtttatgttttgtttgtaaggccaacttttcatttaacataatggactctgcactctgcttacaacttccaactcacttcacttgtttcttcattcactcattcattctttcaccaaacatttattgagtacccactgagtgctaggcactgtattggatgctggggatttataaaaaatggttactaagcctcagatatttgcagtccagtgagggaga

SEQ ID NO: 743237 - DNA, 478 bp, Homo sapiens
tttcatttaacataatggactctgcactctgcttacaacttccaactcacttcacttgtttcttcattcactcattcattctttcaccaaacatttattgagtacccactgagtgctaggcactgtattggatgctggggatttataaaaaatggttactaagcctcagatatttgcagtccagtgagggagaaaaacttactatacaatgtgatcagttttacaaaaagggaatacaacaaagagtgcaattaaatctmtctgggaaaattagggaagctctagacagcagtgacacatgagcagtttccagggagatgaggatgctggcatagcaagattgtgtgtacgcactgaaggtgcaaagggacatggcatgttctgatgactcagagcagtccttagacggtgcaccatttgggtccatgaagaagagtaggtggaaaattattctgagacattagattaggagcacatg

SEQ ID NO: 743238 - DNA, 613 bp, Homo sapiens
aataagcaattttaatacaacggtaaatatttgtggaaacatgtctaaacatagaaaaggtacagtagaaatacagcatcaaagataaacagtggtacacctgtttagggcacgtaccgcgagtggagcttgcaggactggaagttgctctatgtgagtcactaagtgagtggtgagtcaatctgaaggtcgagaacattactgggcactactgtagactttgccaaaactgtacacttacacacttaatctagttaaaaacttattaaataacattaacgttagcttactytaatatctttactttataaacttattttttgacttttgactcttgtaataacatttagctttaaagcacattgtacagttgtacaaaaatattttctttatatacaaattttacatgtactttttatatttttaaatatttttattttgttttactttataatgtttttattatgaactaagacacaaaaacacatattagcctaggcttttacaaggtcaaaatacaaaatattactgtcctccacctccacatcttgttccactagaaagtcttcaggagcagtaaacaggcatgaagctaccttctactacaataata

SEQ ID NO: 743239 - DNA, 617 bp, Homo sapiens
tatggctttctcatgggaaaacttagataagctttagctcataaaaatatttactttcaatgatcaattaaactggagattctttctaatgctgtctcacgcccttgctttgggaagcaaatgcattctttgtacagcaaagatgaacaatataatcctttttcttgttctttctcataaaattatgagcactgctgtaagtccagaaaatataatattccatttgcattagacttgttaaaaagattgcatccacgagtatttttgagtacaagtttgctaaggaaaatgagagtaaggtattttaacattcataatggaaaacatggataaattacataatattgtaagcacyataaaccaggtgaaaaaaatggccatatatattctctacctacaaaatgaaagtgaaggaacaagttccctaaaacatctaattctaaagcccaacccattggtaagaaggattttcaaaatctttaatataatattaaatgcttttattaattattatttttattagatacagttgttgcataaaatgagtctttttctgtggacacaggaaggtctaactggtccagaatattctggatgcaattattggcaggatccca

SEQ ID NO: 743240 - DNA, 617 bp, Homo sapiens
tatggctttctcatgggaaaacttagataagctttagctcataaaaatatttactttcaatgatcaattaaactggagattctttctaatgctgtctcacgcccttgctttgggaagcaaatgcattctttgtacagcaaagatgaacaatataatcctttttcttgttctttctcataaaattatgagcactgctgtaagtccagaaaatataatattccatttgcattagacttgttaaaaagattgcatccacgagtatttttgagtacaagtttgctaaggaaaatgagagtaaggtattttaacattcataatggaaaacatggataaattacataatattgtaagcaccataaaccaggtgaaaaaaatggccatatatattctctacctacaaaatgaaagtgaaggaacaagttccctaaarcatctaattctaaagcccaacccattggtaagaaggattttcaaaatctttaatataatattaaatgcttttattaattattatttttattagatacagttgttgcataaaatgagtctttttctgtggacacaggaaggtctaactggtccagaatattctggatgcaattattggcaggatccca

SEQ ID NO: 743241 - DNA, 632 bp, Homo sapiens
tttgctctttttatttctaatatttactcactttactcatactctgtacaaatatatattaaaatttataaatgtatgcactaaaatttattagtattatgcattaataaatactaaaaatcaagataaattactagaagtcgtatgcattctgattcatgtaccctaaaatataaacacatacatgtatatatataaatgttatagcttgtgtgaatcaaaatgatccagtacttgctaatttatcttattatttaatattcattaatacatattttattcctctaaatgcygggagctaactgattgttgtatcttcagagagcactggagtcagttccataaccagaaagcaaagagtgtgacatttattcatcggactctgaaatggatctgtagcattatggaattaaataaagccatggtatccagaggtgtaaaaaacaaaaactgagtggcagacacagtggcttaggagaacttaacggtaccatctttttttattacctttgctctggtgtcaagggtaagttaaccttctttttaaactctttaccttcacttcagtgtcttcctcctatcctgggcagccagcactctccttttgcctattgtctcttgtaaaaggaaat

SEQ ID NO: 743242 - DNA, 552 bp, Homo sapiens
actgagttatcacctcactttatgaccatgctttcaatggttagacctttagattgtgactgcaaagcaattagacctttgattcttctttttgaagccgcagtgaaacacctataaacaaaatggtccttaggcatttaaccttgcarcccccatgggggtatatttaaagtgataagaccttctttatgaaggtgagattgatggtggaggaaagtcaaaagacattgaaattgcacctgccaaataaagtgattctacttttcataaactaactccagaagccatttttttgtctcttaggaaagttagaagatagtggaaaatgtctatttacttgtaatgaagaatcatgaatatcccaactcatctcctatcagaacttacacccactaaggaaaacgcacttctgttccaaccttttctacacaatttaaaatatcaattaattaactgagtcaacaaatatttattaggagtgtctgattttctaggcaatattgtgggaatacgagtgagaacaaaaatttttgattatgattgatgcatctc

SEQ ID NO: 743243 - DNA, 552 bp, Homo sapiens
actgagttatcacctcactttatgaccatgctttcaatggttagacctttagattgtgactgcaaagcaattagacctttgattcttctttttgaagccgcagtgaaacacctataaacaaaatggtccttaggcatttaaccttgcagcccccatgggggtatatttaaagtgataaraccttctttatgaaggtgagattgatggtggaggaaagtcaaaagacattgaaattgcacctgccaaataaagtgattctacttttcataaactaactccagaagccatttttttgtctcttaggaaagttagaagatagtggaaaatgtctatttacttgtaatgaagaatcatgaatatcccaactcatctcctatcagaacttacacccactaaggaaaacgcacttctgttccaaccttttctacacaatttaaaatatcaattaattaactgagtcaacaaatatttattaggagtgtctgattttctaggcaatattgtgggaatacgagtgagaacaaaaatttttgattatgattgatgcatctc

SEQ ID NO: 743244 - DNA, 654 bp, Homo sapiens
ctgcgcccggccacatccctttttaatattgcattttaggtagcactttgtatgttttgaagtgattaggaacacagattctggagtttgacaccccttgaacaaaaagatggctccacctcttatgatttggggcttaaattaagcaaattattaaatctatttaagcatttgattctttcaatctataatgaagaaaaacgcaacctatgtcattatgaagcttagctttccctaatacttaatagccactcagttaatgttgtctctgttgttagttagtattaatagcattataaaatttcccttgttatatccattttcagatgccagatataatccctaatttaaacttgtcctcggtgctaattaattttcatccttaacaaattgcttcaccttaaaaagctaatgttaaaaaaaaaataaaccaaccaaccaaccaaccaaccaaccaaccacaacaaaacaagctcagtctwtctttcccccagtgattcttggaaattatcactatctaatgaaataatgcttatcatttagggtaagcagtgtattagccacacattttataaacatgttttcctagattgctcatctcattcactcatgtagtcagaatgtataaattagtcatttacatatcaggaaatg

SEQ ID NO: 743245 - DNA, 539 bp, Homo sapiens
  misc_feature 511, 514, 515, 516, 517, 518, 519, 520, 521, 522, 523, 524,525, 526, 527, 528, 529, 530, 531, 532, 533, 534, 535, 536,537, 538, 539: n = A,T,C or G
taattatcctgatctgattactgtacattatatgtatcaaaacatcagtatgtaccccatgaatttacacaatttatgtcaattaaaaatacaattaaaaaatctgaaaataaataacaaatgagggtgaaacttttactgaaaaaaawttagggtcaagagcaaagttaacactattaaataaataaatacatttgatttcatattaaaggatattccatggggaaaattttttttaattttaaccgttgccataaaggccccaaggaagcttgtctcagccttttccctgtcttcaaatatcaagatattggatctctgttccaaagacaaggaaatgctataagttgagattaccaggtgataatgtaggttccttttcaaaaataaatgaaaacttctggagagacagattcaaagtccaggaagttcgtaccctcattgaaggtgtgtttaaagttaaaaattatttaacacacaaaagcatatctaccataaggaaggggtgttnctnnnnnnnnnnnnnnnnnnnnnnnnnn

SEQ ID NO: 743246 - DNA, 596 bp, Homo sapiens
ctacatctggatctgttcttaaagcagtccttaagctaaaatctgaatgcaatgtaaacacattccaccatcctgatattcatattcctatggccaaaattttagagatatgatacgtatactcatgtgtctgagatgctcatctttattccaagtatttgacatcacgtaggtttattcatgatcttgctgctttcactgaggctaagagcctttctttctcccttscctgatacaagatgccctacttgctgcattcctattgacaccacagaatttaacatgtaattcagagtgggatgtgcctcactgtaggcaatgggcatgggcatgttttgaaattaaaatatgagatacaaattgaattcatctaaattaaatcttatttgaaaatgatgaagaaagtgtgtgatatttaaagtaaatataaaatataaattaatttgaatataatttgtttgaggaagaattactccccttttaatatttctcctataactttatttaattttatgctgtatttgcttaaagaagagaatgtttataatttagagtggatttaaaattaggtctctcttttattctgttcatataat

SEQ ID NO: 743247 - DNA, 513 bp, Homo sapiens
ttgctcttgtgcataattttgcactttttaaagcactttcccgtatttaatcatatttgatcctcatgacaaccatttacaaaatgtagggcaatgctagcttgagggacaatgtggagtggtggaaagagttatctgaactgggagtctagagacctgattctgtcagtaattagcaatgcaaccacagacaagtccttaaccctctctgggyctcagtgtcctcatcactgcatgaagggccagtctgtgaaattttcaagattgtttcagctggtaacaatttatgagacccaaagacagagatggagggtagaacatgtgggtgtgggatggctttcctaagtttagacaatggtgagtagcagaactagaactaacatcaaaatctaccaattttagagcaaagatgcattaagtagaaaattacatcaagcattggtggaaaagctctcatacaagccatagagaacacattatataccacacattatcatcaatcttgaaaatatc

SEQ ID NO: 743248 - DNA, 635 bp, Homo sapiens
ccctggctatttgatagctaacaaagaaacggggacctcagtcatacaactgcaaggaaatgaattctgccaacaaccagtgagttgggaagagaccctagagcctccgatgaaattcacagccctagctgacacctttattatcatttggtgaaaccccaggagaagatccagctaacccagactaagacttctgacccacacaaactgtgaaataagaaatctggttattttaggctgctaagtttgtagtaatttttcatgcagcaaagaaagctaataccacccccttctagcaccactcattttggaagactttgttcatataagcaaatgcaaatatctgaattgagtggacatttgaaaaatattcgcccacaaatttgacaaagaattaaagggactctgtaggcaaagctgaccatgtgaaggtaggttttccttgggtgattatggtctcatttaagacttgggcattcagaccaatactcacctytatgtctgtctagtcccttgtgtgtggctgctttggtaatagtataagtacatgttgtatgtttgtatttatttggtaacgaatcacatcagatattttaggggtaggtgttgaatctcttatattgggtataactatg

SEQ ID NO: 743249 - DNA, 613 bp, Homo sapiens
tatatatgcattatccactattataatgcataatagtgaggctgaaagaagattcagtttaatgaatgaacattcattaatgattcgttaaattcattaatgattcattttaaaattttaatgaaaaagtgagaaattatttaataatacataatgtattcgatttaataaaacttttttttttggaagcaatatagcacattaggatgcacctccattgtcaaaataaggttgctgtgcaactatggattggctatagataaaataatttggcaaaaataatgggcaggtcgcggtagctcatgcctgtaatcccagcactttgggaggccaaggcaggtggatcacctgaggtcaggagttcacgaccagcctggccaacatggtgaaaccccgtctctactaaaaatacaaaaaaawaaaattaggctggcatggtggcagatgcctgtaatcccaggtactcaggaggctgaggcaggagaatcgcttgaacccaggaggcagagggtgcagtgagccaagatcgtgccattgcactccagcctgggcaacaagagtgaaactctgtctcaaaaaagaaaaaaaaaaaatggcaaaaataaaaaaaatt

SEQ ID NO: 743250 - DNA, 613 bp, Homo sapiens
tatatatgcattatccactattataatgcataatagtgaggctgaaagaagattcagtttaatgaatgaacattcattaatgattcgttaaattcattaatgattcattttaaaattttaatgaaaaagtgagaaattatttaataatacataatgtattcgatttaataaaacttttttttttggaagcaatatagcacattaggatgcacctccattgtcaaaataaggttgctgtgcaactatggattggctatagataaaataatttggcaaaaataatgggcaggtcgcggtagctcatgcctgtaatcccagcactttgggaggccaaggcaggtggatcacctgaggtcaggagttcacgaccagcctggccaacatggtgaaaccccgtctctactaaaaatacaaaaaaaaaaaattagsctggcatggtggcagatgcctgtaatcccaggtactcaggaggctgaggcaggagaatcgcttgaacccaggaggcagagggtgcagtgagccaagatcgtgccattgcactccagcctgggcaacaagagtgaaactctgtctcaaaaaagaaaaaaaaaaaatggcaaaaataaaaaaaatt

SEQ ID NO: 743251 - DNA, 613 bp, Homo sapiens
tatatatgcattatccactattataatgcataatagtgaggctgaaagaagattcagtttaatgaatgaacattcattaatgattcgttaaattcattaatgattcattttaaaattttaatgaaaaagtgagaaattatttaataatacataatgtattcgatttaataaaacttttttttttggaagcaatatagcacattaggatgcacctccattgtcaaaataaggttgctgtgcaactatggattggctatagataaaataatttggcaaaaataatgggcaggtcgcggtagctcatgcctgtaatcccagcactttgggaggccaaggcaggtggatcacctgaggtcaggagttcacgaccagcctggccaacatggtgaaaccccgtctctactaaaaatacaaaaaaaaaaaattaggctggcatggtggcagatgcctgtaatcccagstactcaggaggctgaggcaggagaatcgcttgaacccaggaggcagagggtgcagtgagccaagatcgtgccattgcactccagcctgggcaacaagagtgaaactctgtctcaaaaaagaaaaaaaaaaaatggcaaaaataaaaaaaatt

SEQ ID NO: 743252 - DNA, 562 bp, Homo sapiens
tatctttctcattcttctttctttaggctgtgtgtgtgtgtgtaaaacattttccctttgtttgagatctaatttacatgtagtgaaatctgcataccaaaatttaaagagtcatgataaatacaagcatctgtatgcccccccaaaatgaatcaagttatggaatatttccactccaraaagttcgttcatgccccttcccagtcaatccctgctccgacctcacgtcgcaggccatgagactcttctgctttctcataccaaatccttacctgttgcaggatttaatgtaagtggaatcatacagtgtcttatgtttggcgtcacctacttagcaaaatgttcttgaaatgcactcattttatttgcatgcatcagtgacttatttgttttcactattccgtagtataagtataccaacatttgtttgttttcttcttgatggatatttgaattgtttccagttaaattattatgaataacatgaatgtgaacgttcatataaaagtatttttgtggacttgtgtctctatttctccttgaagtgaaatccctgggtcat

SEQ ID NO: 743253 - DNA, 641 bp, Homo sapiens
cttgagataagaatcaaagcctggaaatactggccacagagcaaatgcaactggagccctcattggagaaatgtccatttatgtggttattcagccactgtgaagacttaatggcttatatagatttgtgtccaacgtgaattgrtgtgataactaagactggaaaggacttgtgttatcagaggtcaactggattctccttcattgagtttccagaaaatggacatttattacaacagaaaacttagcaatgctcatgaatgttccatgggttttactggccttttcatgccatcaaaaagagacctatacattttccctttgctcagagacatgtatgttaagacttctgctgggaggccacttattttatttggaaatgtatgaacgaaaagggcagattggagttttctagacaaaacattggaatgttttgggtcatacctgctttcatgatgttgctaatgtccttggcttcattattcacacctccaaaacaatgctttaagccaatttgaaatgttcctgggggtagaaaagattgatagttctgttttctttcaaaaaacatttagcaattttagaaatctttctttccaacatgtcatagcacaccgcatcttgcctttcacataaaacat

SEQ ID NO: 743254 - DNA, 641 bp, Homo sapiens
cttgagataagaatcaaagcctggaaatactggccacagagcaaatgcaactggagccctcattggagaaatgtccatttatgtggttattcagccactgtgaagacttaatggcttatatagatttgtgtccaacgtgaattggtgtgataactaagactggaaaggacttgtgttatcagaggtcaactggattctccttcattgagtttccagaaaatggacatttattacaacagaaaacttagcaatgctcatgaatgttycatgggttttactggccttttcatgccatcaaaaagagacctatacattttccctttgctcagagacatgtatgttaagacttctgctgggaggccacttattttatttggaaatgtatgaacgaaaagggcagattggagttttctagacaaaacattggaatgttttgggtcatacctgctttcatgatgttgctaatgtccttggcttcattattcacacctccaaaacaatgctttaagccaatttgaaatgttcctgggggtagaaaagattgatagttctgttttctttcaaaaaacatttagcaattttagaaatctttctttccaacatgtcatagcacaccgcatcttgcctttcacataaaacat

SEQ ID NO: 743255 - DNA, 525 bp, Homo sapiens
ttaaaatttttttaggaactttattcattatcaacaaaaatgtattgaaccctagatgtattgaaccctagcgtgctgaggggactgggctagctactgtagaggatgtcatataccattctccccttcttcagtatgctccaaccatatttacagtctttcagttccatatctctgcaaggtatttcttgcctcaaatccacatacacgctgttcactctgcctgtgtgcacrtcccctccttgtttattcccacaaatagacatttgttattcccagctgactcttccttatccttaaggcctcagattaaatgtaccttcttcagagaggtggtctctcatcaccaaatataagttcttcttcctggcacccactgcctttattgtacatcataatctgtgattattcatttaattgttttcttgtttaatttctctctcccacaaaactataagcttcacaagggcaaggaccaagtctgttctgttaaccactgtgcaaccagggtttctagtgcagggt

SEQ ID NO: 743256 - DNA, 602 bp, Homo sapiens
agacaaagattgtagagatgcagctgtaagaagcaccaagggttcccggaggccaccagcaaagctaggaaaagacaaggaaggagtctttcctagagcctgtagagggaggctgaccccgcccataacttgattttgaacttcaagtctccagaattcttaaagaataaatttctgtggtttttaagtctgtgataacttayggcagccctgggaaactaacacaatcatctggttggagtctccttcctctggattttgggaccctgctttcatccaacttcccacctacctttctagccacccctcactttcttctgccattccttttcctctacccacagcttaaatgatggcactcctcagaattctgtccttggattttctcactgtacattcccttggtaatcttatccaatctcatagttttaaactccacttctcagttcacacacataaagctacaatcagacctctctctttagagtgacttttaatgtcttattagatatcaacaactgatgtcaaaaatacatacttaaaactcatttttaaactccctttctattctttattattctcctttacttttccttctaccc

SEQ ID NO: 743257 - DNA, 551 bp, Homo sapiens
ccaagcaaatggaaaaccaaaaaaggcagagattgcaatcctagtctctgataaaacagactttaaaccaacaaagatcaaaagagacaaagaagcccattacataatggtaaagggatcaattcaacaagaagagctaactatcctaaatatatatgcacccaatacaggagcacccagattcataaagcaagtccgtagagacctacaaagagacttagactcccacacaataataacgggagactttaacaccccactgtcaayattagacagaccaacgagacagaaagttaacaaggatacccaggaattgaactcagctctgcaccaagcggacctaacagacatctacagaactctccaccgcaaatcaacagaatatacactcttctcagcaccacatcgcacttattccaaaatcgaccacatagttggaattaaagcactcctcagcaaatgtaagagaaatttaggaaaagacaaggcctttgggggatcttgaagaaattcttttcaggaattttttttttctagtgaatgagacatgt

SEQ ID NO: 743258 - DNA, 600 bp, Homo sapiens
aaaaacataacataacaccactacatatatgtcagagtggctaaaattggagacaatactaagtgttagtgatgatgcagatactaaaattctcatgcactgcttgtgggagggttgtttgctatatccttacaaaaacctttttggtcatgtmtgttaaaactgcattccttatgaactagaaattttatttcttgataaaccccaacagaaatgtgttcatgggcttacaaagggaatatgcaagaaagtttacaataacaatatttgtagtaattcaaaattgaaaaataaaaacaaaatgaccaacaatagtcaacaaactaataagttgatgtatacccacaaatggaattctatgcaatgatgataatgagaaaaactactacatatagcaacatggatgaatatacaatcactcatttcaacattgagtaaaaaactcaaggagcaaaaatgtatgtacagtttaattcaatttatacaaagttcagttactggaaaaaaatacggtgcttcagtaaggaggctggttgccattgaggaggttttgacttgaaggagagatgtcagtaatgctctgtgtcttaagcttggtga

SEQ ID NO: 743259 - DNA, 580 bp, Homo sapiens
atactcaaaggaatagaaattattctgttacaaagaaacatgtacatgtatgttcattgcagcattgttcgcaatagtaaggacatggagttaacccaaatgcccactaatgatagactggataaagaaaatgtggtacatataaaccatggagtactatgcagttataaaaaggaatgagatcatgttcttttcagggacatggatgaggctggaagacattatcctcagcaaactcatgcaggaacagaaaaccaaacactkcatgttctcacttataagtgggagctgaacaatgagatcacatggacacagaaaggagaacaccccccctggggcccgtcagggggtgaggtgggggcaaagggagagtattaggaaaaatagctaatgcattctgggcttaatacctaggtgatgggtggatagtcgcagcaaaccaccatggcacatgtttacctgtgtaacaaacctgcacatcctgcacatgtactccagaactaaaaataaaaataaaaattcaaaaccaattagcaaaaaaaaaaaaaaaaaaaccccacaaacactacacctctgaatt

SEQ ID NO: 743260 - DNA, 580 bp, Homo sapiens
atactcaaaggaatagaaattattctgttacaaagaaacatgtacatgtatgttcattgcagcattgttcgcaatagtaaggacatggagttaacccaaatgcccactaatgatagactggataaagaaaatgtggtacatataaaccatggagtactatgcagttataaaaaggaatgagatcatgttcttttcagggacatggatgaggctggaagacattatcctcagcaaactcatgcaggaacagaaaaccaaacactgcatgttctcacttataagtgggagctgaacaatgagatcacatggacacagaaaggagaacaccccccctggggcccgtcaggrggtgaggtgggggcaaagggagagtattaggaaaaatagctaatgcattctgggcttaatacctaggtgatgggtggatagtcgcagcaaaccaccatggcacatgtttacctgtgtaacaaacctgcacatcctgcacatgtactccagaactaaaaataaaaataaaaattcaaaaccaattagcaaaaaaaaaaaaaaaaaaaccccacaaacactacacctctgaatt

SEQ ID NO: 743261 - DNA, 618 bp, Homo sapiens
ttatatctttgtaaaatagttatcagataagttcaaaaagaatctgtaacaggacaccattgaaaaaactgattttattatcaaagttttggttacaatattatgtttgagaatgatgtacttagaatcaaatataaggaagcaaggttgactttatgaagccaaagcttaataaagccttctaggaaaaaaacagcctgacacctggcttacaccgttcccagtaaagaagttccctttctggtaggtacaggaacctcagaatatsttggggacctcaagaagagaataaattcacacaaatctctaggtattgcaaatgaactttggtggtaagttcttggcttggcttcttggccttgaaagaatatttaaaatcaaatttgagattcttatgaaaagtttcggtaaagaaaacgtataaggcctttgcagttaattgcgattcttgctgcacttacataaataattaagccaaatctaatgagaccagacttttttgtgattaagaattgtaaagagagctgaatataaagagtaattttgtttcactgggaaattacagtactcccttattgagtaccacttttactttcttctaaaatctgactacaactc

SEQ ID NO: 743262 - DNA, 531 bp, Homo sapiens
agaatcaaatataaggaagcaaggttgactttatgaagccaaagcttaataaagccttctaggaaaaaaacagcctgacacctggcttacaccgttcccagtaaagaagttccctttctggtaggtacaggaacctcagaatatgttggggacctcaagaagagaataaattcacacaaatctctaggtattgcaaatgaactttggtggtaagttcttggcttggcttcttggccttgaaagaatatttaaaatcaaatttgagattcttatgaaaagtttcggtmaagaaaacgtataaggcctttgcagttaattgcgattcttgctgcacttacataaataattaagccaaatctaatgagaccagacttttttgtgattaagaattgtaaagagagctgaatataaagagtaattttgtttcactgggaaattacagtactcccttattgagtaccacttttactttcttctaaaatctgactacaactctcccaattaatatttccaatttttcttctacccttc

SEQ ID NO: 743263 - DNA, 551 bp, Homo sapiens
caggtgaagcaaacattaaagaaatattaaatccaccataaatcgccttttacttttagagtgctgttataacaagctctagataggaagataaagtgatgatcactaggctgaaactggtgtgtggatgaaaaayattggtgcaaatcataagttacatatttccatttactcaaaaatgatgaatattctacaaaattcctggccaatactcttcaagactgtaaaggtcacgggaaaaaggaaagactaggaaactgtcacagattagaagagtctaaggagataagatgattaaatgcaatgtggtattctggattgggtccttgaacagaaaaaagatattggtgcaaaaaccggtgaaatccaaatagggatcagagtttaatcacaaggtaacaatgttagttcttttcagttttaacaaatgtattatggtagtatataacgtcaacattagaataaactggataaggtatgtatggggaaccctgtattctctttgaacttctctgtaaatctaaaagtattccccccaaaatgttattttt

SEQ ID NO: 743264 - DNA, 619 bp, Homo sapiens
aatgttgcacccacttcccttcctaacgaccatgtgacagcccttgtttctactcctgcccactgacactacgggtcatcatgtctgcctcgatgttgcatctgtcaggcatgctaatgtgccacaaacagcttccggccatttccgagtgtggctccatgctgagcactccaggaggttacayggtgcatccatcccagatcctgctcttcttcacctaaggggcagcaggcaacccagaaatataacacaaagtccaagaaggaagtgtcccaacagaagtgaacctgggaatgaagatggctcataggtgggaaagattagttccagctggagtgccagtggaggctgcaataaagaagatgggagttgaaacatgggtggatcagaacaggcagagaaggtcattccagtaggaggcatgtgctccaacagcgaaggagggaaggagactcaaaatgactagagcggtgtggtgccgagcatgcatttcaatctatccagagattaagggaagaacatataatgagaaataaagttgtaaaaaacagatgagtcggaggcccaagtagcctataaaagcaaaataaggagtttagtttataatctgtaataaaga

SEQ ID NO: 743265 - DNA, 634 bp, Homo sapiens
gatcgactgtcatccccaactcctcctcactatgacaacttggttaccctgctttattaaaaagtcccttacatttctccccagtgggattttatcagtattcagaagcaaatatgattacatctttgcaaggttagccttccaagaattagataaccaacctctgaaataccctcattaaattactgcaggatcccttgttataaaactcagggtagagccccaagagaggcaacaggaggaagaagtgcagctgcaggcctggctcccaagaacatgtgtccccgcttccaagttcagatgtaagatgccccgtcctgttctccacccttcccaccaacccccatcacctctgtagacytccatgtgtagtaaaatttcagttctgggcactcagctgatgcccccacaagcccacatgtccaactgacacatgctcttccctgggtccccaaaggacattgtctctgtccagtgctctcccggcttttccacccttctctttcattctctggcacccactcttagtgtctcttactctaatcctcacagtctcaccttcccgcaactcagtcacttcctcctccagaaatgcatcaactcctgctggccatattgtagaattcaagtctgt

SEQ ID NO: 743266 - DNA, 626 bp, Homo sapiens
cattcttcccttccaacaaagttatacttataatcccgttccagagttggttctttttcaaggactcagagagccgtaggttgcgtatcaaagaggactaaagcaaaaaataaagatgacatgtaaacttgcttctaattcctgagagtgacttygatgatcataggaattccaactttcagtatttaattataaaaaaaattcctccctgcctggggaaaactgtttttttcattggttttgcaaacctgctgtcacagttatgtgacttccttctcaagctttggagtggtaataatatagtgaaggatgagtatatgcaacactttgacttggcactggccggtactcccacccagatgcgctctttggtgggactccttcaactgggcctttagctattttaatagtgtgagaggaagaaagacattctgggcaacagagatattataccagaacaaggcattgccttgcaaggaagcaaaatatctctgggcattcagaaataatgactttgaatttatccttcacatttgaatctgtctccacttctctttattccttgggatactaccaaaagccctataccatgtaagattcactagtccaaatagagcctccagtgg

SEQ ID NO: 743267 - DNA, 626 bp, Homo sapiens
aatgccagtcctggtaagggaaataaggaagctggaaggagattatgagggttggggttctgaagacagggagagacagatgatgtttagtttctgacttgctgaggtgtagatgcctgtaagatagagagacagggctagaaatgggaagataaagtttgagaagggaaccaggaaaacttggcaagacttcaacatccctacttaattatcacactgtgaatccayaatcgataaattttatcaaaagcattctggaatctttcctaaaagtttttgacaattgtataaatcttaacatgtcacttacaactaacattcctttctaacaaacatccaatgtctacttaatcaactaacaattgttttctatatacagtttattcaaggttgattcggtcctgctcttacgtcccagctggtgtttgggtcctaaacttaacactgagaatttcaatcgggctacagaggaaacaagtctaactaatgatgccttcttgtcgggcaaataatttcattttgaaattctatagcaaaagaacaacaataaagtattggttccacttttaaataaataaggggttattttgctgctgaaagttttcattcaaatgactgatcagatc

SEQ ID NO: 743268 - DNA, 567 bp, Homo sapiens
tgggtcaatgttcttatataaaagaccccacagagacccttacccttccataatgtgaggttacagtgagaagacagctttctatgaggaagtggggtccttaccagacacagaatctgctggtgccttgatcgtaaacctcccagcctccagaactatgaaaaatacatttatgttatatataagccamccagtttatggtatttttttatagaagcatgaatggactaagatactttaccatctcccaattaaaacacacctttcatctcactatccttgatatcaagcggtacttgacacagcgtaagctttcaataagcattagctaatactgcagtggatgcttactaaatctgtattgaaccactattatttgaatttggaaaactctggtttccaaaatttaggcaattgtctgataatgaccagcattctctctgagatcttaggattttgaaatgacatgtccaggatgcccaaggttctggtcactttttcatttgcaacctattctttttgggggtcacaagaaggtcagcttacaacaaaggttaatctgtggct

SEQ ID NO: 743269 - DNA, 626 bp, Homo sapiens
agcacaatttgcaattgcaaaaaatataaaaccagcctaaatgcccatcagtcaacagtgaataaagaaaatgtggtgtgtgtgtacgtgtgtgtgtttgtgtgtgtgtatgagtatgtgtatgcacacatgatggaatactactcagccataaaaaggaatgaaataatggcatttgcagtaacccggatggggttgaagaccattattctaactgaagtaactcaagaatagaaaaccaaatatcatacgctctcacttagaagtgggagctaagctatgagggcacaaagacataagaatgatataatggacgttggggactccagggaaagggtgggaggggagtgagggataaaatgatacacaatgggcaccttgtacactgcttgggtgacgagtgcaccaaaatctcagaaatcactattgaaaaacttttccatgtgaccaaaaaccacrtgttccccaaaaactattgaaatacataaaataaaatagtggagcatacttttaagaaatattcagagtagattttaaatagtctcaccacaaagaaatgataagtatatgagatgtgtgtgtgtgtgtgtgtgtgtgtgtgtgtgtgtggttaattaggctgattt

SEQ ID NO: 743270 - DNA, 586 bp, Homo sapiens
agccttgccggatccagggcagagttaagcggccccagctctgctttcccagagctgctgagaacctggggaatggtgtggaggttccagggagccctgcccctacctggcaaccgcagtgcagcacgcaccaagttctcctgcacattgcgacagtgtgaccatgggctctggygggcggtaggtcgggcctttggacctaccagcagtgagggagttaacacagcagctgacttctctaggcaaagaaaactcccctcagacgctttgctgcctggcctcctgccaggaacaagcaggagctgaaaactagaagttgaggcatgagtttggccactccgtagtgtgcacttggtgagggcagcagctcgccacagctgccagccatctgtccattcacccatctgtccatctggcagcccgctgttcagacctgtctgtctgtccgcccatctgtaagcccatctctgtcccattgtctatctgaccatctttctcttactgtcctctttgtctagctatctggcctgtctgtcgatccatcttcgtgtctgtcttcagcccccacctgtttgtccatctgtcc

SEQ ID NO: 743271 - DNA, 586 bp, Homo sapiens
agccttgccggatccagggcagagttaagcggccccagctctgctttcccagagctgctgagaacctggggaatggtgtggaggttccagggagccctgcccctacctggcaaccgcagtgcagcacgcaccaagttctcctgcacattgcgacagtgtgaccatgggctctggtgggcggtaggtsgggcctttggacctaccagcagtgagggagttaacacagcagctgacttctctaggcaaagaaaactcccctcagacgctttgctgcctggcctcctgccaggaacaagcaggagctgaaaactagaagttgaggcatgagtttggccactccgtagtgtgcacttggtgagggcagcagctcgccacagctgccagccatctgtccattcacccatctgtccatctggcagcccgctgttcagacctgtctgtctgtccgcccatctgtaagcccatctctgtcccattgtctatctgaccatctttctcttactgtcctctttgtctagctatctggcctgtctgtcgatccatcttcgtgtctgtcttcagcccccacctgtttgtccatctgtcc

SEQ ID NO: 743272 - DNA, 620 bp, Homo sapiens
gctgtgtcctcatcctacatagcatatgagagtgtgtgacgggagataggatgcagacctgagaagcattaaacacctaggcaataaaggtgccagcatcagctgagagcgcaggtagacctcagtcacatttgttactgtgtaactaaaaatacaaaattagctgggtgaggtggtgcacgcctgtggtccccactgctcaggcacctgaggcaggagaattgcttgaacccaggaggcagaggttgcagtgagctgagattgcaccactgcactccagccttggggacagagtgagactgtatctcaaaaaaataaaataaaataatctaggacaaccaagagaaggactcaggctcaccttactcyatgtcacatgtgatatataacacttgagggggacacacacttgtcactttgtatcactatgtcctatatgatagccaatgataacccaagagggggaggcagccttgttcacaccatgtcacttatgatattatatgacatcaaggagcccagacctcagttgcattatgtcactatggcacatacagtatcatgcaacaactgacagaagggttgcaggcctgattcacagtgtatgtgagtcacaaatg

SEQ ID NO: 743273 - DNA, 586 bp, Homo sapiens
gcctaggtgtagcgtagactcttggaaatactgtggttagcattctgtgttttctgtagtatagtttcagtgatgcctgtttagatagtttatcagatctaggtactagtgttatgtcagcgaaacactgtttagctgcacgcggtgcatgtaatactttgttcattgatatttgtttaaatcaatcagtgtttaccagaactagatatgtgagttactgagaatagcctaatctctgaaaatgttttccagcctatggtgcatgtaatatactcttctatggtacctctttccratgtttttattgtggcaaaatatacataacagattataccatttttaagtgtagaatttagtggtagtaagtatagagagaaccttaaaagcagcaagagaaaagtgacttctcatgtgcaagggagcctctagaagattatcagtggatatttcagcagaaaccctgcaggccagaaggtggtgggatgatacattgaaagtactgaaagagtaaagcctgccaactgagaatactatatttgacaaaactgtccttcaaaagtgaaggagaaattaagacattcccaga

SEQ ID NO: 743274 - DNA, 649 bp, Homo sapiens
tattgaacttttagctttgctcatctactattttcttgatattattgagttgatatatacattctagtaaatttcactgagctatcttaattattttgaattgtcaggcaatttgtagatctctatttttggggggttgattacwggagatttatgagtttattttggtagtgtcatatttgctgattcttcatgatctacagactttcattaatgtctatgaagaagcaaatacctcttctttttttttttttttttttttttttttgagacagagtcttgctctgtcacccagctggagtgcagtggtgtgatctcagctcactgtaacctccacctcccaggttcaaatgattctcctgcctcagcctcccaagcagctgggatcacaggcatgtgccaccacgcctggctaatttttttgtattttttgtagagacagagtttcaccgtgttgtccaggctggtctcaaactcctggcctcaagtggtctgcccgccttggcctcccaaagtgctgggattacaggtgtgagccaccatgcccaatctctttctgtctttatagattggtttcagcaggtacaaaccttttcctgctggatcccttgactggatcacagtcaagtgggcctggagccatattaca

SEQ ID NO: 743275 - DNA, 649 bp, Homo sapiens
tattgaacttttagctttgctcatctactattttcttgatattattgagttgatatatacattctagtaaatttcactgagctatcttaattattttgaattgtcaggcaatttgtagatctctatttttggggggttgattactggagatttatgagtttattttggtagtgtcatatttgctgattcttcatgatctacagactttcattaatgtctatgaagaagcaaatacctcttctttttttttttttttttttttttttttgagacagagtcttgctctgtcacycagctggagtgcagtggtgtgatctcagctcactgtaacctccacctcccaggttcaaatgattctcctgcctcagcctcccaagcagctgggatcacaggcatgtgccaccacgcctggctaatttttttgtattttttgtagagacagagtttcaccgtgttgtccaggctggtctcaaactcctggcctcaagtggtctgcccgccttggcctcccaaagtgctgggattacaggtgtgagccaccatgcccaatctctttctgtctttatagattggtttcagcaggtacaaaccttttcctgctggatcccttgactggatcacagtcaagtgggcctggagccatattaca

SEQ ID NO: 743276 - DNA, 649 bp, Homo sapiens
tattgaacttttagctttgctcatctactattttcttgatattattgagttgatatatacattctagtaaatttcactgagctatcttaattattttgaattgtcaggcaatttgtagatctctatttttggggggttgattactggagatttatgagtttattttggtagtgtcatatttgctgattcttcatgatctacagactttcattaatgtctatgaagaagcaaatacctcttctttttttttttttttttttttttttttgagacagagtcttgctctgtcacccagctggagtgcagtggygtgatctcagctcactgtaacctccacctcccaggttcaaatgattctcctgcctcagcctcccaagcagctgggatcacaggcatgtgccaccacgcctggctaatttttttgtattttttgtagagacagagtttcaccgtgttgtccaggctggtctcaaactcctggcctcaagtggtctgcccgccttggcctcccaaagtgctgggattacaggtgtgagccaccatgcccaatctctttctgtctttatagattggtttcagcaggtacaaaccttttcctgctggatcccttgactggatcacagtcaagtgggcctggagccatattaca

SEQ ID NO: 743277 - DNA, 619 bp, Homo sapiens
  misc_feature 1, 2, 3, 4, 5, 6, 7, 8, 9, 10, 11, 12, 13, 14, 15, 16, 17: n = A,T,C or G
nnnnnnnnnnnnnnnnnaataaccaattagatttgattggatgctcagatggtgtttttattaatgtggtgaattacactgattttaaaatgttaggccaaacttgtgttcttgggataaactccacttggttatgatgtattatccttttttatatattgctggattagatttgttaatattacactargcatttgttgcctgtgtttatgaggtctacaggtcagttacattcttttctggtaatgtctttatcaagttgctgtgtcaaaattgtgctaacttcataagattactcatgcgctgcataacgatgtttgggtcaacaatgggctgcatatatgacagtggtctcgtaagattataatggagctgaaaaattcccattgcctagtgacatcatagctgtcatgacatggtagcgcaacacattcctcacgtgtttgtgatgatgctggtataaatatacctactgtgctgccagtcatgtgaaagtatatcatatatattaatagttatatatacataatacttgataataaaaatgactatgctactataattactgcactatactttttatcattttagagggtagtctttctacttataaaaaaag

SEQ ID NO: 743278 - DNA, 631 bp, Homo sapiens
acccctgataggccctggtgtgtgttgttcccccaccccatgtgtccatgtgttctcatcattcagctccctcttgtaagtgagaacatgtggtgtatggttttctgtttctgcgttagtttgctgaggataatggcttccagctccatccatgtccctgcaaaggacatgatctggttcctttttattgctgcatagtattccataatgtatatgtaccgcattttctttatccagtctatcattgatgggcatttggattgattccacgtctttgctattgtgaatagtgcaaatgaacatacatgtgcatgtatctttataatataataattcatattcctytgggtacatacccagtaatgggattgctgggtcaaatggtatttctgcctctaggtctttgaagaatcaccatactgtcttctacagtggttgacctaattaacattcccaccaacagtataaaagtgttcctttttctctgcaacctcgccagcatctgttattttttgaccttttaataatcaccattctgactggcatgagatggtgtctcattgtggttttgatttacatttctctgatgattagtgatgttgagcttcccccaccccccatttatttattt

SEQ ID NO: 743279 - DNA, 510 bp, Homo sapiens
catacattgccagagagaagtgtctacacaggaaatgaatgactaggtaagaggggagggaaggaagaaaaagaaaatgtgtgatttttaaaactgaggtccttggttacagtacatatagatttaactggtttcataaatarctagatcatattccatattagaatataaatatatacaaatatattcaatcatttatctgctcttggaccttcaggttatttccttttttttttttttgccactgtaagcagtgttcccataaacataaactttcttttttttttttttttttttttggcggcagggtctctgtcacccaagctgtagtgcagtggagcgatctaggtatctaggttcactacagcctccgcctcctggactcaagagatcctcctacctcaacctcctgtgtagctggtactaccggtacacaccaccacacttggctaattttttaaaatttttattttttgtagagatgagatctcactgtgctgcccaggctgg

SEQ ID NO: 743280 - DNA, 512 bp, Homo sapiens
aaatttaaaaaagttaatcctgttattgcccagcctactgcctggagagagtttcagggcatggcacaaggagggggaaccccagcagagcccagaacactctctgaataaaggagatgggagtccaaggagattaaggcagttagaattcagtagaacagaataccagaagagagagttgcacaggaaacaaaaaacccagatatctkcagaagatttctctaaattattcaactgagtatggtcaacacatgtatgtgaggaaggcatgtaagaccaaaaacaaaacaacagaatagatcagtaagaaaagaacatgtggttcacataagactgggactaatgcctgtttctacccagaatagtgaaacatttcataattcacagtgcactgagtagagtactcagaaaggttttacctaagtggtggttaaaaaaaaaaaaagtctcagattaaacgtttctttggtcctgcttaacagagcttaaaagtaagacctgaggagatcaaa

SEQ ID NO: 743281 - DNA, 673 bp, Homo sapiens
ggctggctttttatggatctgtgagttcccagaagtcatatgcaaaattctgtttaatcctcatacgtatatggggaggtatttctttctttttttttttttttttgtgacagagtctcattctgtcacccagtatggaatatagtggtgtgatcttggttcactgcaacctccacctcctgggytcaagtgattctcctgcctcagccttcagagtagctggaactacaggtgtgcaccaccacacctggctaatttttttgtatttttagtagagatggggtttcaccatgttggccaggctggtgtcgagctccttacctcaggtgatccgcccacctcggcctcccaaagtgctgtgattagaggcgtgagccaccacacccggcaggatccatagtttcaatctgactcatggacctgaaaaagttaagatccactgctgcttcttatttctctttaaaaatggctacgaggaattaggggtaacatggagtgggaaataaggggcaggagacaccaaagctcttccagtattaattagcctctttccgtccaaggctccatgtatccctccacctcccttcatcctttccacctcactaaaccatggacagcactctaaagtttagactgtttcaacaatatagctgaacaaaaactaattcctgga

SEQ ID NO: 743282 - DNA, 611 bp, Homo sapiens
acgtatagattgtgaagattttctcccactctgtgggttgtctgtttaccctgctgactattccttttgttctgcaaaatctctttagtttaattaagtcccagctatttatctttgtttttattgcatttacttttgggttcttggtcatgaaatccttgcctaagccaatgtctataagggtttttccaatgttaacttctagaatttttatagcttcaggtcttaaatttaagtccttaatccatcttgagttagttttcgtataagatgagtgatgagaatccagtttcattctcctacatgtggcttgccaattatcccaacaccatttgttgaatatggtgtcctttcctcactgtatgtttttgtttgctttgttgaagatcagttrgctgtaaatatttgggtttacttctgggttctctattctgttccattggtctatgtgcctatttttataccggtaccatgctgttttggtgattatggccttctaatacagtttgaaatcaggtaatgtgctgtctctagatttgttctttttgcttagtcttgctttggctatgtaggctcttttttggttccatatgaattttaggattgttttt

SEQ ID NO: 743283 - DNA, 511 bp, Homo sapiens
gccattattgtaccactgcactccagactgggctacagagtgagaacctgtttcaaaaaaaaaaaaattataagaaaagaaaagtttgaagtatggtcccaacctgaactcaagattggtggtaatgctgatttttcaggttctgagtgtgttattaacagcagatctcttcttctaacagccttcaggttacggcgtaatgatcagatattcatcactcggatataaccaatatcgatccacaaaaagatgactgctttaacccactcacaatcatcctctgctccaggccctttctgttggmctctcagatccatgctcttcaagagcactgggtgccccaagggacctgcctccatgtctacatcaaagactcccttgtcacctggcttctgttggttcagccacaggaggcactggcaggaagtcagggtgagaaagaagagtaagttcaagtcatgtttgcatgattccatcactgtgggtcatgcctacggtggcttgagttttt

SEQ ID NO: 743284 - DNA, 552 bp, Homo sapiens
atgaagaacatgagaaatgaatgacatcaaacaggaataaaatactgcaaagtaccttatttttcactatcaagctgaaacaccaatagtgtggcagagaatttcagtaagcaactaccagaggggctcctcataacacaaaaagtcagcagaagtaccgctcttggtatcttcctttggtataagagttatcagtcaggagcacttctgacactctcttgaaattccaagctgctctcagagacatgggggagggaggttcttaggattataattttagagtcagccaaagctactttgggaagcagcttccagtrtgaagactttttggccaaatagaacatcccaaaccttttccaccttcataggaattgcagcagtaccctaaagttccagggtttcttatggctcattcaaaccacactacctcaaagcagcactcttctctcttgctgatggaaatgagttttcttggtggctattcaatcctgatcaacactttgggcattgtgggataaacttctgcccagcaacccaacatgcccaccaacc

SEQ ID NO: 743285 - DNA, 609 bp, Homo sapiens
actactgtgcccctcttgctccctgcctggtagagccaaaagagtcagcaagaaaataagaaaaagtagtttgagacatatttgaaaataaattcacaatacaaaaaggatctcttgcccaatcattaaagaataataaatcaataataaattatgcaagtaacatctgccaatataaatatgcagtgtgactagaaaccaataacaaaaagtaaaatctacctgattggagacaagaatccttttaaaaataaatcttgagtcaaaggaaatatacaaatcaaaattatagaatttytacaaaaaaagcttatagaaaccatgttaacatttttaaaagaaagaaaataaaagcaataaacatacaattcaaaagttaagaaaacacacaaagacactaaaaagtcaaaataaggaaagagggagaaatacaagtggaaaaatcagtaaagtaggaaaaaaaaaaaaaacagaaaaaaaatgcccaggtcatttattgttcacagttttaaacccaggatgtatgtatctgatatgcagtagcaggggcttttgagggccctggccacttaaatagtagcatgctctcttcagggtaaattggatggg

SEQ ID NO: 743286 - DNA, 417 bp, Homo sapiens
gtagaaattcccttgaaatgctcaagtactgtggcactgcggtacaacataatgtctctccatgattgattagtttagccaaagttcttcactctttatatgaataaaccaaggtaatgcatagcttaattaataaataatatattctcttaacaagcattatggtcyattgttaaatcttttaaatatataaatatattgtaaatgtattttgcttttgttatataaatgtaggaacttgacagagaccggaatggagaaatagacaagaatccacaatggagggcagatggaatacagtcattgtcttaggctcttgggtctaatagatctggtctgaaagattggctccttctgtttaaagttgtgtgactctgagcaacttgttttaaattctacaagcatcagtttcctcaa

SEQ ID NO: 743287 - DNA, 661 bp, Homo sapiens
aagttcatttaccattttggaaatcctagggccctttaaattatgctaaatctactctgcctgcactctataaatggaacaacaaagcctggatgacagcttatccctttatatcatggtttgctgagtactttaagcccactgttaagacctactgctataaaaaaaaatgattcctttcaaaatactactgctcattgacaagggacctggttacccaggagcactgatggaaatgtgcaaaaagattaatgttgtttttatgcctgctracacaacatttattctgcagcccatggatcaaggagtcatttcaactttcaagtattattacttaagaaatacattttataaggctttagctggcatagatagtgatttctctgatagatctgggcaaagtaaattaatacccttctggacaggattcatgattctggatgtcattaaaaacgtgtgattgatgaaaagagatcaaaatggcaatattaccaataattttgtaaaagttgattccagctctcatagatgactttgaagggttcatgacttcagagaagggagtcagtacagacatggtaaaaacagcaggagaattagaattagaaggagagtctgaagatgtgactgaattgctgtgatctcataatttgaatgcatg

SEQ ID NO: 743288 - DNA, 661 bp, Homo sapiens
aagttcatttaccattttggaaatcctagggccctttaaattatgctaaatctactctgcctgcactctataaatggaacaacaaagcctggatgacagcttatccctttatatcatggtttgctgagtactttaagcccactgttaagacctactgctataaaaaaaaatgattcctttcaaaatactactgctcattgacaagggacctggttacccaggagcactgatggaaatgtgcaaaaagattaatgttgtttttatgcctgctgacacaacatttattctgcagcccatggatcaaggagtcatttcaactttcaagtattattacttaaraaatacattttataaggctttagctggcatagatagtgatttctctgatagatctgggcaaagtaaattaatacccttctggacaggattcatgattctggatgtcattaaaaacgtgtgattgatgaaaagagatcaaaatggcaatattaccaataattttgtaaaagttgattccagctctcatagatgactttgaagggttcatgacttcagagaagggagtcagtacagacatggtaaaaacagcaggagaattagaattagaaggagagtctgaagatgtgactgaattgctgtgatctcataatttgaatgcatg

SEQ ID NO: 743289 - DNA, 611 bp, Homo sapiens
ttttactgatgtgatattttaccttagtttagttgtttttaaaaccagtgcacaaaagcattatttttctaaagattaaaaaccatccagtagatgtttttaaaacagtagagtacacttgttttcatgtataaatgctgttcactaattgttgtggacactaggaactctcttagctagaccaagggggaaaaaaaaaaaaaaacttgtgtttgtaaagtcatttaaacctttcattaagtttaaaaraaagggatcctagttgcttataaaatctgtttaaaaatattcttttataggacggtttagtgttttgattattgaacaaaataagacatatgacagcacctagcatagacgcttaatagctgtttatagtatgtgttcaacaaatatttgttgagttagaatgtaaatcttacttgatcagagatacaggtattctgctgcttgaaaaatcatagaaaagaatggcaaatttggcattttgttttgaagtcctgttgaataactgtcactctcctacctgtaggcattgatctaatggaggtgaattttacaaggataagttctatggcaatctataagttaaatgatgtaattctattgta

SEQ ID NO: 743290 - DNA, 611 bp, Homo sapiens
ttttactgatgtgatattttaccttagtttagttgtttttaaaaccagtgcacaaaagcattatttttctaaagattaaaaaccatccagtagatgtttttaaaacagtagagtacacttgttttcatgtataaatgctgttcactaattgttgtggacactaggaactctcttagctagaccaagggggaaaaaaaaaaaaaaacttgtgtttgtaaagtcatttaaacctttcattaagtttaaaaaaaagkgatcctagttgcttataaaatctgtttaaaaatattcttttataggacggtttagtgttttgattattgaacaaaataagacatatgacagcacctagcatagacgcttaatagctgtttatagtatgtgttcaacaaatatttgttgagttagaatgtaaatcttacttgatcagagatacaggtattctgctgcttgaaaaatcatagaaaagaatggcaaatttggcattttgttttgaagtcctgttgaataactgtcactctcctacctgtaggcattgatctaatggaggtgaattttacaaggataagttctatggcaatctataagttaaatgatgtaattctattgta

SEQ ID NO: 743291 - DNA, 667 bp, Homo sapiens
gaaccttggtgcatttgtccaggccaggagccttcaggagctgggccaaaaatggacaaggtgcaagtaaaggtatctagaagaaaatgccagcaagcaattgacaatggctgggtctttagaggtggtttaggctacagatttggatgttggggccattcctattgaggtaatagttgacatcactgatggtgacacatagggagaaaaaagtgtgscttcacaataatgggatggtagtggaaaattcagctaaaatgaaacttaaagggaagatggtagaagataaaaaaagaccaacagagcagtactatttactgcataaagagaggcagaactacaagtggctaagtgtggttgacggcatcaagtgctgttgaaaggtggaagacagcattgttaagtgaccattgaacattgttaaccaaaaggtcgtttgtcactgatgaccttcacaaagagaatttgattagcataacctgagtaaagaaagaagctaagagattaaggaggttacagatggtattattagaggctattttgggcttccagcttaatcaggagggagagatacaagtccaagctattcttgttcatatttctttgtgactgatgtcttagactcctgcatttttcttcaatacctttttgccttagaataattgac

SEQ ID NO: 743292 - DNA, 615 bp, Homo sapiens
ccagagggtatgtgcaatgcaccatgtcctatgcatatacgcacaatactgtatgtgcacatgtatatgtcacatgtacacaggtacggggccgctgttcccagggcaggatcaggaaagatacctgatccagtgcccagcacagccatttctgaaccatatagatattattccatgaaaacacacagaagagtcttctctaacagctgagacccctttttaggatgatgatgatggtgattttgtttaycattcactgagtgtctgatacgtgacgctggagaccggggctggcactgtcaagtgagagagacagattataaacataataaacagtaggattctggttcaagatgactgactggagacatcagacacccaccccctccagaacggagaacccacattatgaggagacaatcacgctggggacccagaggggccctgccctccatgagcctccaggctgggagacagagacaggtctccccttcaaggatagtaataatggcaaatgtttccatcccccttgccctgtgcaggcatatgtacatgtacctgtggcagtgcagcagcagcagaattcatttttctcccagcaattgcaaagcagag

SEQ ID NO: 743293 - DNA, 458 bp, Homo sapiens
tcacaccaagaagttgacattttactgtagcagtcatcaaagagttgtcagctgaagggcaataagatcagatttgtgagcttttttgttttgctttgttttgttttgtttttgaggcagggtctcgctgtgtcacccaagctggaatgcagtgtcacaatcacagctcactgcaacctcagcctcccgggctcaagcaatcctcycacctcagcctcccaagcagctaggactacaggcacatgccaccatgcccagctaaattttttctattttttgtaaagatggggtctcactatgttgcccaagctggcagatttgggttttagaaaggacattctggcagcagtgggtgaagtgggtcaagagatggaggcagggagatcacgtaggaggacattaaagcaatcctggtgagaaatcaagaaggcctgaattaatggagagggagaagagat

SEQ ID NO: 743294 - DNA, 600 bp, Homo sapiens
aactcttcagaatagctgctgcctgctagcaagagggagggctgcctgggatgggcaccagggagctttctaaggccaaggaaatgttctatatctccatctgggtactggttaccacagacatgtgcatatgtaacaattcatctagctgttcacttagtatacattagctgtacacttgtgatattactatgttacacctcaactggaaaaaaattacacacratgtccaagtgccttctaagtttcagctgcaaatttaagaaagctgtattgtttcacgtgcccgcactattactagcttctgagaaatacatgtacacttacatatacaggaggagttaataaaaataacagcagctaacatttacagaggttttactatatgccaagtgcttgactttcattatctcatttaatcccacaacaatggtaagacataatttctgttattatacccattttacagacaaagacccccaaggcttaagtcaagatcattgcccaggctcacataaataacaagaagtgagctggtctacaacaagaatagctgaaaagcaagctctatgtcagcgtccaaattctctgtttgtatta

SEQ ID NO: 743295 - DNA, 600 bp, Homo sapiens
aactcttcagaatagctgctgcctgctagcaagagggagggctgcctgggatgggcaccagggagctttctaaggccaaggaaatgttctatatctccatctgggtactggttaccacagacatgtgcatatgtaacaattcatctagctgttcacttagtatacattagctgtacacttgtgatattactatgttacacctcaactggaaaaaaattacacacaatgtccaagtgccttctaagtttcagctgcaaatttaagaaagctgtattgtttcacgtgcccgcactattactagcttctgagaaatacatgtacacttacatatacaggaggagttaataaamataacagcagctaacatttacagaggttttactatatgccaagtgcttgactttcattatctcatttaatcccacaacaatggtaagacataatttctgttattatacccattttacagacaaagacccccaaggcttaagtcaagatcattgcccaggctcacataaataacaagaagtgagctggtctacaacaagaatagctgaaaagcaagctctatgtcagcgtccaaattctctgtttgtatta

SEQ ID NO: 743296 - DNA, 478 bp, Homo sapiens
acaggggaggctgttcacattcctcttggtgtcctcatgtcacgtgctttcctcccagatgtaggacaagccaggatgctctcccaggaggctcttcaggagagaagggagggagaaggtcagagagtcaccttcccaggtttcatggctgctgcagggagaaagggcgaggggaaggtgagcaaggcttcctgcttctgttgttttctcaaacgcccaggcaccatgttttggggtggcatgtcctgaacctggyctggcctcacctcactataggctcctgtttcttttcttttttttttttctgtttccgcctccctccctctaaacattctaatttaccccaagctctcttccccagaactctcgtgtctgacagagctcgaattctgtcaaccaggctggtcagctccagactctgactaatgaaatgcacttgttattaacttatctccttcaggagcaactctcaatccat

SEQ ID NO: 743297 - DNA, 632 bp, Homo sapiens
ataacaatattagccttaaatgtaaatgggctaaatgccccaattaagacactggcaaattagataaagcgtcaagacccatcrgtgtgttgtattctggagacccatctaacgtgaaaagacacacattggctcaaaataaagggatggaggaatatttaccaagcaaatggaaagcaaaaaaaagcaggggttgcaatcctggtctctgataaaacagactttaaaccaacaaagatgaaaaaagacaaagaagggtattacataatggtaaagggatcaattaaagaagaagagctaactatcctaaatacatatgcacccaatacaggggcacccagattcataaaacaagttcttagagatctataaagatatcttcaaatcttagagatcaacaaggagagctaactatcctaaatatatatgcacccaatacaggagcactcagatttataaaacaagttcttagagatctacaaagatacctacaaatcttagagatcaacaagaagagctaactatcctaaatatatatgctcccaaaacaggagcacccagattcataacacaagttcttagagatctataaagagacttacactcccacacaataatagtgggagactttg

SEQ ID NO: 743298 - DNA, 602 bp, Homo sapiens
aaaaacactccttggcaaacgcaaatgaatggaaatcataacgaacagcctctcagaccacagtgcaatcaaattagaactcaggattaagaaactcactcaaaaccacacaactacttggaaattgaacaacctgctcctgaatgactaccgtataaataatgaaattaagggagaaaaaataagttctttgaaaccagtgataacaaagagacaacatatcagaatctctgggacacagctaaagcagtgttaagagggaaatttatagcactaaatgcccatatcagaaagctggaaagatctcaagttaacaccctaacatcacaattaaaagaactagagaagcaagagccaacaaatgcaaaagctagcagaagrcaagaaataactaagattggagcagaactgaaggagatagagacacgaaaagcccttcaaaaatcagtgaatccaggagctggtttttttggggggaaagaaaaagatagaccaccagccagactaatgaagatgaaaagggagaggaatcaaatagacacaataaaaaaatgataaagaggctatcaccactgatgccacagaaatagaaactaccatta

SEQ ID NO: 743299 - DNA, 602 bp, Homo sapiens
aaaaacactccttggcaaacgcaaatgaatggaaatcataacgaacagcctctcagaccacagtgcaatcaaattagaactcaggattaagaaactcactcaaaaccacacaactacttggaaattgaacaacctgctcctgaatgactaccgtataaataatgaaattaagggagaaaaaataagttctttgaaaccagtgataacaaagagacaacatatcagaatctctgggacacagctaaagcagtgttaagagggaaatttatagcactaaatgcccatatcagaaagctggaaagatctcaagttaacaccctaacatcacaattaaaagaactagagaagcaagagccaacaaatgcaaaagctagcagaagacaagaaataactaagattggagcagaactgaaggagatagagacacgaaaagcccttcaaaaatcagtgaatccargagctggtttttttggggggaaagaaaaagatagaccaccagccagactaatgaagatgaaaagggagaggaatcaaatagacacaataaaaaaatgataaagaggctatcaccactgatgccacagaaatagaaactaccatta

SEQ ID NO: 743300 - DNA, 633 bp, Homo sapiens
ccagaggagacatttgttggagatgaaatagagcctttcttaaaagtagaagggaaataaacctgtcttggagggctgccacaggggtccactctgctggaccttggcagtgagagcagtgtccaaatactgtggccctgcacagctgggctgcccctttcctggtccttgcagggcatgtggttagccgggaccagaatggccacatctggaccaggtcaggagaccttcctgattgggccagaaagactatgtatcagargaggaagaagtggcattgcatccaccaagtcctcttccagccaagtgttcgaaaactctgaacaggtctggtggaattgttggagttaatattgctgtgctttgcctttattcaccagagaagcaaagagaggaccatcaagatcacttgaacggggatgtgctggctgcttgcctcctccttgctactaactgacaccaaagacattgtacatgtctgtgctaaaatcctgtgtcctataaatggaggtgtccagagaaagccaccaacttccattagagctgttaaggaaacctttgatgggctttgcgggcatgagtcatccagggaatcgaccttcacatcaaaatctgtcatttcttctttcctga

SEQ ID NO: 743301 - DNA, 626 bp, Homo sapiens
tatggttgggcacagtggctcgcacctgtaatcccagcactttgggaggccaaggagggtggatcatttgaggtcaggagttcgagatcagcctggccaacatggtgaaaccgtctctactaaaaatacaaaaattacctgggtgtggtggtgcatgctggtaatcccagctactcaggaggctgaggcacaagaatcgcttgaaccstggaggcggaggttgcagtgagcagacattggccactgcactgcagcctgggggacagagcgagactccgtctgaaaaaaaaaaaagaaatgaaacatataaaaagacaaagtatatctaatctacaatggtagatcttcagatctttggaggggagggagaaaagtagttgtatggggacacaagtgacactgatgctgttccttggttacatacatgtattcactctgtaatcatttattaaggtttacgtgagtgctctttgcatgtatttctgtgtgcatggtatatatcaataagtattaaatattccatatttgcacaaaaaaattggaaccctcacacactgctggtggaaatgtaaaatggtgcagtacatgatacctgcagtgatgataagatgatcgagatagtgatc

SEQ ID NO: 743302 - DNA, 625 bp, Homo sapiens
gccaggaagaaaatacgatttctgaggtgacagaaggaaattgtagtcgagagctgatgaatgagaggacatgacccagcctttcgagagaggaatgcagaagctctgccccacagcatttgggcagcaggagcagaatctcctgctggaggcagccggggcgttgggtgagcccagtccctgaaatgacaggtaggaggggttctggtcatggtctcagagggagggacccctgtgctggcttaggggtctccgatccccccacctcagaaatgggaggtgagtgtgtggcacctgcacgttccccaaggcccctgcaggctccctccctgcttgcgcagcctcagtcacatctgtgcattgggctgtgcccagctcctgagtctccttgggacccctgatgagcacagcccaggctctcagtctgcrggccagatccacggctgatttgctcttctgaccctgaaaacgctggcatggaggctcccgcgtccccagacctgctgaccgtgtgatagaggccccagtattgaggaggatttggacttctcatctcagcaaggaccagagtgcagctcaagaaatgaacagggagcctctgttgtgatactcacgtctgacctaa

SEQ ID NO: 743303 - DNA, 542 bp, Homo sapiens
agctgcactgtatcggaagggcaacaaacgggactcttaagctaaggggaagacttgtgtcgtcgacttccggcccatgtgtaatctcttaattaaaatttagctcacaagtggtatttcctttcgtaatccagctttcaggctttgctttaggtgcaggaaatctctcactccttattctctttgaagggtctggaaatcctgttaatatttaattggcttttaaattattgacacatcaaagtgttcaacctattgttgtcctttgaagagctagcgcctagtggasctcctggcaggtgttccaagttcttgggcttagagcaccattagagaaaggatggtggagagaagtcaggaccactccattttggaagcagaaagccttggaacctagttaattggatcacactttttccatctagtttccaggtgttagatatttaagtcttgtctttttttaagagagtaatattaattagttcattgatcatgctccctgaggaaagggccatagcttgaacttcttgttatctaatagg

SEQ ID NO: 743304 - DNA, 617 bp, Homo sapiens
ggattggggaagcagcacgggatcccagcctcaagcctgcccggacgctgttggttggggtgattccccccaaaagtcgtgccgcaatccgtgatctcgagcacaggtcagcctgcgtgcccctgggctgctctctcacccgagagtggttctcctccagagcagaaccccacagcctcaggggttgcctgagggtgtgtgtttcaatgcctctgctctatgactctgtgtgtgtgtgtgtgtgtgtgtgtgagtgtgtctgtgtctctgtctcccattctctcttctctctctgtctctcagtctctgtgtgtttctttcccactctttgtgggtttgtgccagccgaagttgcgtcagggctaccaggtcggtggaggawtgggggtgttgcgaattttgcagaaacctctttactcctctcgtagccagtagaaaacgtggcttgggtcgggcacaggcggcccccccaccacccggatcccaggtgttgtttgattttccttggcattgacggaaaggtcacccgtttcccccttccaccggcacatgcctggaccccacccttcgtttcgccgtcgccccgtatgcctccgatgacacacattaacaccaac

SEQ ID NO: 743305 - DNA, 617 bp, Homo sapiens
ggattggggaagcagcacgggatcccagcctcaagcctgcccggacgctgttggttggggtgattccccccaaaagtcgtgccgcaatccgtgatctcgagcacaggtcagcctgcgtgcccctgggctgctctctcacccgagagtggttctcctccagagcagaaccccacagcctcaggggttgcctgagggtgtgtgtttcaatgcctctgctctatgactctgtgtgtgtgtgtgtgtgtgtgtgtgagtgtgtctgtgtctctgtctcccattctctcttctctctctgtctctcagtctctgtgtgtttctttcccactctttgtgggtttgtgccagccgaagttgcgtcagggctaccaggtcggtggaggattgggggtgttgcgaattttgcagaaacctctttactcctctcgtagscagtagaaaacgtggcttgggtcgggcacaggcggcccccccaccacccggatcccaggtgttgtttgattttccttggcattgacggaaaggtcacccgtttcccccttccaccggcacatgcctggaccccacccttcgtttcgccgtcgccccgtatgcctccgatgacacacattaacaccaac

SEQ ID NO: 743306 - DNA, 380 bp, Homo sapiens
gtgtttctttcccactctttgtgggtttgtgccagccgaagttgcgtcagggctaccaggtcggtggaggattgggggtgttgcgaattttgcagaaacctctttactcctctcgtagccagtagaaaacgtggcttgggtcgggcacaggcggcccccccaccacccggrtcccaggtgttgtttgattttccttggcattgacggaaaggtcacccgtttcccccttccaccggcacatgcctggaccccacccttcgtttcgccgtcgccccgtatgcctccgatgacacacattaacaccaactgttgtggcattggccagtgccacgcgtggtcacatggtctccccctgggattcccctctcttcctctttgca

SEQ ID NO: 743307 - DNA, 465 bp, Homo sapiens
atgatgaaaccccaggcggagacgggggaagcagcacgggatcccagcctcaggcctgcacggacggtgttggttggggtgagtctcgccaaaagccttgccgctgtccgtgatctcgaggacgtgtcgggctgcgtgcccctgggctgctctctcacccgagggtcgttctcctccagagcagaaccccggagcctcaggggctgcctgggggtgtgtgtttcaatgcctctgctgtatgactctgcgtgtgtgtgtgtgtgtctgtgtgtttgtctcccattctctcttctcyctctgtctctcagtctctgtgtgtttctttcccactctttgtgggtttgtgccagccgaagttgcgtcagggctacgaggtcggtggaggattgggggtgttgcgaaattggcagaaacatctttgttcctctggtaggcatttgaaaacgtggcttgggtcaggcacag

SEQ ID NO: 743308 - DNA, 426 bp, Homo sapiens
aaaactggaacatttctactgacttatttccatgacttcctttgctccagccactgaacactcactcccggtgtgtccttactaaaatgttagttaatgtgttatctgttcatgatagtgcagctgtctgcataacttctgtgtatttgtttatttatttaatttatttttttgagatggattcttgctctgttgtccaggctgaagtgaattggcgcgatctcggctcactgcaacctccacctcctgggttcaaacgattctcatgtcascctcccgagtagctgggattacaggcacacaccaccatgcccagctattttttgtatttttagtagagacagggtttcaccgtgttggccaggctggtcttgagctcctgacctcaagtgatctgcctgcctctgcctcccaatgtgctgggat

SEQ ID NO: 743309 - DNA, 426 bp, Homo sapiens
aaaactggaacatttctactgacttatttccatgacttcctttgctccagccactgaacactcactcccggtgtgtccttactaaaatgttagttaatgtgttatctgttcatgatagtgcagctgtctgcataacttctgtgtatttgtttatttatttaatttatttttttgagatggattcttgctctgttgtccaggctgaagtgaattggcgcgatctcggctcactgcaacctccacctcctgggttcaaacgattctcatgtcagcctcccgrgtagctgggattacaggcacacaccaccatgcccagctattttttgtatttttagtagagacagggtttcaccgtgttggccaggctggtcttgagctcctgacctcaagtgatctgcctgcctctgcctcccaatgtgctgggat

SEQ ID NO: 743310 - DNA, 623 bp, Homo sapiens
atcccttgagcccaggagttcaagacaagcctgagtaacagggagagcctcatctctatagaaaatttaaaaatttaattagcctatcatggtggctcacacctgtaatcccagatacttgggaggcttttttgaggttatagtgagttatgatccagctactgtactccagcctggtgacagaayggcatcttctctctataaaaataaaaataaaaataaaatctatgacatttaactgattacttatttaatcaattaattggaataaatgatatcctgattatgacatttcaatagacatattattatttattttaatatttgaatagagtaaataaagacctatttttctttcaatttgtcatttattttatgttgctttgaatagaaaactaatgctgcaattgtgtacaccattaaatcattaggttctaatttccttgatctattacgaaaagtgattttcaatttgaatatcaagggcattatttgcagaatattgttattctgcaaatatattctgcaaatacattctgtaatatttaaatatcataatcaagcaaactcttaaatgtgacacctgaaacaattataggcaaagaaaatactagtaatatagc

SEQ ID NO: 743311 - DNA, 625 bp, Homo sapiens
cttgagcccaggagttcaagacaagcctgagtaacagggagagcctcatctctatagaaaatttaaaaatttaattagcctatcatggtggctcacacctgtaatcccagatacttgggaggcttttttgaggttatagtgagttatgatccagctactgtactccagcctggtgacagaacggcatcttctctctataaaaataaaaataaaaataaaatctatgacatttaactgattacwtatttaatcaattaattggaataaatgatatcctgattatgacatttcaatagacatattattatttattttaatatttgaatagagtaaataaagacctatttttctttcaatttgtcatttattttatgttgctttgaatagaaaactaatgctgcaattgtgtacaccattaaatcattaggttctaatttccttgatctattacgaaaagtgattttcaatttgaatatcaagggcattatttgcagaatattgttattctgcaaatatattctgcaaatacattctgtaatatttaaatatcataatcaagcaaactcttaaatgtgacacctgaaacaattataggcaaagaaaatactagtaatatagctcacag

SEQ ID NO: 743312 - DNA, 600 bp, Homo sapiens
gggagcttctgagccaggagaaggaatttcacaaagtaatgtcatcagttaaggcaggagccagccattttcacttcttttgattcttcacttgtttcaggccatatggatgtatacgtgcaggtcacaggagatacgatggcttagcttgggctcagaggcctgacattcctgtcttcttatattaataagaaaaataaaacaaaatagtgttgaagtgttggggtggtgaaaattttggggggtgctatggagagataatgggtgatgtttctcagggctgcttcgagtgggattaggggaggcatgggaacctagagtgggagagattaagctgaaggaagattttgtggtaagaattgyggggttgttaagaggagcatttgtcatatggaatgattggtaatggcctggatgcggttttgtatgaattgagaaactaaacggaagacacaaggtgtgaataagtgaaggagaaaaacaggtattaaatgactaagaattgggaggacccaggacatccaattagagagtgctcaagggggttcagcagaattacttgtttggttggtgagttttggggctctatccttgacagag

SEQ ID NO: 743313 - DNA, 497 bp, Homo sapiens
tgtagagatatgcacatatagatgacagctgtacacccatgcatatctatatccatgcatgcatgcacatgctttatcaggccttccactccttaacagcctacagatagaaaacttagaggagcagcagggacgtactttcatgtactaagctacctagcatacaacttttaatggtttttgattttaaatggaaagaatctttcagcgggagacatcaaagggcctargaaaaaaatggttttggtattaagtggctagtatgcttgtcaaaaaatgacaagaaataattaaaactaaactgaaacaaccaccacccctacaaaatccagaacaatgcacctcatttaaatgtttgtgaggaagtagaattgagtatctttctcacaagtaagttcttcttgaggcagaacagacaagaaacaagaactagaagtatttacaaatctatgtcagtggtagaaatttctccagcaggaaaacagagcctcaggctg

SEQ ID NO: 743314 - DNA, 558 bp, Homo sapiens
ttcactattattatatctgttatggtgatctgtattcagtgatctttgatgttgctactgtaatatggggagaaaccacaaaccatacctttaagagatagcaacttaatcaatacatattgtgtgtcctctgactactccactgarcagaatttccctgtctctctccctctcttagtgactccaatttgtgagacacaacaatagtgaaattaggccagttaataaccttataatgggctctaagtgttcaagtgtaagaaagagtttcatgtgtgttactttaaatcaaaagctggaaatacttaagcctagcaaggaagacatgtcaaaagccaacttagatctaaagctagaactcttgtttttaacagttagccaagttgtgaatgcaaagaaaaaattcttgaaggaaatcaaaacttctactccagtgaacacaggaatagtaagaaagagaaacagccttattgctgagacttggaatgttttagtggttcggccagaaagtcaaatcagccacaacattatcttcagccaaaacgcaatctagaccaa

SEQ ID NO: 743315 - DNA, 656 bp, Homo sapiens
tcttgttgggaaaaatgataaattttgagacttgaatcattatttagtgttatctttcattattttgaaatatactattaagttacagtgagtgttttgaaatatttccaggagacacttagtgttattacaaacactactgataatagaccatgatattcaaagaaatagaaggaaaaaaaaggtggtttaaagtcatataactgtaaataacatggtcttaccagaaaagtcatccatccatccactcactcatttgtaaagtgcctgatgccactataaaatattactatgrcaggatgccataacagaattcttaaagatcccagagttttgcagagtggtctcagtaatgcaaagatgctttacatttgagagcaggaatatcagtgtagacaacaggcatatattgaaaatcaagtaattggcagacactataatctttcagacataacccagtcttttaactcattgcctggtggcaaacagatttaaaaaaatgtcaacaatactataagagatcagataaagtgttttgagaatttcaaggataagatataaaagaaatgcctagaacagggatcctttatccaaagttctattcatagaagcaaggtccaattatttcatgtctctcagtattcaatgtgaagatt

SEQ ID NO: 743316 - DNA, 643 bp, Homo sapiens
aacattaagatttgactgcccttctggatttcagactttcatggggcctgtagcccctttgtttgggccaatttatcccatttggaatggctgtatttactcaattcctgtacccccattgtatctaggaagtaactaattgcttttgattttacaggctcataggaaaaagggacttgccttgtctcagttgggcctttggactgtgaacttttgagttaatgctgaaatgagttaagacttttggtgacagcatgattagtttttaaatatgaggacaggagatttaggaggggccagggtgactatggtttagctgtgtccccaccaraatctcatcttgaattgtagcccccacaattcccatgtgttatgggagggacccggtggcaggtaattgaatcatggaggcgggtctttctcatgctgttctcatgattgtgaatacgtctcatgagatctggtggtcttacaaaggggagtttccttgcacaagttgtcttctcttgtctgccaccatgtgagacatgcctttcccctaccaccatgattttgaggcctccccagccacatggaattgtgagtccattaaatctctttcttttgtaaatcgttcagtctcgggtttgtctttaccagcagc

SEQ ID NO: 743317 - DNA, 587 bp, Homo sapiens
tctcacaacacatgggaattatgggagtacaattcaagatgagatttgggtggggacaacacaaagccaaaccatatcattctgcccctggcccctccaaatctcatattctcatgttataaaccattcatgccttcccaacagtccaccaaagtcttaactcatttcaacattaacccaaaagtccacagtccaaagtctcatctgagacaagcacgtcccttccacctgtgagcctgtgaaaccaaaagcaagctasttacttccaagacacaatggagatacaggtatagggtaaatacatccattccaaatgaaagaaattggccaaaacaaagtggttatggggcccatgcaagtctgaaatccagcagggcagtcaaattttaaagctccaaagtgatctcctttgactccagatctcacatccaggtcatgctgatgcaagagatgtgtttccagatgtgtatccatggtcttgggcagctccccaacctgtggtttttcagggtacagcctccctcctagctgctgtcatgggctggtgttgcatgtctgtggcttttccaagtgcataggtgcaagct

SEQ ID NO: 743318 - DNA, 587 bp, Homo sapiens
tctcacaacacatgggaattatgggagtacaattcaagatgagatttgggtggggacaacacaaagccaaaccatatcattctgcccctggcccctccaaatctcatattctcatgttataaaccattcatgccttcccaacagtccaccaaagtcttaactcatttcaacattaacccaaaagtccacagtccaaagtctcatctgagacaagcacgtcccttccacctgtgagcctgtgaaaccaaaagcaagctacttacttccaagacacaatggagatacaggtatagggtaaatacatccattccaaatgaaagaaattggccaaaacaaartggttatggggcccatgcaagtctgaaatccagcagggcagtcaaattttaaagctccaaagtgatctcctttgactccagatctcacatccaggtcatgctgatgcaagagatgtgtttccagatgtgtatccatggtcttgggcagctccccaacctgtggtttttcagggtacagcctccctcctagctgctgtcatgggctggtgttgcatgtctgtggcttttccaagtgcataggtgcaagct

SEQ ID NO: 743319 - DNA, 585 bp, Homo sapiens
tgacctttcataaagagaattcaaaatagtggttgaggaaactcaaagaaattgaagatatcacagagaaagaatccagaattctatcagataaatttaacaaatacatggaaataattaaaaagaattaagcagaaattctggagctgacaagtgcaattgacatactgaagagtgtgttagcatctcttaatagcagattgaccaagcagaatgaagaattagtgagcttgaacacaggctacttgaaaatatactcagaagagagataaaaaaggaataaaaaagaatgaaatatgctcataggatctagaaaataagctcaaaagggcaaacttaagagttattggccttaaagactaggtagagaaagatatctgggtagaaaatttattcaatggaatcataacaaggaagttctcaaatgtagagaaatatatcaatatccaagtwcaagaaggttatagaaaacaaatagctttaatccaaagaagactacatcaagacatttaataatcaaacacctaaagatcaaagataaagaaaggatcctaaaagcatcaagagaaaagaaacaaataatat

SEQ ID NO: 743320 - DNA, 576 bp, Homo sapiens
ctgaccatttaactgtataatgtgaactatttgattattacaaccctataagactaattaatatgtgtagggaaggctcatttaaaataaagttaggcaatatgcttagattgcctctcttttaaacataggctctattagaaagacaactttattttttaaatataaatgtgatgttgtcatatgcctacctttatgacttatcaaagattcaagtgttccaattgttttattcttgtaagagtttaattaaaatgctaaatgcaagagcaaattctgtagtgtcawaattcttaattattctatatcattaattggggaaaaaatacaaatgggaaatttcagggtttttttattacactgatgatatatatagaaaatgtacctctgaatatagtaattgtcattgaaaagtatcattagttaaatttaatagcatttattaagcttcctagattaaaaccttggaagttaataaacaattcttctacaatatctacttctaaatcacaggttttcatgaatatatcatcaaaaaatctgacaatttttcattcattggtaatttttctcata

SEQ ID NO: 743321 - DNA, 588 bp, Homo sapiens
agtgggcagcttgagagatcaagtgactgggttgacctttgacttaaggcatactaagtatgttggcatactacaagggtcttgtgtccctttctcccctcattcttctcttgcggtgggctgtccacatgcacagtggcctgctagcacttgggaagggagcaagcacagtgtgtttactggagttgtatgcgtgctcccttgaggcattcttgccttccaggtcaggtcarttgtctctagatcatgtaacagttaaactccgccattttgcctcttaatgcgcatgcttgagcccactcgcccatatcttgagatcttattgggaaactactaatcagtaaccagtttcaggttttttgtatttattgggagactgcctttccctggcagtggctgcgaccaattattattttatagaaatagtgtaatacctgcctgaccatcacttgatgatcatttaacgttcctgatgggagcaggagggagccctctcctgccgtgctcatacctgactagcttgttacctactgtaacaaggtcagtggtgaccaggcttgaggctcctaaataggcatttgaagcatt

SEQ ID NO: 743322 - DNA, 551 bp, Homo sapiens
tctcagttggtggcaggtaagagaagagggcttgtgcaggaaaactccccttttaaaaccatcagatctcagccaagtgcggtggctcatgcctgtaatcccagcactttgggacactgaggcaggtggatcatgaggtcaggagattgagaccatcctggctaaaatggtgaaacactgtctctactaaaaatacaaaaaattagctgggcgtggtggtgggtgcctgtagtcccagctactcaggaggctgaggcaggagaatggcatgaacgcaggagatggagcttgcagtgagctgagatcatgccactgcattccagcctgggttacagaacaagactccatctcaaaaaaawtaattaaatagatacaataaatatataaataaaaccatcagatctcatgagacttattcactatcacaagaacagcatgagaaagacctgctcccatgattcaattacctcccactgggtccctcctacatcgtatgggaatttaagatgagattttggtggggacacagccaaactgtatcatagaccttt

SEQ ID NO: 743323 - DNA, 583 bp, Homo sapiens
gttatcttctccttttgttctagagcattaccttttaggtggtttaccacaaagacataaataccaattttcttcatagttcttctttctttgcccatttataaaattatattttattcactgatataaactacataaacaacaaatgctcaattyttcaagctgaaaactgggggattttctaaatttccttgtttttcatttcttacatttagtccatacctactttttttcattctgccttggaaataattctcatatcctttgtgtttctctttcttcaccctagcacacatctatctgttcagggtaaaatttcccatagcttgtattatgggccactaattatttgattcttaataaaatgttatataaaaatgatttctctttttaaaaaaaaggaagaaaaagaaaataaagattgggaagtgcattaaacaaacagatacatttgttaattgtaggatacttttagactacttttagaatactttgtgaattgccaagagccccataaagtatgaagtattttacagaacctctttcttgttgagaatctcacaggcaaattattctgctcaga

SEQ ID NO: 743324 - DNA, 487 bp, Homo sapiens
ccttaggtaaatattatatatccacaaaaaaaaactttattggaaggtctctgcaatttatccctaaagctcttctatctcaaaaaaatgagtctgaatgtgtttcccagtaccaggatccactgcatttccaaagatgctcaaacctatacctctgtcatttctccactgtttaaataattatctattgagtaatcaccatccacaaacaactttttaaaagaaaaattgtgttatccataatatgagtaattgaaattttaggaygcatcaaaattttcaatttctagatttcccttatcttggaatgttttcttagcataaaatccccagatatgtactacagtgtcaaataatatcagcctcatgcccaatgttgcattttacttttaatgaatgtctccaaaagtttgattaacaccagcaatatatgcttcttgaaatcctattaatattgggtatttttaaagttcctagcttgatttgt

SEQ ID NO: 743325 - DNA, 628 bp, Homo sapiens
atacttcactagcaatatgccattatttctattgtccaatatcctcactgacatttgaaatgttcactcttttattttagccatcttggtttgttaaagggttgtcacactgtgattttaatatgcatttttcttatgattcctgataatgagcatcttttaaggcaattcttggccattttttatcttctattgtgaatatatttttaaagaatttcccctttttcttttaggctgggttgtttgtctttttattattgatttgtaagagttatttacatgttctggttacaagttgtattttctccaaatctgtaatttagattatcattttcttaataattttctttgacaaagtttcttatgttgataaagtttgaatttatgatttytatatttaatattttattcagtttgaaacaccatagattaattcaaaatcatgaaaacttacttctatttttttctctatctgtattattaggttggtgtaaaagtaattgtggtttcagaccgtgaattttaaatcattataactaggctcaaaaacatctttattattcaaattatgaaccatggcaattaacacatttttgccaacaagaaataagtttgtttattcctgtag

SEQ ID NO: 743326 - DNA, 634 bp, Homo sapiens
catttaagaaaatgaaagcacattaaaatgctcatatatcaacataaccagttatagaatttctagatggattgtacctaaggtattgcaatttattaaatcagttgggaaaagcaaatttattttgtaatgcaatgaaaaatattaagcatattttctgcacttatatcttatgttaccttacaatgcacacaggtgcttaatggaattatttttgacaaacaatataaataatgtaaagtaaaataataaagagcacattattaacaaaattatytaatttggtaatgacatttcaaatagtcatatggttttgtaatgttggaagttaccagaacaccaaatttgctttgtaaattcataatgtttggtctttttaattttcttttctatacatgtttgaattacatcaggcattatatttggataatatattttaggggccaaggacactaataagtaatatgcatatcttcacccaagttcaaaactatttaaatgatttattagatagatgagtattaaatactggcataagtatatacaaggttaatttgaggatggtgtcttgatcttcagctgcatctgggctcctgatacctatcttctactttgagctttctcctacaaacct

SEQ ID NO: 743327 - DNA, 624 bp, Homo sapiens
cccaaagttttctttaagttgtgttgtttttaaatggctaaatttacattaacttgttagggcaaaaacagacaattaatacataagcaaggtaatttgccattttaaactactatagaaaatcatacaatcatgtcaatagatgcctaaaaataatttgacaagatctaacatctattctaggaaaaaaaaatcattagcgatctagaggaaaattttctcaacctaacaatgggtatctatgaaaaaacatatagctcatattctacttgttaactattgaacagtttctctcctacaattaagaaaactatgtaaatatctgacatgtattaaattacatcttacaggatataaggtaagaaacacaataaggtaagaaaaaggaaagtcactcaaattggaaagaagaggcaaaactctatttatttgcagacamcatgattgtctatatgaaataaatgatagaatctactagcaataatagaactaattaatgaattttacagtgctgcagaattcaaaatccatattctgcaaagaagacatacaaatgggcaactggtgtatgaaaatgtgctcagcaacactaatcagggaaatcctgattcaagccacaatgag

SEQ ID NO: 743328 - DNA, 599 bp, Homo sapiens
gcttgaaggggagtccactgatcaaattgagaaaaagttgagtatcacaataaattgtgaaaaaaacggattatagcccattgaataaactaacaaaccttgagtccatactatacaaataaataaataaataaataaatkgaaagtttgatgaggaatgggatattcacatagtttcaaagtacctgaccacacgatatttactacaaaggggtaaatattgacttcacactggaaaaccttggcagcaaccatcctactcaagtgatgaaagcaaacagcatcagtaacaaacaaatcaaaattatgaggcaccagacaggatgcaatgagaaaaacccagcgtcacttctgtgctattcctgccaaaaatgcatggcctgaatctaatcatgagcaagcatcagacaaatcgaaactgaggcacatcctacaaaaatagcttgcctgtcatcttcaaatgtatcaaggacaagaaagtcaaagaaaggctgaggactgcaggagacagatcagactagaaaaaacgtacaatgagtggttctgaactggatcctcttgctgtagagaacattactgggaaaattggtgacttttga

SEQ ID NO: 743329 - DNA, 642 bp, Homo sapiens
cacgacaagccccatgaccaaaatccctcccaccctgcccctccacccctcagtcccgaccatctgcccacctgggcatcattctagacaccctttcacacacacaatcaaagccaccaactgcccggctctgcctcgggtggcctatcacagcctcacattccggatctctctgtgagccccaatgtgtagacgctgaagtctcygtgcacattacaggtgattcctggactcgtttaaattctggggtcctcagaataggggcagcctctaacttgcttcccataccagggcccccagaactccctctgcatgaagtggtgactcagccccttccccatggactcgctgccccagaaccggcctgcagtaacccatgccagcatgccaggactatccatttctatcccaggtagataatctgttaaccataatctcagatgaaaggaagattattgccccttacgcagatctaatctgtctttgtcaccacccttgcctgataatgcaggattccctgagggcagggcagaaagcctggagttagaaagggaaagaacagaatgttcgggatcacccagtctagtgcctccttttacacggaaggaaatgatgcccagagaccggcagacacttgctcca

SEQ ID NO: 743330 - DNA, 642 bp, Homo sapiens
cacgacaagccccatgaccaaaatccctcccaccctgcccctccacccctcagtcccgaccatctgcccacctgggcatcattctagacaccctttcacacacacaatcaaagccaccaactgcccggctctgcctcgggtggcctatcacagcctcacattccggatctctctgtgagccccaatgtgtagacgctgaagtctctgtgcacattacaggtgattcctggactcgtttaaattctggggtcctcagaataggggcagcctctaacttgcttcccataccagggcccccagaactccctctgcatgaagtggtgactcagccccttccccatggactcgctgccccagaaccggcctgcagtaacccakgccagcatgccaggactatccatttctatcccaggtagataatctgttaaccataatctcagatgaaaggaagattattgccccttacgcagatctaatctgtctttgtcaccacccttgcctgataatgcaggattccctgagggcagggcagaaagcctggagttagaaagggaaagaacagaatgttcgggatcacccagtctagtgcctccttttacacggaaggaaatgatgcccagagaccggcagacacttgctcca

SEQ ID NO: 743331 - DNA, 459 bp, Homo sapiens
gctactcgtgaggctgaggcacaagaattgcttaaactcaggaggcagagattgcagtgaaccaagatcgtgtcattgtactccagcctgggtgacagagggagactccatctccaaaaaaaaagaaaaaaaaaaaaaagtctactttagtaatgaggtaacgagttcctcatccctggaaggatgtgagcagaggttgaatggcycaagcttctggctccgactttgccaaggcaccttgtctgggggcctccctacagcccaatgaccaaggacccaaagagaatgtccaagctcaaaaaggcactcaatgattaagtctaaccccatccattctgcagatgagaaaactgaggctcagagagagagactgacttccccaaagtcacgcagcaccccactatgctatctcggccacaccctggctgagggaacacccacccacccacccactgcaca

SEQ ID NO: 743332 - DNA, 459 bp, Homo sapiens
gctactcgtgaggctgaggcacaagaattgcttaaactcaggaggcagagattgcagtgaaccaagatcgtgtcattgtactccagcctgggtgacagagggagactccatctccaaaaaaaaagaaaaaaaaaaaaaagtctactttagtaatgaggtaacgagttcctcatccctggaaggatgtgagcagaggttgaatggctcaagcttctggctccgactttgccaaggcaccttgtctrggggcctccctacagcccaatgaccaaggacccaaagagaatgtccaagctcaaaaaggcactcaatgattaagtctaaccccatccattctgcagatgagaaaactgaggctcagagagagagactgacttccccaaagtcacgcagcaccccactatgctatctcggccacaccctggctgagggaacacccacccacccacccactgcaca

SEQ ID NO: 743333 - DNA, 616 bp, Homo sapiens
ttactgtagactaagcattgggttgtgtcctcccaacaagccaatggcacaggtattatcacacccatctgtgagatgagaatagtgaggctcagaacttgcctgagctccctctgtgtaggtggagggcagttcgaggtggagctgagactcaattcccgatgtcctgcctcctcatcccgtcctcttcctacctcaacctcccacccctgcggtctcatcagtgggtggactcaggaattctgccccctcccaccccaatgccacagacccgcctgtggctcccccaccataatcttctttatcatggtcttcttttctccttctgcctccagcagatcctggctcttctgaagggtggtgacattctcaacctaggggacagcagagggcaaaacctcagagtgagagacycactgagcccagtcctcaggggttgcccatacagcactgttaaccacccgacacctacaggcaagccagcattggtgcaagagaaatgagaggtccccacaaggggaacttggggtggggtaaagattggagaatattgaggggttggaggagttaatcctgaatgccagcatttggaagaggaccagatatgagggactgc

SEQ ID NO: 743334 - DNA, 542 bp, Homo sapiens
tgaatacagtattgaattgaaatcgccacagctattacaacagtagtgtatctaagctctaacttatagatgtacttctgtcaatacagtaattgggctaagctttgtaatttttactgttccttagcaacagtttgctcggaacctccaacattggtttttacagaatagtcatatgtgaagtcaatgctttatcccttaccttctggtacagtcagaaggcgaaagtaacagactaaaacagaatgcttcacagggctttgaaatagatgctatcatattttcacacctgctttacctttctttttgttttacaagtggtgctaattagtttttattgtgatgaaaatgatacaaaaatcagcctttgatttgaaataaagtgaataatatttattaaaagmtaattttttttttttttttgagagggagttttgcccttgttgcccagtctggagtacaatggcacaatctcgggttactccaacctctgcctcctgggttcaagcgattctcctgcctcagcctcccaagtagctggg

SEQ ID NO: 743335 - DNA, 417 bp, Homo sapiens
taatacattttactcaaatgaacaatattgtagtaagcatcactgtattttttaattgatgtaataattaaacagttttatggggtacaccactgtattttggtacatgctttcacgtgtttgtgaaagcacttcaaaattaatctgtcactcttttcctaaatccatgtttactgaaatagttatttagtgttgcaatacaaactctacaaacttgkttgtttccaaaagtatctaagttagttgcatagaactcagaacacaaaaaaacaatgctcagaaattatgactaattcccaggatgtgttgggagtctccaagactacccccaggttcagtgatttgccagaaagactcacggaatttaacatgtagttgtagtcatggctaagatttattacagtgaaaggatacaaa

SEQ ID NO: 743336 - DNA, 624 bp, Homo sapiens
tagactgtaaaactgggttctacatgtgtttgggtataggacactgagcaagaggagatgagactagagagcaaggtcacattagagcaaacctcctatgtcagagtagataataggcaatggatagaatttttagcagaagagtaatattatcggattcgcattttagaaatggtcttaagctgcagtgtgaaagttggattggaggaatggattctagagagtgtcataccattaggagattattctgttaaaacaggtcatasatacacagtttttagttacagactaaagtagtaactagagaaagacgtgtctgtctcggagacggataacgtttaagtatttgtttgattaaagcaatttttctcaattgtttaagaggaaagcagtaactacatcatgtgcgctaaaatttgtaggtttactttcttttggaatggggattagattagattcaaggatgctgcattacctgaaaattcggattgaatatgaagttaacatgcctttacgaatggaggttagcaaataacactgtttctaaagttacagactaagctcttactctgaatgcagccagaattgtctggcaacaacatgagggaaaatagtatcttatgc

SEQ ID NO: 743337 - DNA, 638 bp, Homo sapiens
attcaggtaatgacatagcaactctcatttttttaagggaaaaaatatatttggcatatttatggttttatatgtacatagtatatctgtttgtggcatgatggcttatgcttgacctgatggattgtcaaataatgcccagtaaaaaccaaagtatccccaaacaccaaacttaacttatgagacaaattgaaggaaaaatgtaggcagattgtataaatatgtcctaggagattttgawtaaaatagatctaatgattatctaatgataatccagctgtcaagtgttaagtgtaaatggtaattagctcatggatgaaattgtatatacatatgattactaggtaattaatcttgatctagaaacttaaaaattttaatggatcccaaactaatattagtaaaagcagtaggacaactatttttcttgaatccaacatgactgtcatccaacaaaaaatgagcattagtctttgaagagcattgtggaatttaatttgactgaacaaactgtgtagcactcactctgaactagagactgtgccaggtcctgaggacacagagatgagtgacacatgaccctgccctccaggaacctacagtaaagaaaggggtccttcgcagacaaaggttggctt

SEQ ID NO: 743338 - DNA, 558 bp, Homo sapiens
ttctcaaaagttatcctaaaaaggaaagaatgctgaatggtctttgaatcaattatctattgccacaaaaaagtacagtgatcacaaaatatcactggtgtttaaccatgcacttttagtgttgatgtctccggggtcagctggaggttggccgggtggctctaatgatcctggctgggtttgctcaagtacctggtggtcagctggctgttggttgatctagcctggctcggtttggcccctgacatctctcattctcctcttattccaggcctgctctcatggtgatagcacagcaacaagagagagaggtcaagctcagccgtgcaagtactttacatgcctctgcttgtgttatgctgggtgggtggttcarggaatgactcagaatgaccaaccacagatggaggtgactgcaaagttacagggtaaaggatgtgacttcaggggggctgaagaattgaggcccttttatgtgatccaccacaatcttagaagagagttatttcccgttgtcgtttaatttttcctactgaaagaataaggttggaaaaaggg

SEQ ID NO: 743339 - DNA, 594 bp, Homo sapiens
gttctggagattggatggccaacaatgtggatatactgaagcactgaagtctacacttaaaaatgattaagatgataactttatgttatgtgcattttccatagtaaaaaacaaaatcccttttccaaaccccatgtcacacaaacctgtccaaaaacctcttcattaacagtgaaagtgaggtctaagatgtctgtgatgttgttgtccttcatccactgcaaactctggtggaattcctcatccaaatattccaggtcactcaaatcacagggcctgggtgaattcagtgagaaaggcaaattaccaaacaaatggctgcccagacctcacttcaaaatgtggttatatcattcctggctaaaacatcacagacttatcctaacaattggatacttttgaatccactgatgaatcagatyattcagtcattttagttcattcaatgattttcctttgaaaaggaaatgtgaaattgtttacaataacaaacatgaaataactattgactcagggactctgcatgaaaattggagaaaactatcattttaaaacagttatgctataaacagatcagttctacttaacagttta

SEQ ID NO: 743340 - DNA, 565 bp, Homo sapiens
gggagacccaaagctgggtcttcctgcctggagagctgatcacatggtgtactgggcactgtaaagaggctgggcatttggtgataatgtgcttggctcttgtgcctttggtgaggaggtgggggctgaggcagatgcaggaacatgtggcaggacactgaggtctgttaaaaaccctgcacgcagtcgttagtctataaaggcctcttctaaccactatggcatcttctggagcacaaacgtctgtcgaaacaagcactgtactggcaaattttgggggttcacacattttgttgggtcagtgaatgaggccagagggttgctataactgcatccatgcctggatgcctccaggacacsattgtaatgtcctgtttcccaagccatgactctggggactgcattcacctatgcattgcctaccacctgtaggttgacagccaggtggtttgtgtcagctgagttctagaagattctttctgtagcagtcatgttttctatctctgatacttcctggatctttcccagacactgcttccctggtaatggaccaggacttgcatgg

SEQ ID NO: 743341 - DNA, 689 bp, Homo sapiens
ttgtgtctttacaaacaatgctgaaataaacacacctgggtgttttgtgcggcagtccagcatagcttttaaaagtctgcactaggccaggcgcggtggctcacgcctgtaatcccagcactttgggaggccgagacgggccaatcatgaagtcaggagtttgagaccagcctggccaaaatagtgaaaccccgtctctactaaaaatacaaaaattagcygggtgtgatagtgggcgcctgtagtcccagctactcaggaggctgaggcaggagaatcgcttgaaccaggaaggtggaggttgcagtgagccaagatcgtgccattgcactccagcctggtgacagagcaagactctgtctaaaaaaaaaaaaagtctgcactctagagtcagactgcatgtgattgctccctacctctgtcacttactagctcttgtattgggcaagtttaaacctctatgggtatgagtttcctcatttgtaaaatagaggattatactaggttatgtaattcatgttgagcctttgcaaaaatacctggcccataataagggctcaataaatattacctgttattacaaaagtactgaatattagtgcttttgtttctatgagataactttatgggctaaagggtataggggttttaaaaattttagtttatattgtggattgcattcccccctg

SEQ ID NO: 743342 - DNA, 573 bp, Homo sapiens
gaatcagggtatcaattaggtattgaagtatgtcaggaagctggtaaagacatgggcaacaaccggccttcctctgatgctgtgcacatttatttgaagcagtttccacattgtgaaagagaaattaaaatctttggctggatcttttatacttttttgtggttaggtaatccaagtggtctgacatggtatctttagaattgtgctgctaactatttttctcagttgtgagaaatttatgtggaagtaaatcacatatgtatatacacaggttggtggtgtttcctaacctacaaccagaccactaattgggcattaatatggtctaagcttgtggtttcattagctttcctatccaaggaataatttcaatagtcagtaatactgkcagcctccctagagacttcatctgtctttcttccagcatatttaactagacaacttcaaagcaggattgtcacttctcctaacttctcaggttctttcaataatgggtaattctttgacttctctcctttatattgttcttcactgccccaaatttatcagaaaaggggacttggtgagatagat

SEQ ID NO: 743343 - DNA, 631 bp, Homo sapiens
gaataacatttctgaaacaattttatccgtcaacatgttatttttgtattttgtttgttcaacttatcagatgttcactcatcttgatccttggttgtaattatggagcaactgtgctgttttttctttaactttattttcactaacttattttctaatatttcttttgttctatcttgttttggtttactttaataactctgtaatacttaatttgactgcttggctcagataccttttagtgttcttgttttctaataggaacactttaaggctatgcattttcctctagtactattttggctgtatctcataagttttgggatatgggctttttattgttattcatttcyaaatagtctaatttcaattaagtttcctcttcaacacaggttagttagaagaaactggtttttgattcatgagtttttaatttccaattagagaatttggcttttttgattcctacttttgggaatgtttttaaaattattttcttttttgttcttgttggaaccaggatttgagccaaaggctctgtctccacagcccaggtgcctgacactgacactgagttaggccacaccttacacaggtctcagcttggccactaatgagggctggccaacca

SEQ ID NO: 743344 - DNA, 494 bp, Homo sapiens
gacatcctacctcagcctcctaaagtgctgggattataggcatgagccacctcacctgaactgggtgtttaaaacaacagaaatttgtctcaaaattttggaggctagaagtgcaaaatcaaggtgttggcagggcttggctcgctctaggctccagggaagcctccttctttgcctcttctggctcctgctggtttctggcaattcttggcttctctggcttgtagatgcatcactgcaatctctgcctccatagacacgtggcattctccccatgtccagatttcccacttactargacatcggtcatattggataaaggctcattctaatgacctcatcttaacttgattaaatctgcaaagaccctatttccaaataaggtcacattcacagtactgagggttaggacttcaatatatgtcactttggggagtgacacaatttaacccataagagtgttaaagaggctgggcacggtggctcacgcctgt

SEQ ID NO: 743345 - DNA, 541 bp, Homo sapiens
agaagaatcacaatttcttggcaagatttccaaatatgtgttgaggttcttcaccttggcttcttctcctccctcaacccctttctctcaacacaggttgccatttgttgcaaattatttgcaagtccagaaatgtggctctgacaccttagttcttttcccagtcagacatgatgatgctaccatttcaagtgagtaattaccaggcacgtaatattatcagcgtggtgaataccttatgaaaatcagactagtcacaaagctcaggtcttcctgaagccatttttggaaayttagaagtttggccatttggtaaaaacacgtgaacaaatcattcttgaacccaactgtttttgttcccatattgtttgagttgcagaaaacatagctgggaaaagaactgatctggcttgcatagagacaccatctggaaagcctgtttcatgcagtcccacctagagcccagtaaattggctattttgtgcctcttcccaaagcacagtcacctctttgcatttccaaaatgatcctgcttcaacat

SEQ ID NO: 743346 - DNA, 610 bp, Homo sapiens
tcctcttgctgaaccttggctggtaaatgttcctgttaaacccagaccgctgcacctttcaaaaccaagcaacatgcagcaaatcacttgccttccctgagcctcaagtttctgcatctgtagaatgaagaaaataaagaacttcaccacacacttcacaaggtagtaataaaaattcaaagagtactttgtaaattgaaatgtgttatacccacgtgaggggttatttttatcacagaagagtgaacagcctcctgagcacagactctgcttttggcacctaaaccttctgtttaccacacattgctgcttggtttgatccacagataattagaggtagatcagatgcatccatgcaatgatatggaaaaaataacaaagataaaaatgaakatcaaataaacgaaaaagaagaagaataaaatgaggatgtgtcacccatgtacatattgaatcactagtctgggccaagattcctagcctgcaaagtcgaggggagaccatgtcagatgcacacctgccagaaatagtaggaaagaagcatattcctcagggaattcctcagggaacatggcttcatggagggaactctgtatgaggaggtcagtgg

SEQ ID NO: 743347 - DNA, 510 bp, Homo sapiens
cactgtaattggagcaggaggttgaaaagattaattcaccagtacttatagagagcctacctgattgtaagcagcagggttcaatactgaacaagtcatggcaagattccctgctggagaatatgaataactcaaaacccttgcttttgagtagctctcatcccaatggagcagggtgaatgaagacgcatatcttttgacaaataattaaaatactgtgaaattagtatttatgaggrtttatgccatgaatctcagagaaagaaacaaaaccatcagagtagctgagagcaaagactctggaaccagaatgcctgaattttaacaccagctgtgccacttactagcccgctgaacaatggctaagttaattaacttgtctgtgcctcagattcttcacctgtggtatgagatttgtactagtaccttcctcatgtgtttaaataaactaatgcttataaagtccttaaaacagtgtctggaatataggaaatttacataaacaaggtc

SEQ ID NO: 743348 - DNA, 620 bp, Homo sapiens
ctgctgggaagtcatagaagaaatgatgctgaggtagcagtaaagacacttaatgcccagatcttggactataaatacaattctttcctccatccctcctcccttttctccctcccttttctcttctttcttttccttttttgacagagtctcactctgtcacccaggctggagtgcagtggtgggatcacaactcactgaagcctcaacttcatgggctcaagtgatcctcytgccttagcctccctagtagctgggactacaggcatgtgccaccatgcctggctaaattttgcattttttgtagagacgaggtctcattatgttgcccaggctgaactcctgggctcaagccatccacctgcctcagcctcccaaagtgctgggattatagatgtgagccactgctcccggcttaaatacaatttcttaataaaaggaactagggcccctgaagaacttgtttatttcagagctggggtaggagaaatacagaatgatcctggaacatcttgtgattctagaaaacaaagaagtgctcagaaaaggatgggacatgttagaagtacacaggagctggcttgaaggagctgttaatggccagagctggaatgaaataa

SEQ ID NO: 743349 - DNA, 613 bp, Homo sapiens
ggaatttttatttcatttacagctttatctcttgtgcctggaataatgtctagtgtgtagtacttaataatactggtagaatgaaagaatgggatattgtcttattttccagggcagatctatatattttgagatgaaatgagcaagtgactgggctgtgatttttttttttcttttttctttctttttttttttttttttgagacggagtctcgctctgtcacccaggctggagtgcagtggcgctatctcggctcactgcaagctctgcctcctgagttcatgccattctcctgcctcagcctcctgagcagctgggactacaggtgcctgtcaccacgtccagctaattttttgtatttttagtagagacggggtttcaccgtgttaaccagtatggtctsgatctcctgaccttgtgatccgcccacctcggcctcccaaagtgctaggattacaggcgtgagccactgcccctggccaggctgtgattttcttaagattaaaaagtccaagtctttcacttagctaaacaccattttattttacttacatagaaatgggctacaggcaaagccagggttttccttgtgaagcagctttgagtactgcg

SEQ ID NO: 743350 - DNA, 613 bp, Homo sapiens
ggaatttttatttcatttacagctttatctcttgtgcctggaataatgtctagtgtgtagtacttaataatactggtagaatgaaagaatgggatattgtcttattttccagggcagatctatatattttgagatgaaatgagcaagtgactgggctgtgatttttttttttcttttttctttctttttttttttttttttgagacggagtctcgctctgtcacccaggctggagtgcagtggcgctatctcggctcactgcaagctctgcctcctgagttcatgccattctcctgcctcagcctcctgagcagctgggactacaggtgcctgtcaccacgtccagctaattttttgtatttttagtagagacggggtttcaccgtgttaaccagtatggtctcgatctcctgaccttgtgatccgcccacctcggcctcccaaagtgctrggattacaggcgtgagccactgcccctggccaggctgtgattttcttaagattaaaaagtccaagtctttcacttagctaaacaccattttattttacttacatagaaatgggctacaggcaaagccagggttttccttgtgaagcagctttgagtactgcg

SEQ ID NO: 743351 - DNA, 580 bp, Homo sapiens
tttcttggcatcgccaccttttggagatctctgtcactgttgcatggtgtttacggtacatgttcagtccatgtcaaatgtgctgaaattgagaccactagaaagagatttgttacctgcaatgtgttttcctaaaggtcatattttatgagtttgtgtgtgtgtagctttaagacagtatttggaatgtagtaaatatgacaaaagtgtcagcaaatattaaatatcattatctattatataatggcacacagatactcattacccacagatgattcaraacccagtgctacttggttaggagtctgttcactgctttccctggtgtgcctgccaaagcctttcagctctctaggcctgcctttatcaggtttttactttggaggttatctcttgttaccttgagatgactggttttgggtgacatttttatagcagcaaattcgtctgtcagatccaagattagcactgcctgttcggttctcaggcatcacaccaaatagacagggccacagtatcatgagttaatgaagcccagagggtctcattcagtaggcccttgaaaaggcctgagaatctg

SEQ ID NO: 743352 - DNA, 580 bp, Homo sapiens
tttcttggcatcgccaccttttggagatctctgtcactgttgcatggtgtttacggtacatgttcagtccatgtcaaatgtgctgaaattgagaccactagaaagagatttgttacctgcaatgtgttttcctaaaggtcatattttatgagtttgtgtgtgtgtagctttaagacagtatttggaatgtagtaaatatgacaaaagtgtcagcaaatattaaatatcattatctattatataatggcacacagatactcattacccacagatgattcagaacccagtgctacttggttaggagtctgttcactgctttccctggtgtgcctgccaaagcctttcagctctctaggcctgcctttatcargtttttactttggaggttatctcttgttaccttgagatgactggttttgggtgacatttttatagcagcaaattcgtctgtcagatccaagattagcactgcctgttcggttctcaggcatcacaccaaatagacagggccacagtatcatgagttaatgaagcccagagggtctcattcagtaggcccttgaaaaggcctgagaatctg

SEQ ID NO: 743353 - DNA, 540 bp, Homo sapiens
gctgcttggccaggcagctgtgcaatgtggacagctgtctgcctgaagaccagcctgcttcaacagcacaggttctgctaacatacatgctaacagggctgttttctctttaaaacaatgggtttgatgggttgggagggagtgaaaactataaaaataaatctctgccaggaagctctcaagtctcttaacgaggtcatccatatagcaagtactctaaggtataaataatgaaagctcagtatttcctacttattcctgaaattgtccatcatttttaaagtttaccaagagtaaacttcccaaatgtaacagcttagtactttacccttcaaattcagrtttataaaattttagaagagaaatataagaatgagaatttttctttcaaagaaaatcaaaccacctcacattcaacccttctcttccttaagattctcctccaaaatacttaattttctacttcattctcagaattttctatatgttagcatagtattttttggttattattttttaagctgctcatcttccccaatt

SEQ ID NO: 743354 - DNA, 599 bp, Homo sapiens
atgggatcagtgacaataaatgtaagccaagggagagacactggtgcaacagtggtagagacatgggagtctaggctgcttgctaatgtaacatactgtgccctttgcctatgtttgtgttctacatgtatagaacccagctcatgatcattgttcttggcttcatggctacttgacatccctttgtcyggtgctatatctctataaaagcccagcagcacatcagcagctgtttgttgaaaggtgtttacttctctgctacagatagcatggccagactcttgggtctgcattgtgattttcccattaggacttatcataaactccacacagaatcttttcctatatatctaatacaacagcatctgctgggtggtatggcaaagtggtaaaactgccacctggacctgcttcagagcccttttctgctctgggtcccacttgaaattggaagccttttatgtcatccagtgtataggtaacagcaagtatttcctgctatggcatatgctgcctctagaacccatagaaacctatcattcttttatgctaccttctttatggtgagaggtacaaaatgcaataatttgttgcttatt

SEQ ID NO: 743355 - DNA, 582 bp, Homo sapiens
aaacacaaaaggtaaggttaaaatctgttcattagacttatttcctaaccttttaatcactcatcactttggaacattcttgcaactgaactgaataagctgggaaggttttttgggtaattctactaacgctttttttttttttttttttttttttttttgagacagggtctcactctgtcacccaggctggagtgcagtgctgtgatcctagctcactgcagctttgatcttytgggcccaagcaatcctcccacctcagcctcctgagtagctgggactcaaagtgtgccaccacacctgattttctttttggtagagatggggactcactatgttgcccaggctggtctcaaacttttggcctcaagggatcctcccaccttggcctccgaaagagttgggattataggcatgagccaacatgcatggtcaaatgctttttaaactagtaattcacctgtgtatggttatgtcaaagaaaaatacaaggttgcatacgcttagagaaagtaaggaagtaacccattacatgtatgtttgtaaattttacttaggccatcattttttattttcaccttt

SEQ ID NO: 743356 - DNA, 582 bp, Homo sapiens
aaacacaaaaggtaaggttaaaatctgttcattagacttatttcctaaccttttaatcactcatcactttggaacattcttgcaactgaactgaataagctgggaaggttttttgggtaattctactaacgctttttttttttttttttttttttttttttgagacagggtctcactctgtcacccaggctggagtgcagtgctgtgatcctagctcactgcagctttgatcttctgggcccaagcaatcctcccacctcagcctcctgagtagctgggactcaaagtgtgccaccacacctgattttytttttggtagagatggggactcactatgttgcccaggctggtctcaaacttttggcctcaagggatcctcccaccttggcctccgaaagagttgggattataggcatgagccaacatgcatggtcaaatgctttttaaactagtaattcacctgtgtatggttatgtcaaagaaaaatacaaggttgcatacgcttagagaaagtaaggaagtaacccattacatgtatgtttgtaaattttacttaggccatcattttttattttcaccttt

SEQ ID NO: 743357 - DNA, 504 bp, Homo sapiens
gaccatccgcattttctgtatgggaatcctgaggctgggagcaggaagtgactcatgtattctgtgagtgtccaggtctctacagtttcatgcctgtgctcttgccactcaaccacgctgcctcgcctcatcttgctatgtttttttgtaattaaaaccaaccacgtatttgtcagaacatttcaaagcactgggatcgaatctccactcttacaaagtttctgatttcattggggtgtttccaggattaaaaaataaatgtgagttagagttgtttctataaggctttgagcagtggaaaagcgccaggcgattgcattacttttcagaggaggcttctsaggctggagatgtaacgttatagcccaatgttatggctcatgccctcctctctgctcagtgccttaatgcacgtcatacacgatccagtttcctcctgtcggtaggagcaaatgtataaatggcggtcaatgctagcccaggagagagaggaggaactctgac

SEQ ID NO: 743358 - DNA, 603 bp, Homo sapiens
gtgtgtaccccttctgtgttattattcataatatcctagggggatgtttctcttaatgtcacaaagagtgtacaaaatgtcacaggaggtgtacacgttgtgacgttatctgtaataccctagaaggatgttactcgtaatatgtcacaggggtgtacatgctttgatgttatttataatctcatagagcgatatgacttcaaatatcacagtggatgttcacacatagtgtataccctgtgacagtattcataatatagtagggagacacaactcctgatatcacagtgcgtgtaccccgtgtgtgtacacccttgatatkagtcgcgatatccagggtaaatatgactcctcatatcacacagtgtgcacaccctgtgatatttttcatcctactttagggagatattgcttctaatatcacagtgggtgtaccccacgtgtgtgtactctgtgacagtatattctatatcctagggaggtattactcgtaatgtcacagtgggtgttcaccctgtgatatcattcttgtttgaccttgctgccttttttaacccacactacaaaaggaatggaacagataagaaggtcttgagattagac

SEQ ID NO: 743359 - DNA, 603 bp, Homo sapiens
gtgtgtaccccttctgtgttattattcataatatcctagggggatgtttctcttaatgtcacaaagagtgtacaaaatgtcacaggaggtgtacacgttgtgacgttatctgtaataccctagaaggatgttactcgtaatatgtcacaggggtgtacatgctttgatgttatttataatctcatagagcgatatgacttcaaatatcacagtggatgttcacacatagtgtataccctgtgacagtattcataatatagtagggagacacaactcctgatatcacagtgcgtgtaccccgtgtgtgtacacccttgatatgagtcgcratatccagggtaaatatgactcctcatatcacacagtgtgcacaccctgtgatatttttcatcctactttagggagatattgcttctaatatcacagtgggtgtaccccacgtgtgtgtactctgtgacagtatattctatatcctagggaggtattactcgtaatgtcacagtgggtgttcaccctgtgatatcattcttgtttgaccttgctgccttttttaacccacactacaaaaggaatggaacagataagaaggtcttgagattagac

SEQ ID NO: 743360 - DNA, 553 bp, Homo sapiens
taggttgggtttgaggtgtaatcaaggtgctggactgtcctccaggctctgaataaaggagaggtaagctccttacagacattagctcattagccaagcaagtggacacagagctgttcccatttcatggcaagtgtaaaaatccggaggaaggcaggaagagacagttctgacttcctgtgcaatccacccattyggccttaaacaagtaaagaccaaatgaaaatgatgtgagagttattttttagctggacatgtaaccagattctaatcaccttctgaattgatatttaattacactgtagtgtgtagccgatctccagagagatagaatgttggcacagttactcttgagtatcttttgtcaacatcactgctttcactgcttctgtcagtcaatatattttgtttccagcttccttcctaggcctttaattcctgctgggacaggaatctctcaattcactcttaagccttgtcgaaacctttcttcctcccatctcccactccatccagaaatagaattgtcctcagcaacagaggttggcaagct

SEQ ID NO: 743361 - DNA, 567 bp, Homo sapiens
tttttgttttgttaaaagagaagatattgatgtgagagagctaagctctgacaattagttagaagaaagaggagacaatttatccaagaggacagtccatgtctattccaggaaaatattaatgactgttcaacctattaaatttcacctgttgctgggtgcggtggctcacgcctgtaatctcagcactttgggaggccgaggcgggcggatcacgaggccaggagatggacaccatcctggctaacacggggaaaccccgtctctattaaaaatacaaaaaaatagccgggcgtggtgacgggtgcctgtagtcccagctactcaggaggctaaggcaggagaatggcgtgaacccgggaggcggagcttgcagtgaactgagattgygccactgcactccagcctgggcgacagagccagactccgtctcaaaaataaataaataaataaataaaataaatggataaataaataaataaatttaacctgtcagcctgataatccctatcatattgtttataaatatgagccatagaagttggagatgtttatctgaacaagaaa

SEQ ID NO: 743362 - DNA, 619 bp, Homo sapiens
aggtctccatcataaagcaaatatctgtccttattccctctaggggaccacttgcccacaccccaggcaacaacaggaatagacatttgctttccgaatgtgcctgccccagaggccagcctctgttttaatatgtattcttggaagtacatgggataggtgagtttgctttgaagggcatattttgactctatgagggacaaatccttttgccaaaattttaacaactaactttaatttaccacgggagatgttggtaaaaattgtcaagacctctttmagttttcagcaaatgccaatagcagcttggacatgattgctgctaagatgcctttaatgagctgaatagtggaatgattgcctttgcttcttcctttgaaaacagacattccccagtagctgctgaacatccccaaggatgttctttgaggatattcctctttactttgtaaccatcacttgcccatccctactgcaaactcttggccctacctacggcaccctgtgtgacatagcaattgctttttctttggtcctctggagaactgttggtgggaccactgatagtcttatcagtgaattccctaagctgtaatagtctcaacaaaggatccattct

SEQ ID NO: 743363 - DNA, 628 bp, Homo sapiens
tcactcaggagtaggttgttcaatttccatgtgattgcatggttttgagtgagtttcttcatcctaagttctcatttgattgcactgtggtctgagagactgttatggtttcagttcttttgcatttgccaaggagtgttttacttccaattatgtgrtcaattttataataagtgccatgtggcactgagaagaatgtatattctgttcatttggggtgcagagttctgtagatgtctattaggtacacttgatccagagctgagttcagtcctgaatatctttgttaattttctgtcttgttgatctctctaatattgacagtggggtgttaaagtctctcactattattgtgtgtagagacctattagtttctttgtaggtctctaagaacttgttttatgaatccggtgctcttgtattgggtgcatatatatttagaatagttagcttttcttgttgaattgtacccttcaccattatgtaatgcccttgtcatttttgatcttgtaggtttaaagtctgttttgtcaaagactaggtttgcaacccctgctttttttgctttccatttgcttggtaagttttccaccattcctttattttgagcctatgtgtgtctttgcat

SEQ ID NO: 743364 - DNA, 624 bp, Homo sapiens
ttataagtgagagtgttaggttttggaggaaaatgagaagtactttctcatacatctgatatttgaggtgatggcagaactcccaacagatcatgtccagtgtacagctgtagtaagggccagcttcttagagggtcgggattggacatggtactttggttctctttcacaagcaggtgatagtagagagtagttgagccctctaagaaagagttgttgagaggactactgagaacagggagcagggccttgagatataccaacttactgaggtagatccaggaagaagaactgggcaagtgaagggaaggaggagtatgaatagaaccacagtaaagcagggttttgtaaagcataggggaggcttaacttagtcagygggtggtaaattgtgttcaaaacacacagagctcaaagaggatgaatactgaataaaaacgatggtcaagaatgtagaacgttccaggagactagagataacatgactgttttttttcaggaaaagaataaaatccatttcctgtgttaagccctctaaaaatctgatttgattaagtgcattttggatactcactttctaatcaattcataatataaagctaaggattattatctttgccctgc

SEQ ID NO: 743365 - DNA, 597 bp, Homo sapiens
gttaggtttgaaaggaaatgaaaaaataaagtggatctagtgcagaatgatgagtgaggaaacggagaatcagagaattccatggagaaaagtaacaaaatctcatccaaacactgattactaatgtgaattccttttcaacatccccagatcctcttctgtaacttcagtgatagagaagcccctgagagataggcagtgcactgtcatgggaaatgcttagcatctcatgctttaaaggytcacatttgagttctggccctacaagactccttctagagtgagaccctgagaaaattttcagcttctccaaatcccgatgtcttcatttgtaaaataaacatatagtgctgtgctggtcattatgcatcttgtccctcattctttacccttatctctgtccttctctttgccctaggaggcttgacctctacagaaagcatcttccatgtctctttgcttaccagcatcctgttgggttgtgtccatggaaggcaccagcaggagatggaggagggcgcaaggagagagaacacagtacttctttactggtctctgactgctctgggctgtgtattctggctgtatccttccctg

SEQ ID NO: 743366 - DNA, 637 bp, Homo sapiens
gaaacattgatctcatttttttttcttttcataagattggccctatcattccaggttgttgagaatatctttactcatatttctattatttattggattaagtgtctgttgaggattcattcattcctaaatttgttctgcatggtaaccatgttacttatgtaggtcttggccacagctggatcctgataaaagtccaaaggtttgatatttggcatttctctctaaattcgcaaggatgtattaatcaacaccatttgtaaccgtatcttactcgactgtagctccgtttttttttctttctttcttttctggaggcagggtctcagtctgtacccaggctgtagtgtgatcacagctcactgyagccctgcatccttaacctcctgggctcaggagatcctcccacctcagcctcctgagtaactgggcctttagctactatttgtctatattatccaccagaccatcaggacagatttgttacttttttttcatgagaagcatatttagagaaatttgccatctcccctatctactactctagtaattctatcaaaaattgatatcagagtagtctagtgagtaatttagaacacagttgaaaaaactttcaaattaaaatcccaatttcatt

SEQ ID NO: 743367 - DNA, 494 bp, Homo sapiens
ctgtaatttcatcctatgtatgggtcccacattttgttcactgggtgtcttcaatgctcctttaggttgcttccaaattgtctctactgtgagcagtagtgcaatgactggttttgctgtgtacctctgccttttgaactgtacagttgtaataggagatatcttagtgtaggcagagtcttcattctagggaaatgcatgcccaggtctccctgtcgsctcaggcccggcccacccatgcttcatgctgagcacgtgctggtctttgtcctggcattttccgcgctctgtgtctttgctttgatttttctgtgtctcttctgtcttaaatgtgaaaaaaggtgcccctgcttctgagaacagagagaaccaagtgacaggccccgaatttcctggtgcaccagtgaatggccacttcgcttgctgtccgtgagctgatcgtgaagctggatggtttttaacctgggccaagccatgggttgtccccgcctttg

SEQ ID NO: 743368 - DNA, 633 bp, Homo sapiens
atggtttggaaatgtatgaggctaaaagaaagtctgtaattactcggaactccttagagggaactgttcaagtataacctgttggttattattagtggttattatttttgcaaagaagggcatggtttccaaaagaaatatcagtttgttgtacaatttggaattagagtatatcgttaatctattcattttaaaatttgaggacttgacaatctgtactggtagtcaaaatcatactcaatggaacataggtgaaactagagtgattttttgttgttgttkttcttttctggtctaacatgcaatgttctatgcaaatgaacacatcaaggttcttattaaatttgatggaactttgaaagcgtgtgtggggagagctactctatttctgggggctcagtaattgcctctacatagcataattattatgatgctttttagggtcttaatttttttcattctaggtgggtttggaacatccatctatatttaacaatagtttaggccaggcatggtggcccacgcctgtaatcccagcactttggcaggccaacacgggtggatcatgaggtcaagagacagagaccatcctggccaacatggcaaaaccccatctctactaaaaatacaaaa

SEQ ID NO: 743369 - DNA, 556 bp, Homo sapiens
ggtcttttcttctctgttctcatatctgcatatttgtagcccagagtgagcagtgggagagccactggaaattgtttttttttcctccaagtttcaggtaattgtaaggttgcattttcctgtctccccaaaatactgaaagtattggttttgtgtggttaatttgctcttatggttgattttatggagagtcatttttagggtgggtgaaagaaaatgtttgattctatttgaaattaagcaacagccattgttctccaaacctggaacttcatcaaaagttattattattattattattattattattattgttttattttatttgagatggagtctcactctstcacccaggctggagtgcagtggcacgatctcagctgactgcaacttccacctcccaggctcaagcgattctcctgcctcagcctcccaagtagctgggactataggcatgtgccaccatgcccagctaatttttctgtatattgaatagagacggggattcaccatgttggctgtgttggtctcgaactcctgacctcaggtgatccac

SEQ ID NO: 743370 - DNA, 424 bp, Homo sapiens
atgagtaagaattcaatcatataaaactactacagcttaatattcagtaaagtaatagactcaaaatcagaattgttgagatgaaagcaccttcaaagtaggttatgttcaaattcccacccaatatagacgtttttttgcttctacaatattccttaaaaatagttattcattctcactagttctacccatcaggaaatgtaatactttatacaataatcctttccatttttgtccagctttagttttcagwggggccaatgaatagagcaatattaatttagatctcacttgaagttcagcgttaaaattcttctacacattttaagaaatgaaaaaagtttgcaaataaaatgcatatttgctactcataagaagacttgctgcagtaatctataaagaggaatctgtaaatatattatta

SEQ ID NO: 743371 - DNA, 602 bp, Homo sapiens
atcccaacgccatgcctaagaacaagtgtatggtacatattttttaaagaacattgtcaacaagtgctcctgcagttatttcttccgttgtagctcagtatgtgccacgttctcattaaaattaaaaaacagttcataaactgctaattaagcttctagtttcaatactttataataccatcttatagactggtagtgtatttggtaaaaacawgattcactataaccaccatcaccatcatcaaatggtattttggaacattagataatatatttggcatatctacagtaacaaagtgattcccctttttccattgccataatagtgctaagcataaccgtaacctgtttgcactttgatacacatgaagggctgagctatgcaagaaaatagcttgcaaatgtttctaagatcttacatttactttggctcatttgatcaccatatccgcttctgagttttgatatggggtggagtaaatctgtcattcacttctactttattatgacagctggtgctatttggcaactaccctgttcaaattaaaccaaaaaaagcaatttttcacatttaaaactaagactatgtctacatcaacatc

SEQ ID NO: 743372 - DNA, 602 bp, Homo sapiens
atcccaacgccatgcctaagaacaagtgtatggtacatattttttaaagaacattgtcaacaagtgctcctgcagttatttcttccgttgtagctcagtatgtgccacgttctcattaaaattaaaaaacagttcataaactgctaattaagcttctagtttcaatactttataataccatcttatagactggtagtgtatttggtaaaaacatgattcactataaccaccatcaccatcatcaaatggtattttggaacattagataatatatttggcatatctacagtaacaaagtgattcccctttttccattgccataatagtgctaagcataaccgtaacctgtttgcactttgatacacatgaagggctgagctatgcaagaaaatagcttgcaaatgtttctaagatcttacatttactttggctcatttgatcaccatatccrcttctgagttttgatatggggtggagtaaatctgtcattcacttctactttattatgacagctggtgctatttggcaactaccctgttcaaattaaaccaaaaaaagcaatttttcacatttaaaactaagactatgtctacatcaacatc

SEQ ID NO: 743373 - DNA, 632 bp, Homo sapiens
gttttcaacactttatatggtttagaaacttttttaacatctttatgattgaatattttaaacatacacaaaaatagattagtataatgaacctccatgtacccatcagctagtttccataatgagcaacacattgccatcttgtttattttcccatttcataattttactttaatactgcaaagcagcttcccaacatcacgacatttatatataaatacttcagtgtacatccctaacagaaactcttaaacaaaatcactgtgtcatcattccatctgacaaaagtagtgaataattctttaaatatcacctaatacttcgtccatattaaaacttattcaaatatctcaaaaaaaatctaaggatcagtttgtgtgcaatagaatctaaaatgcacctacacgttgcttctgtctattatgactctttgcattcttattgtataattgtttttctrttttttatcttaatttcttagaagttagtgaaaaaacagatttttatatatagaaaacaatcctggaattagcagattgctgccttatggtatcatctaaattgtttcttcattccctgaattttctgtagttagatctagaggcttgattggattcaggataattctttca

SEQ ID NO: 743374 - DNA, 629 bp, Homo sapiens
ctttcattagctttccctactgacaggtaccatgctatattcttatattgtttctctaataccacttagcattatctatgaactcctggagttaaagaatcatgttttagtacattttagaatacccactgcatggarcagcatctagcaaaaataaacattcaataaatatttgatcagctaaactgggaatagtaggtgttcagtaaatacttgctgaacaattgattcctgtcatctccaatgtggacccagaaaaaagggaaagagaggtggaagatggcaattcttctgaacatcaacctttctttgattatcatagaagagaacatttcatttcagagagatggagtgaaagtaaatcatggctaagatgttttgggtggccgtttttctgttgtgctgttttttgtttgtttgcttttctgttgatttgtttctgtttgtttttctcctccagtgggaagtcaagggtctaaagatgaaatatatagctgctgggaaggagagaagggtgaaagccagctctttcaagtcatgtggaaagtctgtaacttacctgcagagtgctaaggcaggcatttccataagccgggaaccataggctccaatatttatgggacgaatgc

SEQ ID NO: 743375 - DNA, 635 bp, Homo sapiens
tgcaactaaaatgcaacttaattttattcagatttttaaaatcaatgtggtttttgtgaattaaaaacatgaaatctaattcgtttcagtacagatgcataatatgcctcagtttcatagggaagacagctaaacaggagagagaaggagaaggactggatgaaggctgataaagactgtgagaagagatgttcaaaccaaaattcyaagctggtagagtcactgaggctgtgtgacattgggaaaagaacaggaagggggcaaggagaagatgttggtgcctaaatgataattagaagagcaagaagaattgttacccctctaattctgtgaggctgtggatttcagcatcctttatcactgttcattaatgcaaattaactggttagtctcggcctataactcctcgacagcattaatctttaaattctgcgagtcttggtcccaaatgagacagctaccacagcccaccagttcagggcaaagaggataatgaggtattgttttctgagccttcttgtattggtctggatgaaatcaaactggagggaatctatcccttccacggagcagagagggcagaagtggtttgttgccagggaccaaactaataaaatcagtcagttttacatttt

SEQ ID NO: 743376 - DNA, 289 bp, Homo sapiens
ctttcagtggatagccaatactttcaattgctagaacccactctagggatcctaactctttctttggttcttttattactaattattcatcatttgtgttggaataggctgaacccctgtatcttggtaaccaaatacaacagcatttatttycttttcatacagagcccttacatatcctgatggctctccagaacaatagctttactgggagactctgacccagtgtgacaggcaccgtcagctgaagctgcaccgtccagaatacctggccttcctggttggcacg

SEQ ID NO: 743377 - DNA, 667 bp, Homo sapiens
gttgcagtagccaggaaaagataattcactaaaatatttttatctccagctcattttcacagacttcctcaggaaagacatgctttctctttttgtgtatttaaagaaataaactctaaccttgagggaaggcagaatcaaagatctggcaaccacatttgtcataaataatgaatgagaaaacattaaaaaattaattgagaaaaattaagtatcagtgtagtacttgtgcaaattggctcgtgggagttgtggtaggttcgcctcactgatgagctgcctatataaaattcttcttctgtggcattcttaaggcattgactagattcttctccctactcaccattagctccttccatttttctcctgtggttcataagtaggtgttcctcaaacctcaactctcaagctgctcttctccaattgtctattctttggattccactgatatgtgatcagtccctaattccattttctttctccccacatctatcctgttcacagaatccatcttctcaaakcactgatttatttttatttactctgtttaagaaatatctatagatcattctctccatgcctctctgttatctcaatcctacattccaagacccagccccagtgcaccttctccaaggaacaatgtttttcatcaaaaccttcatct

SEQ ID NO: 743378 - DNA, 634 bp, Homo sapiens
taaatgaaatggcttattgctaaatcatgggcccaaagtaagttaatttggagattctcctttttaatgtagctctgtcgaaagtgacaataacctccataattaagggaactttgagaagcttgattgttttaagaatgtcctcaataaatacctgagaaatacgaacatgatattttggtaagtaaatacaaaatgttagaataagataaaaataagccagtgactttatgtatttcccctgtcatcttatttatgcattgaggccaaatcactttgaattatatgaagatycattttctctttcataaaataaagagatttgtgagagaaaggcctaagagttttagaggacagccagctcaatgtgagctctttgtttaatatatagaatggaaaattggataaatcctaggatgaatcagtagaagtatgtatttcaagttaaaggaggtgaggtcactataacagtaatcacattttgagaagaacattcacaacctagaatattcccaataaaaagctttaaaatatcaaggaatataaaaactgtgacatataagaaaatgtttatgagcctagagattttaggaatgtaaaagagatttagaggctgggcgtggtggctcacgcc

SEQ ID NO: 743379 - DNA, 541 bp, Homo sapiens
gatacatgtaatttctaggtatagaaattaatatacatacctgtatatatgatacagacacatacacacatacatttcttaccactgagaagaagtggtagcagtgatacctcaataacaatgaacacacctaaactgatatcttggtatctaaacatcattcttcacyaaaaggaaccatggctccttggagaaatagctgattctagggctgagatagggaaagtactagatgagctaaaacatatttttgtgccagaaaataaagaggtgctcagtgaatgatgaaacatgtcaaaaggacacaggacccagcttgaaagagctccttttggtcaaatctaggacaatttgagcaacaaaatatgtaaggatagcaaaagattataacccaatgaataaaatatattcttgaatctgtcctgatatagatatacgaatggagagaagagaaaatgtttccttacagtgaagtggcaactgataaatgttgaaggaattatggagtttgaaagtcaccatatagcaacaatcattgcat

SEQ ID NO: 743380 - DNA, 541 bp, Homo sapiens
gatacatgtaatttctaggtatagaaattaatatacatacctgtatatatgatacagacacatacacacatacatttcttaccactgagaagaagtggtagcagtgatacctcaataacaatgaacacacctaaactgatatcttggtatctaaacatcattcttcaccaaaaggaaccatggctccttggagaaatagctgattctagggctgagatagggaaagtactagatgagctaaaacatatttttgtgccagaaaataaagaggtgctcagtgaatgatgaaacatgtcaaaaggacacaggacccagctkgaaagagctccttttggtcaaatctaggacaatttgagcaacaaaatatgtaaggatagcaaaagattataacccaatgaataaaatatattcttgaatctgtcctgatatagatatacgaatggagagaagagaaaatgtttccttacagtgaagtggcaactgataaatgttgaaggaattatggagtttgaaagtcaccatatagcaacaatcattgcat

SEQ ID NO: 743381 - DNA, 537 bp, Homo sapiens
ggctcccctggcttttcaaaagctctcccgttttatccgatggtgtggtcgtccaagttttcctccattgggattttaaaccgtttttttcccgccttgactcttttgtactctaaaagaacgcgtttgttcactgttttgaacctttccagttacttttgtagatttawctcgcttgttagtaagccagcggttttccaagtgtggttacaactattttcgttaatagtaccaaggtcgtgtacatcgagttttccaaaggctacatggtatggagtgatctcaccgccgtttggaggcccgatgcctgtgtattcttaaaaacaaattctcccttttaatttttgatagtaaacattggtggttttcatctgtgtaaacaaaagctctttggaggctggagaccaaaaagtttgagaaccactctactaagcaacctcctacatgagaagtttaaattgtagaaacagttcagattgcaggctgagagattagaggatccgtccaaagtgacaccgttggtttgttttatagaac

SEQ ID NO: 743382 - DNA, 603 bp, Homo sapiens
gttcgcacattctgtgaaggaatttctggtgccccgggtggttagagttgaaagtgctgagttcagtttcatcatggcttacactaattagcaatactagccagaaattgaccctaagcccaatcacaggctgacctccaattctgagtccaccacggtcacagctgggccttcatcctcactcaagattgactcttaagccaaatccaggaagaagggggcattcaaattataatggtagatattttatataggcctaattcatcctcccccrcaattccttgtaatgcctataaggacatgtcaaatgagcactggcagcactgataatgccaatctgtggagaagaattaccctaagcacatgttgatagtaggactgagaaaagtgagcagtcagctaaatattgggacccatcaatgtagatacagaagaggcaggaaaagactttaacataatctgctctatctcccaatatcagaagctaccaaagaagaagcctctcaaccatccaccactgtacagaagtagcacgtcagggcattcagagatatttactccttcccatccatactcccagtctcaccaacacttataattatt

SEQ ID NO: 743383 - DNA, 653 bp, Homo sapiens
aataacatcctttacacctaataaaacacttctataatgcaaaatatttttaaaaagctaagtccaaagacaaaactaggaacaaacattttaacttatgccaaaaatatacacaaatatgtaatgattttctataaattgatttttaagaccaacaactcaatatgaacaggctgttcacagtaatggaaatagtttccttctttcttctttcttcttctttcgtctttcttcttcttttyttggtgtcacccaggctggagtgcaggagtgcagtggtgcaatctctgctcactgcaacctccacctctggggttcaagcgattctcctgtcagcctcctgagtagctgggactacaggcatgcgccactatgctgggctaatttttgtgtttttcaaagagaggaggtttccccattttggccaggctggtcttgaactcttggcctcaagtgatccacccgcctctgtctcccaaaatgctgggattacaggcgtgatccactgcacctggacaggaaatgcaattttcttttaaacatacaaaaaaattatgattaacctattataaatatgctaatgtataataaaataattgcaaattaaaacttcactgaatcatttgggatccctctgttctctgctccaattt

SEQ ID NO: 743384 - DNA, 620 bp, Homo sapiens
tctgtatcattatttttgccctagaaaaacattagaagattctactcaactcctctcattgtttccttggatactttccattttctatttagtgcctgtgttggcaggttatgtattggtggtttgtaatatctgatagattttgtattgcttgggcgtgggaggtggcagcggaattgagaactggcaaaacgagcagctgtcagctggtaactctaatttgggtaagttctttcttagcacttgccaaatttgaaataccatctgcctcagggctatgtgtgctcccttgattagaagtgtgcggctactttagagctcatcctttcacttgcttgaggacagcagattactttgttgggaaaccagtgaccatacaatgccctcatctcccaaaygtttgttgcacgctatggacttatctctattgactttcatctaaaattgcaaacttagatctctgctccttgttatccaatattctccaccctgcttatcttataccatttgggatttttttgtgacttaagaaacccaatgactttagccatagaatttttgttttgtttggggtattgtttgtgtaaataaaaatacagaagctaagctaattttatgta

SEQ ID NO: 743385 - DNA, 575 bp, Homo sapiens
aatcagtttatactgccgtatttatctgtgtgatgtttatttagcgccagccctctccattagtctgtaagtctaacgaagccgggaaccatgtccatttgactcattgttggtttccatctctagttcagtgtttggcacatagcagctactcagtaaayatttgtgggccaagtaagtaaacgactccatgttgggggtacatagctgcttttacacgcacagttctctattaaattagagaattatcagaatctatatagattttgcttcatttccttggaacatgcatgtagaaaggaccttttgatactttaatgatttaagcaagttttacaaaattatcaggagaaaaggtcagaaacatagattacccagggaaatggaggaatctcctgcatttgaggtttaatcagaggatggctcagtttgagctctgttgctatgtgtaggctatgaggtatagacaagatcattctgtagaaccatggaggaaatacctgtctttctctttgtatgtttgattctttgtctagaacttaactctttgctcatgtccaaataggaaaagtatt

SEQ ID NO: 743386 - DNA, 575 bp, Homo sapiens
aatcagtttatactgccgtatttatctgtgtgatgtttatttagcgccagccctctccattagtctgtaagtctaacgaagccgggaaccatgtccatttgactcattgttggtttccatctctagttcagtgtttggcacatagcagctactcagtaaacatttgtgsgccaagtaagtaaacgactccatgttgggggtacatagctgcttttacacgcacagttctctattaaattagagaattatcagaatctatatagattttgcttcatttccttggaacatgcatgtagaaaggaccttttgatactttaatgatttaagcaagttttacaaaattatcaggagaaaaggtcagaaacatagattacccagggaaatggaggaatctcctgcatttgaggtttaatcagaggatggctcagtttgagctctgttgctatgtgtaggctatgaggtatagacaagatcattctgtagaaccatggaggaaatacctgtctttctctttgtatgtttgattctttgtctagaacttaactctttgctcatgtccaaataggaaaagtatt

SEQ ID NO: 743387 - DNA, 640 bp, Homo sapiens
tgccttctgcttccaatcagattgtttcttggaagcctgcttagaaattctgaaaccagccctgtttatatttgggtatcacctccatgctagagctactttcttgcttttacttttcttgagacaaggctatctgtctttcattatagtagaatgtgattccaggataagataaagttgattttgtatatgttctctcagttaaaaaaaaaaraaaagaaaagaaaagaaaaacagagtatttaccaagctggattctgacagcattggttaccttcagaaggtggatgtgtaattcagaatggagctattttgccttggtcatttttgcttttttttttttttttttttttgagacagagtttcgctcttgttgcccaggctggagtgcaacagtgtgatctcggctcaacgcaaacctctgcctcccggtttcaaatgattctcctgcctcagccttctgagtagctgggattacagggacccgccaccatgcccagctaatttttgtatttttagtagagatggagttttaccatgttggccaggctggtctcgaactccttacctcaaggtccaaccacctcggcctctcaaagtgctgggattacaggtgtgagccaccgtgcccggctatttt

SEQ ID NO: 743388 - DNA, 662 bp, Homo sapiens
gtgtcaggggttaagtgaaagttcacactggagaagccggaataacttactcatcgcactatccacactatccattttgtttgtaattttttcaaggctagcacattgaaaaatacatcctaatttaaatctaaaaaactggaaatagtttatttcaataaatatacttaaaaaaaatcacagaagcacacgttgatcacaaaacagagagcggtaaaacctacggaaggcaccagagcaggctcaccagtgttgtaggcagtcggcattgctgagtacacaagtccttgcggaggcaagcttggggttgtcacagacacgactggggtagcaagaggttgagtggcttgagaactactgatcctytgggtattctgtgagatcaaaaaagagaaaatgtgttctgatgtggtatttatgttgacttaaaaatcactttcaatttaagtgacatttttcacagtttcatatgaatgtcattttctgaagcactgatgatgtgaaaacttcaaaaatactagtgagaataactaaatatttaatttgaagggtcctatttttacattaattcttttaaaatagttgattagtgtcagacaccccacgttaaaataggaacttctgttacaggcattagcacttctatttgttgcacaaaatga

SEQ ID NO: 743389 - DNA, 662 bp, Homo sapiens
gtgtcaggggttaagtgaaagttcacactggagaagccggaataacttactcatcgcactatccacactatccattttgtttgtaattttttcaaggctagcacattgaaaaatacatcctaatttaaatctaaaaaactggaaatagtttatttcaataaatatacttaaaaaaaatcacagaagcacacgttgatcacaaaacagagagcggtaaaacctacggaaggcaccagagcaggctcaccagtgttgtaggcagtcggcattgctgagtacacaagtccttgcggaggcaagcttggggttgtcacagacacgactggggtagcaagaggttgagtggcttgagaactactgatcctctgggtrttctgtgagatcaaaaaagagaaaatgtgttctgatgtggtatttatgttgacttaaaaatcactttcaatttaagtgacatttttcacagtttcatatgaatgtcattttctgaagcactgatgatgtgaaaacttcaaaaatactagtgagaataactaaatatttaatttgaagggtcctatttttacattaattcttttaaaatagttgattagtgtcagacaccccacgttaaaataggaacttctgttacaggcattagcacttctatttgttgcacaaaatga

SEQ ID NO: 743390 - DNA, 662 bp, Homo sapiens
gtgtcaggggttaagtgaaagttcacactggagaagccggaataacttactcatcgcactatccacactatccattttgtttgtaattttttcaaggctagcacattgaaaaatacatcctaatttaaatctaaaaaactggaaatagtttatttcaataaatatacttaaaaaaaatcacagaagcacacgttgatcacaaaacagagagcggtaaaacctacggaaggcaccagagcaggctcaccagtgttgtaggcagtcggcattgctgagtacacaagtccttgcggaggcaagcttggggttgtcacagacacgactggggtagcaagaggttgagtggcttgagaactactgatcctctgggtattctgtgagatcaaaaaagagaaaatgtgttctgatgtggtatttatgttgacttaaaaatcactttcaatttaagtgacatttttcacagtttcatatgamtgtcattttctgaagcactgatgatgtgaaaacttcaaaaatactagtgagaataactaaatatttaatttgaagggtcctatttttacattaattcttttaaaatagttgattagtgtcagacaccccacgttaaaataggaacttctgttacaggcattagcacttctatttgttgcacaaaatga

SEQ ID NO: 743391 - DNA, 598 bp, Homo sapiens
gacttaaaaatcactttcaatttaagtgacatttttcacagtttcatatgaatgtcattttctgaagcactgatgatgtgaaaacttcaaaaatactagtgagaataactaaatatttaatttgaagggtcctatttttacattaattcttttaaaatagttgattartgtcagacaccccacgttaaaataggaacttctgttacaggcattagcacttctatttgttgcacaaaatgaggacttgatgccactacaaatactgtcagactcccctaaatgaagtatgtgtaggttttaaatacctgatgatggcaaaggtcatctgtatatatagggattgtacgtctatgagtataggaatcaaaactacttttctttgcggtattatttacgtgttaacacggtttgaagtcatggcttattgggtgcagcttgtattcttatttctttctctccaatcatgcagttgacctattttttaacaacagattcggacatgtatcccttcatagtcccctggccttctgtagcagaggctttgagtagagaattttgaatcaagtactgccgacagggcagtggaagagcaatatta

SEQ ID NO: 743392 - DNA, 598 bp, Homo sapiens
gacttaaaaatcactttcaatttaagtgacatttttcacagtttcatatgaatgtcattttctgaagcactgatgatgtgaaaacttcaaaaatactagtgagaataactaaatatttaatttgaagggtcctatttttacattaattcttttaaaatagttgattagtgtcagacaccccacgttaaaataggaacttctgttacaggcattagcacttctatttgttgcacaaaatgaggacttgatgccactacaaatactgtcagactcccctaaatgaagtatgtgtaggttttaaatacctgatgatggcaaaggtcatctgtatatatagggattgtacgtctatgagtataggaatcaaaactacttttctttgcggtattatttacgtgttaacacggtttgaagtcatggcttattgggtgcarcttgtattcttatttctttctctccaatcatgcagttgacctattttttaacaacagattcggacatgtatcccttcatagtcccctggccttctgtagcagaggctttgagtagagaattttgaatcaagtactgccgacagggcagtggaagagcaatatta

SEQ ID NO: 743393 - DNA, 632 bp, Homo sapiens
gataaagcagacttacacattagtaaattaagagattgccattagggtaagattcataagagacttcataactcaatttctctgaaatgaagaatatcattgctgtgtttaaaatgtttccacactgcttttcagtagtatatttcttacaaaacatgagttttataactttatttcccatatttcattaggtgacattccacaaagaatgttgtcaaaracacacattttatcttttcaagttattaagcattgatacaaaaataggtggcagacttttgtttggtcctataaaatgtagtaatttaatttaaatgtatgaagaaaatgttataactccttagtttttcttttcagtaaaattaagattaaaaattatgaactatattatataattttacaggaatactaggtatgtcctagagtgtaggaaactacagatggaaattaccaacacaagcagttgccattgttcatacacatgcatatgtgtgtaatttgaatttatactaaataaaagcctagagccaatagaggctttgggattctgcatcaaaagaacaattatgctaaaaggcaacaaatgatacctaaaaaacacctgagaatacttttgtatccatgttttttcc

SEQ ID NO: 743394 - DNA, 616 bp, Homo sapiens
ttgctccaaaaggtatctgactatgtaaggcaaaaatagtaactgtattttgtttctgtagcacatgtaaaaataaaatatatgacaacaaaagatgggagggaggaattgactctacacatgatgtaaatattatttgaagatgaactcaaggtaactaaaggtgtatattataaaccctagtgcaactacagaagaaaattttaaagaagtataaataagtcagtagaakagataaaatagaaatataaaaaatgctctactaagtagcccaagaaatgggagaaaagaagacaaaaagcaagataatggtagcttttaatccagtcatataagtaatcacattgaatgtggtgagaaagcgtcagttaaaagattgtcagatttgtgtgtgtgtgtgtgtgtgtgtgtgtgtttcttaaaaagcaatgtggtggctcatgcctgtaatcccagcactttgggaggctgagacaggcagatcacctgaggtcgagagttcgagaccagcctgaccaacatggagaaaccctgtctctactaaaaatacagaattagctgggcatggtagcacacgtctgtaatcccagctacttggtaggctgaggcaggagaa

SEQ ID NO: 743395 - DNA, 488 bp, Homo sapiens
gtgtccttttgaataatctatacaaagaaactcaaaattttctcacccatacattttcttcttagcaataggtgcacataagcatatgctaatttatttatttagcctattcagggatgtgctgagagaaggcagatttcacattatttatcagagggtaacaattcttgcagagaggtrtctgctggggcgtgcagtatggtaccggtggcctttggagaacatgaggaccatggtatctggagggctcaatcctcgaggccagacaggaagcagaggcttaccaagactgcaattgtttttccaaatggccaactcataaactcagttgacagatgaactaaagcacagtgtggatagcagagaaaaaatagtttttagcaacaaggtttatgattggttctaactgccagatcagctttctagcacatcttgggatttttagtcccacaatttaacttcggagttccaaaactaatctgcaattc

SEQ ID NO: 743396 - DNA, 624 bp, Homo sapiens
gcacgctggttcacgcctgtaatccctgcactttgggagaccgaggcgggtggatcacctgaggtcaggagttcgagaccagcctggctaacgtggtgaaatcctgtctttactaaaaaataagccgaggctgggcacggtggctcacgcctgttatcccagcactttgggaggccgaggcgggtggatcacgaggtcaggagatagagaccatcccggctaacacagtgaaaccccgtctctactagaaatacaaaaaaattagccaggcgtggtggcaggagcctgtagtcccagctacttgggaggctgaggcaggagaatgctgtgaacccaggaggcggggcttgcagtgagccgaaatcrcaccactacactccagcctgggtgacagaacgagactcagtctcaaaaacaaaaaaaaaaatcagctgatcagctgggcgtggtggcacacgcctgtaatcccagctactctggaggctgaagcaggagaatcgcttgaacctggaaggcagaagttgcaatgagctgagatcaggccattgcactccagcctggccgacgagagcaaaactctgtctaaaaaataaaaaataaaaataaaaaaaagactaggaattt

SEQ ID NO: 743397 - DNA, 467 bp, Homo sapiens
atgtttatgactccagtccccatgatctgagtcagggtcccagtggggatccatactggggatggcttgctggtcagtagggaatttgtccctttcctcagctgtcattctatcatttacttgactgagataccaggtatctccaaactctcatgctgcagctaaagccacattcttttcattaaaggccagggtttgagstaacaatagcatgacatctctccaaaagagattgaaggtttgccctagaccctgtaggacatctatgtacctatcaggaccatctgaaaacttcaccaggtctgccttgatctgctttaaatcagagagggagaaagggtcatgtacctgggtggggccaaattccccaccccctacagcttgaaggggacaaaactgacagcctggggggttttgtggtcctttggagatttctttgcttatttccttctgggccggggagatta

SEQ ID NO: 743398 - DNA, 512 bp, Homo sapiens
ctaactaaaacggcatttaaaaggagcgaaactcaccaggatggagaaatcgagagattaaaaaaaaaaagcaagctagaaaatggacagattagtttataatttagcagcttcaggaaatggaataccaaggccagcagtgggggcaaaaaaaaactcagaaattaaaaaaaaaaaaaaaaccaaaaaaaaaaaaaaatgaaggacttggcagcagtccaaacccctggaggtgggggcaaaataaggattggatgaatctgtctaaccactcaaatcccaaatccttttccctacactgcrcagttgggcaacagccctctctcatttgttcattctctaaaaaaggtagcccagtctctgggatggcaggggtgtgttacactgaaagcaaaggcccaaccctcaccctgctgggttctaaaatgctggtaaacggtctatcacccttcaggcacgatacaaattgattgaaaatcagctaaaaccttgacataatggcataaaaattc

SEQ ID NO: 743399 - DNA, 609 bp, Homo sapiens
cttgtactgaggtgtaaactccatgagagcagggatgtgactgtgtggcattgtagccccagcacaatgtctggcattgagtgggtgcttgttaattatttgttgaatgactgtggactcaggacctttccacttcaatttgagccaagctgcagggtctgtggggccagcagccccatcactctttctatccgggccagtccctaaggaaatatctccccttcccctgcctattacacatactttccaccaggtgggctcaggtgacctgcagaggcacatagctgctacccagtctgggtgtctttcatctacatgggactgcaagggtcacrtcacctccaggtctgtttgttagatgagtctggtgtgctgatgggagggtccagtgaatcccacagttgatatgtgtacatactaaatgacccaaggccctgggtggggcactgacaggcctggccactgtccctcacttgtgccttcagaggtcaccataagcttttccagccatttttcaaggtaggctgtgggtatcagccacactcaggtgaccccaccagatatcctggataatccccaagtctagggttggttcctaaggatcttgac

SEQ ID NO: 743400 - DNA, 609 bp, Homo sapiens
cttgtactgaggtgtaaactccatgagagcagggatgtgactgtgtggcattgtagccccagcacaatgtctggcattgagtgggtgcttgttaattatttgttgaatgactgtggactcaggacctttccacttcaatttgagccaagctgcagggtctgtggggccagcagccccatcactctttctatccgggccagtccctaaggaaatatctccccttcccctgcctattacacatactttccaccaggtgggctcaggtgacctgcagaggcacatagctgctacccagtctgggtgtctttcatctacatgggactgcaagggtcacatcacctccaggtctgtttgttagatgagtctggtgtgctgatgggagggtccagtgaatcccacagttgatatgtgtacatactaaatgacccaaggccctgggtggggcactgacaggcctggccacygtccctcacttgtgccttcagaggtcaccataagcttttccagccatttttcaaggtaggctgtgggtatcagccacactcaggtgaccccaccagatatcctggataatccccaagtctagggttggttcctaaggatcttgac

SEQ ID NO: 743401 - DNA, 645 bp, Homo sapiens
actggtgtactgggcggcagaggacgaagaccaacaggtgtgcagcgggcagagaagcactgagggggtctcctggtccctgagggtctgtgatgggcttaacccaggagggtattttctggattctgtggcttatgtgggcacagcctctaaggtttctgctggaggcttagtggtgcatgcgtgtcatgtggcccgcacagcctgtatgaatctggagtcattgtcaccctgtgctaggggcaaagtccccagggtctgccttgggtttcctaggctctgtggctcatatgactggcagagccctgaagtttccccagaagccatgcgtcccagatggctcctgtggtccatgtggtctgtgaggcgtctgtggcatgggctaagccctgagttccttttgtgctccatgtggccttatggtgtggagccagtcctggagccgtggtggrtccagaggtgtcacattgcagcccatgttggggaacaacctgtgagtgactttgagctcagagctgtcagtgagtgctccctgctcttcccagcacaaggtgaccttcgacccaacctcctcctacacactagaggacctgaagcctgacacactctaccgcttccagctggctgcacgctcggatatggggg

SEQ ID NO: 743402 - DNA, 501 bp, Homo sapiens
tcgagtcatccttacctctatcgatggtgagccaagggggtgcccctcccatccccttgctctcccccttgctagctagggcaacatgtcattctacagaggatgtccacgagtctcaggggtgcactgaggcatggtgggctgggctggggaccctgtagtaatgccctcccacctcctttcttatccataggcgtccccgggagtgactacatcaatgccaactacatcgatggctaccgcaagcagaatgcctacatcgccacgcagggccccctgcccgagaccatgggygatttctggagaatggtgtgggaacagcgcacggccactgtggtcatgatgacacggctggaggagaagtcccgggtgaggctgcagggccctgccaggaggcgggtgggaaatgcccagccacaaggtgatacagggcaccttcttctgtgccgctttcttctgtggaggaagtcgctcaagtgatccccagatgctattgttact

SEQ ID NO: 743403 - DNA, 501 bp, Homo sapiens
tcgagtcatccttacctctatcgatggtgagccaagggggtgcccctcccatccccttgctctcccccttgctagctagggcaacatgtcattctacagaggatgtccacgagtctcaggggtgcactgaggcatggtgggctgggctggggaccctgtagtaatgccctcccacctcctttcttatccataggcgtccccgggagtgactacatcaatgccaactacatcgatggctaccgcaagcagaatgcctacatcgccacgcagggccccctgcccgagaccatgggcgatttctggagratggtgtgggaacagcgcacggccactgtggtcatgatgacacggctggaggagaagtcccgggtgaggctgcagggccctgccaggaggcgggtgggaaatgcccagccacaaggtgatacagggcaccttcttctgtgccgctttcttctgtggaggaagtcgctcaagtgatccccagatgctattgttact

SEQ ID NO: 743404 - DNA, 557 bp, Homo sapiens
ggcagttgtgagaattaaacaagtcagttcatgtaaagtgctttgcagagcacgtggttcacagtaagcactcatgatcacagtgcttctaaccagctgcagcaaggttagaagaaacttgagaaatcaggtaaggagccctcagaaatacaggtagaagggttcccctggatttccccaccttttttctcccttggacagcatccctacgatctcttattttcacatttttcatattttatgtgagtgtatacatttctktctctcctactagaccaggtgctctcatcatccacaaatgtgtactgaacataagctctgccaggctctgtgctaggtggtggcttgataggtatgaaggacatgtccctggcctcaaagaacctccagtctagtaggaccagaagcaagtaaagaatacattataaccagaagcagaatacattataacaagggctgtggttgagggtcttgtgggatcttctaaaagcgcacctgatatcgtggggaatatgagtactggttttctagggaagttcacatctgacctacatctt

SEQ ID NO: 743405 - DNA, 566 bp, Homo sapiens
cttgagctggagggaagtttttagccccacaaatgggatactcctcagtctccccgaaagaccttgtgtcccagatgctttttcagggtttgtcctttccagcctcccctctctggcagattttcagggcattccctgtaattacccccacctgagctatgtggtcgtaaagatttaaatccaacaaacatggtgtgtacctatcatrttctgtaataatacctgctagcattattaagcacttaaatatgacaagcattttacccgcattgttaacattcagttcctccaaaagccctgtatagtagcttgtattacaacctccttttgtgattgaagacaggctctcagaggtcaaccaactcactcttaagtcacacagctaggaagagagcagaacctagatttgagcctggttctgtgagtccagagcctgaatgcttaactaccatacaaactacaacccacctagcttcatttgtccattctttccccaaatcatagtccagtgatatttattgagcacttactatgaaccaggcattgtccaaggtactgagattcaa

SEQ ID NO: 743406 - DNA, 619 bp, Homo sapiens
agcagacatggaacgctgaagtctctgaaagtgaagttgtaaaaagaaaaggaatgaaataaccgacccatcatcttctcacccaccctcattgcattccgctgtagtgaaaggacgagccatttctgggcacgtggcagcagtcgctgatctcccagctgaggggctgagcactggaatgctgtggctgcactggccccagtccatagagrggtcaactatgctggctggactggctgccttgttcctggcctaggacttagcttcataactatcacctgcaccgactaggctgaggtgctggtacttgccccaacccctacttttgtatttatatgtgtgtgtgtgtgtgcgtgcgtgcgtgcgtgcgtgtatgtttggtctggaccagcttctgccagcccctggcctttactttcttccttgcctatgcagggcaaacaaaatgtgaaattctgccctcagctgagctgagtaagggctcctgggggttggctggagatgggtgtggcatctgtccaggcctggaaccgtctcaagacagtgctggcaaagctgcagtattgagatgctaaggagctgatgccacctctttgtcttcccctaaaggagaacatgg

SEQ ID NO: 743407 - DNA, 581 bp, Homo sapiens
cagtaagtatatattttaaaaagtctcattaaatatacatgtgatgcttgaaatgccaaaagaaaatatcccatacctgtctgagtgaatcctgatttgtatccattagttgtcccattttctggggtcacagttgacgacactgaagagcttggcttaatagagtggcaagaagcagaggattgtcggcttctacattctggaaaagagtaaaaatcacattgtatgaagtgaccaatgttctgttaaaacaggtgatggggacrcaatccataaaatctctaaattaaatcgctgctccttaagcggcagccactttaattagagatcaccttccccatcctgactccaacagaatgtttcaactagtgaacacaatgcttttgtttggaagacaaagaaatggtttcaaagaaattggacctttgttccctacatactagttcccagaggaaaaatactcgtaaccaatatagtcatgctagttttatgggtaagacagaggttaaaacattagtaatttatgaaaacctaataggcctttcaataccagttaacatcctacctgggattggtttaaa

SEQ ID NO: 743408 - DNA, 507 bp, Homo sapiens
tgcttttttgctattatgaataatgttgctatgaacatttgtgtttttgcatgcacgtatattttcacttctctctcatttcgtatctttttttttttttttttcagatggagtctcgctctgttgcccaggctggagtgcagtggcatgatctcggctcactgtgagctccacctcccgggttcaygccattctcctgcctcagcctcctgagtagctgggactacaggtgcatgccaccacgcccagctaatttttttgcgtttttagtagagacagggtttcactgtgttagccagaatgctctcaatctcctgaccttgtgatccgcccgccttggcctcccaaagtgctgggattacaggtgtgagccactgcgcccggctcatttcatatcttggagtggaatttctggatcatagagtaactctatatttaatcatttggacaaccactagactgttttctaaagcggctgtaccattttaaattcctaacagcagtgta

SEQ ID NO: 743409 - DNA, 502 bp, Homo sapiens
acaacataaactgagagaatcctcataacaatcctattaggtagctaccattattatccctattttgcaaataaagcaactgaggcaaagaggggttaagtgacttgcacgacatataaatggcagagccaagactcaactccaagcaatctgtctacaggtctgtgctcctaactcctacactatgttgctttacctactaaaaatacaagtattcacatcacttgacccagaaattccactgctatttatcatacaaatacrcttgcacatatgcaaaatcatgaatatataagattattcactgcatcattgttgataatagcaaaataccagaaaaaaaattctagtgcaggcatacctctttttagtgtacttccctttattgaacttcacagatattgtctcttttactaattgaaggcttgtggcaaccctgtgtccagcaagtctatctgcaccattttccaacagtatatgctcatttcatgtctttgggaca

SEQ ID NO: 743410 - DNA, 492 bp, Homo sapiens
attcaggatgtatatgtaacattttatcctaggaatatgaattttttaaaggaagtctgtaactagactctttggtcagtttcagttaagataaactatatgatgatcacaatagattcctaaattacatttgacaattcagtacctgtcgttaatttaaaaaatataattcttataaaaataagattttttacatgatttatgtatattataaaccaaaaaataaattttgtatgtctgtgcacccacacatacatatctcttaaaccagtatttaatgtcatactcaatrgtgaaacattagagattccctttaaaataaaaaaactaagatgatatttattattctggaatttcttgtcagtacaataaagcatgaaacatatgaaatatagctgatagcaggaagtaaaaagtttttaaaaaataaacaacataattacataacaataaaaaagaaacaaatgtatggtaacactcctaaacttattg

SEQ ID NO: 743411 - DNA, 634 bp, Homo sapiens
gctgcataaatgtcttcttttgagaagtgtctgttcttgtcctttgcccactttttgttggggttgtttgatttttttcttgtaaatttgtttaagttatttgtagattctggatattagccctttgtcagatgggtaggttgtacaaattttctcccattctgtaggttgcctgttcactctgatggtagtttcttttkctgtgcagaagttctttagtttaattagatcccgtttgtcaattttgtcttttgttgccattgcttttggtgttttagtcatgaagtccttgcctatgcctatgtcctgaatggtaatgcctaggttttcttctagggtttttatggttttaggtctaacatttaagtctttaatccatcttgcattaatttttgtataaggtgtaaggaagggatccagtttcagctttctacatatggctagccagttttcccagcaccatttattaaacgggaatcctttccccatttcttgtttttgtcaggtttgtcaaagatcagatggttgtagatgtgtggtattatttctgaggactccgttctgttccattggtctatctctctgttttggtaccagtatcatgctgttttggttactgtagcctttggttact

SEQ ID NO: 743412 - DNA, 512 bp, Homo sapiens
aaaaccccttggcgtctcaagcccatctcttagtcaaagagaattgttattcatcattacagggtaaggtctgaccttaaaagcctgcctccactggacacattcctagatatatacatgtcggggaacctcagatggaccctccgtggagtcaggagagacaccatcacgcacccatcaggcttctgtcactgattcaaggccatcaacttctggcccttgtcaagcagctggaattgtttttaagttctcgctgtgcaatactttcctcagcctcaataaccaacgccaccactcagtgagccttattctatgccaggcactgctctaagtccttttgggtatcatckcttttgtttttcaccactaccctgaggggcaggttctataacacccccatgttttacaaatgcagaaactgagatacagggggatggataaggaagctgcccaaggtcccacagctaattaagtaggagagctgggatccaaacccacagtctggccccaga

SEQ ID NO: 743413 - DNA, 429 bp, Homo sapiens
atatcattttcacatgtcataaaatactattattctgattttttttcaatcatttaaacatgtaaaaaccatccttagcttgtggataatacgaaaacaggtcatgggctggatttggccggtggattgtaatttgccaccctttgccctaaagcattagagattcctctaatgtattccaggtatgcgtgcaattgttttccagtatgtgagccayccttttctgccaaagtccgtctacctattcaggaggtaatgcagagtgacatggatagaaaaccagaaacccaactgaaaccaggacatttcagtcttccgccttcatcacttgctgcctcctctctctctccctcacacacctctacttgatgctcatggcaccctttcttgatgacatgggatctcatttctattctttgggatcctggt

SEQ ID NO: 743414 - DNA, 604 bp, Homo sapiens
gtccgcagtacctcagaatatgacttgatttaggattagggtccttgcatatataattagttatgatgaggtcatactggaatagagtgggtctctaatccagtatgactggtgtcctcagaaaaaggagaaatttggatacagataacacatggggagaatggcatgcgaagatgaaggcagagatctacaggccaagatatccacgagaagctaggagagaaaggtgggacatattctctcttccagccctcagaagragtcaaccttgccaacaccttgatcttggatttctagccttaataactgtgaaacaataaatttctgatgcttaaggtgcttggtttgtagtgctttgttatgacagccctagcaaactgatataccagccttggacagttatgggtctgagagtatagtgtttccagcaaggaaacagaaaatacaaagaccccgaggcgggaactctattaaccacctagctcactgtcttgtgattatttgttttcatgtgtgtcctcttacattagactgtgagctcctcaagaacgaggacagtgtcttatttctcatgattcccctgtgtctagcacggtcctggaca

SEQ ID NO: 743415 - DNA, 609 bp, Homo sapiens
tggcctcccgacgtgctgagattacagacatgataaaaataaatgagcctggctaagtggtggagactgggtaagacaaggctccataaaccttgttcaaaatcttggtttttattctatgaactgcaggaatcactgacttatttttaagctgctataggaagacatttacaactttaaaagagcaatgaggcagcatggtggaaaaattctttggagggaggccagccagagtggccttgagatctgttaagaggctagttggaagttacggagtagatgtggtacaagggaccagggtgatagaggtttaaggaggctagactgcttgacacttaaacattttttaaaattgacctttgtgaagaagcattattctaaaactgaaccaccaacagattgttaaaatttagagtgaaggagaaaaccatgttaaraagggacctaaagtgtattcagtaccttataagtaatcctttgtttttaacatggcatttaaaaaattccccccaaatttatctttactcagtcttgtaatttcactttttaatcatgaagttcagatagttttatctaaacttatctttttgttaatatctgttaaaaatg

SEQ ID NO: 743416 - DNA, 648 bp, Homo sapiens
agtacagttaaaaacctcaagcagaagaactgcttgagaccaagagttcaagaccagcctgggcaagatagtgagaccccatctctacaaaaaattgaaaaatcagcttggtgtagtggtgcatgcctgtggtcccagctactcaggaggcaggaggatcacttgagcccaggagtttgaggatgtagttagctatgactacgccactrcaatccagcctgggcaatagagcaagaccttgtctctaaaaaaataataaaaataattttttaaaaacttgttttaatgttcttgtctgctaactctaacatctgtgtcaattctgagtcagtttcaataggttgatttttttttctcatgagtataacttttctgcttccttctatatctggtaattttttattagataccagatattgttaattttattttgggggtgctagatatttttgtgtccctataaatattcttgctttttgttctgagattcagttaagattcttggaaacattttgataactttaggccttgtttttaagattctttagttaggactcagcttagggtttaacctaaagtcaatttttccccacttctgaagcaaaacccttgttctactctactgaatgccctatgaattactctatg

SEQ ID NO: 743417 - DNA, 611 bp, Homo sapiens
tggtcagcactctcttgaatatcaaccagagaggaagcctctgtagatctccagagctctttctgtatagctatctgtcctggtactatgtcctgcagactccagctgccttagcctacccagacactcggccccatcttcccaactcaggagtttgccaagttttaattgatctcttctstttaaaccctagaaactctcgccaggcagtaagctgaggcaatcatggtactcgcttgttggtttctcatcactcagagggcactgtacttcaggacctgaagtcccatgtcttgaggaccactgttgcatgtattttatctgttttatggcttgtttcacacaggagaataaattggtccctatcctacttgctcaaagctgaagtcagaattatcttttcacaacaaaaatctgataatgtaaatcccctgcttaaaacacttcattgaattcccatcattaaaataaattccaagctctttacattgatttagaaattgacttcataatttaaatcttgtctactttgctagctaatcttgtgacttgtttacaataactatgattcaaaataaaatagctgcagtttcaaatatacaaaatattct

SEQ ID NO: 743418 - DNA, 611 bp, Homo sapiens
tggtcagcactctcttgaatatcaaccagagaggaagcctctgtagatctccagagctctttctgtatagctatctgtcctggtactatgtcctgcagactccagctgccttagcctacccagacactcggccccatcttcccaactcaggagtttgccaagttttaattgatctcttctgtttaaaccctagaaactctckccaggcagtaagctgaggcaatcatggtactcgcttgttggtttctcatcactcagagggcactgtacttcaggacctgaagtcccatgtcttgaggaccactgttgcatgtattttatctgttttatggcttgtttcacacaggagaataaattggtccctatcctacttgctcaaagctgaagtcagaattatcttttcacaacaaaaatctgataatgtaaatcccctgcttaaaacacttcattgaattcccatcattaaaataaattccaagctctttacattgatttagaaattgacttcataatttaaatcttgtctactttgctagctaatcttgtgacttgtttacaataactatgattcaaaataaaatagctgcagtttcaaatatacaaaatattct

SEQ ID NO: 743419 - DNA, 611 bp, Homo sapiens
tggtcagcactctcttgaatatcaaccagagaggaagcctctgtagatctccagagctctttctgtatagctatctgtcctggtactatgtcctgcagactccagctgccttagcctacccagacactcggccccatcttcccaactcaggagtttgccaagttttaattgatctcttctgtttaaaccctagaaactctcgccaggcagtaagctgaggcaatcatggtactcgcttgttggtttctcatcactcagagggcactgtacttcaggacctgaagtcccatgtcttgaggaccactgttgcatgtattttatctgttttatggcttgtttcacacaggagaataaattggtccctatcctacttgctcaaagctgaagtcagaattaycttttcacaacaaaaatctgataatgtaaatcccctgcttaaaacacttcattgaattcccatcattaaaataaattccaagctctttacattgatttagaaattgacttcataatttaaatcttgtctactttgctagctaatcttgtgacttgtttacaataactatgattcaaaataaaatagctgcagtttcaaatatacaaaatattct

SEQ ID NO: 743420 - DNA, 611 bp, Homo sapiens
tggtcagcactctcttgaatatcaaccagagaggaagcctctgtagatctccagagctctttctgtatagctatctgtcctggtactatgtcctgcagactccagctgccttagcctacccagacactcggccccatcttcccaactcaggagtttgccaagttttaattgatctcttctgtttaaaccctagaaactctcgccaggcagtaagctgaggcaatcatggtactcgcttgttggtttctcatcactcagagggcactgtacttcaggacctgaagtcccatgtcttgaggaccactgttgcatgtattttatctgttttatggcttgtttcacacaggagaataaattggtccctatcctacttgctcaaagctgaagtcagaattatcttttcacaacaaaaatctgataatgtaamtcccctgcttaaaacacttcattgaattcccatcattaaaataaattccaagctctttacattgatttagaaattgacttcataatttaaatcttgtctactttgctagctaatcttgtgacttgtttacaataactatgattcaaaataaaatagctgcagtttcaaatatacaaaatattct

SEQ ID NO: 743421 - DNA, 609 bp, Homo sapiens
agccagctttatgtgcattaaactctttctctattgcaattcccctgtcttgatccattggctatctgggcagcaggcaaaatgaaccaatcatgcagttacatcctctctcctcactcccctttttatcttcttctcttcttttgacctcaaattcaagttcttcccattggattgcaacaccttgggacaatttagcactgctcagcccctgctcctaaacccagctccagcctgcctctgcaccactcatagtggcttggctaaaragcctgattctgttcctagacaaaggccatctctcccccatgggtagcgtggtagttcttaaatatgtctacagattctttgatacttctttcaaagggtgacacctatgtctcctcccctttagtatgggctatgcttactgactcaattccagtcaataaagggccacagaagtgacatgtgactttccagatgagggcaacaaagacactgtgacttcctccttagatcacccactctggggcaagtcagctgccctcacaaggactcagagaagcttctctctctcttcccatcctccattactaattcttcccaataaacaccaccacacataac

SEQ ID NO: 743422 - DNA, 590 bp, Homo sapiens
ttgatgaaaaagatggttgaaagtgctgtccctggttaaataaataatacattcatgcactggaataataagtaaatatagaaaggattgatgaagcatcttacatattgatgtattaagtcaaacaagcaaagtgcagaaaaactgatagacagatgacagatagatagatagatagatagatagatagatagatgatagatagagtctcttgacaacagtgacagtgatgtttctttggaaaaagcaataggaggccgggtgcattggctcatgccagtaatcccagcactttgggaggcggaggcgggcagatcacctgagctcaagagtttgagaccagcctggctaacatgrtgaaaccccatctctactaaatacaaaaaaaaaaaaaaaaaattagccaagcgtagtggcacgtgcctgtaatcccagctactcgtgagactgaggcaggagaatcacttgaacccaggaggcagaggttgcagtgagccaagattgcaccactacactccagactgggtgacaaagtgagactgtctcaaaaaaaaaaaaaaaaaggataattattgtctaggtcaccagcc

SEQ ID NO: 743423 - DNA, 590 bp, Homo sapiens
ttgatgaaaaagatggttgaaagtgctgtccctggttaaataaataatacattcatgcactggaataataagtaaatatagaaaggattgatgaagcatcttacatattgatgtattaagtcaaacaagcaaagtgcagaaaaactgatagacagatgacagatagatagatagatagatagatagatagatagatgatagatagagtctcttgacaacagtgacagtgatgtttctttggaaaaagcaataggaggccgggtgcattggctcatgccagtaatcccagcactttgggaggcggaggcgggcagatcacctgagctcaagagtttgagaccagcctggctaacatgatgaaaccccatctctactaaatmcaaaaaaaaaaaaaaaaaattagccaagcgtagtggcacgtgcctgtaatcccagctactcgtgagactgaggcaggagaatcacttgaacccaggaggcagaggttgcagtgagccaagattgcaccactacactccagactgggtgacaaagtgagactgtctcaaaaaaaaaaaaaaaaaggataattattgtctaggtcaccagcc

SEQ ID NO: 743424 - DNA, 590 bp, Homo sapiens
ttgatgaaaaagatggttgaaagtgctgtccctggttaaataaataatacattcatgcactggaataataagtaaatatagaaaggattgatgaagcatcttacatattgatgtattaagtcaaacaagcaaagtgcagaaaaactgatagacagatgacagatagatagatagatagatagatagatagatagatgatagatagagtctcttgacaacagtgacagtgatgtttctttggaaaaagcaataggaggccgggtgcattggctcatgccagtaatcccagcactttgggaggcggaggcgggcagatcacctgagctcaagagtttgagaccagcctggctaacatgatgaaaccccatctctactaaatacaaaaaaaaaaaaaaaaaattagccaagcgtagtggcacgtgyctgtaatcccagctactcgtgagactgaggcaggagaatcacttgaacccaggaggcagaggttgcagtgagccaagattgcaccactacactccagactgggtgacaaagtgagactgtctcaaaaaaaaaaaaaaaaaggataattattgtctaggtcaccagcc

SEQ ID NO: 743425 - DNA, 638 bp, Homo sapiens
agttccttcctctctgccatgtaaagtacaatgagaagacagacatctgcaaaccaggatggaggcctggttattatttcattaattattaattcattattatttattattaacatattataaaatattattaatattcttctcttccacaaagttattcttaattcattatccatgctttcaataaatagtgagaaaggaatcaatgtgaccagcttatttacactactgttgggaataaacaagaagccatgaagcatagaaaagtgattttaatccctaatataaccagttttgagtayctagataagtttaaagacatcttcaagtcctgataatccataattctgtgggctctgtggcttttttggtgtaggaaaagaagtgcctcttgaaacaaggaccagagttaaagttccagcactacatttgttaagtgtgtgaccttaggcaagttgtctatcatctctctacctcaggtttcttttctgtaaaatgggagaaaataatagctacctcaaaagtattgttaaatttggaaaagatagcatactgaaaaatacacagcacagcactgtgaattacacataataggtgcctaataaataaaaattttaaaatttatgtaacaattaatc

SEQ ID NO: 743426 - DNA, 673 bp, Homo sapiens
aaaaacacatgcatgtgtatgttctttgcaacactgctcacaatagcaatagcaatagcaaagacatgaagtcaacctaaatgcccatcaatggtacactgtataaagaaaatgtggtacatatataccatggaatactacgcagccatagaaaagaatgagatcatatcttttgcagcaacatgaatggaactagaggccattatcctaagtgaacgaatgcaggaaaagaaaataaatactgcatattctcacctgtaagtaggagttaaccattgaaaacacatggacacaaagaagaggacaacaggggactacttgagggtggagggtgacaggtgggaggggattgaaaaatctstctgtcaggtactatgcttattacctgggtgatgaaataatctgtataccaaacccgcgtgacatgcaatttacctgtataacaagcctaaacatttatccctgaacctaaaataaaaattttaaaaaaagaaagttgaaggatggcaaagatattccacataaatggtaaccaaagacagtaggggtatccatatttatatcagaaaaaataaatgttaactgaagagctctaataagagacaaagaaggacattacataatgatgaaagagtcaattcaacaggaatatatagttatgaatatatatgca

SEQ ID NO: 743427 - DNA, 631 bp, Homo sapiens
caggataaaaaattaatatgcaaattcaattgtatttctataaaaaatgaacaatttgaaaatgaatttaagaaaacaattccatttacagtaacatcaaaattataaaatacttaggaataaacttaactaaggaggtaaaagtcttatacactgaaaattacaaaacctttatccaaaaaattaaagacacaaatacatggaaagatatttgtattcgttgattggaaaacttcrgagtattaaaatgcaatccctatcaataaaaaaatcccaatagcaatttttacagaaatagaaaaaacaaatctaaaatttgcatggacccaaaaacggctcaaatagccaaagcaatcttgaaaagaaggacaaaactggaggcctcacactgcctggttttaaaacatatcactaagctacagtaatcaaaacattatggtactaacttaaagacagacatatagacaatggaacagagagcccagaaataaacccaagcatatatatataaaatacacacacacatatatatgatgcggaagcaatgtaaatgtccatcagtgtatgaatgaatagagaaaatttggtatacacataaaattatggagccttcaaaataaaggaaatcctg

SEQ ID NO: 743428 - DNA, 605 bp, Homo sapiens
aggtttgtttgcctgagggccatgactaaggctgtggcctttctctgatcttgcttttccttttcggcctgttccttttggtccctattataaaacaccgaggttgccaggtttgataacgcctccagattttgttcagggcccagggctcacttttggagctttctcctgatatctgcggcttattgggtaataaacttatcttttaggatcaattgacccttgagagagtcaggtgacrggggagtatattttcttaaggcctcccatagccactcgaggaaggcagaagtattttcttcctttccttgagttatagtggacatcattgaataattcatgggctttttcctaattctccttagtccttctagaacacaggtcagcagatgtttatgactccagtcccatgatctgagtcaaggtcccagtggggatccatactggggatggcttgctgactggtagggaatttgtcccattctttagctgtcattctatcatttacttgactaagataccaggtatctccaaactctagggctgcagctaaagctgcattcttttcattaaaggccagggtttgatctaactatagcatgaca

SEQ ID NO: 743429 - DNA, 612 bp, Homo sapiens
aggaatgatctcatcaaccaagtagtgagcatagtacccaataggtagtttttcagcccttgccccctgatatggttgggctgtgtccacccaaatttcatcttgaactgcagttcccataattcccacgtgtcatggaggtacccagtaggaggtaatttaatcatgggggcggttaccctcatgctgtcctcaagacagtgagtgagttctcatgagatctgatggttttacaaggggcttaaactcttttgcttggcacttccccttgctactgccacatgaaaagaatgtgtttgcttccccttctgccatgattgtaagtttcctgaggccttcccagctgtgctgaactgtgagktaattaaacctttttcctttataaattactcattctcgggtgtgtctttatcagcagcgtgagaacgggctaatacacccacttccttctttcctccccctagcagtccccagtgcctattgttgccacctttatgttcatgtgtacctgtaagtagcggctcctacttatatatgagaacatgcggtatttgattttttgttcctgtgttaattcatttaggataatggcctccagccgcatctatgttg

SEQ ID NO: 743430 - DNA, 636 bp, Homo sapiens
aatcagtggttaaatcataaattataaatacaaagtctgaaaaataacagtgtagaaagtaaattgctatgattcctatgcctgatgtaacaggataattataaagtaattataagaactgattaaataaaaaatataatataaaataaatataaaatatttaaaataaatataaaatataataaatgattaaataaaaarcataaatgattttgttgcttaaactaatatatcaatagtccaaatgagcatgattcctttaaaacagtcatcttagcagttctatatctattctactaattttgctactaaagtatttttcagaaaaactcttttggaaatgtactcagtttaacttaagagccatgtaaaaaactgcatctcaaagttaaaacatgactctctacttctgcccaaattcactgaatagtgttacgagtcaatgagaagataaaaaagataaatacttctgccccaaaatgattttaaatagcctgatttaaaacattatgtacaacagataaactggcactagatggcttttagtgatttctaaatatcaaattcacattcaaaagaagaattcataagttctgaagacaagtctaaaacgatagtttcaaaaacaacagcact

SEQ ID NO: 743431 - DNA, 509 bp, Homo sapiens
atatcagttggccagtttgacagataggaaattatttggaattaaaaattccccttctagtttttcccctaaaaagtccctgcttaattcatgattgttctctcctttgcctcttctttcctaattctttatcttctcccatatccaaaagaacatctggcaactatctctttagaggcatctatgatcctggattgaatttgttatccagtcagcaccttcgtgagctgtgtttgattttctgaaattgggtttccgcaaatggtcatatttcaaagtgctatgccatataattatttgaagggaaaacattttaacgtggtacaaygacaacgtaaagaatgaaaattgtgctaagtgagttctgtctctttcaagttcaaattggtaggttttcctggcttgaacacaaaatgaagtcaaattgaagggtcagagatacaagaaaattataaggagaacaaactcattagaaagggaactgaaaaatggataacaagaggaacaaa

SEQ ID NO: 743432 - DNA, 623 bp, Homo sapiens
tgacagtttgtcttgctagaggcacgtctgggggtgatccaggcccttgctgcaatcactgagatggatctcgagcaggggcacgtgtcctaggaccctggctcagggcctattgcccactgcatggtgatataccagcacactgaaagagagggagttgccacagagaaagtccaagacgcgtgggcagccaagcgaggagatgggaggaaacctcaaacccacctcccgaggggcttggggatggtgtttttcaggkgtctgggcaggtgatggggtctgaggcgtggggatcgctgattggtgagtatgagtggtgaagtcacgggataggggatgaagaaaccacattcctgagctgagtcggttccttggtggggccttcagaccagttggcgtcagctgttctgctggaattcagggtgtgggaaacaccttaagcaattcttggcttaaaaggtccaggctcagagattccacctgtaggaacaacggggagcaggtgatccgtgtgcctcgtgactcttgttaagttagcagctgcagtgagttgggtggtggtgcctgccacaccctggtcagtgcctaactccaattctgcccaaagcctgcgttggaattct

SEQ ID NO: 743433 - DNA, 623 bp, Homo sapiens
tgacagtttgtcttgctagaggcacgtctgggggtgatccaggcccttgctgcaatcactgagatggatctcgagcaggggcacgtgtcctaggaccctggctcagggcctattgcccactgcatggtgatataccagcacactgaaagagagggagttgccacagagaaagtccaagacgcgtgggcagccaagcgaggagatgggaggaaacctcaaacccacctcccgaggggcttggggatggtgtttttcaggggtctgggcaggtgatggggtctgagrcgtggggatcgctgattggtgagtatgagtggtgaagtcacgggataggggatgaagaaaccacattcctgagctgagtcggttccttggtggggccttcagaccagttggcgtcagctgttctgctggaattcagggtgtgggaaacaccttaagcaattcttggcttaaaaggtccaggctcagagattccacctgtaggaacaacggggagcaggtgatccgtgtgcctcgtgactcttgttaagttagcagctgcagtgagttgggtggtggtgcctgccacaccctggtcagtgcctaactccaattctgcccaaagcctgcgttggaattct

SEQ ID NO: 743434 - DNA, 567 bp, Homo sapiens
cagggaattcacagagcagccgccctaaagggcccgattatcctcatccggacagtgaccgacctgctggccattccagggccatcaccgccatcttcttcaaaatggcacgcaggaaaccagggccccctcttccccctgcctggggctctgcccagctgggcagcctcacagcccctgccctgctgcttaggctgaggagacatactcggggtttggggaaggaaagtgcccgggagggccgctgcttttgtaaagtgaacatttgctgaactacagggatccattgtcaggcccgtatcccagctacaagctcaacctcgtggtgtgttggggccgacagcgagaccagcggttcctgccataggttccccgggctctggagtgggagcaggaccctgcgggagacacgggatgggggcaggtgtctgggggaccctscgagtgggcacccagagctggtcaggctgccgggacagtgggtcagcgcagggcagggctggggccggacatccacagagaccacctgctggtcaggatgtcacagccctgtgtcccatctgtagg

SEQ ID NO: 743435 - DNA, 585 bp, Homo sapiens
ttttgccggcatgttgctcttctgggatcccttcccctgagtccggtcctaagccaaccagtttaaggtttgggaaattaacttttcccagtttggaggatgcatctgaggggagtgtcccattgtacagagacacaattacctatctatgaagacaggacagaggaagagataggaaaaaaagaagggttttttttttttcaaaggagtcccagggggtcaggatgcatttaaaaggggtacagatgaagatggatggctacccactagaaggagggaattgaggcatcccagkttcccttctcttcctagcaaatacctggggtatgtgagggagataaagtgaggcaaccttctttcttcttccatcctcatatccctgggtcccagtgaccacaacagggtgccacctatgggtgtcaaatcggctttcacccatgttaccaggggggcctagggggtgggagtatctgctctcacccatgttcgtcctatttcccttgctatcagtagcctctgaattgcctagacctcgcttatgccttggatactagcatgacctttatccatgaaacgggaggcttg

SEQ ID NO: 743436 - DNA, 492 bp, Homo sapiens
gtctgaattaggaactacatgttaaattatgtatgacagagaaatagcaagcaggaagaaaaaagatgaaaattagctaaaagtccagtggtttgaactgtgtggtagacagagcctgaggaagaagacacaagatgcatgagaaatggctagtccctgtcttcaaggagcccacagatcaagaggtgatcaataggtccaaaatcaataggtgatcaataggtcaaaaatcaataggtgattttggacaacaatgtctccttcaacactgcaactcccactgttgcayctactacaaataataaacatagcacccttttcccaatttcccaccaagattcagaaccctatgggctcgttttacaccctaccctgcctttcgattcttccctccccttacataaaaatgtctttaaaggaaaggacacatcagtcaatgttcaaagccaacgttattatacctgataaataaaagtattaacagtaaagcta

SEQ ID NO: 743437 - DNA, 492 bp, Homo sapiens
gtctgaattaggaactacatgttaaattatgtatgacagagaaatagcaagcaggaagaaaaaagatgaaaattagctaaaagtccagtggtttgaactgtgtggtagacagagcctgaggaagaagacacaagatgcatgagaaatggctagtccctgtcttcaaggagcccacagatcaagaggtgatcaataggtccaaaatcaataggtgatcaataggtcaaaaatcaataggtgattttggacaacaatgtctccttcaacactgcaactcccactgttgcatctactacaaataataaacatagcacccttttcccaatttcccaccaagattcagaaccctatgggctygttttacaccctaccctgcctttcgattcttccctccccttacataaaaatgtctttaaaggaaaggacacatcagtcaatgttcaaagccaacgttattatacctgataaataaaagtattaacagtaaagcta

SEQ ID NO: 743438 - DNA, 572 bp, Homo sapiens
gctattgacacactttaactatgcaattaaatagtgttgtgtgggcctaaatgtttatatgttgtcatatgtacacacagactttatatatatatatataaacgtgtatatgtatgtatatatatatgtatgtatatatgtgtgtatatatatgtatatgtgtgtgtatatatatctatgtatatatgtatgtatgtatgtgtatatatatatgtgtgtgtgtgtgtatatatatatatctccctgctgcttccagggagtccagcctagtcccatttgctggccaggcctctctcagcttctggtcrccaccacttccacactgcacccatggggcaacctcacccggactgacaggcacaaggggcaccgttgcaattattagggacaatgcagggtctccctgtgtccctcctacccacatgtgggcaagagagactttgagtgcccgggagtgctcagtgttctgagaggagggccagccaaagggaggggaccctgcagtgccagcagggaaattttgattttgaggtttctaaatgcattaaagttatttctttagccatatatat

SEQ ID NO: 743439 - DNA, 578 bp, Homo sapiens
accttcacatttgaagaagtagggactcatttcagtctttgcagactggctttgtctgggaaagccctttatcattcagcttgtccagaggttatgggcagactatctgccatgattcatagatggacttgctgctggagtcatcaggcaggctggcccagtaccaaggtcaataggtgagtgggcttggcacccrggtatgcagagatggccttagagcctgggtaaactgtgccagaagttttgattgggtctgtaatggtgtgtctggagactggttccttgaggctggctggagcctgtatccataaagtctgaactgaagcctgggtccacaggaacttctgtgggtactgacctggtgctagagtaaggctacacatgagtcttctaaatagaccctgagataagcctgggtctgcagaggctatcctggagttttggtccttagggtctggcctgatacgaggatttactggtgggggcatggaccctggggccactggagcctggaaccgtggggactggcctggagccagtggccagccagctgctggggatggcatggaacctgggtc

SEQ ID NO: 743440 - DNA, 625 bp, Homo sapiens
gaggcggaggcaggggaattgcttgaacccagagggtggaggttgcagtgagctgaaatcacgccattgtactccagcctgggcgacagagcgagactccgtctcaaaaaaaaaaaaaaaaaaaagaaggctgccctgggctgcaggtgcctgctctcaaattcactgccaggaggaaaggtgggtgctggtgacaggacagcctcccaggctggatgtgctgggcaaagaactggccgggcagggagacactgcggtcccatctggaacctacgctcttctcagcagggcaccccttctctaagcctcagtttccctttctgttcagtgagaggcaagctgctctgatgtcccgggattccgcagcccccactctgaagaccctcacacggagctcccacccctccaggatccaggcttgccgctgcgtttggccaggcccawggcggagttcaggctgccgacctatgggctccaggggcgggaataaacgcactcagcctttttctaactgtggcttagaaaagttttctggctgtggtttccccatcttcaaaaagtcatgaatgccaggcacagtggctcacatctgtcatcccagcactttgggaggccgaggcaggag

SEQ ID NO: 743441 - DNA, 289 bp, Homo sapiens
ttattttttttggtagagatggagtcttgctaggtcgccttggctggtcttgaactcctggcctgaagcaatcctcctgcctgggcctgccaaagtgctgggattgcaggtgagagccactgtacccggtcgccaygtgattactgagttggaaccttcactccactccacctacccactcccgaactccagggatggggagctgaagatagggttaaatcacaacggccagtggtttaaccaagcatgcgtatgtcatgagacctggatactgaactcagaaccacag

SEQ ID NO: 743442 - DNA, 635 bp, Homo sapiens
tcatctatgaaaagattaccttaattttaaagtaagcaaatgagctggccatagtagtgtatgcctgtaatcccagttactcaggagggataggtggaaggactgcttgagcccaggaatttcagaccagtctgggaaacatagtgagacccgcctttcaggaaaaagagagaaagagagagaaatttaaaaatataaataaaataagctaaagaatcaagggaatttgatctgatatagatgatatcaagcttgtttaaaaatttttactaggatttgtcgttccaaaatggcaatatagaagcaagctgtcttcattctccccacaaaagcaaacgaaaagaaaatatgtggtgtcaagtttattaccagaaatctcccagaactcatacatgacaatgagacaaatccccaagccacagagaagtgaaaacaattccatgtggttggtaagagaattgaatttccaagtccaygatgcctttgccccaattctgtctggcaggaaacttgtggaaaaatttcccacaactcactgtttctacactaaaaacagatttaaatgtataatgagctttttcattaccttgttttccctggcagaagacccattactgctttaactcacagaagca

SEQ ID NO: 743443 - DNA, 419 bp, Homo sapiens
aagaggtttagtgacttgcccagagccagtctgtcaatcattccccagggaaatcaataccagcatttctgtggccctcaagaagtttccttgcttttcatgggaccacagaggagggatttaatttaaaactgagacttaaactctggtgtcctctcatgtacttaatttcctattcttgaggtcaatgattttcaaactgttgccygaggaagttcaagtgttcacaatggtgcttcagggtttggagcaagtaacaaaatatttttcactgaacagtgaatatttaaactatcaaggtacccattctttacttttacctcctttatatattgaaattctgaataagatttttttttttttttttttacaatttgaaaaccactgcatcaggtcatgctattgtccaaaatgggcta

SEQ ID NO: 743444 - DNA, 646 bp, Homo sapiens
ttgtttcccttcatggaggtctagccattgtgtgagaccagaataagaccctggggcaactgatgggatctggctgaggccacacggtggtgttgccagaaggtccctgaactggttccatccccaccgcccgttagggcatcaaccaagaccctcagtcttttctatgacatgtttccttacgtctttcatggtttgaaatggctcctatctctttttttaataatgttaaaggtattgctgcaaacagcagagatatttctgggtagaatgagcattcagcccaaccatcagataatgcaattcagaacaatacggtttccatctggcatggagggtacagtgattaagagtttttytcctgttggaggaacccatttgcataaagtaagaggaggcattttccctcaggcattttccctgccctgcacttaagctgttttattttcttttctccacatgtgaggagttaacatagccatgtgaacacagggagcttttctatgcaagagtttgtttttgtttttttttaatttccttttgaaaggcatcttattaggccaggacccccagttcaccagttcactagactccctaacttaatgagtccttgcacctttctgaggtacccctttgtcccaaactc

SEQ ID NO: 743445 - DNA, 558 bp, Homo sapiens
aatatctaaactttaaattatatttgttgaccaacaatgtgattataaaagatatgctaccttctacttattaaaatttagttattttatgttgtgatttttgtttgtatttttaattcagtcttgagatctctctggaaatgtggccataagccaggatagccactctctaggagagctctgaccagaggaaagtgaggttcargtgcatgtgtcagatgagacacaatgaggaggtgaaagcaaaatacatgaaacaagaaatttattactcacaggtaccagagaggttatgggaagtccagaagtgacagggagctcagccagtgggtggggagtgagaaaaagagagggcctgtgggatgatgccgttatcaaggtttgtaggtattatcctttaggctttgtatctgaggctgtggattggctagcttaaagaaaaccacaagaagaggggactcatttaaatcactctggtgtggaccattaggtttcatcatggtcagcagctgaaaggtgtgttgggtttgggggtcagtggagtgaaaaacaaacata

SEQ ID NO: 743446 - DNA, 606 bp, Homo sapiens
tagttacatgggattgctaaaacaaaagtaaagcttaatcttcttcaggttatattctagtgagtaatatcaatttatgttcccaaactgtatgggatttctaaaattttaatgtctgagtatatgctatcgatcataattaaggttatcatgttaagttattgtaaaccacagaaataatcaaatttctttgtcaacttttatttttttgatggtaactaccctggacattttgtcattcacagacaattattgccttgcattgattcttttccaaacatggtttataatcagctataggactttgacaggtacttttaaatgcaggtgtctgatayctttaaagattatgacattggaataaaggaaaaatgtataggacttatgaagagctgaaatgcccataaatatctagtagaacaagagttaactgaatggtgtgaacaacagaaaactgaagtaatcttttgtaactctgcttaaaacattgctgatcctttttttgttttccagagtcagtggaactttccttttgagctttctacagcatttaacaattgagtaatgtatacacctgtgaacaaaatttggagcatgtttgtttct

SEQ ID NO: 743447 - DNA, 577 bp, Homo sapiens
gctgaaccctgcaaagccacaggggcagagctgcacaaggccttgggaactcatcccttgcaccagtgtgccctggatgtgggacatgcagtcaaaggagattattttggagcattaagatttgatcactgccctgctggggtctgaacttgcatggggcctgtagtccctttcatttgactgagttctctttttttggaatgggaatgtttacgcaatgcctatacctcctttgtayagaaaactatacaagggagtaactacttgcttttttattttacttggaagtaaccagcttgttttttattttacaggcttattggtggaagagatttgacttatgtcagatgagattatgaactgtagacttttgagttaagctggaatgagttaagattttgggagaccattgagaaggcatgattatgttttgcagtgtgagaaggacatgaaatttgggggacccagaggcagaatactacagtttggatatttgtcccacacaaatctcatgttgaaatgtaatccccaatgttggaagtggggcttgttgcgaggtgtttgggaaatgggggtg

SEQ ID NO: 743448 - DNA, 608 bp, Homo sapiens
tgtaattcagaaaaactttgctaattttcacttccctaatctgcaaacccccaattctcacaaagaaccctgcagtctcacttcacttctcagcaaagatttaatagctgagagctctatcgtgttctcctattactaagacttcattacttttacatgccacactacaggacacttactaatatactattaagtattatcataaataattaaaatgcaactacacttgacaaaatgaaagaacaaagtgtattctgtgttgcagtcaacttgtgtgtatgttggctggagtgagctgagcacatattttaaaaatagaaaatcaattactaagagcgacctcagtcgctcttagcaatgggcctacctctcattagtgtgagttagtgaggtctttttccggctcctacctgccarttaaatcatatagtcattatatcattatcactgttaaattaaaaaaaaataagtaccagtagaattttgtctttgtgccagcctttttcacatagccatgcctttcattcctagttgatttggtatatccagcactttttatgctcccttgcttgcctcacacatcctgaggtaagaatttactatcttat

SEQ ID NO: 743449 - DNA, 604 bp, Homo sapiens
attaatttataattttaaaatgtcatcaagaacctctaatttcaaagttttatgctttagtcttacagtagtatctctttagctgataagcagaaatcttttttttgtcaagatcatgtgaaccacacatctgtttacctgcaayaaaatgtttgcaaatcattttggtaactattttgaagttattttaattgtaatataattatacttttaaaattataatgtattaaaaggggattcatgtatcagcattaatacttcagctccaaagaaatgtgccccaaataaataactttgaattggaagttagatttgatacgaagatactaagaaagccaaatagtcaccatgatatgctgtgaatcatttaagacaaagtcctctgtgaaattctagagacagcatggtgaacaaaaaaagcaacattaaaataaacacattttaaaattctcaaaaactgtaaaataatccagccaaaaatgatttaaaattggaaaaaaaaataaacccacctggtgttgtggctataagatcaatacccccaatctgcccaaggcgataatggccatagatgtatgaatgaattctggcatgccatcccctg

SEQ ID NO: 743450 - DNA, 599 bp, Homo sapiens
ttgctatctgcaaatggcttcagttttaaacagctcagtgaagagtcagggtcccacaccaagtgcatccggaattcttgtctggcatccaggaagaatcaggtcacatgaatggattgaagggtggtgtatgcagaggatcttattgaccaatggaagtggctttcagtgggatggggaactggaaaggagatggagggggaatataatcttcccctggctgtccccggctgatctcttctccaaccatagtctctgatgtccagctacctcttctcctctcaatgttcagaagtttcttctctactctccttctctgctttgccactctgctcctctgccagtggaacttggggttgtaatgggtacaatgggtacagggtagggggktgcggcaggccagggtggttttggaaaagacaacattcgggtgggaaaacaggaatgtatgttctaatttagggccgcggatccaggcttgagggtggagcctctgccagggacccctccctagtcgacccagtatttctctgcctcctgtctgtatcaataagatattgccagagttaaagcaagtctatgaaaaggtaaatgcaaca

SEQ ID NO: 743451 - DNA, 627 bp, Homo sapiens
agatcatcaccatcagcctaaaactgtttcagccgtacctattatatatttgaataaagactaattatttaaaataaattctaatattaggtatattttataaaataattatatgatgcacatttctttcttttaagggatgagtattcctttagcatcttagtgacaatgtaaatgccagatatgtatttgccttctgctcattcaccactcttctcctgctctgattgtatcacagcaactacatttttagatttccatgccaactagttgaagagtagtttcagccaatggaaatggattggaagcagcctggagggtggaaagaagagacaagggaagacgtcaggatatctcttttgatacctgttaaggtggcatctgtggctgtggttgtatttcctccactgctctagcttctacctgacagacttccctccctgactccagcttctactgggcagcatccttcatggttstaaccccaaatggttttcaccagcttttaggcctggtagcaccagcttctccttttttccctggccctcaggatcgtcatggcttcctgctattgccaatttccgggtgccacactgtctcctttatgggttctcagctctcccatca

SEQ ID NO: 743452 - DNA, 661 bp, Homo sapiens
ggctgccctgtattcttgatcgcagtactgatctgggactttttaacataaccatgtggcttgacaaaacttttgaattgctctgggcaaaaggtcttccaagtcaaggaggtcactttgtccatgattatgattggagatgtcattttagttgggctgccatatgtcagacatgataaaaaaatttcattctgtcaaacataatattctgtcaaaaaatattgagtcagcacccactgtgtgctgggccatgtactacatacagatgtttrgtttctgcattcctaaagggataatgctggtaggatccagaggacaggctagcctgcttattaaaaaaaatgcatcttgttttccagacaagaatagcagggagtggcctggtgacattattcatcgttttggtgtaacccacacctcaccccagccttgttgaccttctgatactgttggaagattaaaaggttataccttccctacctctccttgggataccaacccttttaagctgttagttaacccaaattaggatctgggatacatcatcaaagtaaatacactcatgaaacaaaagaaaccccaacaagcattctgggttaccccggtatcccttttgttgccagactagcactgataaattattcaagaaaaaaatttctat

SEQ ID NO: 743453 - DNA, 661 bp, Homo sapiens
ggctgccctgtattcttgatcgcagtactgatctgggactttttaacataaccatgtggcttgacaaaacttttgaattgctctgggcaaaaggtcttccaagtcaaggaggtcactttgtccatgattatgattggagatgtcattttagttgggctgccatatgtcagacatgataaaaaaatttcattctgtcaaacataatattctgtcaaaaaatattgagtcagcacccactgtgtgctgggccatgtactacatacagatgtttggtttctgcattcctaaagggataatgctggtaggatccagaggacaggctagcctgcttattaaaaaaaatgcatcttgttttccagacaagaatagcagggagtggcctggtgacattattcatcgttttggtgtaacccacacctcaccccagccttgttgaccttctgatactrttggaagattaaaaggttataccttccctacctctccttgggataccaacccttttaagctgttagttaacccaaattaggatctgggatacatcatcaaagtaaatacactcatgaaacaaaagaaaccccaacaagcattctgggttaccccggtatcccttttgttgccagactagcactgataaattattcaagaaaaaaatttctat

SEQ ID NO: 743454 - DNA, 622 bp, Homo sapiens
tgagaattttttttttttttttttttttatgagacagagtgtcgctctgttgcccaggctggagtgcagcagcacgatcttggctcattgcaagcgccgcctcccgggttcacgccattttcctgcctcagcctcccgagtagctgggactacagatgcycaccaccacgcccggctaattttttgtatttttagtagagacggggtttgaccgtgttagccaggatggtctcgatctcctgacctcgtgatccacccgcctcggcctcccaaagtgctgggattataggcatgagccactgcacccggcatgaaaagtattttttttaatactgctttttgtggcaagttgacccaaaaagttgaaaggaggtgaaatcaaagcctttatttttatttatttattttcagacggggtctcactctgtggctcaggctggagtacagtggcatgatcatggctcactgcagccttcaccatctgagttcaagctacccttctttaagaaatcaaaacatttattaggaaaaaaactatgattcatagactgttgcagatagacaggaaaatcatctttgcagtatatgatagcccagattagatttctgtttttttttagaa

SEQ ID NO: 743455 - DNA, 578 bp, Homo sapiens
tatttggccagagaagcaagttttttcctcagtgtgatgattgcttccctaccaattttgaagtgctctgataaaatgcataagaaataggcttgccaagataaacagtttattttttcatagaaggtcactcatttattttttttttttgcatccttgttcctgtcaattttgatataacctctcaaaatttaggcttctaaagtcatttttatttttgcttcagcctccatgagattcstaatcatagtaaataatgtaataattagtcccagaaatggtttagacaataacatttttagagcagactatgggggccctttgcagattttgaaaggaatctattttcaattacaaaaagacctttctttcataaaatagtaggaacacatttgcaactttatgttatttgtccacagacctgtttttgtacatgaatggggaagttgtaaatgttgttcatgtgaatgagcagagtgaagtttaaaaatagtttcagtattctttaaatatattggagagagatggaatggatgtgaatatggaaaagttttctggatttcttctccaaataatgc

SEQ ID NO: 743456 - DNA, 644 bp, Homo sapiens
ttttttaaaaatcacctgtgaaagtaataaacctaaaaatttcatccaattcaaatcagactatatttacttcagattaaacatgattttattaacattctagacagctaagaccctaaaagaagaaattgacagtttatatttttaccatcaggcataggttattttatatatgtgtgtatatatcattaattcttggagcaactcatgctatataagattatctctctgtctctctgtctctctctctctctctctctctctctctctctatatatatatatatatatatacacacacatacataacatgagtcagctaaaggcctattttctaaaagaagggtcagatgacaaagctcactgactttaaaaagctttcacagcacaatatttttgataaaaaggtktagtctattctttaattcacctaaagatacatttagcaaaaaagaaaaagaagaaaaaaatgccattgagagtcaaaagaaaatatcgtgtcaactaaaagtaaaagcaaaaataaaagaaaaaatctcagtactcactgaatactactataaacatcaaaaaatttccatttaaagtcaccagaaacccttgggttcctaatacaatttcatccaattcaaatcagactatatt

SEQ ID NO: 743457 - DNA, 588 bp, Homo sapiens
gtttactataaaattctttcaacttttttgtatttctcgaaattttcacaataaaaggaagaaaatggaatttgagaatttggggttatttaaagaaaaggggctgagtacagtagctcacacctgtaatctcagcactttgtgaggcccaggtgggaagatcacttgagctaaggagttcragatcaccctggccaacatagtgagacctcgtctccactaaaaattaaaaaaattagccagatgtggtggcatgtgcctgtagtcttagctgcttgggaggctaaggtgggaggatcacttgagcccaggatttcaaggctgcagtgagctatgattgcgccactgctctccggcctgggtgatagagtgagaccttgtctcaaaaacaaaacaaaacaaaacaaaaaaacaaaaaggcaatttgcttagtgtcaaaggtaagcaattcaaggttcttagcatgattttggcttgacaaatgccttgcgacatgagaaatcctttctacttaacacccaattgtgaaggttgattaaacatgagcctcctttgttagaagggggaacattctcatgttgtgagatg

SEQ ID NO: 743458 - DNA, 664 bp, Homo sapiens
accaagagcaaagccatagctgtgacagacaacactgtgtctcctgtgacctgtgcacggttcacccaggtgtggggggccgtggtgagaggtaacactggagaaaagggcatgactaggtcttgaggaccttgagtgcacgccgtggatattattgtggaagcaaaggggaaccatggaaataatcataaaaagtcacagcctccccatacaagacatgcatctgtgtctgccttatacagcactaactaagcgccatgcaccatttaaagtactacaatcctcatggaagctagctaaggggctactagtgtcttcctcatatctagatgaggaaactgaggcacaggtagatgagatcacctgcttgtagacacgctgctaataagtggtggagataggctgctctcwgccctgcaactgcactgtctcactcagccacagagggacagagagttttgtgcctctctcctctcactctgtgctcctttcctgggtaagagctcctccactcagggcaattttgccttcagggaatggttaacaaactctggagacatttttggtcacaactaggggaggagagtgctgctggcatctagtgggtagaggccagggatgctgctcaacatcttaccatgcacaggacagcccccatggccaa

SEQ ID NO: 743459 - DNA, 683 bp, Homo sapiens
agtgagtctttctttctgatattattcctgccttcccctgcacacagagtgaggctgatggtttatattatttgaccggccccatgtgcagggctgactcaaccttgggtggattttgaaattgaggctgagaaacaccagttatgctgggctgtttgtagagaactctggatgtaagagctgcgttcatggattagccataagtgcacagaagcagaaaaggtgacgtgcagaggaagaagaatgaagtaaacacactgagaagctgagatgagaggcagggagagagtacttttcctccttcctgtgaagtttcaactgactttggagtccatgaacgacttagacgccttccaataagtcagcatgtttttgtttatggtggcttgaattaacttgtgttacttataagcaagtacactttgactaaacastggcattacttgctcattcattcatgatcaaacatatattaactatctacttgctcattcattcatgatcaaacatatattgattatctactccaggctaggtgttaaggataaagagatgtataaaattcaggaatggctgctaagtatttacaatttagaaagaaggtggatgtatattttaatgatagtaataaacatttatggtatgcttgccatgtgccaagcaatgtgctgaacactttatat

SEQ ID NO: 743460 - DNA, 619 bp, Homo sapiens
tagtagtggggttataggcaatggaatactgcccctcataagagtgggaatgttcccattgtggaaatctgtggggagagtctaggacctcggacttttcaggggcttgataatctgggagaacaagacatacatggtctgtgtgagccaaaagttacctgggcccctgagggggcctccaagtcaggttcaacctatattgttacaataacttgcctttccttcttaggaaggcatggataactyttcttccttacaatgaaagattctaaccaattcaatatgcaagatttacataaagaaagaaccattatttgactgttcagaacaaggttttgcctagcacctcaaatccagtcttgggttttatgttggacaatttaagaataagcataagaatttaaaataagaagtgcgattggcctgtccactgagatatgacatgtaaaccaaaatcttccattatacaatgcagagaagtactccccaaaatgacggattgactatataccttgtcttttaacaacagacatttagggtttttgagggggacatggagatggctagagtctctggttttggtaaaagcatatttaatatctgcttacagacaaatcct

SEQ ID NO: 743461 - DNA, 619 bp, Homo sapiens
tagtagtggggttataggcaatggaatactgcccctcataagagtgggaatgttcccattgtggaaatctgtggggagagtctaggacctcggacttttcaggggcttgataatctgggagaacaagacatacatggtctgtgtgagccaaaagttacctgggcccctgagggggcctccaagtcaggttcaacctatattgttacaataacttgcctttccttcttaggaaggcatggataactcttcttccttacaatgaaagattctaaccaattcaatatgcaagatttacataaagaaagaaccattatttgactgttcagaacaaggttttgcctagcacctcaaatccagtcttgggttttatgttggacaatttaagaataagcataagaatttaaaataagaagtgcgattggcctgtccactgagatatgacatgtaaaccaaaatyttccattatacaatgcagagaagtactccccaaaatgacggattgactatataccttgtcttttaacaacagacatttagggtttttgagggggacatggagatggctagagtctctggttttggtaaaagcatatttaatatctgcttacagacaaatcct

SEQ ID NO: 743462 - DNA, 574 bp, Homo sapiens
tttcctgttctgtaggttgtctgtttatgctgttgatagtttcttttgctgtgcagaagctctttagcttaattagatcccatttgtcaatttttgctttttttgcaattgctttaggcatctttgtcatgaaatcgttgccagttcttatgtgtagaatggtattgcctgggttatcttccagggtttttacagtttcgggttttacgcttaagtctttaatccatctkgagttgatttttgtacatggtgtaagaaagagatccagtttcaatcttcttcatatggttagccagttataccagcataaaacagtgaactttgagtaaagcagattgccccacataatatgggtggacctcatctaatcagtataagtagttaatagaacaaaggttgacttcccctgagcaagaaggaattctactagcagattgcctttggacttgaattgcaactcttccctgattctccagcctactgcatcagatttaagactcaccaagccattttactgtgtgagccaattccttaaaataagtcaatctctctccctctctctctttctggtata

SEQ ID NO: 743463 - DNA, 679 bp, Homo sapiens
ctctggctttttctggttacctctagggaagacagctgtgcgctttcctagatgtgccttggtctccctcaaattcacgggatgtctactacataggcaaatctcatgttcacgtgttctaaaaatacgtggtttaagacgtatctaagagacaatggtttttattttcctccgtcatctagatattttgaggaactcagaagagaattctagccatttgaaaaagtttgtgtttaatagaatctcttagaaatatttaagtcattggctaaagtgaggcctctgtttctactcaactatttgacatttcatacatctctccctgtttacctcaagaagttttctctgactaacccatgccctggaaccttctctgaattcctaaagaattgcctggtccactcattttccgtttgacatataccatcctataaggttctaacttctttcttccttscttgcttccttcctctctctttccttaatctcttccttcctccctccctccttccttccttcctctcttctgcttcctcttttctttctcctaaaatgtgttgaccactcactctgtgcgagcactgttgtagtctcttttcagtcaattttctaacctaatctgcacaaatctgtgatctaatccgttcctgttagattctctactttttggttgtaaaga

SEQ ID NO: 743464 - DNA, 567 bp, Homo sapiens
caaagtaaattgaaaactttatggaaaggagtcaccattctagatgccattaagaatatttattattcatgagaggaggtaaaaatatcaatattcacaagagtttggaagaagttgaatgcaactcatggatgactttaaggggttcaagacttcagtggaggaagtaactgctgatgcggtagacatagcaagacaattcaaattaraagtggagcctgaagatgtgactgaattgctgcaacctcatgataaaatttgaatagatgagaagttccttattgtggataagcaaagaaagtgctttctttttttattatttgttatttttgtagagatgggatcttgttatttttcccaggctggtctcaaacttctggcctcaagcaattctcccactcagcctcccaaagtgctggaattacaggtgtgagccactgtgcccagcccagaaaatgctttcttgagatgcagtctactactggtgaacatgctgtgaacattgttgaaataacaacagaggatttggaatagtacataaacttaggtgacaaagcagtggcaaag

SEQ ID NO: 743465 - DNA, 604 bp, Homo sapiens
taagaaatacatttcataaggttatagctgtcatagctgattctctaatggatctggacaaagtaaattgaaaactttatggaaaggagtcaccattctagatgccattaagaatatttattattcatgagaggaggtaaaaatatcaatattcacaagagtttggaagaagttgaatgcaactcatggatgactttaaggggttcaagacttcagtggaggaagtaactgctgatgcggtagacatagcaagacaattcaaattagaagtggagcctgaagatgtgactgaattgctgcaacctcatgataaaatttgaatagatgagaagttccttattgtggataagcaaagaaagtgctytctttttttattatttgttatttttgtagagatgggatcttgttatttttcccaggctggtctcaaacttctggcctcaagcaattctcccactcagcctcccaaagtgctggaattacaggtgtgagccactgtgcccagcccagaaaatgctttcttgagatgcagtctactactggtgaacatgctgtgaacattgttgaaataacaacagaggatttggaatagtacataaactta

SEQ ID NO: 743466 - DNA, 479 bp, Homo sapiens
attgtggtttctcgttgtctagtcttttgtctgtgtcatgtcccgccacccaccttttggatgttccccggagtcacttagctctttgacctggtttaacatctggttttcttgtggattttaatgttgtttaccaaatcccagggcctgccccgagggcctggtgaccctgggcaggccatttcccgtcctgtgcaactctgatctgcaggatggggtggtgtgggagcacccatgtccctgcctgaggactctccaggcctccgtgggggcggtagcagggcctggcccatgcggcgcgctggtgctgctcacccgcctttctggctttargaagtatgcttggagctcatctaacatcttattttccattttctgtttcttaatacttacagaggcttccgactttttctccaggtctgtattttccttgttcttctctggtaatttggaaggtagacagtcagtttttagttcaa

SEQ ID NO: 743467 - DNA, 636 bp, Homo sapiens
cacttagtgaagcgtctggaaaaaatgaaagcaaatcggagtgcactcttgtcccagcagtaaattccagctctgatcaggcaactggttggtgactggagagcattgtttcataggcttttctctgtcctgtctgggagcgctgcttcttcccctgccttcygagagacgaagaccgtggcgagcttggcgcttaggggctcccgtgccatggctcaccccagggagccccagcagccaccaggtgcctctgtctgcagacccctggcccgggctggcgccgacgctcagaacctgcaggtacttcataagcacacaggggcctcgagggagctctgtgtctgaccgcacagcagcctctgaatgccgctggaagtgatgatcaaagtaaagattcagttgggacttgagttttttttttttttcatgtgtcttgctgaagattaaggggaaatgttacagtgttgggacttcctttcatggcagaatctacaatttgagcgacttcagtagtatctcttagtctacgcttttcatacacaaaacactgtggaaccacaagccattaccaagcaaaactctttcactggaaacaagggggcagtctagaagtaaaagtgaccttaagaagactct

SEQ ID NO: 743468 - DNA, 636 bp, Homo sapiens
cacttagtgaagcgtctggaaaaaatgaaagcaaatcggagtgcactcttgtcccagcagtaaattccagctctgatcaggcaactggttggtgactggagagcattgtttcataggcttttctctgtcctgtctgggagcgctgcttcttcccctgccttccgagagacgaagaccgtggcgagcttggcgyttaggggctcccgtgccatggctcaccccagggagccccagcagccaccaggtgcctctgtctgcagacccctggcccgggctggcgccgacgctcagaacctgcaggtacttcataagcacacaggggcctcgagggagctctgtgtctgaccgcacagcagcctctgaatgccgctggaagtgatgatcaaagtaaagattcagttgggacttgagttttttttttttttcatgtgtcttgctgaagattaaggggaaatgttacagtgttgggacttcctttcatggcagaatctacaatttgagcgacttcagtagtatctcttagtctacgcttttcatacacaaaacactgtggaaccacaagccattaccaagcaaaactctttcactggaaacaagggggcagtctagaagtaaaagtgaccttaagaagactct

SEQ ID NO: 743469 - DNA, 590 bp, Homo sapiens
gccttcagggcatttgcactctgtggataagggctctccagtggacgggtggcagcaggctgtcacactccacccacctttctggcaccccagggctgagctatagcccgcaggcgggctgggctgaagaaagattgaaaattttgcaataaatggaattttagttacccaaggagataagacaaggagtttactgacaacgcagtgtgaaactcagtaattacgaatcgtgctagggatatgagattgtgaaaagcagtactagatacacccctggcatcaccaagacacaaacactgaaggtgaaaatacagcttagaatctccagttgttaagaatctctgctgtactgtttgtgcctcgcgtctttagataaactagcgttcctgggctcctagtgttggctcggttgtgctgttccatgttcgccttttgaatgggatgggggtgcttttggagtcgtaaggaagtgcttgtcacttaaacgtgtttwcttctttggtgctcagaattccagctacagcggtgacagcagattctctactttgtcatcatccagggaggagaagttggttggtttccatttaaat

SEQ ID NO: 743470 - DNA, 560 bp, Homo sapiens
cctctttgtttgcaataattttcctgagtttatcattttgtttaatctttttcttggttctaattattttttaaacttttttcttgacccccgactgtctcctttctttgtttccctttacagcaaaaaatttgaatgaaatgtgtatactcagtgtctctagttctttcttttacttgtaagtctactccagacaggcatctttcaatattccatgtctgcatctattggtctttctcctaccacacatattgctccttctcactctcctttgttggttcctctttatctcttcaacctttttcaactttggaatgcctcagtgcctwattcttgagtctcttctctgcctgtttctatattcaagcagtaggtaattacattcaagttcatagatttaaatctgtattctgatgattcccaaatttgtatcactaactaggtcagtgctattcagtagcaccacaatacaagcaatatatgtgattttaaattttctagtagccacatacagtggctcatgcctgtaatcccagctactcaggaggctgaagtgggag

SEQ ID NO: 743471 - DNA, 605 bp, Homo sapiens
tgtatcactaactaggtcagtgctattcagtagcaccacaatacaagcaatatatgtgattttaaattttctagtagccacatacagtggctcatgcctgtaatcccagctactcaggaggctgaagtgggaggatcactttaacccaggagttyggggctgcagtgagctgtgattgtgccactgcactccagcctgggtagaagagcaaaccccttctctttaaacaaaacaaaataaaaaaacctttttgactgaagaataaatcaaaaatggcaaaccttcatgataatattccagcccctttattatttttaaaaaaggcagaaagaggtgaaattatttttaatgctttatttaacacagtatataaaaaatatttcaacatgtaatcaaataaaatgttaatgatatgtgtttttcatactaagtctctgaaatctggtatgtgttttacacctacagaacatctcaattcagattaaccagatttcaagtgtttaatagccatgtgtggctgctggtcaatgcagctctaggtaattttgctgatctccagacctctatatctccatttgaatgtcaaatagatatctcacaattaa

SEQ ID NO: 743472 - DNA, 615 bp, Homo sapiens
tctgactaatgtggtctcaaaagacctgcctcccttgaactcctagagtctgagccctcaggcagcactgacatcagtgatttgtgatacatttttgaacctaatatgctcttgtccaggctgaagagtgagcacccaagtgcagctagtacctcaggggccctgtctcacaggactctggaagagacttatctcttgcttagtcctgcatagtgccttgcatatagtaggtgctcagttcatatcatctgaataattgacaggaagcaacttgtacacagtaaacatacataaatgatatggtttggctctatgtccccacccaaatctcatcttgaattgtacttacataattcccatgtgtggagggacctggtgggagacaattgaatyggggggcggtttccccatactattctcatcgtagtgaataagtctcatgagatctgatggtttgataaggggaaacctgttttgcttgactctcattctctctcttgcctgctgcgatgtaaggtgtgcctttcagcttccaccacgattgtgaggcctccccagccatgtggaaatgtgagtccattaaactttttcttttgtaaattacctggtctcagg

SEQ ID NO: 743473 - DNA, 535 bp, Homo sapiens
ctctgcttaaaaaaatatatatatatgtaataatagtcatgagatctgggtcagatctggtggtaatgaaatcagtgctcaagatctgggtgctgagtgtgctcattactgttgggttgttgctgctcccagaccctccagtgggcagagctagggaatatatgtatgtataaatatatagatatatacacacatactrtatatactgtatgtatacacacatatatattgatacttttttttttttttgagatggagttttgctctgtcacccaggctggagtgcagtggcatgatctcagctcactgcaacgtcatctcccgggttcaagcgattctcctgcctcagcctcccaagtagctgggatcacaggcacctaccaccacatccggctaattttgttttgtttttttgggttttttttttttgttttttttttttttttagtatttattgatcattcttgggtgtttctcagagagggggatgtggcagggtcataggataatagtggagagaaggtcaacagataaa

SEQ ID NO: 743474 - DNA, 634 bp, Homo sapiens
tcagagtagaatttaatatcactgtattagtatgcaaagaggcattgcctattaataggatatcaaatcaacaggaagatataacagtcataaatgtgtatactacaaaatacatgaagcaaaaattgacagaatataagggagaaagaaacaatttccatatgagaatttccattctcagagatggatattttaacagacctctttcagcaactgatacaataactagaccaaagaaatcagtaaaaatatacatgatatgaacaataccattatcaaccactttgacctaattgatatttgtagatcactgcacctagcaactgtagaatacacacattctttctgagcatactgaggatgttcaagawacactatatgctggaccataagacagttttaatacatttaaagagcttgaaatcattgaaaatatgtcctctgaagacagtgggatgaagttagaactcaatattatgtatctacaaattcacaaagaaatgagaaaatattttgaactgaaaagtattttcaatgaaaatatagcatcaggaaacaacagatgttggcaaggatgtggagaaataggaacgcttttacactgcaggtgggagtgtaaattagttcaaccatt

SEQ ID NO: 743475 - DNA, 465 bp, Homo sapiens
ctagactgctttcatttccagcccccttctgtcccatgaagcagttttggtctcctcttttttttttttttttttttttttccccaaaacggccttccttagtcctgtaaaacctggaatgcacatagtcctgtaatggccatcccagaagtgaatctacatgattattcaaattcaaatacctaagaaaaaaaatcacttgaagttctgcaacttcccaaatgcaaattcctgagaaagaaacttgactgagccagttcaactttctgtattggattataaatcctatcttgctggctggtctgtarattggttgctcttgagtcagatgacctctctttagagtttagtcagctatggccattgaggggagcaccacatggatggcataaaacatagctgacgaggcatggatgtaatgcctagaacaagtagtattcataaaacactgaaaaaaagaaggac

SEQ ID NO: 743476 - DNA, 465 bp, Homo sapiens
ctagactgctttcatttccagcccccttctgtcccatgaagcagttttggtctcctcttttttttttttttttttttttttccccaaaacggccttccttagtcctgtaaaacctggaatgcacatagtcctgtaatggccatcccagaagtgaatctacatgattattcaaattcaaatacctaagaaaaaaaatcacttgaagttctgcaacttcccaaatgcaaattcctgagaaagaaacttgactgagccagttcaactttctgtattggattataaatcctatcttgctggctggtctgtagattggttgctcttgagtcaratgacctctctttagagtttagtcagctatggccattgaggggagcaccacatggatggcataaaacatagctgacgaggcatggatgtaatgcctagaacaagtagtattcataaaacactgaaaaaaagaaggac

SEQ ID NO: 743477 - DNA, 467 bp, Homo sapiens
ggtgctctcttgcaagtgccacctcctggctagaggccaaacacctcaggccattacagtaactcatgacagagtaaccctgctccaaggaaggagaaaacaacagttaatcccaccgcctgcaacattctggctaaccagaggccctgagtctgatcacatggcaacttcactaattttattaccagcatttaagaaagccagcacacaaaaacatatctacaaccagggcctctcctctgccacctccatcagagcaggtgctggtatccatggctgggagaccagaacatggaccacatcaygggatgctttgcagacccccccccagcactagcctggagcttggtagcccttctgggtggctagatccagaagagcaataacaaccactgcagcctggctcttaggaagccccatccctaggggaaggaggagagcacctcatcaagcaccacatctgtaag

SEQ ID NO: 743478 - DNA, 654 bp, Homo sapiens
agatcaaaaatatgaggagaaaacacatgaaagactatcagtgtgcaaattcagaaggcccaacgaattctaagcaagataaatgaaaataaatccacatctaaacccttgctatacgccaatggcaaagagaagatcttgaaagcagccaagggaaaagacaaattgctttcaaaggagcaacatttagactcagattcaatgcaactccaatcaatatcccaaaaagtgtcttgtgaatttgataagctgatactaaaatgtttacaccagtacaaatggccaagtatagccaagacacttcggccaagaccaaagaagaacaagaaagtaggcgttgctttacctaatatccagacttacttaatgaggtcttgtaattaattaaaatggtgtggtattagtacatatggagacgaactgatcaatggaacagaaaatacagaaaaagrtcccaatatgtgtagaaaattcatatatgatagaagtagtgtttcagattagtaaagaaaaaataaaatgatcaataatatggtgttggaaccatggaatatccacatgagaaaaaatgaaattggactcccacatcacactatacacaacaattttcttttccaaggagattaaacaaccacatgtttaaggcaaaactaa

SEQ ID NO: 743479 - DNA, 626 bp, Homo sapiens
ggctagacggcggggaaaagacactgcttccagaagggtcttgatgctgatggagccgaggttgaggagtaaaatacgcctktttcctctttctcccttaatcccacttttctaccaatgtttccaagtcccctcacacaacgtcaatcccaggtaaagagttgtcatcctctgttggttcttcttcctacgattctgtcttgcggtgttgttattttcgcttttactcccaagaagattctctctgtgtcttttggaatccacagatgtggaagctgggtacatggagggccaacggtagaactcagtggggtgtgtccaggctgcaattaacctaatgaccccgcggggcacagcagtccacctggcgtggaccgccccgattggctgcgttgggctgacggaatgaattcctatcggggcggggcagcccaggggcccaggggggtcagggcttgagccctgggtgggcccggggctggctatataaggccgggctctggcagcggagcttcactccgccttggacggcgcaccgcacaggtcacactccaggctgcggccgcacatcccgaggaacagaagcgggcctgctcagctgtctgcaaggaccggcgttccagacc

SEQ ID NO: 743480 - DNA, 631 bp, Homo sapiens
ctgtgttggttcagcagcatgaggatcccagaatgaccaggagacagtttcatttttttttttttttttgaaattaacaaaatgatgactttgttccatggtggaaatttctcctttgagcactagaacttcaaactcaccatgccaacaattatggtgataggaagcaaaaataatacaagcaaattattaggtctctaataagaggaaccattctcactcttcctccacccttggttcctgtacctgtgtatgtattctggccayggtgaaaaaaacaatatttattgtcctttgatttaaggcatatattgcatctatatgacagcaccccagacttacagggtattgtgttgttgacataactcagcctttagcagatcattccacatattctggattaatgggcgtatggcaagacctatgaattacatgtacgtgaattcattgctatactttctttcctgaaaaatgagttatttggaggcaacagagtatcgaataccgtggtaataaacaaccttaagtcaatgcaaatttgtatctggactatgtatttaatactttgtaaacaaattgctgccctctttttgatagaagtggttcagtgtaatgaatctgcccccatttc

SEQ ID NO: 743481 - DNA, 587 bp, Homo sapiens
atgtttgaatgagggagtgctgtcctaggccctcctgtcatgtcacatcttatgttctttggagtatatacactttttttctttctaaaatcaaaattatctgaataccaaaatacatctggccacaagaatttcaaagatccccacttctcagataaataaactgagattcagaaagaatacatttttagtacacatctcctctaagtcatcagagcccttttactaatgtaatagtcaatacttgttacaggctgaattgtgtcctcccaaaagtcatatgttgagaccctaatccccagcatgackgtatttagatatggggcctttgaagaggtaattaaagttaaatgaggtcataagagttggggcttaatccgatagggcaggtgtccttataagaagaggaagtgaaaccgtagcactctctctctctccctccctctttatccccctccccctcccttcctccttccctccctctctccgtttcccgccaatccctcccccacccactccacccccatccccactgtcttcctgcacaaacacagaggaaaggttgtgtgaggacacagcaagaaggc

SEQ ID NO: 743482 - DNA, 610 bp, Homo sapiens
atgactgaatatcctgcctgaatgtaacatgtctcaaactaatcttacacattcctttcccttacctgctctcttgcgtgaatcttcactctaatggaacaaggcacttacctaactcagattcctacacaaagatcagggaatcaagccataagcaaacgttggcatccctactgcctaaatatgtccctaacctgagcactgacctccattttcactgcttcctcactgayccattgttttttggatgtgtttcagcagcttctgaattggtctctcttcttccactctgtatttctgtctctgtagataaattttagaaatgtgctgaagttccaccaagggtgttccattgcacttgaaataagccacttttaggctcaacattcttaccgtctttccccacatctcccactgactcttctccttcagtcactccagccacatggattcgtgttttgttcttggacatgttgaatgtgcttcagcctcatccttttgcattttctgttccctctacctgaaatgctcttcccatgttttttcacgtttaggttctcattatttagagcccaacatctgttacctcccaaaagaggaataagtagcc

SEQ ID NO: 743483 - DNA, 627 bp, Homo sapiens
aacatgagcaatttttctccatgattattactagtaacagcaattagttaacaaaaagattcagtgcaagcagagctacggagtcatttgctgcttaaaactttactggaggtggtgatgggagagccatttaacagagtttacacattttaaagcagtttgagcctggaattatgagaacatagaccttaagagaactaatttccaactttgtaaattttctcatgaaattacagaattactttgagattcttcatacaattccagcacttttgattttatgttgaaactgggttggcttaragtcaagccacagttcttgtgtgttttttacaattggttttatgctgcctccccgttagtttggcactggctctgtgacatgcctgaaaatgtgtcaagaaaatccagtctcttgttttcattaccaagatattatagcttcatagaacgcttattgggcaaatgacagtctccctccactgtgagaatgggaattatattggatttttcaacacagccatttgctgaaaatgaacttgctggtgtgagctactgtttccacaagcaggatgtagaatgagaaatgcattaatgccttgatatttgatatcttaaactcacaca

SEQ ID NO: 743484 - DNA, 637 bp, Homo sapiens
attatctattgacattttataagatactctggcaaaattactcccccaagaagttctagaatggtttactttttagtctggattgtttttattatttctctgcttttaatgaatcaccttattatcctcaaaataataaaaaaagatctaggggtaaaaaagaaagtggcattcttatagttacaatagctattaataaactaatagacaataactaacatattccatktgtggttttacaatttagaaatccaagcatacaaatatcagcattcattttaggttttaatatgtgcatgtttccatttatagatgttaagcacaggacaagttaaggatagttgctctttcagatataaaaatacttatggttttacagtttttttagctatagtgattaaaataatatgattatagcctagggtagatcataggtgcaggagcttttattattccatttgtataaatgtagaaacagttcggagaagataaataacttgctcgaggtcacagagttaatacatggtacattttagattgaaatcaacactggcgtttgtatcttttcttctagcagctataccaaataacatttcttagaggagaatatttatatgacttgatattcaaaaatatg

SEQ ID NO: 743485 - DNA, 536 bp, Homo sapiens
tgctccagaagtagacattgtctttatctttcaaggtaattgctatacaaacatccatgcataaacatgagaaatccatggataattgtcttccaacaatattaacaataataacaactgctaccattcattgagtgttcaacgagggtacccatagataaaagctaacttctggaatatgtaataaataatacgtaaaccatagacaaaaactagagaaaaatccatttcaagtgaccattgmaattataaaggaatttgatgtgtcccttgtcatatatatgtgaattccatcaaaagatgtgaaccaaacaatgtccattttaatgggtttatatttggtggaactaaatagctcaaagtattgatatcagactggaaagaggttccaaatggtgtccttgaaaaggtctctgcccttgccctgttcttgtgttgcaaagttatcaatggttagaatgagaacataaatggcaagcatatcagatttagggaggagaaaagaccggaagagatagccaatgtttggagggaag

SEQ ID NO: 743486 - DNA, 536 bp, Homo sapiens
tgctccagaagtagacattgtctttatctttcaaggtaattgctatacaaacatccatgcataaacatgagaaatccatggataattgtcttccaacaatattaacaataataacaactgctaccattcattgagtgttcaacgagggtacccatagataaaagctaacttctggaatatgtaataaataatacgtaaaccatagacaaaaactagagaaaaatccatttcaagtgaccattgcaattataaaggaatttgatgtgtcccttgtcatatatatgtgaattccatcaaaagatgtgaaccaaacaatgtccrttttaatgggtttatatttggtggaactaaatagctcaaagtattgatatcagactggaaagaggttccaaatggtgtccttgaaaaggtctctgcccttgccctgttcttgtgttgcaaagttatcaatggttagaatgagaacataaatggcaagcatatcagatttagggaggagaaaagaccggaagagatagccaatgtttggagggaag

SEQ ID NO: 743487 - DNA, 495 bp, Homo sapiens
cagtttcttttaaacctttatacatttggagggagttttgctttactgagctatacttatgggaaataattaatagaaaaaggtgttggcattatatacaactgggagatgccaattagcaaaaccctccttcaaaatgacaccagttaattccagcatgagccctcagagtgaaatagcctccctcttacacaatgctagtgcctcattgtctttaggaatgtctccaatcatcctatatataacctcctgggataagtgcttttggccctgcctttctattgcctctgcactgaagagatgatattcattaagttaaatcaattgartaagagtgtgctttcctttactttggtgactcttctatagtggaaagcttacctctacaaggtgatctctgacacagaatgatcaactagacagtaatacacagataaaaggtcattattagcactgccaataaaaagtatggaacatattgaaaaatacatgtgt

SEQ ID NO: 743488 - DNA, 644 bp, Homo sapiens
attttaaaattagtgttgtaaattttaaaattttgctaataattgtaatttatgtagacttaattgtaggaggctgtacagtttcctatgataaattataccaagcataagatgattgttagagacatacaggaccaacacctgaccaggggtgaactgactgggataaaaatacagaaggaaagggcattgtgttttgcagtgatcatgggtcacaagactaaagttgcaggattggaatggtggcccaaaggagcatgctcatgcaggaaagaataggaatatatggatgtatcaagacccaaactattcgttggatttttagtgtgataatgccactttacaaatctccataattacaaaaacagaaataaaatcttcttaaggcctataraaaataaatctactgtaaagatcttgttaccagaagaccctctctcactaataaacacctgtctttcttatttaagaatttgatattattgccattataacaatctgtcaataagacacttatgcttatcttcttccatgttttgtaagacatattatgagtatgtgtgtttatgttattacctgttatataaaaataatttgtaatacattatctcatttatttcacataacaatttgtgagataatat

SEQ ID NO: 743489 - DNA, 614 bp, Homo sapiens
ggactaaaattaccaacattgagctgtaatacgatgtccacttcccaaattgtgaaatgactcatatatgcttgacatgtgcaggtctattatatggtataatgtgtctgaatacttcatataagctaggtcatcatctaattatgttatgaatgagcattatattaatgagtttcaccttaaatattttctcatgtgtgaattttttttgaaaacctgtatcttaaaataagaaaaatgtcttctttctgtatgtgtcaggctctaggtctcaagaggagaggacattattcgatcttgtcctctctttttcctctaaccyctttccctcatcgcccctgttaggaggcccctcttagaagtacgacctgttttctctgagttagagaaggagtccaaccaaaggtctcccatgtctaagtgtgagcactttggcattgcagagtcctgttcataacctgggtttcattagggccagaatttacttttgtgtggaggagcaaaagggagagatattctgagaaaaataagagcaaaggaatacattaaccttatgggaatttgcctactgataaatgagaagagcttacaggcaaaaaaaaaaaaaaaaaatg

SEQ ID NO: 743490 - DNA, 656 bp, Homo sapiens
gaaattatagactagatgaagatacagatggttaagtaattacaaaaaataatgtgtgataggtacaattttagaaggtaaaaagacattgtagagtagataaacaaggcgtttcatccagtatgtgaggttataaaactccttctagaggaagtactcaataagtgagacatagaggttaaactgggttagacagaaaaaagaggaaggaggaagcaaagagaacaatctgtatggagggatcaggcttgaaggcaagcaagacacggcttgtttaagcaaataaaatctacaytttttactaccttgttaaatgacactagacaaagcatatgtgtctaaaggaaaatagtgctatttagtttgcacagaagaaaccattcgggagaaaaatgtgtccaaaattctgaataaacatgaactttcacacccaattaaacaaaataaatcccagaaaaaaatcatttcaagtttgctacctctccctaatctcacatgatttatttgttcacaaattgatccattctagaagcaactaaaatgaaacattttcttcctaatatacttgacccatttactagacaataagggactatttgggtctttatctgcaaaacatattggagagagttgttttgattgtgtgaatccttttt

SEQ ID NO: 743491 - DNA, 656 bp, Homo sapiens
gaaattatagactagatgaagatacagatggttaagtaattacaaaaaataatgtgtgataggtacaattttagaaggtaaaaagacattgtagagtagataaacaaggcgtttcatccagtatgtgaggttataaaactccttctagaggaagtactcaataagtgagacatagaggttaaactgggttagacagaaaaaagaggaaggaggaagcaaagagaacaatctgtatggagggatcaggcttgaaggcaagcaagacacggcttgtttaagcaaataaaatctacattttttactaccttgttaaatgacactagacaaagcatatgtgtctaaaggaaaatagtgctatttagtttgcacagaagaaaccattcgggagaaaaatgtgtccaaaattctgaataaacatgaactttcacacccaattaaacaaaataaatcccagaaaaaaatcatttcaagtttgctacctctccctaatctcacatgatttatttgttcacaaattgrtccattctagaagcaactaaaatgaaacattttcttcctaatatacttgacccatttactagacaataagggactatttgggtctttatctgcaaaacatattggagagagttgttttgattgtgtgaatccttttt

SEQ ID NO: 743492 - DNA, 604 bp, Homo sapiens
tcctttaactttagccaatatgttaacacaaagaatttcttttacaagatttaattttttgcaaacctttcacaacttggttaaaccttcagctctataatttaggccaaaagtaatccacattcccatgacttctcgtaatcttttaccaaaaacacattttacttttttctacatacctagcatgtaaaactatttttatttcccaaagattactaaagtcatataaactaaaacatgactttagtaaaatacaccacggtttctatttttctgataaaatatttkctttaagctcttattatttttaaacaaattattcaaagctctttcatattgcacacacaacacatataaatacatagttggaagaagaagatcaagtacctttaagatttttcctttgtcagttttttaattggattaccaccctggctttagggtggatgcctcagagaaacagggccaggaaagcaaaaaacaagcagtttctacagcctagtaagtaggcacagctggaaggcaaaacacatccctccaaattaagacttatttttatgctagaacctggatcccaaaaagagaaaattagcccatcttccat

SEQ ID NO: 743493 - DNA, 615 bp, Homo sapiens
gccatctactctatttgatgatcaggatgggcatccaattcaaactatgcactaatcggtgcattacaagctgtcgcccgaacaatttcatatgaagtcaccctaaccatcatcctgttatcagtcctactgagaagcggctcattcaatttatatacactcatcacaacacaagagtccctctgactgctcctaccatcatgacccctagccataatatgatttatctccacattagcagaaactaactgagccccttctgacctaacagaaggagaatcagagttagtctcaggtttcaacatcgaatatactgcaggtccatttgccctcttctttataacagaatatatgaatattatygtaataaatgccctaactactacattttttctaggaacattacacactatatattcaccaaactctatactacatatttcattaccaagaccttcctcttaacctatttttatgaattcaaacagcatatccctgtttccgcaacgatcaactcatacacctcttacaaaaaaaactttctaccacttacactagtattctgtatatgacatatctcaatacccatcctaatctccagcatcccaccccaaa

SEQ ID NO: 743494 - DNA, 693 bp, Homo sapiens
acagagacactcatagacctcacgggatcctcccctatgtctcccatctcttcaccaccagccctcagggagtctcatgtctcccaattactctccaatcattcctagatttctgtaacagtcaggccctgacacccatgtaacaagcagaaactcagggacctcacagggctctggccccatgtctcccaactctttactccaggccctcaggtactctcctgtgtctcccagattctctcaatccccagcttactgcaacattcagcttcccaaacccaagtatcacctatagacaaaamtctcagggccctcttctatcacgtctcccatctcttcacctgcaaccctcagggactctcctgtgtctcccagctcctctccaaccatccccagatttctccttgggtcagccctgaacacacaggagtcacccagaaactcatagacctcactgtgctcctcccttatctctgtcacctctataccaccattccttagggcctcatctgtgtctcccagctattctccaagcatcctcagttttctgcaagagtcacccctcagcattcaggagaaccctagaaattcacagagctcaccagattattccccaactacctccacctacacagcaatggctcccacatactccctgggggccccacacctatcttcctttacactcagaga

SEQ ID NO: 743495 - DNA, 693 bp, Homo sapiens
acagagacactcatagacctcacgggatcctcccctatgtctcccatctcttcaccaccagccctcagggagtctcatgtctcccaattactctccaatcattcctagatttctgtaacagtcaggccctgacacccatgtaacaagcagaaactcagggacctcacagggctctggccccatgtctcccaactctttactccaggccctcaggtactctcctgtgtctcccagattctctcaatccccagcttactgcaacattcagcttcccaaacccaagtatcacctatagacaaaaatctcagggccctcttctatcacgtctcccatctcttcacctgcaaccctcagggactctcctgtgtctcccagctcctctccaaccatccccagatttctccttgggtcagcccygaacacacaggagtcacccagaaactcatagacctcactgtgctcctcccttatctctgtcacctctataccaccattccttagggcctcatctgtgtctcccagctattctccaagcatcctcagttttctgcaagagtcacccctcagcattcaggagaaccctagaaattcacagagctcaccagattattccccaactacctccacctacacagcaatggctcccacatactccctgggggccccacacctatcttcctttacactcagaga

SEQ ID NO: 743496 - DNA, 549 bp, Homo sapiens
tgttatgaaaaatttcaaacattgatagaaatagtgaagtattccattgcctcatcacccagattcagcaattttcaacatgtgccacacttcctttatctatcaatattgtctttctgccctttttgttattgtaattttaaaacaaaatcatgacactgtattatttccycctaaacactcccatgcatacttcaaagaattacattttctaatataacaaaaatacaactgtcatactgaagttaataattccttaatattattttatgccctaaaaaacaaaacttcagaatttccagtcatctcaaaaatgtccatcctttgcatgtgatcgttttgtctcttgagtctctttcaatctggaagagtatccccactttgatccactttaaattcatgcttttggcctatacaagacatcaggtcagttgtcaagtaagatgtcccacattctggatttttaaaaatgtttcattatgctgtcagttaacattttcttgaatatcttctgtggctctggtaaactacaatttagatttagagagc

SEQ ID NO: 743497 - DNA, 549 bp, Homo sapiens
tgttatgaaaaatttcaaacattgatagaaatagtgaagtattccattgcctcatcacccagattcagcaattttcaacatgtgccacacttcctttatctatcaatattgtctttctgccctttttgttattgtaattttaaaacaaaatcatgacactgtattatttcctcctaaacactcccatgcatacttcaaagaattacattttctaatataacaaaaatacaactgtcatactgaagttaataattccttaatattattttatgccctaaaaaacaaaacttcagaatttccagtcatctcaaaaatgtccatcctttgcatgtgatcgttttgtctcttgagtctctttcaatctggaagagtatccccmctttgatccactttaaattcatgcttttggcctatacaagacatcaggtcagttgtcaagtaagatgtcccacattctggatttttaaaaatgtttcattatgctgtcagttaacattttcttgaatatcttctgtggctctggtaaactacaatttagatttagagagc

SEQ ID NO: 743498 - DNA, 549 bp, Homo sapiens
tgttatgaaaaatttcaaacattgatagaaatagtgaagtattccattgcctcatcacccagattcagcaattttcaacatgtgccacacttcctttatctatcaatattgtctttctgccctttttgttattgtaattttaaaacaaaatcatgacactgtattatttcctcctaaacactcccatgcatacttcaaagaattacattttctaatataacaaaaatacaactgtcatactgaagttaataattccttaatattattttatgccctaaaaaacaaaacttcagaatttccagtcatctcaaaaatgtccatcctttgcatgtgatcgttttgtctcttgagtctctttcaatctggaagagtatccccactttgatccactttaaattcatgcttttggcmtatacaagacatcaggtcagttgtcaagtaagatgtcccacattctggatttttaaaaatgtttcattatgctgtcagttaacattttcttgaatatcttctgtggctctggtaaactacaatttagatttagagagc

SEQ ID NO: 743499 - DNA, 551 bp, Homo sapiens
tggagttccccatcctttggagacttgtgcatgtggaggacatagatgttcatggtgaagaattttttaggcttccaatgtcgaatttgatgtggaggtaaagaataattaatccattaatactttcaaggcatcttcatcagactgtatcagctgtagaacaacagcactcacctgtattaataatctttataaagtacactatcccagagagttcccaaaaatcattctcaatgtagaaatgagaaaacacaggctttgtgatgtcaaatggctgctccaaaacacacaggtcagaatgagaatcttccatggtgagggttgcatgaaatttcctctaagctacstgagtcttagtctgttcctgtcatagaggggaagggcatgttttaaagacaggtcacagggcaagaaatcctagcacaacccttttgacttaaatcaacatagctgggttttctaacctcaaagggaaagaaccagctacagcaatcccacacctggcaaaagcgtccatgctgggaaactccagggtaggaaaaaccccgtca

SEQ ID NO: 743500 - DNA, 551 bp, Homo sapiens
acatgctctgacatggcaggccccagcccattctccttacgaacgacacttgctgggaatccctactgggcacacacaacccagtctacaagatagagtggtccaaaccccccatcctgggctgtggtgcttggaagatgcaacacaccgactggctacgctgcagttactgcatctttctggctggctggcaagcaaacttcccactgcctttctccccaggcctgaccccattatgacaatggagccattgttctgaacaggggccatgaggcagctgggactggccgaccctatgctggctcctcacatctcagaagtcaagccctcagacagatcaaggaaagtgataaaattcagygggaagcaggacagagtattgggggtcctgagccagcttcttcctctcagttctgtatcgtgatgggaatgaataatcaccccaattacagagcaacctgaaggagacaaaatcacttaactaaatgaggtgcttggggaatggaaggtgggagcagtctgcaacgattttggcagaaacttctgggcca

SEQ ID NO: 743501 - DNA, 658 bp, Homo sapiens
tttagggccagatggctgcccaggtctcttagaattaggttggcctgattccttgagctgtggggttggtgttcctggagtcactgctaaaaattctgcaaattgcagggaagccaatgtttaaagacttctccatcgcacttgtggttgcatacatccacacacctcccagtgggtcacgacttcctagggcttatcccactgccaaggagagaggcccttctttcctccatcctctacgtccccaactcccagcttctttttctatcacctggggggtgcccataatctgtctcaagtttctgatggtgaggtgctcgaggttgggaagcgtttccctgactgtctcgtgagcagraatgatcacactgtgttcccagccctttgttctccccttagcctcccactcggttttccaggtgaggtcaagggccacatggaaagggaaaaggtattataatggaagggatgcccaagaggagtgtgtatgggaagggttgagcgatcatactggacactttcaggtcttttttattggccatctgtcctccactttcttcttgcttccagggaggtgggtctgtgtctgtggctggatgcagtgagaggagccagaaccaacacccagtctgttcttcagccagaggggtgaggctga

SEQ ID NO: 743502 - DNA, 636 bp, Homo sapiens
atgctaagatgaagttaatttagaggtcaataaagtatcaccagccagttcactataattccccttctcttttgaaaaggctattctggctacagcttcagtttttcctaacctcacttcttctctgagcctcagagattcctagtgacttttgttgctttatgcatttctaagaatggaaaactgatcatctctgactttcgcacccctgagacaagctcagaggcactgtgggatctctggagtgtggcagggaggggtgtgggcaggactgagctttcattggcctggcaccaggctgtagggccaacccaaaggagggcgtgcaggaatccagtcagtgtgcaagggactgtgtccactgggcttgatttggtttggcatcagtttcaaagtgctcacaataatctttatggctgggtgggggcactctgcttccaaggagcccagccaggacttggaaaaraaaacgctgcagtccagattccaaaccaataagactgaaatgggcccaggaaagcaaggatgatcctagggggcaggaaaggaaggggagatatagtcagtgttgggggactgtagttcaaaggcagcacaagtgtttgggatttcccccaggagtttctcacaccaaat

SEQ ID NO: 743503 - DNA, 620 bp, Homo sapiens
ttatcacttttgggattacagaggttttaggagctaggtgctaagaactaggacaaagacgaaatatatatctcctactgtattgctctgtaaccagtattttctttaatatcatctctcactaccaccctattctctacactgtctacaattgttcacattgcttctctgagcactattgctctcccctccttgttcttggttctacccacagcagttcttacagagggccccttcctttggtggggtgaaaatttgctggcattgtttgtgctctgcctctgctagaaaatctcactcccagttctttcctacaacacctgccatcatccaacactgtttgtcaaccccctgctattcttcttgtttcaaatgttcttcccctaacttatattttattcagtttgtggatttttcttggtcttctagtttttttgaaggctgtggagagttgtatcgttgtkcttgttgtctctattataattcagaattcctctagttctaatttcaagttattatttctgttttcttatcttgtattatccaggagacttcagaatagtttcataaaactaagggctagatctctggtagattgtagaaaactaagggaagcatct

SEQ ID NO: 743504 - DNA, 612 bp, Homo sapiens
ctaacagtgggaatggtcagccagggttggggtggctactctgcagtcctaagctgggggtcctgcttggtgaagagtcagggatggaggcttacagggaagagacactgggctcctctccatgtaatggatgtggtgtgctggaggttccagcatagtgacaaggctctctgttccttcgccagccccagagcagtaataaaagtactacagctacaattgcaaaggggttgtgggatgcctctgtgatttcctcctcagagaaatgcagagcggtcattgactgaagtgttcagmagggagtagggtgattgtgttgaggtcccaggtggagagggactgcctagtgaagagtagcagaggtggggacccatatggaaaacagtctggccactttttcataaagcaccttcactgtgatgggggttcgcatttgtccgcaactgcgatgctaccttccaagcatagaggagcaacagctgtgggcagcaaaaatagcagcctccctgcttcttctgggagctccatcccagggaagtgcagagctcaagagctcaggcagggggtgggtggagtccttcctctatcaggtccccttatccagagagcagt

SEQ ID NO: 743505 - DNA, 629 bp, Homo sapiens
agaatctttctgagaatcttctttgtgatgtgtgcattcatctcgcagagttgaaactttcttttaattcagcagtttggaaacagtctttttttagaatctgtaaaggatattcagcagcccttcaagtcctatggtgaaaaaggaaatatcttcacataaaaactagacagaagctttctgaggaacttctttgtgatatgtgcattcatatcatagagttgaaactttctttttattgagcagtttggaaacagtctttttgtagaatctgcaaaagatattttggagccctttgagttctatggtgaaaaaggaaataactatgcataaaaacttgacagaaggtttctgagaaacttctttgtgatgtgtgcattcaactcagagttgaaaatttcttttgattgagcagtttggaaacagtytttttcttgaatctggaaagggatgttagggatccctttgaagcccactgtgaaaaacggacagaaaccagacagaaactttctgagaaacatctttgcgatgtgtgcattcacctcacagactttaacctttcttttgattgagcagtttggaaacagtccttttctagaatctgtaaagggatatttgggagccctttg

SEQ ID NO: 743506 - DNA, 701 bp, Homo sapiens
aagggctcccaattatctctttgcagattctacaaaaagaatgtttccaaactgctcaatcaaaagaaagtttcaattctgtgagattaatgcacacatcacaaacaagtttctcagaaagcttctgtatagtttttatttgaagatattccatttttcaccataagcctcaaaccactctgaaatatccctttgcagactctagatggctcaatgaaaagaaaggttgaaccctgtgagatgaatgcactcattacaaaggagtttctcaggaagcttctgtctagggtttatgtgaagatatttcctttttcaccataggcctcaaagactccaaaatatcactttgcagattctacaaaaaggctgtttccaaactgctcaatcaaaaggaagttttaactctgtgagatgaatgcagrcatcacaaagaaggttcttagaaagcccctatctagtttttaattgaagatattttctttttcaccattggcctcaaaggtctctcaaatatcactttgcagattctacaaaaagactctttccaagctgttcaatcaaaagtaagttactactctgtgagatgaatgcacacatcacaaagaagttcctcagaaaagttctgtgcagtttttatgtgaagatatttcctttttcaccttaggaatcaaagggatcccaaatatcactttgcagatgtt

SEQ ID NO: 743507 - DNA, 701 bp, Homo sapiens
aagggctcccaattatctctttgcagattctacaaaaagaatgtttccaaactgctcaatcaaaagaaagtttcaattctgtgagattaatgcacacatcacaaacaagtttctcagaaagcttctgtatagtttttatttgaagatattccatttttcaccataagcctcaaaccactctgaaatatccctttgcagactctagatggctcaatgaaaagaaaggttgaaccctgtgagatgaatgcactcattacaaaggagtttctcaggaagcttctgtctagggtttatgtgaagatatttcctttttcaccataggcctcaaagactccaaaatatcactttgcagattctacaaaaaggctgtttccaaactgctcaatcaaaaggaagttttaactctgtgagatgaatgcaggcatcacaaagaaggttcttagaaagcccctatctagtttttaattgaagatattttctttttcaccattggcctcaaaggtctctcaaatatcactttgcagattctacaaaaagactctttccaagctgytcaatcaaaagtaagttactactctgtgagatgaatgcacacatcacaaagaagttcctcagaaaagttctgtgcagtttttatgtgaagatatttcctttttcaccttaggaatcaaagggatcccaaatatcactttgcagatgtt

SEQ ID NO: 743508 - DNA, 530 bp, Homo sapiens
gtccacaaaccacatttagagaaatactatcgcagtgactggtgtgtggcctcctcatctccacatcactattgtaggggctgtcagcgggggcctctcagcctggaaggtgcttggaagacctgcacagtttaaaaatgccagaagagcacaggakgcttccacgtgagctttcctacaagcaggaactagtcaataaaagcacatatgcctggcaaaacatgaataaccagcttgcgcagaggtcaagacataatatgaaatactgctggtcaaatggaaatgacaagctatgtgctgtctctcattcactctcaactacaccaatccctctgtcgcttaactctgctcttccctttctcaaccccctccactctcctccctctcctattgggatttgaaacctgttaagacagctgtgcctctgagtttgtcaacgcccctgcaccaagaacagcagcttggaagcttgttagaaatgcaaattcttgggcctccctccagacctgctcaatcagaatcccccaggt

SEQ ID NO: 743509 - DNA, 530 bp, Homo sapiens
gtccacaaaccacatttagagaaatactatcgcagtgactggtgtgtggcctcctcatctccacatcactattgtaggggctgtcagcgggggcctctcagcctggaaggtgcttggaagacctgcacagtttaaaaatgccagaagagcacaggatgcttccacgtgagctttcctacaagcaggaactagtcaataaaarcacatatgcctggcaaaacatgaataaccagcttgcgcagaggtcaagacataatatgaaatactgctggtcaaatggaaatgacaagctatgtgctgtctctcattcactctcaactacaccaatccctctgtcgcttaactctgctcttccctttctcaaccccctccactctcctccctctcctattgggatttgaaacctgttaagacagctgtgcctctgagtttgtcaacgcccctgcaccaagaacagcagcttggaagcttgttagaaatgcaaattcttgggcctccctccagacctgctcaatcagaatcccccaggt

SEQ ID NO: 743510 - DNA, 530 bp, Homo sapiens
gtccacaaaccacatttagagaaatactatcgcagtgactggtgtgtggcctcctcatctccacatcactattgtaggggctgtcagcgggggcctctcagcctggaaggtgcttggaagacctgcacagtttaaaaatgccagaagagcacaggatgcttccacgtgagctttcctacaagcaggaactagtcaataaaagcacatatgcctggcaaaacatgaataaccagcttgcgcagaggtcaagacataatatgaaatactgctggtcaaatggaaatgmcaagctatgtgctgtctctcattcactctcaactacaccaatccctctgtcgcttaactctgctcttccctttctcaaccccctccactctcctccctctcctattgggatttgaaacctgttaagacagctgtgcctctgagtttgtcaacgcccctgcaccaagaacagcagcttggaagcttgttagaaatgcaaattcttgggcctccctccagacctgctcaatcagaatcccccaggt

SEQ ID NO: 743511 - DNA, 530 bp, Homo sapiens
gtccacaaaccacatttagagaaatactatcgcagtgactggtgtgtggcctcctcatctccacatcactattgtaggggctgtcagcgggggcctctcagcctggaaggtgcttggaagacctgcacagtttaaaaatgccagaagagcacaggatgcttccacgtgagctttcctacaagcaggaactagtcaataaaagcacatatgcctggcaaaacatgaataaccagcttgcgcagaggtcaagacataatatgaaatactgctggtcaaatggaaatgacaagctatgtgctgtctctcattcactctcaactacaccaatccctctgtygcttaactctgctcttccctttctcaaccccctccactctcctccctctcctattgggatttgaaacctgttaagacagctgtgcctctgagtttgtcaacgcccctgcaccaagaacagcagcttggaagcttgttagaaatgcaaattcttgggcctccctccagacctgctcaatcagaatcccccaggt

SEQ ID NO: 743512 - DNA, 526 bp, Homo sapiens
gttttttgtggtgggcttggagagagttttaaatgctaggaaaatgacatataaaagtgtagatttctgtactttccttaaaaaatgggaataccaggtttcctggatctcacactccctataagattaacaactctggtgctgggtgtgactactcccatagagaggccgcagtctccaccactcccagctgctcgtctccccgttttcacgcagcatgacatcagcatggccctggagacatttgagtttgccaccccggggcaggccagtatcctctatggggcctttacgtgttacagttactgttttcaggaatgtccctacactgtatgtgtttgttctaaggctcagtgaagtcagggatcytacacagggatcctggcacacagtaggtgcgtcacaaatttctggtgaaacgctctgagacaaagttaatgactgtggcaagctggagtaaacattggaggaggagttggcagggcttagcatcgagctctggccttgccacaaagggacactgggc

SEQ ID NO: 743513 - DNA, 596 bp, Homo sapiens
aatgaagaaataaatatgtaattaactacatagtacttcataaaattacacattctataaaacccaaatatgaaacatttcaaataagtacccatcttcacctgcacattaactaatatgtgcacctgtgtagaagtgagtgacagccacgtggtatggtattacctcagtttatttgccagggtccagagtcagagcccaccctgaaagttcatctgcctgatttagctctgcactccagtggattcatgtataagaaaataattcacattactctagcccacaggactgatgccaattttctaatgttctgtgtagttaactgtgtgttccatacaagctgctgcttcaggtaaagcatctgctttcaagacactgtatttttttatttktaaattttggtgaggcaaagggagagaagactttcatttgacttacttatccttattcaaattaatacatttaacaaactatccttcaatagcatattaggtaattgtagcaaagtcaataaataatgaaatttagtaatattttaaaactattatacatatagaaaatatattactaaggattatgctaaattattcgctgaa

SEQ ID NO: 743514 - DNA, 585 bp, Homo sapiens
aggatccctggtgttacccccttttttttttttgagatggagtttcactcttgtcccccaggctggagtataatggcatgatcttggctcactgtaacctccaccttcccgggttcaagtgatcctcctgcctcagcctcctgagtagctgagattataggcatgcrccaccacaaccagctaatttttgtatttttagtagaggcagggtttcaccatgttggccaggctggtctcgaactcctgtcctcaggtgatggagacccacttcagcctcccaaagtgctgggattataggcgtgagccaccgcacccggctggtgtcacccttttataacccacccaccttcctgctgaccctgcccccttgttcccctactatccctaacccctggcaactatcaatcttttctccatttctaaaatgtgggcatttcaaaaatattatataattatacagtctaacattttggggactgacttttttcactcagcaaaatttcctgaagattcacccaggatgttgcatgtatcagcagtgcattcctttattattgcaaagtactattccatggtatggatatg

SEQ ID NO: 743515 - DNA, 617 bp, Homo sapiens
tagcattttggctataatatacctaagtgcagatttctttgtatatatccttctttgagtttgctgagcttgctgtatctataaattaatgttctcgccagttttaggaaatgttaggccattatttcttcaaatatttttcctgtccgactttcctcttctttctctgggattcctattacacatatattagaccactttatattgtcctggaggaccctgatactctgttgacttttttcctacttttttctctttttcagattgggtaagtttttattgatgtaagtctagattsagtgactttttcttctgccatttccaaactactctggactccatctgataaaattttcatttcagatagaattttcatttttaaaatagtttccatttttctgctcagaatccccaatttgcgtattatgtctccatttcctttaggtctctgaacatatttataacatggttttgaagtacttgtctcctaattctcacatctggatcatttcagggtcagtttcatctaattgtctaataaccatgacctagacactcctgtttcttcacatacctagcgatttgtattgtatagaacatactgttggccacaaaga

SEQ ID NO: 743516 - DNA, 688 bp, Homo sapiens
atctggtcattcaagagctctgatgaaaatatataggagattaatgttgtgttcaggtctgctaatacaacaccctttttgtaggccacggatcaagaggtaatttgactttcaagccttattatttaagaaatatatttcataaggctatagttaccatagatattgattctcctgatggatctgggcaaagtaaattgaaaaccttccgaaaatgattcataagtctatatgccattaaatacattagtgatttacgggaggaagtaaaaataccaacattaacagatatttggaagaagttgactctaatgctcatgggcgactttgaggggtacaagacttcatwataggaagtaactacagatgtggaggaaatagcaagagaactagaagtgcagcctgaagatgtggctgaattactataatttcttaataaaacttgaacagatgaggagttgcttcctatggatgagaaaagaaagtggtttattgagatggaatctactgctggtgaagaggctgtgagcattgttgaaatgatcacgaagaatttagaatattccataaacttagttgattaaacaatagcagagtttgagaggattgactaattttgaaagaagttctactgtgggtaaaacgccatgaaacagcacagcatgctacagagaattcttttgtgaaa

SEQ ID NO: 743517 - DNA, 658 bp, Homo sapiens
ttaattatacatctttattcataacaaagcattttctcagaaccttatgtatggtccaatattagttttggcttgaactggtaaaacaaaaactgagctgccaacacaaagattgaacttgggtagtcaggaagccagtgggaaaaccaagtagcaacacagaatacacaaagtgcaaggaaaacctggattaatgtattggttcttcatcaggtaatttctcagaaagccaagacacttacaggctgtagaagggaagtaaagactgtgtgactaaattgggaggcattgaaaaggacaccygagacagacaactgaacgcagataattggcttgggaggtgatcccaggatgccacaggggtggcagcagggagaacaagacagggaagaagagacaatgaagactggcgctgtgagcaaacagagttcaaagttcctgggaactttcaatgttaaggacattaggatccactgaccagtcttgtgttgaaggacaaacagattcaagtgtcaggcaagctcatccaagtggaccatggcataataaatattctatcaactataagttaattcatcattcttaaatatcttaaaatgtttcattgtctcctaagaagagatttagtgggtcaatatttattatctgcttctaattt

SEQ ID NO: 743518 - DNA, 581 bp, Homo sapiens
gggaacattctaagtatgctcctatgatgcatattgtacctaacaagcagtggattaaggggcttcattaggaagacatggccaattcataggaggcattaacacatctctacttgtctttgtaaggaacattttgataaattgcttaggatgaggggcagagtaaatacttcactgccccccaacctcaaacaaagggtaggcccaaggaacgacagatgacagatgaccagtaatttgccatcaaggggatgggactggcaggtccacctatccatcaagtggctatttcactgcatggkctgtgcctatttggagcagaattgctgaagatgatagagaggagaaagactgagatcaaccaggagcaccatccttttcctctgtttcctcataagtgcatggccttttcacttaataaatgctgttcaaatttgcaaagaagatttgcttgataaaattccaaattactacattttttaggatactcttatgtcttggtctggttctgaccacagaatacattttcctggggctgaatgttaccccgtcatattacctagttctgctagttctaggct

SEQ ID NO: 743519 - DNA, 581 bp, Homo sapiens
gggaacattctaagtatgctcctatgatgcatattgtacctaacaagcagtggattaaggggcttcattaggaagacatggccaattcataggaggcattaacacatctctacttgtctttgtaaggaacattttgataaattgcttaggatgaggggcagagtaaatacttcactgccccccaacctcaaacaaagggtaggcccaaggaacgacagatgacagatgaccagtaatttgccatcaaggggatgggactggcaggtccacctatccatcaagtggctatttcactgcatggtctgtgcctatttggagcagaattgctgaagatgatagagaggagaaagactgagatcaaccaggagcaccatccttttcctctgtttcctcataagtgcatggccytttcacttaataaatgctgttcaaatttgcaaagaagatttgcttgataaaattccaaattactacattttttaggatactcttatgtcttggtctggttctgaccacagaatacattttcctggggctgaatgttaccccgtcatattacctagttctgctagttctaggct

SEQ ID NO: 743520 - DNA, 589 bp, Homo sapiens
agagagattatgcaatatagaataaaataaaaagaaatatcaggggtcccactgaaggtcacagtggtttcctctaaccatcttcttccttagaccccctgtgctctgtaataagaaaaaattcagggcctacaatggaggcataactcaatcatttaacattataggttgagtactttctatgcactaggcttggtattagtcaacacagctaaaacataatttggatatcatctctgtcttgaagttgttcataatatagagatattagcagttgtggtcacaaaatgtgacaccacaaagagaaaattctaaatgttatggcatcgtcagcaataggcaagcagtagaaacaaagactgcatcacagtgtccagattgaagaatcagaaaggaagtttgyattaaaaaccaagtagagcagttttctacttatcagaaagcctgcagtactgctcaacttttaattgaaatgtctgttttcagcatcactctccatatagcgggaattctccctgaaggaagtatgaaatcaaagtttagatttaaaaaaaaaatcaagaattcccatggaagagatatagtactc

SEQ ID NO: 743521 - DNA, 657 bp, Homo sapiens
gttgggtatatttcttttatttcttttctatttgcatattttatcttgctaaaactcaatatcttacctgttttaacaatagatgttcattacagaaaaagtggaaaatatgaatatgccaaagaagaaatagaaatccccatggtcccattacctagaaacaacctctagttacattttgacgtgtttccttaaagatgtttaaattggccaggcacagtggctcacacctgtaatcccagcactttgggaggccaaggcaggtggattacctgaggtcaagagttcgagaccagcctgaccaatatggtgaaaccccatctctactaaaaataaaaaaattagctgrgcatggtggtgggtgcctgtaatcccaggtacttgggagaagctgaggcagcagaatcgctttaactcaggaggcggaggttgcagtgagccgagattgtgccactacactgcagcctgggcgacagagtgagactgtctcaaaaaaaaaagaaagaaagaaagaaagaaagaaatgggggatatatattctatacacattaaaaaggtagtaaggaaatactaaaactagttctacataaattcaacaacttagatgaaatggaccaattcctcaaaaaaatgaaaataatctaccacaattcatcc

SEQ ID NO: 743522 - DNA, 635 bp, Homo sapiens
ataaaatcaattagcttcttatttaccagcaagaaagaaatgtgaaatataattaaggtacaatgaccagactaagaaacaactatctgcactacaaatgaccccataaaggattaatttatagaatacctttttaaattcttcaaatcaacgtaagaatacaaatgacccaacagaaaagccagcactgaaaatgaagacaaagacgcaaaggccaataaatattcacaaaacgtcacttcactaacatttccagttccagatgacaggaggccctcagggactcaggaggcaggagcacggggaggtgacagcgccagcagcaggagggcaggcctctgccttggcacsagcggggccacagctcctggcgggctgcgggggccgggaagcccgagcagcctggcgctcctggcccctgcacacgcttccctccctccaccccgttcctccctctctctgtgccttgggccccgtgggatgcgctcacatccagactcaccaggcccgagacgttgggagaatggagaagcgcttgcgagccaaaagtcctccaggagcacctgaaggaagcttcgcctgcacctgggacacccttccctgatgctggcctcaaggcaggcgcgccgcacacg

SEQ ID NO: 743523 - DNA, 651 bp, Homo sapiens
taggcaaatttcttaatactatgatacttacttgccgccataactccaaggaaatggaaagtctctcggagaaacactgaagaaatgcattccccatcccatatggcttcaatgccttaagcggttaatatattctaatattagattagacccgcaaataaaagacagggcagggctgagaatatagtcttagtagtcaggtatcctatacattcacgcttctaggtaayacaagctgggaaagtcttgttttccagctaaatgcattatttaaaagttcattgaagatcaagacttatagcagaatttggtttttctttcaggaaatattactaaaataactatgtgtatgttcatttctttaaaaattttacacatgcttaaaaggcatggcctccagccactgagatgtacagttaaagacatatttgatccaagagagaagtacatgtaaaaggtatcctctagtgaagaccaatgataacaaagcaaagcttgtcacattaactttgtttcacttgctgtaatgtcccaagcaggggcagccactcttaggccccttgttggtttcctgactgtactcttaaaaataaagctgaaaaagagcaatacaccaccatccttaaagaaaacataaagattattagaaat

SEQ ID NO: 743524 - DNA, 623 bp, Homo sapiens
atttggggcctcataaaaacatcatgattaagacaaaggtgttctgtttcctgtaaagcccagtagcaggtcaacagctgcttctcaaagagtataagctttgctagcctctgacagcttctgggtctaaaaccccaaaggtatctcttcccatcttgtttctacctaaggctccaatgagcgtgttgatctaggacagttacttgcagttctactggcccatcctgtaagggccatactgttgctctgcttgtttggctggttgaaaagccacgctcactttctgtcttcagtgaaagtcatagcgttttctagtgactgcatgcagaggttgtaaaatgttacccaartggggaatatgatgtctccagaatccaaacaaaccaatacaattttggacctccttttcagtggtagggctgcaaattctagtattttagccttagcctttggtaaaatggactgtttccctgcattccataggatgccaaggaactttacagtttgtggaggtccttgaattttactagggttaacttcccatccttgagataggatttgggtttttaccggatccaagccccagctgactagttcttcagttttaccctgactgggccact

SEQ ID NO: 743525 - DNA, 513 bp, Homo sapiens
tcacgttggattctagaacaatccttctgtgttctgaatgtttcttcctcacataggcttccaaaatattcctgctgtggtctgagtgtttgtccctcaaataggattccaaaacactgctacttgggtctaaaggattgtccctaacataggattctggaacactcctacgagggtctgtatgtttcttccrcacataggactccagaacactcctgctgtattgtgaatgaattttcctcaaataggattgcagaacaatgctgcgagggtctaaatgtttgtctcacaggtaggattccagaacaccccagctgtggtctgaatgattgtccctcacataggattccataacactgctgctgggttctgagtgtttctccctcacataggaaaccaggacactgctactgggttctgaatgattgtacctcacattggactccagaacactcctactgtggtatgaatgtttgtctctcagacaggattacagaacactgttgctgggtt

SEQ ID NO: 743526 - DNA, 645 bp, Homo sapiens
cacatagcattccagaacaatgctacaagggtctgaaagtttgtcccacatgcaggattccagaacaccacaggtgtggtctgaatgattgtccctcaaataggattacagaagactgccgctgggttctgagggtttctccctcacacaggattccagaataccgctacgagggtctgaatgattgtccctcacataagattccagaaccctcctgctgtggtctgaatggttatacsttacatccgattccagaacactgctgctgggttctgagtgtttgtccctcacataggattccagaacacttctatgagggtctgaatgtttgtccctcacataggattcaagaacacccaatctatggtctgaatgattgtccctcacataggattccatatcactactgctgggttctgagtgtttctctctcacataggattccagaacattactacgaggttctgaatgattgtacctctcataggattccagaatactcctgctttggtctgaatttccgtccctcagatagaatgccagaacactgctgctgggttcttagtgtttgtcccttacataggattccagaacactgctacgagggtatgaatgtttgtccctcacatagaattctagaacact

SEQ ID NO: 743527 - DNA, 633 bp, Homo sapiens
tacaaaaaattcaaaaaatcaatgaatataggagttatttttttgaaaagatcaacaaaatagactgctagcaagactaataaagaaaagagagaagaatcaaagagaagcaataaaaaatgataaaggggctatcacccctgatcccatagaaatacaaactaccatcagagaatgttataaacacctctacgcaaatwaactagaaaatctaggagaaatgggtaaattcctggacatatacatcccccacaagactaaacaaggaagaagttgaatctctgaatagaccaataacaggttctgaaattgaggcaataattaatagcctaccaaccaaaacaagtcgaggaccagacggattcacagctacattctaccagaggtacaaaggggagctggtaccaacccttctgaaactattccaatcaatggaaaaagagggaatcctctctaactcattttatgagaccagcatcatcctgataccaaagtctggcaaagacacaacaaaaagagaaaattttaagccaatattcctcatgaacatcgatgcaaacattctcaataaaatactggcaaaccgaatcaggcagcacttcaaaaagcttaaccaccaagatcaagtgtgct

SEQ ID NO: 743528 - DNA, 633 bp, Homo sapiens
tacaaaaaattcaaaaaatcaatgaatataggagttatttttttgaaaagatcaacaaaatagactgctagcaagactaataaagaaaagagagaagaatcaaagagaagcaataaaaaatgataaaggggctatcacccctgatcccatagaaatacaaactaccatcagagaatgttataaacacctctacgcaaataaactagaaaatctaggagaaatgggtaaattcctggacatatacatcccccacaagactaaacaaggaagaagttgaatctctgaatagaccaataacaggttctgaaattgaggcaataattaatagcctaccaaccaaaamaagtcgaggaccagacggattcacagctacattctaccagaggtacaaaggggagctggtaccaacccttctgaaactattccaatcaatggaaaaagagggaatcctctctaactcattttatgagaccagcatcatcctgataccaaagtctggcaaagacacaacaaaaagagaaaattttaagccaatattcctcatgaacatcgatgcaaacattctcaataaaatactggcaaaccgaatcaggcagcacttcaaaaagcttaaccaccaagatcaagtgtgct

SEQ ID NO: 743529 - DNA, 393 bp, Homo sapiens
aatttaaaaaatgcaaaagatcttaatagatgtttgtcaaaaagagatacaaaaatggctaactggaacataaaaagatgctctacattactaatcaccaaggaaatgcaaatccaaactgcaatgaagtaccacctcattcccattagartggctataataaaaataaataaataaataaatcaagaactaatgaggatataaaaaagagtggatgtataccttgttggtggaattgtaaattagtatggccattatagaaaatagtatggaggtttctgaaagaaattaaaaatatatctattatatgatccagcaattttacttctgggtgtatatccaaaagaaaggatattactgtgtcaaaaagatatttgcattcccatgttcatt

SEQ ID NO: 743530 - DNA, 569 bp, Homo sapiens
agaccagtttcggtggcatattcttgcaatccatacattttgggagattgaggtaggagaatcacttgacgtcagaagttcaagatgagcctggacaacatagtgtgaccccgtctgtatgaaaaattaaaacattagccaggcatggtggcagcttcytgtagtctcagctaattgggaagctgaggttagaagactgtttgaagttacagtgagctaggattgcaccactgcacaccagtctgggtgttagagcaagatcctgtctctaaaaaaaattaatacataaagataaaataaaatagctagagaaggagcttttgaatattctcaccacaaaaataacaaatgcatgaggcaacaaatatagaagtactgatttttattgttatacaaaacatatatataattgtttccccaaaatatgcacaattacatgtgtcaattttaaaaaatgaatgaagactataatgtaaaacctataactgtaaaattcctagcacaatacagaagggtgaagcttcattacaactggtcgtggcaataatttgggggacgtagcatcaacg

SEQ ID NO: 743531 - DNA, 569 bp, Homo sapiens
agaccagtttcggtggcatattcttgcaatccatacattttgggagattgaggtaggagaatcacttgacgtcagaagttcaagatgagcctggacaacatagtgtgaccccgtctgtatgaaaaattaaaacattagccaggcatggtggcagcttcctgtagtctcagctaattgggaarctgaggttagaagactgtttgaagttacagtgagctaggattgcaccactgcacaccagtctgggtgttagagcaagatcctgtctctaaaaaaaattaatacataaagataaaataaaatagctagagaaggagcttttgaatattctcaccacaaaaataacaaatgcatgaggcaacaaatatagaagtactgatttttattgttatacaaaacatatatataattgtttccccaaaatatgcacaattacatgtgtcaattttaaaaaatgaatgaagactataatgtaaaacctataactgtaaaattcctagcacaatacagaagggtgaagcttcattacaactggtcgtggcaataatttgggggacgtagcatcaacg

SEQ ID NO: 743532 - DNA, 569 bp, Homo sapiens
agaccagtttcggtggcatattcttgcaatccatacattttgggagattgaggtaggagaatcacttgacgtcagaagttcaagatgagcctggacaacatagtgtgaccccgtctgtatgaaaaattaaaacattagccaggcatggtggcagcttcctgtagtctcagctaattgggaagctraggttagaagactgtttgaagttacagtgagctaggattgcaccactgcacaccagtctgggtgttagagcaagatcctgtctctaaaaaaaattaatacataaagataaaataaaatagctagagaaggagcttttgaatattctcaccacaaaaataacaaatgcatgaggcaacaaatatagaagtactgatttttattgttatacaaaacatatatataattgtttccccaaaatatgcacaattacatgtgtcaattttaaaaaatgaatgaagactataatgtaaaacctataactgtaaaattcctagcacaatacagaagggtgaagcttcattacaactggtcgtggcaataatttgggggacgtagcatcaacg

SEQ ID NO: 743533 - DNA, 577 bp, Homo sapiens
aattcagcattccttcaggtttaaaattctcaataaactaggaagtgaagaaacatacctgaaaataataagagccatatacaacaaacccacagccaatatcatactgaatgtgcaaaagctagaaacgttccacctgaaaactggcacaagaaaagaatgccctctttcaccactaccrttcaatatagtatcagaagccttggccaggaaaatcaggccagaggaagaaataaagagtattctaatagaaagagaggaagtcaaattatctttgtttgcagatgacctgatcctacatctagaaaacctcattgtctcaggcccaaagcttcttaaggtgataagcaacagtagcaaaatctcaggatataaaatcaatgtgcaaaagtagctagcattcccatgcacaaacaacaggcaagcagggagacaaatcatgaatgaactttcattcacatttgctacaaagagaaaaaaatacctaggaatacagctaagaaagaaagtgaaggacctcttcaaggagaaccacaaacaactgctcagagaaatcagagtggacacaaaacagatg

SEQ ID NO: 743534 - DNA, 639 bp, Homo sapiens
ttgtttgcagatgacctgatcctacatctagaaaacctcattgtctcaggcccaaagcttcttaaggtgataagcaacagtagcaaaatctcaggatataaaatcaatgtgcaaaagtagctagcattcccatgcacaaacaacaggcaagcagggagacaaatcatgaatgaactttcattcacatttgctacaaagagaaaaaaatacctaggaatacagctaagaaagaaagtgaaggacctcttcaaggagaaccacaaacaactgctcagagaaatcagagtggacacaaaacagatggagaaatattccatgctcatggagaggaagaatcagtatcatgaatatgggcatatkgccctaagtaattcatagattcaatgctattcccattgaactactgacattcttcagagaattagaaaaataaaaacttttaaagttcatatggaaccaaaaaagagcccaaatagccaagccaaccttaagaaaaaaaaaaaaagctggaagtgtcactctacctaacttcaaactatactagaagagtacagtaacaaaaacagcatggtactggtatagaaacagacacatagacaaatgaaacaaagtagagaacctagaaataaagccaaaaac

SEQ ID NO: 743535 - DNA, 613 bp, Homo sapiens
tacaataccatacagagagtcaaatcctgagtgaactcccattcacaattgcttcaaagagaataaaatacctaggaatccaacttacaagggatgtgaaggacctctttaaggagaactacaaaccactgctcaacgaaataaaagaggacacaaacaaatggaagaacattccgtgctcatggaaaggaagaatcaatattgtsaaaatggccatgctgcccaaggtaatttatggattcaatgtcatccccaccaagctaccattgactttcttcacagaattggaaaaaactaccttgaagttcatatggaaccaaaaaagagcccgcatagtcaagacaatcctaagcaaaaagaacaaagttggaggaatcgcgctacctgacttcaatctataatacaaggctacagcaaggaaagcagcatggtactggtaccaaaacagatacatagaccaatggaacagaacagaggcctcagaaataacaccaaacatctacaaccatccgatctttgaaaaaaactgacaaaaacaagcaatggggaaaggattccttatttaataaatggtgctgggaaaactggctggccatatgcagaaaactgaaac

SEQ ID NO: 743536 - DNA, 613 bp, Homo sapiens
tacaataccatacagagagtcaaatcctgagtgaactcccattcacaattgcttcaaagagaataaaatacctaggaatccaacttacaagggatgtgaaggacctctttaaggagaactacaaaccactgctcaacgaaataaaagaggacacaaacaaatggaagaacattccgtgctcatggaaaggaagaatcaatattgtgaaaawggccatgctgcccaaggtaatttatggattcaatgtcatccccaccaagctaccattgactttcttcacagaattggaaaaaactaccttgaagttcatatggaaccaaaaaagagcccgcatagtcaagacaatcctaagcaaaaagaacaaagttggaggaatcgcgctacctgacttcaatctataatacaaggctacagcaaggaaagcagcatggtactggtaccaaaacagatacatagaccaatggaacagaacagaggcctcagaaataacaccaaacatctacaaccatccgatctttgaaaaaaactgacaaaaacaagcaatggggaaaggattccttatttaataaatggtgctgggaaaactggctggccatatgcagaaaactgaaac

SEQ ID NO: 743537 - DNA, 613 bp, Homo sapiens
tacaataccatacagagagtcaaatcctgagtgaactcccattcacaattgcttcaaagagaataaaatacctaggaatccaacttacaagggatgtgaaggacctctttaaggagaactacaaaccactgctcaacgaaataaaagaggacacaaacaaatggaagaacattccgtgctcatggaaaggaagaatcaatattgtgaaaatggccatgctgcccaaggtaatttatggattcaatgtcatccccaccaagctaccattgactttcttcacagaattggaaaaaactaccttgaagttcatatggaaccaaaaaagagcccgcatagtcaagacaatcctaagcaaaaagaacaaagttggaggaatcrcgctacctgacttcaatctataatacaaggctacagcaaggaaagcagcatggtactggtaccaaaacagatacatagaccaatggaacagaacagaggcctcagaaataacaccaaacatctacaaccatccgatctttgaaaaaaactgacaaaaacaagcaatggggaaaggattccttatttaataaatggtgctgggaaaactggctggccatatgcagaaaactgaaac

SEQ ID NO: 743538 - DNA, 616 bp, Homo sapiens
tcctgagtgaactcccattcacaattgcttcaaagagaataaaatacctaggaatccaacttacaagggatgtgaaggacctctttaaggagaactacaaaccactgctcaacgaaataaaagaggacacaaacaaatggaagaacattccgtgctcatggaaaggaagaatcaatattgtgaaaatggccatgctgcccaaggtaatttatggattcaatgtcatccccaccaagctaccattgactttcttcacagaattggaaaaaactaccttgaagttcatatggaaccaaaaaagagcccgcatagtcaagacaatcctaagcaaaaagaacaaagttggaggaatcgcgctacctgacttcaatctataatacaaggctacagcaaggaaagcagcatgrtactggtaccaaaacagatacatagaccaatggaacagaacagaggcctcagaaataacaccaaacatctacaaccatccgatctttgaaaaaaactgacaaaaacaagcaatggggaaaggattccttatttaataaatggtgctgggaaaactggctggccatatgcagaaaactgaaactggatcccttccttacactgtatacaa

SEQ ID NO: 743539 - DNA, 616 bp, Homo sapiens
tcctgagtgaactcccattcacaattgcttcaaagagaataaaatacctaggaatccaacttacaagggatgtgaaggacctctttaaggagaactacaaaccactgctcaacgaaataaaagaggacacaaacaaatggaagaacattccgtgctcatggaaaggaagaatcaatattgtgaaaatggccatgctgcccaaggtaatttatggattcaatgtcatccccaccaagctaccattgactttcttcacagaattggaaaaaactaccttgaagttcatatggaaccaaaaaagagcccgcatagtcaagacaatcctaagcaaaaagaacaaagttggaggaatcgcgctacctgacttcaatctataatacaaggctacagcaaggaaagcagcatggtactggtaccaaarcagatacatagaccaatggaacagaacagaggcctcagaaataacaccaaacatctacaaccatccgatctttgaaaaaaactgacaaaaacaagcaatggggaaaggattccttatttaataaatggtgctgggaaaactggctggccatatgcagaaaactgaaactggatcccttccttacactgtatacaa

SEQ ID NO: 743540 - DNA, 613 bp, Homo sapiens
tacaataccatacagagagtcaaatcctgagtgaactcccattcacaattgcttcaaagagaataaaatacctaggaatccaacttacaagggatgtgaaggacctctttaaggagaactacaaaccactgctcaacgaaataaaagaggacacaaacaaatggaagaacattccgtgctcatggaaaggaagaatcaatattgtgaaaatggccatgctgcccaaggtaatttatggattcaatgtcatccccaccaagctaccattgactttcttcacagaattggaaaaaactaccttgaagttcatatggaaccaaaaaagagcccgcatagtcaagacaatcctaagcaaaaagaacaaagttggaggaatcgcgctacctgacttcaatctataatacaaggctacagcaaggaaagcagcatggtactggtaccaaaacagatacatagaccaatggaacagaacagagrcctcagaaataacaccaaacatctacaaccatccgatctttgaaaaaaactgacaaaaacaagcaatggggaaaggattccttatttaataaatggtgctgggaaaactggctggccatatgcagaaaactgaaac

SEQ ID NO: 743541 - DNA, 587 bp, Homo sapiens
ctttcctttatgcccctctggtggaccagaaatcatggctgggtgctttccatttcaccaatcactctttgttcagataaactggttaacgtttaacatagactcccgttaatttttaacaagagagactggggaccccacgggccgcagctcctcccacgcaaacacccagtsgcggtttttccctgatgacccaccaggcctccctgaacaatctgggaaatactcatggctgtgggcgcagagcagggcgctgcccagggacaggaccggatgggccggacgggacgtggggccctcgctgctggcccagcggccatcttgcagccacaggggactgagggccaagctgcgggagactcggagctaaccgtggggaggacggtcctgccggtttcacagtctgttctcccctctcgggatggcgaaccccgtatactcaccatttcccagcttccaggatgtcctggcaccttgactatgcgtccccaaggacctacagatcacagggcaacaggggctgtgggagagtagcccggggctcccaaggtgcaggaggcgaaagaggagacggatcccaagttcct

SEQ ID NO: 743542 - DNA, 587 bp, Homo sapiens
ctttcctttatgcccctctggtggaccagaaatcatggctgggtgctttccatttcaccaatcactctttgttcagataaactggttaacgtttaacatagactcccgttaatttttaacaagagagactggggaccccacgggccgcagctcctcccacgcaaacacccagtcgcrgtttttccctgatgacccaccaggcctccctgaacaatctgggaaatactcatggctgtgggcgcagagcagggcgctgcccagggacaggaccggatgggccggacgggacgtggggccctcgctgctggcccagcggccatcttgcagccacaggggactgagggccaagctgcgggagactcggagctaaccgtggggaggacggtcctgccggtttcacagtctgttctcccctctcgggatggcgaaccccgtatactcaccatttcccagcttccaggatgtcctggcaccttgactatgcgtccccaaggacctacagatcacagggcaacaggggctgtgggagagtagcccggggctcccaaggtgcaggaggcgaaagaggagacggatcccaagttcct

SEQ ID NO: 743543 - DNA, 454 bp, Homo sapiens
atgccatttttaataaatctgttgtgcttcaattcagaagtgtgtgaggggagttgtggaggaattggcatttgggttagaaattccaggaacaacagagacagatgacacctgttttctgcttcataatgtcaagttttatgaargctaaaacctaattctacaaaaaaaattagactgaaaaactttataggcaaaaattatcttattaaataggaaaatctaattattttattttaaaattttcttttccttagtaggacctaatcatagaaatttaaacactgtatgccaacagcctctactgtaggatggtttattgtaagtactcattttacagatttcttacaaaaactttttccgtaagagaaattagaatattgttcaacatatattgaattcacaattattaccttatttctcacttattattttatgattctgttttctttaa

SEQ ID NO: 743544 - DNA, 540 bp, Homo sapiens
atccccgggcccaacacttaggggataaaaggcttattcctctaccttatgcacagagaaacttgtgacgtttttctgcattcatcaccaaggagatgtgactctcctacctgcatcctgaccacagagaggattgtaacatattgctagatccagcacccaggtgatgtgactctgctgcctggttcctaatttaaggagtggattgctacatacccatgcctgagcattcaggtaatgtgtctctgttctctggtccctgttctcagggaagmgacatatccctggcccagcgtccaactgattttactctccttctctcttcctatatgaaggtgtaattgtgacttatatcttggaacacaacacacaggtgcaatgatgactttcatatgtcacaccagccaataggagagatcctgcttctcctaccgacacttagggaaatgaaaaaaaaaaaatccctgggtctcctcgttaagatcatccactctctcacatattacagaaagccctcgggtggtagagagtcttatcaca

SEQ ID NO: 743545 - DNA, 377 bp, Homo sapiens
ggattcagataagaggatctttacttggctgtaaactgggttcagaaataagtcactatcccaactgtgactggatgttcacatgtggtagttacaattccagctgtggacggcattcaggtatgaggtttagacctccctaatcacctctgttcctgtgtaggaatgasaattctgatgattggtgggtgtgcacacagagaacacaatctcacctgtgttctgggccctgtgatgacactgtaccatctgagtgctttacaggatatgcaagagtgcttattttctctgaccttcatagtaagagaagacccataattttgcacattttgtaaagcctggatatgagacaaagtatctctcctattggttggttt

SEQ ID NO: 743546 - DNA, 535 bp, Homo sapiens
taatccatcttgaattaatttttgtgtaacgtgtaaggaagggatccattttcagctttctacatatggctagccagttttcccagcaccatttattaaatagggaatcctttccccatttcttgttttagtcaggtttgtcaaagatcagatagttgcagatgtgtggcactatttctgagggctctgttctgctccatttggtaccagtaccacgtactctgatttggtaccagtaccatgmtgtgctgctataaagacacatgcacacgtgtgttcattgtggcattattcacaatagcaaagacttggaaccaacccaaatgtccaataatcatagattggattaagaaaatgtggcacatatacaccatggaatactatgcaaccataaaaaatgatgagttcatgtcctttgtaaggacatggatgaagctggaaatcatcattctcagcaaactatcgcaagaacaaaaaaccaaacatggcatgttctcactcctaggtgggaactgaacaatgagaacacttggac

SEQ ID NO: 743547 - DNA, 647 bp, Homo sapiens
gtaggaatctgcccactttatctaggttttccaatttatcatcctatcatagttcacagtacacttttttaaacattttatttctttgaattagtagtaatgtcccactttcattactcattttagtatgtgaatatgctgttaatttttcgtgtgtgtagctgaagttttgccaattgttaattttttsaagaactgagagtgaacttttggttttttggaattctgttgtttgtgtaatctctattgcatttatctctgctaaaatcttcaatactttcttctttctctttgctttgcatctaatttggtgttatttttctaatttactaggtgataaagttattatttatttgaaatctttgctctttttaaatgtatcttagctgcaaacttttcatcttaacactgtttttgctgtttcccataacttttgatatgttttgttttcatttttcttcctctgtatgttcctacttcttccgtgatttcttcctttacttaatttatacaattttgtaattctttaagttgtaattgtgtagttgtttaatttatacaattttgtaaactttctagcatttcatctgttattgatttaatttgagatctactatacagcccatcctggagaattccccatgtgc

SEQ ID NO: 743548 - DNA, 618 bp, Homo sapiens
caccagtgaagccaacaaaacaagggcttttcttcatgagaggtttttaattactgattccatttccttagtagttttctatctattcagattttgtatttctttgtaatcaagtcttgcataagtaggaatctgcccactttatctaggttttccaatttatcatcctatcatagttcacagtacacttttttaaacattttatttctttgaattagtagtaatgtcccactttcattactcattttagtatgtgaatatgctgttaatttttcgtgtgtgtagctgaagttttgccaattgttaattttttgaagaamtgagagtgaacttttggttttttggaattctgttgtttgtgtaatctctattgcatttatctctgctaaaatcttcaatactttcttctttctctttgctttgcatctaatttggtgttatttttctaatttactaggtgataaagttattatttatttgaaatctttgctctttttaaatgtatcttagctgcaaacttttcatcttaacactgtttttgctgtttcccataacttttgatatgttttgttttcatttttcttcctctgtatgttcctacttcttccgtgatttctt

SEQ ID NO: 743549 - DNA, 647 bp, Homo sapiens
gtaggaatctgcccactttatctaggttttccaatttatcatcctatcatagttcacagtacacttttttaaacattttatttctttgaattagtagtaatgtcccactttcattactcattttagtatgtgaatatgctgttaatttttcgtgtgtgtagctgaagttttgccaattgttaattttttgaagaactgagagtgaacttttggttttttggaattctgttgtttgtgtaatctctattgcatttatctctgctaaaatcttcaatactttcttctttctctttgctttgcatctaatttggtgttatttttctaatttactaggtgataaagttattatttatttgaaatctttgctctttttaaatgtatcttagctgcaaacttttcatcttaacactgtttttgctgtttcccataacttttgatatgttttgtttycatttttcttcctctgtatgttcctacttcttccgtgatttcttcctttacttaatttatacaattttgtaattctttaagttgtaattgtgtagttgtttaatttatacaattttgtaaactttctagcatttcatctgttattgatttaatttgagatctactatacagcccatcctggagaattccccatgtgc

SEQ ID NO: 743550 - DNA, 637 bp, Homo sapiens
gtgctggcctaagtgatacatcatcatccccactgtggacaggtcgcagtaagaacaggagagtcacatcattcttataatgggctcagatatacatcacaatgactcccctgggcagaaagaagggataagagtcacatcacctgtgggctaggcccagagatgtcactcttacttctgtgggcatgyctcaggctggagaggagaatcacattacctaagcactggaccaagaaatacgtcacagactttctcatgggcaaagtccaggtaagagaatagagccacatcaaatagttcatgggctcagagatatgtcactatgctccctgtgggcagggttcaggtaggacccttacattaccttggtgctggttcagcaatatgtcccaatgccttctaaggacagaacaaagacaaaagagtaaaatcattttggtgttttacccatcgatatgtcacaatcttccccgtgggcagaacctgaaaaaagggaagagtcatattagctaaatgctgcgcctagcgataagtcaaaattcaccctgtaagcagggactagacagaagatagagttacatcatctggtggctggtgcagggatacgccaccatgccctctctaggcaggatccaga

SEQ ID NO: 743551 - DNA, 543 bp, Homo sapiens
aagagctagaaaactgacaatgtcgtctgcttacggaagctctgaaagactagggtgtgatttattaacgcccaacttctattattgtgtgttaagtttttcatctgtgcatcaaatcacaaagaataaatagaacttttccctttatcagtcccttagrcacagcaggtcctgaacaccctgcttatatgttgcatcagcagttcaaatatgaaaataaaaaccatgaagaggaaatccgcatcctgtgactggagtcccttcagtctacagggactggttaccgctttttgctaataggaagattacattactagaaaatgtggagtaaactgtttgcctgtggtaaacacctgcatgcaaaggattgaagacagtaccggctcctgtacagagacgcgtctctcacatctgagctgcatattgagcggcaagttggttgtaagttcagtaaaagccgctgatgatgcaaaaaaaaaaaaaaaagtattaagtttcacaagttgttagtaatcaagtatattttctcagtttcagatcctc

SEQ ID NO: 743552 - DNA, 627 bp, Homo sapiens
gtgctggcctaagtgatacatcatcatccccactgtggacaggtcgcagtaagaacaggagagtcacatcattcttataatgggctcagatatacatcacaatgactcccctgggcagaaagaagggataagagtcacatcacctgtgggctaggcccagagatgtcactcttacttctgtgggcatgtctcaggctggagaggagaatcacattacctaagcactggaccaagaaatacgtcacagactttctcatgggcaaagtccaggtaagagaatagagccacatcaaatagttcatgggctcagagatatgtcactatgctccctgtgggcagggttcaggtaggacccttacattaccttggtgctggttcagcaatatgtcccaatgccttctaaggacagaacaaagacaaaagagtaaaatcattttggtgttttacccatckatatgtcacaatcttccccgtgggcagaacctgaaaaaagggaagagtcatattagctaaatgctgcgcctagcgataagtcaaaattcaccctgtaagcagggactagacagaagatagagttacatcatctggtggctggtgcagggatacgccaccatgccctctctaggc

SEQ ID NO: 743553 - DNA, 557 bp, Homo sapiens
ctgttagtatattttcttatctctgtttatagttaaaggaaaaagacaatggaagttatttaaaatccggaaatgcctcctaagaagagaggtcaagggattatttggagaactggcgaatttaggataattttgtastgttagagtttgctgagctctggaagccaggtgttttaaggatcacatgtctggtgtaagcacttgttcttctcttattctatttccccacctctccaccacctccccaccaaaccccagtcctgatttctgcccttctcttcatcttctggcccttttaaggtgcatgctaacagatgaagaaggaaatcaccattgttctccagtctagtagagcctgcttgattgaaattgattagctctagatgattggagtccttgtagcagcaggggttatatgtcaaatggatctccactgaaggccaaagctgttcttcctctgcagctgccaggctgcttgaaattaggcagaatgattttgcacttggataatagtcaggaattaactgcagcttacaaagcactgcataattatggga

SEQ ID NO: 743554 - DNA, 515 bp, Homo sapiens
ggtggctcatgcctgtaatcccagcactttgggaggctgaggcgggtggatcacctgaggtcaggagtttgagaccagcctgaccaacagggtgaaaccccatccctactaaaaatacaaaaattaaccaggcatggtggtgggtgcctgtaatcccaactactcaggaggttgaggcacgagaattgcttgaacccaggggactgrggttgcaggtgagcggagatcgcaccactgcacttcctcctgggtgacagagcgaaaaaaaaagcacacatgcaaatttcagaataatgggatcaaaatgccttccaaaaatttcggaagctttttctctgacaatactgaacaaggccaagtccaagtggtatgaagcaactctcaataagatgcctggcacaggaccagccgttgcttccttcctaatgtctatactcatcaagccacatgaacttgtggcttgatacttgaataactatttttaaattatttttgacctgcaggtaaaacaataa

SEQ ID NO: 743555 - DNA, 515 bp, Homo sapiens
ggtggctcatgcctgtaatcccagcactttgggaggctgaggcgggtggatcacctgaggtcaggagtttgagaccagcctgaccaacagggtgaaaccccatccctactaaaaatacaaaaattaaccaggcatggtggtgggtgcctgtaatcccaactactcaggaggttgaggcacgagaattgcttgaacccaggggactgaggttgcaggtgagcrgagatcgcaccactgcacttcctcctgggtgacagagcgaaaaaaaaagcacacatgcaaatttcagaataatgggatcaaaatgccttccaaaaatttcggaagctttttctctgacaatactgaacaaggccaagtccaagtggtatgaagcaactctcaataagatgcctggcacaggaccagccgttgcttccttcctaatgtctatactcatcaagccacatgaacttgtggcttgatacttgaataactatttttaaattatttttgacctgcaggtaaaacaataa

SEQ ID NO: 743556 - DNA, 427 bp, Homo sapiens
agaaaacatcaaggctgggcatggtggctgacacctgtaatcccagcactttgggagcctgaggtggcagatcacttgaagccaggagtttgagaccagcctggctgacatgatgaaaccctgtctctaccaaaaatacaaaagttagccaggcatggtggtgggtgcctgtagtcccagctgctccagagtctgaggcatgagaattgcttgagcccaggaggtggaggytgcagtgagccgagatttcaccactgcactccagcctgggcaacagagtgagtctcaaaaaaaaaaaaaaaaaaaaaaaaaatcagagcactgctttctcacacaattttaattattgctttgattgaaacataaatttgtcagttcaaataaagcttttaataactccactttgaatttacattagttctaagcc

SEQ ID NO: 743557 - DNA, 640 bp, Homo sapiens
cttcatccctgttgttacatgggtcagaacttcattctttttatggccaaataaaataattgcattgtatgtacatatcacatgttgttttatccattcatttgcggttggacccttacattgtttccacctttgggcatcgtgaatagtgctggggagcatattggccaaaaaagcatctggtcaagtccctgcctttatttccttaggatgtgtaatgaagagtagaatcactggttcatatggtaattctgtgtttaacattttgaggaaataccaaactgttttccacagtggctgtaccattttacatgccagccagcaatgtacaagagttccaatttctccaagtgtyagtttccttaaaaaaaaaattactgtagccactctagtaggtatacagtagcatcccattgaggttttcaattcactttttcctagtgacaggggatgtcgggcgtcctgtcatgtacttattgactacgtatatatcttgtttgtagaaatgtctatatttatcccaacacatcctttgcccacttttgagttgtccttttgttgttgagttttaggagttatttatatattctagatattaagctcctctgagatacacaatttgcaaatattttatttcatt

SEQ ID NO: 743558 - DNA, 609 bp, Homo sapiens
tctggacttaccccacagctaatagatttcaaagtaatcaatcactaatcatgactgcatttaactagaaaatgtagagtaactcacctgtaaatcatatggctttccagccctcactaaaaaactcagtaatatactggtatgtgcaaaatggacattctcatccaggaaaccatgtaagagcagtaaacgatttggtctggagaaatggaaatattagaggattaggcaaaatagtagagtatttgggaaaaccatttcacttatttaatcatacttaaccatattaacttccttatactgtaatgttagaataagaattcagtattttcaatattaaatttgtaacatattaaccagatgccacaygcaataaaagattaaaaaaagatcttgtgttcaattttttataattaaaatattagaacacatctataattatagcatgtccctagaagaactatttgtaaaatatattcaggcagacataaaattttttccaccttgaaagtcgtgtacttaacttttttcagcaaaaacaactgcttcaaatataacttgtaaagaaacattatatgaattggcctgtaattcagttttaagaaacag

SEQ ID NO: 743559 - DNA, 609 bp, Homo sapiens
tctggacttaccccacagctaatagatttcaaagtaatcaatcactaatcatgactgcatttaactagaaaatgtagagtaactcacctgtaaatcatatggctttccagccctcactaaaaaactcagtaatatactggtatgtgcaaaatggacattctcatccaggaaaccatgtaagagcagtaaacgatttggtctggagaaatggaaatattagaggattaggcaaaatagtagagtatttgggaaaaccatttcacttatttaatcatacttaaccatattaacttccttatactgtaatgttagaataagaattcagtattttcaatattaaatttgtaacatattaaccagatgccacacgcaatraaagattaaaaaaagatcttgtgttcaattttttataattaaaatattagaacacatctataattatagcatgtccctagaagaactatttgtaaaatatattcaggcagacataaaattttttccaccttgaaagtcgtgtacttaacttttttcagcaaaaacaactgcttcaaatataacttgtaaagaaacattatatgaattggcctgtaattcagttttaagaaacag

SEQ ID NO: 743560 - DNA, 531 bp, Homo sapiens
atttgctgtgaacttacagaataggagaccatcatttggactgtacaatgtttgtacatgtacacgcaagtatgcatgtgtatgcatagagtgtccagggcttagtacgattcaggaataccagataatttaaatgtaagctaatgtacattttgcataagaaagatgtgacgtgaataataagaagctgggcatggccaggcscggtgactcacacctataatcccagcctgtacaacatagtgagacccccatctctacaaaaaagttttaaaaaattagccaggcatggtgatgcattcctgtggtcttagctgctcaggaggctgaggcataaggatcctctgattccaggagttcaaggctgtaccactgcactgcagcttgggcaacagtgagacttgtctaaaaaaaataaactggacagtaaggcttgggaggaggtctttctgttgagcttccctattctgttccccagccctattcttgcaagcactggtttgcaggtgaacttccaaacgtaacacaaga

SEQ ID NO: 743561 - DNA, 628 bp, Homo sapiens
agtcatccccctcttttacccctattcctccaggtttaacccttgacttatccggatctagttgctgtgacaataagtctgcatcctctgggaaagagcccagggtgggggtaaggggtgttgaggcacattcaggaaaccaggtggtcagcagtggggggtcacactcgcccacggaggagccacacccatggctgtgrgttaaatgaagttgaataattatccttatgttgggatctccaagtactagcccagacacacacaggacacaaaggtggtcccaggcttcctccttaggggctcacaggctgatgggagagactcagaccctaccttgaggggaccttcttccaaggaagggaaaatagccttgtcacagggcattctatagtccaatgcaggaagacgcttcctctactcgagggaaaatccgcagtcagggaggagatatgtctcccagtaggacaagagagactgtacatctggcccaaaggctcaaaaaccagagatactgtatagaaacaaaatcaccccatttcatcaaacctaaggtgccactgatcgtaagatgcatcactgtttcatatgctgcaaagaatgaaaaacactggcaattaaactatgacat

SEQ ID NO: 743562 - DNA, 615 bp, Homo sapiens
gttcttttgctctctgataagcttggtccccaaaattgtgaaaagatgtgaaaaacaaccatgtgcatccaactgaataatgaaacactatcttctccagcaggataactagagtttgtgagggctttaaaaaaaagccatacctcaaaatggtcacagagtatattaacagacctaaattagttagccctggtgatcattgtatactcctgagtatctaacaaatctttgaattcttattttaaaaattattttcaatcttagttcttgaaaacaaatctggattgcygtcagcctttatccattttaagaattgattttaagtgatgataaaagaaaaattttagctgaattaaatttaagggagtttgattgagcaatgaacacttcacaaattgggcagcctcctgagccaggggagtggaagaagatttattgacagaaaaaggaaagtgatgtacataaaacagaagtgaggtacagaaacagctggattggttagctgagcgtttgcgttatctgaacatggtttgaacagttggctatatttgattggcaaaattcagtgattggcataagggtaggctaaggtctgtttacacctccacttgttat

SEQ ID NO: 743563 - DNA, 631 bp, Homo sapiens
ggctaatatatccctccctaataagggtgtgggattttcatgcataacaaggaaggaacatgaaaagagcaaagtctcccaattacaactgaggaggtgagcagaaccctcagagttatgttgcctaagcgagagtcaaccatctatcctatctatcctgacccttgccccctgggtcctaacaactgtcagacaaacttcctcccrcctctcttctccaaggttagtcccacttctaaataccactccctgtccctgtgctcttctagcttctcttatacaaatgatttctagtatacattttgggactctgttcccttctttaggcacatgggctcaccaatcagaaagacataatttttgcccaaagccccagcatagtgggtagtggggcaggtggactatctggaattttaggatccctccttagtctagcaggcctaacaaaggctattcctgaagctaggatatggggaccctcagaaattatagactcccaaattaggagaatatccttcctattcatatgataagaagtgaggacaaaaggcgtcactcttccaaccctggagatcccttccctccctcagggtatggccctccactccattttgaggcatatcatctttat

SEQ ID NO: 743564 - DNA, 673 bp, Homo sapiens
gcttcaggaatagcctttgttaggcctgcttgtctgaggagggatcctaaaattccagatagtcccccgacaatggggctttgggcaaaaattatgtctgtctgattggtgattctgggtgcctaaagaatggaacagagtcccaaaacttatagtagaaatcactcttataggagaaactagaaaagcaccagaggcagggagtggtttgtagaagcaagactagccttggagaagggggatgagggkaagttggtctcacaggcattaagacccaggagacaagggtcaggatagataggatagatgggtgagtcttgcttgggcaacgtgactttgagagttccgcttatggatgcagggtcaaccaactttttgtcaggaccccagaagtgaatggctttcctctctgttgacccttggctcagcctggacgtacaggaaaagtggaagctggttccaggcaaaccaacactcccaactccaaagagttaggggttgttagagagccctttcaaagaaatcctgacacccatgtctttagtccagcagccgcgctagtcacttttaactgatcagcagttgccctgtgtttagcccccaaattctaaggaaaaataggacagaatagcaagcaaaaggggtccgatgatactcaccacgtggtggtatt

SEQ ID NO: 743565 - DNA, 590 bp, Homo sapiens
ctctctttttgtaaaatctgcaggtggatatttggagccctttgcaccccatggtggaaaaggaaatatcttcaaataaaaactacatggaagcattcatagaaacttctttgtgatgtatgcattcaactcacagagttgaaactatcttattattgagcagttttgaatctctctttttgcagaatctgcaactggatatttggagcgctttgaggcctaacgtggaaaagcaaatatcttcmgataaaagctacacagaagcattctgagaaacttctttgcgatgtgtgcattcaactcacagagttgaaactttcttttgattgagcagatttgaaatactctttttgtagaaactgtaagttgatatttggagccctttgagtcctattgtggaaaaggaaatatcttcacataaaaactacacggaatcattctgagatacttctttgtgatgcttgcattcatctaacaatgttgaaactttcttttcattgagcagttttgaaacactctttttgtagaatctgcaagtggaataattggatccctttgcgccctgtggtggagaaggaaatatcttcaaa

SEQ ID NO: 743566 - DNA, 600 bp, Homo sapiens
tttctgagaatacttctgtctagtttttatatgaagatattcccgtttccaacggaggcctaaaagcagtaaaaatatccactggcagaacctacgaaaagagtgtttctaaactgcactttgaaaagttatattcaactctgtgagttgaatacaaacatcacaaagaaggttctgagaatgcttctgtcaagttttcatgtgaagatgtttcctttcccaccacaggtcttaaagatctcgaaatatccacttgaagatcctacagaaasagtgtttgaaaactgctctatcaaaagaaaggttcaactctgttagttgaatgcactcatcacaatgaagtttctgagaatgcttctatctagtttttatgtgaagatatttcatttccaccataggcctcaatggattccaaatgtccacttgcagatactacaaaaagattgtttcaaaactgctctatctaaagaaaggttcaactctgtgagttgaatgcacacatcacaaagtagtttttgagaatgcttctatctagttattatgtgtagatattcccgtttccaacgaaggcctcaaagcagtccaaatatccactggcag

SEQ ID NO: 743567 - DNA, 534 bp, Homo sapiens
atttcttttttgaccataggcctcaaagcactccaaatacccatttgcagattctacaaaaagagtttttccaaactgctcaatcaaaagaaaggttcaactctgtgacacggaagcccacgtcacaaagaagtttctcagaatgcttctgtctagtttttttgtgaagatgtttcctatttcaccttgggccatatagggctcaaaaatattttttgcagattctacsaaaagactgtttccaaactgctcaatccaaagaaagttttaactctgtgagatgaatggactcatcacaaaaaagtttatcagaatgcttctgtctagtttttatgtgaagacatttctttttcaccctaggcttcaatgggctcagaaatatccctttgcagattctacaaaaggacagtttccaaactgctcaatcaaacaaaggttcaacactatgagatgaatgcacacatcacagagatgtttctcacaatgcttctattttttatgtgaaggtatttcctttttcacaatgggcttcaa

SEQ ID NO: 743568 - DNA, 609 bp, Homo sapiens
gattttacaaaaagactgtttccaaatcttcaatcaaagaaatgttcaactgtgtgagatggatgcaaacgtcacaaagaagtttctcagaatccttccgtctaatttttacgtgatgatatttccttttttaccataggcctcaaagtgctccaaatatccatttgcagattctacaaaaagagtgttttcaaattgcccaatcaaaagaaaggttcaactctgtgagatggaagcacacatcataaagaagtttcttagaaacattctgtctagtttttatgggaagatatttcatatytcaccataggcctcaatgggctcagaaatatccctttgcagattctctgaaaggactgtttccaaacttttcaatcaaaagaacggttaaactctgtgagatgaatgcacatatcacaaagaactttctctgaaatcttctgtctagtttttatgtgaagatatttcctttttcaccataggcctaaagccactcacaaatatccctttgcagattttacaagaacagagtttccagacttatcaaagaatagaaacttttatctctctgagatgagtgcacatcttacaaaacagcttctcagaaaa

SEQ ID NO: 743569 - DNA, 615 bp, Homo sapiens
ttcagaaacttctgtcaagtttttatgcgatgatatttcctttttcaccataggcctcaaactgctcacaaatatccctttgcagattctacaagaaaagagtttcccatctgctcaatgaaaagaaacgtttacctctgtgagatgaatgcacacattacaacgcattttctcagaaaccttctgtctagtttttatgtaaagatatttcctttctcaccataggcgtcaaagtgctcacaaatatccctttgcatattctacaaaaagactgttaccaaactgctcaatcaaaagaatggttcaactctgtgagatgaatgcacacatcacaaarcagtttctcataaaccttctttctagtttttatgtgaagatatttcctatttcaccataggcctcaaagcactcacaaatatccctctgcagattctacaaaaacactatttccaagcatttcaatcaaaagaatggtttaactctgtgagatgaatgcacacatcacaaagtagtttctcagaaagcgtctgtctagtttttatgtgaagatatttcctttttcaccataggcctcaaagcactcacaaataccactttgcagattgtacaagaaca

SEQ ID NO: 743570 - DNA, 401 bp, Homo sapiens
cagcatgtgcatgcagggaggaaagcaattgagggcatcatcttgaagactatcatatcacaccattattccaactaatgaacatgatgttttggatgggtagtactagctactcatctctcccccagaaacccaactaagcatggacatattgaagagaatgtcagcaccattaaaaaaaaytctagaaaaatcacatgtgatgactgaggttaattcagtctgtcaattacatcaatataattcccttcttgtaaccctaaatatggtgaagcagaattgaattctacaaaagtctttcatctgttttcctgtggaataattaacaaacccaatgaatgtataaataacatggtctgatttattttagatttttacctcttaatttcaaagcttataga

SEQ ID NO: 743571 - DNA, 605 bp, Homo sapiens
cttggaaccaatccaaatgtccaacaatgatagactggattaagaaaatgtggcacatatggaccatggaatactatgcagccataaaaaatgatgagttcatgtcctttgtagggacatggatgaagctggaaaccatcattctcagcaaactatcgcaaggacaaaaaacagacaccgcatgttttcactcataggtgggaattgaacaatgagaacacatggacacaggaaagggaacatcacacaggggcctgttgcggggtgggggaggggggaaggataatattaggagatgtacctaatgctaaatgacgagttaatgggtgcagcaaaccaacatggcacatgtatacatatgtaacawacctgcacgttgtgcacatgtaccctaaaagttaaagtataataataataataaaaaaagtttagtcttttgctgttttttagttgggtattataattattattgtttagcttctgatttgtatgagtttctgctatattttgaatactaacctcttatcatatatggtttgcaaatattttatcccatcttaaatgttttcttattttttgctgtgcacaataatttaatacactac

SEQ ID NO: 743572 - DNA, 620 bp, Homo sapiens
tgcagacataaatgtccctgtcccacagctttgaagagagtagtggttctcccagcgcacagcttgagatctgagaatgggcagactgcgtcctcaggtgggtccctaaaccccgagtagcataactgggaggcacccccmagtaggggtggactgacaactcacatggctgggtatgcctctgagacaaaacatccagaggaacaatcaggcagcagcatttgcagttcaccaatatccactgttctgcagccaccgctgctgatacccaggtaaacaggatctggagttgacctccagtaaactccgacagacttgcagctgagggtcctgactgttagaaggaaaacaaacaaacagaaaggacatccacacaaaaaaacccatctgtacgtcaccatcatcaaagaccaaaggtagataaaaccataaagatggggaaaaaacagagcagaaaactggaaactctaaacatcatagcatctctcctcctccaaaggaacgctgtgcctcaccagcaacagaacaaagctggacggagaatgactttgatgagttgagagaggaaggcttcagaagatcaaattactccgagctaaaggaggaagttcaaaccaatg

SEQ ID NO: 743573 - DNA, 620 bp, Homo sapiens
tgcagacataaatgtccctgtcccacagctttgaagagagtagtggttctcccagcgcacagcttgagatctgagaatgggcagactgcgtcctcaggtgggtccctaaaccccgagtagcataactgggaggcacccccaagtaggggtggactgacaactcacatggctgggtatgcctctgagacaaaacatccagaggaacaatcaggcagcagcatttgcagttsaccaatatccactgttctgcagccaccgctgctgatacccaggtaaacaggatctggagttgacctccagtaaactccgacagacttgcagctgagggtcctgactgttagaaggaaaacaaacaaacagaaaggacatccacacaaaaaaacccatctgtacgtcaccatcatcaaagaccaaaggtagataaaaccataaagatggggaaaaaacagagcagaaaactggaaactctaaacatcatagcatctctcctcctccaaaggaacgctgtgcctcaccagcaacagaacaaagctggacggagaatgactttgatgagttgagagaggaaggcttcagaagatcaaattactccgagctaaaggaggaagttcaaaccaatg

SEQ ID NO: 743574 - DNA, 606 bp, Homo sapiens
cgcttaaacccgggaggcggaagttgcagtgagctgagatcgtgccactgcactccagcctgggcaacagagcaagactctatctcaaaacaaacaaacaaaccaacaaacaaactacatgatgaaccaatcaaatatagtaactacaactttttaaggcatagacagtataataagatataaatagaaacaacaaaaagttaaaaagcagaggattcctgtagtcctagctactccggaggctgaggcaggagaatggcgtgaatccgggagggcggagcttgcagtgagccgaaatcatgccactgccctccagtctgggcgacagagtgagactccgtctcaaaagaaaaaaaaaagcggaggataaagttaaaatgtagagtttttattasttttccttttgtgtgtttatttacagaatcaatgttaagttgccatcaatttaaaataatgggttataagatagtatttgcaatctccacagtaacctcaaattgaacaacatacaatgaatacactaaaaacaaaaagtaagaaattaaattataccaccagagaaaatcatctgcactaaaaggaagacaggaaagaaggaaggaagga

SEQ ID NO: 743575 - DNA, 574 bp, Homo sapiens
actcatccctgttcccttccctacggcaagcaagaagtcagccctccaactgaagagattctttggcaatagttatcagaagaaaatttttcatagccaatacatctgagtagtctctcattttctctcagtcacmttctaggttttatttcctccttagtcatttgtttacatggctgctgtctgccttctcaccctcactaaaatgccagccccacaaaggcagggcttttcacccctgtccccagtaccaacatatagtagatgctcaatacatatttaatgaataaataaaaccaacatgacaaccaagacaggtgatttttcatcagtccataagtcttctaatagggaaatgaagatacgtacataaaattgttaagtacattaaaccaattttgtctccagtcttgatgaatactgatatttatatattgtccactccccataccaggaaactatttttctcaagggaagccactagatattattactacatatactataggtaacataaaacatgttatgttttatatgtaatttctagtatgaaccacagtatataagaagagtt

SEQ ID NO: 743576 - DNA, 584 bp, Homo sapiens
tagattgtttcaaatttgaactactgtatcaattgggctattagtatccacaatatgcaattttgtgcacttgtttaataactcttagcataaatatttacaagggaaatttctgggtcaaaggtttgggactttttttaggggtggagaggtggttgtttttgttttgagacggcatcccactgtctcgcccaagctggagtgcagtggccyagtctcggctcactgcaacctctgcctctcgggttcaagggattctcatgccccagcctcccgagtaggtgggattacgggtgtgtgccatcacacccagctaatttttgtatttttattagagacagggtttcaccatgttaggtaggctagtctcaaactcctggtgtcatgtgatctgcctgccttggcctcccaaagtgctgggagtacaggtgtgagccactgtacctggtcaaagggttttaagtttacaaattttgacacatcatgcccacttaacctccagaaatgtaccaattcacaattccaccaaaaatttatgaaaaggtgctcatttccccaccccattctctttactgaatgtatgc

SEQ ID NO: 743577 - DNA, 534 bp, Homo sapiens
ttctaaggtacatatgctactcctttcctaagaatgacaactacaaattacttacattggatattcattgttttggtgtgacccaatatgtacacccaatctgtattctttaccggtcaaagccattagcccagtctctcttcacatagccatgtttcaaggccatatcccacacttttagtcatacattcaagcatatagtgataagagggccaaaccatggtggttctgcccatttttcctggcttggctataccaagaaaagttttgtcactcttaattgagtattgtctgagttgtgatttccttcacttactactctaacatatctgtcttcatggatatcaacaaaytttggtccaagaaatctggtaataaattccaagtgttaatggggaatgccttttcaccctgctctcatattcctattactgaagagcaatctggtttcagggtaggagaagataaaaagagcctgaggggaaataaactcaccatgatagaggaaagaaaccagctgtatttcaaggactt

SEQ ID NO: 743578 - DNA, 608 bp, Homo sapiens
tctataaggcacttaaacaaatttacaagaaaaaaccaagccctttaaaaattgggcaaagaacataaacagacacttttcaaagaagacatacatgtggtcaataagcatatgaaaaaaatgcaatatcaccaagcattagagatatgcaaatcaaaaccacaatgacataccatctcacaccagtcagaatggctattggtaaaaagtcaaaaaataacagatgctggtgaggttgcagagaaaatggaatgtttatacactgttagttggagtgtaaattagtttgaccattgtggaaagcagtgtggcaattcctcaaagagctaaaaacagaactaccattcaacccagcaatcccaatgctgagtatatacccaaaggaacgtaaataattctaccatgaagacacgtggacacacatgttcaytacagcactatttgcaatagcaaaaacatggaatcaacctaaatgcccatcagtggtagaatgggtaaagaaaatgtggtacacatatgctatggaatactacacaaccatgaaaaataacaagatcatgttctttgcaggaacgtcgatggaactggaggccatcatccttaacaaa

SEQ ID NO: 743579 - DNA, 608 bp, Homo sapiens
tctataaggcacttaaacaaatttacaagaaaaaaccaagccctttaaaaattgggcaaagaacataaacagacacttttcaaagaagacatacatgtggtcaataagcatatgaaaaaaatgcaatatcaccaagcattagagatatgcaaatcaaaaccacaatgacataccatctcacaccagtcagaatggctattggtaaaaagtcaaaaaataacagatgctggtgaggttgcagagaaaatggaatgtttatacactgttagttggagtgtaaattagtttgaccattgtggaaagcagtgtggcaattcctcaaagagctaaaaacagaactaccattcaacccagcaatcccaatgctgagtatatacccaaaggaacgtaaataattctaccatgaagacacgtggacacacatgttcactacagcactatttrcaatagcaaaaacatggaatcaacctaaatgcccatcagtggtagaatgggtaaagaaaatgtggtacacatatgctatggaatactacacaaccatgaaaaataacaagatcatgttctttgcaggaacgtcgatggaactggaggccatcatccttaacaaa

SEQ ID NO: 743580 - DNA, 590 bp, Homo sapiens
tattctaggattcctttatattctttaaaattattgggatcctcaaagacctttttcttaaaaattatatctattttcacttttcatattacaacttaaaactgacaaattaaaaatatattaatttatcaaaaatagattaatcacatgtcaacactaatttgtagtactgacactacattttacatttcataaaataacatattttatgaaaaacaaatatccaaaattwaaaaagtatgatattaatattatgtttttgtagttctcttgaaagtctagtttaatggaagctggttaaattatcttatttgtttgcattcaatttgctgtgatttattgttttgattgaagtatatgaagaaaatttggtattacatgaatatatagctgagagaaaaaggaatattttaatagcctttttggatgatagtggatattctcttttaatattacaccaaaacttgtagagtggtagctttttaaaggttaatggtaatgtgaaattttaaagtgtatcagtgaatttttacattcaattacattaaatctgtcttgcttttggaatgcatattttaccaatgcatttt

SEQ ID NO: 743581 - DNA, 601 bp, Homo sapiens
atggtttttgattgtttttcttttgtttgtcaattcacctgagtccaagccctatcaatccattctatagagttcttggtttataactttaattagtccccaatgtcatattagcagtggatttgggggattgtagtattttgtaagaaaatgtgcaaacaagaaagaaaaataccttcttttgtctaaaaataaatctctactgcttaaaggatctaggtttccccccttcttcaactcccttctttccttctttgtcctcttccctccttcccttcctgttttcctcctgttcatttgtttgatttggtttcttttatttgttagaaaacggagatattgctcaatgatagcagataagttagtgtcattaaaaatgtttaattattcttcataaacagattaaaatgttstcaatatataatgtaaattgtcatttaacttaaaaaacacaaaaatccccatgcaattaaatgtactatatactgtctttgaccctatattatttggaagaagatctgcattctgtctagttacactgctgtgaaatttcacgttgtgatattgacaaaattccttaatatctctgtatccaggcttc

SEQ ID NO: 743582 - DNA, 619 bp, Homo sapiens
aaccatattctcagacagcacatctcttagtatttagctagtccagagcttaccacccacaaaatagatataaaataggggagaaaattatcctttcatttaaaaaaaaaagctcttttataatatcaagtattttctaaggaacatgasttctgacaattcaaagtttctttgttctgctgcactttgacgagtttgggattgcaagttgtcctcaggagctagtagctaaatttctatgcaaaattgagggaaaaacttagagctgaagaggacaatgtgtgaaggaggagcagaggaggagaaggaatgagagacataagcaagccggcaaattgggaattacatgagaaagtgcctcccgtcacccatcccttagccctgtcatcttaagattattagttcatagaatttgtggcatgagtatatttctggtggaaactgaagaaaaggataaaaaataagcttatgcgtacataggagtgagaagtagggaagaacatgagagtcaaagtccactgagatgagtagcaatcctcagaaatttggatttcttaggcatggaatgaactggcattgaaaccaatcacctctaaatctctgagaagcagagaaacct

SEQ ID NO: 743583 - DNA, 553 bp, Homo sapiens
aggagggtacattctactagaaaagtcaaatacagaaatatctataatttagagatgaaaattccataagaggcacacaaatatattaaggcgttttagcacagacagaaagacgcatacctttgttcattaatcatatatgggttctcatttctcagagaaatagtcgacataaagttccaagccatgggcaggattttcaatgtgccattgccttctcatgacatcctgtaaagttaacttccatcagaaaagtaaacatagcaggggaggtaatgggtttctgtcagggaaagtgtggagaagccagaaggstaagtgctatatcaataataaatgtgtatgaatacactatggcttgtaattaaaccaggctttcccaagagtcaatagggttcttcagaaacatgattatctttgccaggatactgctgtgctggtgtaagaatgcagctgagattttttgatggattatactagtacatcactttatatttcctcaactaaattcacacttatgatcaaattcacatctaaaattaactattgcatt

SEQ ID NO: 743584 - DNA, 545 bp, Homo sapiens
tctgtcgcccaagctgtagtgcagtggcactatctcggctcaccgcaagctccacctcctgggttcacgccattctcctgcctcagcctcccgagtagctgggactacaggcgcccaccaccatgcctggctaattgttgtagttttggtagagacggggtttcaccatgttagccaggatggcctggatctcctgacctcatgatcctcccaccycggcctcccaaagtgctggaattataggcatgagccaccgcacccagctaaaagtgtcttcttatctacaagaggctgactaccaggtcttcaaaaagaatcctcttttgtgacttcttctggcagaaaatttgactaatgtcattttaacttatagtagctttgccagaagaatgtacccctgaaaatcagaagattatctgtattgactgtaggctatgaaatctatctcctagagctcactagtcaaatatggctcaagctttcagtgagagagaatcagtatgcaaatcggatcacttacatataataagtcagtctatttctag

SEQ ID NO: 743585 - DNA, 556 bp, Homo sapiens
ccctagagcacacagcagagggatcctgggcccagcccgtgaaaccatttttttctcctagctctccctgcctgtgatgggaggagctgctgcaaaggtctctgacatgccctggaggcattttccccattgtcttggcgattaacatttggctcctagttacttatgcacacttctgcagccaacttgaatttctcctcagaaaatgggattttcttttctatcatattgtcaggttgcgaattttccaaacttttatgctctctttcccttatgacattgaatgcctttaatagcacccaagtcgcctcttttgctktgctgcttagaaatttcttccaccagataccctaaatcatctctctcaaagttccacacatttctaggacaggggcaaaatgccatcagtctgtctgcttaaaacataacaagagccaccttttctccattttccaacaagttcttcatgtctgtctgagaccaccttagcctggatttcattgtccatatcattatcagcattttggtcaaagccattcaacacgactttagggaa

SEQ ID NO: 743586 - DNA, 640 bp, Homo sapiens
tcacataacataatgtcctccaggctatccatgttgttgcaaaggacagaatttcattatttttatgggtgaatagtattccattgtgtgtgtgtgtgtatatatatatatatatattccattgtgtgttatgtatgtatagtattccattgtgtgcatatatatgtatatatgtgtgtacatatatatatacataatatatattcttctgcacatggaaatccagtttctccagcatgatttattgaagaggrtatcctttccccagtgtatgttcttggtgcttttataaaaaatcaggtgacctcagatcagacccaactacatcataccttctttcgaaatgtgcaagaaacctactagaaattcttattgttagagtttcagatttatgtcctggtttatactgccacattcattcttggaggtgagtacatttcgatcttggtccggctgcgcagagagtcaaagcaggaaaatcacagattcttcccagcagtctacagcctacacagcggcatttggtgcgatgggatggaacatgctgtatctctattccatgtgggggtaaagtgggtggcctgaaatttcctgtgtctgcctgcatgatgcaaagctcacagttcagaagcttaaggac

SEQ ID NO: 743587 - DNA, 506 bp, Homo sapiens
tctttttttttttttttttttagctgtcttattttgctttccattcatatttgctattccatcactggttgttcctttctactcttttcttgtttcatttattttgatcagtgatgtgtatttccaattctgtgaaagtttaattcagttgtatgtgtggtaaaatgtaacaccaaatcctttgcaagaaggaattaccttgcacatcagattgaacattgtatacttgaaaatccagagagatgccagtgagctaaggatcaaatgacctattattaaccaagrccattttcatcacatcctggtcctctctgtcacatggctgcttacatttctctgtggttttctttcaatgtaagtagttcttgttaaggatccttgcaatgaactttggtattcttttctctttcatttttataaataccaggtatattttaatttgaaaactctgtttaacaaattacaatcatgtaactaaaaagatgcccagcactggtgtaaaacac

SEQ ID NO: 743588 - DNA, 564 bp, Homo sapiens
gatttatgtaatgatcatataaattctgttaaggctcagggagcttttcagagtagctcctctctctgtgtgatgacctctttctctgtgatgagaggtgaggtcacttgcttcttgtggtatttccatttcaacacatggtttctacagttgcctgttatagagaagataggytcttgaatgtctcagcctggagctgacctgaatttcttctacttagttttcactgcctagaaccaggtttctcaactatggctggggtgaataatttgttttgggggactctccttgcactgcaggatgcatgccagcatccctggtgtctatacaccagataccagaggtgtcccctctggctgtgataaccaaagatatctctagaggttggggtgagggcagcagtgaatggaaaaattgcttttggttgaaaaccgctgaaccagaggtagtcatttagttctaactgcaaggttgttgggaagagtggtcttcttgtgtttacaggaaggtgaggaaaatcagacatggatatgcactagtagactgcaacatattagctaacgg

SEQ ID NO: 743589 - DNA, 646 bp, Homo sapiens
aaaatgtctgtaagatgacacagctatattttctgggagagggcgggaggatgctcagcgagggtggcccggagtgtccttgtacagagtacagatgttatgaagtggggaagaccagcctgtgttcattgattcacctattgattccaggagcaagctcaccctgtttcatacactgctcaggaggtaaacaggaggaagggagccagcctggcttttttgccacatgctctgctgtttggtagaactgtattatagtcagaaaccttccgcttttctgcagttgtttgcatgctgtttccaaggctagccctctgagtctgttttctagagttgttttgaaattcaacctaaagataacagaggaaatgtgaccctctcttgtgaatgctgccaccaactggcaatgtttcttcccaaggcakattcagggttctggcatgagttgtcacaaatacagtggtggttgctttgagagaaaggtgcttacaacctgacataaatttgctttgcatgaaactttaaggaaattaatagaagtaagattaaacaaagaaattttgatagtgagtgactaagagcaatatcagatgacaaatgagggaagagaacattaataagtgcaatactttattttttatggttg

SEQ ID NO: 743590 - DNA, 601 bp, Homo sapiens
  misc_feature 422: n = A,T,C or G
tataaaacctcacgtaaagtctctgcaaagagtacatgcaccacgtgcaagagttctttagtgagcctttatttagagctcttgaatcttttactcaatgtcttatgtcagttttgaaaaattccaagccatggccgggcgcactgtctcacgcctgtaatcccagcactttgggaggccgaggcgagtggatcacgaggtcaggagatcgagaccatcctggctaacatggtgaaaccccgtctctactaaaaagtacaaaaaaaaaattagcagggcatggtggtgggcgcctgtagtcccagctactcgggaggctgaggcaggagaatggtgtgaaccctgaaggcagagcttgcagtgagccgagatcacgccactgcactccggcctgggcgacagagtgagtctccatctcaaanaaaaaaaaaaaaaaaaaagaaaargaaaaaagaaaaaaagaaaaagaaaaattccaagccattatcccttaaaattttgcttctaccctatccttattcagtgcttcttcttggacttcagaacaaaatgttagatttttcattaagttgtgtatagctattatactcatttctttttc

SEQ ID NO: 743591 - DNA, 646 bp, Homo sapiens
atttttttcaccagacaatgtaaatcttcgcctttcttcgatcttccccgtccccaccgctggccaccactctcatggctctgccaggcctcccttccccgagcaggtgatacttttgcacacacgcgtctgcacctaggagcaatctaaagatccctgattatagatggggaaaaaacagtctttgtcagtgccctttgtggttggtgtggccaatgagtctggctggaatcctggggggctgtgaagacaccactttacagggggctgacccaaataagacccacatccttctggtctgctcattcccatcaccccacttaaaatgcagactgatgacacagctctatagctaccatgtcaccttcaggatgggagccacaggctgaggaagtcaggacagagacaggagccaaatccctgaggtctcagggaagcctccgttttgctccttgaatgaccaccctcagamttgttgatgtgagcaatgaaagttcaatctgttcaagcctgtgctgttgggttcctggccgacaaatgcaacttataaccaacacaccaacaaattgccctccaggcaggctgtgacaaagggcaatacccctccattcttccaaatccttgagagtttaaatctttccattct

SEQ ID NO: 743592 - DNA, 657 bp, Homo sapiens
cccagctaatcaggaggctgaggcaggggaatcacttgaacccggaaggtggatgttgcagtgagcctagatcgtgccaccgcactccagcctggggggcagagcgagactctgtctcaaaaaaaaaaaacaaaaaacaaaaacaaacaaacaaagaaaattggaatctaaagtgattcctgagtggggcagcaaggatggctgctgatgtgctgtgtgrtctgggagaagtggggcagtaggagaggtggacggaaaacctgatggcgtcttccatggcgtatttactctttacttggtgccagaacaaatgaaacaagccctcgtacaagctgttattaattgcctttaaaaatcttttccattttttccccaggtacttaaaatacaagtgccagtaagcagttcttatgtatttttggggaaaaaaatttattttccttttcttctgatattttaaaaattcattgatctttcaagatgaaccaaagtttcttaaaagaattatagtacacacttcattctttataaaactttctataatgccttatttaaatgttaatcgtacgtgctttctaaaaatgttgtgaactaccaaacttgtggattatcactaggttatcaggcatacattagtctttatcagaataaaatgaa

SEQ ID NO: 743593 - DNA, 549 bp, Homo sapiens
actgacacataaaattaaccatcgtaaagactaaaccaacaaaaggaacagaaatgtgacctttttttttgaaaccataacactcactctgtgagtcaggcagtttttctggtaacccgaactctgtccccctctcccttcctgacacttgtgtcctacggtggccttgtgtgtgtgcccctgtccccctccwcccttcccagcacttgtgtcctatggcggccccatgtctgtgccccgtccccctccacctcccgccacttgtgtcctatggcagccccgtgtgtgtgcccctgtccccctcggcctcctggcacttgtgtcctatggcggccccgtgtgcgtgctccagtgaggggttgaacacgtcatgccttcaagggcggagtgagctgcagtgtatagtgggattggggcagtcaactgttctcctagctgcctgttgcagacctgcagggctagctctgggtctagacacaatgtccagagtctttgaatgaatattcacatctcatctaagaagggacaggactaagatatcagcaatgg

SEQ ID NO: 743594 - DNA, 549 bp, Homo sapiens
actgacacataaaattaaccatcgtaaagactaaaccaacaaaaggaacagaaatgtgacctttttttttgaaaccataacactcactctgtgagtcaggcagtttttctggtaacccgaactctgtccccctctcccttcctgacacttgtgtcctacggtggccttgtgtgtgtgcccctgtccccctccacccttcccagcacttgtgtcctatggcggccccatgtctgtgccccgtccccctccacctcccgccacttgtgtcctatggcagccccgtgtgtgtgcccctgtccccctcggcctcctggcacttgtgtcctatggcggccccgtgtgcgtgctccagtgaggggttgmacacgtcatgccttcaagggcggagtgagctgcagtgtatagtgggattggggcagtcaactgttctcctagctgcctgttgcagacctgcagggctagctctgggtctagacacaatgtccagagtctttgaatgaatattcacatctcatctaagaagggacaggactaagatatcagcaatgg

SEQ ID NO: 743595 - DNA, 549 bp, Homo sapiens
actgacacataaaattaaccatcgtaaagactaaaccaacaaaaggaacagaaatgtgacctttttttttgaaaccataacactcactctgtgagtcaggcagtttttctggtaacccgaactctgtccccctctcccttcctgacacttgtgtcctacggtggccttgtgtgtgtgcccctgtccccctccacccttcccagcacttgtgtcctatggcggccccatgtctgtgccccgtccccctccacctcccgccacttgtgtcctatggcagccccgtgtgtgtgcccctgtccccctcggcctcctggcacttgtgtcctatggcggccccgtgtgcgtgctccagtgaggggttgaacacgtcatgccttcaagggyggagtgagctgcagtgtatagtgggattggggcagtcaactgttctcctagctgcctgttgcagacctgcagggctagctctgggtctagacacaatgtccagagtctttgaatgaatattcacatctcatctaagaagggacaggactaagatatcagcaatgg

SEQ ID NO: 743596 - DNA, 549 bp, Homo sapiens
actgacacataaaattaaccatcgtaaagactaaaccaacaaaaggaacagaaatgtgacctttttttttgaaaccataacactcactctgtgagtcaggcagtttttctggtaacccgaactctgtccccctctcccttcctgacacttgtgtcctacggtggccttgtgtgtgtgcccctgtccccctccacccttcccagcacttgtgtcctatggcggccccatgtctgtgccccgtccccctccacctcccgccacttgtgtcctatggcagccccgtgtgtgtgcccctgtccccctcggcctcctggcacttgtgtcctatggcggccccgtgtgcgtgctccagtgaggggttgaacacgtcatgccttcaagggcggagtgagctgcagtgtatagtgggatyggggcagtcaactgttctcctagctgcctgttgcagacctgcagggctagctctgggtctagacacaatgtccagagtctttgaatgaatattcacatctcatctaagaagggacaggactaagatatcagcaatgg

SEQ ID NO: 743597 - DNA, 479 bp, Homo sapiens
agctcgggcagcgccaggagcacaaatggccctgctctcccccttccctgctgctgccgtggcaactcctcctcactcggccccgtctttcctgctgtgcctccctttttctctccctctgcctctgtctcgtcatctccttgtctgtctctgtagctcctctctccctctgtctttttctgtctctcatagtcactctctcagtctctgtagccctcgtcctcctctctgtctgtgtctctctctgtctctgtttctgtagccttcctccctctcagtctctgtttctctsattgtctcttcctctgtctctgtttctgtagccttccttcctctcagtctctgtttctctcattgtctcttcctctgtctctgtttctacctctatctcagtctctagctctctctctcactctctctctctctccctgtctccctccctcccctcctctcctgttttacacctaacccttttctaa

SEQ ID NO: 743598 - DNA, 533 bp, Homo sapiens
accaccatggcacacgtttacctgtgtaacacacctgcacatcctgcacacgtatcctggaacttaaaataaaataagataaaatgaaacaaaaaagacttgaaacaaagcctctaccacatactctatgtcagtattaagttctattgaaaagaaaaatttccaagcattttatcagaaataattttcgtagwgtattcatcaatctcagccacactagcatggctgttctcagtattacagatgaacccacacgacctcagctgctttgtcatgtcagttacatgtaccattattcagaacgagtgggcccattttcaatttcctgttgtaaggttagtctgtcttcaatctatcacaggacgcaatggcgttgtaactaagattcataatttccagtaggagaatgatttgtcatcacattccatagtctcagggttgactgtttcgttggtcttgctattgaatgattaagggaacagccaggagattttaaacactccttacaaagcgttttcctctggagacctact

SEQ ID NO: 743599 - DNA, 641 bp, Homo sapiens
aaatgcatgtttctccatagagaaggatgggcatcaacgagatgcacgaggtgtttttattttatttatttatttattttttaatgtttctaggtctacaagggctttagggagatggcaaccaatgtgatgtctagccttttacatgaaaaaatcttttacttgtgttacccctctagataaaggccatctgragtttaagcttaattcaatcatgttttagtaggcatccaacagggtctgaattattttcagagatctttcataccatagaagggcccaagttattactggggtccaggggaaataaaatagaaagcaataactaagataagtgatccgtcaaaagttacacatgctaacaggcccacacaacacacacttgtgcacagatctctaaggcttgcacggagaaacgctgcaaacccaggtttgcagaagcagttgtttcttttcttctctccttgaatttaattagaaatggagatacataatattaacaccaagaactgtctttcttctcaaactggttttccaatccctagaaatcaggacatattttttatatgtgctggaaactggaaacgcgtttcatgtattaattgggtaaatccttctatcagcgctatgaggcatgagtt

SEQ ID NO: 743600 - DNA, 538 bp, Homo sapiens
gattggatcatggaagcaatttccccatgtggttcttgtgatactgagtgagttctcacaagcgctgacagttttaagtgtttgaaagttcctccgttcttttctctcctgccgccttgtgaagaaggtgcctgtttccccttccaccatgcttgtaaatttcctgaggcctccccagccatgtggaactgtaagtcaattaaacctctttcctttataaagtacccagtctcwggtatttctttagagcagtgtgaaaatggactaatatagtatatgttagaatgttctttgccattctacccatttccatgaaaggagtatatttctcctctcttcaactttgggcttgaacttatagctttagcctgtgggatatcagccgatgtgctgtaagcagaggttagaaatgtgcttttgcactggactttctcacctgccttctgtctctactaccaggacatgttgagtggtttgatggtcctgtggggtagtggaggagcacagagcagacatccacctttacccatggcctgga

SEQ ID NO: 743601 - DNA, 490 bp, Homo sapiens
agcatgcttctaaccttgtttagtaaagaaatacttgctctttccatcctcttccctacccctcatcacaacgaatggaggagccagtgattagaagaggatgtagtgttcattttatagtccaagtctttcttcgttcatccattctgaaaagccatgaactccacttcagtatgtaattagggagaggagaaatcaagctttaaatacagattgacattaaattaaaaacaaaataaaatgaggagaatgtgtcttaattatcataatgagatatgagtgatgcaaaagctatgcatccaacccagatgtcactaaagagccrccaaatgttattttacccaagagagttgtaatgatggctattggaagaaagaaaccctagatgtttataaatcaatgaattgggatggttcaaccttatagctacagtgagatttaggttttgtttagacagcctctctctcagtaaataaaacatctaattgca

SEQ ID NO: 743602 - DNA, 655 bp, Homo sapiens
gacagcactaggcagatcaagacatacagtcaaagaagaaaatgtgaacttaaactagaccctagaatgaatagacttaacacatatttacaggatattgtacccaacaactgcagaatatatattcttttcatcagcacatggaacattctccaagatagaccayataataggccacaaaacaaatcttgataaatttttaaaaatcaaaattatatcaagtatcctttcagaccacagtagaataaaactgtaaataaactccaaaaggagccttcaaaactatataaatgcatggatattaaataatctgctcttgaatgatctttgggttaaaaatagtatcaagatggaaattttaaaaattcttttaaatgaatgataacagtgacacaaattatcaaaacctctttttcaaaacctctgggatatagcaaaagtggtgctaagaggaaagttcattgcattaaatacctacattgaaaagtctgacagagcacagacaacctaatatcacacctcaaggaactagagaaacaagaacaaactaaactcaaactcagcagaagaaaagaaataacaaagatcagagcagaactaaataatactgaatcaagaaaatacaaaaaataaaacagaacactggttctttgaa

SEQ ID NO: 743603 - DNA, 589 bp, Homo sapiens
atttaatacaacatgatgaaatagtctcattttactgagggattaaaaataataaactgatggctgagtatgttggctcacacctgtaatctcagcactttgggaggccgaggtgggcagatcacaaggtcaggagttcgagaccagcctgaccaacatgatgaaaccccatctctactaaacatacaaaaattagctgggtatcgtggcaggtatctgtaatcccaaatgctcaggaggctgaggcatgagaaccacttgaacccaggagggtggwgttgcagtgagccgagcttgtgccactgcactccagcctacatgacagagtgagaccctgtctcaaaataataataataatgaactgagactcagaaaagatgtttgttcagggttacaaagctcagacaggacagggcagcattggaaaccaaaattggtctgactcctaggctcatgctgtaaatcacggtgcaaggcttctactatctatgtttttcctaaaagaatgtataaatgaaaagatggttaacatattaagcaaaatatgttaaacgtcaaatgaactgtataaacgataaatgctggagag

SEQ ID NO: 743604 - DNA, 615 bp, Homo sapiens
acacattaatagtgggagactttaacaccacattgacaatatcatacagatcaaagagacagaaaattaacgaaatattcaggacctgaactcagctctggattaagtgaacctgatagatatttacagaaccctccatccaaaaagtgctgactatacattcttcttggtgtcaaatggcacttactctaaaattgatcacataatcagaagtgaaatagtcctcagcaaatgcaaaagaaytgaaatcataaagaacagtctgtcagaccacagcacaatcaaattagaatttaagattacgaaattcattcaaaaccacaaaactacatggaaattgaacacccggctcctgaatgactcttgggtaaataatgtaattaaggcagaaatcaagaagttctttggaattaatgagaacaaagagacaacatgccagaatctctgggacaccgctaaagcagtgtgttaagatggaagtttgtaccactacatgcccacatcaaaaaggtagaaagatcccatgttaaaaacctaatctctcaactaaaagaactagagaaccaagagcaaacaaacccaaaaaatagcagaagacaggaaataaccaagatc

SEQ ID NO: 743605 - DNA, 608 bp, Homo sapiens
aaatgctgaatgattttcttaaagaataaaactatatagatcccattcatgatagtaacagacatgtgatttgtctacagcttcccataatcaccttcaagagattcttgacctggaattattcatttggatcaatagagaattaagaaataatagactgaaaaatatttacatatttaggtttaaaaagtgtagaaagaataaaaaattagcttttacttgagctctgaaaggaaatggagagaagcttggactgaagggcccagaacrctgttccagctggtggaagtctgtttagcagactgtggtgatggtggtgggacttttaaaacaaatattgcctaagacaattccagaagacatgcaaatcatgatcttgataacggaggaatgatattgttcaagttacgagtatgagcaagtgccaaacagtgaagctctttgcacatatttttcatcaagaagatatctactgacaaggtatacacactgattcacaggtgtgcaagggcaatgttgctaaagtggccttctctttttctctgacttaaggccactctctcactatgaatctcattgctgcctcataatatactatacatacctaa

SEQ ID NO: 743606 - DNA, 631 bp, Homo sapiens
tttgtattaaagagagatcattttgccgatattttgaatagtggattggaagatagaaaggtagaaggcaacagttaggaagttaatgcaaaatccaggtagaggtaatgatgatctctgctagaaaatggcaacagaatgaaaaagaaaagccaataaataggaaagtaattaaggacaccaaatccttgggctggacttgattaagaggagagtggtttattataaagagaaaatgaggtttcacagacaactcccacatttttgacttatgatmtaacatttttaaattaatagattggagtatttaggacagttttagatttatagaaaaatcaaacagatggcccagagagttcctatagtccccccgcctcctggtttcctcaattattaacatattagcatggtgcatttgtagttcatgaaacaatattgattcattatcattaattaaagtgtataatttacattaatattcactcttcttgtattctatggagattgaaaaacacagaatgtaatctatacacaattatgatttaatatagaatagtttcactgccctaaaaacccctctgaccactattctgttccattgagctgcccattctttgccacactatattac

SEQ ID NO: 743607 - DNA, 633 bp, Homo sapiens
aggcaactcattcttactgtctaacaactctaattgtttaaatttttctttatatattaagctaaaatcatcaaatgatatttctgtattaatctcaggtctatcttgtgaggccatgcagaaaaattctatgaccattctatatagaagccctgtagatatcaaagtgttatttttcacacatggcatcacaaatgtcaaccattttacatgagacatgtcttcagatgctatgttctgcttgaccttctttgacatgtttcaattagtttctgtccttgttaatatatggcacccagacttgattacaatgtacaatctagccaatgacaaattcatgagactattatccaactttttatgtatactatattcctattaatatacctcaaaactttattatcttcttttgtcaagcatgtcacactgtggcttttataaggcatttattttttataagatcatcagtcttattcctatcttctrttttgaaaccaacttcagatctgttcattatccccagttaaattttaataatcattcatgttttaattattccaagtaattgattaaacaattttaagagtttttaattgaatctaaaatcaatctctgcaattccaaggtctcaac

SEQ ID NO: 743608 - DNA, 530 bp, Homo sapiens
gttactgaaaatgttcctaacttatggggtgacaatatgcataggaaacatgactttgggggaaaatgtgcttcagacatagctaatagctcataaaaatatttcctgacaaagcattaagcatattgaaactacatgaaagtcttgattattttctccttcacattctagagcagaggttacaaactctaaagtctctagggcctagggaggtygtgatgtcaatgagcaaacggaactaggtgcaaaaaacattctgagaggtgacgagctgggaaaaacgtgtgagcgcaagctgtgtctaaagaacaatggatatttaaatccaaacatcatggctgatttccaatttttttaggaaaagccataaatccagatttataagcaagattttccaatttgtaaatatcagctcaaatgaccaaaaaaaaaagattgtgtgtaagtcataaaaagaaaaatcatagtacctagctagtttataacttctgacctagtacctgcacaaacacatgtgtatacacttagag

SEQ ID NO: 743609 - DNA, 617 bp, Homo sapiens
atatatatgaatactctatttgcaatttaaatttagagaaattgtatgtcagaatgaatatctacccagtaagagatttaattgtattttctccaataaaatttcaggacacaattttccgaggattaaaggctattaaatgtcaggctattactatgcctgacaccaggcacaatttataaacacatggagagccagggcttgtgtcatgggatgccacaaagtagagtggcagtgaaatggtgaggtttctatcatcctctgatatatcactaggggaaaactacgagacactgactccaagcaaaagctgattacagaacattgctttgcccaacataaggatgaagagatgatcctaagagaccttgaaggtagaaagctgcacrtagtatcccagagtctccagcacctcatttgtaactgaataaatggtacctactccactactatgaagatcaatgagaatgcatggagtgtttagtcccatgcctggtgtatagcaggaatttaacaaacattactttccttttctaattaaagttaaattagccttaatgctcttctcaaccttgaagtagacaaaagatcccttttcacaaataaacttagtgcaa

SEQ ID NO: 743610 - DNA, 597 bp, Homo sapiens
cctcactggtgctggcatggcagctatcactgggaggatgcactgagcccctgctttgtgacagagccagctgccgaaggcacagccaacagcttctaatcaaagggaattctgaagaaaaaaaaaaaccttcagcaatcttctggggattcttcctatcaaagtccytggcaataaataatacatgaaaagagatccgctcatgcgaaggtggacttcaaagcgggtggggtaacagtgctcaaacccaccacttggcgtctgtgctgtctgctcattccagaagttaattcacagagaatagcatgagggaatgcctgcctccctgcagctgattcatgggaactccgagcctgcattaacaggagggaagggcagcttgctagtctttcaagagcattttcccagccccaagccttagagctaggccttggactgctgctgtgacatgtgttctgagctagtcccaaacaagcacaaacacaatagcctccactgatcaatgcagcagggctgaaggatggaatccaaagcatgaaccctgagaacagaaagtcccagcactcgctctgtgcaagttgccatgaactccagcca

SEQ ID NO: 743611 - DNA, 637 bp, Homo sapiens
atcacacaaactcagcacagggaacattcaactcctaaaccctgccccactccctactcttcggtcttcattatcagttaataattacactttatatcttaaaacaattttacattttagaaaaaatgttcacatgcgtttttcatttgattttcattttaaattatcctcacttttcaaatgaagcaattgaggctcagagcaattaaatgtcacataactaagaagctaagtacagattgcctcccactcatcacatctgctttacctgctctcatttgtctgtkaaaaatcctttgctggctgggtgtggtggctcacacctgtaatcccagcactttgggaggctcatgtgggaggacagcttgagcccaggagtttgagactagcttgggcaacacaggaaaacctcatctctacaaaaaaaaaattttaagaaagtaaacgggagtggtgacgaacacccatagtcccagctactcaggaggctgaggcaggaggatgacatgagcccaaaaggttaaggctgcagtgagccgtgatcatgccactgcactccagcctgggcaacagagcaagaccctgcctcaaaaagaaaaagaaaatcaatttgctagtttcccatcacctacagaat

SEQ ID NO: 743612 - DNA, 616 bp, Homo sapiens
cctttctaattatctcacttagaaaacataaacacaggcttttaaaaaatgcagttataggcaaaacaaatttcttagcacctccacaatatctagcaagtataagtgcggtgcgtaactggtataatcagaaatctttgaaaagcaggaagacgygacttttgcgtgtcccttcccagttacaaagcagattcttccgttctgtaataaagttcatttgtgtatctagtctgtgatgtctgtgcatagcacattccagacctactagagacataaaaagaaataagaaagggtctgctagccttgaggatctcctaggctattagaggaagagagacatattagtagaccctgataattgagtgtgataagtgctaaagatagatgcaaactcagggtgctgctatgggagcctcacgggggcagccagctcctggaggggtgggtgaggtgtaccagctagggtcccagggaaggcttccttgaagatgggaggcgtgactgaaaaatgagctggagttacacatgtgaagagaggggaaaaaaagagagagaaacctggacatgggctgggggtgagaaagagcctagtgaagaaatggtgagtccctctgtg

SEQ ID NO: 743613 - DNA, 616 bp, Homo sapiens
cctttctaattatctcacttagaaaacataaacacaggcttttaaaaaatgcagttataggcaaaacaaatttcttagcacctccacaatatctagcaagtataagtgcggtgcgtaactggtataatcagaaatctttgaaaagcaggaagacgcgacttttgcgtgtcccttcccagttacaaagcagattcttccgttctgtaataaagttcatttgtgtatctagtctgtgatgtctgtgcatagcacattccagacctactagagacataaaaagaaataagaaagggtctgctagccttgaggatctcctaggctattagrggaagagagacatattagtagaccctgataattgagtgtgataagtgctaaagatagatgcaaactcagggtgctgctatgggagcctcacgggggcagccagctcctggaggggtgggtgaggtgtaccagctagggtcccagggaaggcttccttgaagatgggaggcgtgactgaaaaatgagctggagttacacatgtgaagagaggggaaaaaaagagagagaaacctggacatgggctgggggtgagaaagagcctagtgaagaaatggtgagtccctctgtg

SEQ ID NO: 743614 - DNA, 620 bp, Homo sapiens
tttactagctaaaagtcactaggaccagtccacaaaaaagggcagcaaattacataaaggtatgaataccaagaagcagaagtcattgagggtcatttcagaagctgcctaccatcctgtctgagctggttgaatttacttagcctyatttttaaatttaaatttaaactttttaacttaactgttaagtttaggggtacatgtgcaggtttgtaatataggtaaacttgtgtcataggtgtttcttgtacagattatttcatcacccagatactaagcctagtacccaacagttattttttctgatcctctccttcctcccaccaataggcctcagtgtctgtttttcccctctatgtgtccatgtgttctcaccatttagctcccacttataaataagaatataccgtatttggttttctgttcctgcattagtttgctaaggataatggcctccagctccacccatgttcctgcaaaggacatgatctcattctttttttacgactgcatagtattctgtcgtatataggcaccatattttctttatccagtttattatttatgggcatttaggctgattccatgtctttgctatgtagtagtactgcagtgaacat

SEQ ID NO: 743615 - DNA, 497 bp, Homo sapiens
ataaaagggatccaaattagaaagaagtaaaattattactgttttcttgtttgcagatgatttgatcttatatttggaaaaacctaaggactccaccaaaaaacgattagaactgatcaacaaattcagagtcacaggatacaaaatcaaactacaaaagtcagtagcatttctaaatgacaaaaatgaacaatctaaagaagaaaatcaagaatgtaatcccatttacaatarctacaaataaaataaaatatctgggaataaacagaagaagtgaaagatctctacaatgaaaactataaaacatcaatgcaaaaaaattaaagaggacaccaaaaaaaaaaaaaaaaaaggaaagatagtccatgttcattgattggaagagtaaatattgttaaaatacccatacttcacaaagcgatctacagattcaatgcaatccctattgaaatactaataacactcttcacagaaatagaaaaaaaatcctaaaattt

SEQ ID NO: 743616 - DNA, 544 bp, Homo sapiens
atgtactgggagattatttgagaacacctaactatagatagacctatatacaggtaagcatgtacctaaaaatatgaatataaatgtaaatataaactatacatgtatactcatttatgtacccaaactgcctgtctttgttccagagtaggtgtcagtacatttatctgtaaaagaagagacagtaaatgttttaggttttytgggccacatggtctctgtcacaactacataaaagtatccatagcccatatgtaaatgaatacatatggctgtggtccaataaaactttatttaaaaaaagcaaaaaaaaaaaaaaaaaaaaaaaaaaccaaggtccaatgattgtacatgcatgggtaagtattcccagccaaaaggaaaaaatttgccagaaagaagtacaaaacacagttgggacttacagaccccataaaagtcaacaacccaactggccagtcattgattcctacagctccaaatcactttttttgaatccagatcccatatccagagcacaagggtatgaggcctgggatcccaa

SEQ ID NO: 743617 - DNA, 544 bp, Homo sapiens
atgtactgggagattatttgagaacacctaactatagatagacctatatacaggtaagcatgtacctaaaaatatgaatataaatgtaaatataaactatacatgtatactcatttatgtacccaaactgcctgtctttgttccagagtaggtgtcagtacatttatctgtaaaagaagagacagtaaatgttttaggttttctgggccacatggtctctgtcacaactacataaaagtatccatagcccatatgtaaatgaatacatatggctgtggtccaataaaactttatttaaaaaaagcaaaaaaaaaaaaaaaaaaaaaaaaaaccaaggtccaatgattgtacatgcatgggtaagtattcccagccaaaaggaaraaatttgccagaaagaagtacaaaacacagttgggacttacagaccccataaaagtcaacaacccaactggccagtcattgattcctacagctccaaatcactttttttgaatccagatcccatatccagagcacaagggtatgaggcctgggatcccaa

SEQ ID NO: 743618 - DNA, 612 bp, Homo sapiens
tgctgcagtctcgccagatcttcaggctctgtctctgattctaatgctcttgttatttccaccatatctgcagttacttcctccacagaagtcgtgaacccctgtgtcatctgtgacggttggaataatcttcccaacttctctctctctgttttttttttttttttttgagatgacgtcttgcctgggctggagtgcagtgatgtgatctcagctcactgcaaccyccacctcctgggttcaagcaattctcctgcctcagcctcccaagtgtttgggattacagtcacccccgaccaggcccagctatttttttgtgtgtgtgtttttagtacagacaggatttcactatgttggccaggctggtctcaaattcctgacctcatgatccacgtgccttggcttcccaaagtgctgggattacaggcgtgagccaccaagcccggccccaacttctcctaatgttgctattttgatcttcttttttaaatcatgaatgttctcaatggcatctagaatggtgaatcctttccagtaggttttcaattattttgcccagatccatcaaaggaatcactttctagagaagctatagctttatgaaatatattt

SEQ ID NO: 743619 - DNA, 612 bp, Homo sapiens
tgctgcagtctcgccagatcttcaggctctgtctctgattctaatgctcttgttatttccaccatatctgcagttacttcctccacagaagtcgtgaacccctgtgtcatctgtgacggttggaataatcttcccaacttctctctctctgttttttttttttttttttgagatgacgtcttgcctgggctggagtgcagtgatgtgatctcagctcactgcaacccccacctcctgggttcaagcaattctcctgcctcagcctcccaagtgtttgggattacagtcacccccgaccaggcccagctatttttttgtgtgtgtgtttttagtacagacaggatttcactatgttggccaggctggtctcaaattcctgacctcatgatccacrtgccttggcttcccaaagtgctgggattacaggcgtgagccaccaagcccggccccaacttctcctaatgttgctattttgatcttcttttttaaatcatgaatgttctcaatggcatctagaatggtgaatcctttccagtaggttttcaattattttgcccagatccatcaaaggaatcactttctagagaagctatagctttatgaaatatattt

SEQ ID NO: 743620 - DNA, 612 bp, Homo sapiens
tgctgcagtctcgccagatcttcaggctctgtctctgattctaatgctcttgttatttccaccatatctgcagttacttcctccacagaagtcgtgaacccctgtgtcatctgtgacggttggaataatcttcccaacttctctctctctgttttttttttttttttttgagatgacgtcttgcctgggctggagtgcagtgatgtgatctcagctcactgcaacccccacctcctgggttcaagcaattctcctgcctcagcctcccaagtgtttgggattacagtcacccccgaccaggcccagctatttttttgtgtgtgtgtttttagtacagacaggatttcactatgttggccaggctggtctcaaattcctgacctcatgatccacgtgccttggcytcccaaagtgctgggattacaggcgtgagccaccaagcccggccccaacttctcctaatgttgctattttgatcttcttttttaaatcatgaatgttctcaatggcatctagaatggtgaatcctttccagtaggttttcaattattttgcccagatccatcaaaggaatcactttctagagaagctatagctttatgaaatatattt

SEQ ID NO: 743621 - DNA, 612 bp, Homo sapiens
tgctgcagtctcgccagatcttcaggctctgtctctgattctaatgctcttgttatttccaccatatctgcagttacttcctccacagaagtcgtgaacccctgtgtcatctgtgacggttggaataatcttcccaacttctctctctctgttttttttttttttttttgagatgacgtcttgcctgggctggagtgcagtgatgtgatctcagctcactgcaacccccacctcctgggttcaagcaattctcctgcctcagcctcccaagtgtttgggattacagtcacccccgaccaggcccagctatttttttgtgtgtgtgtttttagtacagacaggatttcactatgttggccaggctggtctcaaattcctgacctcatgatccacgtgccttggcttcccaaagtgctgggattamaggcgtgagccaccaagcccggccccaacttctcctaatgttgctattttgatcttcttttttaaatcatgaatgttctcaatggcatctagaatggtgaatcctttccagtaggttttcaattattttgcccagatccatcaaaggaatcactttctagagaagctatagctttatgaaatatattt

SEQ ID NO: 743622 - DNA, 574 bp, Homo sapiens
acttcttggtcagatcaattaagaataaatacataggtttttattgtaccacgattctttctttaatgctctttttaaaaaaatgttgatccaggtttcagttatatatcttttgtttccctctaaagaatttcatttaacatttcttgcaagacagctstcctggcaacaagtttcttgaatttttatttttctgaggaaggccttaattctccttcacttttgaagggtgttttcagtgggtacagaaacttaggttggtgggtttttttctgtcaatatttggaatttttcatttcactgtcttcttgctttcacagtttctgcaatgttgaatgcagttcttatctttgtgtctctgtaggtaaggtgttttctgccccacctctggtttctttcagagttttcctttatcttttatttcatagagtttgaaaattatatgtccaagtgtaggttgttggcatttattctgcctggtgttctcggagcttcctggatctttggtttggtgtctgacattaatactggaagttctcagaaatggttgttgcagaactttcttctatttctt

SEQ ID NO: 743623 - DNA, 595 bp, Homo sapiens
cagggtcagtggcttacacctgtaatcccagcactttggtaggctgaactgggcagatcacttgaggtcaggagtttgagaccagcctggcaaacagggtgaaaccccatctctactaaaaatacaaaaattatctgagtgtagtggcatgtgcctgtaatcccagctactagggaggctgaggtgtgagaattgcttgaactatgcaagcagaggttgcagtgagccaagatcatgccattgcactccagcctgggcaacagagtaagattctgtcagaaaaaaaaaaaaaagaaagaaagaaagaaaagaaaaaaagtttttagcttcaagtaacagaatagtcaactaattgaagaaaaaaacaaggagcaamttttaccaaatcggacaacaaatagatggtatcaatgcttagttaattcaacatgatccacttctttatgattctcttatctttctacctatgttttcaagatggctacggcattcccagccttacaacttcatgtgacaaaatccaatggcaggaaataataagtgacggcattttggaacgttaaggaaaaactttaaggattggaaaacagggatg

SEQ ID NO: 743624 - DNA, 593 bp, Homo sapiens
acatctaatgaaatattatggacaccaataacatgaatacaaatatagctatagaccctaacaagtaaattgatgtctcttgaaaggctgtcatgtcttagatgctaaatttggagtgtttctaataaataaatagcttgctttaataattctgatttatgaatgtaatataggggagcagcttttatttcacccttaatcttaaaaaacaattagctgggtgtggtggcgggcacctgtagtcccagctactcaggaggctgaaacagaaggatggtgtgcacctgggaggcagagcttgctgtaagccaaaattgtgccactgtactccagcctgagtgacagtgtgagactctgtctcaaaaaaaaaaaaaamaaagatcatacaaggagtaaatgatgatttagcataaaactcaactttagcctaaaacacagatcatagggctcaaactttgttattttatgggattatactaaccagttaatattcaaaatttaccatttcaaaagaagaaatattggtctgggaaaattgccattgcttatacagaagaatggaggaagctttttgagaacaacaattctaatga

SEQ ID NO: 743625 - DNA, 606 bp, Homo sapiens
aacaaatagacagatgacctatcatcagaaatgacactttaaaaaacaatgaaactacatcttcaaaattaaaaaaaaaactgtcaactccaaattctataactagaaaaagtaattcttgagaaaataaagatttattcagataaaagaaagcttcgaacaattgtcattagcagacctagatacaagaaatgcaaacggaaattttttaggctaaagaaagataacaacagatggaaattctgacctacaggaagcaaggagaagctctaggaatggcatgtgcataaacatgaaaaactaaggcttttttcttttagttttataacaaacaactgatggyttaaataaaaaattaagtgtactattgataatgtatgtagagtaaaatattctaaattaatagctctgacaggagactaaacgcaaaaattttaccacaacttttctttatgttacatgaaaacgttgactattaacagtaagtggactgtgataagcccaggatgtttattataatccctagagaaccaccacattatatgaagatattcttctaaaatgccaataaaggaattaaaatggaaccctgaatattgttcagtt

SEQ ID NO: 743626 - DNA, 516 bp, Homo sapiens
tttaaaaaaaaaaactctcagcaagctagaaaacgaaattttctcgaagtgatggaaagcatccacaacaaaacatataaacaatactatatttaatggtgaaagtgtaaatgtttaaaccacatagattaggacaagaaagggatgtgtgtgttcatcacctctattcaacattgtactggtgatcctagattttgagtataaatatttagggracaactatggtcactgaagcccaaatcttggtcatcctcagaaaaaaaaaagttgattaggttgtatataatctaattctacttgctaatataatttctctaaaattacagcttgtatcaactctagaatttattgggcacctcctaggacataaacactggaatttggtgagagacgtcaaataggaaagaacctgtctctgaaataaattcaacacacggagggggacatatgttatgagactgacctggcctcttcatctcataaaaggggttcttgttgatggtaacacagattaaa

SEQ ID NO: 743627 - DNA, 516 bp, Homo sapiens
tttaaaaaaaaaaactctcagcaagctagaaaacgaaattttctcgaagtgatggaaagcatccacaacaaaacatataaacaatactatatttaatggtgaaagtgtaaatgtttaaaccacatagattaggacaagaaagggatgtgtgtgttcatcacctctattcaacattgtactggtgatcctagattttgagtataaatatttagggaacaactatkgtcactgaagcccaaatcttggtcatcctcagaaaaaaaaaagttgattaggttgtatataatctaattctacttgctaatataatttctctaaaattacagcttgtatcaactctagaatttattgggcacctcctaggacataaacactggaatttggtgagagacgtcaaataggaaagaacctgtctctgaaataaattcaacacacggagggggacatatgttatgagactgacctggcctcttcatctcataaaaggggttcttgttgatggtaacacagattaaa

SEQ ID NO: 743628 - DNA, 491 bp, Homo sapiens
gattttgagtataaatatttagggaacaactatggtcactgaagcccaaatcttggtcatcctcagaaaaaaaaaagttgattaggttgtatataatctaattctacttgctaatataatttctctaaaattacagcttgtatcaactctagaatttattgggcacctcctaggacataaacactggaatttggtgagagacgtcaaataggaaagaacctgtctctgaaataaattcaacacacggagggggacatatgttatgagactgacctggcctcttcatctcataaaaggggttcttgttgatggtaacacagattaaaactatttcaattacattcaagataaaaagwttagcaatggtatctaagttgaaaaaatcaccccgcaggaagacaaaagtctcacaaaaggatatttaagctagccaacactttgaaattcaggcagagatcgtgctttctgggtgaactaaagtagcaagaaca

SEQ ID NO: 743629 - DNA, 593 bp, Homo sapiens
gctctttcagttagggttttcccagctgttagggaagcctgctgatgagacactaggtagagaatatcggaagataatgatctcatggtaactctttgccaagcaaccaatccacttaaactcccaacatttctgtcttcccttatttttgggaaaaaatcatggaatcatagaattttaggagctggaagaggccttagaaataatctaacccagcaccttctgttgataatctgcttgtttgattatttgagttaacttctcacttataaatctccatttttttctttttctttcttctgaggaaagaagagatcctatcaagacgaactactgtcccttctatgcagtagatcccatttcctttattgtgaccatctaatttactgtccaaactgggacactgttgagagtaaaggaggyattggtagtaatgaagccaagacagctggcaaaaccaagactgtcctgaggaaacgtagatgtatgctcgtcactgcttctgcttcccctccttttaaaacttgattcttgaagtagcctttgtttcaactgatttttcaatctctccatttcatttgcatagaaaccta

SEQ ID NO: 743630 - DNA, 361 bp, Homo sapiens
caaaatgcaattgtcttggatccctccctataatcttatcaaatagaattgtaattcctaggaagaaaaaccagagttgacaccacactcagagcccagataaattttgtcccaggctattatctattcttcacacccattcatctcccctaaaaatcatttcttctgcctctaaaattgcctacatgccccctacttacttctcccctctgaagaggkcatgtgagcttcaaccatctgccccttatttgagtttcatattttgtgtgactcctgtgcatattcaagtgacaaatttgtctgtcttttatgctgttaacctgtctattgtattgttttatagactcaacttctctaaact

SEQ ID NO: 743631 - DNA, 541 bp, Homo sapiens
gacaagatggtggatccccacattattaccctccagacccagggcttatataccataggggaggggtgattcaggagggacatctaggacaattgaactacaatagcatcaagattgtttgacctaagggcaggatttacagtaagtatctgcttttacacaaggmacaatagataaactggagatcttaaagtcctttcaggaacaggggttaatcagaagctaatatggtggattatcatccaagatagagttgccttagcctccacatcccgctacagatatggatgcaaatcctgacaacctaactcattcactttgagaactcaagcaaataacttctctgagccttggtttctttgttaataataatacggcctatgtgatagggcagttgtgaaggtcaaatgaagaaagcacttaaacattatagttagccatctgcattcaataaatcttggctaatcaatttaattattattgttagtgttatcaggaactgaaacactacttgggtcaaagagggataactctatttacc

SEQ ID NO: 743632 - DNA, 647 bp, Homo sapiens
ttttcaaaccatatattttgttcttctttactatactggtgcgtactcataaagaataggggcttaacagaaattatattttagactaggctaataccaagggttaagtaggaattaaagcaacatgcttttaaaastagtgtgtgagacaccctaagaacggctccagcctctgaactcctgtagttgcttcatatctccgcaaatagcacaaaattatcgtgatttccctgttatatgtctggctatgaattcttctatggcagggtctttcaattccaaacagcagcacaatactggcatatggtagaaactcaactattgtttgaggaattaagagaatgcaaaaatatcacaagaattccacgactctcccaaacagcaatttccttgctttcagggaaatggtgacactttggtttcaattttttgatataatgaattgattaatttactggccattcagatttgagcaatataccatgtatagatcttcattaaaagcaaagagaaaagtctgtttcctgaaccaaaccagaaatgattcagaggaaaatgcaaattttaactggaaaaaaataattttttaaatgtataaagtactatattacttcaagatatgtgtaggcaaatatgctaagcttcta

SEQ ID NO: 743633 - DNA, 593 bp, Homo sapiens
aaaaggagtggtgagaggggatatccttgccttgttcctgattagtgggaaggcttcaagtttctcaccattaagtatgatgttagcgtgggtttttgtagatttttaaaaattaaattgaggaacttcaccctattcctagtttactgtgagtttttattattagcaggtgttggattttgccaaatgctttttcttcatctattgatgtgatcatgtgatttttttcttctttaccttgttgatgtgatagattacattgattttcaaatgttgaaccacccttgcatacctagaataaatctcacttggtcatggtgtataatataatcctttgcatacatttttggattcagtttaatartattttcttgagttttgcatctgtgtttattagcaatatttgtctgtagtttcttgtaatgtctttgcctgattttcatatggtaatgctgaactcatagaagtagggagtactccctgtgcttctatcatctgaaagagataggagagaattggtgtattttttttttttccttaaatgtttcatagaattcataagtgtatctgtctgggcctgcgctttgtgtttt

SEQ ID NO: 743634 - DNA, 549 bp, Homo sapiens
  misc_feature 1, 2: n = A,T,C or G
nnagaaaaaaagagaaaagagtcaaattactaaaatcagaaatgaaagtgagacagtactgttttgcagaaataaattggataatactataaacaattgtactccaaaaaatcggaaaaccttagatgaaatgtacaaatttttagaaaaacacaaactaccaaaactaactcaagaagaaatagaaaatctgattggatctataacaagtaaggatattgaatcagtaatcaaaaagtttccaacaaaaaagcgcagraacagattgtttcaagatgaattctactaaacatttaaagaagtaacacaaatccttctcaaactcttctaaagattgaagaggaaagaacacattctatgaggccagcaagacaaagacactgagagaaaagaaaactgcagaccactgctccttatgaacataaacacaaaaattctcaacaaaatactaacgaatttggcagcgtatttgtaagattatataccatgaacaagtggaatttattccagagacacaatggtgattcaccatataaaaataaatcgatg

SEQ ID NO: 743635 - DNA, 567 bp, Homo sapiens
tgtcagtgccctaaccgccaatgggactgtttctgaagatagggcctttatggaagtaattaatgttaaatgaaggtggggccttggttcaataggattagtgtccctatcctggcagagataccagagagctttctcttgctctgcatgcaaggaaagaccatccaaggacatagtaagaaggtggtcatggacaagccaggaagagaaacttcatgagaaactggcttttccaacaccttcatcatggayccttagtttccagagctgtgaggaatataaatttctattgtttaagccacctgtcatggtattttgttatagcagttcaagcagactaatacaacaatgttctccaaagccatccacagattcagtgcaattcctatccaatcccaatggcattttttttgcagaagtaggcaaactggtcctaaaatttgtatggaatttcaagagaccccaaataaccaaaataaccgaaaaagaagaacaaagttggaggtctcatacttcctgatttcaaaacttactacaaagctacagtaatcaaaatactatgaagcc

SEQ ID NO: 743636 - DNA, 560 bp, Homo sapiens
gtttattttagcatccatggatacttgggttgcctctaccttatggtgattttgagtaatgctgctgtgaacatgggtgtttggtttaagtatctgcttttgattctttttttttttgttttttttttttttttttgtttgttttgagatggagtttcactcttgttgcccaggctggagtgcaatggcacaatctcggctcactgcaacctctatctcctgggttcaagtgattctcctgcctcagcctcccaagtagctgagattacaggcatgcaccaccacccctggctaattttttgtgtttagtagagttggggtttcaccatgttggtcaggctggtctcsaactcctgacctcgggtgatccacccacctcggcctcccaaagtgctgggattacaggcgtgtgccactgcgcccggctgctttcgattcttctgggtatgctcagaggtggaatttctggatcatatggtaattctgtgtttaatttttaaggaactgccacactgctttctccggtgactgtaccattttacattcccggacaaattcac

SEQ ID NO: 743637 - DNA, 560 bp, Homo sapiens
cccacctcggcctcccaaagtgctgggattacaggcgtgtgccactgcgcccggctgctttcgattcttctgggtatgctcagaggtggaatttctggatcatatggtaattctgtgtttaatttttaaggaactgccacactgctttctccggtgactgtaccattttacattcccggacaaattcacaagggttccagtccacatactgggcaacttttggcatttgcattggctgtttytgttttctgtaaggaccatcctcattactggagtgtcaaatggttccccattatagttctaattgatgtacttttatgttcttttttctctgctttttttttttccttcctttggatcaaacattttgtattgttatttcctcctattaacttgtttgtgatacattattttttactacttttatactgtacttatggtttagtactaaatataatatgtatttatagtatcttttttttttttttttttttacaattccttttcactaagtaagtctctggtgtctctagagatcatagcattcattcatttatcca

SEQ ID NO: 743638 - DNA, 621 bp, Homo sapiens
tttgtttaaaattgaaatggttttctttacttttatggtggttgatttatttatttatttatttatttttggggacagggtctctgtctgtctcccaggctggagtgcagtggtgtgatctcggctcactgcaacctccacctccttggttcaagcaattcaggctacctgagtagctggaattacaggcatgcaccaccacacctggctaatttttgtatttttggtagagacggggtttcaccatgttggctaggctggtctgaactcctggcatcatgtgatctactggcctgggcctcaaagtgctaagattacaggygtgagccactctgctcaggctatggtggtttttatacagcaacactcagtttattacagtttatcccagtgcttattgcatttttttctgttaggaacctgtagtcaattcctcccttatttgcaaaggggtttacttaaaagatttgtaatttttgtaaattttgttgaaagtacactatttgtatactttggtaatgatatttatacatctacttgacaaatctatcttttaagaaattattttcagcttttaagtaactgtcacataacatgtatgtccagtatccattggcttca

SEQ ID NO: 743639 - DNA, 640 bp, Homo sapiens
caggctgttgtataactggcatgatcttggctcactgcagcctccacctcctgggttcaagtgattctcctgccttggcttcctgagtagttgggattacaggtgcccaccaccatgcccagctaacttttatatttttagtagaggcggggtttcgccacgttggccaggctggtctcgaactcctgacctcaagtgatccaatggcctcggtctcccaaagtactgggattacaggcatgagccactgcacctggccttccccctgtattwttatgcataggttggaagtgctctctgtctggggggccacgtggaaagatgggtcaaagacggaagcagtgatgctcccaatagcatcctggctgcagatcagctgggtctggagctaaatcttggtgaatttgacacacagcctgattattgtctggaaagttctggagaggaactcagtcacctgtcacctgtcttcccaggcaggtatttccttcgagctctttgaacctcagcaccctgctggggagtgacccctgcctgggtttaggttctgcagttggcatgcaggtcaaaatgtatcggaggtgtgcctgcaacacaggccagggcctgactggtgctgtgtgtgccattatcctggaat

SEQ ID NO: 743640 - DNA, 597 bp, Homo sapiens
cccactaattctatctacccactgccattctcaagagttaaatcttgtttgcgtggactcatgccagggcattccgggtggtaagatgctatttgcttttgatggtgcaagtgtttgcattccttcatgcttaacatcaatagtgcacaaaaaagggagccgaaagccattttaaaagaaattggattatagagaacatacactgatactggctcagaaactacagcatgagaatcccaggagaaacttgttcctaaatagcttgttgtttttgaastgatttgtctcatgtaattcaaccaaagattgttcttcatttctcctaaatatcatgggattaatatattgagtctagttatatgtggtcttgataaagcacaagtagatcactgttggtgacagctggaaaaaaagatgaatgtcaagtcttatcaatgtgaactcatttcaaattgtctatattatttattagttgacttgagaaaacctatgtaaataaccatacattgtatttggtttcattttgtttatgattttttttcttaactattttacacgtttatattcagcagcttcccatgggaaggaatggtgagc

SEQ ID NO: 743641 - DNA, 592 bp, Homo sapiens
aaaatacatccttaagcaagatgcctgacagaggagaggaaggtgagccagtactccatgcctattccttattagtttattgacatttggccatgttgataccttctttggagaagtatctatttcaattccttactcatttttaatttgggctattgtcttttaatggttgagttgtaagaattatttatacattatgtatytagacctttatcagatacatggtttgcaaatattttctcacattctgagggttttcacttttttgatggtgtcttttgaagcacaaagctttttcattttgatcaagtcccatttatctgtgttttctgctatcacttaggcatgtggtgtcatatctaagaaactattgcttcattcaagttcccaaagatttattcctatgtgatcttctaagagttttgtaaatttaccacttatattcagttctatgatgtattttgacttaatttttgtctatgatgtgagacagggattcattttcattcttttgcatgatatccattgcatgttctagcaccatttgttgaaaagattattccttccaccttgaattgtcttggtacccttt

SEQ ID NO: 743642 - DNA, 592 bp, Homo sapiens
aaaatacatccttaagcaagatgcctgacagaggagaggaaggtgagccagtactccatgcctattccttattagtttattgacatttggccatgttgataccttctttggagaagtatctatttcaattccttactcatttttaatttgggctattgtcttttaatggttgagttgtaagaattatttatacattatgtatctagacctttatcagatacatggtttgcaaatattttytcacattctgagggttttcacttttttgatggtgtcttttgaagcacaaagctttttcattttgatcaagtcccatttatctgtgttttctgctatcacttaggcatgtggtgtcatatctaagaaactattgcttcattcaagttcccaaagatttattcctatgtgatcttctaagagttttgtaaatttaccacttatattcagttctatgatgtattttgacttaatttttgtctatgatgtgagacagggattcattttcattcttttgcatgatatccattgcatgttctagcaccatttgttgaaaagattattccttccaccttgaattgtcttggtacccttt

SEQ ID NO: 743643 - DNA, 592 bp, Homo sapiens
aaaatacatccttaagcaagatgcctgacagaggagaggaaggtgagccagtactccatgcctattccttattagtttattgacatttggccatgttgataccttctttggagaagtatctatttcaattccttactcatttttaatttgggctattgtcttttaatggttgagttgtaagaattatttatacattatgtatctagacctttatcagatacatggtttgcaaatattttctcacattctgagggttttcacttttttgatggtgtcttttgaagcacaaagctttttcattttgatcaagtcccatttatctgtgttttctgctatcacttaggcatgtggtgtcatatctaagaaactattgcttcattcaagttcccaaagatttattcctatgtgatyttctaagagttttgtaaatttaccacttatattcagttctatgatgtattttgacttaatttttgtctatgatgtgagacagggattcattttcattcttttgcatgatatccattgcatgttctagcaccatttgttgaaaagattattccttccaccttgaattgtcttggtacccttt

SEQ ID NO: 743644 - DNA, 611 bp, Homo sapiens
tttaatcagatgccccttccttagtgtgccctagttcatccacagagagaacaccagggaagccacagcacagcaagtctggctgcattcatgagagggatgggctggtgacagagtagctgctgccctgggagattcatatttcactacagttcatgattcccatctgctataaaaatatatgatgagagacaattcatattttagatggtttagataaagttagaattagagactttctaatatagattttagattatcccatgttttagagtggaaagaatacctagaacttggaaagatttataaaagaattatccaactacatgatactcaagaaacaggttatgttgcaaacgctaattctcttctcccatggatttagctagaaaaatctgggttcaatttattgatgacagaagkttgggaaaaaaatcatcaaaatgaaattcacatttgtgtaatgaacagtccatttatttgagtgagtcaatataaaaatatttacagtatgtcttcatagatcaattttgattcaaaatacagatggaaatattggcaactttaaattgtgtatacaggcagtaggcagcaatgagaattatgtgaat

SEQ ID NO: 743645 - DNA, 628 bp, Homo sapiens
gcgaccagctttgggaccgcaggacagctctaacttggcagtagtttcatgatgcttcctgatcatagcagaagcttcaagaagtctgcaccacagcagtatgagcaaaaataaaaatacaaatagaccttgacaccctgacttttrcttttccatcttttccaataatttttgttagcactcaatggagttcaagatgtactaccctaaaatatggtcccttgtcattggagaaaacagcagattcagaaaggatactctcacctttcactcactcttctcccctgaagcaggccataaaacctaaacaacatttttctgaccttcccctgaagcaggtcataagaccctcattcaagagttgccctcccagtacccagaagaaaggaacatctttatttctaaagacacatggacacagagacaaatgtaaacaaataggccttgctaagttctcccaaatttatgaccattagattatatttttttatccaatcatacttctccacaactacatccacttcgccatttcatcaaaacttgcataagaaatacgcaagtttaccagtttctttgggtcttattatgaaggccctcgtgtcccataacacttattaaataaatgtat

SEQ ID NO: 743646 - DNA, 596 bp, Homo sapiens
ctcctgcctcagcctccctagtagctgggattacaggtgcgtgccaccacacccagctgatttttatatttttagtaaagacggggtttcaccatgttggccaggctagtcacgaactcctgacctcaggtgatccacccgcctcgacctcccaaagtgctgggattacaggcataagccaccatgcccgacctatttatttattttttgagacagagtcttgctctgtcgcccaggctggagtgaagtggygcaatctcggttcactgcaacctctgcctcctgggttcaagtgattctcctgtctcagcctctcaagtagctgggattacaggcgcacgccaacatatccagctaatttttgtattttagtagagacggggttttgccatgttgcccaggctggtctcgagctcctaacctcaggtgatccgcctgcctcagcctctcaaagtgctgggatttcaggcgtgagccaccgcgtctggccaatatcccgattttgaaaaaaaaaaaaaattcagcaagaagaggaaaaaaaattaaattgcatttacaagctattgtctaaaaaatatatttacatactatatatc

SEQ ID NO: 743647 - DNA, 567 bp, Homo sapiens
agaaacaaacaacaaaaaaaatggcacatatatgtctagaaacgttttagcttcttagggcttgatttttggcttgcattaatcttataggagtccagttgccatgtttcttggtaagctataaagttgtagtctgggggaagaaataaaaaacaaataagtggccgggtgtggcagcacacacctgtaatcctagtactttgggaggccaaggcaggcagattgcttgagatcaaggttttgagaccagcctggctaacatagtgagaccacatctctaccaaaaaagatacaaaaattagctaggcrtggtggtgtgtgcctgtagtcccagctactcaggaagctgagttgggagggttgcttgagcccaaggagcagaggttgcagtgagcttagatcttgccactgcactccagcctcagtgacagagtgagaccctgtctcaagaaaaaacaaaaacaaaaacaaagcaagtaagtctatttttctgtttaaaagctcttagcaacatttttagcccctaataatatgagagggtttaaacatttgggaacgaggccctgt

SEQ ID NO: 743648 - DNA, 600 bp, Homo sapiens
gcctggttaattttttgtatttttaggggagacaggatttctccatgttggtcaggctggtctcaaacccccgacctcaggtgatccgcccacctgggcctcccaaagtgctgggattacagacatgagccaccgcacccagcctccaccctctttatttaaaccctgttcactagtttgagtaaaataatcagatatgttttcrgttcaatttccctagcaacacttaaaagtttgaaattttttacaatcaacttcagtaaggcttctttaaacattattttgaaaattaaaaacattttagaaaagcaagctaaactggttgtatgacaggtatacattctaagtcattttgagaggtgacaccgtgctggcagccctcgcttgctcttggcgcccactctggccacacttgcggagcccttcagcccaccgctgcactgtgggagcccctctctgggttggccaaggccggagctggctccctctgcttgcggggaggtgtggagggagagtcacgggcaggaaccagggctgtgcgtggtgcccgtgggccagcacgagttccgggtgggcgtgggctcggtgggccccgcactc

SEQ ID NO: 743649 - DNA, 616 bp, Homo sapiens
gccattgggtacaatttatagcatcttattttccagtgaaaataatctgttactatatttgtagcctgtttcatacggtttaacacttaataattctctgttgtttttattacgaaaacttgcattctctcatctagagcagaatctccctgagggcaagatttacgccttccaatttctttggactcctccacaggaccagacagagaatgaaggagtacaatagtgggtgatcargagggaatgattacaggacagagtatttggagacctgggcagttccaatgctccccacccccgtcaagctgagtataggtcctcagaaagcacttaagtctcagagttgccatttcctcattttcagatttcctctcttaccttaccggttgttgggaggatcaaataagataatgtctgtgaaagtattttgtgaaccaagatctgctagccactgaaacgtaagaagtcatcagaagaggcacttagtaaatatctgattgatttttaatgataagatattgtcttcccctttctcctttacattcagctcctttgagggtgttattttgcaggatttcactttatatgagtagcaaaaccactccacatccacctg

SEQ ID NO: 743650 - DNA, 616 bp, Homo sapiens
gccattgggtacaatttatagcatcttattttccagtgaaaataatctgttactatatttgtagcctgtttcatacggtttaacacttaataattctctgttgtttttattacgaaaacttgcattctctcatctagagcagaatctccctgagggcaagatttacgccttccaatttctttggactcctccacaggaccagacagagaatgaaggagtacaatagtgggtgatcaagagggaatgattacaggacagagtatttggagacctgggcagttccaatgctccccacccccgtcaagctgagtataggtcctcagaaagcacttaagtctcagagttgccatttcctcattttcagattwcctctcttaccttaccggttgttgggaggatcaaataagataatgtctgtgaaagtattttgtgaaccaagatctgctagccactgaaacgtaagaagtcatcagaagaggcacttagtaaatatctgattgatttttaatgataagatattgtcttcccctttctcctttacattcagctcctttgagggtgttattttgcaggatttcactttatatgagtagcaaaaccactccacatccacctg

SEQ ID NO: 743651 - DNA, 616 bp, Homo sapiens
gccattgggtacaatttatagcatcttattttccagtgaaaataatctgttactatatttgtagcctgtttcatacggtttaacacttaataattctctgttgtttttattacgaaaacttgcattctctcatctagagcagaatctccctgagggcaagatttacgccttccaatttctttggactcctccacaggaccagacagagaatgaaggagtacaatagtgggtgatcaagagggaatgattacaggacagagtatttggagacctgggcagttccaatgctccccacccccgtcaagctgagtataggtcctcagaaagcacttaagtctcagagttgccatttcctcattttcagatttcctctcttaccttaccggttgttgggaggatcaaataagataatgtctgtgaaagtattttgtgaaccaagatctgctagccactgaaaygtaagaagtcatcagaagaggcacttagtaaatatctgattgatttttaatgataagatattgtcttcccctttctcctttacattcagctcctttgagggtgttattttgcaggatttcactttatatgagtagcaaaaccactccacatccacctg

SEQ ID NO: 743652 - DNA, 643 bp, Homo sapiens
tcccaaatccatatatcccgctcctaagcagcctttatgttcacccacggtcaaagctgctttcttgttccccataaaaaaaagattagggtggttgccagggggtgaggagagggaaaaatagggactgattgcttaatggaaacagggtttcttttgtgaggggataaagaggctttggaactagacagaagggtagctgtacaacattgtgaaggtactraaatgccattgaattattcacttcaaaatggctgattttatgttatgtggattttgccttcaaaaacctattaaaaataaggccaggcgtagtggctcatgcctgtaatcccagcactttgggagccaaggcaggtggatcacctgaggtcaggagttcaagaccagcccagacaacatggtgaaatcccgtctctactaaaaatacaaaaattagctgggtgttgtggtgcgtgcctgtaatcccagctactcaggaggctgaggcaggagaatcacttgaacccaggaggcagaggttgcagtgagccaagatcgcgccattgcactccagcctgggcgacaagagagaaattctgtctcaaataatgaatgaatgaatgaatgaatgaatgaatgaatgaatgtcaggggcaacatt

SEQ ID NO: 743653 - DNA, 599 bp, Homo sapiens
aaattcatgtaaagtaggctaagtactaggaggatgaaatgaaaaggaatcagctcaagtcctcaaggagcttacctctagctgagaacgagtgattggtgagggcttaacaactaggaatatcagccaggtgtggtggmtcatgcctgtaatcccagcactttgggaggccgaggcaggtggaccacatgagggcaggagtttgagaccagcctgggcaacatggtgaaaccctatctctactaaaagtacaaaaattagccgagagtgttggtgcatgtctgtaatcccagctactcagaaggctgaggtgggaggatcacttgaagctgggaggcggaggttgtggtgagccgagatggcaccactgcactccaccctggacagcagagtgagaatccatctcaaaactaaaactaaaactaaaaaacatcaaaaactaggaatatcaggcaaagtcacgtaagttagagtgatgataacagaggaaacagactttgcactgatccctcaagactaaggggagcttaggggagcaaagaaggtatgccaggtatgccagagagaggctcaagaagaggacgttcacagctggcagc

SEQ ID NO: 743654 - DNA, 596 bp, Homo sapiens
gatactatcaacagcagccttctccttacgtttatcctctttctcttctctcagtccttatatttatctttctcattccctttgtctactaaactatagttgatttgagcgactgccatgatttaaagttaaaaatacaaagggctgctcacctctaacctgttacgtgtcctcctgagctcatgtccccaaatcgaacatcatctgaaataaaacccgttgatctcaggctgcctgaactctaacagtggaaacatgtcggggagtccctggggggcccatctattttaagaaccgttttgagagttagaggagaaaggawtctttttttttggcaagcagtctgagaattaggttacattctaaagtagggcaaaatttgtcatatatggcccagttctatacctagaactcctgctcacacacacactcacacacgtacacatcttttaagattcaagtgagtttggttggatataacagtagacatatttgtttgcataaggctttgaaataaaatgctttcatatatattatgacattgtataccaacaaggaagcaaggcagttgtgaatgtccccattttagtgttacg

SEQ ID NO: 743655 - DNA, 634 bp, Homo sapiens
tttagatacattgctgtgatttttttctttcattgcacacacatgcacaccatctcacaaaacataacatcatcagcaacctggaagaccataatctagaaaaatgccagagccctaatcctacatgatattgaagctgcaggcacttttattgccactatttgtcaaagattgttggttattagagtcattgcttttctcctttcaggttggaatcaaaattgccaatttatyagatatttgctgaaaatatagtcatttgtacactgtagataggtaaaatgtaactttcaaatggatctctgtattcacgtagagaagtagaaaattgtcatgtctcgttagcactcttctgcaccagcgtctgataaagccatgcccccaaataaatgttcacagaggatgcaatgcaattttcaactaactgtgagggaaaaggatgttttgagaggaaaaaaaatagaaaatactaaaaaaatgatcagaatcactttaaatactaatgggattgtatagtactggctgatactgaacctacgctagacttagctcgtgatttgtggaccccataagactcctgccttctcctcttcctttttcgccttctcctccagggttggaaaggtgaatggtt

SEQ ID NO: 743656 - DNA, 624 bp, Homo sapiens
tgtggcacagcaaagtgaaggcaattccccattcatactgttaaattaagtttagcctaaagctactgcttacatacttgaaattcagcctaaagagttttctgcacatagtgaactgtaacctatctgaatgtgtaaacagattgtaacctacttttctaccaatcactgagtttaggccaatcaaacgtggccaactattcaaaccacattcaaataagatgaatgctaaagtgtaaccaatctggctatttctatacctcacttctgttttctacacatcagctttctttttcttttcttttcttttyttttttttttttggtccataaatcttctttgaccacgtggcagggccagagtctctctgaacctactctggtttgggggctctctggttaacaaatcattctttactcaatcaaagtctgttaaatttaacttgtctatggtttgccttttaacaatacataagcagggttcattttcccccttcttctttatctcgtcaaaccaccaaatatttccaaatttcctgggttctaatttgagcaaaataatcacccaaggtcatataatctcaggacttggttttaaaatgtaaaaaattttagattaaaaaat

SEQ ID NO: 743657 - DNA, 639 bp, Homo sapiens
atgtcatctatataaataaagacagttctttctcccttttctctctctttctctctttcttacaggatctcactctgtcacccaggctggagtgtagtagtaggatcatagctcaactcctgggctcaagtgatcctcctgcctcagtctcctgagtagctgggactataggcatgggctacctcactcagctactttaacttttttttttttttttttttttttttaagagatgggttccagctttgttgcccaggctgatcttgaactcctggcctcaagcaatcctgcagttctggccttctaaagtgcaaggattatagttgtgaaccactgtgcccagcccagtattttttctttcttcccagtttgtattwacattttatttcctcttcttgtcttattgcaataagtaggatttcctatatgatgccgaataggagttgtgagagggaatatccttgccttgttcccaatcttaggagacaagtatcaagcttcttagtttaaacatgttagctgtagggctttttaattttaatttttaatttaaatttttaaaaagttttgattgttgtgggttcatagtaggtgtatatatttatggggtacatgagatatttggatacaggcatacaa

SEQ ID NO: 743658 - DNA, 514 bp, Homo sapiens
gttgttggtagaattaaattccttgcagctataggactgagatccctgttttctttctggttgttgcccagagacctctcagtcctagagactgcccacagttccttgccacatgtccctctcacaggtcattttacaacattgcagtttagttctttcttctgtttttttttttttagagacagtatagggtctttctgtgtctcactctgttgcccaggctggagcatagcggcaacatcatagctcactgtaacttcaaactcctgggcttaagtgatcctcctgcctcagcctccccagtaactaggactgcagatacaccccaccagacctggmtaatatagtttagttcttaaaggccagcaggagaaactctcacttcagcctggcaagattgagtcttatatataatgtaacataatcatgggagggattatcccattgctgttgccatacactattgcctagaagcaagtggcaagttccacctatactcaaggggagggaatta

SEQ ID NO: 743659 - DNA, 555 bp, Homo sapiens
agcagggtcttggcagggctgctttcttctgaggcctctttccttggcttgcaggtggttgtcttctccctgtgtcttcacgtggtcttccctctgtgtgtttctgtgtcctaatcccctctgcctatgaggacaccagtcaaagtggattagggtccactctagtggcctcattttaacttaatcacctctttaaaatctctatttccacatatagwtacactctgaggtactagtgggtgggagttcaatacataaatttggtggaggttgcggcggcaggggtggggcgcacaattcagtccaaaacaataaatcatgtgtaccagaagcatctgaagtgccttgttaagagtgttacgcctcctgtgatccatctcagagtgacagtgatttagaatctacttgtcgtaagtctcgggacacgtaggttgttcagctctagaagccctcagattggcaggacttcactcttctcaccagagaatgtatgtctgaagggaagtcatgcttctacctttgttcctataaatcctgggatggaggaattccact

SEQ ID NO: 743660 - DNA, 602 bp, Homo sapiens
ccgttcccaacaagttcctcatctccatttgagatcatctcagcccgaacttcattgtccatatcactatcagcattttggtcaaagccattcaacaagtctctaggaaggtctcacagtttcccacatcttcctgtcttctgagccctccaagtctctaggaagtttcaaamtttcccacattttccagtcttcttctgagccctccaaactgttccaacctctgcctgttacccagttccaaagttgcttccgcatttttaggtatccttagagcagcaccccactctctgtggtaccaatttactgtattagtccgttctcatgctgctataaggacatacccaagattgggtaatttgtaaagcaaagaggtttaattgactcacagttccacagggctggggaggtctcagaaaacttacaatcattgcagaaggggaagcaaacatgtccttcttcataaggtggcaggagtgagaaggatgagaactgagtgaatggggaagccccttatgaaaccacagatcttctgagaagttactcactatcatgggaatagcatgggggaaactgcccccatgattcaattacctcccact

SEQ ID NO: 743661 - DNA, 602 bp, Homo sapiens
ccgttcccaacaagttcctcatctccatttgagatcatctcagcccgaacttcattgtccatatcactatcagcattttggtcaaagccattcaacaagtctctaggaaggtctcacagtttcccacatcttcctgtcttctgagccctccaagtctctaggaagtttcaaactttcccacattttccagtcttcttctgagccctccaaactgttccaacctctgcctgttacccagttccaaagttgcttccgcatttttaggtatccttagagcagcaccccactctctgtggtaccaatttactgtattagtccgttctcatgctgctataaggacatacccaagattgggtaatttgtaaagcaaagaggtttaattgactcacagttccacagggctggggaggtctcagaaaacttacaatcattgcagaaggggaagcaaacatgtccttcttcataaggtggcaggagtragaaggatgagaactgagtgaatggggaagccccttatgaaaccacagatcttctgagaagttactcactatcatgggaatagcatgggggaaactgcccccatgattcaattacctcccact

SEQ ID NO: 743662 - DNA, 539 bp, Homo sapiens
ggtttaattgactcacagttccacagggctggggaggtctcagaaaacttacaatcattgcagaaggggaagcaaacatgtccttcttcataaggtggcaggagtgagaaggatgagaactgagtgaatggggaagccccttatgaarccacagatcttctgagaagttactcactatcatgggaatagcatgggggaaactgcccccatgattcaattacctcccactggctcccttccacaacacatggggattatgaaaactaaaattcaagatgaggtttgggtgggcacacagctaaaccatatcaatagtaatctccattttacagacgagaagcaggatcagagaagttaagtgatttggtgaaagtggtgtagctagtaaatggcagactctggattctagcccaggttatacacctctaaagtacatgttttgctacaaggatagggatttttgccactaggtttatgagaaatgttgatcagtaattttcttttcttgtactgttttagtctggttttggtatcagagt

SEQ ID NO: 743663 - DNA, 602 bp, Homo sapiens
ccgttcccaacaagttcctcatctccatttgagatcatctcagcccgaacttcattgtccatatcactatcagcattttggtcaaagccattcaacaagtctctaggaaggtctcacagtttcccacatcttcctgtcttctgagccctccaagtctctaggaagtttcaaactttcccacattttccagtcttcttctgagccctccaaactgttccaacctctgcctgttacccagttccaaagttgcttccgcatttttaggtatccttagagcagcaccccactctctgtggtaccaatttactgtattagtccgttctcatgctgctataaggacatacccaagattgggtaatttgtaaagcaaagaggtttaattgactcacagttccacagggctggggaggtctcagaaaacttacaatcattgcagaaggggaagcaaacatgtccttcttcataaggtggcaggagtgagaaggatgagaactgagtgaatggggaagccccttatgaaaccacagatcttctgagaagttactcactatcatgrgaatagcatgggggaaactgcccccatgattcaattacctcccact

SEQ ID NO: 743664 - DNA, 601 bp, Homo sapiens
acaggagggcctgatggatgactttaatatattttagttttctactgctcaagtaattctcataattcagttggttttatattataatctattttagccaccgactgttgggtaaatattgaatccctgactcctgtgcgattttggcaagcctagccttgcccttggcattatgaaagaagcagattgaattatgttccccttcacattttcttttatcaatctccctctctcctcctcttttttgttaatactttctcccctttcttactcagagactgtttcattctttccaggcccagatctstgctatgcagcaagagataaatctacttggtctcacaacctgatggcctctgcactgaatttacaagcatgaggtatagaaacatcgcacagattgtaaggggtggccatcccagttgtgtgataagtctcttgtgccacaggtttttctttctgactctttgcctcaacttcactcagctgtccccatgttatctacctgctatcactcttagccttaggacatagacctgacctggacaaatagcacctgggtttggttgctccatagatggggcttccatagcaggtacca

SEQ ID NO: 743665 - DNA, 616 bp, Homo sapiens
actcagcattggatcaaatggacctgatgaacctttacagaagtctccaccccaaaataacacaatatacattcttctcatcgccacatggcacatactctaaaatcaactacataattggacataaaacaatcctcaacaaatgtaaaagaaccaaaatcatactagacacactctcggaccacagcacaataaaaatagaagtcaacacaatgaaaattgctcaaaactatacaataacatggaaattaagcaaaatgctcctgaatgacttttgggtaaataatgaaattaaggcagacatcaagaagttctttgaaaataatgagaacaaagacacaacataccagaatctctgggacacaggtaaggcagtgttaagagggaaaatcatagcactaaatgcccacattgaaaagttagaaagwtctcaaattaacaacgtaacttcacaactgaaagaattagagaagcaaaaacaaatcaacaggaaagctagcagaagatgagaaataacaaaaaccagagctgaactgaaggaatcaagacacacacacacacaaaattcaaaagatcaacaaatccaggaatggtttttttgaaaaagttaataaaa

SEQ ID NO: 743666 - DNA, 632 bp, Homo sapiens
tctggccaacatggtgaaacctcgtctctactaaaaatgcaaaaattagctgggcatggtggtgcctgcctgtagtctcagctactcaggaggctgaggcaggagaattgcttgaacccgggaggaggaggttgcagtgagccgagatcacaccactgtactctagcctgggcgacagagcgagactccatctcaaaaaaaaaaaaaaaaaaaaaattaagggagtcaaaaggtacacacagattttcaactgtgtaggggtcagtgctcctaatgccctccttgttcaagaatcaactgtactaaaagaaaatgaatgccaaccttgaaattctgtacacacwgaaaatatcacttaaaagtaaaactaaataaatcttttcagaaaccaaaaaggaaagaatctgtatttagaatctgtactgagaaaatactaaagtaagttcttcagacagaagaaaaatgatcacagaccccaaaattaaagttttgctagattttaattctaatgaacctctagagattaaagaaaaaaaattagtacagaaaggataaatatgcaaaaagtaataatagtcatgtctcgaggatcttaaatgtgttgagctaaaaattcaaaaacaaaagtcatt

SEQ ID NO: 743667 - DNA, 524 bp, Homo sapiens
cctcatttggaagcttaatcatatcagcgagctcaccgcactgcatttgtaatgacttgtttaccagtctgtgccggctccccttgccacactgggctctccctaaggacaagggccatgtcatgttcttgtttgcctctcttcctgctcccacacattgcctggcacagaacaggccccagtaattacctgggaccctcaggccacgtgactctcatctgtctcacaaaggtgtcttggtccaccaaccggttcctaacctccttgaggtgagggctcaagccatcttctgttcctctcctctcayggggcttcaaaagacactcagtggctcacaaatgcatacctaattgcattaagccatgagtaagatggtttccccatgtctgcatggaggaagaggggacatctgctgtgattacttgcctgacccccacttctttagggggaaccatctctcatttactctttttattttgtattttttattttgagacagagtctcactctgtcacctaggctgg

SEQ ID NO: 743668 - DNA, 624 bp, Homo sapiens
gcgcatcataatttagatggcttcttttatgaaatattttgtatcatttaaatagtccagtgtagtttgttttcattgctcttcatgatgtgaactgtgtatgcagtcacacttttcatttagtggaaaattcagttttcaaatttggcaraaagtggtataggtgggattatattttatttgaggtttccgttttccaggggaaaagagtttgcaatcagcagatcccagcctggtataagaatttttgaaatgttttacaggtgatgatgaacagtctacacagatggctgcaagttgggaagatgataaagttacagaagcatcttcaaacagttttgttgctattaaaatcgataccaaaaggtttgtttatgttttaatattttattaattttaaaatttataagtattgtctttgatttatagtgatactcttggactagaagaatgttgatgttgggctgggcactcccagcactttgggagactgaggtgggaggatcgcttgagcccaggagttagaggctagcctgggcaacatagtgagaccctgtctctataaaaaataataataaaattaggagtgtggtgtgtgcctttggtcctgctacttgggaggct

SEQ ID NO: 743669 - DNA, 437 bp, Homo sapiens
gtctttgtcattttaaaaagctgtcttacaaaaacagtatttcttaatttagttggaataactttttgcacctgtgtctcgtataattgcattaaactttatacaaaactactgaattacagagaatacaggaagacatgttaaatgacagtatgatgacgcaatcggtaaaatccagaatatgggaaactctaagacaaatgtgtaaaaacataagcaatatttgcggggcrgaaggaaatacaaatattaactggatatttgatgtaattaatgaattaacctcaatattttaagatataaaatgatattatgtgggatttaaaaaatccttcagggatacatatgctgaaatactcatggatatgaaatactatgatgcctgggatttatttcaaactaatattggagggagaagaggcagagatttatatgaa

SEQ ID NO: 743670 - DNA, 613 bp, Homo sapiens
ccgagtagctaactacaagcgcccaccactgcttaatatcaagcaatatcaatgcttgatattaagatatattcactagatcttgcaaattcaagtgacagtacattgctattttaatgcctttgacatttaatacctgacctagggcaaagcaccatgtatttgggtgtcagaagggagcacagggctgtgttccaactctacttgttattcgttatatgagtctgaacatgttatttgaacttcagctctttcatcaacaaacatgccattagcacttaaacatgcaattagcacttgccttaccaaactatgatgaaagatttggccaaataattcaaagtgtaaacagccaaacataaaaatgtacaacttcattaataatcacagagccaaattaatacatgttgccatttatgaaatgtgaaaacagtaaagcrgagtcagtacatattgggactgtgaatcaaagattttggcaaaatgtaccatggaccttaataacagtcacatcctttaacctactaattcccttctaaggactcatgccaagggagtaattaaaattgcttacaagatggttcaataaagtaaaaagatacgacctaaatgt

SEQ ID NO: 743671 - DNA, 534 bp, Homo sapiens
tttatactttacatggccaggctataaattttccaaatctttcactctgcttctttttaaattataaattctgtctttaagtcattcctttgttcttgtatctcactatatgtgatttaaaatagccatgcagcagtctgaatgcttaactgcttaggtatttcttccaccagatatcctagtttgtcattcaaattccactttccatgaagctctcargcatggacacagttccactattactactttataacaaagatgctctttattcaattttccaataccttgtttctcatttccatctgagacctcatcagaatggcctctaccaatattaaatataatgttggtagaaaatatagccagtaaaggccatttactgttaatggtggtagagatatagacagtaaaggccatttactattaatgttcgtagaaatatagacagtaaaggccatttactgtccacatcagagactgtgtccatatctctgtcaacagtcatgaccactgaagtaatctttaagaagattc

SEQ ID NO: 743672 - DNA, 587 bp, Homo sapiens
tgtggcattgggaagggtcctgcacttgctgcccacagcctcctctccaccactctcctccttcaatccattttaggcataaaagtcacacatactcattaccaaaaacacctcctatgagacactgaaagaagtcattacccagagcctgccaaagatgaggagaggtgcccagtattaatggccacataaagctctagcctgggctgcactacagaaaccaatyccagggtcctgacctcatgcctgccaacccctgcatccctcgcaccaccactggctcttctcttgctaccttgtcggtttaggccttacagagtctgtctccctgctgactgttcttacccagagactccacagatgcctcttcagcagctgctaatcttgagtcttttgcagcacaggtggctctctctgcctcctgcccgtgactctctcccaaacctgttcactcccttcgacccatggatggccatttggcccagctctggagacgacctggcctgaaatgctgggtctgccacccaccctgcactacctcaatttcctcatctctaaaatggagacagcaacagctaacccgtggg

SEQ ID NO: 743673 - DNA, 622 bp, Homo sapiens
gtttgtacatcctgaaaatgtcacctctgtaataacatagatcccgcctgtctgttgtgttcacctctgtatccccagcacctagaagcaaaccagtataaatatttgttgaatgaggctggttgtggtggctcatgcctgtaatcctagcastttgggaggctggagcggtggattgcctgagctcaggagtttgagaccagcctgggcaacgtggcgaaaccccatctctactaaaaatacaaaaaattagctgggcatggtggcgggcgcctgtaatcccagctacttgggaggctgaggtgcaagaatcgcttgaacctaggaggtggaggttgcagtgagccaagatcgtgccacttcactccagcctgggcaacagagtgaaactctgtctctaaaagcaaacaaataaacaaacaaatatttgttgaatgaatatggaatgtatactttaatgaaaaatcatactgagcaaaagttatgggatgtagttaaaggcagtgttcaaagggaaatatatagttgtaaatgtctacatttaaagaagatcatgtgtaaaatttgtgatagtggaaatgaagaaagatatcaaatcaataaccaaatttataccttgatg

SEQ ID NO: 743674 - DNA, 473 bp, Homo sapiens
aatttcaaacaaaaaaagacaatctatagacaccaataccaagatgacgtagacttacaattatctgacaaagattctaaaagaggcatcctcaaaatgcttccacgagcaactatgaacatgcttgaaacaaatgaaaaataaagtttcagcaaagagaagatgtagagaacaaaacagacatttcagaactgaaaaatgcactaagcaaaagaaaaaagctttagcatgggttaaagggcagaataaagacagaggaaatcagtgaacttgaagacagaacaaggcctcagggaaataacaaaagatctaatattratgtcattggagtccctgatgaaggcagaaggaggggctggaaaagcattcaaagaaataatggctacaaatctcccaaatctggcaaaaggcataaagaaccccgtgaagaataaacccaaataaatgcacaccaagacacatcataaacaaat

SEQ ID NO: 743675 - DNA, 501 bp, Homo sapiens
ctgggaaccgaggcaggtggatcctcttagctctgagctagaggagttggggggccaagaggggagcaagccctgccctctgcacccgcctgatttctggcctcttctgctaagtgccaaccccacccccaacatctggtaggcatggggctcccttgggataccccagatctaggcctccctggaggagggagggagatcaaaatgkacggggagaaggggcggcagctcagaaagggttaaaatgagagctgcgccctggtcctgacccccacgagcagaggctgctggtgtgggaggggaacctcttgtctcagcctccacgtttcctcccctaagtcccagaatcagcctctctaccccacaatttcattccctgtccaagacccctctctgctttcagaccaaacaccccgtccttccctccttgaagggagcgctccgtgcctggggcatagccctggcccccatcccagtacctccctccccacgagtgccctg

SEQ ID NO: 743676 - DNA, 588 bp, Homo sapiens
tagaagttaaagacttaaaacaaattttagcaattaagacaggataccaacatgcaaatgcctagttaaaatggatcaaatattccatctgcacattaaacaaaagcaattgttatgcttgtgcacatggcaggccagaggcccagactgtcccccttccactaaggtggtcctccagtcgaccaggtgtaggttgcatggtagctcttttccaggattctacagcctggagtaataagtcatgccaagctctctctgctgtatccctaagtctggcaccctgcgggtcagcccctgagggccatccagcttccgtctcccaacactaagttcacttcgtrtctctcactacagggaggaaacttagcattccttggagacctgaagggatgcgatgagcttaagaattttcaagagcttattaatcagtcagcccttgttcatccctgagcggatgtgtggtggtattttggtggacctttactaggcactctgccgaataactggagtggcacttgtactttagtccaattggctatccctttcaccctggcatttcatcaaccagagggagaaaaaataagacat

SEQ ID NO: 743677 - DNA, 515 bp, Homo sapiens
acagcccctcttctctggtattgggacacaagagattgttttccttgggtctctctggtccaggatctactgcgatgtaaacctcttggtggcaaagcaggtttgcaagtcatacactgtttccactcttttaggaataaacagagctgaagtcacaggaaccagacccaggaggggactgtgactgkctgggaggcaaaggtgggtatttattggcagtaagatgcgatgcccagccaggggtcccaatgcctaaccacattcacagcttttgttagtctttaaaaagaacacattcttaaccaatgtgttaggctttaggcagcatgagtgagtggccaagagaacagattctacaaccagactgtttgagttcaaatcatagctttgtttccatctagctctaaacctcaacaagccacttaacttctctgtggatctggggatgataacagtgcctaccttgtaggattgttggtaaggtactgaggatggtaacaggcatattccaagaa

SEQ ID NO: 743678 - DNA, 496 bp, Homo sapiens
ttacttctctaattctctcttcaactatatctaatctgctattaaactcatacccttagtttagaatttctattattatatctttcattaaaatatatttcttcaaaaattgtggtctcttttaagactattgatctgtaggttatatttagcttcctcctatgttcctttaatcatattaaaatatttaaatttatgatctatgtccaatagttacaatatctgaggctttcttttgttgtccattctttcaattaacttttgtcctgttacctggtatgttttamaattttttattgtggactcaaatttcttggaattttacttgcaggtattctttatgagtagaaggggaaagaaaggattcctccagagaggatctgcctttccctctgccaggcatctggaggcccgtgcacctgggagcgtttgaagctgaattccctgcttgagatgttgtggctgtccaggcagcatgcagtgggattgtacatcc

SEQ ID NO: 743679 - DNA, 633 bp, Homo sapiens
tttgggtgggtcgaatgctcactgctggtcctgtcctgctctaaaatgttcagatatgtaatgggttatttttgttggtatttgggtgggtcaaatgctcactgctggtcttgtcctgctctaaaatgttcagatatgtaatgggttatttttgtcggtatttgggtggtatttttgctctatgacctcccatttctctgacgtctctagattcctttgttatttgtgatttctgcttctggtggtgacaacaaaatctgccattgctgtgcagcygcctcacccatggagcaggcttatcctctacaactattctacagaaaagacaagcaaggtctgcgtggagtgaaagcgccttctttccatatcggatgctggaagctgtgatgttggcaaacggctctttgcatgaagtactgtgtactgaaccaggaaagtgaggtgcagacgcggaagtcaggtgcagatgtgttgggcagatgagctatggtgatggcgggtggccattccctataagagagtggctcctctattattaacaaaataaaaattaaagaaggtttccattgagtttgctagttcttcactagcaatattcccagctggttgaccttcatttgttttagtttgatt

SEQ ID NO: 743680 - DNA, 605 bp, Homo sapiens
aacttaggaggagtgaagagtggaagagtgcccggtgcagggatgggtgggaggaacctggggtagtgtgcacgcctgagacagggtgggggacacgaagggagacaggcgagggtgggacaggcaagggtgggtagtgtgcatccctgagacggggtgggggacacggggggagacaggcgagggtgggtagtgtgcatscctgagacggggtgggggacacagggagacaggcgagggtggggagggagacgctgactccgtggtggaacgtgggtaggtgataggctggctccctgagcagcccctcccctgtggtgcagagctgtgggtctaggggtgagggagccatcatctcatctcacgccatggagacacaggtgtggcttctgttcctgtatctctagtaaatgtttccttctgagaaactgggtctgtcagcctctttctcaggcctcttggttccctcagacttgggggtaggtgtgcacaggcctgcctgccaggggacaggaaccccaggggaaataaaggtgatgctcaaacccagaccaccgaatgctctgaacacacttgcttgctttcaggtggaaacattcacagtg

SEQ ID NO: 743681 - DNA, 605 bp, Homo sapiens
aacttaggaggagtgaagagtggaagagtgcccggtgcagggatgggtgggaggaacctggggtagtgtgcacgcctgagacagggtgggggacacgaagggagacaggcgagggtgggacaggcaagggtgggtagtgtgcatccctgagacggggtgggggacacggggggagacaggcgagggtgggtagtgtgcatgcctgagacggggtgggggacacagggagacaggcgagggtggggagggagacgctgactccgtggtggaacgtgggtaggtgataggctggctccctgagcagcccctcccctgtggtgcagagcygtgggtctaggggtgagggagccatcatctcatctcacgccatggagacacaggtgtggcttctgttcctgtatctctagtaaatgtttccttctgagaaactgggtctgtcagcctctttctcaggcctcttggttccctcagacttgggggtaggtgtgcacaggcctgcctgccaggggacaggaaccccaggggaaataaaggtgatgctcaaacccagaccaccgaatgctctgaacacacttgcttgctttcaggtggaaacattcacagtg

SEQ ID NO: 743682 - DNA, 602 bp, Homo sapiens
tcactttccctcctgctgaagaggcctcagtgcccggcgggtgcacacaagcggcgcagtccctactctggcgggaaacacaggatgtgaaagtattttatgaaacagtttcagtgaagaagaaagtgggtcattttctaatttgaaaaatccagagtcttctatttttctttgaaatttaaggagaagcaaagtgcttttaaaatgtttgcgtattagcataaacgaytacaaatatttgtgtgtttcctggtcgatgaaaacacgccgctgccagcaggatgagatccgaatgtgaatggccacacttcagcaggagtgttattccaccagcgggagcgttattcccccagcgggagcgttattccccttcccgtttcctgttccttggtgttgactttaatgcatatgttcagatacacagaggaatagaattgtcaaactcggtcaccagcaggtctctcattattagaggacaccctgatccaggacagcagaccaagggtgcttagtttttacactatttaatacacagattattttcatcaatgttaagactacagcttcctgaagtcagaccccaggccttttattggtaccta

SEQ ID NO: 743683 - DNA, 612 bp, Homo sapiens
gagaagcaaagtgcttttaaaatgtttgcgtattagcataaacgattacaaatatttgtgtgtttcctggtcgatgaaaacacgccgctgccagcaggatgagatccgaatgtgaatggccacacttcagcaggagtgttattccaccagcgggagcgttattcccccagcgggagcgttattccccttcccgtttcctgttccttggtgttgactttaatgcatatgttcagatacacagaggaatagaattgtcaaactcggtcaccagcaggtctctcattattagaggacaccctgatccaggacwgcagaccaagggtgcttagtttttacactatttaatacacagattattttcatcaatgttaagactacagcttcctgaagtcagaccccaggccttttattggtacctacacacccggggtcaggtgcagcctgcacatggcaggtacttgaggaacacctgtggacaagctggaagagtccggtgggaagggttttcagtgacaagcataggaagggttcgtgacacctgttcctattacagacatggggaggttcaaagtgaaccagtcaggaataatctcagcctcaccccagaaggaa

SEQ ID NO: 743684 - DNA, 628 bp, Homo sapiens
tgacacctgttcctattacagacatggggaggttcaaagtgaaccagtcaggaataatctcagcctcaccccagaaggaatttacaaatgaggaccatatatggcatggactagagggtcatatcaacccacagactgtggcattcttggttccattccccactatttggataaccttgagcaaggtagtctttgagccctgaaatggtgaggaacatgcccttagccatgggatgctggcaggtcattgatactgtcctatctatgaacggggttttcctgtctttaaatggggtgatgaggccacctcgcaaggcagcatgcagagaagcaagtccacacggcagacactcagccagcgcagcgcccagcacagacgtgctcagcagaygcacactctcagctctgacagccacggtgcaagtcagatgcaagcctgcaggctgagccgggcagtctcctggcctcaggtggacctgcagtcagagacagtccctcccttctgcggcatcctttccttcctgtgtgcacgctgtagaatagcgggctgggggtgtttaagaccagaagcagaaaactgacaactttgttgcctggaaaaaataaggtggacaatactggaactaat

SEQ ID NO: 743685 - DNA, 552 bp, Homo sapiens
cttcaggatcttgattccgctgttaaaaatttccattgaaagctctgcccttggctgcagctcatctgggtgcaatggttttggaacccatggagtggaaagtttgctcaactttaattttccagccagaattatgtaagctgaaccagccgagatgtctatggtgttggctgctgtttctgctgttaattgttggtyctctccaattaggatataaacaaggttaattttttccttgcaaattgatgagggggtctgccactataggattcatcttcaatatcatctcattctttcttaaaatgagttctccatttgaaagctgctgatttctttggggtgttgtccctataaacttttcataaagcatcaatgacttcatcattgttccacccatgtttcaccacaattttgatgtttgttcttccttcaattttagcagaattcatgttgctctgataggggctcttttcaaactgatatattctcttcctagccttaaactagatcctgttcagacatgttacaacaagttagtatgagtttattttg

SEQ ID NO: 743686 - DNA, 513 bp, Homo sapiens
ttgtttacttgatgtgatcccgtttgtccatttttgctttggttatgtgcacttgtggggtattgctcaagaattttatgcccagacaagtgtcctggagatttttcccaatgttttctgatagtagttttatagttagcagtcttagatttaagtattttatccatttttatttgagttttgtacatagtgagagatagaggtctagtttcattcttctgcatatgggtatctagttttcccagaaccacatattgaagagaytgtcttttttgcagtgtatgtttttggcacctttgtcaaaaatgagttcactctaggtgtgcagatttgtttctgagttctctattctgttcctttggttatgtgtctgttgttatgctactaccatgctgttttgatgactgtggctctagagtataatttgaagtcaagtaatgtgatttcctccgttttgttccttttttaggatagccttgactattctgggtcttttgtggtttcatatacatt

SEQ ID NO: 743687 - DNA, 618 bp, Homo sapiens
ttacaagtgaaagtgtctatgtttggtaacttaaatttgttattttgtattatctgtgcctttggctctcttccatatgataatcccattctcttttcattgaactaggaaaatgtagatcaggtcttaagagtatcatatttctaatgctttcactattttatatgtacagtgatattattattattattttaaataaaagctcttgagaaagaagctagtgttttctatttcagctgtttcagcagctgctgtaaagataagcaagctttcaatatacctgcttcctctgacttttcctttcccctaaatttaagtcgattataggaaaaaatgtaacctataaagctgaggaggacagatcacatcaatagaacccrcatgacaggtgactaatggtaacaaagtggacccatgggatgatggggaaagttagggaggctgtgcataccttcatgacctagattggaagctgagcctgaaacctagttagatacatatgggttggaggtgcattgcacataaatgaagtactagtcacttccattccatctaaggctgcttcagctgtacttttggaagagatgttaagaattaaatgtgtgcattatttaaaca

SEQ ID NO: 743688 - DNA, 645 bp, Homo sapiens
ggtaaactcatttaagctgaggttctcacttagttgacattgttttttggatgtctcaagccatctcaaattagatggagctaatactaaaacttgggttcttctctccaagctagccctcttccagtttccccatcctagtgattggaatcacccttcatccagttatgcaagtcagaaccttaggtgtcaccctagatccactgctgtctcacttcccatatctgattatcatcacatcctggcctatgtaccttctaaatagctcttgactctgtcctcatctctccacttccactgccaccaatttagtcaaagctaccatttaacctctgccctggaccattggagcagccaagtacctgatctttctgatttcatttcttgtaactkccaatttgttctccagagtgcagagtaatctttttgacacacagatcaatatgtcactccctacttaacatcccacaatggcttctcattgcccttggaataaagtcaaagccccctaacatggcttttatggtgtggcatagtccatcctatttcagtgcctggtatacatatcatgttctcttccaccacaggaacttggaacgtgtggtttcctctgcttggaacattctcctctcctcttcacctaat

SEQ ID NO: 743689 - DNA, 682 bp, Homo sapiens
cctgggcatgcacttaagctggctcaataatcctcggtgattgagacttatgcttcagtcactcattttggtgaaggttgagatgacaaaagccctcatggacttgagcctcttaagactaactcccctaagagctggcatggtcagacaaagagaatgctactttctacttcatgtcatgggtccctggcctttttgactagcagccagatgggaaccaamaatcagacccccaggtaacagagaccagagagagatgttctcacttggcaacaaagccaatttctcaggacatacaaatagacaaaaggaagatctcatttgatttttttctgagagatacactgcaaagtttgcctaaacagatgctggtctgctgagaaatatgaagtcaccagtctgcttggtgggcttaaatgacaggcttataaaaagaccttatgcccatgttctgccctacaattctcctctttctgacaaatgacaacaagacaaaggaaagcaaagaccatctctgaaggggcagggaccagaaatgcagaatactcatagcaaaaataaaaacactagatgtataccaagaacaagtttacaaaaaggttttctactactaatctaagtttggaaagaaacatgagactagtagtgatattaccacttgttcaacctggttccacaagca

SEQ ID NO: 743690 - DNA, 627 bp, Homo sapiens
gaaggctattctaaagaagaaaaaaaatgggacaggttttctgggtagatctgcaagtctggctttaagagcacaaggaggaaaagtaacaaaagggctggactactgtaaaagttacaaatacgtagttagaccaatagatctatatagtcaggtttttgtcatgtaatttattaactattacagaaacacaactaagaatatcaagtatttctctggctcttgatagaaaaaaaaaatcagctgacttaatcctttrctgtcaaaagagttggcgtttcctgttctgggtgctactgccaaacgttctggtgcttagaggtgggatgcacgacgtcaaccaccgacttatcaatgcagccggctgtgtgtcacaattggccgttaccttaagcactgagccacacgggattagttcagccatttcaagaggtacatttaacgtcggcagttctgctttactaaaatgcagtagaggtactcttctgtcccttccgtttatagttctctgagagagttatattttttggttttgttttgtgttttcttttgaattttatatcttgtatttatccctgaacatgttttgtacttttttttttaagaaaaggaattattttgtgtata

SEQ ID NO: 743691 - DNA, 617 bp, Homo sapiens
aattgtgatgaggtgcaactatcatctatcaattaatcaatctatatttatcatttctcaaataatcaatcaattatctatcatctatcaatcatctatgcatcaaacgatgtacttacaacaattattaatgcttacctagtatccctctaggttgataagctatatctctgtctagatttttttttattattgggcctttatggtgttttgttgttgctttgaacgttttttcacaaatgacttttttcccrtttcagattctttcccacattggaattactggatcaattccaataattccaagctgccctaggctctcgttaggtattgcaagactgcagcagcccctgggcccaggctgcagcggagagcatgagagcatggactctcccacacggacgtcttatgaggccttcagcacttgctttactatcagtagttagtagatgcgtcgggtactgaagtggcattgcttcatgtgcccttaatgtcagcccactgagccttttcctggctgaagacatatttgtatttggtgccttttgcagtgggtactggatgctagcctcttgggcccttcctcactggttacatgttttcacgggccatgtata

SEQ ID NO: 743692 - DNA, 536 bp, Homo sapiens
tacaattttgcctgtataagggtaaatttctctcctgaaatttacccctgcctctataaacccttgcttgtaagctgccagggaggttggctcatttttttttttttttttttttgagacggagtttcacttttgttgcccaggcttagattttccacattctctcaagttttwtaaatatctatttatgctttgtgattttgtgattttggctttttaaaattgaaatctgcatttgatctgaaatttgttttgatcaatgtcatttccactttttacatgaagaatgtgtattgcttgtttttagtaagacaaaccctaagttttctttttgaccagaggaataaaaggcacattttaataaaacagtaaaatccacagataatcccacagcttgggccaaatgatctctgctgagatctctgcagcaattagctttaggaggggtttggcctttagagtgggcagctctgaaacagcttcttttttcaggatggtgggctggtacgcggctgcttcagcagggataccttcac

SEQ ID NO: 743693 - DNA, 536 bp, Homo sapiens
tacaattttgcctgtataagggtaaatttctctcctgaaatttacccctgcctctataaacccttgcttgtaagctgccagggaggttggctcatttttttttttttttttttttgagacggagtttcacttttgttgcccaggcttagattttccacattctctcaagttttataaatatctatttatgctttgtgattttgtgattttggctttttaaaattraaatctgcatttgatctgaaatttgttttgatcaatgtcatttccactttttacatgaagaatgtgtattgcttgtttttagtaagacaaaccctaagttttctttttgaccagaggaataaaaggcacattttaataaaacagtaaaatccacagataatcccacagcttgggccaaatgatctctgctgagatctctgcagcaattagctttaggaggggtttggcctttagagtgggcagctctgaaacagcttcttttttcaggatggtgggctggtacgcggctgcttcagcagggataccttcac

SEQ ID NO: 743694 - DNA, 536 bp, Homo sapiens
tacaattttgcctgtataagggtaaatttctctcctgaaatttacccctgcctctataaacccttgcttgtaagctgccagggaggttggctcatttttttttttttttttttttgagacggagtttcacttttgttgcccaggcttagattttccacattctctcaagttttataaatatctatttatgctttgtgattttgtgattttggctttttaaaattgaaatctgcatttgatctgaaatttgttttgatcaatgtcatttccactttttacmtgaagaatgtgtattgcttgtttttagtaagacaaaccctaagttttctttttgaccagaggaataaaaggcacattttaataaaacagtaaaatccacagataatcccacagcttgggccaaatgatctctgctgagatctctgcagcaattagctttaggaggggtttggcctttagagtgggcagctctgaaacagcttcttttttcaggatggtgggctggtacgcggctgcttcagcagggataccttcac

SEQ ID NO: 743695 - DNA, 587 bp, Homo sapiens
  misc_feature 1, 2, 3: n = A,T,C or G
nnnaagatattcccgtttccaacgaaaccttcaaagctatccgaatatccacctgcagattctacaaaaagagtgtttccaaaatgccatatcaaaacaaaggttcaactctgttagttgagaacacacatctcaaataagtttctgagaatgcttctgtctagtttttacttgaagatatttcctttctcaccataggcctgaaagcgcttgaaacgtcagcttgcagatactacagaaagagtgtttcaaacctgctctatgaaagggaatgttcagtyctgtgacttgaatgcaaacatcacaaagaagttcctgagaatgcttctctctaggttttatatgtaatcccgtttccaacgaaatcctcaaagctatccaaatatccacttgcagattctacaaaaagagtgtttcaaaactgctgtgtaaaaagaaaggttcaactctgttacttgagtacacacatcacaaagcagtttctgagaatgcttctgtctggtttttatgagaagatatttcctttttcatcataggcctcaaagcgctgcaaatgtccacttccaaatattacaaaaagagtgttt

SEQ ID NO: 743696 - DNA, 383 bp, Homo sapiens
tgtttccaaactgctgtgtcaaaagaaaggttcaactctgttagttgaggacacacatcacaaataagtttctgagaatgcttctgtctagttcttatttgaagacatttcctttctcaccttaggcctgaaaacgctcgaaatayccacttccagatacgacagaaacagtgattcaaacctgctctatgaaagggaatgttcaactaggtgacttgaatgcaaacatcacaaagcagtttctgagaatgctgctgtctactttctatttgtaatcccgtttccaacgaaatcctcagaactatggaaatttccaattgcagattccacaaaaagagtgtttcaaagctgctctgtaaaaagaaaggttcaactctgtgagt

SEQ ID NO: 743697 - DNA, 621 bp, Homo sapiens
agtgtttcaaaactgctctctcaaaacgatggttcaactctgtttgctgagtagatacatcatgaaaaaatttctgacattgcttctatctagtttttatgggaagatatacccgtttcgaacgaagccacagagtggtccaaatatccacttgcagatcctacaaaaagagtgtttcaaacctgaactatcamaggaaggttcaactctgggatttgaatgcaaacatcaccaagaagtttctgagaatgcttccgtttagttaggtgcagttatcccgtttccaacgaaatcctcagagaggtccaaatatccacttgtagattctacaaaaagtgtgtctcaaacctgctccatccaaaggaatgttcagctctgtgagttaaactcaatcatcacaaagtattttctgagaatgcttctgtctagtttttctatgaagctattccctttactaccataggcctcaaagcgctccaaatctccacttgcacattccacaacaagagtgtttccaaactgctctatcaataggaatgttcaactctgtgaggtgaatgcaatcatcacaaagcagtttctgagaatgcttctatctagtattaggtgaagatatttctt

SEQ ID NO: 743698 - DNA, 529 bp, Homo sapiens
agtgtcccccctcccccagcacaggatggtaagcacacaggtcccagacaggggctggatggctctgaagctggtagccctgatctacctaatactgcagctgggctgcatcgccctcaccaacttctgactggacttcctgctggccgccactatggtgctgccgctgtgctcgccgagcctttgggccctggaccctctgtgctgtcctgctggtgttgacaagcccrgcagccacgctccttggcagcccattcctgtggcgggagctgcaggaggcaccactgtcactggccaagggctggcagctcttcctggcagcactggcccagggtgcgctggagcaccacacctaaggcgccctgctcttcccactgctgtccctgggcctctgcccttgctgactacttttctggaatgtgctcttctggaagtgagatctgcctgtccggggcaccaggctgggacagagactccccaaggaccccattctgcctccttcaagggaaataaacaagtgcctgtttca

SEQ ID NO: 743699 - DNA, 613 bp, Homo sapiens
ttaatttatgcacggtgaaggaggaaagaccaaaaacaggcaagactcatcaactcatgttcctgctcagggactttgctccgtaacttatttcccaccacacttggatactcaacctcattctcttggtttctgccactcagccaacaaatatattctagtgtcttccattctttttttttttwaaaaaaaagaaaaaacatttcatattttaccctttctatgctctcccttccctgcttatacagcagtcaacattcctgcttctttaccttccattcattccataaccccatctcctaatgctttacgattgtgcctttatctgaagctattacaaaaattaacacagtcatactgtagtacaccaaacaagcagaatggggaaatttgattccacaaatactccaattttgtctatgactatgcctactgatggaaatttggactgcaagagagatgtaattatgagtttctccttggctttaaagtgcagaaaattggaaattggaaacagtaagcctcctaaaattttcacaagttgggcagggggtgagtatcttatatttatgtgtgcagttatattgctttaaaaagtttttccagcctgggc

SEQ ID NO: 743700 - DNA, 572 bp, Homo sapiens
gaaataatctctccagttaagccaaagagacaaattataaacaacaaattcagacagcaatgaaaggaatctttaactgagacagagactatatttgttgtcaataacaaagagaatgataactagtattacagccagagctgtagaaccttagaatatyacagttttgtccagctacatttttcagttgataggtacatgtgtatgttgggatagctgaaaaatatggagtccaaatagtaaaattactaccctgttcaagctctattgctttctcaaatctattgtacaaatctcgatttaattgccctatgcccacttgaattataatatgactgcataataaatgtaatattatgaaatattataatatattgcttaaatataaatttaattcaatatcatttagtttcagaaagcttttataaatcaagggatcaattttcatagcattaacatatctacgcacatgattttaaaaccattttgcctaaatatgcttatgttggtttagtttacttataaaacaatataagaaatatatacatcaaactttttaaaacagagtttca

SEQ ID NO: 743701 - DNA, 572 bp, Homo sapiens
gaaataatctctccagttaagccaaagagacaaattataaacaacaaattcagacagcaatgaaaggaatctttaactgagacagagactatatttgttgtcaataacaaagagaatgataactagtattacagccagagctgtagaaccttagaatattacagttttgtccagctacatttttcagttgataggtacatgtgtatgttgggatagctgaaaaatatggagtccaaatagtaaaattactaccctgttcaagctctattgctttctcaaatctattgtacaaatctcgatttaattgccctatgcccacttgaattataatatgactgcataataaatgtaatattatgaaatrttataatatattgcttaaatataaatttaattcaatatcatttagtttcagaaagcttttataaatcaagggatcaattttcatagcattaacatatctacgcacatgattttaaaaccattttgcctaaatatgcttatgttggtttagtttacttataaaacaatataagaaatatatacatcaaactttttaaaacagagtttca

SEQ ID NO: 743702 - DNA, 588 bp, Homo sapiens
gcagtacccacgtactacatcaagggctttgagtgagtgcctaagacttgctggctttaagtatcaggttgaccacagtggggtacagcactaaacaagctcctgtggtcctccattccaggacttggttcttgttggcacttttggacctgtcctgtgcccgaggggagcccagtgccctgaaggatgagttcaaagccaggaagcactcaccacaagccgatagaagagccctcgagccttaagggaacatcagtaatagtctggcaatgctccccaagggctgtggtggtggtggccatgggtgagactcctttgcctttggaaagcgaagggaagagtgaaaagaactgcrtctagtggactgaaggctacgccagccatagtacagtagaaaaccaagcagacttctaaagtttttgattctactccctggctcctggatagtacctctggacttccaggggcctggggaaactcaccaccctgaagggaggaacataggcttaactggctttgccacctgctgattacagagccccaggaccttggtaaaacacaggcagtagccatggagtggttagagta

SEQ ID NO: 743703 - DNA, 548 bp, Homo sapiens
gtatactaatggttggaaagttggatcctttctctgcaggtagagggtaagttcttcatttttatggggcataagtgtattatgttgaatgggaacatattctcactgctggtgttattgtttgtgattttgcatataaatagaaaggcatgttaggataattagtggccagatgggccagggaagtgtatagcatttaccatcaatttcttatggtgaactgtctaaagtgctaaatatggaaaactaagaattgcattactctaattttcttatamctgaatgaatgtattttatttttatttacaagatgtagttgtgtaaaatactgtatatgaaaaccgtgttttctgagacttctgcagcttcagttggtaagtcctatgatggaaatgtttgcatttctgatgtagcctttggattgtggctactcactcttatgactggttcattattgtgaaagcaaattccagttcccttgataacccagttctatagtgtaggttttaaacaacatctgcatgcattttgcaagccatttaatacca

SEQ ID NO: 743704 - DNA, 622 bp, Homo sapiens
agtttattttacatctttcataatttttatttttgaaaaaggaggacttctgagtttgatatgagcaaaaattctggcatagtcaacaccatttgagaatactagaagtcaaagaagaggggagagacttcttatttggtatttagccatttgtagtcctgggtagttataaattaactstaccctgatcatattgcaggtccttctaattatgcagataattgtttatggagtaattggttaataataatatgagaagttattaaaaatgatacctcctctttccatcttcctccttatgtacatcatattgtagatgaatctgttcttttctaacagtaaaggtaaaataagggaatactagttaataaatatgtcaggaaaggcaatttgggcgactttggttcattgaaaagtatcatagtatgagagcattttcctaaagtgtcaatgtatttcaaatagaatattaaaaagaataaatgcattattgacagaacagggacagcatggagtaaacagagaacccagccatttatttcattcttttaatatttgaatgagcttagtacttgtatttttgagaagtaaatggatcctgagtttttactgacacaatttt

SEQ ID NO: 743705 - DNA, 653 bp, Homo sapiens
ctgatcaatacaatggagatatcaaataaggaagcaagtttattttacatctttcataatttttatttttgaaaaaggaggacttctgagtttgatatgagcaaaaattctggcatagtcaacaccatttgagaatactagaagtcaaagaagaggggagagacttcttatttggtatttagccatttgtagtcctgggtagttataaattaactctaccctgatcatattgcaggtccttctaattatgcagataattgtttatggagtaattggttaataataatatgakaagttattaaaaatgatacctcctctttccatcttcctccttatgtacatcatattgtagatgaatctgttcttttctaacagtaaaggtaaaataagggaatactagttaataaatatgtcaggaaaggcaatttgggcgactttggttcattgaaaagtatcatagtatgagagcattttcctaaagtgtcaatgtatttcaaatagaatattaaaaagaataaatgcattattgacagaacagggacagcatggagtaaacagagaacccagccatttatttcattcttttaatatttgaatgagcttagtacttgtatttttgagaagtaaatggatcctgagtttttactgacaca

SEQ ID NO: 743706 - DNA, 622 bp, Homo sapiens
agtttattttacatctttcataatttttatttttgaaaaaggaggacttctgagtttgatatgagcaaaaattctggcatagtcaacaccatttgagaatactagaagtcaaagaagaggggagagacttcttatttggtatttagccatttgtagtcctgggtagttataaattaactctaccctgatcatattgcaggtccttctaattatgcagataattgtttatggagtaattggttaataataatatgagaagttattaaaaatgatacctcctctttccatcttcctccttatrtacatcatattgtagatgaatctgttcttttctaacagtaaaggtaaaataagggaatactagttaataaatatgtcaggaaaggcaatttgggcgactttggttcattgaaaagtatcatagtatgagagcattttcctaaagtgtcaatgtatttcaaatagaatattaaaaagaataaatgcattattgacagaacagggacagcatggagtaaacagagaacccagccatttatttcattcttttaatatttgaatgagcttagtacttgtatttttgagaagtaaatggatcctgagtttttactgacacaatttt

SEQ ID NO: 743707 - DNA, 622 bp, Homo sapiens
agtttattttacatctttcataatttttatttttgaaaaaggaggacttctgagtttgatatgagcaaaaattctggcatagtcaacaccatttgagaatactagaagtcaaagaagaggggagagacttcttatttggtatttagccatttgtagtcctgggtagttataaattaactctaccctgatcatattgcaggtccttctaattatgcagataattgtttatggagtaattggttaataataatatgagaagttattaaaaatgatacctcctctttccatcttcctccttatgtacaycatattgtagatgaatctgttcttttctaacagtaaaggtaaaataagggaatactagttaataaatatgtcaggaaaggcaatttgggcgactttggttcattgaaaagtatcatagtatgagagcattttcctaaagtgtcaatgtatttcaaatagaatattaaaaagaataaatgcattattgacagaacagggacagcatggagtaaacagagaacccagccatttatttcattcttttaatatttgaatgagcttagtacttgtatttttgagaagtaaatggatcctgagtttttactgacacaatttt

SEQ ID NO: 743708 - DNA, 622 bp, Homo sapiens
agtttattttacatctttcataatttttatttttgaaaaaggaggacttctgagtttgatatgagcaaaaattctggcatagtcaacaccatttgagaatactagaagtcaaagaagaggggagagacttcttatttggtatttagccatttgtagtcctgggtagttataaattaactctaccctgatcatattgcaggtccttctaattatgcagataattgtttatggagtaattggttaataataatatgagaagttattaaaaatgatacctcctctttccatcttcctccttatgtacatcatattgtagatgaatctgttcttttctaacagtaaaggtaaaataagggaatactagttaataaatatgtcaggaaaggcaatttgggcgactttsgttcattgaaaagtatcatagtatgagagcattttcctaaagtgtcaatgtatttcaaatagaatattaaaaagaataaatgcattattgacagaacagggacagcatggagtaaacagagaacccagccatttatttcattcttttaatatttgaatgagcttagtacttgtatttttgagaagtaaatggatcctgagtttttactgacacaatttt

SEQ ID NO: 743709 - DNA, 525 bp, Homo sapiens
ttgcatgccatttagtgcatcattagtttaatagagacttatgctctagtgtaccaaatggtatcccagaggcctaaatttggtcaatctaacaaattcaatgctagtctgaaatcttaggaaaatggtgctgaatccaaatgtgagttagctgaaattcgtattataactttgcattgggaataagatcatgtgaggtctcaaaggaaaccaatcactatttatataggccatgagttctggaagaatctattagcctattttggaataggaatgtgatgtgggagcgtgaatggaaaawaactcttcagggaccttataatgtaatgttaaagccaatactctttcaatatatcatctaatgagaaatggaaaacaaatttcagttgtgtgtacttggagtaatattagtaagagtatcttcacagtcactttgagactaaattctcttattccatggttctactatttttgccatcttactcattacaaactttcttctacattgtgtatgatgtcttcatt

SEQ ID NO: 743710 - DNA, 672 bp, Homo sapiens
gtttttagtctcatttggcaaattttcagtcattattatttgtaatttatttttcatttctttttctctctcctatccctctgctcttccaattttgcatatactactgtgctcaacgatgtcctagttcctctgagattttattttctttaatgccttattctttctgttcttcaaattgtaaaatgtatatattgaactaccttcaagttcattgattctttcttgtaccagctccaatctactgcacagcttctctagtaatttttttttactttggttattttacttctttagaatttccattttaaaatagttcctaactctttaatgatattctctatttaataactgtttagtattataccattaattatttaaatatagcttcctttagtatttgcaacatatttattataggttctttgaagtccttttgtgcagtccaacatctagctcttctcaaaaacagtttttggtgcctgattgtacctgtgcatgggtcatatcttcctgattctttgyaagtctcttttttttgttgttgctaaaatgagagtttttgtataacattttgcagcaactctggatactgattcttttccccagggcttgtagctattatcatttgcttatttgcttttttgtttgttttagtgattggcttggact

SEQ ID NO: 743711 - DNA, 654 bp, Homo sapiens
catgacacagccccaggagatcgtggtgacaagtgcctacagcagtaggggcacagcttggtattataaattttaagaagatatgagacataaataaattatctacaagatgtacattggttcagtctggaaaggtgggactactcgaggagaaggcaggacaactcaaagtggggagggtgcttctagatcataggtagataagagacaaatggttgcattcttttaagtttctgattagcctctccaaatgaggcaatcaaatatgcatttatytcattgagaagaggagtgacattgaataaaatgggaggcaggtttgcataagcagttccccgcttgacttttccctatagcttagtgattttgggtccccaagatttattttcctttcacatttctcccttctctttttaaaaatcatttgaagaaggcattttaggagaaaatgagtctctggttgcaaggtttgactgatctttcatggctaggatggtttatttctaggatggtttattaggaaagttcatttttagcaagttgtgaagtttcatgtcttataaaaagaaactaagtggaggaagggagaaaaacaaaaacaaaagaacattcctggaaaatcaatataggtgacactactctgaagttcataca

SEQ ID NO: 743712 - DNA, 654 bp, Homo sapiens
catgacacagccccaggagatcgtggtgacaagtgcctacagcagtaggggcacagcttggtattataaattttaagaagatatgagacataaataaattatctacaagatgtacattggttcagtctggaaaggtgggactactcgaggagaaggcaggacaactcaaagtggggagggtgcttctagatcataggtagataagagacaaatggttgcattcttttaagtttctgattagcctctccaaatgaggcaatcaaatatgcatttatttcattgagaagaggagtgacattgaataaaatgggaggcaggtttgcataagcagttccccgcttgacttttccctatagcttagtgattttgggtccccaagatttattttcctttcacatttctcccttctctttttaaaaatcatttgaagaargcattttaggagaaaatgagtctctggttgcaaggtttgactgatctttcatggctaggatggtttatttctaggatggtttattaggaaagttcatttttagcaagttgtgaagtttcatgtcttataaaaagaaactaagtggaggaagggagaaaaacaaaaacaaaagaacattcctggaaaatcaatataggtgacactactctgaagttcataca

SEQ ID NO: 743713 - DNA, 614 bp, Homo sapiens
  misc_feature 1, 2, 3, 4, 5: n = A,T,C or G
nnnnnttttaggtaatattggcaaagtgatgaaaaataagtccctagctgtccttccaaaatgaaggagatgtaaagactttcccagacaagcaaaagctgaaggaattcatcaccaccacaccagtcttacaagaaatgctaaagggagctyttcgtgctgaaagaactgagtgctaattagtaacttgaaagcatgaatgtataaaactcactggtagaagtaagtacacagtcaacttcagatgctctaatattgtaatggtggtatgtaagtcactaatatctttagtacaaaagttaaaagacaacactgttaaaaatagtgctttagatttataagctacaataatttgctaaggaatacacaatataaaattatgtaaattgtgacatcaaaaacataaaatatgaggaggttaagtaaaagtgtagagttatattttacgtgatcaatgttaagttgctatcagcttaggatagtatgttataataagatactttattttagcttcatggtaagcacaaagcaaaaacctatggtagataccaaaagacagaaaaatatggaatcaaagcataccactagagataaattttaatcacaaaggaaga

SEQ ID NO: 743714 - DNA, 618 bp, Homo sapiens
agaaacctccacgtgtcagctatccagaagctctctgaacccactcctttgggtttcaatggaagcctcattatgtaggcatgattgattaaatcattggccattggtgatcagcttaaccttcagtcccttccccatctctggaggttgtggagtgggcctgaaaatatcaaccctgtaaccatgacttgtttttttctgattaccagccccacccttgcacttgcgcttacactcctcaaagctacataggggctgcttgtcattagtcaatcattagcatacaaaacagtctaaagattttggttgtatgccaggaaacagggtcaaagaccaaatatatgtttcacaatatcacaatgacccatgagagaagagtaacacatgaaatttagcctcycatactcttgccaactttgtacttggggcctatttcccaacttttatgaggaaagtagagtccaagaagggtctctctgggaaggcaaagaatagaatgcacgactgctgacccaattggaacttgtggagtagggtactgaagaggacagagctgcacacaggggctcccaagtctttggtcaaagcctgtactgcatatatgtaacgtgaaactcc

SEQ ID NO: 743715 - DNA, 628 bp, Homo sapiens
gctaaagctatgattggagctgaacctcagaagacaataaaattgatagttttataggggtgaggggaattttccttccaccctctgaaagtttgacaatttgagtctctggaataaattgacagcagatatattaacaagagaaaagataccacaagtttattatgtggatatgcacgtgggtcctacaaagtatgagactcccagaagagttgggtggttgaagtttatayagtatcctcagctacaaaaagatataggggactgggacatctagagtcaggcggccacaggttatggggtgctgaagggaagaaacacatgaggaacaaatgctgtttttgtgcagatgaagtttctcaggtagcagtccacagaagaataggtagtgtcaatcttttttctcctttcctgttagttaatcttcgctatttgatgatattattgtaaggaggggcctcatgacaattgcattcctttcacaggaactttctttagtgagttaagggaactttagagagagcctcttcatgcctgctttgggagggaaagaggagcaagagactaggggaacagagaaggtcagagaggccttgtttctcctttagttcaaagcactcagcgtaac

SEQ ID NO: 743716 - DNA, 628 bp, Homo sapiens
gctaaagctatgattggagctgaacctcagaagacaataaaattgatagttttataggggtgaggggaattttccttccaccctctgaaagtttgacaatttgagtctctggaataaattgacagcagatatattaacaagagaaaagataccacaagtttattatgtggatatgcacgtgggtcctacaaagtatgagactcccagaagagttgggtggttgaagtttatacagtatcctcagctacaaaaagatataggggactgggacatctagagtcaggcggccacaggttatggggtgctgaagggaagaaacacatgaggaacaaatgctgtttttgtgcagatgaagtttctcaggtagcagtccacagaagaataggtagtgtcaatcttttttctcctttcctgttasttaatcttcgctatttgatgatattattgtaaggaggggcctcatgacaattgcattcctttcacaggaactttctttagtgagttaagggaactttagagagagcctcttcatgcctgctttgggagggaaagaggagcaagagactaggggaacagagaaggtcagagaggccttgtttctcctttagttcaaagcactcagcgtaac

SEQ ID NO: 743717 - DNA, 613 bp, Homo sapiens
cctgacaagacggtgcttggagttctttttttcatttaaaagagttaacaatggcctgaatttgttgaaataaagtagaaacatctgttcaaatacttggccctttttaaaaattgagtatttttattgttaagttgtaagagttcattgtattctggattctagttccttatcagatacataatttgaaaacattttttcacaatctgagggtagtttcactttcttgatcatgtcttttgaagaacaaagggytttatttgaaaaaagtccaatgtatctattttttcttgtgtttcttgtttttgagtactataagaaactattagctacttgaaagtcacaaagatttatgcctatattattatctaagagttctatagtgaaactctaaaatttaggtctttgaaccactttctttttttttgagacagagtctcactctgtcacccaggctggagtgcagtggcgccatctcggctcactgcaagctccaccacctgggttcatgccattctcctgcctcagcctcctgagtagctgggactacaggcgcccaccaccacacctggccaattatttgtatttttagtggagacaaggtttcaccacg

SEQ ID NO: 743718 - DNA, 613 bp, Homo sapiens
cctgacaagacggtgcttggagttctttttttcatttaaaagagttaacaatggcctgaatttgttgaaataaagtagaaacatctgttcaaatacttggccctttttaaaaattgagtatttttattgttaagttgtaagagttcattgtattctggattctagttccttatcagatacataatttgaaaacattttttcacaatctgagggtagtttcactttcttgatcatgtcttttgaagaacaaagggttttatttgaaaaaagtccaatgtatctattttttcttgtgtttcttgtttttgagtactataagaaactattasctacttgaaagtcacaaagatttatgcctatattattatctaagagttctatagtgaaactctaaaatttaggtctttgaaccactttctttttttttgagacagagtctcactctgtcacccaggctggagtgcagtggcgccatctcggctcactgcaagctccaccacctgggttcatgccattctcctgcctcagcctcctgagtagctgggactacaggcgcccaccaccacacctggccaattatttgtatttttagtggagacaaggtttcaccacg

SEQ ID NO: 743719 - DNA, 613 bp, Homo sapiens
cctgacaagacggtgcttggagttctttttttcatttaaaagagttaacaatggcctgaatttgttgaaataaagtagaaacatctgttcaaatacttggccctttttaaaaattgagtatttttattgttaagttgtaagagttcattgtattctggattctagttccttatcagatacataatttgaaaacattttttcacaatctgagggtagtttcactttcttgatcatgtcttttgaagaacaaagggttttatttgaaaaaagtccaatgtatctattttttcttgtgtttcttgtttttgagtactataagaaactattagctacttgaaagtcacaaagatttatgcctatattattatctaagagttctatagtgaaactctaaaatttaggtctttgawccactttctttttttttgagacagagtctcactctgtcacccaggctggagtgcagtggcgccatctcggctcactgcaagctccaccacctgggttcatgccattctcctgcctcagcctcctgagtagctgggactacaggcgcccaccaccacacctggccaattatttgtatttttagtggagacaaggtttcaccacg

SEQ ID NO: 743720 - DNA, 615 bp, Homo sapiens
gtgagccaccgcgcccggcctgatctactttaagtaaagttttatatatggtgtgaggttgggtttcacctttatttatttatttattttcgcatgtggatatctagttgtctcaccacatttgtttagaagataattctttcccccatgaatggtcttggtagcttgtcatagatgtatggttttatttctgaactataaattttattccattgaccaatttgtccattcttatacaagtaaaatattgtttattaatgtagctttgtagtaagccttgaaattggaaagtgtgagacttctaatggtctwttgtgaaaagctgttttgatttctctgtatcccttgcatttccatatacattgtaggatcagcttgccaatttctgaaaaaaaaaaaagaggttgcaggagggaagctaagattttggtagaggttgcactaaatttgtgaattaatttggagaatttttccatcttaaaaatgttatgcctggatctgtgaacacagaatatctttataattaattaggtctttaatttctttcaatgttgttttgtaattttcagtgaacaagtcttatgcttctttggttcaatttactcctaaatatgt

SEQ ID NO: 743721 - DNA, 521 bp, Homo sapiens
cctacaaccaagggatttttgacaaagttgacaaaaataaacaatagggaaaggacaccttattcaaaaaatggtgctgggaaaactggctgaccacatgcagaagaatgaaactggacccatacctctcaccatatacaaaaaattcaagaccttaaactataaaaattttagaagaaaacctaggaaagactattctcaacactggccaaggcaaataatttaagaagaccccaaaaacaaatataacaaaatmaaaaacagacaaataggacttaattaaactaaagatttctgcaaagcaaaagaaactacagagtaaagagacaacctacagaatgggagaaaatatttgcaaattatgcatccaacaaaggattaatatctggactctttagggaagttaaacaaatgaacaaggaaaaaacaaccctattaaaaagtgagcaaaaatatgaacagacacttctcaaaagaaatacaagcagccaaaaaacatgaaaaatgctcaacataactaa

SEQ ID NO: 743722 - DNA, 611 bp, Homo sapiens
tgcttaaaagaggcttggtttcaagccatatccaggccatttctctatttattttatttttttggagacactgtgtaacccaggctgaagtgcagtagtgcaatctcagctcacctcaacctctgcctcctgggctctagcgatcctcccacctcagtctcccgagtagctgggactacaggtgagcaccaccacgcctggctaattttcgtattttttggtagacacggggttttgccatgttgcccaggctgatcttggactcctgagctcaagygatgttcccacctcagcctcccaaagtgctgggattataggcgtgagcccctctagtcaatgttttgtaataaataaaaataatgtcccaggtagcagaaagaacagattgaaaatataaacatggcctagaaaaaaaaaattctgtcatcaagtttactcctagagacttccataaagtccacacagtaagtctttgattctgtcattaagaagtacagtggcaaagaccatatcttcttggtctttcactagtcattaagtcagcaatgactttaaactctccacattccactaactgacctctactctgtttaacaagaacaataacccct

SEQ ID NO: 743723 - DNA, 597 bp, Homo sapiens
gtaagagcagaaatgatcatactcatacttagctattttgactgttgtgaggatgaaatgagagagcatacgtgaagtttttagcatggtgctctggaatccaataagtatttggtaaatgatacacctaatattatcatctcaacagcattaaagaaaaaagacacccattaagtaatctgatggagaccatacctggcagtttttcaccatgagagttttatagactggttttcctcrttttacttggcgtaatccccacaggaatgtgggtgtaagttgaaggggatctggagtgtgcaggatgtatgcagctgaaccctcactatgtgctttagatcccatgcagccaagaacccatttgtcatcaaattccattaaaaggcagggaacagtgtgacaccacactcaggctttgccctgacatcaactgcatgtgtgtaaaaatcagaatatgggctcatatgggccccagcccaagtgttttgctctcttaagttaaaaaaaagcttttataacctaagaccaggtaaagcagagaaaatccaataggattagctgaggatgaactagcattactcttggcttgaagtgatc

SEQ ID NO: 743724 - DNA, 578 bp, Homo sapiens
atgtatgtgtgtgtatatgtgtgtgtgtgtgtggtaaggattaagtattaaggatacttaacatttactctcttagcaaacttaaacaatacagtattattatctattgtcaccaagctgcaatattaaatccccataatgtatttgtcttataactgaaagttagtatgctgtgtccaacattaccccatttctaccatgtcccagattctggcaaccaccattctactctctgttcctatgagttcaactatgttagattacacatataagcaagatcatacagcatctggctgtctgtgtctggtttatttcagttagcataatgtcctccaggtttatccatgttttctcaaatggcaggatttgtttttctttttactgttgaataatattccattgtatatacaccacaktttctctattaattcatttgtcaatggacacttaggttggttccataccttggctattgtcaataatgctgcaatgaagacgacaagtgcagacatctcttcagcatgctcctttcatttcctttggatatatacccaaacattagagtgctggatcatatg

SEQ ID NO: 743725 - DNA, 584 bp, Homo sapiens
aactgttttacttgtcctaaaaggaatataagattatgatagccaaccacagcgaagacagatgcagttccttaattatgctttataagctgcattttaaatgctgtgaacagagcttcttaccacttttgatttgaggtccctggtttgcaaactgtccttttgtrtgctcaataaactttaaaaaatttttctaacttgatctgattttaacacattctatctactttagtgctttttatatcctaaacacatgacgctaacattctatatagctcacttgtttatactgtttattttctcttcccctacactagtgaaattctatgaaggcaggaatgtttgtcattgtcacactactgtatttccagtgcctaatataggcactcgataaataattattgaatgaatgaatcaatcaattgattaatcttaggaaaagttctttaatggatcttaaaaaaaaatcttgtgagcctttagaaaggaaagtgatgatcacctggagcttgtattaggtcactaatagtaaagcatatcagattaaataacttacttttcccataagaccagtgtatctgagg

SEQ ID NO: 743726 - DNA, 610 bp, Homo sapiens
agtaaaagtgtaaaattattacttttctctttccttgtctgtttgtttatgcaatcagttttaatttgtcgtcagcttaaaataatcagttatgatatgatatttctaaaccttgtagtaacctcaaatcaaaaaacatacaactgayacacaaaaaataaaattcaagaaattaaaaacatactagcagagaaaatcacctttactaaaatgaagacaggaaggaaggaaagaagaaagaagaaaacaaagcaaccagaaaacaacaaaatggcagagtaagttctttcttaccaatgctaatattgaatatcaatggactaaactccccagtaaatacacagagtagttgaatggataaaacaacaggacccaacaatctgttgcctacaagaaatgcacttcgctgataaagacacacatgtactgaaaataaagggatagataaatatattccacgtaaatggaaaccaaaaaagaacaggaatagttacagttatatcagacaaaataaatttcaggacaaaaactataaaaagagactacatggtcactatataaggataaaagggtcaattcagcaagaagatataagaattgtaaatatata

SEQ ID NO: 743727 - DNA, 694 bp, Homo sapiens
gcatcagacaaaggtctaatatccagcaactacaaggaacttaaatttacaagaaaaaaacaaccccattaagaagtgggcaaaggacacaaacagacacttctcaaaagaagacatacacattgccaacaagcacatgaaaaaaagctcaacatcactgatcattagagaaatgcaaatcaaagccacagtaagataccatctcacaccagtcrgaatggctactaagaagtcaaaaaataacacacgctgatgaggttgtggagaaaagggaatgcttatacacagtgggagtgcaaattagttcaaccattgggaaggccagtgtggtgattcctcaacaagctaaaaaaaggactgcaattcaaccctataatctcattacagggtatacacccaaaggaatataaatcattctatcataaagacacatgaatacaaatgttcactgcagcactatctgcaatggtaaagacatggaatcaacttaaatgcccatcaatggaaaactggataaagaaaatgtggcacatatacaccatggaatactatgcagccataaaaaagagtgagatcatgtcctctgcatgaacatggttggagctcgaggccatgatccttaggaaacaatgcaggaacagaaaaccaaatactgcttgttctcacttataagtaggagctaaatgatgagagc

SEQ ID NO: 743728 - DNA, 615 bp, Homo sapiens
ttcattgtgtacatatatggttcattttctttatccattcatttgctgacggaacttagactgattccctatcttggctatcacgaatggcgttgcaatcaacatgggagtgcagctatctcgtcgatatactttttttttcttttagatatatactcagcagctggattgctggatcagagggtaggttctatttttagtttttgaggaacctgcatactgttctccacagtggttcccaacaacactgtatgagagctcccttttctccaaaatacttttagactttagaacagtaataaggtacctgcaccctacattagtgaacacctccattaacctttgagcattcccttactttctggcacarcaagatgttccaggttcatcttgttctttcctcgtccaagctctaaaattggatatttgttccaaagtgtcgattccctaaagtggagaatggagtttggaaagcaagatttgggcactaaatgtatacattgctatttagagtgtcattgtttctaagctagaaaacgtgtgtgtatatacgtatgcatgcacatacatacccctgggcacataaacatattttatctacgaattaaaaatcat

SEQ ID NO: 743729 - DNA, 586 bp, Homo sapiens
gagaacaggcatgggaatggatattaacggtatgggataatggtgggaggaacatggtgttggatcaggctgaatttactgatttgggtccactaagtagggactctgcatttaatgttgcagctcagggagtttaaaaaggttctaatagtttatttgcatggttagctgaaatatggattaaaagatggcccactgtgggtaagctggaaatgcctgatctcccttaatatagaggaagggatccaaaggcttagggagatcgggatggtggagtggattagtcactttagttttactcatcccrgctaggagggtgcagaagatatacccttgaccaatgccttgcaaaatagatttgtgagtgcagcaccttcatctttgaagagccctgaaattgctcttctctgtatgtcagatctaacagtgggaaccacagtcactcaactagaaaatttaaatacagtgggaataattggatcctgaggtggcaggggccaagtggcagcactcaaccatcaaaggcaaggcaggcatagatactgtaagggacagcagagacaaagcagcaatcagaacagtctga

SEQ ID NO: 743730 - DNA, 566 bp, Homo sapiens
aaccacagtcactcaactagaaaatttaaatacagtgggaataattggatcctgaggtggcaggggccaagtggcagcactcaaccatcaaaggcaaggcaggcatagatactgtaagggacagcagagacaaagcagcaatcagaacagtctgacttgtgtagagctctggcattggctaattaatcacaatgttcctagaagtaaaatgggtaggaagcctactgcatttctacttaatctacataggaagaaaacttctagrttgagtggacaaaagactaattcgaattataaaaacagaaaatcatggcccctcaatcaatttccagacttgagccagtttacacacccagaaccccttgaatgaagggaagctgggtgctcttgaggaaggaccccactatattaccagcaatttatgcagtgactctttctcccatccttctccaagttttagctcaggtctgacttacagtgggtccagtgggcccccagactcatcctgtggtcatttgcataattggcatagacatacttagcagctgacagaatccccgcattgg

SEQ ID NO: 743731 - DNA, 566 bp, Homo sapiens
ctactatggtgggaaaggcccaatggaagccatttgactccctacctaggaaaacagtaaataaaaaacaatatcgcatccctggagggattgtggagattagtgccaccatcaaggacttgaaacatgcaggggtggtgattcccaccacatrcccattcaactcttccatttggcctgtgcagaagaaagacggatcttggagaatgacagtgaattatcgtaaggttaaccaagtggggactccaattgcagctgctgtgctggatgtggtttcattgcttgagcaaattaacacatctcgtggtacctggtatgcagccattgacttggcaaatgcctttttctccattcctgtccaccagaagcaatttgccctcagctggcaaggccagcaatatacctttactgtcctacctcaggggtatgccaactctctggctttgtgtcataatctcattcagagagacgttgatcactttttgcttccacaagatatcacattggtccattacattgatgacattatgctgactggatccagtgagcaagaagtagcaaacaca

SEQ ID NO: 743732 - DNA, 604 bp, Homo sapiens
tcgacacttgcttggaaaactattcacatgctggaaagcagaggactgtgaacagaaaatctagctaaactcagaacaagtgactggggctgggaagattatagtgtgagaggtcgtttgctccctccactccttctcagatgcgagggtttgcctgccttctgctgggatgccccagctgttaagaggctcatacttccagtaagatttccacaggaggccgggtgcggtggctcacgcctgtaatcccaaagtgaaggccgaggcgggcggatcatgaggtcaggagatcgagaccatcgtggctaacacggtgaaaccacgtctctgctaaaaatacaaaaaattagccgggtgtggtagcgggcacctgtagtcccagctactcaggaggctgaggcaggagaatggcgtgaacccrggaggcagagcttgcagtgagccgacatcgcaccactgcactccagcctgggcaaaggagcgagactccatctcaaaaaaaaaaaaaaaaaaaaaatttcctcaggaacacaatagtctgggtttctgctcccttcctcaaataatctcattaagagaacctttccaatgtgggccacatggt

SEQ ID NO: 743733 - DNA, 607 bp, Homo sapiens
tcatttggagagatagaagattgataaatctagaaaaagattaggaatgatgagatgaatagattatcaatagatttcatgaaacaggttcgattcaatttgggccttgaatgatggtagagttaattattttggcaaaggcattgaggtataaaatgtttttctttaaaactgttagaatttattattaaaatgataaacttctttatcttttcagctggagggcttagcaatgcttccagcacatatgaaatcaycaataactcttagttgaattagtaaattacatgaccacaaaaaagtaaatctacttaaaaaaaacacacaaaatcccaccaccttgacaaaacttcatgatttttgttgatgatgctgttgttttgatttttatttcaaattcttcatttcttatttgtatagtttgaatagttatagtaataaagatataattttctttggttttataagttatataatggcacacacattttccatcttgatttagaatattcataattattctagtagcaaaagaataaataaaatggatgtattgtaatgtacatacctattctgtgttttttagataatggacgcatttctattc

SEQ ID NO: 743734 - DNA, 617 bp, Homo sapiens
tctagaaagcaaaaaaacttctaaattattcttggttcctactggatccttttgactcaacaaaaggaatgggtcaaagttagaatgaggttaagaaaataagtgaagctctgcaaagaaggatgctgacgagttttgagctgtgctttctgcggaagcactgcagagaggtggctgcaggttaaatatcttccctctctccccctccccctccatatttgaagattatgttacctttcagaaaccttttccttttaatctgttcttcctttttcatcttttcctggagagaaatttagagcattatctactttccacyagaggaaaaaatccttttctccatggggtttcctgattgacttggtgaatgctgagaatgcatccctggttcgatatttctccctttagtgattgaagaaaatctctgatgacaatactatgcacctgggggtaacacctaaactcaacacaggcctcctgtgctagttgtgatcaacttgagtgattttgaagagaaggagaaaatggaagcttcaaaacaacttacatcttcacgtgctagtgattcttaactaatcactgctctgacctcacaaacaggtcatcatgctggccct

SEQ ID NO: 743735 - DNA, 564 bp, Homo sapiens
taaaaagcaaaattctggagctatattgcaatccagataatattcttatcctcagaggaaaaaacaatgaccttcacttaagttctgctatattattggctatgatttgaataagaaagcttagtatgacaactgcaaaacatatacttggagaaaaatagcctaaaatataaaactaaggacaatgtaggagcatgtgtgttaatgcataacagacccacagacacagtgggtatcacaagcccttttaatcaagacagaaatatgcacatatatatcatgaacattaatgaaacttgtggaactcctccatggttccaaattatgtcctgtctcaaaatacattyatgtaccttatggtaaagtgatctttgaataatgggatcactgaccattacagttcaccgatgaatacttctaaggaggaaaggagagaaagctaactataagacttaaacagcacctgctgtcagctaaacaaattagctgccctgaaatcacatgtacccacaaggaatgaatagcacaacctttacctaggagactgccttcggaggaaaatgc

SEQ ID NO: 743736 - DNA, 638 bp, Homo sapiens
acatatttattagctctttcaggatttatcaccttatcctaagcattgaaacccagtgtctggcacctgcagtcagagtgtggtaagcatagcagataagcaccagcattgcaaagctctgcagggcataccctctgttaagaaagcgtagtcattaatgcagcctggctagttgtcgatcatctgtcattcttatctaccctttctattgcatctcactttgaatggcagtacacagacagcactcactttagagcaatccagcttctgattggctacgagtacagcattgttcaacatcttgaataaatcattttgtaaagaatkttaccagtttcctctcagaactttgttatgcagtgtagattaccactgtactagccaacattttcctgggcccaccattttggggttgtattcacatttttgttttatcttttaccaactttatgccttctgccctttgccttttgttgtaagtctagaattcatagggtggctttcacgctgtacctgattctgttctgctccgtatatactagtccccccttacctgcggccagttgcaatccaacatataaataacatattttggccaatcgcagtggctcacacctgtaatctcaacacttaggtaa

SEQ ID NO: 743737 - DNA, 524 bp, Homo sapiens
gaaatactctgaaagtagattttctttcttttttgagacagtctctctgtctcccaggctggagtgcagtggcatgatcttggttcactgcagcctccacctcctgggttcaaccgattctccttcttcagcctcccgagtagctgggattacaggtgcccaccaccacgcctggctaatttttgttcttttagtagagacggggatttggttgtgccatgttggccaggctggtctcaaactcctgaccgcaagtgatccgcccacctcggcctcccaaagtgctgggattacgggcatgagttactgcgcccagccaaatatctgttcttttagctctttgatagttcctttgtartgacaaattattttttaaaagcttataaattggtgtttctgtggaagatgttatttctcatcgaatgcgtattgatagtgttttaagtttagaccacaaagtatttgtcttccatgtgcctgatatttacatagtactctaagctgcactgttgagtactgtagca

SEQ ID NO: 743738 - DNA, 524 bp, Homo sapiens
gaaatactctgaaagtagattttctttcttttttgagacagtctctctgtctcccaggctggagtgcagtggcatgatcttggttcactgcagcctccacctcctgggttcaaccgattctccttcttcagcctcccgagtagctgggattacaggtgcccaccaccacgcctggctaatttttgttcttttagtagagacggggatttggttgtgccatgttggccaggctggtctcaaactcctgaccgcaagtgatccgcccacctcggcctcccaaagtgctgggattacgggcatgagttactgcgcccagccaaatatctgttcttttagctctttgatagttcctttgtagtgacaaattattttytaaaagcttataaattggtgtttctgtggaagatgttatttctcatcgaatgcgtattgatagtgttttaagtttagaccacaaagtatttgtcttccatgtgcctgatatttacatagtactctaagctgcactgttgagtactgtagca

SEQ ID NO: 743739 - DNA, 582 bp, Homo sapiens
tgtatcgagaccttgtctcaaaaaaaaaggaataaaaagtccactattaaactaaagaataaattagttgaaaataaaagccactgttaaaacgaagaaaaaaactttcactatgttactgctaataattaatacaggttgtatatcccttaactgaataagcgaccagaggcatttcaaggtttctggattttggaatatttgcatttatataggttcagcatccytaaatctcaaaatccaaaatgctccaacaggcacttcctttgagtgccatgctggcgctcaaaaaagtttcagatttcagatctttggattagggatactcaatatgtagttcttttgataaaaatgttaggacagaaagtaaaagaactactgctagaaaccagaccaaggtgggctaaactttctagtaaagaaggaaatactaagcattatctatggcatcctaagatttttatttatttatttatttattttagacggagtcttgtgctgttgcccaggctagagtgcggtggcactatctgggatcactgcaagctcagccttccgggttcacgccattctcctgcctca

SEQ ID NO: 743740 - DNA, 631 bp, Homo sapiens
ataatgaggtcaggagtttaaaaccagcctggccagcatggtgaaaccccatctctactaaaaacacaaaaaattagttgagcatggtggcacgggcctgtagtctcagctacttgggaggctgaggcaggagaattgcttgaacccagcaggcggaggttgcagtgagctgagatcatgccactgcactccagcctgggcaacagagcaagactctgtccccccmaaaaaaaaaaaaaaaagtaaattccgggactcccaccccagtcctgctgaaccatactctggagatgtggctttacctttggaaactccttctggctatgacctcagcatggctatcattgaggatgtctcctgcggcaaagataggacaccaggtgaagacatatggaagctggagagggtctggttcctagaagcagaacacagcagtcccaccagcacccaggatggtcatgtagctcctggagagctttgccagaaggtaccacaatcatgaataacaatgcatcaggtgcagggtttctcaacccagcactgtagacattttgggccagaaaattttttgttgtgggggatctattccatccatacactgtagactgtttattagtagtattcctggcct

SEQ ID NO: 743741 - DNA, 725 bp, Homo sapiens
gacatggcgtcaaaaaactcatttggagctttaagatttgacttccctgctggatttcagacttgcatggggcctgtagactctttgttctggccaatttcacccatttaaagcagccatatttacccaatgcctctacccccattgtatctaggacgtaactaacttgcttttgcttttacaggcttataggtggaagggagttgccttgtctcaaatgagactttggactctggacttttgagttaatgctgaaatgagttaatactttgggggattcttgggaaggcatgattggttttgaaatgtgagggcatgaaattttggaggggccagggcagaatgatatggtttggctctgtccccacccaaatctcctcttgaatttccacatattgtgggaggaacctgatgggaggtaattgaatcatggaggcargtctttcccatgctgttctggttatagtgagtaagtctcatgagatctgatagttttaaaaacaggagtttccctgcacaagctctctcccttttcctgctcccatccatgtaagatgtgacttgttcctcctcgccttcctccatgattgtgaggcttccccagccatgtgcaactgtatgtccgattaaacctctttcttttgtaaattgcccagtcttgggtatgtcattatcagcagtgtgaaaatgaactaatacaatcatcaacacttccttattcttca

SEQ ID NO: 743742 - DNA, 586 bp, Homo sapiens
gttcacgaacacttgagtttattgcatatcttggctattgtaaataatcctgcaataaacatgggaatatagagatctctttgagatcctgatttcttttgggtatatacacagaggtagaattgctggatcatatggtcattcagttttaattttttktaaaatctccaaactgttttccatagtggctgtaccattatacactcctatcaacagtgcataagggttcccctttctctacctctttgccaaaacttgttatattttgcttttttcgataatagccattctaacaggtatgaggtggtatctccttgtgctttaaatttgcatttccttgataattagtgatgctgagtaccttttcaggtacctgttacctatttgtatgtcttcttttgagaaatctctattcaggtactttgcccatttttaaagctatttcaaattttgaattttcatgtctttgctctggatttgccttaaccctgggtaccaagagcacacaatgagggaattacagtctctttaagaaatggagttagaaaaatatccacatgtaaaagaataaagtgggatccatatc

SEQ ID NO: 743743 - DNA, 524 bp, Homo sapiens
atctctttacttattcatttactttttcttcacttaagatttcctgggtgtattctgcgtgtctgacatgattctcaatgctgggctcacacaagggaacaaaagcgacacagctgctgcccttctaggacttacattttagcagatggggcagcccacagaccaccagataaacgtatgatgtcacgtggtgagaaggtatgacggagatttctgaggaggggatatttgagcagagtcctgaacgatgggcacatgatcccatgtgcatatccaggtggtgggcacagcaagaccaagtatctcrggcagggctttgctgggtttgcttgaggatcaggaagaaagtctgcagagcagcagcaggaggcgtggtgggactcaggctggggtgcatggcaggctgcaggaggggcttatggtactggtgaggccgtgggttttaactgagagaggaagccattgtagggtggtcttcagtagaagaactttgtgacctaatttaattgtcaatggctcactct

SEQ ID NO: 743744 - DNA, 524 bp, Homo sapiens
atctctttacttattcatttactttttcttcacttaagatttcctgggtgtattctgcgtgtctgacatgattctcaatgctgggctcacacaagggaacaaaagcgacacagctgctgcccttctaggacttacattttagcagatggggcagcccacagaccaccagataaacgtatgatgtcacgtggtgagaaggtatgacggagatttctgaggaggggatatttgagcagagtcctgaacgatgggcacatgatcccatgtgcatatccaggtggtgggcacagcaagaccaagtatctcgggcagggctttgctgggtttgcttgaggatcaggaagaaartctgcagagcagcagcaggaggcgtggtgggactcaggctggggtgcatggcaggctgcaggaggggcttatggtactggtgaggccgtgggttttaactgagagaggaagccattgtagggtggtcttcagtagaagaactttgtgacctaatttaattgtcaatggctcactct

SEQ ID NO: 743745 - DNA, 629 bp, Homo sapiens
  misc_feature 1, 2, 3, 4, 5, 6, 7, 8, 9, 10, 11, 12, 13, 14, 15, 16, 17,18, 19, 20, 21, 22, 23, 24, 25, 26, 27, 28: n = A,T,C or G
nnnnnnnnnnnnnnnnnnnnnnnnnnnnaaaccccgagtcagcctagttgaatattccatatttgtttatttcaacatcaacactgttgtgtattaaacattgcaataggaaataatgctatggagatgaacaagacacatatctgccctccgggagctcakagcttggtgagatgggagtgtgagcagctgatgattccccagcaagctctccgatggaaggaaatgcacacagaggctgtggatgaccacagctggggagtggtgatgtctcagtgaaaaggacagctgaagtgagtcccgagggaatggtggcatttagggatcagtgtgtgctgagttgtcctctgaaggacatacactatctgtggaactaggagtgataagagatgagccaggaagattcagtggaaatcccttcaagggccctgtggccataccaaggcctttgggtttatcctatagcagagtgtgaggctgggagaaccatgtgggtggatggctaaaggccacctctcattctgaaaaggcaaagaagacttctaagaggttaccctgtttgacacatggaaaatgttcagagatcctatgggagtgtagagacctgagaacagaaagtcacacggcag

SEQ ID NO: 743746 - DNA, 629 bp, Homo sapiens
  misc_feature 1, 2, 3, 4, 5, 6, 7, 8, 9, 10, 11, 12, 13, 14, 15, 16, 17,18, 19, 20, 21, 22, 23, 24, 25, 26, 27, 28: n = A,T,C or G
nnnnnnnnnnnnnnnnnnnnnnnnnnnnaaaccccgagtcagcctagttgaatattccatatttgtttatttcaacatcaacactgttgtgtattaaacattgcaataggaaataatgctatggagatgaacaagacacatatctgccctccgggagctcagagcttggtgagatgggagtgtgagcagctgatgattccccagcaagctctccgatggaaggaaatgcacacagaggctgtggatgaccacagytggggagtggtgatgtctcagtgaaaaggacagctgaagtgagtcccgagggaatggtggcatttagggatcagtgtgtgctgagttgtcctctgaaggacatacactatctgtggaactaggagtgataagagatgagccaggaagattcagtggaaatcccttcaagggccctgtggccataccaaggcctttgggtttatcctatagcagagtgtgaggctgggagaaccatgtgggtggatggctaaaggccacctctcattctgaaaaggcaaagaagacttctaagaggttaccctgtttgacacatggaaaatgttcagagatcctatgggagtgtagagacctgagaacagaaagtcacacggcag

SEQ ID NO: 743747 - DNA, 629 bp, Homo sapiens
  misc_feature 1, 2, 3, 4, 5, 6, 7, 8, 9, 10, 11, 12, 13, 14, 15, 16, 17,18, 19, 20, 21, 22, 23, 24, 25, 26, 27, 28: n = A,T,C or G
nnnnnnnnnnnnnnnnnnnnnnnnnnnnaaaccccgagtcagcctagttgaatattccatatttgtttatttcaacatcaacactgttgtgtattaaacattgcaataggaaataatgctatggagatgaacaagacacatatctgccctccgggagctcagagcttggtgagatgggagtgtgagcagctgatgattccccagcaagctctccgatggaaggaaatgcacacagaggctgtggatgaccacagctggggagtggtgatgtctcagtgaaaaggacagctgaagtgartcccgagggaatggtggcatttagggatcagtgtgtgctgagttgtcctctgaaggacatacactatctgtggaactaggagtgataagagatgagccaggaagattcagtggaaatcccttcaagggccctgtggccataccaaggcctttgggtttatcctatagcagagtgtgaggctgggagaaccatgtgggtggatggctaaaggccacctctcattctgaaaaggcaaagaagacttctaagaggttaccctgtttgacacatggaaaatgttcagagatcctatgggagtgtagagacctgagaacagaaagtcacacggcag

SEQ ID NO: 743748 - DNA, 531 bp, Homo sapiens
agagcagaaagggattcagtttcaattatcaaatcataactgaattgtaaccataggttggctacagatactgcagcttggcaaaaatcagtgaaagtattctgtaagaattaattgcttatgtaaaatttgcaataaagagtattgtgtattttattatttgtaaattgtgtgatatacatcctttatatgagtaaagtttataatgacattatatacatgtatatatattctagcaatttttatttggcgagcttgttgttaaatatttacctgcaaatcactgtgtgcgttcttcattgtaaaatgcaatcatagttgattttgaacaagggaatgtaragccctagctacgttatgggcattatctccccacttttcctagagatgtatcctctcctattactttataaaatatatgtagcttaacttttgttttctggggggtaagggcattcagaatatccccatctctgctctgcctgtaaaatacctatacatgctttatctttttttatatcataaagcata

SEQ ID NO: 743749 - DNA, 587 bp, Homo sapiens
atgagataccatctcactccagtcagagtggctatattaaaaagtcaaaaaataacagatggtgatgaggttacagagaaaagggaatacttatgcaccactggtgggaatgtaagttagttcagccattgtggaaagcagtttygagatatttcaaagaccttaaaacagaactaccatttgacccagcaatcccactatcgaatataaatcattccaccataaagacaaatgcacacgtatgttcattgcagcactattcacactaacaaagacatggaatcaacctaaatgcccatctacagtaaactagataaagaaaatgtggtacatacacactgtggaatgttacacagccataaaaatgattatgtccttggcagcaacatggatggaactggaggccattatcttaagccaactaatgcaggaacagaaaaccaaatattgcatattcatacttataagtgggagctaaacattgggtatacgtggacacaaagaagggaacaacagataccagggcctactggagggtggaggttgggaggagacagaggtttgagaaactacctattgggtattat

SEQ ID NO: 743750 - DNA, 613 bp, Homo sapiens
ctcctacatgaaggctccttgagttagtcattgcttcacagaagccagtgtccctaattttgctccttgttctccttcctcttaggacaacccttcacgtgcacacaacaagtgcacattccagacctcaacttctgttggtctctaaccgttccagacagccccccatctgctcttgactatgtctgtcattttcattttccctagagacagaaaaacagtgtatggaaaggagtattggaggccggaaactatagcrgcctttgagtatttttaatgcaaataggaaaaatgctttttatagtctttcaaatttctgttttgagaattgactccaatcaagaccaccaagaataaataaataaataagaatctatgtcattggtctactgcacacttacacactttcatctttgtctccccctgtcctaagggaagcttttttaaaggcttacatctgcaaggactcagacaataagtgagaaattgatagcaaagaagataaattgacattttggaaaaaggaaagcaggtggaagcttttagccaataaaaagtgaaaacccaggtctttcagtaagaaaatggagatgaagaaaccatcaataaaaag

SEQ ID NO: 743751 - DNA, 613 bp, Homo sapiens
acactaccgaagctgtctgtgggttaaaaaattatacaaagactacactactgcatgcccccagaattaaggccaaagtgccctatccaaaacatcatagatatatcttaaggaaaaagtcctcccctatgaaagcaaattcaaaaacctggaaaaattgactttacaacagatgtgcagatatcaacttaaggacacacaaaaaaattaataagcaaagaaatatgacatttccaaaggaacacaataattttccagcaacagattccaatttttaaaattatgaaatcctgaatgaagaattaaaaataagtatattaaagaagctcaatgacatacaaaacaatttagataaacaatacaaagaaatcagaaaaaatwattcaggatacaattgagaaatttaccaaaataatagatgccattaaaaaaagaaatctgagaactaattaattcactaaataaatgcaaaatatatttgaaagcttcagcaatagactggattacacagaaggaagaattttagaacttgaagacaagtctttggaaataacccagacacaaataaagaaaaatgaataaaaagaatgaacaaagtctgcatgacatatga

SEQ ID NO: 743752 - DNA, 544 bp, Homo sapiens
acatatgattcctgccttcaaggagcttgagaaagttgaataatgaacagatgatgacaagagcgaaaaatgataagtgcaattaatggtacgtccagaggaccaggactaaacagaagtatacttcaggaaggttttggggttagaaaaagattcacagaagatgarctcactgatttttaaaaagtttaaaaattcagtaaaagttttattgctcagtttggggctaagagcatctcaagcatacttgtctctgccttcaaaataaatcttatcagataaggctaaagtagaacaattaagtagctaaacaaaagtaggcttttacaacaccaaaagcataattcatcaaataaaaaagataaattagacttatcaaagttaaaacctttttctctgttaagagaatgaaaagacaatttacagactggaagaaaatatttgcaaatcatattatctggcaaatattctcatattcagaagacacaaagaaattttgaaacttaacaataagaaaacaaacaacccaataaaaaatgagcaa

SEQ ID NO: 743753 - DNA, 633 bp, Homo sapiens
gtgacccgtagggccttttacaatctgctccctttgatatctctaccttatcacctattattattctccagcagatgtctttcaaaattatgttgtccttcctcttgaacactattttcttcttttgtgtcaacaaatatttttcttataaacctttttattttttttttttgagagcaacatgtttttcacacctctgacctcaaatctcacctggtttatgttctcatctatcattataatcattttgagtttcacggaaccttgccctcccgacctcccttgcaaaggaatcataactagcagacacatcataggagaaagagcagagcattctagtgcaatcttttgagtgtgtctgcctttcacactcacaagggaaaggcaccattttaattggatgttcagtaggttcaaggttatgaacactgttgkaggttcagttgctcactcttaaaagtattaggcataccactctgggcgatattactgtgtccgcaattcattccttcccatgggttcttggtctcacttagttcaacaattaagccacggaccctcacagtgagcattacagctcttaaagatggtgtgtccagaagtgtgttccttcatatgtccagatgtgtcctg

SEQ ID NO: 743754 - DNA, 562 bp, Homo sapiens
tttccccatccttgtccttcccatgttcattaattaattcatattgccccgcgcctagtcccattttcacttcctttgacgctcctagtagttttgttaagtcttaccctgtaatttttgcttttaattttgatacctctttatgacttaacaataaaaakgatgtatggtttttatcaactgtctccaaaataatctcttgttatgcagggagtacagttcttttcattcatacataagttcagtagttgcttccctaactgcaaaggcaatctcatttagttgagtagctcttgaaagcagctttgagttagaagtatgtgtgttacacccccacattagtgtgctgtgtggggcagttcaacacaaatgtaacaatgtatttttgtgaatgagagttggcatgtcaaatgcatcctctagaaaaataattagtgttatagtcttaagatttgttttctaaagttgatactgtgggttatttttgtgaacagcctgatgtttgggaccttttttcctcaaaataaacaagtccttattaaaccaggggaaaaaataaata

SEQ ID NO: 743755 - DNA, 531 bp, Homo sapiens
ttttattctagattctggggtacacatgcaggtgttacaaggatatattgcataatggtgagatttggacttctagtgaacccatcacccaaatagtgaacattgtacccaagaggtaatttttagacactcattccctcccactctccctttttggaatccccagtgtctattatttccattcatatgtctatatgtacccattatttggttcccacttataagtgagaatatgtggtatttgattttctggttctgagttgtttcacttaagataataacctccagctccatccatgtttcttcaacagacatgatttcattcttttttaatgactgcatagtaatccatgrtgtatatatcccattttctttatccaatccaccaatgatggacacttaggttaggttgatcccataactttaccatggtgaatagcactgaaataaaaatacatgtgagggtatctttgtgacataacaatttattttcctttgggtaagtaatcagtagtggtattgctgggtcaa

SEQ ID NO: 743756 - DNA, 632 bp, Homo sapiens
cgtattagcaaatcctccaaaatgcaaaataaagttggtagtggaaaatattgctacatgacgtttctaatccaaaagtcattgtacaaaagagaaaatgtttctgctgacttcaacattatgtctcagatgatctcctgctttatatattcacagctactgccaaatttaagctgtgttttgttttacttttaatctcttaattggctacttcagcgttccctgattttccctccctcccttctttccttccttccttcctcccttccttccttccttcttccttccttctttccttccattcctcatcctcttcctcattctcctcctctcaacatcttctgtatgagatgtaaaatttcgttttttttaacagyttattgaggtaaattaatgcacaaagcattgcagttatatatgtgtacgatttgatgtctgaacatatacaaatacccatgaatctattgccacaatcaggtaatagacatatttgccactctcaaaatttcctcaggactttgtttttctttgtttgttttgtggtaagaacacttacatgagatctactctcaaaactaattttgaatgtgtaataccatatcgttaaatacagatgcagtgttttcatgaat

SEQ ID NO: 743757 - DNA, 514 bp, Homo sapiens
acagaatttcagtcaaggatttaccacatatatgacggtggtcccataagaatttataacacatcttaaaaattcctgttgcctagcaatgtcacagctgtcagaacttcacagtgccattcattattcacatatttgtggtgatgctcrtgtaaacaagcctactatgctgccagttgtataaaagtgtcttgtaatgtcctaggccttcacgttcattcagccctcactcattcagccctcactcatccactaacccagagcaactgccagtcctgtaatctccattcatggtaagtgttttatacagatgtacaatttttaaaattatttttgtcatatttttactgtaccttttctatatgtagatacacagatattaaccatgttgttataaatgcctacagtattctatacagtaatatgctgtacaggtgtgtggcctaggaacaataggctccaccacatagcctagatgtgtagttggctgtatcatctaggtttatggaagtac

SEQ ID NO: 743758 - DNA, 514 bp, Homo sapiens
acagaatttcagtcaaggatttaccacatatatgacggtggtcccataagaatttataacacatcttaaaaattcctgttgcctagcaatgtcacagctgtcagaacttcacagtgccattcattattcacatatttgtggtgatgctcgtgtaaacaagcctactatgctgccagttgtataaaagtgtcttgtaatgtcctaggccttcacgttcattcagccctcactcattcagccctcactcatccactaacccagagcaactgccagtcctgtaatctccattcatggtaagtgttttatacagatgtacaatttttaaaattatttttgtcrtatttttactgtaccttttctatatgtagatacacagatattaaccatgttgttataaatgcctacagtattctatacagtaatatgctgtacaggtgtgtggcctaggaacaataggctccaccacatagcctagatgtgtagttggctgtatcatctaggtttatggaagtac

SEQ ID NO: 743759 - DNA, 545 bp, Homo sapiens
ataaaaggaaataacaaactatttttattttcatttcattgatcttgttccaattgtatgagaatttgtcatacataattttgcaaaggaatggccttgagtagtcaatatacataatattaatgttgctatctatgtacaaagcaacttaacaatcagctgtcatagagataattgctatggtcattatctgtagaatgtattgttttacctgggtgttcttttttcagagaattactaattttttagatttattttatggtgtttataaatttcttatatatgtttttccattcataaatgaraaaaattgaagctcaaagatgttgagtaatgcttataagattgacacagataaatgtctgtgcttgtatgtggatgtgtgtgtacgtttatgtgtgacagagagagagagagagctgccattgaacatattaatcagaaagtttcagcatatgtatttttatagagtttattcatcatctttgtgtcataatataaaaataatttattatattccttcttatgttactttctgtttgaca

SEQ ID NO: 743760 - DNA, 648 bp, Homo sapiens
tgtttaattatgtacatattaggactgaatatggctgcaattaacaaagtatctgatatctgaggaaccacagtatgtcaatatgaagtattccttatctaatcttacaaaaaatttaaaatagaagattgcttgttcagtccctctctgaacatttcaactttgatctagtatttgctctagcggccactggatgtctagacatcacacatacttcactgtatgcaatggcagaaagtagtgggaaattcagggaaaaggggaagagagtaagtggagggatgtagagatagagaatgagaaagtaaaagaaagagcaagagagatgtattctctttacatattctttattttttacaccccctccccacattttatagattttccytcacatctcattggccataagtgtacaatagacactctaggtactagaagcaagctttgattttacttgcttttattttgtgaggtggtgagaaacaaaaatttggggaatgctattgcatacaaaccaagggtttctgccaaatattttcagaagagagatatctcaaatcatgtaacaatcttgtgaaagctttgcctattagatagttctttcttgtaacatcaatgtctatgaatttagatatgcccacctacatc

SEQ ID NO: 743761 - DNA, 560 bp, Homo sapiens
aattttgcctgccttcaatctaggtaatacagagatactgcatacaaagtatctttaaaatatataaaaagaattgaaaatgtgagaaaagggaacaaaatagacttaaccaagaccagcataaagtaatggcatactttgtaaataattcagagcaatcttccactgaagacaagaaaataagcagagatataaaacatctgcttgaaggcattggagacctaagaaaatggcgaagacttaatgggccagcatttggtagagaattgagtttcagggctgtaagtccatattcagtgtggcttttatttygcagttgtttgcaaaggtcagagaggcttttggtctggttcttttgatagtctcacttggactaaaggacatgatttggagtctgatatctgccaagaaattaggaccccaaaaggatataccccaggaataaagatgaaccaaatttaattacttcttcaaacagttttacaaatatatgcagcaaatagctagttttgcgtgagacaaaactacatgaagtcaggtgtggtggtgtgtgcctgtag

SEQ ID NO: 743762 - DNA, 555 bp, Homo sapiens
cctgggtcttcacatttctgccatgagagggtttcttcttggcatagcgatagggaaggcttggtggcacatcacagaatcttctggttttgagaatgtgtgtgttgcagggaggagggtgtcaaagtcattgggaagtggcagctgagagctggcacagtgggtggtggagctcccaggcccagacttctgggcraggccacgaccccaaagagggaggcttctgtcatttgcatttctcagccccacttctcccacccatctgacaatctctctagctttggttctaccagcaactccaaaacaaagaagacttggccatgggctcagagtgttatggaggcaggagggcttggggaaggggccagaggactcccaccttgaccccttcactggcatccacaacggctgccaggagggcagaggcctggtgggcaccctctgggcaagcagccccaggcctttgacggctgcggctcactggggatgtgaaagggcaaagctcagggtctgcagttttctctagggctttctgggtgttttgaagacatgtgg

SEQ ID NO: 743763 - DNA, 517 bp, Homo sapiens
aggtgacagagcaagatcctggctctaaaaataattaattaaaaagccaaaaattaacaacaacaaaaaaagaaaattaggcaactaatgaggaaaatgaggaatagtgattggatagctgttttagattcaatggttgtggaaggcctctctgaggaagtgatatttgagttgggacctcaataatacaaagagccagcaataaaacttctgagaaaacatagcaygccacacagaagggactatgagcattcgagggaagagcattttactgtctgagaaacagaaggccagggtggctaaagcccagtgaacaagaagattagtaaagtcagagcaatagcagttaagagatcatgtacagtcttgtgggacactgtagtaaggcatctgcatctttcacttggactttaacaggaagtcatcatctggattatggcacaccagtggttacccatcctcagtcttcttttcattctagggtctcactgaatgatttcaggctcaccgaatgcta

SEQ ID NO: 743764 - DNA, 634 bp, Homo sapiens
acttccaggcacacaggcgactcacgcttccccgtctacttgatgctaggaatgcctaggtggctttccctggccaaagaaacacgagcagagggggtgtgtgcctacttccacgtggaccccttaagagcccttcattaactcccctttccttcattaaagcaactaaccaccctccagatggtggcaccccgtcatcccgggtccctaggtgaggatggtgtggcacaggagacctgcctctgcaaatcccgatggccatgtaacatgagaaaaattaatttttgtcttttaaaccactgggatgtagggactatttgttatcaaatcacagcctaacctatcgcaactaatctagccttactatcccacacaagggagagggatrtgtatggagattctgagaacttatatgctgggcagggaagaaggaagaaaagctagaaaaagaaagaacagtttggaagaaaagtgagagatgaaggcaggcagtccaccagattcagcaaacccgtctatggggtgatttaggtattttctcttacgcggcttagattttctttcttttttaatctattagttgaagtgcccaaccaacctgtctccaattagagagagagtagcccggtaaaca

SEQ ID NO: 743765 - DNA, 591 bp, Homo sapiens
aataaggcaaatcttgtaagaaaggaagattgctaccagcagttttaaaatagtctttctcttcatttcccctagttttcaaataacttcctcacaagtttgttcagatgaaaatgcttttaaagtgcttaagttcttggcagttttaaccttaccattcactgcatttattaacaaacatgtatacttgaatcctggctttcctggctaccctaaaagggagtggataaacaacttatatgccttagcaatcccacttttaggaatcgatcttacaggaataaaagcaccaatataaaaatgtattatgacattgtttataacagcaaaactactaaattatgaaatatccacactgctgaatattatatggctattaaaattaatgttagacatgaagttggacccttaacttacaccatatacaaaaattaactcaaaaaaccaaagaycttaatgtaagacctgaaaccataaaactcttaggataaaacataagggaaaagcttcatgacctcggatttggcaatgatttcttcgatctgataccaaaagcacagggaaccagggaaccaaagaaacaaatagatc

SEQ ID NO: 743766 - DNA, 610 bp, Homo sapiens
atgatttcttcgatctgataccaaaagcacagggaaccagggaaccaaagaaacaaatagatcaattggactacatcaattaaaaacttccatgcatcaaataacacaatcaacagagtgaaaaggtaacccatgaaatggaagataatatttgcaaatcatctgtctgataaggggtgaatatccaggatgtagaaacaattcctacaactcaacaaaaaaagccccaaacaacctaattaaaaaataacggacttgaacagacatttctccaaagatatacaaatggccaataagcacacaaaaaagatgctcagcatcactaatcattagggaaatgcaaatcaaaactacaaggagataccacttcacactcattaaaattattataaaacatatcagaaaataacaggtgttggcaaggatgtagaamaactggaactcttgtgcacttttggtgggaatgtaaaatggtgcagctgctaaggaaggcagtatggtggttcctcaaaaaatgaaaaaaaattaccacaagacccagcaattccatatataccatttttgtatatatataaaaaaatggaaagcagggtcttgagcagatgcattt

SEQ ID NO: 743767 - DNA, 629 bp, Homo sapiens
tgggttagtgtccttccttggtttaaaggggcttctgctcacagaggccttgaggcctcgcagtgagactgctgacaggtagcctgttcatagcactcacacagagcgccattcaaacaggcctcgccgggaatggaaacatatggggtgttactttctatggtcataggaaacctgtcttaaaggtctattttacccactggaggccaggcagctccttgccctggtcacaaggaggcttggatggaagacactggtcagagaacactggaamcccccccacaggtttgagtcactgaatgggaatcattagcttagatgccagagatgaaagactgcactttttttctttaaaaatgttattgtataatcctcacaatacatcagaggaggtaggttagtatgactagtctcatttcaggtggggatactgaggcacagaaaggataagagattggcccccactcataccatgaatcactattaaagccaggttaaaagagggaagtaaccgagggctgaacttggtgtctgatcaatacatcctgcccgaaacctgccctcatatttttacagcctagatattaggttaaagctgcaggatcctttgatcttctgggaggaactgc

SEQ ID NO: 743768 - DNA, 629 bp, Homo sapiens
tgggttagtgtccttccttggtttaaaggggcttctgctcacagaggccttgaggcctcgcagtgagactgctgacaggtagcctgttcatagcactcacacagagcgccattcaaacaggcctcgccgggaatggaaacatatggggtgttactttctatggtcataggaaacctgtcttaaaggtctattttacccactggaggccaggcagctccttgccctggtcacaaggaggcttggatggaagacactggtcagagaacactggaaasccccccacaggtttgagtcactgaatgggaatcattagcttagatgccagagatgaaagactgcactttttttctttaaaaatgttattgtataatcctcacaatacatcagaggaggtaggttagtatgactagtctcatttcaggtggggatactgaggcacagaaaggataagagattggcccccactcataccatgaatcactattaaagccaggttaaaagagggaagtaaccgagggctgaacttggtgtctgatcaatacatcctgcccgaaacctgccctcatatttttacagcctagatattaggttaaagctgcaggatcctttgatcttctgggaggaactgc

SEQ ID NO: 743769 - DNA, 603 bp, Homo sapiens
gaaattttctgttatttttgatatggttttgcatggaaaaacatttacaggggcttcatgtgggtagaaatcacagttgctgtgacagggcagtgagttgtcatttatgaattcagtgttgtctgtaggagatatggcatggaagtattcttccaggactctgttggcattctgtggatggtgaatagtaaataagttaatgcagattttgatgagtgacttcaaaaactacagattatgatcagggatcatatratgggtaggaatggaatagaaggtcaccttgaataacaaggtagcagggcttgagaaaatgggaagccaggacaggaaatgaactggaacatttttataagaggatcgacctctcaccaggatgatgtaatgattgtgatggggacaaagatagaacaagtctcattttgtaggcaggtgctccttcctacaaaggaaggaatgggatagattcatcaaaaacacagacagcacgtaatgttgtttggagcaggaacttctacatctgaaacagacagatctggacttaagtgttagaaagtggtgagaggtgacagcgtgctggcagtcctcacagccctcgctcgc

SEQ ID NO: 743770 - DNA, 579 bp, Homo sapiens
ctcagcctcccaagtagctgggattacaggcacccgccgccatgcccagctaatttttgtattttaatagagacagggtttcaccatgttggtcaggctggactcgaactcctgacatcgtgatcctcctaccacggcctaccaaagtgctgggattacaggcgtgagccactgcgcccggcyctagcatagtttttaaatgattgactctaacctacaaccaggcttctactcagcgagacatcacagtccttagaggccaggacgcttcatttttccctaccccatggctccctagtagggaaggaaaggtactgatttcttaatttccctctatattcatatttcctggtatctttattatatctgtagcacttttccttagaatcactgtggagctttgaaaagccaaaaccaaaaccaaaaccaaacaccaatggctggcccataccccaggtcaactgaagaaactttggggtggggctcactcccctagtaattctaacatagggccttgacagaaccccctggccttgactacaggctcctgtgaacatgacgtgtactgtactcattttt

SEQ ID NO: 743771 - DNA, 661 bp, Homo sapiens
gcagcaaaataaccagtatgataaaagaagctatcagactgaggcccagctaccatattacttatctctttgtgagatggccctgttgaacaggtacttacgaccctccactgtctcacaggaataagatgggcttttcaagcatgcctgaaaatgttcagcagaaaagagctttaatctggaaagttgtgcccacctaggcattccttgtcaattgactgtagttggagtggccaggatcactcrgtaaagacctttccatttaagtaatagttggtccttcagggagcccaccttccaagtcttaaggaggacctgatctcctgggttaatctggatagaggatgccccactcctggcaggggatggcagaatattgttcccctattctaagattgccttctgggcctgccctgaaaacattagatgttgtaggttttgatccaattctccatctaacagaagattagtagtgagaaagggcatcccctaaattatttcagaaggactgaaattcaggttgccataagggactgtgcagattctgagaagtgtgactgaagcatttaatccacagtttatgggtatcttgaaaaagctttgctaggatccttttaagggtatgattcatctttttaactatctctgatgattgggaatg

SEQ ID NO: 743772 - DNA, 603 bp, Homo sapiens
atccatgtaatggagcagtgtaatatcttgtgaagtgaaaagcactcaaggtctctctgaatacaattattacacaaagccggagagttgatatacctctgtgttaggacagtaaaggtatattgctggcctttccagctgaaggcaaattgcttctgatgggccttttggacaggaatggagaaaaaggcatttgtcaagtcaatgtctgcataccaggtaccaggagatatgttaatttgcccaatcaatgaaaccacatctggtacaacaactgcaattggagtcaccatttggataagcttacgataatccactgtcattctccaagattcatctgtcttctgcacaggctacatagaagagttgaatggggttatggtgggaatcactacctctgccatctttcaagtccttgatggtggcattaatctctgcaagcycttcaggtatggaatattgtttttgatttactatttttctaggtagaggcagctctaatggcttccactgggcccttgtcaccataacagccttcaacctaccagtcagaaatccaatatgggggttctgccagctggctaagtatgtctatgccaatta

SEQ ID NO: 743773 - DNA, 623 bp, Homo sapiens
ttaactacagggaaggagaaatgtcacctaaaactaatgttcaaagaaacaaggatcctttttaacgatatctatgtttacagcatacccaatgacttaattgtcatctttattccattgcctttagacatgaaatagtgtcaatagtctgaattctaaacctttgaaaataatgtcaaattaaatattaacaataatcaagtcagtatatttcattaccactaaatggatttcagatatagtatctcactgagccgtataacttatgaggkgtatgttattattgtttctattttatggatgttgacattgttaatttggtttctcaagatttgaacttgagcttccattcatcaaagtctaagctctttctaaatttaagggacttcttaccaactatcatctattagtagtttctagattcttgtatcttacacgtaagtacttctttatagcattgatagaaaattcataatttgtgtgttttgattcatgatggtatgaataacatactcatttaatctaatctaatctaataattatttccaaaaaagaagcatgctacctcaacaaagtgcaaaaaaagaatattagaataaatgtttacattattctaatattaa

SEQ ID NO: 743774 - DNA, 623 bp, Homo sapiens
ttaactacagggaaggagaaatgtcacctaaaactaatgttcaaagaaacaaggatcctttttaacgatatctatgtttacagcatacccaatgacttaattgtcatctttattccattgcctttagacatgaaatagtgtcaatagtctgaattctaaacctttgaaaataatgtcaaattaaatattaacaataatcaagtcagtatatttcattaccactaaatggatttcagatatagtatctcactgagccgtataacttatgaggtgtatgttattattgtttctattttatggatgttgacattgttaatttggtttctcaagatttgaacttgagcttccattcatcaaagtctaagctctttctaaatttaagggacttcttaccaactatcatctattagtagtttctagattcttgtatcttacacgtaagtacttytttatagcattgatagaaaattcataatttgtgtgttttgattcatgatggtatgaataacatactcatttaatctaatctaatctaataattatttccaaaaaagaagcatgctacctcaacaaagtgcaaaaaaagaatattagaataaatgtttacattattctaatattaa

SEQ ID NO: 743775 - DNA, 586 bp, Homo sapiens
agaaagtaaataaatgctaccctctgctgtttttcatttgtaaataagaaagcaaactgaggaggaataaaggtgaaatcctgtctgcttaaaagcaaaatagctatgtgaagccttaaaagcctgtaatttactcaggagctgaaacttatgtactctcaaaataaccaaaacaaagaaataacctatttaaaagccayatggattacagtcttttagctctaaatcataccttccattaagctgggaagaaaccacttggatatgttttacagataaaaaacaaatgtgtgcttatgagtcctttggaagctttgaggtacttgtggcccagaatctatcatgaggaagagcaggtttcttcacagaaaataggggtgtctgtttttgagcagacaattaaatagttaaacacagagaaagacattggttccagatgggggtgttttaaatctgaaccaatttttatcatggcaagatgagagattttttcaagtaacattccgaaataaggaatttggatactgaaataccttggacacaaaaattgtctttcagattctttctctcttcttcagaaccattg

SEQ ID NO: 743776 - DNA, 642 bp, Homo sapiens
tatatttaatgaatgtcctttgagaacaaatattgaggcttaaaactccactgttatttttagatatgattaaaacagaataaaaatgaaataagagattagaattttttcttcaagttttcttcaaaataagtattttatttcctgaacagcttgtaggtattattttgcattgatattaaggtatttaagttgtaataatgcctttctcaagacatttaaaaaactgacttctaaattgttttttktgtgtgtgtgtgtgtgtatgtgttgcacaagagtatttactatgctgagaatacagataatttatggaaagtttaggtctgttaatacagactagattaagaaaaatagagctgtgatcagtttggacttcaaattccaaaaactgaaattttctgaaatatgtggacgcttataaaaaggaaagatttactctgtagtaaatgttcaatttcatcataaatactttaaaagcattttgctctgtctcattttttttttgtggagtttgctttatattcaaaacaagtacaagatattatctctggcaaaattaatgtagttatgatgatatgactgtgaattattttcccattccaaatcttattcagttatttgacttcataacctatgaga

SEQ ID NO: 743777 - DNA, 572 bp, Homo sapiens
caaaaacaaattccactgcttttattctactacctcatacatgcacattctcccaaccctcacagcttacagagtactgaaaagaaaaggaattaagggttgccctagttttcccattcctcttatgccatcattttcagtataagtgtttggctaataccagagtgtttatatgagtgttaacatgaggaagaaagttatgataggtttccttgattatctgtgtttctcasaaccattgccttcattcttttttcaatgcaagtttttgttcaaatgtagagtagcttctgagggttgtcaacacactgctgattactcagtcatagacacaatatgcttttcttgttctccacttgaatcctgctgaagatccatgcactatgcaaccacaaggattctgtgttcttgggtcattgcaaatgctctatgacagtgagatggcaaggaacagtgtactattgtgtgcatatccattggatttcatttacaaatcatatgttcaaggaaacaacaggaattttaagaagtcagcagagcattatgccaacacatactatgtgtggctgctc

SEQ ID NO: 743778 - DNA, 626 bp, Homo sapiens
ttatatctgggattaaatctgacatcttgctattcatttccttttattatgccatctagtctttgtttctttgtttcttgttcctaccttcgtttggccatttatatgtataaatttagcttatttggctagtattrtattatttaacttaatacttaggtgtttaattttcatctttggttattatttcaagtttcttttagagctcctaacatgcattttaacttattggagccttaagttagcccttaagcatttcataaataatacaaagaccccacaacactttaaattcatttactctttctacaaactgttgtcatatattttgattccatatacattttaaatcctacacaattttaaaagcagtaaatattcattgaagctttcccctatatttaccatatcactgttcttcattaactcttataaccatgcttcatttatgatcattatcaattctgcctataacactcctacagtagcaatttcagtgctcatctcctagagaaaaaattgtcattattttatttttatattttagtgaaatattagaaggttagaaaattctttttttttttttttacgtttccacactatatatttcatccttatttctgact

SEQ ID NO: 743779 - DNA, 609 bp, Homo sapiens
aatgtcatccatgtaatggagcagtgtaatatcttgtgaagtgaaaagcactcaaggtctctctgaatacaattattacacaaagccggagagttgatatacctctgtgttaggacagtaaaggtatattgctggcctttccagctgaaggcaaattgcttctgatgggccttttggacaggaatggagaaaaaggcatttgtcaagtcaatgtctgcataccaggtaccaggagatatgttaatttgcccaatcaatgaaaccacatctggtacaacaactgcaattggagtcaccatttggataagcttacgataatccactgtcattctccaagattcatctgtcttctgcacaggctacatagaagagttgaatggggttatggtgggaatcactacctctgccatctttcaagtccttgatggtggcattaatctctgcaagcycttcaggtatggaatattgtttttgatttactatttttctaggtagaggcagctctaatggcttccactgggcccttgtcaccataacagccttcaacctaccagtcagaaatccaatatgggggttctgccagctggctaagtatgtctatgccaatta

SEQ ID NO: 743780 - DNA, 605 bp, Homo sapiens
gtgtgtgttgcagctggggcaatggttctgaagaagagagaaagaatctgaaagacaatttttgtgtccaaggtatttcagtatccaaattccttatttcggaatgttacttgaaaaaatctctcatcttgccatgataaaaattggttcagatttaaaacacccccatctggaaccaatgtctttctctgtgtttaactatttaattgtctgctcaaaaacagacacccctattttctgtgaagaaacctgctcttcctcatgatagattctgggccacaagtacctcaaagcttccaaaggactcataagcacacatttgttttttatctgtaaaacatatccaagtggtttcttcccagcttaatggaaggtatgatttagagctaaaagactgtaatccatrtggcttttaaataggttatttctttgttttggttattttgagagtacataagtttcagctcctgagtaaattacaggcttttaaggcttcacatagctattttgcttttaagcagacaggatttcacctttattcctcctcagtttgctttcttatttacaaatgaaaaacagcagagggtagcatttatttactttct

SEQ ID NO: 743781 - DNA, 655 bp, Homo sapiens
gggcagcttgatttacaagcattaaagatggaagaagcggggaagagctgattagcattggccaggacaagaacatacggtaaaccctgggttgtgttcaaagcaaggaggatttatgcttcctttcagttactctgagcactaagtactctcagrtggtgatgggtgatggccatgaacttgaaggatgaatacaaggaacacagaaaaccccttttcaaccaaagcacaagctttggaggtgctgtccattcaaatgagcaactctgaaaaatcagttttcttgggagatcctgagctcttttatcaaagtgagtagaggtaaatctgtcttaatataagaatgttaatactcaatgccagaatttttgtctcttttggggttggaggggggataaggaaagaaaatgaatctccttcctgcaaaacttctgagttcactgctaatgagagttggagacgagacacaggagggaactcagatgtgattcacagacgttctgatagggtatcctctgcaaaggtcacccaacagggcagcgtgatctgggttcccatgaagagctcctttctgatgctgaacttacccacttataatagaataagagttgttcacaaagtgaacctcaatactcaccaacatcatccagccata

SEQ ID NO: 743782 - DNA, 655 bp, Homo sapiens
gggcagcttgatttacaagcattaaagatggaagaagcggggaagagctgattagcattggccaggacaagaacatacggtaaaccctgggttgtgttcaaagcaaggaggatttatgcttcctttcagttactctgagcactaagtactctcagatggtgatgggtgatggccatgaacttgaaggatgaatacaaggaacacagaaaaccccttttcaaccaaarcacaagctttggaggtgctgtccattcaaatgagcaactctgaaaaatcagttttcttgggagatcctgagctcttttatcaaagtgagtagaggtaaatctgtcttaatataagaatgttaatactcaatgccagaatttttgtctcttttggggttggaggggggataaggaaagaaaatgaatctccttcctgcaaaacttctgagttcactgctaatgagagttggagacgagacacaggagggaactcagatgtgattcacagacgttctgatagggtatcctctgcaaaggtcacccaacagggcagcgtgatctgggttcccatgaagagctcctttctgatgctgaacttacccacttataatagaataagagttgttcacaaagtgaacctcaatactcaccaacatcatccagccata

SEQ ID NO: 743783 - DNA, 655 bp, Homo sapiens
gggcagcttgatttacaagcattaaagatggaagaagcggggaagagctgattagcattggccaggacaagaacatacggtaaaccctgggttgtgttcaaagcaaggaggatttatgcttcctttcagttactctgagcactaagtactctcagatggtgatgggtgatggccatgaacttgaaggatgaatacaaggaacacagaaaaccccttttcaaccaaagcacaagctttggaggtgctgtccattcaaatgagcaactctgaaaaatcagttttcttgggagatcctgagctcttttatcaaagtgagtagaggtaaatctgtcttaatataagaatgttaatactcaatgccagaatttttgtctcttttggggttggaggggggataaggaaagaaaatgaatctccttcctgcaaaacttctgagttcactgctaatgagagttggagacgagacacaggagggaactcagatgtgattcacagacgttctgatagggtatcmtctgcaaaggtcacccaacagggcagcgtgatctgggttcccatgaagagctcctttctgatgctgaacttacccacttataatagaataagagttgttcacaaagtgaacctcaatactcaccaacatcatccagccata

SEQ ID NO: 743784 - DNA, 631 bp, Homo sapiens
attagtttaaagaactaaagatgaatgtaagtcaagggaaggaatggaggaagggagggcttactcgttgttaagttacatcttgagtcatctcttcgttttcttgagagtcaaagcctgaacactttgggaagggagctaactttatcacatttaattttcacaataattcacaataatgaagacattaattcattcacttatttatacaccaaatttattaagcaccttcaatatgacaaagatggaaagaatctctgcatttgaggaacttagagtcaataaggaagcagagctaaggacaaacaattaaagtgtaaggtagaaattgcttaacagaggagtgttacagatgcagttacatgagacagcaggccagattgtttcttctaactttaaggctccaagttattataaagtactttcctgagtttgcagagctaacatttgagtggcatgtgaaccagrgcaattcatcttgaatagggggtgtgtaaaataaggctgagacctattgggctgcattcccagacagttatggcattctaagtcacaggatgagataaaagattggcacaagacacaggtcagaaagactttgctgataaaacaggttgcagtaaagaagcca

SEQ ID NO: 743785 - DNA, 614 bp, Homo sapiens
gttaattgtctctctaaaataatcattggttgaagccagggccaggcagtttcccaataaatagaaaacacctgaaactggtgatcagcttcctagtaagatctcaggagttgggtgagtggactcaagcatgcgcactaagaggcaaaatggcagagtttaactggtatatgaatcctcarctgataaggagaaaaagccctcaagtgagcacgtacacaacttcagtaaacacactgcgcacgctcaccccccaagtgcctgaatgccactgtggatgcggacagcccactccaagggaagaatcaggggagaagagatgcaacccccctggaagcatgccaacatatgaaacaccaagtcaaaggtcaaaccacccggctgatctcaagtcacccgcttggccctcttctaagtgtacttccttttgttcctgctctaaagctttttaatacacttttcactcctgctcaaaaacttgccttggcctctcaccctgccttatgacccttggttaaaaattctttcttttgaggtgttaagaattgaggttgctacagatttgccaccagtaacacttccatagccttagatgatttaggtttcaaaattgg

SEQ ID NO: 743786 - DNA, 614 bp, Homo sapiens
gttaattgtctctctaaaataatcattggttgaagccagggccaggcagtttcccaataaatagaaaacacctgaaactggtgatcagcttcctagtaagatctcaggagttgggtgagtggactcaagcatgcgcactaagaggcaaaatggcagagtttaactggtatatgaatcctcaactgataaggagaaaaagccctcaagtgagcacgtacacaacttcagtaaacacactgcgcacgctcaccccccaagtgcctgaatgccactgtggatgcggacagcccactccaagggaagaatcaggggagaagagatgcaacccccctggaagcatgccaacatatgaaacaccaagtcaaaggtcaaaccacccrgctgatctcaagtcacccgcttggccctcttctaagtgtacttccttttgttcctgctctaaagctttttaatacacttttcactcctgctcaaaaacttgccttggcctctcaccctgccttatgacccttggttaaaaattctttcttttgaggtgttaagaattgaggttgctacagatttgccaccagtaacacttccatagccttagatgatttaggtttcaaaattgg

SEQ ID NO: 743787 - DNA, 653 bp, Homo sapiens
ttaagtgttcttcgtatcttttcatggctcgatagctaatactttttagcactgaataatcttccattgtctccatgtacccgagtttatttatccagtaacctactgaagggtatgtggttgtttccaagttttggacataatgaataaagctgctttaaacatttgtgtgcaggtttttgtgtggacataagttttcagctcctaggagtaaataccaaggaacacaattgctggattatatggaaagggyaggttaagcattgtaagaaactcccaaactgtcttccaaagtggctctaccattttgcattcccaccagtaaggaatgagagtttctgtcatccctactggtggtaatgcaaaatgaccacatccttgtcagcatttaatgttgtcaggttttgtatactgaccattctaacaagtgttgagtagtagctcattgtttttattggcaattccctaatggcatataactttgaatgtattttcatagacttacttgccatctgtatgcactcttcggggaagtgtctgttcaagtcttttttccatttttcaatagggtttttcattttcttattgttgagttttagtattatttgtctattttggataacagagctttatcggatttgaattttgcaaat

SEQ ID NO: 743788 - DNA, 629 bp, Homo sapiens
gaattttgcaaatatgttttctcagtctgtgacttgtcttctttttctctggtcattgtcttttgcagaacggaartttttaatttaatgacagcaagcttatttattaattatttcatatattgggtttttagtatcatatataaaaagtcattgttatacccaagtctatctaggtgttctcctattttatcttctagttctatagttttgtgttttaatttaggtctataatttatatgttgttattttttgtggagggtttaagattttgtgtaattcaatttttgcacatttgcacagttgttttagttccatttcttgaaaagaatatctctgcttcattatattgacttctctccttttttaaagatcagtataccacattcatgttggtctatttctgggctctattctgttctattgatttgtctaatctactctttggcccaaaccacactgccttgattaatgtagttttattgtaagactaaagctgggtagtatcaaatttctgacttttctttttcttcttcattattgagtcaggtattctgagtttttttgtctcttcacataaacctcaagtataggtttgtgaatatctacaagatatcttgctgggattt

SEQ ID NO: 743789 - DNA, 592 bp, Homo sapiens
aaagttacatacattgttcattttttttcaaatatacaaatattcacagtgattacttcctttccaaaaatgccaatctaaaagacaagaattatttttctttatgtcattaccttagacttttctcatgatttctcttctatttccccaatttccctgcctttcttaccattggcctctccaasttgaatctttactattttgatttttaatttatgttgaccattcttcacaatattcccaatattttgttcatcctcattttcaattacttattgagtctattagatcttcacaatctagaaactgcaggagtatgtctggactgcttgactccctctaaaagcattcatctagtttaagttccagttataccagagcaagttttatggtggagaaacaggaggctcttccataatcttactaggttctcagtctataatatgcaaacagagtcccacaacacctacataaaatgaaacacagtatcttagtgaagccccatacagtttattatgcaatatatatatttctattataaattaaataattatacatggaatatatacatatgaatttaggttaaatattc

SEQ ID NO: 743790 - DNA, 595 bp, Homo sapiens
taatttgggtagttcaaatgtttccactggcaaaataattttgctttatatgaagtttaaatctactctaggtatatatttgtgtttagggtatatgagggagacataattggttttgtgattttattttctgttattctcaggtaatataagaagtaaaattaggttcctcttttaatggaggtttcagttaaaaacaaaaatgaaacacatactcacttcctaagtctgcaatcttttctttaaagggtcaattagtaaatgttttaggctagtcagccatatggtctctgtcacaactattcacctctgctatagtaagccaaatggccacagacaatacttgaacacaggggtgtgactttgtttaaataaaattttatttacaaaaagtggtggcagacttttgccgacagtccttaggttgccamcctttgtacctacatcaatctacaaattcttaggaaaagaatatatatatattaaagtatactgaagaataaatactggtttctttgttgcgttatccttgaatgacattatcatttttccatcttttaaagtgtttttaaaattatttatctgagaataaaat

SEQ ID NO: 743791 - DNA, 554 bp, Homo sapiens
tgttctctgaactgtcattgaagttatgaattatttgctgaatctaatatgtggataacagttaaatcagcacagtgagtttatttatcttttgcataatcagttttataaacatgcttgtccaaacaaaagatacttaattatcaaagaaatcagtctaaattttttgataaaaatagtacaaaataaacacacatgtgtaaacacaaacacatacacacacaaatacactcagaataactcattatggaatagatgtcaaggcagcttcacaaaattttcaaagatttctgttttgaagatccctgtaaacatctttgagactattttcttgaactggyttccttcattaggattcattgtttgaatccatttgcttgaattacaaagtaaggctttgtgtgcccaactgactagcgcagtgtttgccaactttccttgataagaaatcctgaggcattccttatatgacttcttttagaaaagtacttctcacctttaatgagcatgtgagtcacctgagaatcttttgaatattcagtaggtttgaagtc

SEQ ID NO: 743792 - DNA, 616 bp, Homo sapiens
tccaatgagaacaaacacacaatgtaccagaatctctgggacacagctaaagcagggtttagatggaaatttatacaactgaatgcccataggagaaagcaggaaagatctaaaatcaacaccctaacatcacagttaaaagaactagaggactaagagcaaacaaattcaaaagctagcagaagacaagaaataactaagatcagagcataactgaaggagatagagacacaaaaaaacccttcaaaatatcaatgaatccaggagctggttttttgataagattaacgaatagatagactgctagccagactaataaagaagaaaagagagaagaatcaaatagacacagtaaaaaatgataaaggggatatcacaactgatcccacagaaatatgaactaccatcagagaatactataaacacctctatgcaaataaacyaggaaatctagaagaaatggataaatccctggatacatacacacccccaagatgaaaccaggaagaagtcgaatccctgaatagaccaacaacaagttctgaaattgaggcagtaattaatagcctaccaatcaaaaaaaaagcctaggaccagacacattcacagctgaatt

SEQ ID NO: 743793 - DNA, 616 bp, Homo sapiens
gtttctgcatttcagatatagcaggtgtagataaacctgccaaatatgttaaaaaggtttttaaaatatgatttgtattcttggaaaaaaggaaaatagctctcttttttgagcacctactctacttgtggtgacggtgagtaggtgttggacatacggatctgaagttcagggagaggtgtgggctggagatgggaactcagatggggcagcttatggatggcaatgacaatcttggatgagggcaccaagagcagtcagagcgatggagaagagaaggggaccaaggactcaccctggatcctgygcatgtttggagactggaaaggtgggggaaattgacaaagaagacctagcagaagctcagcaataggaagaaaatcagatgagtttggtgtcttggaaaccaaatgaagaaagtgtttcaaggaggaagttttgatgaactgcgtcaaatgctgcttttagatcaagtaagattagggccacgaattgacagtatgtatgtgtgagtatatgcacacacctccatatgggatttttttctttttttcttttttttattttgacggagtcttgctttgtcacccaggctggagtgcagtggggcaatctc

SEQ ID NO: 743794 - DNA, 607 bp, Homo sapiens
gaaaaatcatcaggcctgggtgcacatttgtacaccttcacttacctggctgcatggctttgaatgattccacctctctgagcttctgatccctcatctgtaaaatggacatgatacctcgctcagagcttctctgacagtcaaagaggctcatgtaggggaaagtgccttgtgaacactaagcttatatttgtgctactcccagacaggaggaatgtaaaatgagcagctttagtaggtacaatggggcagccaacagcctagtctcctcacaacagactgcatctaggaagaatgtcattagggaaaacatcctgacatgctgtgttaggggcaaggtgagattctaaagacaaggctaaaagagagacagcagaacaattctgttagaaaaagaactagaartttggggttagaaggagagaaaaatgaaaggagtgggtgataaataacaggacagtgtggctaaaaagcttttaagaatagggatgtcagccaggtgcggtggctcatgcctgtaaccccagcactttgggaggctgaggcgggtgaatcacctgaggtcaggagttcgcaactagcctggcgaacatgatgaaaccccgta

SEQ ID NO: 743795 - DNA, 519 bp, Homo sapiens
cccatcatttccagggaactcttggtggccagatgcaggggatcctatttggtcctctgcttccaggccctctgggctggcccagagggggcaccaggggcaccctctactcctgcctagcctctcccagtctgaatttattgccttctcccttaaacctgctgttcctctgggttggctagctcagaaagcagcccactgtctgcccaggtgagaccagaacctggcgtctctccagcctttctcattcttcaatgcccaccctggctccaacatccagccgcctgtcacatgcaggtraatgcacctgtgtgaagttctctcccctttgccttccctcctgccccaggctcttgccctcggtcaggacctggtctcctgtctcttcccaacccattcctcctctatgttgcctccaagtgatcatccgcgccgtgctaattccatgctccaagaccttcagtgactccccagactgcagtaaagacatccgggccccatgatcctggctcccatccc

SEQ ID NO: 743796 - DNA, 609 bp, Homo sapiens
cagaagtccaaagtcaagatgtccgttgggctgtgctccttctgaaggctcaagagaagaatcctgccatgtcttctccagctcccggtggccccaggcattccatgctgtggctgcatcattctgcctccatctccgcatggccttctcccctgtgtctgtgtccctctatgtgtattttttataaggacacctgtcatcgagtttagggcccatccgggtaatccaaaatgatttcttctgaagacccttaacataatgacatctgcaaagacycctttagcaaataaggccacatttcacaggtccaggggtaaggatgcatatatcgtttagggggaatgacaattcagcccagtacactaacctaacttcacacagtaagtggctgaactgggatttggagttaagcctagctccagagtctacttgcttaaccactaagggctacatgttgtatatttaccagctgtgtgaccatgggcatgttatttaacccctctgtgcctcagtttcctcatctgtagactggggataataatggtaattcccacatggggttgttgtgaagactgaatgagttgataaagcaaagaacttggaacagtg

SEQ ID NO: 743797 - DNA, 642 bp, Homo sapiens
agaattcaatgaatgaaatttaaaaacacaattgagagcttcaaaaatagactagatcaagcaaaagaaagaatttctaaatttgaataaagccatttcccagataagcaaaaacaggaaattcatcatcactagaccatccctacaagaaatggttaagggattcctacatctgggagtgaaaggatggtatctgccttcatgaaaacacacaaaagtataactcactggtagagaagagacacraataagaaagagaaagaaatgaaatgttagcaccattgaaaaccaccaaaagacaaaggtaaataataaaagaggaataaaggaacaaaggatatacaacacaatcagaaaacaattaacaaaatgacaggagtaaatctgcacttatcaataacaacattgaatgtaaatggtttaaatacctcaattaaaagacatagactggatgaatggattttttttaaaaagccaactataagctgcctacaagaatctcacttttcctgaaaaagatataaatagactgaaagtgaaggaatggataacaaaattccacacaaatggaaaccaaaagcgtgcagaattagctatacaaatatcaaacaaaatatactttaagtcagaaacataaaaagg

SEQ ID NO: 743798 - DNA, 540 bp, Homo sapiens
tcaataaatttctccactgctccatgatcaacagatgttttattaccacaaacctttaaaaattgaatgccatttttataagtttctatcacgagtctattgaacattcagtttccagtttattgtaatagacctttgcttgtttcatttattgtaatagacctttgcttgtttcatttattgtaatagacctttgctcgtatcattaagtggaatgtgttcactgtgatactgacaaattcactcttgcaatacacaattgaaatcttcatttttaactttgtgcagtcttttaaagaatmaactttgattaactttcagcatagaatttcaacaatttatccttctgtttcttcaggttatatatggtggtcattccaacactatactcttctgtaagatgtttcatgcttataccactgtctagcttctccaacaactggacttcctgtgctatccataaacaaaggcattctctttttcttattactgttacccacagaggtatctccgggccttgctggtattttcaacaatacc

SEQ ID NO: 743799 - DNA, 582 bp, Homo sapiens
ctgtctagcttctccaacaactggacttcctgtgctatccataaacaaaggcattctctttttcttattactgttacccacagaggtatctccgggccttgctggtattttcaacaatacccttatgccacagaacaaagtataagcaaaacaaaacactgtaaataaggcacataggtcttggctccacatgggtcattgtgagaaatatgctgttggcgtgtccgaactgcacacatgacattttcttacattttatgagtgtgcttctgtgggacaatttgggcatgtgcagaaaagatactctcacagccaaaaggggctgaaaggatcttttttccactgggaacactaaataaactgtgtgttgtgcatctgcattttgacgaagacccaccatgttaggtcaggtgtgaaactttccacttgcgatgccatgtcagctmgcaaaaggttttggatcttggagcattttaggttttgaatttttggactagagatgctcaccttgtacttcattcattttatgctgaataatattccattctatggagataccacattttgttgtcattcaacagt

SEQ ID NO: 743800 - DNA, 510 bp, Homo sapiens
tgtgtccctcctaccccgacccctcctgctactttctcttcctctggcaaccaccattctactctctgtttctatgagtttaacttgtttagattccacatataagtgagttcatgcagtgtttatctttctgtgcatgggtgcctgacttatttcatatagcatgatgtcatccaggttcatctgtgctattgcaaatgacaggcttcccctcttttttatttttattttatttttttgggatggagtcttgctctgtcagccaggctggagtgcagtggcacgatcccagctcactgsaatctctgcctcccaggttcaagtgattctcctgtctcagcttcccaagtagctgggactacaggtgcctgctaccacgcctggctaatttttgtatttttagcagagaccaggttttgccatgttggtcaggctggtctcgaactcctgacctcaagtgatcctcctgcctcggcccctcaaagtgttgaaattacaggcatgagccac

SEQ ID NO: 743801 - DNA, 550 bp, Homo sapiens
cccccagtccctacctactcactgtaatgtgactaaaagcaattctaactgtatctattttattggtttacaattccatataagattttacttgaacaaacctcaagtaaaggaaagaaaaagaagtttacagtctttggcacagagctttgtatagtgaacataaaatatcaagcaaaactttaaaatttctcccaagaacctctttactaaatcttctaatggtttccccaaataagaactcatacactcaagtgaaacagtatctgttatttaaccaatatgaactcatggaaattccacaaagccattggaaatggaattccargcaactcatggaattgagctactcatataacgtgagtaacaccagacactgctggaagtcaagaaagttccattacactcatatgacaatgaaccagggtgaggcttttcctatcagtcttcagtatttgagtcagagaacatgactaaattatctaatgaagaaatggaagagctacactgagtcataatataaaattatgtttcattagattttgcttcc

SEQ ID NO: 743802 - DNA, 562 bp, Homo sapiens
acttcgtgtactctctgttccctgccctgcagccacactggcctcttcgcttttctctgcacatgccaagcatgttccccatctcaagtctttgtattcgctgttccctctggctgcaatgctcttcccccagatactcacagttctagcttcctcatttcattccggtctgtagtcagatgtcacctgccttctctgaaatcctttctaaggaaactgcctcccagtgctctttatcctctcatcttccgttaytttccttcctggcccttattacctgacatcattatatatatattatatatatataaatatattatatatttatgtatatatattatatatacatattataatatatattatatgctatattatactatattataatatataattataatataattattattatatattataattattaatatattatatataataattacatgtattaggtgaataggtgaatatttattcacctattagctgaataattaggtgaatatttaggtgaataattatttaatataattaggtgaataattatatatat

SEQ ID NO: 743803 - DNA, 578 bp, Homo sapiens
gaatatttcctagggataataaatagcatagcttattgaaacggattaggggccagtgtcgatcagagttcaatcagagaagcagaggcactatcatacacatctcactagatacaccaccagggtacttgtatggcaagcagccttgtaagagagcaatagggtttccatcagcagcaaagggcaggcttgtttactgtctaaaatgataaagatatcgtctccctccagagcaaagttcatacaagcttactgccsaatataaaaggcttgggcttccaaagcttgagcttcttctctaggaaagtcacccactgcctctggagataacacctggctcttgtcacattagcctgcaggaattgggactggggagatgaacacaaatgctgacacttggttactgctattgctatgagtaatgaagtcctttgtctctgcctctgttgtgtcttctgccagcaaccttgaaagtgtggcaggctaacttgttagactgcaagtagggtgaaatctcaaacctttcccagctcttgatatttcctaaccaacaccagtctcatgggtcaggaaggaaa

SEQ ID NO: 743804 - DNA, 629 bp, Homo sapiens
aaggaaaactagttttttgttgttttaaggtttgggagaattaaattttacccagttttggggattgcatctgaggagcatgtcctctggtatggagacatgactacccatctgtgaagagagaacagagggagaaaaaataaartgaagcattccctcttattttcctattatcttgaattgggtgttcccccattcatccttagggttccagaataaactggtcttaccttgtacctttaaccttggtcccatctcatcacaattacccaccggagaacagaggacgtatccgagtgtacaagaggcccctgtttatccttgggtttctgggttgaactggtcttctcgcatacccttaaccttgcctttatctctgttctaatggtaatctattagtctgggaccacgcttcatcacttgcacctgcatccttaggctgggctatatttgtgtctccataagcttatagaaactccgagtattctagcaagaaaataattatctattttctcagattcccgtttcccatgatctttaagtaggcaagaaacctgtttttcagttaactgccgcaaggtggctggactttcctctttttaaatataaccttgaaggtcttgatgcat

SEQ ID NO: 743805 - DNA, 595 bp, Homo sapiens
ataaacatggatgtcaaaattctcaacaaaatattagcaaaccaaattcaacaatacattaaaagaatcattcactgtgatcaagtgggctattatacctgggatttaaagatggttcaatgtatgcaaatcagtaaatgtgaaagccrgcattaataggataaagaataaaaatgacatgatcatctcagaaaaagagtttgataaaattcagcactcttttgtgataaaaaccttcaacagattaggtatatgaggaaagtacctcaaaacaatgaagaccatatgtgacaaacaggtagttaacatcattctcagtttctgaaatttcaaagctttttttctaagattggagacaagacatagatgctcactttcactacttattttcagcatagtacgggatgtcctatccagagcaattaggcaagactaaaaaataaaaggtatctaacaggaaaggaagaaataaaattgtctcattttactgataacctgatcttatatatagaaaagcccaaagactacaaaaaaagagagaaattgttagaactgataaactaagtcagtaaagttgcaggatataaaatcagtg

SEQ ID NO: 743806 - DNA, 565 bp, Homo sapiens
attggatccttatctaataccatacacaaaaatcaattcaaaatggattaaagacttaaaagtaaaacttgaaactgtaaaactaccagaagaaaacatagggatgtatctctgtaaaattagtctgggcaataatgtgtttgatatgatcctgtaagtaaaagaaacaaaagcaaaaagaaaaaaatggaatggtrtcaaaccaaaaagcttcttcacagcatagagaaaacaattaacaaagtgaaaagccaatccaaataatggaagaaaatatttgaaaataatgcatttgataaggggttaatatccaatatatgtgagaaactcaaacaactcagtagcaaaaaaaaaaaaaaaattataataattaaaaaatgggcaaaggacaagaacagacattcctcaaaataagacatacaaatggccaagaggtacatgaaaagaaactcagcattgctaatcattagagaaatgcaaattaaaaccacagtgagatatcactttacatatttggaatggcttttatcaaaaagatgaaaggcaagtattggtgaggataaag

SEQ ID NO: 743807 - DNA, 500 bp, Homo sapiens
tgtcatcaattacttagactacagcaccccacagcaaaaccagaagtgcaccataagtctcaaattagtattaactatcagattgtgttagtctctttttacactgctataaagaactacctgataccaggtaattaaaaaaataggtttaattgactcacagttctgcatggttgaagtgacctcaggatacttacaataatggcagaaggtgaaggagaagcaagacctatccttcacggtggcagaagagagcgggygcaaaggagaagtgccacacttttaaataatcagatctcgtgagaactcactcactattatgataatagcatggggaaaatctgtctccttgattcaatcacttcctaccagttccctctctcaatacatgggaattacaattcaagaaaaaatttaggtaggaacacagaaaaaaaccatattattctattcctggcccttcccaaatcttatgtgcttctgacattgcaacatcaatt

SEQ ID NO: 743808 - DNA, 616 bp, Homo sapiens
tctttttggcttttattctaaaacacaacattcttattgctttatttggatccgacttactggtcattctctctcctttgcaaaatgcactatctcccagaccttgaaattttagtgtgtttcaaggatctattcctgaatttttctcttcttactctacattcttattgatctcaacttttttttttttttcttagatggagtctcrctctgttgccaggctggagtgcagtagtgccatcttggctcactgcaacctccacctcctgggttcaagcgatcctcctgcctcagcctaccaagtagctgggactacaggtgcgcactaccatgtccagctaattttttgtagttttagtaaagacggggcttcaccatgttggccaggatggtcttgatctcttgacctcgtgatccacccacctcagccttccaaagtgctgggatcacaggcatgagccaccacacccagcctgatttcaacttttatcatgacttcaaatagcatctatatacaaatttatctcttggtctccatactcattcatctaattgtctaaatttcatctctacttagatatctagtaggcattccatacttaacatattcaaaatc

SEQ ID NO: 743809 - DNA, 599 bp, Homo sapiens
tgcattaagtttggtacttcctactgacctaacctatgatgacatgtaagctacagatgaatgaatgaatatgctagactttatgcaacttcagtgttctactgttttgtagagttcacgtttctggattagaactgagttcactgcaacctggcactttcccctcacacagaaatgcggtgaacttctctttcaaaggatgacatttattgaatggtcagctatttctcagacactgtctttacccaaaggaaaacgtcatccacttgtagtgtccagttcctcttttacttcttgttccccaaggaataaaaattacttaaacccaagtctctctgaattgcaacagaattccaaatgcccttgwgaaaactcaaagattaggcttgaaacagatatatttttatatattctcctttcttgtgatttggcaaatgttgcaataactagaacaaatgacagaaaaaaatctcaggcagacatttttattttttcgctgagtggtatcaaaaggtgccatatagactccagttcataccttgtaagataaatagataacagataaatattccaagaaaataataaaagaaaaatcttta

SEQ ID NO: 743810 - DNA, 579 bp, Homo sapiens
atttcatcattacacattctattctcatatcagtctatcactctgtatctgataaatatatacaattattgtgtatcaactaaaaataaagaaaaaaattaaatgactggttaaaggtcagtttaacaagcagttaatcctcacattttcacccatttctacttgtcccatcctcccataacataggtgacttcccctttccaactgcagcaagaagaccagaggtttaccaatgaaggatataaaataaatcctctaaactaccagacatcagcccttggttagagcaggtgcaccattttgaaaataggaatactcattgaatactgagatccccaggtcactgtctcactagtttctaagacacatgcagctaagactacacrcttcagacaggaaaatataaaagtttccagggcctctgataaatacaagagaaaatgactaaagctacttatgccaataggttgtctgaagacctatctcaaccatgacccgaacctcattgtcaaatcagagcttccaatcaggttgctaacactccaatagctgataaatatgagcagacacacaaggatc

SEQ ID NO: 743811 - DNA, 576 bp, Homo sapiens
agacacttttgaatctttttaatatatgcctacaaatacattttattaatagtgtaaatttaatttcctctgagaatttattcaaagaagttctatctgagtttgtgctcagaaaatgccaggatgattccttgtcacaatgtatttggtgtttaaagttccctctaatttacacagcaagacaacattcaattttctacacttctgcttaagcatatgtaaaagaaacacactcctcatgagatatgtttacaaatataaatggaatagtcacagtggagcatgaataaaccattacatggttatttctctacagtggatgtaaagagagaatcaagtccaccataataagaaataaactaagagttgtagttaaaacataataaaaatttttttaaacgyttctttactttgccaattttgtcatccaaatagggataattaaataatctgggacaacaaaatgtatactgtggcagaacaaaagaatccaaggtaaaaaaaaaaggacatggcagaatttaaggtctttgataaataatactcagatattgcaaggggtatacaaagagttca

SEQ ID NO: 743812 - DNA, 617 bp, Homo sapiens
ggggaatgcatttgaaatttactctcttagtgatttttaaaatgtagaattctttactatgtactattttcaccaagttttgcaatatatctcaaagaaaaaaaacccttattattccttttgtataaatgaggctttgtaccttttgwccaatatctatccattccaccccgcacctccagcctctgctaatgaccattctgctctctgcttctttcagtttgattgttttagattccacatataattgagaacatgaagtttttgtcttttttggcttcgcttatttcttttagcgtaacattttccaatgttgttgccaatgaaaaaatgatttttgtaaaggcatgtaattgtaacagtctcttatgatcctttgtatttttgtggtatcagttatagtgtctcctttttcatttctaattttatttatttgagtcttctctccttttttcttagtctagctaaaagattattggttttatatttttaagaaacttagttttgttcatcttttgtgtcattttctagttttcatttcacttatttttgctctgatctttattattttatttccttctgctaacattggaagaatttgatatcctttttctatt

SEQ ID NO: 743813 - DNA, 617 bp, Homo sapiens
ggggaatgcatttgaaatttactctcttagtgatttttaaaatgtagaattctttactatgtactattttcaccaagttttgcaatatatctcaaagaaaaaaaacccttattattccttttgtataaatgaggctttgtaccttttgaccaatatctatccrttccaccccgcacctccagcctctgctaatgaccattctgctctctgcttctttcagtttgattgttttagattccacatataattgagaacatgaagtttttgtcttttttggcttcgcttatttcttttagcgtaacattttccaatgttgttgccaatgaaaaaatgatttttgtaaaggcatgtaattgtaacagtctcttatgatcctttgtatttttgtggtatcagttatagtgtctcctttttcatttctaattttatttatttgagtcttctctccttttttcttagtctagctaaaagattattggttttatatttttaagaaacttagttttgttcatcttttgtgtcattttctagttttcatttcacttatttttgctctgatctttattattttatttccttctgctaacattggaagaatttgatatcctttttctatt

SEQ ID NO: 743814 - DNA, 624 bp, Homo sapiens
tcctgaagttgcttatcagcttaataagcttttgggttgagactatggggttttctaaaaatatgatcatgtcatctgcaaacagggataattgacttcttctcttactatctgaaagttctttatttctttatcttgcctgattgccctggccagaacttccaatactatatttaataggagtagtgagagagggcaaccttgtcttgtgccagtttccaaggggaatgcttccagcttttgcccattaagtatgatattagctgtgggyttatcatatatggtgcttattcttttgaggtatgtttcttcaatacctagtttattgagagtttttaacatgaatgaatgttgaattttattgaaagccttttctgtatcttttgagataatcatatggttttggcctttagttctgtttatgtgatgaataacatttattggtttgtgtaggttgaaccaaccttgtatcccggggatgaagtctacttgaccgtggtggatacgccttttgatctgctgctcaattcggtttgccagtattttgttgaggatttttgcatcaacattcatcaagaatattggcctgaagttttttgttgttgttgttgttgtatatctgcc

SEQ ID NO: 743815 - DNA, 491 bp, Homo sapiens
gaatgtagtgctatttaaaccaaagaacacacgcacagctcttactattataatcatagaaaaaaattaactgacattaaagggcattttaaatgttcatatattttgtctcttttactcagctactaaaatactcaaaatgtggtaagattctctaatgtttatatagtagaggtttttgtttaactagttgagttggattgcttatcatacaattgagagcttcgaatatcagaacagttacttacatgccaaaattgcttatgaatgttctgtcatgtcaaagttgttccattaccatatagaagtaaactctgatctgtatagatactaycagatgggtgtggtggcacatgcctgtagtctcagttacatgggaggctgaggtggaagggtcacctgagcctgggaggttgaggctgcagtgagctgcgatcacaccactgtactccagactgaatgacagagtgagaccctgtctcaaatgaaaa

SEQ ID NO: 743816 - DNA, 521 bp, Homo sapiens
atttttttaatttttctttttgtagagatgagatctcactacattgcccaacctggtcttgaacccttggtctaaagcaatcctcccgatcccacctctcaaagtgctggaattataggcatgagccactgtgcccagccaaaggcattgatgttaatgttgttgttggatgtttttgctaaaggtgctgttactaagaacattgtggccatggccactattgcagaggctactgttgctaagatcattggtgctaaaggtgctgttcctaaggaaagagtgttgaatttaargaaattgttgttatgggctattttcttagagtcattgttcttaaaggccttgatagtaagagtgttgaaaataaaacagattttgctacgagtgatgttgataagggagctgctgctatgagtactgtttccaaatgtgatgttgctaagagccaattgctaagggtactctagctaaatacattgttaataaggacattgctgcaaatagtgctgctcacagagttg

SEQ ID NO: 743817 - DNA, 521 bp, Homo sapiens
atttttttaatttttctttttgtagagatgagatctcactacattgcccaacctggtcttgaacccttggtctaaagcaatcctcccgatcccacctctcaaagtgctggaattataggcatgagccactgtgcccagccaaaggcattgatgttaatgttgttgttggatgtttttgctaaaggtgctgttactaagaacattgtggccatggccactattgcagaggctactgttgctaagatcattggtgctaaaggtgctgttcctaaggaaagagtgttgaatttaaagaaattgttgttatgggctattttcttagagtcattgttcttaaaggccttgatagtaagagtgttgaaaataaaacagattttgctaygagtgatgttgataagggagctgctgctatgagtactgtttccaaatgtgatgttgctaagagccaattgctaagggtactctagctaaatacattgttaataaggacattgctgcaaatagtgctgctcacagagttg

SEQ ID NO: 743818 - DNA, 560 bp, Homo sapiens
taaaatgaacactgatgtacacattacctgcctaagaatcaaaaactacccatatttttagagtccttaacactgtcctgttaattagtcccatttcttgtctttataattttgccaaaataaatgcattagtaaaggacattgaacattattgttttacatgtttttcagtttaaacaaatgggatyacactgaatatatttttctgaaattgctttttggttcaatattaaatttgtaagattcattcttatgatattcttatctgtactttctgtgcattgatttagagtattccttcacaggataatactataatgagcattccattttattagattggggttattatccatttttttctgttacaaaaagtagatgtccttttcttgtatgagtctcctggacataagagttagattttctctaaggtataaacccaacattcaaatcattgtgtcaaaagatttgtacactaagttaaaatgaactgttttccgatttatgctcccattagaagttaaaggttctgatagatctatattctcaacaatacctaa

SEQ ID NO: 743819 - DNA, 630 bp, Homo sapiens
agaagaagttgtttgtgccaagaatttgcggttttcacaggttaagacagcggtgcctgggatcatctgcaaggcatgagtcaaatgttgacacaatgattgtttgcagactcatctgagggcttaggcagatctggacctgttgatactgaagtttctgaaggtagaggaagaaaatataatgtctcaataatatctgaagtaggggtaggraaacagagatttaaggaggtgagatcccttcaggcctcagaaagaagcttcacttcttgtgcctctcttcagaataaatgggtcattaaattagttctttgtaactaacctaggcatgatggtgaagaagggaatagtgagaggaagaactttaaataaatatgcctgagagatcatactagattaatgggagagaaagaaatttccaagaagctgtcatgggaaagggctcacgaataataatttaaaaattagttattgataatatgaataaatcaataaaaataaataaaaagagatctgccaatagccacacttacagcaccagatagattttaaataaattaaaatttgagtttttaatgaattttctacaatccaaaatttatttgtttaatttttgcaacgaaacaccat

SEQ ID NO: 743820 - DNA, 630 bp, Homo sapiens
agaagaagttgtttgtgccaagaatttgcggttttcacaggttaagacagcggtgcctgggatcatctgcaaggcatgagtcaaatgttgacacaatgattgtttgcagactcatctgagggcttaggcagatctggacctgttgatactgaagtttctgaaggtagaggaagaaaatataatgtctcaataatatctgaagtaggggtagggaaacagagatttaaggaggtgagatcccttcaggcctcagaaagaagcttcacttcttgtgcctcycttcagaataaatgggtcattaaattagttctttgtaactaacctaggcatgatggtgaagaagggaatagtgagaggaagaactttaaataaatatgcctgagagatcatactagattaatgggagagaaagaaatttccaagaagctgtcatgggaaagggctcacgaataataatttaaaaattagttattgataatatgaataaatcaataaaaataaataaaaagagatctgccaatagccacacttacagcaccagatagattttaaataaattaaaatttgagtttttaatgaattttctacaatccaaaatttatttgtttaatttttgcaacgaaacaccat

SEQ ID NO: 743821 - DNA, 536 bp, Homo sapiens
ggatggtctcaatctcctgacctcgtgatccacccgcctcagcctcccaaagtgctgggattacagacgtgagccactgtgcccagctgtaaaataattttataggccttttgagacaatcatataatttttgtctttaatttgttgataaggagataatttcagtagattttctaacactgaactaaatttgcattactaaccgagcttgttcatggtttttatactttgctaggtatacytcctagtattttgtttacactatttgtctgtgtgcatggatgaggtacaccatagcaaggttatcctagtatcatatgaattaaagaatggtctcttttttttcccctcgcagattattagtgtaacattggaactactggtgacatcatctaggcatcatgttttctttgtagaattattaattattaactcaattactttaatggtatgatttccatctagattttctaattatttgagtcaactttgatatgttatatgtatccaaaaatgtgttaatctcacttatttac

SEQ ID NO: 743822 - DNA, 567 bp, Homo sapiens
actgaagccatttagacctagcattggagtctttgtggaaaggttttaaattacagcttcaatttctttaatagataccgggctattctgtctgtttgtttttgagtaagactagataattgtgtctttggagacatttgtccacttcatctaagttgtcaaatctgttggcacaatgttgttcataattaccatttattatctctttagcatctgttgaatctgttgttatgttacttctcttattcctgataggttgtttttgtattctctctttttttcctgataagcctgaatagaagtttatcaatactatggaccttctcaaagagacagagtttggtttcatttatttcctgtaaatgatttttcctgtkttctattgcattgatttctacactgatgctttttacttcctttcttctgcttactgttggttttattttcttttctagtttctttttttttttttttgagatggagttttgctcttgtagcccaggctggagtgcaatggcaagatctgggctcaccgcaacctccccctcctgggttcaagcgattttc

SEQ ID NO: 743823 - DNA, 622 bp, Homo sapiens
tcctattgtacagtctgaaggtccaggaaaggttcaggtccatgccagcacttcataccagttaatgcattgctccaacaagaccagccagtattcttggaagcttaacatccatgttacatattaaaatctgctttggagagtgttggtcaatccaattacatgtttgtatttatcatcatcatcatcatcatcawcaacaaccacaacaacatcacaatacattcatctacatgttcacagggctgttgggtgtttaataagctagacatgagaccatcttttatgaatatgaaacattgaaggacatagttatttaaaggcatatgtactatagaactgtagaagggacaaacaatgaagtggcaagagttctcttagcatttatatatctgcatttgtctattttaagcataatagcttcaagagaatgaaaagacaagccataaactgggagaaaatatttgtaaaacacatatctgataaagaactattattcaaaatatacaaaggactcttaaaactcaacaaaaagaaagaacaaactgattcaaaattgggccaaagacctgaacaaccaaagatatacatatggcaaataagtatatagaaagatcctcca

SEQ ID NO: 743824 - DNA, 636 bp, Homo sapiens
ggctttgctttccacctcacagggtttctctgtaaattgcttatgaatctaactctggtagcacatagttgggttaataaaagttcttttttttcttcattcttttaccaaaaagaaaaaaattccctgcagggcactttgcagatgttttcatactagacctctcagtagcttctgacagaaaatatactgcctttgacttaatagtcatttatgaaaataggtcatttaaaacaagcctgagtaggagtcaggggagggagaggaggtatagagagtgattatgactttaattttgaaaggagaagttttaccagggtgaccctgaagaaaggtctttttcctcttatgtgtttatggttcaagagactcatctcttgcttcagaaattgtcagaactgtttcttctgcyttatccaatttaaaagatgaaaacttaaaattacttgagccaagtgatgggaaaaattgtggtgtcaagaccaatttactcatacaaaatggatttatgggcaagtcattaagtaacagggagtagcaaggaagcctaatgaagactaatgtaaaagatacggctttcctaaagtgatggataaaatgtgtttgaggcaacccatatactcttttccaaataac

SEQ ID NO: 743825 - DNA, 451 bp, Homo sapiens
tctgtcagagttcagagcagggaatgaatagactctatatagtcaaatcctgatatcctgactccacaggaaagaatagtttctaaaatataagggcacaatcataacaatgacatttttaacttttttggctttctaaacccttattatctaaaacaggaaatctgattatgacatccaattcccagtactgactccccacaacatttaattagttttgactcagtgaggttttttttaatgtttaacatagtatataacaatagtagaatayagtaattaagaacacaggcctgggaactagactctgtttgaatcctggctctgtcacttactaccatgggccctgagtacattatacacttctgtgtgcctcagttttctcatctgtaaataggaacattacatcacttgccttttggggttgttgcttttacatgtaaagacatta

SEQ ID NO: 743826 - DNA, 595 bp, Homo sapiens
tgcctccctgaggccgctctctgtagacaattgctagttccacagatacaacttcccctttacacccaggaagaactgggaacatgctgtgtgtctactgctgccagaacaatgagggacaaaagtgactggcagcagggctctgggaggtgaccccctccacagatgctttgaatggcctaattatgtacaaactttttttttttttttagacagaatctcgctctgtcacccaggctggagagcagtggcacaatcttggctcactgcaacctccacctcccaggttcaagcaattctcctgcctcagcctcctgagtagctgggactacaggcgcatgccaccatgcctggctaatttttatatttttagtagagacagggtttcaycatattggtcaggctggtcttgaactcctgacctcaggtgatccacccaccttggcttcccaaagtgccatacttttatctgttacagaaatgccttgtttcccccattgccctttcatttagtaaatctatattccatttctactacaagccagagtctgtgctagatgctggggtatacagcagaaaataaacattcaagaat

SEQ ID NO: 743827 - DNA, 585 bp, Homo sapiens
ttgtcatagaaagaaagtgacttcggtggctcacgcctgtaatcccagcactttgggaggccgaggcgggcggatcacaaggtcaggagatcgagaccatcttggctaacacggtgaaaccccgtctctactaaaaatacaaaaaattagccgggcgcggtggcgggcgcctgtagtcccagctactcgggaggctgaggcaggagaatggcatgaacctgggaggcggagcttgcagtgagccgagattgtgccactgcaatccggcctgggctaaagagcgggactccgtctcaaaaaaaaaaaaaraaaagaaaagaaagtgactttttttcatgatcacagaatttctctaaatgggctacacgtaaagacagtgttgcagcttcaagataatattaatgacaatggtatgtcagtttggttatggatagctaaatattgtgtatgcattcaatctttacatcaaccaaaagagctgaatgattttgtgatgtccttttctctgatgaggaagatgaggctcagagacctggctaacccttctgcatcactttactgttttgtataagctggaagtccaac

SEQ ID NO: 743828 - DNA, 576 bp, Homo sapiens
taaaagatgtgtgctctcaataatttgttggctgatttccataggcccaatcaaaattttctttaaaaaatagtttttaattttcagcaaacacatcctagtttctgttaaaagtacaaaagtattttaaaaaccctcaatggttttatgttcacattaaaatatattcggatatgttaaaaaccaacttgcttataccatcagtaatctactcaggtgatttgattaaatatataaaagactttcttcatctaggtagatttctaatattgtaaactcaaactgatgggtgaaatggaacagaaatcacattaatgccacaaacatcctacttataaaatgagacaaactgaaataaaattttaatcaggacttctgagagtcattagcctrgagggaaaagcaatctttgctcatataaaccatgagtcctgaacttgtttcatactgcactttaaattgtcagacctctgagtattttctactttgcactcaattcagtggaagcttgctgacgccttcagcaatagctttggtgctttactttttgttgttcttgacagagagcttggttgt

SEQ ID NO: 743829 - DNA, 600 bp, Homo sapiens
gagcttggttgttcagtcacaaaactttattccttgtgactccgagtggctctcattctccagtgctgcagagtgtgagagggaatttgccctccagtgttttgccttcataaatgactcctgcttaaagctagttagtcccctgaccatgtcactgataccttcacatgtagaacaagtagaaaatggaaaagctgcttgtgagcaacttgattcacaaagcccctgggggacctctaggcttcaaagacccacttgtgaccttgaagggttttaattcctaccaatagacagaatatgtgacggtgtttttctgaacctgcaawgtaaccactgggaaaagaaagaaagaaagaaaggaaagaaagagaaagaaaggaaggtaggtaggtaggtaggtagataggaaggaaggaaggaatgaaggaaggaaggaaatcagcgtttatccctaaaatttaaactgagactaacaaaactttcacatacataattggcagggctcaaaagtcctagtttttcagaatagggacttcacatatttgctcctatggaactcatatctactaatatctttttaccagtctaattatatatgcc

SEQ ID NO: 743830 - DNA, 582 bp, Homo sapiens
gcatatataatatgcaaatgtaacatgacattttaattataaaaatgacagaggtttttagtaattcctaaacaaagcatataagcattaagtaataaataccatcactgcaaatatatgtatctagttactacatgaattttctatatacgtatatattacacattttaaygaaactttattacattttttatcaactctgaaaaagtgctcacaaacctgctgagagctttgaatttttaggagatctaagcatgtaaccgcagaagtacagcctaagcaaggccagacagccttgcaaaacatgatgacaatgagactcagtgagggtctacatcagcatctaggccaacaagatccctacataatgcccaagccttctgataaagtggcttcacttcacaactacgatctcttctctcaagtagaaattatttcctttttttttctttttggcttaacaaaagctaataagagggaatataagtagggtggtgcagggtttaaaactataaaattgtaccacatcatccaaaatccttgtaacaaaggtatcgaggcctgagaaaggtgagaactcct

SEQ ID NO: 743831 - DNA, 613 bp, Homo sapiens
gatgtctcagcaatggagtaggattgtttagaaagcaatatgtaaggtgggctaaagaaatgtttaaaaagatgaatagagcagttaatccttgggggaaagggaaagtaagccacaaaaattaacttggggccatttaagttattgaaaggatttttagtaggtcgtagagtccaacagaatgtcagaaccaagctttggaaaggctctgacgcaaggcagttcaggaaaatcaggtacactggacactcccttcgcagtcagccagtaggaagaatcaagatcaattatcttctttctttgagttactcttcagggatcaaactccgaacagagcttggtttgcatgtttactccttgtccaggagagsgagggcaccctgactgacagtcctctcaaaacgtaaagtgtctcccccttaacattaaaaaggagattggatactgggcagacaaacaaacagctgtccaaatgagaaccagcaaagtaactcttttcttaactcactccagaaaggatagaaaatttctgagggtagaaaccaggtgcagggttactgtccagcatgattcctgctgtccagtcttgatgcacctattgatagcaaacatc

SEQ ID NO: 743832 - DNA, 626 bp, Homo sapiens
gcttctgacaaaattcaacagcccttcatgctaaaaactctcaataaattagatattgatgggacgtatctcaaaataataagagctatgtatgacaaacccacagacaatatcatactgaatgggcaaaaactggaagaattccctttgaaaactggcacaagacagggataccctctctcaccactcctattcaacatagtgttggaagttctggccagggcaatcaggcaggagaaagaaataaagggtattcarttatgaaatagtaaatatttaatccacatgagcaaaagtcctgtaggggagctctcaataataataatttaaagaattctgagaccaagatgtttaagaaatgatgctttataaaatgaggctatcaattgttagtgtacatatgcctttgcatttgtttttctcagtttatcatttgcctgttatttattgtgtttttattatcgtagttttattatttttctggagtctattctctggatttagtccttgtgtatctcctcctactattcttgtgtttatagtgttttgattaaacattacctcatgttcatatttttatgttttagtttttatgtaatgtaaaatataaatgtaactccccctca

SEQ ID NO: 743833 - DNA, 626 bp, Homo sapiens
gcttctgacaaaattcaacagcccttcatgctaaaaactctcaataaattagatattgatgggacgtatctcaaaataataagagctatgtatgacaaacccacagacaatatcatactgaatgggcaaaaactggaagaattccctttgaaaactggcacaagacagggataccctctctcaccactcctattcaacatagtgttggaagttctggccagggcaatcaggcaggagaaagaaataaagggtattcaattatgaaatagtaaatatttaatcyacatgagcaaaagtcctgtaggggagctctcaataataataatttaaagaattctgagaccaagatgtttaagaaatgatgctttataaaatgaggctatcaattgttagtgtacatatgcctttgcatttgtttttctcagtttatcatttgcctgttatttattgtgtttttattatcgtagttttattatttttctggagtctattctctggatttagtccttgtgtatctcctcctactattcttgtgtttatagtgttttgattaaacattacctcatgttcatatttttatgttttagtttttatgtaatgtaaaatataaatgtaactccccctca

SEQ ID NO: 743834 - DNA, 626 bp, Homo sapiens
gcttctgacaaaattcaacagcccttcatgctaaaaactctcaataaattagatattgatgggacgtatctcaaaataataagagctatgtatgacaaacccacagacaatatcatactgaatgggcaaaaactggaagaattccctttgaaaactggcacaagacagggataccctctctcaccactcctattcaacatagtgttggaagttctggccagggcaatcaggcaggagaaagaaataaagggtattcaattatgaaatagtaaatatttaatccacatgagcaaaagtcctgtaggggagctctcaataataataatttaaagaattctgagaccaagatgtttaagaaatgatgctttataaaatgaggctatcaattgttagtgtacatatgcctttgcatttgtttttctcagtttatcatttgcctgttatttattgtgtttttattatcgtagttttattatttttctgkagtctattctctggatttagtccttgtgtatctcctcctactattcttgtgtttatagtgttttgattaaacattacctcatgttcatatttttatgttttagtttttatgtaatgtaaaatataaatgtaactccccctca

SEQ ID NO: 743835 - DNA, 621 bp, Homo sapiens
tgaaacaattgacatttggtcaacaggaccccaaagaaatgggctggggcaaagaggaactgaccggggacgtcctgtaatggtgcaaggttctatgtgaggcttctgtggccagcttgctccatacttgcaggcctccctaggaataccaaggtgctccaaaaattccagcttgcttgattagccttatggagggtttaaaattgcaaatggccagcaaggaggccaggttcctagcaactgggaaagtctgacttctgttgtggccatcyacctagtaacagaggcttcactggcagcagaaagcaaggtgagcaagttagaggagaaattacaactggaaagggatgtacgctccactctgtcagttcccaacaggctggataaagtggaagaaggggaggatgaacacaatggcatgctgctatgccaagtgatgtggtgagaaaatacctaaagccctgccattatccagtcccccagttgggatgccaaaaaatggtaacccttagacagtgaaagtgtctgacagatccagataatggaggggaatgtctgaggactcactccatcacacaaagtaaattaaagtaagcccaccaggcaggagcctgaggccct

SEQ ID NO: 743836 - DNA, 621 bp, Homo sapiens
tgaaacaattgacatttggtcaacaggaccccaaagaaatgggctggggcaaagaggaactgaccggggacgtcctgtaatggtgcaaggttctatgtgaggcttctgtggccagcttgctccatacttgcaggcctccctaggaataccaaggtgctccaaaaattccagcttgcttgattagccttatggagggtttaaaattgcaaatggccagcaaggaggccaggttcctagcaactgggaaagtctgacttctgttgtggccatctacctagyaacagaggcttcactggcagcagaaagcaaggtgagcaagttagaggagaaattacaactggaaagggatgtacgctccactctgtcagttcccaacaggctggataaagtggaagaaggggaggatgaacacaatggcatgctgctatgccaagtgatgtggtgagaaaatacctaaagccctgccattatccagtcccccagttgggatgccaaaaaatggtaacccttagacagtgaaagtgtctgacagatccagataatggaggggaatgtctgaggactcactccatcacacaaagtaaattaaagtaagcccaccaggcaggagcctgaggccct

SEQ ID NO: 743837 - DNA, 621 bp, Homo sapiens
tgaaacaattgacatttggtcaacaggaccccaaagaaatgggctggggcaaagaggaactgaccggggacgtcctgtaatggtgcaaggttctatgtgaggcttctgtggccagcttgctccatacttgcaggcctccctaggaataccaaggtgctccaaaaattccagcttgcttgattagccttatggagggtttaaaattgcaaatggccagcaaggaggccaggttcctagcaactgggaaagtctgacttctgttgtggccatctacctagtaacagaggcttcactggcagcagaaagsaaggtgagcaagttagaggagaaattacaactggaaagggatgtacgctccactctgtcagttcccaacaggctggataaagtggaagaaggggaggatgaacacaatggcatgctgctatgccaagtgatgtggtgagaaaatacctaaagccctgccattatccagtcccccagttgggatgccaaaaaatggtaacccttagacagtgaaagtgtctgacagatccagataatggaggggaatgtctgaggactcactccatcacacaaagtaaattaaagtaagcccaccaggcaggagcctgaggccct

SEQ ID NO: 743838 - DNA, 621 bp, Homo sapiens
tgaaacaattgacatttggtcaacaggaccccaaagaaatgggctggggcaaagaggaactgaccggggacgtcctgtaatggtgcaaggttctatgtgaggcttctgtggccagcttgctccatacttgcaggcctccctaggaataccaaggtgctccaaaaattccagcttgcttgattagccttatggagggtttaaaattgcaaatggccagcaaggaggccaggttcctagcaactgggaaagtctgacttctgttgtggccatctacctagtaacagaggcttcactggcagcagaaagcaaggtgrgcaagttagaggagaaattacaactggaaagggatgtacgctccactctgtcagttcccaacaggctggataaagtggaagaaggggaggatgaacacaatggcatgctgctatgccaagtgatgtggtgagaaaatacctaaagccctgccattatccagtcccccagttgggatgccaaaaaatggtaacccttagacagtgaaagtgtctgacagatccagataatggaggggaatgtctgaggactcactccatcacacaaagtaaattaaagtaagcccaccaggcaggagcctgaggccct

SEQ ID NO: 743839 - DNA, 594 bp, Homo sapiens
agcctttcctgactgcctataacttcccagaaggactaagttatatctgctcaaatacactcccataacactctgcacttctgtgatatcgtcacacttacaatcagtaaggattgccctcacctctacactgaagctcttgagggcaggaaccatgtctatcttgttcagggccatatccccactgcctggcacagggctatctacatagtagtggcccaatacattttttaaaatataattaatggttaatagttattggtttatgtgtcagtctcccttactggtgcttctgcatgttttrtctatcttggtattgtctatgtttatcctagagcctggtacagagtaagccctttaatagatgttggctaaatttatctctgaaatggtgtgcacatctaatttcttaaggacagtgctgtgcaaagacccttgaggccctcctttcccttttgcttactttcaactatgagaaagggcttagaagatggctggattgttaggcaaaagggcaaataagccaccagaagagaagcgaaatagcctcagaaagttagacggatgtgaaaatgaaaaatagattgttcattc

SEQ ID NO: 743840 - DNA, 638 bp, Homo sapiens
acaatttcaataaaatagacaatttccctaaaaatatgaatataacagaactgttgcaagataaaacagaaaatctgacttgtactatatcaaagaaactgaattataaattctcaaagaaaactgcagcccaggtggcttcgatggtatattttgtcaactattaatgaagaaataatattcaccttacacaaactatttttttaaatagaggtggtaggaacacttctcaactcattgtatgaggctctggtaccaaatgcagacaaacayattatgagaaaactacagaacaatatccttcctgagaaaacaaacaaaaagatccttaaaatattagaaaattaaacacagcaatatataaaaaggtaatattaatacatcacgaccaagttaggttatctgaagaagaacaggttgctttaacatttgaaaatcaaaaatgtacttcactgcagtgacagaatcaaggaataaaaaacatataatcatttccaatcacacagaaaagacctgcaatacaattcaaaccgattcataataaaagtcctcaaaaaatcaggaatatatgggaacattctcaatctgataaatgggcactacaaaaaacctacagttaacatgatttcttagagtaa

SEQ ID NO: 743841 - DNA, 639 bp, Homo sapiens
aatttatatgcctctatagactgcattccttgagggcaggatatatttatatttgcttaaacatgcctgcacagtgtctggatcatggtagaatgtaataaagataataatgataaaaatagcaaacatgtatttaatatttactacatgcccagcactgtcctaagtgcctcacatctattagcttatgtaatctactcaataactctgtgagacaggtgatatcattgacttcttttacaaattgggaaactcaaaacaagttaagcaacttgctcaagaaatcacagcattaaattgtggattgaggatttaaatgcaggaaacctggctcccaagtctagctataaatatctgtatctaataatttctccacttgaataacgtctgcttcaggacttagaagatacaaccactaaaattttagaactcatttactctaaatgtcctatgtgcatttatcataatatagcaactcagtatattccccytgacaacttaggttttaaagatgttcttgtatccaaatggctgtgtgtgtgtgtgtgtgtgtgtgtgtatacacacacatatatgctttttgctgtattttttccactactcataaagacaataaaaagggcgccacagaaataatca

SEQ ID NO: 743842 - DNA, 584 bp, Homo sapiens
gaagctctgggtgtgggggatccttccctgcctcttccagtttctgggggctgctggtgttccctggcttgtggctgattcaatctgatctctgcctcagaggttacactgccttttcctccatcgtgtgtcatcgaatctccctctctcacaaggacactgtcattgcatttagggttcacccacaaaatccaggaaaatctccccacttggagatcgttagcttagccatgtctgcaaagtctaccaaataatgaacattcacaggttctaggggttagaccctgatgtcttcaggggccattatcagtttaccacaggccccgtgccctccctgggaccacagcacccagggcagagatctgtactgggctctgtggggaagaggggcaggactccttcccgaaaggatactggstcccgcacagtcgcagctgtgcagaggactgtgggccagggcccagcctattttgtctctctcatgattgctgatgggacagtggtgtgcaattcccagagaatcccgcacatgttttctcacttgacctcatcagcaacatgaaggcttatcatggatattattg

SEQ ID NO: 743843 - DNA, 494 bp, Homo sapiens
attaatattattatcagtgtgaacttctaaatactactgacagtaaaggctacgaaggtttccttttaatccattaaaatatattttcactttactctttcccaaagtatcaatattgaatgttataaaaatacttttagcatttgctttcaaataaaatattcaatactcaatgctttcatggaatattttcccttaaaaatccattatacyaaaagtaaatatctgtatggaacctactagactgatgtaattaaaattaaatttacaaaaaggtaatggagattatatcagcaatagcatgcaattcaatgcagcagctgaatcaccgtagatttttttccctatttaatcttatctcggatgaacaaaaaggttaagtcccacagcaatccttagattaggctattatttttgttatggctacttagtcgttttattacaaactattaaataacgcaagaaaatcaaagaggtacaaaggtaagaagttg

SEQ ID NO: 743844 - DNA, 595 bp, Homo sapiens
agtctattttcaaacgcctacagctagtagtaaaatagccagactcccccagcaggttaggatcacacatcatcatcatgtctattagatgctgagctggaaatattgagccagagcaataagcaaaaataaataaatacataaagattggaaaggaataaatacaactgtcaggattcacaaaggacaattgcatagatagaaaattcaaataatcaacaaattagaattaacagatgaatttagaagggtcactggaaacatggttaatatarcaagtccactttgtttctatgtaatagcaacaaaaattagaaaaataaataaattctgattcatatagcatcaaaaaattcaatacttatggatacatttatttttttcaaatgcaagacctcttcatgaaaaactatgaaacattactgaaataaattaaagaagacatgagtaagtggggaagatggtccttgtttgcggattagaaaatccattatttttaaaatgtcaaccctttccacattgatcaccagatttaatgcgattccaatcataatcccagcaggaatttttgtgcacgctgacaagccaattataa

SEQ ID NO: 743845 - DNA, 520 bp, Homo sapiens
actcatccacctggcccatgaagggcccaccccctccatcacttgggtctgcagggcgtgtgtgagaccttgcgtgggaaaaacagctctgtctccatcccctgcaggcggggatcagcaatctgctgaccagggaaaaggtaagaaaagccccttggactgagggcagagttgacaccgtgcattcccctgtgcttggaagaaagtgctgggcgtcgtcacagggacagccactgcttccggaggtagacrggccactaggaacacacaccctctagagcacttctcatttgcacagctccaccttatgcatacatttcccaagtcgtgcgctgagctcctactgtatgcaaacctataggagagaataacttaatccccgcactgtctgagagaaaaagtctctccatgtctgcacttcccagggaacaagacaaaggcacagagaagctaagtgagagttggtggggggcagagactacagggagcaaccccagtgagtggctcccatgccggctcc

SEQ ID NO: 743846 - DNA, 635 bp, Homo sapiens
gtgcgctgagctcctactgtatgcaaacctataggagagaataacttaatccccgcactgtctgagagaaaaagtctctccatgtctgcacttcccagggaacaagacaaaggcacagagaagctaagtgagagttggtggggggcagagactacagggagcaaccccagtgagtggctcccrtgccggctcctgagcccaggcccctgcctcacagctgttcctggcggcacctgcagccccaggcccgggataaccatcagacattatcatgtctggtgctaataaaagtgtgggttctcccactatcaaccacacaaatgtcctttggcaggcaaatgatttttagcctcttagcctaaaaagatgccttagggagtggggagcccatgtttcagggggacagggtttccgtctgggaagacgaaagggcggtggggatggatggtgctgcacaacagcgtgagtgtgcttcatgccgcagaactgtgtgcttaaacaaggttaaggggcgaaattctgtgatgtgtattttaccacaataaaataaaaaagaaattaaagatgaattactctgaatcctggatcccaggactagcgaagtgaaatcagctctagaatcaagtgtccataaa

SEQ ID NO: 743847 - DNA, 425 bp, Homo sapiens
aacagaaaggctaggatcccctctctgtgcttcaactgcatgtcaagattctgcatctgactttttcatctgccccagagagctcttagattgcaagtataacatccaaacggataacacctccttgagcatcagagaccagagatggagacgmagccaatgtggatgcctcgaagccagatgctgagtgaggaggagccaggtcttgagccttcctccctccaaccccacagccccttctgtaggtcatccacagcagcctccagaggtcagacctgtggccaggggcattcctcatggtcccttagtgcccatgggtacatttaccaagcacgctgctgattcattattcaccagcgtgagcaaatgggccggcttcccatggctgctgtaacacattttcacatactcagtggcttgaggca

SEQ ID NO: 743848 - DNA, 635 bp, Homo sapiens
ccctcagaaataggttattattttttggcaggattagggggctaaatatttttattccactggtttcccaccagtcaagatacaaacaatgcataaaatataaccaattacctatgaaaagcacaaggctttttttttttttagacagagtctcactctatcactcagggtggagtgcggtggtgtgatctcggctcactgcaacctctgccttctgggttcaagtgattctcctgcctcagcctccccaagcatgtgggactacaggtatgcaccaccatgcccagctaatttttcatattttcagtagagacaaggttttgccatgttggccaagctggtctcgagctcctaacctcaagtgatccccccgcctgggccacccaaagtgctgggattacagatacaaaccaccgcacctggccacagggccattttggtcacattgaggttcttcttagtttttctgastcttataatgtctgttttataacataaaccacatttatctccactaaggacataggatgaaacatacttaccttgtagcaggtaggattctcgctagacacaactgagaacttcccacttctaaagaatgttaataattagaaagaaaaagacaaatctctcac

SEQ ID NO: 743849 - DNA, 444 bp, Homo sapiens
tgtgtacataagtatgtatacatattgtgatttatccttgcccaaaagcccatttttcccatagagtaactaagtctcaggaaggttaagttacttgttcatggccacaatgaagcacatgagctgcagctgggatttttttttattgccaacttctatattatacactccagtctccacartttccaaactgtgatcaattcactggtgttgggctggccacacaagaggctcattggaaacaaactacatatacattaattcccagtgatttcttattagtagaccgaggagggacccaagaatctgtgattttaaaagttgtcaggctgattcagttgtgcagtctgattggagaagatctgtgtttggctacctgggctgttcccaaattatttttggtctctccaacttcagcaaaaaggaagaaagggagggagagag

SEQ ID NO: 743850 - DNA, 551 bp, Homo sapiens
ttacaggctgcttaaaagggatagtttgttgtagtcctgaattaataaagtaatgtcctattctccacttaccatgtagtactgcttttgttaaataatccactggggcttgggtagtttatgtggcatttttgatatgccccactgttatggcttgaattctgagttgtcaaaaagtatgtcycctcaggcaatggtgatttttgtgctacaagaagtcgggggctcaataccaataatgcactcacaagtgagaaccatggtcactgacatccaatatggaccaaagccatatcacaggtagataagcactactggtcaatgcattcattctaaaaccttccagtgtcaccagtttttctccctaagaggacctggaagtattatgtggactcctgtatcaaaaaaaaaagtctgaatttctttcttttctcctcttaccttgacagaaatataaggcctttggcctccatttggggaccccgagaacttggtcccatttctgactctgccattcagcccaagacattggatttgcaatgtcctttcat

SEQ ID NO: 743851 - DNA, 551 bp, Homo sapiens
ttacaggctgcttaaaagggatagtttgttgtagtcctgaattaataaagtaatgtcctattctccacttaccatgtagtactgcttttgttaaataatccactggggcttgggtagtttatgtggcatttttgatatgccccactgttatggcttgaattctgagttgtcaaaaagtatgtcccctcaggcaatggtgatttttgtgctacaagaagtcrggggctcaataccaataatgcactcacaagtgagaaccatggtcactgacatccaatatggaccaaagccatatcacaggtagataagcactactggtcaatgcattcattctaaaaccttccagtgtcaccagtttttctccctaagaggacctggaagtattatgtggactcctgtatcaaaaaaaaaagtctgaatttctttcttttctcctcttaccttgacagaaatataaggcctttggcctccatttggggaccccgagaacttggtcccatttctgactctgccattcagcccaagacattggatttgcaatgtcctttcat

SEQ ID NO: 743852 - DNA, 607 bp, Homo sapiens
tattcttgatggcttcttgaacatgtgtcttatttaggaaggccttccttttctgaggataaagaatacttttctaagttttcttctaatattattattgttttgttttttatgtttagctctttaatccatctggaaatgatttttgtatatggtgtgaggtaggtatctaagcgtattttttttaatgaatagttcattgtcccaacactttaattactaagccattgtttcatatattaaattccaatatttatacatgggtctgcctctggactctctagtttgttccattaataaatttgtctaccctatgccaaaatgcaatgtgttcattacatagtttgataaaatgctttgctatctgatagagtaactctcccktattgttctatttcaagtatatcttagtttttatcaaataattactactttagatcaattttgggttcatcttgtcaatttccatacaccatttcatttgggttttcatatatattgtgttaacttttcagattaatctaaagaagaaatgaaatatgtataacattgagtcttcctattcaaggaaatgacacaacttttcatttgttcagatcctctttta

SEQ ID NO: 743853 - DNA, 489 bp, Homo sapiens
ttaatatgtcctgtattcattacaacattaattgcattaaattcagctactatgaataaataatctatcacatatacattttaaaggtagaagcatttcagttttatacaaggatgtctttttgagctgacataggtttccaagatttgagacaatatcagaagatttattaaaawtgatatgagacagcaactccccacatcactttgctggcatatatctgcatgggtgggctttacttgcttcaacagcacatgggaatgcagtgtgccccccataatccccaccaaccaccactgcagatggatccttgttgggcacagagtcatcaagccccatctacaccagtgccctgcccttgtgctgtgctgcacacagagcaggggatccccccacaacctgagcaattgctcctgcttgcagaccacagataaggcgccaagacctccactggccagcaccccaccccaagccatcaccacctacagt

SEQ ID NO: 743854 - DNA, 534 bp, Homo sapiens
tgggcttatctcataacatttgctatggcatctaggggactgcaatccaggcctgctcaggtgtctcatgatcttcactgtgctgcttagatgaataacagaatcaaaagagaaaggaaaatttgtttttcttctccctatgttgagggagccctgggagactctccagagcacattctttgagccccagcttcttagataatgctatcgagactttgcctgggtctgggctttgcctgttactgcctttgggatgagtcagcctaatacagaaagattgtttctttctctttttaattttacttttctttctttaatttccagcctcaagggtgatgggagaagatgtaagaaaarttatagggaaaaatgcaaaccttcttggaaggccaaaaactttggagaataatttagctgaaggcagctaaattctcttaagggcaaaggttagataacaagggaatgtaaagaaacatatctagaaaaattggtttacttatgtctcaggaaaccaacctttgatcattcatgtgc

SEQ ID NO: 743855 - DNA, 534 bp, Homo sapiens
tgggcttatctcataacatttgctatggcatctaggggactgcaatccaggcctgctcaggtgtctcatgatcttcactgtgctgcttagatgaataacagaatcaaaagagaaaggaaaatttgtttttcttctccctatgttgagggagccctgggagactctccagagcacattctttgagccccagcttcttagataatgctatcgagactttgcctgggtctgggctttgcctgttactgcctttgggatgagtcagcctaatacagaaagattgtttctttctctttttaattttacttttctttctttaatttccagcctcaagggtgatgggagaagatgtaagaaaagttatagggaaaratgcaaaccttcttggaaggccaaaaactttggagaataatttagctgaaggcagctaaattctcttaagggcaaaggttagataacaagggaatgtaaagaaacatatctagaaaaattggtttacttatgtctcaggaaaccaacctttgatcattcatgtgc

SEQ ID NO: 743856 - DNA, 659 bp, Homo sapiens
tgcatttccctgtacatctccattagagctttttagtcaccaggtacactgtcaaaaagctgaagtatttgaaatcaatctttttttctgagctgtaggtctcaacagtgggattaaaatactcagtaacccatgcrgtaaacagctctgatatcatccaagtgttgttgttccatttatagagcttgggtagtgtagatttagcataattcttaagaggtgccctaggatttatggaatagcaaatgagcattggcttgtaacaagaaagtcagcctgtcctttaaatctttttctttttcttgatataaggtctcactccattacccaggctggattgcagtggcatgatcttggcccactccatacttgacctccttggccccacaatcctcccacctcagcctcctgagtagctgggactagtagcatgcaccaccatacatggcttatttttatttatttatttatttattgttagagacagggtttcaccatgttgcccaggctggtctgaagctcctaagctcaagccattcccccacttcagcctcacagagtgctgggattacaggcgtgatccaccctgtctggcctctaaattcgtgttatggagactcattttcatggttaaaatgtcctgaattgactgtggcctg

SEQ ID NO: 743857 - DNA, 503 bp, Homo sapiens
ctccagcctgggctacaaaagtcaaattccatctcaaaaataataatgataataataatgttttctacaagcaaggagttactttgtactgtgaactggtgtgaagggatctgccatgtgtaagcttttggattgatgacagttatttctaattttaaaaatagcaacccaacagaaaattgggaaaatgcattaatagggatttcacaaaagagaaagcctgcaaaacataaaaattttctcaacctcattagtaatcagggaaatgcacaagatactacacatctattctctccacaaatattaagaagtttgacaatacaaaatgtaktagtccatattcacactgctgataaagacataaccgagacagggaagaaaaagaggcttaattgcattaagggttccacatggctgaggaggcctcagagttatggtggtggatgaacagcacttcttacatggcagtggcaagagaatatgagaaggaggcaaaagaagca

SEQ ID NO: 743858 - DNA, 655 bp, Homo sapiens
ctgcaaaacataaaaattttctcaacctcattagtaatcagggaaatgcacaagatactacacatctattctctccacaaatattaagaagtttgacaatacaaaatgtattagtccatattcacactgctgataaagacataaccgagacagggaagaaaaagaggcttaattgcattaagggttccacatggctgaggaggcctcagagttatggtggtggatgaacagcacttcttacatggcagtggcaagagaatatgagaaggaggcaaaagaagcaaaagacaaaaccactgataaacccatcagatcttgtgagatttattcactatcacgagaatagcatgggaaagaccggctctaaagattcaactacctcccccggttccctccccgaacacatgggaatcctgagcaatacaattgaagttgagatgtgggtagggacatagtcaaaccatattattytgctcctggcccctccaaatctcatgtcctcacacttcaaaaccgatcatgccttcccaacagtcccccaaagtcttaactaatttcagtattaacccaaatgtccactgtccaaagtctcatctgagacaaggcaagtctcttctgcctatgaccctgtaaaatccaaatcaagctagttact

SEQ ID NO: 743859 - DNA, 678 bp, Homo sapiens
accgatcatgccttcccaacagtcccccaaagtcttaactaatttcagtattaacccaaatgtccactgtccaaagtctcatctgagacaaggcaagtctcttctgcctatgaccctgtaaaatccaaatcaagctagttacttcctagatacaatgggggtacaggtcattgagtaaatacagccgttccaaatgggagaaatttgccaaaacaaaggggttacaggccccatgcaagtccaaaatccwgcaaggtagtcaaattttaaagttccgaaatgatctcctttgactccatgtttcacatcaaggtcatgctgatccaagaggtgggcttccacagccttgggcagttctgcctctgtggctttgcagggtatagcccacctcgtggctgttttcatgggctgacgttgagtgtccacagcttttccaggctcatggtgcaagctgtcagtgaatctaccattctggggtctggaggagagtggccctctcctcacagctccactaggaagtgccccagtaaggactctgtataggggctctgaccccacatttctcttctgcacagccctagcagaggttctccatcagagcaccacccctgcagcaaacttctgcttggacatccaggtgttttcaaacatcctctgaaatctaggtggaggtttcca

SEQ ID NO: 743860 - DNA, 523 bp, Homo sapiens
cctagatacaatgggggtacaggtcattgagtaaatacagccgttccaaatgggagaaatttgccaaaacaaaggggttacaggccccatgcaagtccaaaatccagcaaggtagtcaaattttaaagttccgaaatgatctcctttgackccatgtttcacatcaaggtcatgctgatccaagaggtgggcttccacagccttgggcagttctgcctctgtggctttgcagggtatagcccacctcgtggctgttttcatgggctgacgttgagtgtccacagcttttccaggctcatggtgcaagctgtcagtgaatctaccattctggggtctggaggagagtggccctctcctcacagctccactaggaagtgccccagtaaggactctgtataggggctctgaccccacatttctcttctgcacagccctagcagaggttctccatcagagcaccacccctgcagcaaacttctgcttggacatccaggtgttttcaaacatcctctgaaatctaggt

SEQ ID NO: 743861 - DNA, 628 bp, Homo sapiens
aaagtctcatctgagacaaggcaagtctcttctgcctatgaccctgtaaaatccaaatcaagctagttacttcctagatacaatgggggtacaggtcattgagtaaatacagccgttccaaatgggagaaatttgccaaaacaaaggggttacaggccccatgcaagtccaaaatccagcaaggtagtcaaattttaaagttccgaaatgatctcctttgactccatgtttcacatcaaggtcatgctgatccaagaggtgggctyccacagccttgggcagttctgcctctgtggctttgcagggtatagcccacctcgtggctgttttcatgggctgacgttgagtgtccacagcttttccaggctcatggtgcaagctgtcagtgaatctaccattctggggtctggaggagagtggccctctcctcacagctccactaggaagtgccccagtaaggactctgtataggggctctgaccccacatttctcttctgcacagccctagcagaggttctccatcagagcaccacccctgcagcaaacttctgcttggacatccaggtgttttcaaacatcctctgaaatctaggtggaggtttccaaacttcagttcttgacttctat

SEQ ID NO: 743862 - DNA, 485 bp, Homo sapiens
aatgggagaaatttgccaaaacaaaggggttacaggccccatgcaagtccaaaatccagcaaggtagtcaaattttaaagttccgaaatgatctcctttgactccatgtttcacatcaaggtcatgctgatccaagaggtgggcttccacagccttgggcagttctgccyctgtggctttgcagggtatagcccacctcgtggctgttttcatgggctgacgttgagtgtccacagcttttccaggctcatggtgcaagctgtcagtgaatctaccattctggggtctggaggagagtggccctctcctcacagctccactaggaagtgccccagtaaggactctgtataggggctctgaccccacatttctcttctgcacagccctagcagaggttctccatcagagcaccacccctgcagcaaacttctgcttggacatccaggtgttttcaaacatcctctgaaatctaggtggaggtttcc

SEQ ID NO: 743863 - DNA, 523 bp, Homo sapiens
cctagatacaatgggggtacaggtcattgagtaaatacagccgttccaaatgggagaaatttgccaaaacaaaggggttacaggccccatgcaagtccaaaatccagcaaggtagtcaaattttaaagttccgaaatgatctcctttgactccatgtttcacatcaaggtcatgctgatccaagaggtgggcttccacagccttgggcagttctgcctctgtggctttgcagggtatagcccacctcgtggctgttttcatgggctgacgttgagtgtccacagcttttccaggctcatggtgcaagctgtcagtgaatcyaccattctggggtctggaggagagtggccctctcctcacagctccactaggaagtgccccagtaaggactctgtataggggctctgaccccacatttctcttctgcacagccctagcagaggttctccatcagagcaccacccctgcagcaaacttctgcttggacatccaggtgttttcaaacatcctctgaaatctaggt

SEQ ID NO: 743864 - DNA, 628 bp, Homo sapiens
aaagtctcatctgagacaaggcaagtctcttctgcctatgaccctgtaaaatccaaatcaagctagttacttcctagatacaatgggggtacaggtcattgagtaaatacagccgttccaaatgggagaaatttgccaaaacaaaggggttacaggccccatgcaagtccaaaatccagcaaggtagtcaaattttaaagttccgaaatgatctcctttgactccatgtttcacatcaaggtcatgctgatccaagaggtgggcttccacagccttgggcagttctgcctctgtggctttgcagggtatagcccacctcgtggctgttttcatgggctgacgttgagtgtccacagcttttccaggctcatggtgcaagctgtcagtgaatctacmattctggggtctggaggagagtggccctctcctcacagctccactaggaagtgccccagtaaggactctgtataggggctctgaccccacatttctcttctgcacagccctagcagaggttctccatcagagcaccacccctgcagcaaacttctgcttggacatccaggtgttttcaaacatcctctgaaatctaggtggaggtttccaaacttcagttcttgacttctat

SEQ ID NO: 743865 - DNA, 578 bp, Homo sapiens
cattatttagtgtaatctatgtgacaatcctctgagatatgtgttactattccaatttaaacaagaggaaacaggttcaaggaaggtaagttatgtgctgagggacacacaagagggggtggagctggatttcaagcccactgggtgtrcagaactgagccttttcaccatgggggcaaatccctcctgaggacagggctggaaaggccatggagatcatcttgtgcttggacaagcctctcaccagtcaccacagggccctgactcccattcctaccttcaagaagctcagcaggctactactcgtgttcatgttgggtcactacatacggttttatttgaaggaaggaccccagagttaaactcatttgaaaacccctgataaattcagtcccctccctctttttacaggtgaggcccggagagaagatatgacttgcttaaggtcacacacttagtttctctgtcaatctttctaaatctaggacgagttctcttcccactgtatcaggctgcctcaacaaacagggaagtacaaaaatagccaaatccaggaaggagggcaagtggtctgtgtc

SEQ ID NO: 743866 - DNA, 608 bp, Homo sapiens
ctgcaagtccctcagtgtagagatgagtctgtagaggaggttgacacaagcttgtgaaagacccagtatgccaggctaagggggtgggaacagtgagggacactgagggttttatggcttaaattttgacaagtgtatctacatatagacaactaatgtaacactcctttttttttttttttttttttttttagagatggagtctcactctgtcgcccaggctagagtgcagtggtgagatcttggctcactgcaacctgcgcttcctgggttcaagtgattctcctgccttagcctcctgagtggctgggactacagactgatcccaccacatctggctaatgttttgtatttttggtggagacagggcttcgccatgttggccaggccggtctcgaactcctgagctcaagtgatccacctgcctcagcctcccaaagtgctgggattacaggcaacacttttttwaattttcttttttgagacagagtcttgctttatcatccaggttagagtgaagtggctcagtcatagctcactgcagccttgacctcccgtactcaagcaatccttcctcctcagcctcctgagttgctttcaattttttt

SEQ ID NO: 743867 - DNA, 577 bp, Homo sapiens
ggagtggcggcacatgcctgtaatcccacctactggggaggctgagacaggagaattgctcgaacccagggggcggagtttgcagtgagccgagatggcaccactgcactccaaacctgggcgactaagcaagactctgtctcaaaaaatatatataaatttatatttatatacayaaaataaataaaaaaataaaaataaataaaactacagtacaccagtgtgtatcccttcattgttggtggacatgtgggttgtgttcattttcatcagttacaaatgatgctgttgtgaacatgtttgtatttctatttggttaccattagtgtgtatttatgtacagtataaaccaagaggtgaaatcacggttacagggtaaacatatcttcagttttaccagttattatgggtttcatcccaatgttaacacagcaactgacagtcttacaatgtctgataattcccaaatcttcgcattcttcttgacacttaatttcgtcaaaattttaatctgagtcttttggtgggtatgtggcaatgattgtgatattaatttactgggccttttcttctctat

SEQ ID NO: 743868 - DNA, 544 bp, Homo sapiens
ggtctgcagtccctccgccatctcacaagtgtgcagccgctaggcctgggggatccgaatgactggggctggataggaatgccttcgtgtttcccaagacccccgggcctgctccacaaagtttgaagggtgggtacaccccgacccaggcaagttactcccccaaacccatgactgactaatctgatatgacaaaagcccatgatggatttggtatatgttaattcacaatgccctttcctccagaatttaactataagttaatacacacyggaaaccatgcgcatacactctccttaatgggcttagtaatgtattagtgagtcctaacgatgcatacaaatgtgctctgcgctctgtagacccctcaagatttatgggccttgagctctctgaagctgtaaacaaggagaaaaaaaaaagagaaagcgaaagcgactggggggaagagacagaggcctgactcgcccctccaggttttggagagaagggattctttatgtattttcctttccttgcaagctcggtgcgtgtgggttttggc

SEQ ID NO: 743869 - DNA, 487 bp, Homo sapiens
aggcctgggggatccgaatgactggggctggataggaatgccttcgtgtttcccaagacccccgggcctgctccacaaagtttgaagggtgggtacaccccgacccaggcaagttactcccccaaacccatgactgactaatctgatatgacaaaagcccatgatggatttggtatatgttaattcacaatgccctttcctccagaatttaactataagttaatacacaccggaaaccakgcgcatacactctccttaatgggcttagtaatgtattagtgagtcctaacgatgcatacaaatgtgctctgcgctctgtagacccctcaagatttatgggccttgagctctctgaagctgtaaacaaggagaaaaaaaaaagagaaagcgaaagcgactggggggaagagacagaggcctgactcgcccctccaggttttggagagaagggattctttatgtattttcctttccttgcaagctcggt

SEQ ID NO: 743870 - DNA, 544 bp, Homo sapiens
ggtctgcagtccctccgccatctcacaagtgtgcagccgctaggcctgggggatccgaatgactggggctggataggaatgccttcgtgtttcccaagacccccgggcctgctccacaaagtttgaagggtgggtacaccccgacccaggcaagttactcccccaaacccatgactgactaatctgatatgacaaaagcccatgatggatttggtatatgttaattcacaatgccctttcctccagaatttaactataagttaatacacaccggaaaccatgcgcatacackctccttaatgggcttagtaatgtattagtgagtcctaacgatgcatacaaatgtgctctgcgctctgtagacccctcaagatttatgggccttgagctctctgaagctgtaaacaaggagaaaaaaaaaagagaaagcgaaagcgactggggggaagagacagaggcctgactcgcccctccaggttttggagagaagggattctttatgtattttcctttccttgcaagctcggtgcgtgtgggttttggc

SEQ ID NO: 743871 - DNA, 544 bp, Homo sapiens
ggtctgcagtccctccgccatctcacaagtgtgcagccgctaggcctgggggatccgaatgactggggctggataggaatgccttcgtgtttcccaagacccccgggcctgctccacaaagtttgaagggtgggtacaccccgacccaggcaagttactcccccaaacccatgactgactaatctgatatgacaaaagcccatgatggatttggtatatgttaattcacaatgccctttcctccagaatttaactataagttaatacacaccggaaaccatgcgcatacactctccttaatgggcttagtaatgtattagygagtcctaacgatgcatacaaatgtgctctgcgctctgtagacccctcaagatttatgggccttgagctctctgaagctgtaaacaaggagaaaaaaaaaagagaaagcgaaagcgactggggggaagagacagaggcctgactcgcccctccaggttttggagagaagggattctttatgtattttcctttccttgcaagctcggtgcgtgtgggttttggc

SEQ ID NO: 743872 - DNA, 505 bp, Homo sapiens
ggggcaaatccgaggcggagaccatatgactacgcgtggcactggcctatcccacagcagttggtgttaatgcgtgtcactggaggcatacggggagacggcgaaacaaagggtggtgtccaggaacatgccggtggaagggggaaacgggtgacctttccatcaataccaaggaaaatcgaaaaacacgtgggacacgcggggtktggggagggggggcctgtgccggacccaagctacgttttcaaatgcctaccagaggagcatagaggtttctgcaaaattcgccccaccccaaaccgtccaaggccctggcagccctgacacaactttggctgcaccgagccccaggaccagcccccaaccctagaccagtcccttgggttccctgacattcttttctgccagatgatcaagggcttcagttcacccaggagcagaggagaggatgtccctcaagaatgagacaggaagtgcagaggaaatgcgacaccacctgtcctgg

SEQ ID NO: 743873 - DNA, 505 bp, Homo sapiens
ggggcaaatccgaggcggagaccatatgactacgcgtggcactggcctatcccacagcagttggtgttaatgcgtgtcactggaggcatacggggagacggcgaaacaaagggtggtgtccaggaacatgccggtggaagggggaaacgggtgacctttccatcaataccaaggaaaatcgaaaaacacgtgggacacgcggggtgtggggrgggggggcctgtgccggacccaagctacgttttcaaatgcctaccagaggagcatagaggtttctgcaaaattcgccccaccccaaaccgtccaaggccctggcagccctgacacaactttggctgcaccgagccccaggaccagcccccaaccctagaccagtcccttgggttccctgacattcttttctgccagatgatcaagggcttcagttcacccaggagcagaggagaggatgtccctcaagaatgagacaggaagtgcagaggaaatgcgacaccacctgtcctgg

SEQ ID NO: 743874 - DNA, 505 bp, Homo sapiens
ggggcaaatccgaggcggagaccatatgactacgcgtggcactggcctatcccacagcagttggtgttaatgcgtgtcactggaggcatacggggagacggcgaaacaaagggtggtgtccaggaacatgccggtggaagggggaaacgggtgacctttccatcaataccaaggaaaatcgaaaaacacgtgggacacgcggggtgtggggagggggggcctgtgccggacccaagcyacgttttcaaatgcctaccagaggagcatagaggtttctgcaaaattcgccccaccccaaaccgtccaaggccctggcagccctgacacaactttggctgcaccgagccccaggaccagcccccaaccctagaccagtcccttgggttccctgacattcttttctgccagatgatcaagggcttcagttcacccaggagcagaggagaggatgtccctcaagaatgagacaggaagtgcagaggaaatgcgacaccacctgtcctgg

SEQ ID NO: 743875 - DNA, 643 bp, Homo sapiens
gcgaatccgagggggagaccatgtgaccacgcgtggcactggccaatcccacagcagttggtgtgaatgcgtctcaccggaggcatacggggcgacggcgaaacaaagggtggggtccaggcatgtgccagtggaagggggaaacgggtgacctttccatcaatgccaaggaaaatcaaagaacacctgggacccgggggtggggggccgcctgtgcctgacccaagccacgttttcaaatgtctaccggaggagcaaagaggtttctgcaaaattcgcaacacccccaatcctccaccgmcctggtagccctgacgcaacttcggctggcacaaacccacagagagtgggaaagaaacacacagagactgagagacagagagagaagagagaatgggagacacacacacacacacgcagagtcatacagcagaggcattgaaacacacacccccaggcaacccctgaggctgcggggttctgctctggaggagaacgaccctcgggtgagagagcagcccaggggcacgcaggccgacccgtcctcgagatcacggacggcggcacgacttttagggagactcaccccaaccaacaccgtccgtgcaggcctgaggctgggatcccgtgctgcttcccccgt

SEQ ID NO: 743876 - DNA, 370 bp, Homo sapiens
gagatgaagttctatagatcctggaatcagggatggggaatctgtgaggtccctgaggtgagagatgacgatctgtagattagtgatgggtggtctttgggatagtgatgaggtccatggaatcaatgattgtgggtatktagggtcagtgatgagggaatctggtgtcagtgatgggatgtgtgtggaatcaatatgtgaaagccagatttgtggagtcatctctcaggctgacacatcctgatctgtgtgtcagtggtggaaattctatggggtcagagtgtgactgtcaggtccctgacactgtgtgttctgggtctggccaagtgcacagattcccttgccttgtcctggctggggaggcccttct

SEQ ID NO: 743877 - DNA, 617 bp, Homo sapiens
gtgtatgcagaagagcctacataatccacagggaaattctgaggattcagaggagtttagcaaagttgttgggttcaaaatctataggcaagattccattttcttactatatattagcaacaatgttggaaaaataaaatttataaaaagacataatagcacaaaatatcaagaatctaagaataatgtgcaaggtcactatacagaaatgttattagtaggcattaaagatggtctaaacaaatggagataccatgttcatggattagaagactcaaaatgaattcttcccaaattaattaattttttccaaattgatttgtagaactaaagaaattgctatccaaatcctaaccaggtttttgtggaacttaaaatacttactctaaaatttgtgttgttttcgtttttgattttttttttctttttcttcttcttcttatattgagayggggtttctctatgttttccatgctggtctcaaactcctgggctcaagccatccacccgcctcagcctctcaaagtgcttggattacaggcatgaagcactttatccagactaaaatttgtatggaaatacaaattcaatttgacaaatatttggccaggcatggt

SEQ ID NO: 743878 - DNA, 557 bp, Homo sapiens
agacggagtctcgctctgtcacccaggctggagtgcaacggcgcgatcccggctcactgcaacctccacctcccgggttcaagcgattctgctgccccagccttccaagaagctgagattacaggcgcccaccaggcccggctaatttttatatttttagtaggggagcagtcgggctctggactacatttcccggaggattctgcgggccaataccatgtctcgcgagattttggcttcctcttagccaggtggcagaatctttcgctgtgcccaattagctgctgccacgccttggagtccggagtaacttggccaggccggccccgagcggaactagagaaagctgaggatgaggaatccggctctggtccttttgtgtgtggagggctgaggagaggagtttgcgtgtgtgattgcsatggttgccgtgggtcttcgtggtctgtgactgtggctgtgtggtgctgactctgggtgatcaggtgggcgcttgtgactgtgcgcgctcggagtggatgtgtgtgtcctggacgagccgcgttgtgtgtgcggat

SEQ ID NO: 743879 - DNA, 590 bp, Homo sapiens
aatctatagacaacataaacaaatggatcccttactctgtagcaagttctgtatgcataagcctctctttgttcttattttggtggcctctgtttatttacacaaagagaaataactgctattcccataaatcatggctttcaaaatggtcacagttcactgggcatgcttgctcatgcctgtaattctaccactttgagagaccgaggcgggcagatcacgaggtcaggagatcgaggccatcctggccaacccagtgaaaccccatctctaccaaaaatacaaaaaaaaaaaaaagccgtgattggtggcatgcgcctataatcccagctactcaggaggctgaggcaggagaatcacctgaatccaggaggcagaggttgcagtgagccgagatcaygccactgcactccagcctggatgacagagtaagaccgtctcaaaaaacccaaactggtcaggctcggtggctcacgcctgtaatcccagcacttttggaggctgaggcaggtggatcacaaggtcaagaattcaacaccagcctggccaagatggcttatccccaactctactaaaaaatacaaaaatta

SEQ ID NO: 743880 - DNA, 615 bp, Homo sapiens
ttattcacagctaagtatatacacatttaaatattaatccaatatacatgtatttggtgcacattacacgctgagtacttttctaggccctgaggctagagctgggcacaacggagacaagtccttgctttgtgaagcagaaaacagatgacttccagtaaagtgctaagttgtgcttgggaaaaataaaattagaaaagcagctagaaggtgtactggagatgacaagaaactgagaagagaggttgctgttatatagaaagggcggagaaggcttctagcaaaaagcagcattttaccagctatctgaaggatatgtgaagccctaaggtctttaattagaaatgctttacttgcaagagcaacaaaatataaaatattgataattttgacaacaaataacttaggattttcwaaagaaaaatgacaaactaggttggcaccatggtctctcacttgttatttattttaagtctaatttctctacttatataaaggatgcaatttttgtttggtatatggttttactcaatatatgaagatattgagtaaatatcaattattattacaacttttaaaaacaaaaacaagggacaaaagatgagatttgactaa

SEQ ID NO: 743881 - DNA, 652 bp, Homo sapiens
aatagtttaaaccaacgtaatattaaggtcattttgaaacaagggaaaacaggtaatttaggatgattcccagatttccaggtcaagaaggtagaaatattttgatagtttgtaaactagaaaaggaataagttgaaaatgaaattgaatacaaaatttccattctgaacacattgtgtttaggataaatatgcagcacataaracttaagccatttaagaaggttgtggaacatcccagtggaacattcagtaagaagagaccatttggaagagatctgagctgcaggtggaaatttggagatcataagtatatgtgtgtccattaaaaccatacatgtaaatggctttatagaatttggagattttaaatatgtgattccataaaactatattgcccaaggaaagtacatagcacaagaaatgagtagcactgagatctaagctctgcaaaacacccacttttaagggtcacacagaggaagagcaacctgagaaaaagacttgaaaacatacatagggaatcagtaggagaattctgaagtcctaaagggtaagaaaggagagttaaaaagtaactggtcaacaatgtcactccctgtggaaaaacagtaaggttgaaagataacatatgacagctgataatttggtgg

SEQ ID NO: 743882 - DNA, 597 bp, Homo sapiens
ataactagacataaagggcctgttcaataacaagtgcatagtcacttgggcaaagaactgaaaaattaaaataagagctccacgttagaaaaggtggcattaaaaaggcgcatctgcaaatgtccaaatcaaattattttctatatattatattaaggctccttttcaaaccatrttccacactctccaaaatcacaattgttacaatcacaagtcataaatgacaggacacattatgctgttaccttcataatttcagtttgttcccaattgactacaaaaaaaaaattagaaactcttcattatggctttccagcagatccacaacttacccacagttgatagctttaagatcatcggctgctttcttccgcttcaccccaacagctcgttaccttgaacacaccgtgcttcttcctagtgctagttcctcaccttgaggtatctgggtatctttccttttctggtctacatgacctctttccagtatcagatcaaatgtatttacaattctctggtttctccctatcttctcactacccaatgaaattaatcttgctcacttatacactcacattttaaaaacaatgctatcat

SEQ ID NO: 743883 - DNA, 597 bp, Homo sapiens
ataactagacataaagggcctgttcaataacaagtgcatagtcacttgggcaaagaactgaaaaattaaaataagagctccacgttagaaaaggtggcattaaaaaggcgcatctgcaaatgtccaaatcaaattattttctatatattatattaaggctccttttcaaaccatattccacactctccaaaatcacaattgttacaatcacamgtcataaatgacaggacacattatgctgttaccttcataatttcagtttgttcccaattgactacaaaaaaaaaattagaaactcttcattatggctttccagcagatccacaacttacccacagttgatagctttaagatcatcggctgctttcttccgcttcaccccaacagctcgttaccttgaacacaccgtgcttcttcctagtgctagttcctcaccttgaggtatctgggtatctttccttttctggtctacatgacctctttccagtatcagatcaaatgtatttacaattctctggtttctccctatcttctcactacccaatgaaattaatcttgctcacttatacactcacattttaaaaacaatgctatcat

SEQ ID NO: 743884 - DNA, 617 bp, Homo sapiens
tattcacagatcattggatcctttaaaggaatttgttttaccaccattctgtaatattgagatttagagtgttttcactatttttaaattaacacctcttctgccatgtagcacttttgaattctatctctttactttctttcaaagaaacttactttaaggtccacatatattcaacaaatacttatcaaaagcctacaaaatacaaagcattayatacaattgcagatattcttgaattcaaagagaacttactgtcaagcaaaaaaagtaaaacaaatggccaaagctataatgctaaacagcccaagagaagtgctatttgaatgacagaaactaaatacctaagagaatttcagagttttaatttggctttggaatgatcaagtgaccttataaacactagagtgcagccaaggtcaaggctccttagatgaggagagctctttgtttcgaaggtcctagaatggaaatttcttggtattgcagaaatactaggatttgtttactcttaaattgctttgactcagttacattgcaaagttaccgttgtcctttgctaaaagaccaaatactcactcaacgttaagagaacatctctttcttaacatgagggt

SEQ ID NO: 743885 - DNA, 617 bp, Homo sapiens
tattcacagatcattggatcctttaaaggaatttgttttaccaccattctgtaatattgagatttagagtgttttcactatttttaaattaacacctcttctgccatgtagcacttttgaattctatctctttactttctttcaaagaaacttactttaaggtccacatatattcaacaaatacttatcaaaagcctacaaaatacaaagcattatatacaattgcaratattcttgaattcaaagagaacttactgtcaagcaaaaaaagtaaaacaaatggccaaagctataatgctaaacagcccaagagaagtgctatttgaatgacagaaactaaatacctaagagaatttcagagttttaatttggctttggaatgatcaagtgaccttataaacactagagtgcagccaaggtcaaggctccttagatgaggagagctctttgtttcgaaggtcctagaatggaaatttcttggtattgcagaaatactaggatttgtttactcttaaattgctttgactcagttacattgcaaagttaccgttgtcctttgctaaaagaccaaatactcactcaacgttaagagaacatctctttcttaacatgagggt

SEQ ID NO: 743886 - DNA, 589 bp, Homo sapiens
caaccagtgatagtcctaattgtaactgctatgccatacatggtattattattaaagcagattggtatggcctaagacacaagatatttattcattgacttggtgaatgcattattttctattccaatagaaaaakaatatcttagtttgcattcatgtagaacagggaataatatgcatttacaattttgtttcaggggtatacaaactcttctactctctgtcaaattacaattcaaaaagatccataccgactcaacataacacaaacatcatatcatataaaacatcacattaatatatgatataaatgataccatgctgatcaagtaggatgaacaaaaggtgagaacaatgctgcaggccttgataagacataagccttccaaatgatgggaaataaatctgacgacaatagagctcaaccatgagtacttggaatgacactattcgttcagaagatcaaccagctacttggtagcaagttaaatgttttgggccccttctgtcttggaaacatcagcaattctttctcataggaacagacacttattctggctaatatctttccttcttagagctccttaat

SEQ ID NO: 743887 - DNA, 621 bp, Homo sapiens
  misc_feature 600, 601, 602, 603, 604, 605, 606, 607, 608, 609, 610, 611,612, 613, 614, 615, 616, 617, 618, 619, 620, 621: n = A,T,C or G
cttgctgtgataaatctggctttgcaaagatttataaattttactgcttatagattaattatgatcttgagcacgtttgtttccttgtgggtttactttgaatttggaaaataaattgcatcaagaggtaaatttgctggttattgccaagttcttttaaaagggctcattaaactgaaacggtgtctgtgtcttgcgacgrgttgaaagtatttagatgctttctgttcctgaggtcgatcatatattttgcggtaaaaacccgggaaagttcgttatatacaaactatttgctgcaaggaattttaaatgtcttcagtctgcctaaaatatcacacacagtgatgatctggtcaccttaaaaataaaattttcagtgtatgaggtgggctttaacattagttacttgaagtttggagattgtacttgtatccttctacttagtttatatatttgttaaataagttttaaacccttgttgcatagctgtagacatgatatgatttccaacatttcttaatttgggggaaactaacgatatggtctatagtttatctcaatgaggaataaatagatgtattgccaaagtacaagctttgnnnnnnnnnnnnnnnnnnnnnn

SEQ ID NO: 743888 - DNA, 621 bp, Homo sapiens
  misc_feature 600, 601, 602, 603, 604, 605, 606, 607, 608, 609, 610, 611,612, 613, 614, 615, 616, 617, 618, 619, 620, 621: n = A,T,C or G
cttgctgtgataaatctggctttgcaaagatttataaattttactgcttatagattaattatgatcttgagcacgtttgtttccttgtgggtttactttgaatttggaaaataaattgcatcaagaggtaaatttgctggttattgccaagttcttttaaaagggctcattaaactgaaacggtgtctgtgtcttgcgacgggttgaaagtatttagatgctttctgttcctgaggtcgatcatatattttgcggtaaaaacccgggaaagttcgttatatacaaactawttgctgcaaggaattttaaatgtcttcagtctgcctaaaatatcacacacagtgatgatctggtcaccttaaaaataaaattttcagtgtatgaggtgggctttaacattagttacttgaagtttggagattgtacttgtatccttctacttagtttatatatttgttaaataagttttaaacccttgttgcatagctgtagacatgatatgatttccaacatttcttaatttgggggaaactaacgatatggtctatagtttatctcaatgaggaataaatagatgtattgccaaagtacaagctttgnnnnnnnnnnnnnnnnnnnnnn

SEQ ID NO: 743889 - DNA, 693 bp, Homo sapiens
aagaaacaagagaatttagaaataaacttttgctcttttcctatccaaagaaagtggtcttttgtttttaaaaatctatcatctttttctttgatgagagaaattatatttgaggcatttagttaatctgctattctttgaaacatacacattcttattttggaaaaattaaaaacattcatctctacattcaacattctttaagactggtgggattgtgagttgcagtagtagcagaaagaaaagacagaacgtggaaaaaagccgtttcctttctctttttgttgcaacttctagtcccttgtcatttgtttgtctttgtcacacttgcaggcctttccaacccccagratctagggtactgttatacataactagaagacttctatgcgccagattatttaatgctcctcattccctttgcatttggtggcacgtctccctcatgtctttgtattaaactgtcagtcaccagcataggtaacacagtacactttaaatttcttgtgaaaatcagcccttggtcacattgtcttagccatgggccaaggccttcaattccagccccacctcaggagttcacagatagtgagtcaatacgttccctgtaattttaagccagctcgacttgcggtttctgttacttgcaaccagatgcacctaatggatcctgattgtaatgaactttataat

SEQ ID NO: 743890 - DNA, 635 bp, Homo sapiens
tggcgcgaatggcaagctcagaaatccagcaagagggaactcccaccacaccaccgggaaacgggaacctgtcctgaccgcttccttcacatctgcatggtagggacactgcaaggtggagaccctaagtaggacagttattttggaaggtgggtgtgagcctttctatctgcctcccttgctggtgggccaaaggcccctggacatgttgtgtcactgacgagctcgctggagacggcgtccccgttgtccctggtctgtgcctgtggtgggtgggaaggctgcccccgctgtaccaccggacacgccgtgggcggcagaatggtgaaaaagtgcctgccctccctagggctaccctctggctggctttcctgatccgtgcgctcagagctggaaggtggcccacgtcctacttttgcggttgggtcatatcaaatytgtatcggctaacgggaaggaagttacgagcaagttccaccggaaagaaaatctagcgcggggactgcactcgaggccgaggagagggcagcgcgtccgtggtggggtcgcccagcactgcgagccgcgctgaaccccacccccggcctgcagggtgcggctccctggctgccccgtggacccggccagcccgggac

SEQ ID NO: 743891 - DNA, 664 bp, Homo sapiens
cagggctggatcctcgtgaaggctccgaaggagaatgcatttccctgctttcccagccgggagggcccctgcaggagaatctccgcatcccgaaatccttgactccatcacatctgcaaagacccttgctgtgatctgactgtctgcgtcctcccagaattcgtgtgttgaaacataaactcccagtgtgatgctgttaggaggcaggactctgggaggtgacaaagtcacaagcatgcagacccgtggatgggattagagcctcatgaagggggccccagagcactgcactggcccttccgctgtgtgaggacacagtgagaaggtgtgtaactagcctgagaaccagaattggggtcctctccagacaccgcctctgccagttccttgatcttagacttgccagccctccagaactgtgagaaatccatttctgttgtttctaagccactcaacctgcagcgttttgttagaacagccagaacggactaagataggggtccccgaccccccagccatggacrggtacccgactgtggcctgttaggaaccaggccacacagcaagaagtgagcagcaggtgagcgagcattaccgcctgagctgcctgacccctgcctcctgtgagatcattagattctgaactgcacatgctcgggatcta

SEQ ID NO: 743892 - DNA, 588 bp, Homo sapiens
aggtgaacccaccttctcctcacatgtggcaagccacataacacaggtttccctttctgccccacaagaagctaaagacccaccattctccaggctccctgccagccactgaatagacaaattagctcagtcccactctgtctcacaggaaggagctaaaggttcccatttatgcctcagatccaagacacattgtccaatccatccttatctgagagtctgtgttgggggtttggtcttcaactgactgtcagacccctgtagccactccctccatcagttagcatcttatggaaaggaggggtgagtcccagcccaccctattcccacttctccaacctccagyaggataccacagaatcaagatctgaactcaggtcatatttcttcaagctctttcttacccctccactgtgaaacgaccacccaatcagatggacaaacctaaaccagttttcagtttccatgtcacttattcctgcttgtcattattattattactgctgttgttgttgctataattatagttattattagcagtacaaatttcagctctacgtcataacaactatggggctcgggtaaagt

SEQ ID NO: 743893 - DNA, 588 bp, Homo sapiens
aggtgaacccaccttctcctcacatgtggcaagccacataacacaggtttccctttctgccccacaagaagctaaagacccaccattctccaggctccctgccagccactgaatagacaaattagctcagtcccactctgtctcacaggaaggagctaaaggttcccatttatgcctcagatccaagacacattgtccaatccatccttatctgagagtctgtgttgggggtttggtcttcaactgactgtcagacccctgtagccactccctccatcagttagcatcttatggaaaggaggggtgagtcccagcccaccctattcccacttctccaacctccagcaggrtaccacagaatcaagatctgaactcaggtcatatttcttcaagctctttcttacccctccactgtgaaacgaccacccaatcagatggacaaacctaaaccagttttcagtttccatgtcacttattcctgcttgtcattattattattactgctgttgttgttgctataattatagttattattagcagtacaaatttcagctctacgtcataacaactatggggctcgggtaaagt

SEQ ID NO: 743894 - DNA, 606 bp, Homo sapiens
ttacctagaagtccctggttgtagatgataatgatgtctacccatgaagcgttacaattgcttcagtgaccaggtcaatggcctcataattctgtaattctatattacactgttataggtgaaattggcacttctgactctgaaaatgctggctttatgggactggaactggctaattgatctgattaaaaaatacacacgaaatggtacttgatatcatttgactacctagagggtggtagaaacagctgtaattttgcaagataatatcaagacaataaaggagtcttataagkctactgtctcattaagggatggatttcttcccgaagcctctttgaaacctgtccttcacatctgaaggaggaggccaagatattcatactatgttgggacttactagagcagtaaaaactcaagagcagcctgatgctataacagaataaatctttaaaaatcattttaacaataagatcatgaaaatgactaggagatatgtgatttagaaaaatgaaagagaaaagctgagaccatttggttcatgcttcatgttcccatttctgttcatctaaataagacatggagtggttcaacaaattctgaatg

SEQ ID NO: 743895 - DNA, 561 bp, Homo sapiens
agcacagaacttggttcatagtaagcactatttacaatagttatcataatataaaactggcaaaagcttagttgtgtgtagcaaacgaagctcattcaacttcagttttgtttaatatgaatttgatctttttttttttgagatggagtcttgctctgtcacccaggctggagtgcagtggtgcgatctcagttcactgcaacctctgcctcccaggttcaagcgattcttgtgcctcagcctcccgagtagctgggattacaggtgtgtgccaccacacctggctaatatttgtatttttagtargggcagggttttgccatgttggccaggctggtcttgaactcctgacctcaagtgatccacccgcctcattctcccaaaatgctaggattacaggcataagtgaccactcccggccgggtttgattgttctgggaggctatttctggctttgtcttctcttgagccatcttgtcacaaaactacctccttgattgctcaagctaatcagccttttttgggatacacagttcaacggtggttcgaggactcatcatt

SEQ ID NO: 743896 - DNA, 535 bp, Homo sapiens
ggcattaaaaagaacaagaagttttgatgttaaagaaagtagctaagtcagaaaggttacgagacttttcttttgagtgctggtagctttctattaaaaaatacctgagtccttgcctgatttataggtgtttggcatactctaatatgaaaagagggcagcatcagatgaatgggtgtaagttccagggataactttcactctcacctggacaattgcagtaaccttctgactggtctcctgctttcacttccctcctcttcaatccattctccacatggattgtggagccagagtgattctcttaaaatcacatgtcatcgcttacctcagcaaaagcargttcccgttacagtgggtaaaatcacattcattgcttaagacttcacggcattgtctgcttatacctgtatctttaaatgtattatcatttgcttgtctcttctttgtttaccaagctccaggcaccatggtgtctttttagctcctgcaacaagataatcttattcctgcatctgcaatgttccatctcata

SEQ ID NO: 743897 - DNA, 555 bp, Homo sapiens
cctggtccagtgttctttccactgtataaacttatctttcatgtagttaatgattttgtgtcattttctctcctcaaaatttgtattttttcaagagaaactaagagggaaatgtatagctctcaaaaaatgaatcactaaaaagttgtttaaaaagactttctggacacttaaatcactttctggactaccttaaagaagtaatcttcatgttggtcctttcttgtcctgtctactcagaaagaattcccaaagatctggactgtgtakaatattctacactatagcttctgcagaggtttaaaattcataaacaaatgttcagtctttcaacagccagtttgattgcctataaattccagtcactctgattgctaaaggaacatgaataaagacaattttttaattaataaagttttcactccagcagataattgagaaatgatcatactacatggcaagtattacagtgaaggaggctgtgggtaccagtatacagtagaagaagccatcaaacaccaggagaattaggaaaagtcaaggatgatgtggcaa

SEQ ID NO: 743898 - DNA, 604 bp, Homo sapiens
agaaatataggtgtctattaatattactgctacataagcctctaagtgttagtttttctttctcaaatgaggtatttctataattacaagtagtaaccaataaatgcacagttgatccaataagtatacacatctttcaaattttgataaataattatctaaacttaataagtaaacatatctcttaatgagttgggttgggatgattaatcattcttggatttaaaaaggcttctcctgttaccagtatttcaaatgttctatttgtttgctgctccagaggttatatgcctcaggacaatgcatctgagttgaaagattctgggcatgtgtgagaggaaccttttgaagtgtgattgtgtaagaaataggaaagraaatccaccacgatgccatcatcccaaccataatctcaggcatatcagttttagaaaagagtacatttggatattgtccatctggaaaatgattctttaaaaactctcagtgtctaccttctcatccttccttcctgagtttgaaaacaactggtccagggtggtgattatcaatcctaactacttttaaagtgtacttttaaacatatacccatactcctgagatg

SEQ ID NO: 743899 - DNA, 611 bp, Homo sapiens
tcaatttttattaagtccaatttatcaattttattttttatggttcatacttattgtatcctatctagtaaatgtttgccttaagcaaggtcacaaatattttcttgtatgttttcttatagaagtttatagttttagttctaacatttagagctgttatttatttgaatttaattattcttacrtagtgtgtacatgttaatttccaataaaaaccttaaaaaggaagagtttctaactttgttgacctttgttggtaagtattgttagattagtgttactccacctagtggatacctaaaaacacacattttatctgtcagttcatatggcattttaattaaaaatacaaaagttgtttttttccataaaataaacagaagtattttgacaccaaatgtttttaaaattatgatataattgtatttttggaacaaatatatcacctatacaaattctcatatctccacatgcttaggaaacttacttagaaacagaatttttaaacatattctaaagtccttcactttaaaatgaagcacttcagtgagattccagtgcttttaaaaatttgaaaatacagcaccttctagttaattgacattaggaaa

SEQ ID NO: 743900 - DNA, 611 bp, Homo sapiens
tcaatttttattaagtccaatttatcaattttattttttatggttcatacttattgtatcctatctagtaaatgtttgccttaagcaaggtcacaaatattttcttgtatgttttcttatagaagtttatagttttagttctaacatttagagctgttatttatttgaatttaattattcttacgtagtgtgtacatgttaatttccaataaaaaccttaaaaaggaagagtttctaactttgttgacctttgttggtaagtattgttagattagtgttactccacctagtggatacctaaaaacacacattttatctgtcagttcatatggcattttaattaaaaatacaaaagttgkttttttccataaaataaacagaagtattttgacaccaaatgtttttaaaattatgatataattgtatttttggaacaaatatatcacctatacaaattctcatatctccacatgcttaggaaacttacttagaaacagaatttttaaacatattctaaagtccttcactttaaaatgaagcacttcagtgagattccagtgcttttaaaaatttgaaaatacagcaccttctagttaattgacattaggaaa

SEQ ID NO: 743901 - DNA, 664 bp, Homo sapiens
gggatgtgatctcggctcactgcaacctctgcctaccaagttcaagcaattctcgccagcatcatttgttgaacggggtgtcctttcagtgttttatgttttcgtttgctttgtcaaagatcagttgactccaagtatttggctttatttctgggttctctattctgttccattggtctataggcctatttttataccagtaacatgctgttttggtgactatggctttatagtatagtttaaagtcggtaacataatgcctccacttttgttctttttgcttaaaattgctttggctatgcaggctgtttttgggtccatatgaattttakgattttttttctagttctgtgaagaataatggtgggttttttggtttgtttttgagacagagtctccctctgtcacccaggctggagtgcagtggtgcaatcatagctcactgcaacctctctctcctgggctgaagcaattctcttgcctcagcctccagagtaactgggattacaggcaagtgttaccacgcccagctaatttttgtatttttagtagagatgaggttcatcatgttggccaggctggtctcacactcctgatctcaagttatccgcttgccttggcctcccaaagtgctaggattacaggcatgagccactgtgcccag

SEQ ID NO: 743902 - DNA, 599 bp, Homo sapiens
gaaattctttaaaaacatgcattgaggttgggcacaatggctcacacctataatcccaacactttaggatgctgaggcaggcagatcacctgaagtcaggagttggagactagcctggccaacatggtaaaactccatctctactaaaaatacaaaaattatccaggtgtcgtggcacatgcctgttgtcacagctactcargaggctgaggaaggagaatggcttgagcccgggaggcagaggacacagtgagccgagatcatgccactgcactccacactgcagcctgggggacaaagagagactccgtctcaaaaaaaagaacccaggtcaggcacagtggctcacgcccgtaatcccagaactttgggaggccaatgggggcagatcacctgaggtcaggagtttaagaccagcctggccaacatggtaaaaccccatctcaacaaaaaatgcaaaaatcagccaggcgtggtggcacacaactataatcccatttactggggaggctggggcaagaaaattgcttgaacccaggaggcggaggatgcagtgagctgagatcatgccactgtactccagcctgggtgacagagcg

SEQ ID NO: 743903 - DNA, 599 bp, Homo sapiens
gaaattctttaaaaacatgcattgaggttgggcacaatggctcacacctataatcccaacactttaggatgctgaggcaggcagatcacctgaagtcaggagttggagactagcctggccaacatggtaaaactccatctctactaaaaatacaaaaattatccaggtgtcgtggcacatgcctgttgtcacagctactcaagaggctgaggaaggagaatggcttgagcccgggaggcagaggacacagtgagccgagatcatgccactgcactccacactgcagcctgggggacaaagagagactccgtctcaaaaaaaagaacccaggtcaggcacagtggctcacgccygtaatcccagaactttgggaggccaatgggggcagatcacctgaggtcaggagtttaagaccagcctggccaacatggtaaaaccccatctcaacaaaaaatgcaaaaatcagccaggcgtggtggcacacaactataatcccatttactggggaggctggggcaagaaaattgcttgaacccaggaggcggaggatgcagtgagctgagatcatgccactgtactccagcctgggtgacagagcg

SEQ ID NO: 743904 - DNA, 613 bp, Homo sapiens
gtggccctttggccttggagcctgggtccggatgtgcccaaggttcaataagtcactaaaagcatttacaggacacaacatggagtggggctcacaatatttgttacagcaaaagggaaaaaaaagcaaatcagcaaagggaaaaggttcatgggacaaagttcggaggaagccgggcaaaagcttccaagagtttttctctcagcagagtcatgcgggaagtgctctgttcctacagccaggagctgtgatgacacctacaaagtgctgtttaccatggaagctcaagactcagggccccaagtgttgatcaggtgctagtcacataggtgccctctgcctagcatgcaccaaattccaawctcccggaaggaaataaggtgtttaacatacactcattattggtacaatctaggcataatacaatctaggcacagatagcccctcctatcatttaggacctaggcaactgtttaccagccaggttctcaggcaccagcccaaggccagctttgcaagcagagctttctaaggatgcaggcttcggcctgctatgttaactcctttctgccccctgcctcttggactgccctcctgtttgattagtgagtgg

SEQ ID NO: 743905 - DNA, 629 bp, Homo sapiens
gggcctggcaacttgttacgggctcctgtatgttagctatgaatattcagagcaacccagaggccagaggagagaccagggaatgcgtaggagaaagaagagacagggacgaggcctgggagggctcagtgccgttctgccgttctcaccccagggcttytgaagtttatgacggaacaatttacttagttctggaactatttatttcgtaaagcttgacagatttactcaggaagaggctgtaacaaacaccctgaaacaacatatcatgtttcttaatttttgtctgaaattctaacaactcagcatggactggttatctcaagctcattagaagctccgattgaagattatattgtgtctttggttaataaaagatgaggaaatcaacgtatattggcttaatacatgtggcctggtagacagaacttttccaaaactggaaccgtagggggagtcatgaatgtggttcttggtggggcggttttgttacctttaatagatatttggtgaacactaaccacctgctcatgcatattgtgtactcacatacattatctttagtcctcacagcagctatataaaaggtaggggtggtgggtggacaaattacaaatgaggggccgggc

SEQ ID NO: 743906 - DNA, 613 bp, Homo sapiens
ctgcaagaaataataatgagctactgatacacaaaccagttggctgtatctgaaaagcattgtgctgttcaaaactagccagagtcagaagagtacatgccatttgatatcatttctatgaagctcaagagccagcaaaacaaatctgtcatggtgagagaaatcagagcaatagtgcccagagggtgaggaagagggcaaggaaaatttctggagtgatggaaatgttctgtatcttaactgaggcagtagattcacaggtatattttttaatgaaaattcattgaatttgagactcaaaatctgtgcttttcatgataagtaaatttgcatgctacaaatggttgtactgtgtgatttgaattggatttggattaaatatagcatgattatggtttggattggatggacagttggactggattaaatacagcataaccagatgataagaaytgaaaatagagtatatgcctactcaaggaagttcctgactcacccctctcctatacatcatatcctacccaacataaatacatgggtgtcctggaacatgtcccattttcatgccttattcttcacttctattctttaggattatttccttttcctgggg

SEQ ID NO: 743907 - DNA, 621 bp, Homo sapiens
ggtctcagaggctgtaaatatcagaccagcctgactcaatttaggacaaggggaatcattgaagggtttagtaaagcctagccataatcagaagcatgctttttgatcagtttgaaaaaaaaatatgcaatgaaatgaaaggaattgactagacgagagagtaccacataggaggccatgctgtatctataatgtctccaasaaggcagagatttgtgtctgttttattcagagacgtattccaaagtgcctggaagaaagcctaatacataatagctgtttgataaatattagctgagtgaaaaaattcatgaatgaatgacccaggcaaagtcaaaggcctgacctggagtgaaggcaaaagaaatgaaagggaaggaaaagatattgtgaacttagtgttgagcatcaaatggacacagaaatcaacggaaagaggggagcaaaatcattttgaaatctttagcctcaccggctgagagatcaagaagtcattaacaaaagagaagccagaagaggaaactggtttgagagtgaaagtgctaattttggtctaggtatgttgaacttggggcaccagaggatgatatacccatataaggaaatgtagggaatatgaca

SEQ ID NO: 743908 - DNA, 630 bp, Homo sapiens
taaaattatggttatttctcaaattataccattttaaagtgaaaccacattgaaatgatattattttgatatgccagcagatacatgtagtcacccaaagaagttttatattacaggtgcttgaagtcagaaaaaggagccttttttataatttcataatgagaaaaaaaggaagtcagagaggtacgatttaattcaaatatacatttgtgtattagaaatgattatggagtaaatgccttatcttattattttgattgaatcttctgtaaagaaatatgagaaatactctctatcaaatggagcagtagtcgcgtatctgcctccctcccccacaacatgtgagtaaaaagtttaaaaatatattttaagaatcaaagtttaaaattataaatatgtcaaaaattgtgacagtctgagatcttatatgacttgcaatctaccaagttagcctgccacagtttcayagatgctaacagaagactcaagactcctgggtcagaaacaagagtttattatgcatagcacaggcagcatgagccttatgttttcaccagttccccttgtctccagagcccatgcagataatacaaagacaggcccagatggatcctgctcacagagggcatt

SEQ ID NO: 743909 - DNA, 616 bp, Homo sapiens
tgagacttgagagatttaaaaacatggctgcagctctataatcatcctctttatatcttaagcagacaattcatacaataagcattctaagtacattgagttgtggaaattgttttcttgaattggacacagcttgataatagctgctatatattaaagttctcatgctgcytctccttgtagattcatgccttggtactttctgcttttaaagaaactttctcttatatttaatatcatgtcacaaataaacttgatgatttaaggctttaatttattttgtatgtatccgaacctattagaaataatactaggagcatgaattccacgttaaaacacctccggttacttattgcaaaaagttctcccctcatttcggagcaactttcagtgtctttccccaagctatatatctttgttaaaattacattggtcatgtcactaaataatgcttggtacctaaagaaataaaagaatttaagtggaaaatatagatattattttgaaaacatttcaaaacaatgaaaatgtgatggatttcccctctcattttgaggacaattttagccttagatggaatcttctaaagtgttgtttaagtaagatgcattgtttc

SEQ ID NO: 743910 - DNA, 616 bp, Homo sapiens
tgagacttgagagatttaaaaacatggctgcagctctataatcatcctctttatatcttaagcagacaattcatacaataagcattctaagtacattgagttgtggaaattgttttcttgaattggacacagcttgataatagctgctatatattaaagttctcatgctgcctctccttgtagattcatgccttggtactttctgcttttaaagaaactttctcttatatttaatatcatgtcacaaataaacttgatgatttaaggctttaatttattttgtatgtatccgaacctattagaaataatactaggagcatgaattccacgttaaaacacctccggttacttattgcaaaaagttctcccctcatttcggagcaactttcartgtctttccccaagctatatatctttgttaaaattacattggtcatgtcactaaataatgcttggtacctaaagaaataaaagaatttaagtggaaaatatagatattattttgaaaacatttcaaaacaatgaaaatgtgatggatttcccctctcattttgaggacaattttagccttagatggaatcttctaaagtgttgtttaagtaagatgcattgtttc

SEQ ID NO: 743911 - DNA, 639 bp, Homo sapiens
gatggatttcccctctcattttgaggacaattttagccttagatggaatcttctaaagtgttgtttaagtaagatgcattgtttctagtctttttttgttgttgttctcttttgagatggagtctcgctctgtcacccaggctggagtgcagaggcgtgatctaggctcactacaagctccgccgcccaggttcacaccattctcctgcctcagcctcccgagtagctgagactataggagcgcaccaccaccacacctggctaattttttgtattttcagcagagacagggtttcaccattttagccaggatggtttcaatctcctgacctcgtgatccacccgccttggcctcccaaagtgctgggattacaggtgtgcaccaccgcacccagctgtttctagtcttaatgatagytatgacagaatcagggttatttttaatggtaaatatttgctttttagagatatttctatatttatttctgtgctcctaagttttattctaaaactcatttacataaaatatgcttatcttaaaaaatgtatttatctattttttaccctctttccccactcaaaagacaaatttatatctacaatctcagacttacataaaaacaagacatcactgaaatt

SEQ ID NO: 743912 - DNA, 572 bp, Homo sapiens
gaataaaatccaatcatccagaaggcttgagaagagaaatgaatagatgctgcagttaaataactaccacaagaaaaataacaaggagggcaatactgaagagcaaataattcaatgagaatgaagacatggactcagagggtcaaaatttttctctgacctatgtggcacaataatctattacatagttaatagtttgaaagacgtttccatcagcctggggccctctctccggtatcgagacacagtgatattttytacgtcaagaccatagctccagtccaccagattaatgccagaaatatgtatacgcagggcctacaaatctaatgagtatgttggcagaccataattctacacagcttcaatatcactgtcctaccttaatatcactgtccataattctacacagcttcagtatcgctagcctactcagagcccctctccatgcttgttgtgatctgattttattcccccaaagttaaataacaaaataggcaaaagccttaaggtatcaaaaggaaaatagagagagaattggggtaattagtcatggattactatcaacacta

SEQ ID NO: 743913 - DNA, 572 bp, Homo sapiens
gaataaaatccaatcatccagaaggcttgagaagagaaatgaatagatgctgcagttaaataactaccacaagaaaaataacaaggagggcaatactgaagagcaaataattcaatgagaatgaagacatggactcagagggtcaaaatttttctctgacctatgtggcacaataatctattacatagttaatagtttgaaagacgtttccatcagcctggggccctctctccggtatcgagacacagtgatattttctacgtcaagaccatagctccagtccaccagattaatgccagaaatatgtatacgcagggcctrcaaatctaatgagtatgttggcagaccataattctacacagcttcaatatcactgtcctaccttaatatcactgtccataattctacacagcttcagtatcgctagcctactcagagcccctctccatgcttgttgtgatctgattttattcccccaaagttaaataacaaaataggcaaaagccttaaggtatcaaaaggaaaatagagagagaattggggtaattagtcatggattactatcaacacta

SEQ ID NO: 743914 - DNA, 631 bp, Homo sapiens
tggatatccaatatttcccacattacatgttaaaaagtatacactttcctcactggattatctgggatcaggaattgaccacataagatgggtcctatttgtagactctattccgtgccattgatctttatgtctgtcttcatgccaacatcacrtcaccatagttttatagtaaattttgaattaggtaccacagatactcccactttgcttttcctttgaaaattactttgactattttagctcctttgcattgctatataagttttagaatcttctttttaacctcaaaaacctgttgaaatttttattggcatatcattaaaatataaatcaatctgggaaaattgacacatcaacgatattgagtctcctgatcatggtatctctcttcactgattttcacttcacttacctctcttcacttttcttcattcaacaatgttttgcagtttttggtgtaaagatcttgtatgtattttagtcagtttatccttacatatttcatgacattcgttgctactttaaatggtattgtagtataaattccattattatattgtcacaaatacatagaaatacaattgacatttgcaaattgacacggtattctgcaatgtaataaaattta

SEQ ID NO: 743915 - DNA, 667 bp, Homo sapiens
tggctcaaacctataattccagcactttgggaggtcgaggcaggaggatcccttgaggccaggagtttgagaccagcctgggaaacatagtgggacctcagtttctccaaaaaaaaaaaaaaaaaaaaaataagccagacaaggtggtatgcacctatagtcccagcttctcagaaagctgaggtgggaggatcatttgagcccagaaatttgagactgcagtgagccttgatcrtgccactgcactgcagcctgagtgacagagtgagatcctgtctctaaagaaaaaaaaaaatagaataactgtagaatgtgcgaggaatgcagtaccttgagatagggaagaactcccagaaatagccaagccttatgtgttttcctcagaggaaatgcaacatcttgagatagggaggaactgccaggggagctgagatttgttcctgtctccccaaggagcagaatgtcctcaaggctttccccgtgagtcatgtggccagcccctaagatatataaaacggcccctccatctgtcccaggcagctttcatgagccttaggaaaccagctcacaatggatcctgggcgtctttgccccttcctgcccagcagtaacaaataaatctgctttatataaaacctgctgcatgtgagtgtattctgcttcacca

SEQ ID NO: 743916 - DNA, 667 bp, Homo sapiens
tggctcaaacctataattccagcactttgggaggtcgaggcaggaggatcccttgaggccaggagtttgagaccagcctgggaaacatagtgggacctcagtttctccaaaaaaaaaaaaaaaaaaaaaataagccagacaaggtggtatgcacctatagtcccagcttctcagaaagctgaggtgggaggatcatttgagcccagaaatttgagactgcagtgagccttgatcgtgccactgcactgcagcctgagtgacagagtgagatcctgtctctaaagaaaaaaaaaaatagaataactgtagaatgtgcgaggaatgcagtaccttgagatagggaagaactcccagaaatagccaagccttatgtgttttcctcagaggaaatgcaacatcttgagatagggaggaactgccaggggagctgagatttgttcctgtctccccaaggagcagaatgtcctcaaggctttccccgtgagtcatgtggccagcccctragatatataaaacggcccctccatctgtcccaggcagctttcatgagccttaggaaaccagctcacaatggatcctgggcgtctttgccccttcctgcccagcagtaacaaataaatctgctttatataaaacctgctgcatgtgagtgtattctgcttcacca

SEQ ID NO: 743917 - DNA, 595 bp, Homo sapiens
cacaagcagtggcagaggcagaaaggggtgagatcacagcaaggaggctggtccagtggggttgcaatgaagagtgtctccagagaggatgtcccctgctgccaaggctcgtggctgggcctccacccgaatgacctgcagtgagccactgaggagcttcctgctcacgtttttttccccagagcatggcacagtaactgcygacttgggtgaatcgtgtgaaactgatgacattcaactgttcctgaccctctcaatgtcactgttatgattccactgcatatctagtaggcattcaatacatgtccaatgaaggaatcaacatagacaggttatcagggctctcacatgccagctgccaagttagtatttttagttgacccaaccacagcgcaaggtgtctatgacatctccaatctacagccgaggaaactgagctaatctatgtatacaaaagtgcttagcacagtgctgggtgatgactgcatgctcactgtgtggcaatgatcattattattatccaaagccagacagagccccagcaactgagttaggacttgaatccaggcctgctgggctccagtcagcctgactt

SEQ ID NO: 743918 - DNA, 595 bp, Homo sapiens
cacaagcagtggcagaggcagaaaggggtgagatcacagcaaggaggctggtccagtggggttgcaatgaagagtgtctccagagaggatgtcccctgctgccaaggctcgtggctgggcctccacccgaatgacctgcagtgagccactgaggagcttcctgctcacgtttttttccccagagcatggcacagtaactgccgacttgggtgaatcgtgtgaaactgatgacattcaactgttcctgaccctctcaatgtcactgttatgattccactgcatatctagtaggcattcaatacatgtccaatgaaggaatcaacatagacaggttatcagggctctcacatgccagctgccaagttagtatttttagttgacccaaccacagygcaaggtgtctatgacatctccaatctacagccgaggaaactgagctaatctatgtatacaaaagtgcttagcacagtgctgggtgatgactgcatgctcactgtgtggcaatgatcattattattatccaaagccagacagagccccagcaactgagttaggacttgaatccaggcctgctgggctccagtcagcctgactt

SEQ ID NO: 743919 - DNA, 640 bp, Homo sapiens
tgcagtaagctactatcatcacaccactgcactcctacctgggcgacagagtgagaccctgtctctaaaaaaattaaattaaattaaaactcacatgattggtctatgagagcatccatttatcaatcacccatgtacccaggatgacaaaaattccatctttacatgtgcttcttcaatgttagacttggggaagggaacatagtgatcctgcattggtttttcaggcttccatcttcaaatgatttgcataattgtacaaacattttattgatcaaagcaaattacatgggcacatccaacttcaaaagaagagataaaatrcaatcattctttgtgcccagaatgagaactggaaccgatgtgagtagcactaatgacccccacacatatcaaagatatcctgcttgcgtgattttgttctggtctggagttacataaacacaattagtggtaaacactttacatttaagtttccttgtaaccgtattccagttcctataatttacttagagtcacattctgtactttcattgcagggataaactgccctaagaaaatatagtctattaactcagagtctaataacaaacacttatcttgaaaatccctttttacttttctcacttgctaattgaac

SEQ ID NO: 743920 - DNA, 442 bp, Homo sapiens
ccatcacagctgtagatcatgtgcctatcattttgacccccacattctcaccacctgtttctctgttggattagcaataaatagtgtgggatcccagagttcggggccttcgcagcctccacaatcgcgatggcctcctggtcccactttacctctcaaactgtctttttctcaatcctttgattctgccrgactttgttacccccacgacctggtgttggatctgattaccccaacattcctggctgcccgatgtggggcaacaaagaccctggtgaaggaacactagagcgtgggaaagtggaggatgcatcgtcaaaggacactcgaggacgtctaaaagaaactcagcgggaaagctgagcactcggaagaaccagggtaacaatgagacaaagtgaaagcagactttctgcttatttaaatttcttaaggcatttat

SEQ ID NO: 743921 - DNA, 624 bp, Homo sapiens
agcagtgaaggataatgttttgtttaagttgtcagtgttcacccttcaaaaatgtaaaatataattccaaatcaaaatccaagttgcttttctttttggtattttgcgatttattgtagcattacctttatttgtgaggaaaatatattgaaggtttttttctcattaaatatgtaactatgaaatatttaggtctacaaaatgaatttctctatattttatgaacaaaatatcctagaaaagagagactttttaaataaatgaagattagtgaggataattatttcayatagaaaaattacatttattggcttctaagacctaatctactcaataaaataagttatgataccttaataactgaggaaaatagacataagtaaaaaaaaacacgaggagagaagtctacatgtaagtattctgaggtcaggactttttcaactttatcacaaaattcacagggtggataaatagtatttccacattttataaaggtttcgaggaagcctcagtataatcagcccctaacatattatcttctagatagccaagttctgtagctcacaacacatggcccctgccttccaactgtaattaacataatctggttatcttattctgtaa

SEQ ID NO: 743922 - DNA, 583 bp, Homo sapiens
taaaaaaaaaattacaaattttatctattccctttcctttaaattatattggactgatgctattaaagcagacctccaaattttaaagtcctttagatttcaacctcaaattactaaggggtagagtagctatccacttcaaggtctattttatagtctaaactttatttcattytttctctctacaatcaccacccaatgctgtctgattttctttgaaccattcttagatgatctcattcaaatcatgttctttaaatgttctcaattcacctttttctattacaaccctagaagtgtaaggtgttaaaatcaactctgaagctattctagctacgttcactcagcctaataattcctagattatgctatgcttttttaaagcacacaattagcaactcattgggtagtttgaatcaaagaatttcttagaagttatcacatgtaaatccattggcctgcataagtaatccaaactatatcaatatttttttaagttaagaatattttgagattcctattcatgctgttttttgtctcttttcagtcaagtcattatccctaaaatattgttattaacaga

SEQ ID NO: 743923 - DNA, 613 bp, Homo sapiens
tgttatacatcttgttgtattttctttttaaatcaggtggtctttccatacccccacataaagacttttctcgttatgctttatagctatagtatccatagtgtgatgtacgataatttcattacctagttctctactgataaacattttgatgtttttgtaatattttgctattaaaaaaggatagctgcaatgaataatcctttcacttgatacataatagaatacgttgcagaggtgggattgctgggtattaaggtatgcgctgtgtaattttcatagaccttatccctcacagggattatgctaatttatattctcacaagcaamaaaccagagtagcttttcttctcaccctcatccacagattaactattaaccttttgtatccttggtaacctgaaatgtgacaaatagtatctcactgtagatttattctttatttctcttattaaagagatagtttggtttagaatctctccccatatcaaaaattcaaattgtcttttctttgctatctttttataatactttgaatttttttctatttatttgttggtccctatttttccaattcgtagaagtgttctatatattaaggaaattagacttt

SEQ ID NO: 743924 - DNA, 577 bp, Homo sapiens
tagcagaacaggtagacaataatttattaaagatatagaagaccagaacaatattcttaatcaacttgatctgaaaaatacatagaacattttgcctaacaacagtgtaatgtgcattcctttgaagtacacatgaaaacagatttaaaaatataccacatgttgccattaaacaagtttcaatgaattcaaaaaacagaaactacacagtttttttctcacaacataattaaattaggaataaggtgtaataagatatctagaaaattcaaatatctggaaattaaacaatatacctctaaataattcatgggtcaargaagaaatcacacataaatttaaaaaacattttgaaatgaatgaaagcaaaattaaaccaaaattgtagaattcagctaatccagcaaaagcagggaaatgtatagttttaagtgattatagtaaaacagaagccagatcccaaatcaataaaatttctaccttaaaaagcaagaaaatgttagctaggcatgatggcccatgcctgcagtcccagctactcggtaagctgaggtgggaggatcccttgagcccaggg

SEQ ID NO: 743925 - DNA, 577 bp, Homo sapiens
tagcagaacaggtagacaataatttattaaagatatagaagaccagaacaatattcttaatcaacttgatctgaaaaatacatagaacattttgcctaacaacagtgtaatgtgcattcctttgaagtacacatgaaaacagatttaaaaatataccacatgttgccattaaacaagtttcaatgaattcaaaaaacagaaactacacagtttttttctcacaacataattaaattaggaataaggtgtaataagatatctagaaaattcaaatatctggaaattaaacaatatacctctaaataattcatgggtcaaggaagaaatcacacakaaatttaaaaaacattttgaaatgaatgaaagcaaaattaaaccaaaattgtagaattcagctaatccagcaaaagcagggaaatgtatagttttaagtgattatagtaaaacagaagccagatcccaaatcaataaaatttctaccttaaaaagcaagaaaatgttagctaggcatgatggcccatgcctgcagtcccagctactcggtaagctgaggtgggaggatcccttgagcccaggg

SEQ ID NO: 743926 - DNA, 472 bp, Homo sapiens
tggagaagcttggccagctacctgctaccatgcacaagtttgagagctcctgcatgtgttccccaagagtggcttacagactagaaagcagatggtgcagcagcagacggaagggttgatgtgtatgctctgtgcagcaggatatttcttcctgtgtctcctaccactgttccaatcatttcctctacatcaaaaactgtacctgaaaaggaaggagaccctggacctctttcaatagagcaaaatgcaactcctggaaccaactgcttcattatacccccatcatgtatggccactgggtcactcacaccatagatagcccaaaatattatacmtaggtgtgcaatgtagaagacttttccccattcatgctcaaaagtttcattctctcaactagatgactgtattagtccattctcacactactactaaagacatacccaagactgggtaatttataaaggaaagaggt

SEQ ID NO: 743927 - DNA, 672 bp, Homo sapiens
cttgtgctagaatcagggaaacacaacagcatcaaaggaacaaaatagaaaaacaagtaactggttctaaaatatggagatctataaattgtctaacaaagaattcaaaataaccatcttatactagctcaatgagttccaataaaacacagacagacaactaaaaataatcaggaaagcaatatttgaacaaaattagaagctcaacaaggagaaagaaccccccacaaagagccaaacagaaactctggagctgaagtatgactaaagtgaaaagtatcatagagagtttcaatagcagactgtataaagcagaagaaagaatcrgttaactcaaaaacagatcatttgaaattacccagccaaaagaacaataaacaaacaaacaaacaaataaataaataataagaaagactatgggacttatgggcactatccagcagaccagagcattataaaacacacacacacacaaagttttaacaagtttaaaaatattgaaatactattaagtctattttctgaccatagtggaatgaaactagaaatcagtaacgtgaagaagattttaaaaattcacaagtatgtaaaaattaagcaacaaagccttgaataataaatgggtaaaagaatgaaaagaaggaaaataaaaatatcttgaagtaaataaaa

SEQ ID NO: 743928 - DNA, 610 bp, Homo sapiens
tatctcaattactattttggatcatttataaaaattaattcaatatggcttatatatatgaatataaaaggtaaacaaaaacttttgaaaacttacaaaagaatatctttcaaccatggaggtagacaataatttctcagagaggacaaacataaaataggattaatcatttaaaaattggtaagtttgactttatcagaattcaaactttctcctcctcaaagacattcttaagaaaataaaaagtcaagctatagactaaaaaatcacaagggctgggggcrgtggctcacgcctgtaatcccagcactttgggcggctgaggcgggcggatcacgaggtcaggagatggagaccatcctggctaacacggtgaaaccctgtctctactaaaaatacaaacaattagctgggcgtggtggcggaggcctgtagtcccagctaatcaggaggctgaggcaggagaatggtgtgaacccgggaggcggagcttgaagtgagccgagactgcgccactgcactccagcctgggcgacagagctagactccgtctcaaaaaaaaaaaaaaaaaaaaaaaaaaagcacaatacatttatctatcaatcaaaga

SEQ ID NO: 743929 - DNA, 575 bp, Homo sapiens
taatgagtgagatgcctgataccctataattattatagtatatacagtatgctatttatgtatcaagttgtattacatgtgtgaataatactatgttatatgtaatgtaatctcttcattagagaaagaagagttgaggaaagcactgtggtgtggtggttaagagcacaatttgaaattcccactctgttacctacttagttatctgaaagtgggcaagtattttaaactctataaacttgatttttctcttctgtaacactggggaggataayaataatcataagaaataattactaacatttatgtgtggcttatttatgacacacattattttaaataccttaaatttattaacttttttaatccttccataaactctatgagggaggcaatattatccccattttagggatgaagaacctaaggtacagagaaattaagcaacatgacctgatatacacagctaacaagtggcagagccaggttacctcattattcaaactccagaggatgttcttttaaccagatcatatctatcttttaaaaaattgtttagttcatgcatggaaaac

SEQ ID NO: 743930 - DNA, 575 bp, Homo sapiens
taatgagtgagatgcctgataccctataattattatagtatatacagtatgctatttatgtatcaagttgtattacatgtgtgaataatactatgttatatgtaatgtaatctcttcattagagaaagaagagttgaggaaagcactgtggtgtggtggttaagagcacaatttgaaattcccactctgttacctacttagttatctgaaagtgggcaagtattttaaactctataaacttgatttttctcttctgtaacactggggaggataataataatcataagaaataattactaacatttatrtgtggcttatttatgacacacattattttaaataccttaaatttattaacttttttaatccttccataaactctatgagggaggcaatattatccccattttagggatgaagaacctaaggtacagagaaattaagcaacatgacctgatatacacagctaacaagtggcagagccaggttacctcattattcaaactccagaggatgttcttttaaccagatcatatctatcttttaaaaaattgtttagttcatgcatggaaaac

SEQ ID NO: 743931 - DNA, 638 bp, Homo sapiens
gggagcaagaaagagagcaagtgagaagataccacacacttttaaacagcaaaatctcaggacaactcactcacttttgtgagaaaagcaccaagccatgaagaatctaccccaatgacccaaactactactcccaccaggccccacctccaacactggggattgcatttcaacatgagatctggggggacaagtatccaaactattaacatatcagtgtcctaaagctggcttcataaatcttgattgattgagatatttgcctcagtcactcattttggttatcagtacctgtcagaataagtaattatttttgagaagggagatacaaggtagttctaacggagtatttaatgtgatttaaaaatttgtattgtccttagagcagctggaagattatggttatgcagtaagttatttgaaacaaacctgagaatctgataatcttggaatttaaagagtctagaattmattacaaattaaatctattaaatctattatcaatctggtattgggtcaacattcttaaaatagatacctgtatttgaaaacctaatcacaatctttttgacaaattcaacaataactgccattaactcctaaatcagcctgtggatgccaccaaagaagcagcatta

SEQ ID NO: 743932 - DNA, 602 bp, Homo sapiens
tggaaacattcatcaagaatgttgtttataactgaaacatttcaaggtggatccaaatgcagtatttatacctgaccttttgaaacttgccaaaagctacattatacttttaaagactaaagattgaaaaaagagtgccaaaagtgattagttatatacgtacatacacacatacataccatgcataccaatatacatatacamtagatactctgctaaataatttttatatattattgcatctaattttaacattgattttatagtacaagtactattattatccctattatcttagatgaggaaatcaagacttgatatgctagattagtcttgtctgaaatatttgccaatatactatttgattatgaaataattgatatatgcaaaagaaacttaccaaagatgtaaagaataaagcttaataaaaggcataataaaaacaaacacccatgcatatcgtgaacattggaactagacttttaccaatattattgaatcttatgtgcttttccactattctgtccctctgcctccaaccagagttaattacaatcctaaattttgatatattctttgagtaagaagtgtagctattttct

SEQ ID NO: 743933 - DNA, 620 bp, Homo sapiens
caaaagctacattatacttttaaagactaaagattgaaaaaagagtgccaaaagtgattagttatatacgtacatacacacatacataccatgcataccaatatacatatacactagatactctgctaaataatttttatatattattgcatctaattttaacattgattttatagtacaagtactattattatccctattatcttagatgaggaaatcaagacttgatatgctagattagtcttgtctgaaatatttgccaatatactatttgattatgaaataattgatatatgcaaaagaaacttaccaaagatgtaaagaataaagcttaataaaaggcataataaaaacaaacacccatgcrtatcgtgaacattggaactagacttttaccaatattattgaatcttatgtgcttttccactattctgtccctctgcctccaaccagagttaattacaatcctaaattttgatatattctttgagtaagaagtgtagctattttctaaaaccatcctaattattgatttatttgtggcacttatttagcattcataaaactacatggatgttttggcagtcatagatttaatacaaatactgttaacataattc

SEQ ID NO: 743934 - DNA, 585 bp, Homo sapiens
gttaaatataatttcccaactatactctcaaatactagagcatattccttctctcaacctgtacatttgtacccattaactaacttcgttcccctgtctcctcccttcccaagctttggtaaccactattttactctctgcctctttgaaatctgcctttttggctctcacatatgagtgagaacaagcaatatttgtctttctgtgcctgggttatttcatttaacataattatctctggtttcatccatgttgtttcctgtcacaggatttcctgctttttcatggctgaatagtattccattttgtgtataggccacattttctttattcattcatcaattgatggacaggtagtttggtyccatattttggctcttgtgaatagggccactataaacatgagtacgtgtgtcaacatctcttcaatatgctgatttcctttcttttggatatattcttaacagcaggattgctggatcatacactcttttatagatgggaagcttgagtctaggagaggtaaaataatttaagccaagtcacttaatttgaggcaaagctgcaaatgggagccagatctcc

SEQ ID NO: 743935 - DNA, 650 bp, Homo sapiens
tcaagtattttctgaatattatgcattgctctgtgctctgacaagctgcactgattctcttcttacattcaactatcaactggaaatgttaaatccattattatttattgagctggcattttgttattacctgtggatactgagatggaatatagtctcattactctagtaaaacattgatatctgattgagtgattctttacttcatttgatagtatcattttttgggtgagacacaacaaccctggacattggctagagaagtgtggccaattaaaatgattattttccgtattttttaagttttataaaataaacacatattttctttgataaccacaataatattcaacactaaaaaataaagacatcaaaacagaaatttagatgataaaaatgagaaagtgtgacatatttttgtttccttaattttacttacacctttggtttttgtgaaatattaaatatacttttttgaamgattgagtctcattcccaagttccgttacccagaaacaacagcttttaattcacttaactgcttttcctagtactttagtccatatttctaaacagcacacacacatacacacacatatatatacacgaatattttaaaatttttatttgcagatagtatctattgtatt

SEQ ID NO: 743936 - DNA, 606 bp, Homo sapiens
ttgattgggaaaggctgggatcctgttagttgggatgggaatgtgtggggagaccgatgaagctgaaacactgaactcctaaattctgacaagtctttattgccaaaagaagtgtcctccctaaccccggtgacagtggccacctcacccacagaagtttctacctcygactgaggggattaaccctgaattgtctaagaaaactgtaatggcctcccctgaggcagttgtcgggcaagacaatgctgattttccttcggacccaccacctctctcccctctttgcttctagacctataattggactcaagttccagaaggcacctaaaggtgaggtatgaagagtgatccataaggaggtacattatactccaaaagaactatttgagatttttactttctacaagcagaagtctgaggaacatgtatggggataaatattaaggatgtgggataatgtagaaagaacttatagttggaccagactgaatttattgatgtgagcccactaagcagagagtctgcatttagtgttgcagctcagagagttagaaaagacaccaatagtttggttggtggggtgaaacatcgatcaaaagatggccc

SEQ ID NO: 743937 - DNA, 668 bp, Homo sapiens
taaagatagtttgtagctgggagaatctctacattgcttccctaacctatgaagtgagggctattgtggtagtgaaggacaaatgaaagccatcagagctgcctctacctaggaaaatgtaaatcaaagcaataccacatgcctggtgggattgcagagattggtgctaccataaaggacttgaaagatgcaggggtggtgattcccatcacagcccattcaattctctggtttgccctgtacagaagacaggtgratcctggagaatcaaagtggattatcaaaaacttaatcaagtggtgactctgtagctgctgcaccagaggtggtttcattgtttgagcaaattaacgcatttcctggtacctggtatgcagctattaatctggcaaaatgctttatctccctacctgtctgtaaggcccaccagaagcagtttgcatttatttagtgaggccagcaatacacctgcactgccctacttcaggggtgtatcaattctacaacaccatgtcataatttacttcacaagaatcttgatcatctttcccttccacaatatgccacactggtctattacattgatgacgttacgctaattggacctagtgagcagaagtagcaaccatctagacttactggttatacatttgcttgtcagagggtgg

SEQ ID NO: 743938 - DNA, 653 bp, Homo sapiens
cagaagacaggtggatcctggagaatcaaagtggattatcaaaaacttaatcaagtggtgactctgtagctgctgcaccagaggtggtttcattgtttgagcaaattaacgcatttcctggtacctggtatgcagctattaatctggcaaaatgctttatctccctacctgtctgtaaggcccaccagaagcagtttgcrtttatttagtgaggccagcaatacacctgcactgccctacttcaggggtgtatcaattctacaacaccatgtcataatttacttcacaagaatcttgatcatctttcccttccacaatatgccacactggtctattacattgatgacgttacgctaattggacctagtgagcagaagtagcaaccatctagacttactggttatacatttgcttgtcagagggtgggaaataaatctgcctaaaattgagaggacttctactttaatacaatttctaggggtccactggtatggggcctgtttaaatattccttctaaggtgagggataagtttttgtatctggcccctcctacaaccaagaaacaggcataacacttagtagacctatttagattttggagggaacacattgctcatttgggtgtgttactcttgcccatttaccaagtgac

SEQ ID NO: 743939 - DNA, 653 bp, Homo sapiens
cagaagacaggtggatcctggagaatcaaagtggattatcaaaaacttaatcaagtggtgactctgtagctgctgcaccagaggtggtttcattgtttgagcaaattaacgcatttcctggtacctggtatgcagctattaatctggcaaaatgctttatctccctacctgtctgtaaggcccaccagaagcagtttgcatttatttagtgaggccagcaatacacctgcactgccctacttcaggggtgtatcaattctacaacaccatgtcataatttacttcacaagaatcttgatcatctttcccttccacaatatrccacactggtctattacattgatgacgttacgctaattggacctagtgagcagaagtagcaaccatctagacttactggttatacatttgcttgtcagagggtgggaaataaatctgcctaaaattgagaggacttctactttaatacaatttctaggggtccactggtatggggcctgtttaaatattccttctaaggtgagggataagtttttgtatctggcccctcctacaaccaagaaacaggcataacacttagtagacctatttagattttggagggaacacattgctcatttgggtgtgttactcttgcccatttaccaagtgac

SEQ ID NO: 743940 - DNA, 523 bp, Homo sapiens
aacaattgaatgcacagacaatgctcgttagatgaatttaacactcaccttaattgggcaatctagtatttcattaattccaaaatggtactaatttcccaatatgcataattgggatacacaaatattgctctttttatgattgctatgtaacatttgtgaagcttagcctcttggaaattctgtgaaaatatgggattaaaataatactaataattccttaaattgcaacgaaaataaaatacatatgtaaagtgttttataaaattaarcatttctaaatacttttccccaattttatgtcatagcatccctttgtgacataaatagggcagttatattgtcactactttataatgagataacaaaattagagtcttaggttaaaaaaaaaatgcaggaaaagcaaatgttcaaggttctttccagtaccgctctttaaactctgagatacagagagccagggagaagttgccaggactcctgcttctgaagcactagatatattcctgactctctgaac

SEQ ID NO: 743941 - DNA, 572 bp, Homo sapiens
cgatgcaaaaatcttcaataaaatactggcaaactgaatccaacagcacatcaaaaagcttatccaccatgatcaagtcagcttcatccctgggatgcaagcttggttcaatatacacagatcaataaatgtaatccaacacataaacagaatcaatgacaaaaaccacatgactatctcaatggatgcagaaaaagcctttgataaaattcagcaccacttratgctaaaagcactcaataaactaggtattgatgaactacatctcaaaatagtaagagctatttatgacaaacccacagccaatatcatgctgaatgagcaaaactggaagcattccttttgaaaaccagcacaagacaaggatgccctctctcaccactcctattcaacatagtgttggaagttctggccagggcaatcaggcaagagaaagaaataaagcgtattaaaataggaaaagaggaagtcaaattgtctctatttgcaggtgacatgattgcatatttagaaaaccccatcatctcagcccaaaaactccttaaggtgataagcaatttcagcaaagtctc

SEQ ID NO: 743942 - DNA, 639 bp, Homo sapiens
acatacaatttacctatataacagactggcacatgtactcttgaacctgaaataaaagattttaaaaaaagaaagaaaaaaatggttgtgaaaaacttcccataactggtgagaaaaaggaacatctacatccatgaagtacaaaaaactccacatasattaaatataaagacatcttcactgagacacattacaatcaaattccaaaaagtcagggatgaaaagaaaattttcaatgcagcgaaagaaaaataacatattatgtgcaagcgaatgtctataagattatcagttgatttttcagaaggtacctttcagggcaggagagagtgggataatatattcaacatactcaatgaaaaaacaaaacaaaacaaaaccctgcaaaccaagaacactatacctggcaatcctatccttcagaaacgatgaaaagagaggaagtttaccagaaaaacaaaagctgagagagttcattaacactagaccttctttatgtaaaagactaaaagaatttcttcaagatggaagataaaaatgctagctgataccataaaaacacaggaaagtataaagtataaattgactatgttaagtacatagtaaaatttgaaatactctaacattgtagtgatggtt

SEQ ID NO: 743943 - DNA, 658 bp, Homo sapiens
gtattaataacatcctttacacctaataaaacacttctataatgcaaaatatttttaaaaagctaagtccaaagacaaaactaggaacaaacattttaacttatgccaaaaatatacacaaatatgtaatgattttctataaattgatttttaagaccaacaactcaatatgaacaggctgttcacagtaatggaaatagtttccttctttcttctttcttcttctttcgtctttcttcttcttttyttggtgtcacccaggctggagtgcaggagtgcagtggtgcaatctctgctcactgcaacctccacctctggggttcaagcgattctcctgtcagcctcctgagtagctgggactacaggcatgcgccactatgctgggctaatttttgtgtttttcaaagagaggaggtttccccattttggccaggctggtcttgaactcttggcctcaagtgatccacccgcctctgtctcccaaaatgctgggattacaggcgtgatccactgcacctggacaggaaatgcaattttcttttaaacatacaaaaaaattatgattaacctattataaatatgctaatgtataataaaataattgcaaattaaaacttcactgaatcatttgggatccctctgttctctgctccaattt

SEQ ID NO: 743944 - DNA, 632 bp, Homo sapiens
ctatcaaactggcaaagatctagatgtttcattacaaaccatgtgagcaagactgtgaggaagcagaatcctcatacgtaagataaattggtgtcatgcctccccctctagagggtaatttggtcatatttatcaaaattaaaaatgcacacttcttttgacccttgaattttacttcttgatatttattctgcagatacaattacatacatgcaaaaytaagtgtgttcaaagatccttattacaagattattagtaactagagaagaaaggaaataatctaaatatgtatcaaatgagaagaataaataccatgatatctccagctagtacaatatgagtcaacagtccctgagccagaagtgtttcggaattcagaattcttttactgaaagataatatggtgatagcatattacatcacacttccagaagggtttgggatagcacctatttaccaactgcatcaacattttgcatcatgtttgaaaaatcacattcggtggcattatatatagaaaaaacataagtatacttacttcaggtcaggccagttcagttcagacagggtgagattgtatcactggggtaggcaaaataatggccactcaaatatgcctatgccctaattcc

SEQ ID NO: 743945 - DNA, 615 bp, Homo sapiens
tctgtatcattatttttgccctagaaaaacattagaagattctactcaactcctctcattgtttccttggatactttccattttctatttagtgcctgtgttggcaggttatgtattggtggtttgtaatatctgatagattttgtattgcttgggcgtgggaggtggcagcggaattgagaactggcaaaacgagcagctgtcagctggtaactctaatttgggtaagttctttcttagcacttgccaaatttgaaataccatctgcctcagggctatgtgtgctcccttgattagaagtgtgcggctactttagagctcatcctttcacttgcttgaggacagcagattactttgttgggaaaccagtgaccatacaatgccctcatctcccaaaygtttgttgcacgctatggacttatctctattgactttcatctaaaattgcaaacttagatctctgctccttgttatccaatattctccaccctgcttatcttataccatttgggatttttttgtgacttaagaaacccaatgactttagccatagaatttttgttttgtttggggtattgtttgtgtaaataaaaatacagaagctaagctaatttt

SEQ ID NO: 743946 - DNA, 617 bp, Homo sapiens
gttcattgcagcactgttcactatagcaaagacatggaatcaacctaaatgcccatcaatgataaactggataaagaaaatgtggtacatatacaccatggaatactatgcagccatacaaaagaatgagataatgtccttttgagggacatgaatggagctggaggccattatctttagcaaactaacacaagaacagaaaaccaaatactgcatgttctcacttataagtgggagctaagtgatgagaacaattgaacaaatagtgggaacaacacacactggggccttttggagggtggaacatgggaggagggagagggtcagcaaaagtaactaagggtactaggcttaatacctgggtgatgaaataatctgcacaacaaacccccattacacaagtttacctctgtaacaaacttgcacttgtaccacttaacttaaaattaaarttaaagggtgggtgtgttagctcacgcctgtaatcccagcattttgggaggctgaggcaggcagatcatgaggtcaggagatcgagaccattctggctaacacggtgaaaccccatctctgctaaaaataaaaaaaaataaaaaaacttagccgggtgtggtggc

SEQ ID NO: 743947 - DNA, 549 bp, Homo sapiens
gagaagggaaatgatataggtctgaaactcagatctatttaaagagtgttaaaaaaaaggcataaaaaagttaaatgaaatattttgtttaccttatttttcatcaagctaatagataaccattggcctaaaggaaatatagtaattgtcttctgtgagtgcagcacatgaacaagtgagatgaatgacagcaatgtcataaggggtgagatggagaaatttggartgctttgttctaagtttctgtgctatatgtgaagtactatatattatttgacagtggacttgcattagttgtaaatgtatattgcaaactctatagcaactgctataaaaatttaaaataaaatacaattaagatatgagagtgaataaaatagaatcatataaattgttcaattaaaaccagagaatgcataaaaagggaagaaaaaaactgaacagagtaagtgatcttatagaaaacagttataaacatgataaatactattccaactatatcaataatcactttaaacttgggtgatctaaatgtatcacttgaaagaa

SEQ ID NO: 743948 - DNA, 576 bp, Homo sapiens
caaatagttaacttggaacatgtttgccattggtaggagccaagctaaccccagagaaactgaacaggggcagccatgcctcttcagccaccagaacactccatgtccagacaaggtgggcagagcagacccaaaagcagtgtatggacaagaaacccttcctcaacagccaagaagctcctcaatctttgcctatacccagagcatataatgagatggtagataaaaagtgacctcctgagacagtagagatagcttggttagtttaaaccttgacttgtactgagtgggaaattagcctgatgttgccatagactccaagaccaggcaatacactgtcagcctattccggaggccattgaacagaaagactcacagatccaaccacactcttcatttaatagatygaagcacacaaaaggaagcaaggagagaatgactgggtagattaacacttcaaagtgactttggagaggctgcaggtgagaaacaaggaccacaatatctgaatcctgggatccatgatgttcacatatcctgcctgtctctaaggattggtcttccccactgatgatg

SEQ ID NO: 743949 - DNA, 575 bp, Homo sapiens
tctccaataggcagccaaattaaggtctcatattcatgaagtcttcatgtatgtttagtgcttctttatagttaacacctcctgaatacttagtatgcaacaaacttttagctctcaggcacctcatgattattaggtaccgttggatccttccatcccttcctgtgttcagcacacacatgccctacaaactaacctgttatctatacttaacataactgaaaatatttctattatcaaagatgagtaagtcttacaactcgtcttcagtaatagaaatgaatgttctctaaaagcaaatgctcattacaacttgatagcctatttacctggtaggtaatttttacattakaaataaataaaatatctctgattgacaagtttaagatttcctttttcttttctcctgggaatgagaggccaagagatgggtgagaacgttcacagacaatgaaagccacccgattttctacttctgagccgtaaagagtcaacagcattttgcagagctgaatggtgtttttactcactctgtggcatttctctcttccaaatcttgtccccttcccccacat

SEQ ID NO: 743950 - DNA, 602 bp, Homo sapiens
gcaacatgttaatatattccacttttatggttttattcttatttcttttccaaaactatccattttaagcagctagtccccagagatgactagccacactaccttatctcgaaacagtgctatgaatactcaccaacaaaacaatacatgcattataagttttatttataagactggaacagacaagaatattagtttgagggttttttccaatttaaattaactaataaagtggggagaatgacacaaaagctgctatttacaaaagacaagyatatgattaaagaaggtcagtttttattccaaaataggaataatgagatatacaaagtaatcattttataaacattgatctaaatatttaatactcgcggactttttttcttaggaaaaaaagattgacatcaactcttcggcatcatcttttacaatcatttattcttggattgttatccattagagtgcttataaatgtctaggatagatgtgtaagaatgcattctgaggccaggcgcagtggctcatgcctgtaatcccagcacttttggaggatgaggtgggcagatcacctgaggccaggagttcacaagaccagcctggcc

SEQ ID NO: 743951 - DNA, 637 bp, Homo sapiens
tgcctgtcttagtctgttttctgctgtataatggaatatctgacaccaggtagtttgtaaagaaaaggaagttatttcttacagtgctggaagctggaaatccaacgtccaggggccacatctggtgaggcccttcctgcaggtggggactttctacagagtcccgagggggcacagggcttcatatggtcagggggctcatgagagagaggcgacctggcttttactaacaacccattctcgtgataagtaaccccacccctctctaacccatcaatccagtaatccggtaatcaatggatgggttaatccattcatgagagcagaatcctcatgacmtcatcacctcccaaagatcccgcctcccaacactgctcatattggggaccaaatttccaacacaaatgaacttttggggacacattcaaactatagaaatggccgtattcaccatctccgtttgccatacccaatgaccacagactagggggcttaaagaatcagaacttacttgctcgcagtttcagaggctggaagttggcatcaagtatcagcagagttgattccttctgaggcctctctcctcaccttccagatgccatcttctcagggatcctcaggtggtcgtccctctgtg

SEQ ID NO: 743952 - DNA, 479 bp, Homo sapiens
ttagtgtatatatactttatatatgtgtatatatactttatatatgtgtatatatactttatatatgtgtatatatactttatatatgtgtatatatactttatatatgtgtatatatactttatatatgtgtatacataaataytttatatatgtgtatacataaatactttatatatgtatatataaatcctttatatatgtgtatatataaacactttatatatgtgtatatataaatactttgtatatatatatataatgggatattttaaagaaatgttctgtcattcatgacaaatgagtgaatatgggaaacattatatactaagtgaaataagctaggcacagatagacaaataccacataatctcacttgcatatggaatctaaaaaagtcaacctcatagaagtagagaatagaatgttggttatcaggggctgggggagtgtgtaggagttggtgagatagatgttgg

SEQ ID NO: 743953 - DNA, 479 bp, Homo sapiens
ttagtgtatatatactttatatatgtgtatatatactttatatatgtgtatatatactttatatatgtgtatatatactttatatatgtgtatatatactttatatatgtgtatatatactttatatatgtgtatacataaatattttatatatgtrtatacataaatactttatatatgtatatataaatcctttatatatgtgtatatataaacactttatatatgtgtatatataaatactttgtatatatatatataatgggatattttaaagaaatgttctgtcattcatgacaaatgagtgaatatgggaaacattatatactaagtgaaataagctaggcacagatagacaaataccacataatctcacttgcatatggaatctaaaaaagtcaacctcatagaagtagagaatagaatgttggttatcaggggctgggggagtgtgtaggagttggtgagatagatgttgg

SEQ ID NO: 743954 - DNA, 479 bp, Homo sapiens
ttagtgtatatatactttatatatgtgtatatatactttatatatgtgtatatatactttatatatgtgtatatatactttatatatgtgtatatatactttatatatgtgtatatatactttatatatgtgtatacataaatattttatatatgtgtatacataaatactttatatatgtatatataaaycctttatatatgtgtatatataaacactttatatatgtgtatatataaatactttgtatatatatatataatgggatattttaaagaaatgttctgtcattcatgacaaatgagtgaatatgggaaacattatatactaagtgaaataagctaggcacagatagacaaataccacataatctcacttgcatatggaatctaaaaaagtcaacctcatagaagtagagaatagaatgttggttatcaggggctgggggagtgtgtaggagttggtgagatagatgttgg

SEQ ID NO: 743955 - DNA, 479 bp, Homo sapiens
ttagtgtatatatactttatatatgtgtatatatactttatatatgtgtatatatactttatatatgtgtatatatactttatatatgtgtatatatactttatatatgtgtatatatactttatatatgtgtatacataaatattttatatatgtgtatacataaatactttatatatgtatatataaatmctttatatatgtgtatatataaacactttatatatgtgtatatataaatactttgtatatatatatataatgggatattttaaagaaatgttctgtcattcatgacaaatgagtgaatatgggaaacattatatactaagtgaaataagctaggcacagatagacaaataccacataatctcacttgcatatggaatctaaaaaagtcaacctcatagaagtagagaatagaatgttggttatcaggggctgggggagtgtgtaggagttggtgagatagatgttgg

SEQ ID NO: 743956 - DNA, 614 bp, Homo sapiens
aatgactgacacctgcctaaaagatccaccattccccgcagtctctggccccttacccaactttgcttcttcacatcacattcaagggtgagctggggctggctcatactgctccagagagttaactgtacacatctctttccaactcctcatccrgtgacatcacattgttagactgaaattgtccaggatgggtgcacttacactatggcaaaagctacaaatcacatccttccgactcccaagcttgttcaacatttataccactgcttatggcgacgtgaattcagatttaaacttgtatgtttgggtctgactcccacagtagaatttaacctccgtgagtacagggaacttgggatgtcctttacatatgattacatcctgtctatggcagtatctggacatagtttgcattcaatcaatatgtattgggtggtaaatggatggttgaatggatggatggatgcatggatggatgaaattcagattttgatagtcccatctcagttttagacataaaaaataaaattttttgaagagtagaatttttttttaatttttgcccttttatatttgccttatactactggcctctgtgataatcctctgct

SEQ ID NO: 743957 - DNA, 628 bp, Homo sapiens
ctcagttttagacataaaaaataaaattttttgaagagtagaatttttttttaatttttgcccttttatatttgccttatactactggcctctgtgataatcctctgctctgagcacaggttttattctttttttttttaaacatgtgcagatacatgtgtttctttttgtaggtaatstatttgtcattttttgctactaacatgtttcttaccttcatgtatatgtgtatattaaacctatgaattttttttatattcttcaagatagctattaatctggaaaccctgggaaacatatgcaatgaatagtatgctgatactacatcacattgcatgatatgttcagtgacataacatgataagtttaatgtgctgtcccttatgagcactgcctagcaggatgcactgtgcaaactgtaacaaatgcagtcattaacacagcatgtccatcagtgtaccacacaatctgtgatgcattgccttggaggatttgtgtctctgattttcaatgaataagccttcacctttagtataccttagaaggtgggatcaagcaagttgagatctgacgagcctgcagcccactctacactacctcccatctagttgtagaaatcatcattcac

SEQ ID NO: 743958 - DNA, 601 bp, Homo sapiens
caaagaagaggtcacaagcacaggtaggaaaaggcacctgcaggtggggaactagctgtgaggccgagaatgtcagtacatgactagaaaggccagggaatgtcaaagaatttggatttcattttctagattgtggtccgtcattgaaagggtttaggcagagtggacaagtgaatgttctgtaaagagccctgtggtgcttctttatggtgtggccataggtgcaaaaaaactagagccaggaagatgagctagatgtgtgagtcccagtctgactctgaaaaagtcatctggagagctttaaaaaatggtgatgcctggkctctattccatcccgaataaaaccgcatctctggaggtggatccaggttctggccatattttaaactccccgttacctgattctaacaggcagccagaactgagaatccttgcactagaagaatgttaggtggaatgcaggcaagagaggatgacagtttggagaagatacttgtagttgggctacatggatagatttggggagtggggggatggtaaatatagcaagaattgaaaattaattgcatgtatgggatggaggggcatgagctgtcaagga

SEQ ID NO: 743959 - DNA, 562 bp, Homo sapiens
ttttattgtctttcatgaccttgattcttttttaaaatattgattagttattttgtagaacactcttcacttttgttggcctatgttttctcttaattagataaagggtatgaatttgggacaataatatcacagaggtgatatgcccttatcagtgtgtcatatcaggggatatgagatgccaatatgtctaattactggcagtgttaatttgatcactttaagcttaaaaagtaacttgcccacagtagcatagttgagtaagtggcagatccaggattctaatccaagcatgctttctaccacagagaaaaagttcgmtggtctcttaaatccttgaagtgaagatcactgacaaaccatgcacaaagaacttcccattaggattttagtgcctccctcttaactatgacgtgcagccacgttagaagaaaacctctagggtgagagaacaaaataaacagaaaaaaagaaattcataagaaacatacaatgcagggagcagaagaaaatatcaaagaaactacaattaatatcctctccgaaacaggcaaaaactaat

SEQ ID NO: 743960 - DNA, 646 bp, Homo sapiens
gaacaatgaacctaaagtcccttttccatccatgttaaatatactcaacagggcattgttcactaggttaaattctgcagagccatctgactccaaaagttgcattagtatatctgccactcgaggaagattttctccagtggtaaattgaggcagttctttaattgcttgacrtcaaatagatacatcttcatcttcacagaggtctaactgtgcattgatagcagaatcagccaattctgtaaaatgcttaaagaatttcagaataaattgagctgctaatcgtttttccttagtaccacctttcacaccatccagtatcacttgataggcatctttatgctggcccactcgctccgtggtatcggccatgatgccatagttgccgtaaagctcctctaccatcggcatggtgagcgacaagcccagggcctgctcccactatcttcatccttgccggcaccactgccacctcagcacttctccaagcccactacctgcactattacacccaactggatggctctttaaagtgtaaaacaatggaaacatccatggcaacaagccacatcatccggatcaaatcttaaaacaatgggcactctagatctagtgcaaaatgtattttcagtctcatagagacaat

SEQ ID NO: 743961 - DNA, 615 bp, Homo sapiens
gattggcaatggaatcagaatctgccagtgaaaataacctacaatcatatctagccaggatattatccacggcacatgtgggagaaataaaaggaaataatggaaaatgaccagaaaatggtttcatttctgccttcaattcagaaaagaagggaaaaaataaatatccaagtagattttctaaatcactacatactgttaaaaatagaaattacaaagtatgtcacagagttatattatatttgaaattctccaacaggaaatatgatgtggcttcatttaaacagcatattccataaattttgctatacataggaaaatgctctaagtaagctgcagggtaatttatactggaamacctcactttatcactcagtgcaatcaaatgctatttgcaaattctgatttgaggcacaactttttaaagcaagaaaaatgctaaaattagactaatcctcaccttcttttcattctcagttgaggaaaatataataaacaaccataaatttaaaaatgttttgtcagtaaaagcacaaaattgaagaaaatgaaaatattaaagtatctacctcatagctgtatatgtacaaagccgttattattttttaatgattt

SEQ ID NO: 743962 - DNA, 542 bp, Homo sapiens
tctgaagcttcactcttttatggacctgaagtggtgtagttggaattggagtattttgtacattcacataggtaagctctacttgctaaatgtttaaagggcatacctttatttaagtctttcaaatagaattggtggttgatagacaccatcaaataatttgatatgaagtttcaaaacagttattgtgattaccatgttgtttggggcattatccctttttttagtcacgttgctaaagtaaactttgtttgctgatcttatttccctctgttcttcctttcttagttggcacttttctttggtcctgtcttatcatcatgattattattatttctctttattacaataaatacaaatacaaatctcaaggcaaaatacacaggaaaatgaagacccacaccrcacttgaaaccaaagcgcaactgacgtagtaaaaaagaaaatgatgaattcttaaactgctttaatagacagcccagatatctattaccgtaagtctgcaaatatattgtacctagagttaaaatgcaacctcatgc

SEQ ID NO: 743963 - DNA, 605 bp, Homo sapiens
ttctcaagactctctaagagcatgccttaggaatgaggggctataagctctgatatctattccactgtttcctgttgcaattggttctcaaacttttagctttagaatgtcctaggagcttcttttttttttcatctagattccagagccccagccccaatgattctgattcagtaggtctagggtaragcccaggtatctgcaattttaacaagcgttccaagtgattctgataaagcaagtattaccaacacaaatggaataatttcctagggctcaatttcttcatctgtaaaggggaaataatgacacctgccatgcctattctcagggcttttatgaagtccagaacaacagcgatatatgtaagagagctttgaacactgtgggttctccacactggtaagatgttggtattgtgtggggcagtgcatcagaattacctggcaggctccttaaaacatagaatggtgaaccctattgccaagatttctgattcagtaggtctgtggtaaggcccaagaatttgcctttctatcaagttcctaggagatattgatgcaactgctcaggggaccaggctttgatatgctcatccgggcacc

SEQ ID NO: 743964 - DNA, 569 bp, Homo sapiens
gaaccaattagttctcttttctttataaatcacccagtctcgggtattcctttatagcaacgcaaaaatggcctagtacaattcacaaacgtgaaaccagtggagtgcattctacagctatcgctgtagaaatggtagacttttaaaggcaaaggcaaggaattccagtaaacaaatcttcctttaggktgctcttttatgataggtttcttcaaaaacatccaagaaatgttttactttcctatcaccttaaaataaaaataaaaataaaaaaaaaaacaccccagaacctttagcatttcaaatgataaatctacataggcattttcaaaagccattttgtatatgtgtttagccccaccatgtttgcttgcctcgttgaatattctggtgacaatactaagaacacaaaggaatttcagaattagcattttaatgcttctcataagtaaaaaaatcaactgagtctcattctgaagcaaatgttaagtttgctatgtggaggctgtggccaataaccagtcagcagcactaaagctgagtgtggatgttggctgttttcttgcaaa

SEQ ID NO: 743965 - DNA, 484 bp, Homo sapiens
taccttaatttttgctttcacaattttagcgcatacccattttatgcgctaaaacacagttaacaatttttaggaaaaggattttaaaagacaaagaaaaaccccatatatcttttccctaaaaaagttctaaaaagttcttgccgaagtctaaaagtagacttctcctaccaagaaggatcaggatttctgaactatcttagaagtataggttacatcacacagaaaggacaaactgactgacccatctggaacataaaatcatgttcctaagaaaattatcttaaccaactacaaaacctaaaaactcatcattttttgccaacgwgtcttagccataagaattttcctttttcgcaagatagcaaaagccattaacccacctactggtaattattcaggctcgattccttaacatgctagtgccaaaagtttaataatagttatctatgtaccacatgttgaacctattgtataaaattgg

SEQ ID NO: 743966 - DNA, 633 bp, Homo sapiens
agcacagaaaacgtgttttgtcatagtaattttaatgtgttataatttctgcatttgactttccagaataaaatcatactttcattacatgtatttttgttcattgtatttttgccaaagctctgaacctccaataatgggcacatggattaatatttattgagcaaacatttatggagtaacttttatatgtgtaatatatgactatttggggcactggggatataaagacgaataaggtacattttctgcattttgggagctgaaaaatccaataagaaaactttaaggtataattcctaaacataaagtataagtaagaagggagtgtatactgagaattgcttaattacaactgggagaatggaattatttggaraaagagatacatgaggtgggactaggacaggacataggattccaacaagttaagaaaggtaagatttccaggttaaaggagaaagcaagagctgatgagcgtttgtagattatgggtaatgcctggtcaatggctagtggattagggatatgagagagagcagttagagacataaaagtgtgcatggtaataaggactttgaatagaaaaggacagaaactgaaaattattgggcagttgattgagataatcag

SEQ ID NO: 743967 - DNA, 589 bp, Homo sapiens
catattaacaaactagacatacattatgtgttttttcagtgactgtcccattttaggccttttaaatccacctcatctggccgtaaatccacttcatctgggtattgtgaaacagcacccacctgtcagtgctatgccccagccccttgctgtctccttcccttgcttcccaatgcaatcccctctcaatgtagctccttgagttctaaaggacctccagtttttcctggcattgacaatttactgaaaaaacataaaaactgtcagacatattcttataactgtcctccaacrccaaatgtcaagtatactgaaataaaactatcttttaccttctacattttcccactaatgctcatcgtattctcattagaaaacagtgatgagatatttagaattaggactatttcataagttaggaccccgccacccaacaatgcaaatggtcaaaatgtaggtaacaaatacttataatcataaatggtattaagaaatgactgtgtaatgctgagttaaaaggtattataaggtcaggtgtggtagctcatgcccgtaatcccagcattttgggaggttgaggcaggaggat

SEQ ID NO: 743968 - DNA, 648 bp, Homo sapiens
tcacactctctctcctcatataaggtatctgggcattcctggcctccattggctgcttcttggatgatgattctgtatcgagactgttttactgtggcatttcctgaagtaaaggaaaaagaaaattatatagtgcccttttatgttgatgcagatcaaaatccaggtagcaattgaaaaaaaagagagagagataaagtaagcacatgtggaaagtcaacctgggaacgaaaataacaagcaaagaccaggagttaacactccatcttacttttatgaaataaacacacaatacttaataatggtgatttcgaatataattatttcccrctgtcttaatatgtttaattagaatctaccttaccaatggcataaaagttttatggcatgatcgaaggggccccagaaaccttctttgatctccaaacaacagctgaaatctctggtgttttattattagcaactcagtcccttgagtaagggatttctccatccaggctattttttataatgcaaacaaaacacacctataataattaatatattagtcacctattcatttatggatattagtttattagatttcttattcctcaaaacctcataaccttataaccatatatatataattggaatttaggaaagagg

SEQ ID NO: 743969 - DNA, 618 bp, Homo sapiens
agtctgttgaatagacaagcaatctgggttaatagttttaaatggactatgccccattgttcaatgtcaaattttgtgaacaaaataattaaacagttaaactataaattactctttctcatggccagtatctatttgtttatacaaatctcatttccraagccaaagtgaaagatatttgaggtcacgccgatacctttgaaacactaaatgtcaaggaagtatcttgcaataatagggtctcaatgaatgttcactttaacaggtggagggaagtaaaaaatataattaagaaagaatagttaatgttcctgcaatcaacagaatcaaagtttggaagaaacagctctattatgaatacattttcctttttcccccaaatgaattattctaaaaattattcagaataaatgaaagatagataaggagttcaaaagccatatgacattcaaaagcctgatacacctagagggctaaattctatcttctgaaataacttttttttaactttaactagaacataatctcattaaatgacataatacaaaagtgaacataaaagttgtacaagagaaatgtcaaaactctcagaagaaattaatgtttattggtgcagtc

SEQ ID NO: 743970 - DNA, 618 bp, Homo sapiens
agtctgttgaatagacaagcaatctgggttaatagttttaaatggactatgccccattgttcaatgtcaaattttgtgaacaaaataattaaacagttaaactataaattactctttctcatggccagtatctatttgtttatacaaatctcatttccgaagccaaagtgaaagatatttgaggtcacgccgatacctttgaaacactaaatgtcaargaagtatcttgcaataatagggtctcaatgaatgttcactttaacaggtggagggaagtaaaaaatataattaagaaagaatagttaatgttcctgcaatcaacagaatcaaagtttggaagaaacagctctattatgaatacattttcctttttcccccaaatgaattattctaaaaattattcagaataaatgaaagatagataaggagttcaaaagccatatgacattcaaaagcctgatacacctagagggctaaattctatcttctgaaataacttttttttaactttaactagaacataatctcattaaatgacataatacaaaagtgaacataaaagttgtacaagagaaatgtcaaaactctcagaagaaattaatgtttattggtgcagtc

SEQ ID NO: 743971 - DNA, 618 bp, Homo sapiens
agtctgttgaatagacaagcaatctgggttaatagttttaaatggactatgccccattgttcaatgtcaaattttgtgaacaaaataattaaacagttaaactataaattactctttctcatggccagtatctatttgtttatacaaatctcatttccgaagccaaagtgaaagatatttgaggtcacgccgatacctttgaaacactaaatgtcaaggaagtatcttrcaataatagggtctcaatgaatgttcactttaacaggtggagggaagtaaaaaatataattaagaaagaatagttaatgttcctgcaatcaacagaatcaaagtttggaagaaacagctctattatgaatacattttcctttttcccccaaatgaattattctaaaaattattcagaataaatgaaagatagataaggagttcaaaagccatatgacattcaaaagcctgatacacctagagggctaaattctatcttctgaaataacttttttttaactttaactagaacataatctcattaaatgacataatacaaaagtgaacataaaagttgtacaagagaaatgtcaaaactctcagaagaaattaatgtttattggtgcagtc

SEQ ID NO: 743972 - DNA, 618 bp, Homo sapiens
agtctgttgaatagacaagcaatctgggttaatagttttaaatggactatgccccattgttcaatgtcaaattttgtgaacaaaataattaaacagttaaactataaattactctttctcatggccagtatctatttgtttatacaaatctcatttccgaagccaaagtgaaagatatttgaggtcacgccgatacctttgaaacactaaatgtcaaggaagtatcttgcaataatagggtctcaatgaatgttcactttaacaggtggagggaagtaaaaaatataattaagaaagaatagttaatgttcctgcaatcaacagaatcaaagtttggaagaaacagctctattatgaatacrttttcctttttcccccaaatgaattattctaaaaattattcagaataaatgaaagatagataaggagttcaaaagccatatgacattcaaaagcctgatacacctagagggctaaattctatcttctgaaataacttttttttaactttaactagaacataatctcattaaatgacataatacaaaagtgaacataaaagttgtacaagagaaatgtcaaaactctcagaagaaattaatgtttattggtgcagtc

SEQ ID NO: 743973 - DNA, 516 bp, Homo sapiens
ttctaaaaattattcagaataaatgaaagatagataaggagttcaaaagccatatgacattcaaaagcctgatacacctagagggctaaattctatcttctgaaataacttttttttaactttaactagaacataatctcattaaatgacataatacaaaagtgaacataaaagttgtacaagagaaatgtcaaaactctcagaagaaattaatgtttattggtgcagtcttcgatactcctctcatctctacttaaatgsagtttaaatgtattactatacatcaaacgaagtcagcccagtaatttcctacaaaattctcccactcaaagtttataaagatttgacaatgacttttaggtagtttacaaagagatttgtccttgaatgttttgaatgtttaaacttgaaaagaaaagaaaaaagagtctcctacataactgtaagaacgaatacttcaaatcagcctcaatggataattttaaatgaatgtatatattttaacataatttatag

SEQ ID NO: 743974 - DNA, 608 bp, Homo sapiens
acatttataatatgatgccttccaatctatgaacatgagatgactttccagttgattgggtcttgttaatttcttagtttctttctttttctttttctttttttttttttaaacagagtctcactctgttgcccatgctgcagtgcagtggcacaatcttggctcactgcagcctccgcttcttgggtcaaatgatcctcccacctcagcctcccaaatatctgggaccccaggtgtatgccaccatgtccggttaatttttgtatttttagtatagatggtgtttcaccrtgtcacacaggttggtcttgaactcctggcttaagccatttgctggccgtggcctaccaaagtgctgggattacaggcatgagccaccatgcctggccagaattcatcagttttagcaatatggtcatggatttttctttgagaagagttattttttattttttttaatgatgtactctttttttacctattataaatattttgagactttctatttatttttggggagattttatatttttgttgttctaaaccttttccaatttaacttatctaatatgttagcatatagtcttatatctgtgaggttggtagta

SEQ ID NO: 743975 - DNA, 605 bp, Homo sapiens
acatacacgccaacgtaccacacacatacacacacatgcagaccacataccacacatgtgcccctacagacatatgcacgcacacacacacacacacacacacacacacacacacacacaggtaaggggtgttcatttggcatcaggagcttgctcacagctccagtgcgatgggacactttccacccgggcactagctgtgtttatgttgtttacgtgatgtagcctttcacaggatccccacctacctcaaaacaccagggtggccsggcgtggtggctcacgcctgtattcctagcccttagggaggccaaggcaggcaaatcacgaggtcaggagatcgagagcatcctggctaatacggtgaaaccctgtctctactaaaaatacaaaaaattagctgggcatggtggtgggagcctctagtcccagctactcaggaggctgaggcagtagaatagtgtgaacctgggaggtggaatttgcagtgagctgagatcacgccactgcactccagcctgggtgaaagagcgagactctgtctcaaaacaaaacgaagaacaacaccagggtgaagaccttctcaaagcaatgccagccactgt

SEQ ID NO: 743976 - DNA, 605 bp, Homo sapiens
acatacacgccaacgtaccacacacatacacacacatgcagaccacataccacacatgtgcccctacagacatatgcacgcacacacacacacacacacacacacacacacacacacacaggtaaggggtgttcatttggcatcaggagcttgctcacagctccagtgcgatgggacactttccacccgggcactagctgtgtttatgttgtttacgtgatgtagcctttcacaggatccccacctacctcaaaacaccagggtggccgggcgtggtggctcacgcctgtattcctagyccttagggaggccaaggcaggcaaatcacgaggtcaggagatcgagagcatcctggctaatacggtgaaaccctgtctctactaaaaatacaaaaaattagctgggcatggtggtgggagcctctagtcccagctactcaggaggctgaggcagtagaatagtgtgaacctgggaggtggaatttgcagtgagctgagatcacgccactgcactccagcctgggtgaaagagcgagactctgtctcaaaacaaaacgaagaacaacaccagggtgaagaccttctcaaagcaatgccagccactgt

SEQ ID NO: 743977 - DNA, 551 bp, Homo sapiens
gacagttttctctgaagccctatggatcctgttctattaccagttgatagtttcaacttactctacttttattggcagtatacataattcattttgaatggggcaggaagcaccctgtttttaaaatgaaatgcctgtctgattttacaatatttaatgcaagccaagttactttgagaaagaattcattattaattattgtattcatgtaatgatgaataaaagaaaagaattaataaatgtgaatctcagcaccactaagttatgatgactgtaatgctatattcattttctttattaaaagggttgttaaaaataatttatcaaacttgcaaagctatttcaatatgaaaagcctaatcttatttctctagttattcacctttctcaggctagttttggcaagrtatatcccaaattcaaaccatcaaagtagaaaagacactttaggctttggggagaaatggtctcctcctctttctctttatcctctcatgaaaaaaaaaaagaaaaaaaaaagaaaaaaaactgcatatttacagtatttcaac

SEQ ID NO: 743978 - DNA, 635 bp, Homo sapiens
gccggggtctctcccagtgccatgtcaggctgagcagatcccttcgtggccgagggctcgggatcagaaagctcctactgctggctccccctccagtgaatcccccacccacaagggacagggccaccgggacaaytccccgtgagtgcgtaattttatgattcagaggatactgcttccaaataacggctcttgcagaattatgttccaagagtcaggtacagcaataatggtctatttgtgtcctttgctgctctgaagtctaactccggaggtggagcactgggggccgcagagccggggacctggcagcctgtggagcccctcgctgggctctgggcatgggagtggccttggaggaaccctgaggctcctctgaagctaagaagctacaaagacagggaggctgaggcaggaggatcacttgagcacaggtcgaggctgcagtgagctgtgatcacagcaccacttcgatccagctcgggcaacagagcaagaccccatctcgaaaacaaaaaatcaaacaggcatttgggaaccacacgtgctggggacccagggcctgtgttggagatggaccggagcccgacagccgccctctccctgtcccaccatcggtggctcctctgtcccct

SEQ ID NO: 743979 - DNA, 624 bp, Homo sapiens
tcccaccccggccaaaactgaaagtagagaagcagccctcaggttacacgatcccccacatctggcactcaattcttttcagggaattaaccagctgttttggggtcacgcatacccaggctgattacagccatttttgtaggttgatttgagttgatggaacagaacagagagttcagtaatggaccaagcagatggggcagttggcgcactggggctcggtggaggaggggacagaccccacagtgaccacaccatggggatgactttctgtccgtcacatacacatagagctagatccctacctcacaccaagcacagatggagttttgctcttgttcaccaggctggagtgcaatgrtgccatcttggctcactgcaacctcagcctcctggattcaagggattctcctgccccagcctactgagtaactgggactagtcacgcctggctaattttttgttgttgttgttggtagagatggggtctgcctatgttgccaggctggcctcaaaatcctaggcccaagtgatcccagggtggtccatgaagcaagtgtgccctaggcctggcacccagggcagaggtatcccaggccttgccttccctgctggagctcccag

SEQ ID NO: 743980 - DNA, 519 bp, Homo sapiens
aaaagataaatatttctctttgtgtgcttatatctgtatatatgtgtaacatgataacactgaatcatcactctcagaagtacaaaccatattattagtattattttgggtgtgatgagagaactaattagcagtgtttggggtggggggaatttcaaggtgctcaatattatccatccattcaacaaatacggtacatatttttttaatatccattgtgttcaagggcagaagtgatctttcaagctgagcttggaagagtttgccacctgattaraacatttattgtttgacaatttcactcaactcctccctttacccaaataagtcacagatctggttacactagctgttcaagccactgctcttccttgtcttatttttcttggtgacaagagtcaagtatatatgggctctactattatctctctgtctcagcattgtccagacacaagttaggacacttttcatgcctggtcaaaaaagttaatttgtggtttggagccaaggagaagagag

SEQ ID NO: 743981 - DNA, 437 bp, Homo sapiens
tttggtaagagtatgtattatttttataacaaaagccagctttttaaaaacaaaccccaaaataaatgaagtcagtaaaagttacgtttgttcattatagtcacatttaccatttgcttgggttttctcctttctgatgggttatcacacacagttgcagcctcaactatgataggtggcccaggtgcccctttgaaaacctaggctaagaartgctttgcaagtgcaaactaggagaaagatattcagtattttaatatctgcagaaaagccatcacaaatgaatattttttttttaaataaacaacctagcatgtgtatttttctccagtcaccatgttttgactcctgagtctgtcactggcaatgcttaccagcagactagtcacaaaaaagaacagaaattggatttttgtacagtgttcagaattgagatg

SEQ ID NO: 743982 - DNA, 635 bp, Homo sapiens
catgctggtcttgaacttgtgtcctcaagcaatcctcccacctcatcctcccaaagcatgggattataggtgcgagccactgcacccagccaaatccaagtcttagtttcctcatttgccaaactgttaggatactacctgcctagccaaccttacagcactactttgttattcacccagacacctatcctagacttcaggaggcaagcaraattctatagttgggactctaaaaagaaaggggactgttgatcttgattaatcttcaataagcaccttcaataagggaaaaaaaaaggggtacataacccaggagcacagatataaagaaggcacaccaaattgaggaagtggttaaaaccaaaatggcacaatcctttaagaataaagtcaagaaaagtaactgatagttaaagtaccttgctcatcgttatattccccagctaatacaatgtttgacatataccaagtataaaataaacgtttcttgaatttaactgcatagattcaacagtattgccttcgtaaattccagagaaacagtagtaactccctcactccaattgtctttcttatttttcccaagtttatcaaagcctcaaatcagcgaggaaatcacacgagagcttggggac

SEQ ID NO: 743983 - DNA, 635 bp, Homo sapiens
catgctggtcttgaacttgtgtcctcaagcaatcctcccacctcatcctcccaaagcatgggattataggtgcgagccactgcacccagccaaatccaagtcttagtttcctcatttgccaaactgttaggatactacctgcctagccaaccttacagcactactttgttattcacccagacacctatcctagacttcaggaggcaagcagaattctatagttgggactctaaaaagaaaggggactgttgatcttgattaatcttcaataagcaccttcaataagggraaaaaaaaggggtacataacccaggagcacagatataaagaaggcacaccaaattgaggaagtggttaaaaccaaaatggcacaatcctttaagaataaagtcaagaaaagtaactgatagttaaagtaccttgctcatcgttatattccccagctaatacaatgtttgacatataccaagtataaaataaacgtttcttgaatttaactgcatagattcaacagtattgccttcgtaaattccagagaaacagtagtaactccctcactccaattgtctttcttatttttcccaagtttatcaaagcctcaaatcagcgaggaaatcacacgagagcttggggac

SEQ ID NO: 743984 - DNA, 601 bp, Homo sapiens
attttgaattatttgacagcgtttgtggtttggtgtttggagtattagactaggcggctgaatgacaaatatgggcttggttttgctgttaatctgaagtatgaccttggaaaattgggcaattgtgacttttgtcttttcgcgttctttatctgtagaatggaggagatgccaatcattatttcttgtattggagttgttagggttatataaatttttttttaaawaaacataaaattacacacttgtacctactggctcttttaaaggataggtgggcatccttttttggattattcgtgctccttggttgtcttgtcagtttttttctttttatattcagggtggatgctgatatactgcttgacttactgcgtatttgaagattatcctgtttgattttccatctaaactgatccaggctgggacttttcaagaggggatcccttccgtttaaacatctccctctttcaggtttggattgattttgaaagaatccttgaggcaacgaagcagagttgtgaaatgaaaaacatttttcactctttgcagccactacctttcatagtctgacttcttaaagtgagacttatatttagta

SEQ ID NO: 743985 - DNA, 619 bp, Homo sapiens
ttaaaggaaaatgtgaacataaggaggagagaaatggaagacataaaatatgttaataaaatttttagagataaaaatataatttattaaatgaaaaataaccggatgggattaagagcccattaaacattgcagaggaaacaatcagtgaacttgggtaagaacaatagaaactatgcaaaatgaagtatacagaaaaaagaccaaatataagtgaattgagccaaggggcaatatcaagtggtctaacgtatatgcaaatgaaatcctagcaaaagataggtgagcaaaaatatttgaaagatggtcaagtactttctaaatttgatraaaactgtcaatccagagatccaaaaaagtcaacagacccaaagtagaagcggtatacagaaagctccataaaaggaaatcagtttcaaattgttgaaaaccagtggaagagaaaagtagccaaaggaacaaagattttttaaaaagtaacaattttctcatgagaagttatgcagaccagaaaacaatcaaatggtatctttaaagtgctaaaagaaaaaatattcaaccagtaattatctaccagtgaaaatgtctttcaaaaatgaagtcatgtccaatcctggaa

SEQ ID NO: 743986 - DNA, 597 bp, Homo sapiens
ccagagatccaaaaaagtcaacagacccaaagtagaagcrgtatacagaaagctccataaaaggaaatcagtttcaaattgttgaaaaccagtggaagagaaaagtagccaaaggaacaaagattttttaaaaagtaacaattttctcatgagaagttatgcagaccagaaaacaatcaaatggtatctttaaagtgctaaaagaaaaaatattcaaccagtaattatctaccagtgaaaatgtctttcaaaaatgaagtcatgtccaatcctggaagctaagcatggttgggcctagttagtacttggatgagagtactgttgagtgatgtaggtttattaaaaactaaatttaaaaattttaaaatgaagtttaaaatgattttcagatcaatgaaagctgacaaaattcattgcaagtaaatgtgcactataagaaagctctctaggcagaagaaaaattatgaaaatgtggatctgtgcaaaggaatgaagagtacctggaatgggaaatctttgagaaagaaacattaaatttattcctcatattttaatctctttaaaagataattatttgtagcaaaacagacaagtaga

SEQ ID NO: 743987 - DNA, 597 bp, Homo sapiens
ccagagatccaaaaaagtcaacagacccaaagtagaagcggtatacagaaagctccataaaaggaaatcagtttcaaattgttgaaaaccagtggaagagaaaagtagccaaaggaacaaagattttttaaaaagtaacaattttctcatgagaagttatgcagaccagaaaacaatcaaatggtatctttaaagtgctaaaagaaaaaatattcaaccagtaattatctaccagtgaaaatgtctttcaaaaatgaagtcatgtccaatcctggaagctaagcatggttgggcctagttagyacttggatgagagtactgttgagtgatgtaggtttattaaaaactaaatttaaaaattttaaaatgaagtttaaaatgattttcagatcaatgaaagctgacaaaattcattgcaagtaaatgtgcactataagaaagctctctaggcagaagaaaaattatgaaaatgtggatctgtgcaaaggaatgaagagtacctggaatgggaaatctttgagaaagaaacattaaatttattcctcatattttaatctctttaaaagataattatttgtagcaaaacagacaagtaga

SEQ ID NO: 743988 - DNA, 512 bp, Homo sapiens
ctactggtgtcaatttacaaacaatactgcattgaaaaacgttgtacaaactcatttccttcatacataagcatatttacaggatatattccaagaagtgaaactgctaggtcaaaagaaaagacaattttgattgctgttgcycaattgccctccagatcagtcagctttcaatgcaggaaacagaagccattatagatattttaaacaggaaggcactttttaaatggaatttggtgcttataaagttactggaagggttgaaggagcagggtttaggaatctaagttgagcctatgggaatgaatcccacagtgacacaaacatgattcactgggggaactacaacctctggtcaccatggagccctgctgggaaccagaggccagccactacaacctttcactcctgggaagctggagaaagaagatgtaacaccacaatctaggggttggaatgtcagattaagaagctgctgccaccaccacagcctatccatattcaggaagctg

SEQ ID NO: 743989 - DNA, 577 bp, Homo sapiens
catgtgtttgatagacatttgggttatttccactttgactgttacaaataaagctgctcttaggccaggggccgtggctcacacctgtaatcccagcactttgggaggccgaggtgggtggatcacctgaggccaggagttcaagaccagcctgaccaacatggagaaaccctgtctctactaaaaatacaaaastagctgggcatggtggtgcatgcctgtaatcccagctactcgggaggctgagacaggagaatcgcttgaattcaggaggcagaggttgcggtgagccaagatcttgccactgcacgccagcctgggcaacaagagcgaaactctgtctcgaaaaaataataaaacaaacaaataaataaaataaattaaagctgctctgagcattggtatatgtgttttatgaaaatatgctttcatttttcttgattggatacctgggaatggggtggctggatcatatatattagttgtgtgtgtagcattttaacacactgccaaattgttttccaaagtaggtgtagtgttttatatttccactggcagtgtatgaaagttccagttg

SEQ ID NO: 743990 - DNA, 610 bp, Homo sapiens
actgattttggctactagattattttttaaaatcctcgtgtctcagtatactttgttaatttttaatttttaagataaaaaattagttcctttttgtttttcttatttaataataaatttatttaatggcgaacatttcactctggattcagctttcaaatgtcctgtaagttttggtatgcagtcttcttttcactgcatccaaartagcttataacttcctttggttttcccctaatttttattatgttattatctgagaaggtagttactagtatctctactttttaaaatttgttattttttaaaaaaatgttcttcgtgagaaaatacatggtatatgtaaatgttctaaggacatacaaaaaaaagagagaatattgtctgttagagtaataaaagattctaaatgtagctattaaagcaaggtaatttattgtgtagttgccctagaattgatcaattctaacagaaatatatttatgtcttccactaaatacttctctatattacgcatttctaatgtttttgctttacataatttaccagcatgatgtttggtgtatagaatttaaaaattctacctttttcaggccaggtatggtggctt

SEQ ID NO: 743991 - DNA, 610 bp, Homo sapiens
actgattttggctactagattattttttaaaatcctcgtgtctcagtatactttgttaatttttaatttttaagataaaaaattagttcctttttgtttttcttatttaataataaatttatttaatggcgaacatttcactctggattcagctttcaaatgtcctgtaagttttggtatgcagtcttcttttcactgcatccaaagtagcttataacttcctttggttttcccctaatttttattrtgttattatctgagaaggtagttactagtatctctactttttaaaatttgttattttttaaaaaaatgttcttcgtgagaaaatacatggtatatgtaaatgttctaaggacatacaaaaaaaagagagaatattgtctgttagagtaataaaagattctaaatgtagctattaaagcaaggtaatttattgtgtagttgccctagaattgatcaattctaacagaaatatatttatgtcttccactaaatacttctctatattacgcatttctaatgtttttgctttacataatttaccagcatgatgtttggtgtatagaatttaaaaattctacctttttcaggccaggtatggtggctt

SEQ ID NO: 743992 - DNA, 529 bp, Homo sapiens
ataaagaaatacgtgaggttaagaaagataacacagaaaccaaaggagaaaaaagaaaaaaaaaatatgaagaatagttatgacccaccaataattatctggcaattctggagcagaggttcctatctagctgtttcattaaagtaggatgaaaagctgaagtatagctctccaattatcaggctttagaacgtttttttaaaataaagctcratttcatctctaactagtttttgtgtcttttacgagatggaggtctcagtgttacctaggctggatttgaaatcctggcctcaagtgatcctcctgcctcactctcccaagtagctggccctacaaatgcatgcctctgtgcccagctactctagtttttaaaacatatttcactgtaatgagaaaagcttatttcctatctacttctacaacagtaagaatggaaaagctttcttcactctgtctgaaagagccaggaggtcaaaaacaaagtaccgtgatacccatgattcttgctaccttcccccacccccac

SEQ ID NO: 743993 - DNA, 593 bp, Homo sapiens
gaaaaatgccttttagaattattaaggaagaaaaatattttagacttggctttgagtggtgggcaggacctggaagaaaaagtatctctgagtgatcacaacactgtgaccattctgggctgggagagaacatttatatatcatgtggttactcaattttataaaaggaacctaagaacaagtgtagkcactggttaggaaaaacaaatgaaaggaataatttaaaaagtcaataagccacaggaaatctggagactgtttaaaaacaccttactggaagcctagcaaaagtatgtgccagagatcaaagggacacttggaaatgtggcccaagtaaggaaaccagggagatccgcaaactatggcaggtcaggtgtgaacaagaatgcaggcaagccaaaagagaattcaagagtaccttgcaagtgactccaaagctaataaaaatgttcttcaaaatatatccatggcaggaaaccaaatagagaactaatgggccgatcaagtgacccactctgggcagaagagatattcttcttggaagacagaaactcttctgacttgactaaaaatgattcatttattcatttgtt

SEQ ID NO: 743994 - DNA, 628 bp, Homo sapiens
atattactatgagcatctacacaggttacttttcaagttgaaaagaaaactgagatgttgggaaacaagcccagtatactctaggcaagggcttcctatcaactgaaccacagaccagtaacatatctaaattttctactgtaatatagcaaaatcatgtaggcctattatacatgcataaaatgtgtataaaagatatatataaaatatgcacatatggwtataaaatatagggataatagttcagtaataacaacaacaaaaatcttttcagtcagtgcacattgaactggcctctgcggggactggctttctgtgccctggcagagttaggagatgtcaaacccagagccttgccagcatgcattgcatccttcagggtagtcctgtggcctttggttggtcttgggagcctagtacagagttttattatgagagctctagggactcaatgagaggaaaaccacctgttgatcttttatttttccccctgaaagtggatggctacatggaagctggtggtgctggtagctaaggtgatgattagagtccagcaggcagcggggagaaatggaatctctagattccatttgaatgccacctgggctaagtagataatgcagaagag

SEQ ID NO: 743995 - DNA, 645 bp, Homo sapiens
ctttataaaatcaatgtttgtgttgattttaagaatttaaaattaacaggggcaactcattgttcaggttcttggtggcaccttcctgctgtcctcagtcctacccagacttacaagctaatttggtatcatggattgtcagtaacagctttawggttttagggaatgctgaatgcaaatctgcctgtaaccaggtaaaacacagggtagctttggccattgtgtaagtcattttgctaggattagaactcacacctacagacttcctgccccactctgctggtgctgtgaaggcctgactaaacactaccctactactgtgggggcaggtgcctaggctctggcctgatcttcactgttccctcctcaatctggatactcagtgtggtcgcagaataacagccccctaaagacctccacatcttaatatgaaccttacatggcaaaaggatcttgcagatgtcattagattaatcatgtcttgagatggggagatgattgtggattatttggacccaatgtaatctcaagcatccttataagggaaagaaggagttagaagaatgaaagaatgatatgtgagggtggatatagaggtcagaggtttgaagatgctattctgctggctctgaagatggaagaagg

SEQ ID NO: 743996 - DNA, 597 bp, Homo sapiens
atcacacatataatgcagaatcatagagtacagacctgaaggaatgaagcgttgactaggaatactgtgccccaaatcaaatgacatctcatcatctggaaagacccccagagttttcttcaggtgaacttccccccggcctggcacctccagccaggtacatgtgctcagatggagcccagcacctccactccagtctagactcgggactcagccaggcccgatcagagcgccagagacacttggcctcagtgactgaaggaggcatggcacgtgacccagtcagagcacygaggtgaggtgcaacccaaggtggacaggactattaagagagagacatgcgctcttttttacccctctactctccctgaacctggaagaaaatgggtttgggattgcagcttgccatttgccatcacaggaacctgggagagtaaagccacacgaaggacagtgaagctgagaactggcaagatattgtgtccttatgacactttttggaggcccaggatccagctgtgtgtctgaattttcaggttatgttagccaatagatcccatttttcttagatttaagttttctttcacttgtaatcaa

SEQ ID NO: 743997 - DNA, 573 bp, Homo sapiens
aagacatttctttttgtcgaagtgtccagtacttgagttcttctttatctgcaaacatattaagacataaaagacaactaacatggcctaaagcatagcaaataagtaaaacactacacctatgccctaatttcttaaaagtaaagcaagaactcgtaacgggagatttccaggtttaaatataacacgccttttaattttcartgaaattctagacagaagagttaaatatgtgatttgtgagcacttagaaaggaaagcaatgatcactaagagacaacatatgttcattaagaaaaggtcatgcaaaataaatttttttttccctcggtgtggaacatcaaagacataatataattcaattacaacaaagcatttgaaaaaactgatcgtactggctttgtgactaaaatgaagaaatatagctgaattattagctgagcactgcttccacccttcattctttcttttgttcagtcattcattcagtattaatcatgtgtccaacactgtactaaaaaaaagcaccctattaaaaattaatgaacatgttaatgtcaatttagaccaaaa

SEQ ID NO: 743998 - DNA, 612 bp, Homo sapiens
ccatatctttgcaattgtgacttgtgctgctaaaaatatgtgtacaagtgtctttctcatataatgacttctttgcctcttggtagagatgcaggagtggtatctaccaagaggaaaatatttacttttagttctttaaggaatctccactgttttccataatggttgtactagtttccattccctccagcagtgtaaaagtgytctgttttcaccacatctatgccaacatctgttattttttgattttttgattatggccattcttgcaggagtaagttggtattgcattgtggttttgatttgcatttccctgattattagtgatgttgagcattttttcatatgtttgttgaccatttgtatatctttttttgagaattgtctattcatgtccttagcctactttttgatggtattatttgtctttttcttcctgatttgtttgagttccttgtagattgtagatattagtcctttgtcagatacatagtttgtgaagattctctcccactctgtgagttgtctgtttactccactgattatttcttttgctatgcagaagctttttagtttaattaagtcccatctctttatctttgtttttgttac

SEQ ID NO: 743999 - DNA, 617 bp, Homo sapiens
gaggttgtgatgagccaagatcatgccattgcactccagcctaggcaatagggtgagactccgtctcaaaataaaataaaaaaaaatacaaaaattcaaaataaataaataaataaataatgtttatggaatttgaaccatcctatatatcagatggtccccctaccatttcttggcaaaattactaactattcttaattaaaggctctgctcaccttggtgcttgctacacagagaaaaatctccactgcaaccaatgcctgcagtcttgaagttcctccttagtgactttggattttaggggaggggaaactcctatttaaactatacttggttttctctggcccaagtattttagtacatgggacttacatgtcctgatgatagttccaagggcttcttgtgcttcagtttcagctgctgcagagtaagaccacctgtatgtctgagaaacamcatcctcaaatgaggtttgtttatgccatagaagcttatgtcttaattgaggccatcctgaatgtggtctcaaaattttgcgaatatctataaatatctgttttttatgatgcagaaacacacgtataaactttttgtttatttgtagttcattttcctgt

SEQ ID NO: 744000 - DNA, 638 bp, Homo sapiens
ggacctccttttgaaatgcctgttttaaaacatcaaatggtatgaaatcctttaacctcatgcagttacatttattatgaaatatttcaaacatactgcaaaggtataacgaatactttggaataatctggtttttgaggtaggagttagaaaatgttccatgggtaactcatttgtgcattttagaactacttgaaactctgtaccttcaaataaaaagtagagtggggtggaagkagggagagcattaggaaaaatggctaatgcatactggacttaatacctaggtgatgggttgatacgtgtagcaaaccaccatggcacatgttcacctatgtaacaaacctgcacatcctgcacatgtaccccggaacttaaaaaaaaaaaagaaagattttgtgaggtggaaaaaaaaagtagagtgatacgtatgccaaattttgaattactaattttaaagtaattttgttcttcataatctgattttggaaaacaaaaaacgactccctttctgccttctagtgtgctaaaacatgagctgctccgtgtgtactattgatctgtacacactgagattttaaattaaaattaatttataaattgtcacaacttctttatagtgcttgttgcatataatt

SEQ ID NO: 744001 - DNA, 566 bp, Homo sapiens
aaaccagttacttgtgaggctattacagaagtccaggcaagaaatggtgaacacccagaccagggttagcacaggagataaagatatttgggatgtagaattaacaaaaatttgtggaaggtaaaagaattatgaaaataaaggctgatttccaactttctggatcaagcaaccagataaatgatggttcattcattacaacgagaaagacctgaatgggtgtagytgagttcagttttgaagatgataactttgagatgactatatgttaaaacaaaaaaaaagtcttcaagtctggagttcggaagagagagcctgtacttcagataaaaatttggaagtaataagtatacatattcacactagtgaaaaatgataaattcacctgagatagaaaagaaaaagactgagttcctgtaaacaacacttggaaatcaagaagaagaaaaggagacagaatggtcacgctggtagaaaaaccagattcagtactatgttatataaactgaaaaagagggtgtttccagaagaatagtgtggtcggttgagttaaatgctgctcagag

SEQ ID NO: 744002 - DNA, 581 bp, Homo sapiens
gctggagcctgggcttagggagccccactgcagggctgcctggggcatggcgaggtgaggttgcgaggcagggttttccggccagaccttcacgatggccagttgcctgctatagtaaatccctgtcccttcccaaggccrccaaggctttcttggggaaagtatccatcatagtctatgaaaaggctgccaggtcttaccttaagagaaataatttaaaaattcctctgtagttatatctccagacagtatcctggcttagcatcagatgcaaataaatcactgtgatccattcctagatgggtaaagcttggtgtatatgtgtgtgtgtgtgtgtgtgtgtgtgtgtgtgtgtgtgtatataaataaatatataaatatgtgtgtgtgtaaaaacactttcatctttgaactgctgtcttccaatgttaacattgagaaatacagtcgtatcgcatggttcttttgaagccaagtaatgtcacagtcagtatcctttttatcagtagaaaaaatgcgaacacccaacatcggctgcatgctcaccaaggtgtctcagcaagcaataaatgatgtgccgc

SEQ ID NO: 744003 - DNA, 613 bp, Homo sapiens
ctttacagctataaggaaatggcttctctagctctcaaaatgctcagtgaatttcctgcaaagttactaagaaagttaccctctttgaattgaaatacatatggaacaaattttatatttatgagagagtatcaattgttggaactacagaggatgctgcatgtgaagtaacttcaaatgtaattacggggccgggcgcagtggctcatgcctgtaatcccagcactaaggccggtggatcacttgaggtcgggagctcaaaaccagcctggcgaacatagtgaaaccccgtctctactaaaaatacaaaaaattagtggggcatggtggtgcatgcctgtaatcccatctatttgggaggctgaggcaggagaatcgcttgaacccgggaggcgaaggctgcagggggccgagatcgtgacactgcactccagcctgggtgacagagcaraactctgtcttcaaaaaaaaaaaaaaaaaaaagtaattatgaatggattcttataaactgggaacaaaggtagaataattccatataaattaaggcttaaacccatcttctcttcttagtctgattctttattttcatgccagaacaaagaaaaatgctcaa

SEQ ID NO: 744004 - DNA, 629 bp, Homo sapiens
tcactcttttttccccattagccactagctaacttggaagtgtgtagtaataaggccagatgactaaatggaaagcaaaagttatcttttaagcatgagcaaaattatgaacaatctatagagtgattaaagttgtgattcagtaataacaatttaaagaaatttatcaatagcaaatgtaaaaataatttaaatcaagaattagtttcaatcaagaaaatttcagattttattttattattcatttatatttgttatatctrtggatctgttttatttatgttcatgaggacctgtttggtctgaaagtaatttaagatagcttacaaagaagcatattatatatagtaaaatgatattaaatttaaattaataggaaaagttagataaatggaaaacaaaggtagaaaagaaggagatggtgttttgaatatgaaattgtatcttgaatcccccatgcttgctacaagtggtaatgagagtggtaatataattcaagaagatgattgtgtaaaacaaactggttgcttaggcagaggacatccattattgatactgtgataagagtaatttctgccatgttgctcagtttcagtattcaccagaatcttaagcattaaacttgaata

SEQ ID NO: 744005 - DNA, 603 bp, Homo sapiens
tttacttcttttccctctactttttattgcttcttgttccagatatcctttttcccattctatttctttgtgctctactcgatcattgtcataaccataatacctaggtgaatactgaatccacaagggcagcgtgggtccctaccagttccaaaggtgacactcctttggtacagtattttatatacactaagtatggactaaatatatataaagaactgtcccatgtcctacagttcttttaaaaagcgkttcttttctaacatatgctggatttgtatttagaaattctagtcctggttttcaacacttacaaattgtatgccctttggcacattactttaccacagggagcctcaatttccttacttataaaatgagagttgttttggatttctaaagaccctttcagttttatgatgctgttacttactcacacctccttgtgaatggtaggtaggaagatttaaatcttattccttacatgggtatttgcttgtccaaataaatctatgtctggtggaaatttatgaaatatatttagggacaagaaacctcctttggtacaagaaacacttcttggcctgtgaagccaaggtaagc

SEQ ID NO: 744006 - DNA, 567 bp, Homo sapiens
atctaagccctgattgcaggctgactggatataaactcaatatggttgctggggcatggcaggattgagactgaccttgccggttatgagggagctgggtaaggcctgtcactgctggctttcccccacttccctggtgacctgtatgatgcagcagaggcagccataatccccctgggaacaaaactccattggcctgggaaccacctcccaccccccacagtggtggcagcaagccccgtccaagaaaagcctaagctcagacctgcctaacagtgcccacacctgatggtttttctctactcactctggtagctgaagacaaaaggcataagctcttgagagctctatggccctacccatcacctgagaaacctaagtacccatcctgccaaaygtagggcaagattatatacccctcctactacctcagctggtgctctcttgaaaacaccacctcctggctggaggcaaaccaactcaagccattacagcaactcataacagaacaactgttaccagggggtccttgttcttagagctcccaagatggtggcgggcagcttc

SEQ ID NO: 744007 - DNA, 548 bp, Homo sapiens
tgctcctgtgatccctggaccacttagggctcctttctaagacagtaaatgggaaccctaatggacctatatctggtgcttttattacctgagagtggaactaaccaaccactctgccctctaagcctacatttaaggcaaatcttacaagctactcttcccagcttcaagctggatttgagtcaagatacaactcagactgaaaaatcagtgctccctaaactyaggcagttagcaactctgagactgtccagactgagaggcactttagttagcttgctaagcttctgcccacgtatttcctcaccctctgaactagaccaataccttgtgggcaggaccttggttcaattcatctttataccctcaccatcagacagtggcataaaaaaaaatctccgtttaatgaatgggtctatagaatcaaagcaatgagtgccaaataagtggtttagacaatagttaggaatgggcccaaagttaacgatatagaataaaaagcaaatgatgtagaatacggacaaaatcaagtacagttgtgtagatct

SEQ ID NO: 744008 - DNA, 548 bp, Homo sapiens
tgctcctgtgatccctggaccacttagggctcctttctaagacagtaaatgggaaccctaatggacctatatctggtgcttttattacctgagagtggaactaaccaaccactctgccctctaagcctacatttaaggcaaatcttacaagctactcttcccagcttcaagctggatttgagtcaagatacaactcagactgaaaaatcagtgctccctaaactcaggcagttagcaastctgagactgtccagactgagaggcactttagttagcttgctaagcttctgcccacgtatttcctcaccctctgaactagaccaataccttgtgggcaggaccttggttcaattcatctttataccctcaccatcagacagtggcataaaaaaaaatctccgtttaatgaatgggtctatagaatcaaagcaatgagtgccaaataagtggtttagacaatagttaggaatgggcccaaagttaacgatatagaataaaaagcaaatgatgtagaatacggacaaaatcaagtacagttgtgtagatct

SEQ ID NO: 744009 - DNA, 530 bp, Homo sapiens
ctagatttatatttttccatcaagtatatgcttatttgtattcatcacagtagtcctgtttttctcattagtgtcaccccccctccccttaaaaaaaaagaaaaaaaaaagagacagggtctacgcagcagtatgatcatagctcatcacagcctctaactcctggtgtcaagggatcctcccatctcagcctcccaagtagctgggactacaggttcactagtgtcttgataggaaagattatttccttattcacagaggatacgtagtaagtactggccagtgaagaggcacactttaggaggaaagagaaaacacggaacattccaatgagaaatagctggtatctgcyaaactgctgagcaggctctaaatcaacatacagcaagataccacaactgtggagctgacaatgggtatcgagtagacaaagattcaggtcatacttctagatatggggagcacctaaggagaaatcagccttacactgcgtgaaatggctgtccctttagttcctctctagcacaagc

SEQ ID NO: 744010 - DNA, 618 bp, Homo sapiens
caattacagtgatgagcgaggcataaacaaggcgctttacctgccgcagccaaccctcccctgcacacacgtgcgcatgcacacacacgggaacacacacacacacacatacacacgcacacatgctggagtcagcccatttgcagggtaatggctttgcgacagcagaaattatctgcagcattagaggcagcctggccaggcagggcaagctgggggyggggcctcaggatgaacctgggggatactaagagaggaagcaggtgcccgcaggctagggtctgggcccctggaaacactgcagggctggggggagtgggtgcaggctgcaaagggcttggtgagggccagaccaagtggagggtccctgcccacccctgcccacagctctttccctttcgacttccaaggcctgtaagtgggcagataactgggagcagcggtgtctcaggacctgaaatcatagctgagcagccacttgctcctgtcctggcctgaaagccacgtccttttccctagccccagggaggccacacttggtggcctagagagaggggcatggggtgattaaggaatgaaagggagcccccgaaaggaggatgcgtgttgcgggggtgg

SEQ ID NO: 744011 - DNA, 609 bp, Homo sapiens
gctaataccagggcctccctcagaaggttgttgaggggctcagctcaggccacccagccaaagcagctgctagggtgctgggcacacagggggctgtcccagatgacaaaggtgtgctcagcatctatgacatgcccatgctgcactgagaactggggcacagtccctgccctcatggagctaatagcctggtggtagacaaatggtaaaraagtaataatagtaaggactggccgggtgtggtggctcacgcctgtaattccagcactttgggaggctgaggcgggtggatcacgaggtcaggagatcgagaccatcctggctaacatggcgaaaccccatttctactaaaaatacaaaacatttagccaggctactcgggaggctgaggcaggagaatggcgtgaacccgggaggcggagcttgcagtgagtcaagattgcaccactgcactccagcctgggtgacagagcaagactctgtctcaaaaaaaaaaaaaaaccaccaaaaaaaaaagtaaggactacgtaagtcatctcaaatgcacacggcgctgtgtaggagaagccttgagtgctggggacaggggaaggggcttgcttacactct

SEQ ID NO: 744012 - DNA, 634 bp, Homo sapiens
aatatcagagaagatttctggaaaagaaaacatttaaaatgtgtcttaaaagagtgagttgtaagatggaaagaggagatggaggaaaagatgtcattttaggtatggagggcaatgtaagcaaagatatgagaatgggaggggaggctgttgggatctttttcaatcaatagctataggtagcacatgaaatttcaacatgttttcttgagcacyacctctgtgccaggcaatgttatgtggcactcgtgaattaaggctggataaaatgcaggcctaccctcaaggagcagggagagctaagacaagaaaagctatttgaggacagaccatggggagctttgaatctgacctccagactaagagatttgcacaatacttaaccatttaaactttcagtcagggacctctgttgcaatataattagaattatattttaggcagatgaatttcatagacaaatgaatataggaacatagagagaattcttacaagattatcataatggtccaggaaaaagatagtgcaagaatagaaaacagatttataagtgagaatttcagcaggagagatcatcagaattgggcatttgatttgtggacatgtatgtgttggcagtggtttatccttttga

SEQ ID NO: 744013 - DNA, 576 bp, Homo sapiens
aaatatgcttcttaaaattttggttaaatgtatttgcatttcaatgcttgtgtttactttatctctcataatgaaaataaacatatcttgaaatagtgtagtttagaaacagttatctactcagaagggggctaagggattattttaaagtggtatttatacaataggtttagtttttacttagaactatttatcatatttttctaataatttttcttttatttttacattttagctaagattgagaaaagatcagttgccaaaattaagaaacggtatgccattaagaaggaggctttagaaaagataatttcaaggagaatcaaaagttctcttatacttgactcaagttctctgtttattccactgtgcacatcctactcccaaccactggcctggttgactacagaacccatttgtaatatttggwgaaaggagaaataaattatgaataataaccaccatttattaagcatttgcttggtgctaggtactactctaaatctttgtataactactttatttaatgttcataagtacattataatcctttatttacaagaggaaactgagact

SEQ ID NO: 744014 - DNA, 595 bp, Homo sapiens
gctttcaggaactttcagggaagaccatttgattcagttcaaaagtcagaagcctctgccctaacaggtaaaaagcgtggttccatctcctttttaaaaataaagcaaataactacaatttagagtctaaaatcaagcattaatgatctgctccagtcattttttaaagaagcaagctatattaaaaattttgatacttaatgtgaaaattatatttttatttatattttactacatgctgttatcttctaataacaattcatgcctaatttatgtgctccccttytaactgctttctatttttttgcttattccaaaattcatccctaatgtatccatttttacctgtggttgtaattctgatgtcccttcttgcaagctattgaacagtataaattttattatcatttttaaaatttttttatgcgttgatattaaatgtttatatttgtaaagtacatgagatgttttgatacagcatgccatgtgaaataaacacatcatggagaatggggtatccatcccctcaagcatttatcaacagtctaactgtcatgcagttataaacttcttaggagaaggatctcttgtgtta

SEQ ID NO: 744015 - DNA, 542 bp, Homo sapiens
tcagtgggcctgtcatacttgtgattgactgcatagtggtaggaggtactcctgacaatttttgctttgcaattattccttaatataattcaccaccatgactgccatcactcactgattcaccaaatattgggtaaataattttgtttatattagtctttaatcttaaaagtatgtatagctcamatttatttcaatatttaatattagaggtgttctgtatctttatttagaaatttgattttttattttttgaccagaaatatgccataggaacttaactcttgattagcctagggtaaaactggttttgttatatgtggtttcacctaaagctggtttccaagaacccactgataacgttaaatgaggacttgttttacaagcattttaatcccaatacttctgtaactctgatagcccattcaaaaatataataataaaatatttgtcaaatctatcttctttcattttcagttaatattaaccattatttgctgggtggggaggggggtaggtaactagttacattgttgcatttc

SEQ ID NO: 744016 - DNA, 627 bp, Homo sapiens
ggaggcaattctcactgagcagacctaggtacctgtcgaactgcaggatgtgagtggcgtggtgatcaaacccctgctcccgggccaggaagacgtcagctaccttctgctggctctccctgcagccaggaatggggatgggacagtgagaactcagccttgtaaccaacgcagggttagaagcagggggcctggagtcayatccctgggtgcagatcccagctcaacccttgcacagttgttttactttgagcaaatgacttaacacttcggagttcggctttcccatcaatcaaatggagatactatttcatatggtggtgtttttatccgtctccattcccccagtgcaacaaaagtggaacccgggggtccagggactgctcaccaatttgacagcctttcctccagctcctccaggatgccttgatgaaggtcgtggatggctgggagttcactcaggccctgcctcagctcctcccgggccaatgtgtctctgccttcatggtccatgtcatccaaggccctcatgacagctccatggaaatcctgaaacaccaaaaggtctgttacccacaggttgataggactgagcacaagtcctccttggcagatttcccctggggc

SEQ ID NO: 744017 - DNA, 627 bp, Homo sapiens
ggaggcaattctcactgagcagacctaggtacctgtcgaactgcaggatgtgagtggcgtggtgatcaaacccctgctcccgggccaggaagacgtcagctaccttctgctggctctccctgcagccaggaatggggatgggacagtgagaactcagccttgtaaccaacgcagggttagaagcagggggcctggagtcacatccctgggtgcagatcccagctcaacccttgcacagttgttttactttgagcaaatgacttaacacttcggagttcggctttcccatcaatcaaatggagatactatttcatatggtggtgtttttatccgtctccattcccccagtgcaacaaaagtggaaccygggggtccagggactgctcaccaatttgacagcctttcctccagctcctccaggatgccttgatgaaggtcgtggatggctgggagttcactcaggccctgcctcagctcctcccgggccaatgtgtctctgccttcatggtccatgtcatccaaggccctcatgacagctccatggaaatcctgaaacaccaaaaggtctgttacccacaggttgataggactgagcacaagtcctccttggcagatttcccctggggc

SEQ ID NO: 744018 - DNA, 642 bp, Homo sapiens
ccataaagagctccacaaacatgagacattgctattgccatatttaagccatgggctctagaaacccctgaagttatatataaaattttatgagtgtgtacattttttggggggagaaaagtttttatcaaattccccaaaaggttaagaaacactgaaaagaaaaaaagtcctttgacccagaaggatactttgacccagaaggataccaaaataaaaacagcacatccttatctgttgttctgaaccttcccatgctcacacctctgccttgtgcgccatcctccctccacctgcccgtacctcgcagacagcatcaggcaggactcggaagtctcaatctttagagcgtagggcactttctccatcacagggcggctgacctggaaaaccaacagcagcctccttcagggtggggcagggaggggcaagtgtagacmggcttctcctggcagcagatgaacagagggaccatgtccacctactgccgttctctagcctcagggcatacctttctgtgatggtaggtgctgtggaaggtgcctggctgccagctccatcattcttggccactcacccaccgctgggaaggctgcagagcgtcatgctcagggcccagcccgggcaaccccaggtgcactg

SEQ ID NO: 744019 - DNA, 642 bp, Homo sapiens
ccataaagagctccacaaacatgagacattgctattgccatatttaagccatgggctctagaaacccctgaagttatatataaaattttatgagtgtgtacattttttggggggagaaaagtttttatcaaattccccaaaaggttaagaaacactgaaaagaaaaaaagtcctttgacccagaaggatactttgacccagaaggataccaaaataaaaacagcacatccttatctgttgttctgaaccttcccatgctcacacctctgccttgtgcgccatcctccctccacctgcccgtacctcgcagacagcatcaggcaggactcggaagtctcaatctttagagcgtagggcactttctccatcacagggcggctgacctggaaaaccaacagcagcctccttcagggtggggcagggaggggcaagtgtagaccggcttctcctggcagcagatgaacagagggaccrtgtccacctactgccgttctctagcctcagggcatacctttctgtgatggtaggtgctgtggaaggtgcctggctgccagctccatcattcttggccactcacccaccgctgggaaggctgcagagcgtcatgctcagggcccagcccgggcaaccccaggtgcactg

SEQ ID NO: 744020 - DNA, 485 bp, Homo sapiens
taatttgtgaacagaaacaatttcactttttcttttccaatttaaatgcctcttgtttaattgcctacttgctgtggttagaactttgagtaagtagggaaggtgggcatccttgccttgttcctatcttagagtaaaagctttccatctttcactattgagtatgatgttctctgtgggtttttgatatatgggttttattatgttgagatactttccttttatttatagattrttgagtgtttttatcatgaaaaggtattgaattttgtcaaatttttttctgagtcaattgatataagcttgtgtttttgtccttcattctgttattgtgatgtattacattgatcaattttgctatgttgaaccatctttgcattccaggaataaactgcacttaattgtgataaattattcttttaatatgctactaaattcagtttgctattattttattaaaaatcttcacatccatgttcataagg

SEQ ID NO: 744021 - DNA, 485 bp, Homo sapiens
taatttgtgaacagaaacaatttcactttttcttttccaatttaaatgcctcttgtttaattgcctacttgctgtggttagaactttgagtaagtagggaaggtgggcatccttgccttgttcctatcttagagtaaaagctttccatctttcactattgagtatgatgttctctgtgggtttttgatatatgggttttattatgttgagatactttccttttatttatagattgttgagtgtttttatcatgaaaaggtattgaattttgtcaaatttttttctgagtcaattgatataagcytgtgtttttgtccttcattctgttattgtgatgtattacattgatcaattttgctatgttgaaccatctttgcattccaggaataaactgcacttaattgtgataaattattcttttaatatgctactaaattcagtttgctattattttattaaaaatcttcacatccatgttcataagg

SEQ ID NO: 744022 - DNA, 565 bp, Homo sapiens
taaaaactgcagaaccatgagccaaataaaccacttttctttataaattacccagccccagatattattcatttatagcaacacaaaatggactaagacggaggttttgctggtatatgtattaaaaaatatcttctccctttctgtggcttgtcttttcactttcctaatggtaaaacactactaatttgccacgtggaatgacattggcatcctcaccacatatgcatgtcagtcaccacatcctaaaagtgtgtggtgagaaaccaggagctggatggtgtgcttaaatgtgatgcaatcatttgaatttttgtttttgagatattgctgtgcattatagttttatatatgcatgattaaatgaacagaattatttattrtccagattttactaaactagtcttcacaaaatgggcaagtgacttcaaaatatttttgcaaagtaaacctaaatttaagataatcttaatagaacaggcacttggatactgtaagaaaatggttgccctgatagctcttttccaaataagagctattcctcagttaagtaaagaaaacgaca

SEQ ID NO: 744023 - DNA, 638 bp, Homo sapiens
tggtgttttcttccatgtttctagataacatacatcaccatttattgatattatccattgaattactgctatgatatagatatagaattatttttggttagatcgatattcagtattatgaattcacattattaggatcatgcaaatataactcacggatgaggcatataggattctatggtaagttttgctttttccttaaaaaggttttgtcctttctggacattatacgtgtcttctctgatacctgcttctttttctatgtactcatcmctaattgttccccaaaatctttatcagaagtgttagtattctcttaatacatccactacatcgggaatcccatcagcttctccttttggaagatgcccctactggagcactcttccgctctgatctgaggcttttgctctccaggcctgctgcccagtggttgccgtaaaatttcccctgggccaccattctggggttcctcccactattctcctgggttgggttccctgtttcctggatactgtgtagtcctttcttggtctcctctcttgttttggcaggacatatcgcttcagtagcttctacagaaattacatacatgaaactttaaggttgtactctttgaaaagtatcctgtttgaggt

SEQ ID NO: 744024 - DNA, 621 bp, Homo sapiens
gtttaaggagccggtctaacaaatgtggctcaaggggatgaagtgacttgcccaaggttcccactgatgaggctccagcagagctggggatggtactttggttaaggacattgcctctctaatatgtccccatggcagtgttggacctcttcccagaggggtcttgttctcaggaccttgccaaggtataaaccagctggacaacagcggggcattaaaaaggcaaatgttccttgtgtctctagcgctggcacaaatatatagtgagggacagggatgaggctccaaatgaagtcaccaaacccttgcagccatyatcccagaccttcaaacagcaggatggatccaaaggctacatattcatcttgactatggcaccatcagaaaacagatgagaaacaaacacaatgtttttaccagaagaacaggttctttgtggattatttagaattgtggtctaactggaagtgtcagttttacttgcaagttgctatatcttgtaatcatttcttggtcctttaatgtatttttaatcaagaatctatgataaggagggcactgctcattgcagggctgtttccagctgtggcacagcactggaaacagcatggagcaagtagc

SEQ ID NO: 744025 - DNA, 642 bp, Homo sapiens
gtgatatgccatcatcaccattccctgtcctccatgatgtctgcttgtcacagtgccccccagcgtggtggcctgggggcacttggggcaggcgctggcactgcaggaacctgactgttctctgccacccccgtgccctgtgcgagcctccctgtaagcaggagggctgatgagcacatcaagaagctgcctcattgaagccaaagtgctacatctgtttatggtaattaaataaatgccagttggacccttctcagcgtgcttactgaagcaartgccagaaacgcgctgctctccaagaatcggagagaaattagaaacagaaaggcgagctcccaggcacttaccacccactccttgaaaagacttggccaaggaggtttatgcagaatcaagaggctaagctttcatttgcagttctggcttgcttccttgtgtggtcttgagcaagtcacttaaccttggctacttcatctgtcagatgagaagatgacacttgccctttacctccctccaaggtgaccttggtgtgcagagatgagtctttacaattgaactgatttacaggctgcctcttttcaaaaaagtttgaggcaatttacaccaaatggggggtgatgtggtgaatacaatagacataaa

SEQ ID NO: 744026 - DNA, 593 bp, Homo sapiens
tttttacacacatatatatatataaaatcacatatccatagagccaccacccatccagaccacgagttatatttccagccctcaggggctccctcgggtcccaccaagtcaatatgtccacacacaaagataaccactgttcaagcctctgtcactatagatcaattttatatgtttttgaacttcaaacaaaattcttaaacatgtactcttctgtgtctagcttttttaaaaattcaacatgtttttgagatctatccatgttgttgggtatagcagtagctcattctttttttatagttgcatgatattccattatgtagatatatcacaatttactcattagaagaacatttaggtgatttttagattttggctattatgaattagtgctgctgtaaacattcgtgtgcaggttttctgatcacataatgctcatatytgtcaggtattgattataactgtgaagaggctcagatcttaccccactactaacaagctcaaaaggtgacctgccacagtttcatggatgctggtagaagacacgagactcctgggtcagagatgaaggggtgcaaagtgtcagcttgtgc

SEQ ID NO: 744027 - DNA, 618 bp, Homo sapiens
aagatatacactattgttttttgtaaatttcttaatatttggttttttaaatccccactaaattataacctccttgcagtcaagaactctgacttagtcatctcagcacttcccacaatgctttgcgtgtagtaggccatcaataaatcttagttgaattaaattatttacttaagttatagtttctctgtcatggttacattargaacttgacagtaatcctacaaaaatatgtaaccatgtcttagtaattataattagaacaattaaatttatattttccaagatttagaatttaggaatatggctgtggagatctcttaagtttaaattttgtagaatcagcttacactttggttctgatcatagaatgcaaggagggtagctttattcttttttaaaatgtgtgcacctggaagcatgaagcagaaatttaccacgttccgtagaagagcttttgtttaatactagaaattataatgccataagcaaataatttcttggctatagagtagattaggcatggaccaccaaagcactttggtactaaagatggagatggggtggtgtatgtactatcagtggtattaatttgcaagtagggaaaagatacagaca

SEQ ID NO: 744028 - DNA, 678 bp, Homo sapiens
acctttagatagttggttgtctctatctggacttcagatgagcggtctgggagttatcaggtagagatggtaccaaaagctatgagagtggatgaggtgacccaaagagagagtacggagctctgtgaagtatgtttgagtcgcattaaagtggagcagtcagggagaggaagagaagtggctggtcaagtaagaagaaagtcatcagagagtatggtgttctagaagcctgcttaagaaagactttgcagaaaaatggagggactcactctattatatgctgctagtagatcaggtataagaaaaacttaaaattgaccactggatttagcagatggaggtcctgagtaatcccgataagaaaattttcattctcactcagttgagttcccattgastgagaatgggagaagtctgagagaaatgagctcaagaagagaatatagagatggtgacagcccttttgagaaggttttctgtaacaaggactggaaagcaggttactagatgaaagtcagatgaagaaattttgaacatgaaataatttgcagcatgtttgtatgctaaagtgaatgatccagtaaagatgggaaaatggataactcagtagagtaaataattaatttgctagagtgacaatcttgagtagactagaggaaagtggatttagagcaaatg

SEQ ID NO: 744029 - DNA, 639 bp, Homo sapiens
tttaaacttggtatttcctcttctcagaatgcccattcctttccctttattcattagttgaataccttgcaatcctttagactcagctaaaatatcagcccctctggaagacctaaaatacaaagtttatattaataattttagctaataactttttaagttgttttcatgtactatggtaccttgctaagttctttatttacatttcctcattaagctgtatatcatcaccctctatgcctagctattgttgatgtccccattttataaaggaggtagataccaaggcttagagtagttagtttgttggccaagttcataggayggtaatggtggacaaaaggttcaaacctagatctactagaccctctcaaaacgggaatctaagagcccagactctagggtcctccctggattggcagctgaagctaacccatccttcccgcacagacattataatgaagcagcatcctctctgctccatgtccaggcagatctctaggcatttagtgtgaccacttgcttgaatcagcagcctgagctggcccatccttcctttgcatactgtggtaaagtgccgccttccctgccccaagttcaggtgtatttacctgtataaaaataattcaaagcacacat

SEQ ID NO: 744030 - DNA, 611 bp, Homo sapiens
aaaatatatatgggaataattcaagaaaattctcctaatcctgccagagaggtacaaatctagatagaagaaatccagagaacacctgccagatacaatagaaaatgaacatcaccaaggcatatagtcttcagattctccaagatcaatgctacagaaaaaaatcttaaaggaagctggagaataaaattwaaaaaaattaaaaaatgaaaaggaagctggagataaggtcagatcatgtacaaaaggaactccatcaacctaacagcagatttctcaacagagatgttacaagacaggagacattagagggctattttcagcattttaaagaagagaaattcaaaccaagaattttatattccccaaactaaggctcataagtgaaggagaaataacatttttccagacaagcaagcactaagggaatttgttaccactagacctcccttacaagagatctctaagggtgctctgaatgtggaaatgaaaggacaatatctagaatcacaaaaacacatttgagtacatagcccacagaccctataaaacacccacacaatagaaacaatgaagtaatcagctaagaatttcataataggatcaaaacc

SEQ ID NO: 744031 - DNA, 627 bp, Homo sapiens
aacacatttgagtacatagcccacagaccctataaaacacccacacaatagaaacaatgaagtaatcagctaagaatttcataataggatcaaaacctaacatatcaatattaaccttgaatgtcaatggtctaaacactccacttaaaaggcatagagtagcaaatggtatgaaaatttaagacaaatccatctgctatattccagagactcaactcacacataacaacacccacaggmtcaaagtaaaggattggagaaaggtctgccacacaaatggaaaacaaaaaaaagtaggagttgttattcttgtagcagataaaatagactttaaatcaacaacagtagaaaagaacaaagaagggcattatataatgataaaaggttcaattcaaaaagaagacttaactatgctaaatgtatacacacctaacaatggagcatccagattcataaaacaagtaattctcaacctgcaaaaagacataggtagccacacaataatagtgaggaacttcaacaccccactgacaacattagacagatcattgaggcagaatactaacaaaaatattctggatgtaaatttgacacttgacccattgtatctaatacacatctacagaa

SEQ ID NO: 744032 - DNA, 629 bp, Homo sapiens
aacacatttgagtacatagcccacagaccctataaaacacccacacaatagaaacaatgaagtaatcagctaagaatttcataataggatcaaaacctaacatatcaatattaaccttgaatgtcaatggtctaaacactccacttaaaaggcatagagtagcaaatggtatgaaaatttaagacaaatccatctgctatattccagagactcaactcacacataacaacacccacaggatcaaagtaaaggattggagaaagrtctgccacacaaatggaaaacaaaaaaaagtaggagttgttattcttgtagcagataaaatagactttaaatcaacaacagtagaaaagaacaaagaagggcattatataatgataaaaggttcaattcaaaaagaagacttaactatgctaaatgtatacacacctaacaatggagcatccagattcataaaacaagtaattctcaacctgcaaaaagacataggtagccacacaataatagtgaggaacttcaacaccccactgacaacattagacagatcattgaggcagaatactaacaaaaatattctggatgtaaatttgacacttgacccattgtatctaatacacatctacagaata

SEQ ID NO: 744033 - DNA, 534 bp, Homo sapiens
tgggcagagaaagaggctctttcttctgaggtaatgtgttagctgggctgggattaaagcaatcatggagcaagcctgttgcctaggttgctctccccacccttaccatggtccggtccatctgctttgagagatcagaacagagtcaacwatttttagcaacatgttttcttgtccttgctggctttgttttagtttgaagtacacaaatttggggtaccatttctatttagataattgaacttgaatacttatgctggttgctaagtctaccagacattctcaccaaaagaggaaagggagtaattcaaaccatttaggaatttggggctgtaatgatgcaagtgtggctatcagttttctttctttaaaataaaattggcagcttaaataatagagtcaaattgaccagatgttttgcacttggttaaatgcattccaattaaccaatcagtacgaataactgattagatcttttgctaaagaattcccattaagcaaataacaacaatggcaacaacaacaacaacaaag

SEQ ID NO: 744034 - DNA, 525 bp, Homo sapiens
aaggacgagaaaccaaacaccgcatgttctcacttataggtgggaattgaacaatgggaacacatggacacaggaaggggaacatcacactctggggaccgttgtggagtggggggaggggagaggaatagcattaggagatatacctaatgctcaatgacgagttaatgggtgcagcacaccagcatggcacatgtatacattgtgcacatatamcctaaaacttaaagtataataaaaataaaataaaataaaaagaataatagaatataaacttgctcacaaaaaaaaagaataattaaagcctttactctaaacattaaaatatcatccatggtgtactcaatttttgaattggtccaatctcatggacttatatttcactcttatcctgcaaacaacactgcataactagaatatttagggtttcaacattcaaaataaggaaacaaaaaacaaaagttcaagtgcaaagtagcaatttagtaaatgtttttggcactgaattgcctggaataaagtcaa

SEQ ID NO: 744035 - DNA, 534 bp, Homo sapiens
tgggcagagaaagaggctctttcttctgaggtaatgtgttagctgggctgggattaaagcaatcatggagcaagcctgttgcctaggttgctctccccacccttaccatggtccggtccatctgctttgagagatcagaacagagtcaactatttttagcaacatgttttcttgtccttgctggctttgttttagtttgaagtacacaaatttggggtaccatttctatttagataattgaacttgaatacttatgctggttgctaagtctaccaracattctcaccaaaagaggaaagggagtaattcaaaccatttaggaatttggggctgtaatgatgcaagtgtggctatcagttttctttctttaaaataaaattggcagcttaaataatagagtcaaattgaccagatgttttgcacttggttaaatgcattccaattaaccaatcagtacgaataactgattagatcttttgctaaagaattcccattaagcaaataacaacaatggcaacaacaacaacaacaaag

SEQ ID NO: 744036 - DNA, 631 bp, Homo sapiens
cctacctccaaggtagggaggaaggtacagtcaataaatcagactgggtcagtagtggatatggagaagagacagataagctgttcaagatgatttgaagtgaaaagataatgtatccttacaaaaggcccaggaaaccttcacctcactctcatcaggaatacgcataagagaataatgccaagacaatttctcctatattggcaaaattgagttttccacctatattatgtgtagttacttatctacatgtaagatgtgctccaattcattctaatcaccagttgtactttgggaggttgatctattacagaggttctcatcttgaaagaacatcagaattacctgaaaggcttgttagaatgcagatgactaggctccacttccagagtttctaaatcagtaggtctgaagatggcctaacaatgtgcattcctaacaaatttccttgatactgatgctgccggtcgggggaacacaytttgagaagcattgatcctgtctgaattaattatttgagggccatcccaggagttgaggtaaaggtagcaagtcaaacaggaacttgctcagttaccatgagcacttcatccatgtcctttgatcccacagccatttgagaatatcttca

SEQ ID NO: 744037 - DNA, 533 bp, Homo sapiens
actcttactgatgttgaaatggaaatcacatcaaaaaccattgaaaaaaacaaaaatccattatgaggcagaaatgtggcagagtcctactgaatagtgtttagccaagggtatggcttggttctcagttttacacatttctacaaactkaactgaagcaccatactataaaatggtgtaccttatatcttcactgtataacatatggtacagggcggataaacctattttgatgagttatgaaacaactactggaagttttttcaaaagtataattcttacttctatttaaatgatcctgtaataatctcctgtctgaactcaaggaatttttagctgtcacttccaaaggggcaggttacagatgaggaaactgacagataggttaagtaacttgtctgaggtcacagaagccacagtactgagtgtctgggatttgacctcagatccatttggctacaagttcatgctcgttcataatggtattcattcagtagggcattcattataaaagatatgccttctaatttgtg

SEQ ID NO: 744038 - DNA, 543 bp, Homo sapiens
tggaacttatcactaacattccacatgctttacatattagtcttgcttcatttccatctttcccactagaatgtaaactatataaggtcaggtatccttatctatatccttctctactctatcccaagtctccatgaaagtggctggtacattataggtacataataaggcgagctctattttagcgtaacgcgtccatatacaatattatggtctctccccttacccacaatgctctcttaaagtgcaaattcataacgaactctaatagctttatataaagtggccataaaaccagtacatggggayaggtgctgcaagctcagtaaaggaaggatggattaaatcaaagtattctagaaactgcatattagttagggagttgggcacatccatcttttcttcagctcaagtcctgatactggtaataaaccaatacctaagtagaaaagaaagagtaccatatacaatccatgagtcaaaacttggtagaatcttacctctctgtttttatttcatggctctgatcttccacctcctctc

SEQ ID NO: 744039 - DNA, 565 bp, Homo sapiens
ttcaagctctgagctattcctaacctaatcttaatatttattttatgttgcttccatttggacttcttccttcaaacatctctgatttccttgctaaaactctttttgtccacacataatgtgcagtcagcctacactctaatacttaacatgtrccaccatctcttagagttctgggagttaactgtcagctactagcattgttttctctccaatattctgccagtggatagcctcatctctttatgccagcaatgaggatggaagggtgaagaggaagcagaggcagggtttcaaggcctcccatgtactctccctgagtgccaatggcctacatccaacgcttagttttaggttcagtgacattttcaatgcacaatgaactcagtctccttcccggatcctactcagaccctggcttccaagaagcaattgcacgtttattttattccttatcaatttagcaactatcgcttcatcactttttgtggtttgtcgtgtagttttcatgtatttcactgctactagatattcctcagatatctttgctgagatgcatggcaaa

SEQ ID NO: 744040 - DNA, 584 bp, Homo sapiens
atcatgttctcgtaaactagcaggatggattccatctattataggtgtacttcttcatgaaaatgcactttccgttactggaaaaaaaagacatttaatgcaaaactagggactcaacaagcaggccctttataaggaagaaaaaaaaaaaagaaagaaagaaacttttaggaytaaaatgctaccacagtagtttatcacctatagtttctatagtttcttctttcactccagaaaacaccatttccattaagcatttactttctgttgcgatagtgatttcttgtgaaagttttaaaatgtacttcataatttttctcactacattaactgacattacaggtacccgaggattctggaaatattgctgaagtgaaaacaccaccaacaaaactgctgtaaatgagttttctccacttcatttgcagataaaagcttgagatgctctcaccttttcctaatttcagaatccacagtaatctgcctcttcttttggggaggtggtggtggaagttcctcttgagcatgctttaccaggatctgttcccttgtggtcaccgtagttactgtttccattacagttg

SEQ ID NO: 744041 - DNA, 584 bp, Homo sapiens
atcatgttctcgtaaactagcaggatggattccatctattataggtgtacttcttcatgaaaatgcactttccgttactggaaaaaaaagacatttaatgcaaaactagggactcaacaagcaggccctttataaggaagaaaaaaaaaaaagaaagaaagaaacttttaggactaaaatgctaccacagtagtttatcacctatagtttctatagtttcttctttcacyccagaaaacaccatttccattaagcatttactttctgttgcgatagtgatttcttgtgaaagttttaaaatgtacttcataatttttctcactacattaactgacattacaggtacccgaggattctggaaatattgctgaagtgaaaacaccaccaacaaaactgctgtaaatgagttttctccacttcatttgcagataaaagcttgagatgctctcaccttttcctaatttcagaatccacagtaatctgcctcttcttttggggaggtggtggtggaagttcctcttgagcatgctttaccaggatctgttcccttgtggtcaccgtagttactgtttccattacagttg

SEQ ID NO: 744042 - DNA, 584 bp, Homo sapiens
atcatgttctcgtaaactagcaggatggattccatctattataggtgtacttcttcatgaaaatgcactttccgttactggaaaaaaaagacatttaatgcaaaactagggactcaacaagcaggccctttataaggaagaaaaaaaaaaaagaaagaaagaaacttttaggactaaaatgctaccacagtagtttatcacctatagtttctatagtttcttctttcactccagaaaacaccatttccattaagcatttactttctgttgcgatagtgatttcttgtgaaagttttaaaatgtacttcataatttttctcactacattaactgacattacaggtacccgaggattctggaaatattgctgaagtgaaaacaccaccaacaaaactgctgtaaatgagttttctccacttcatttgcagataaaagcttragatgctctcaccttttcctaatttcagaatccacagtaatctgcctcttcttttggggaggtggtggtggaagttcctcttgagcatgctttaccaggatctgttcccttgtggtcaccgtagttactgtttccattacagttg

SEQ ID NO: 744043 - DNA, 620 bp, Homo sapiens
aaataaatttcaatgtgagcttttggctatactatacctatggtcaagtggcactacaaattcaaaattttaaatattctttattgaaactactaggaacaactgttttatatatagtagaggaaaccagggctttattctcttgactgaaacgtgtaagaagtgattcataggtcttcaaacacaaattagtaaatttaggaagctaaaaaggcatatatatttgactactgatgggggcaatatgttgattgtgtaatatttttatctaccctttcatctcagttataatttaaaaaccatttatatactacataaactatgtaatattggatacttctgtgtctatataatttgcaacaaagtagaataaatggccagagatgttattgtaatcttatggttgaatgttatttcttttttctaggtcattgtttaaaatctggacatcatagaaayagataatgcagagagaaaattctttcataattccaccacatctcaatctttgttattagttttaaaatatgtccttctagacatattttattgtaaaaagtatttaaaatactcattttattttattgccgcaagagagagaagggcatttattgtagggc

SEQ ID NO: 744044 - DNA, 616 bp, Homo sapiens
ggttctccaaggagatcatcaggggtcaccgagtccattccccagcctctggcttcactgaaggactcccaactcctcccaaagagatagtcatccatgtccttaaaaaatctccttgtgtctgaatccaagaccccaagccaattctccactgcctcatcagagctgccattagcatgacaccaaattcacttacagactcagctggtaaaggaaaggtcagtaaacaccactctaatcagctctggagagatacatgtggggggcacatgccagcctagggacacaytgtcagaaaacatcaccttccacactaacgatatctcagagggccgtggagcccttgcctgtgatggaagaaaatcactcttccctagcttccctttggtggcaaacaagaaagtccccctctgaagtactagaagaatcccccctaccccaaagcccacccatgcccaatgctttcctctttctcctttctcagctgcaaacctgcagaggccccacttagtgaatatttccaagaaggagacctgcagtcccccacagaacttcaccattgggctatgcatagtgctgctttattggtaaaacaggaagatccaatttacaccta

SEQ ID NO: 744045 - DNA, 616 bp, Homo sapiens
ggttctccaaggagatcatcaggggtcaccgagtccattccccagcctctggcttcactgaaggactcccaactcctcccaaagagatagtcatccatgtccttaaaaaatctccttgtgtctgaatccaagaccccaagccaattctccactgcctcatcagagctgccattagcatgacaccaaattcacttacagactcagctggtaaaggaaaggtcagtaaacaccactctaatcagctctggagagatacatgtggggggcacatgccagcctagggacacactgtcagaaaacatcaccttccacactaacgatatctcagagggccrtggagcccttgcctgtgatggaagaaaatcactcttccctagcttccctttggtggcaaacaagaaagtccccctctgaagtactagaagaatcccccctaccccaaagcccacccatgcccaatgctttcctctttctcctttctcagctgcaaacctgcagaggccccacttagtgaatatttccaagaaggagacctgcagtcccccacagaacttcaccattgggctatgcatagtgctgctttattggtaaaacaggaagatccaatttacaccta

SEQ ID NO: 744046 - DNA, 558 bp, Homo sapiens
tggagggaattaagctaatggtagaatagtggagccaaattctgcgctgatacacactgcactgaatcgctgaataagttgaaggtaacaaaatggggagtacaggaatagacaggtcttttgaaaatttgacactaaagcaaaaagagaaagaactgaagagggcttctggtagggtggttgcttaaagggagaagacagagttctcaaaayctgatgggaattactgtgttgtaagggagcactgactatgcaagataaagaaggaaaaaatgactctgtttccccagaggacgaaaaaattgatggcatctatcacatgggtggagtagctagccttcaatagggggaagacttgattgattttgctgtatattcctggaaaagaagatttctcttggggatagagtgaacatttcttttaccagcagaccaaaagtgcccaacaaggatggaggccttgtcactaatgctattaaggtcatcaaacatctttcttgcgcttgatgcaaagtgctcaccactttggaaggaggggagaaatacacagcccatgcg

SEQ ID NO: 744047 - DNA, 535 bp, Homo sapiens
aaaggcaagttttaaaagcaaagctgaggcaacaccagtgccgagggcctggaaagccatactgagcagagtgtggtgaaagggcctgggaaaaatatgggattggtggtctggataggcacaagcagaggggaggacatgcttgctgggttggttttccatggctgctctaacagattaccctgggcttcrctgctgaatgcaatgcacatgtgtttcctcctatttctgaaggtcaaaagccagtgggcacagctggtttccccgcattgagtctgacaaggccaaaatcaagttgctggctggaccaggctctggggtagaatctgtcccttcttagccccagtcaggttgctggtagaattcagttccactgggctccgggattgaggtccatgtttccttgctggctgccctgtgattagtcccacttcatagtttttatcccaaaatactcataaactgttgccccccgccaatttccagtttagggtttctttaaaatggagcagagtataaagacccttgaaaggca

SEQ ID NO: 744048 - DNA, 535 bp, Homo sapiens
aaaggcaagttttaaaagcaaagctgaggcaacaccagtgccgagggcctggaaagccatactgagcagagtgtggtgaaagggcctgggaaaaatatgggattggtggtctggataggcacaagcagaggggaggacatgcttgctgggttggttttccatggctgctctaacagattaccctgggcttcactgctgaatgcaatgcacatgtgtttcctcctatttctgaaggtcaaaagccagtgggcacagctggtttccccgcattgagtctgacaaggccaaaatcaagttgctggctggaccaggctctggggtagaatctgtcccttcttagccccagtcaggttgctggtagaattcagttmcactgggctccgggattgaggtccatgtttccttgctggctgccctgtgattagtcccacttcatagtttttatcccaaaatactcataaactgttgccccccgccaatttccagtttagggtttctttaaaatggagcagagtataaagacccttgaaaggca

SEQ ID NO: 744049 - DNA, 538 bp, Homo sapiens
ttccagggttcactgtataaactatccagatggatttagagatgataatatgagtacatttggaactaaggcaaagaaccagtgcacatatgataactcaatacaactgaaaacacagccatttgatttttaatgaatacaagaattttaatatgcttccagaccttgtttttcttttttctattttcttgtatttttgaaattctctgtattcttgaatgtggacwtttttcttttataaacccagtccactaatgcatacaaagctctgtttctgccctaaggctaagaacattccaggtgaactaatcaatcaattttgcccattaagaaagagcactaaaataaaaagaatcctaaccttttgatggatctgctagttgtttgctaaatactttctttttttaatggcaaaacaccaagaggagaagcagtctttcaccttaaggagaggaaaagcttccagttcctagggaatttgtagcatttggggaatttgtaccatttggggaatttttttttcaaatcctggagtatc

SEQ ID NO: 744050 - DNA, 538 bp, Homo sapiens
ttccagggttcactgtataaactatccagatggatttagagatgataatatgagtacatttggaactaaggcaaagaaccagtgcacatatgataactcaatacaactgaaaacacagccatttgatttttaatgaatacaagaattttaatatgcttccagaccttgtttttcttttttctattttcttgtatttttgaaattctctgtattcttgaatgtggacttttttcttttrtaaacccagtccactaatgcatacaaagctctgtttctgccctaaggctaagaacattccaggtgaactaatcaatcaattttgcccattaagaaagagcactaaaataaaaagaatcctaaccttttgatggatctgctagttgtttgctaaatactttctttttttaatggcaaaacaccaagaggagaagcagtctttcaccttaaggagaggaaaagcttccagttcctagggaatttgtagcatttggggaatttgtaccatttggggaatttttttttcaaatcctggagtatc

SEQ ID NO: 744051 - DNA, 634 bp, Homo sapiens
gcatagaaagggcccaggtaggaaccggaggcagaggccttctgtgatgctcttggcaatgactaagaccatggcctgacccttggagatggagaggagggagtctcatagtgcttgagattgggtttcttgtctttctgaaaggataaagatcaaaaaccaaattaatttgactttaaaaaataaagaagagaaacatttctttcacatccaagtttgtggactaaagctttacataaagaaagtgcttaacacgtaattgttattacagtatgtaatacctaaaaagactctacaatccatccrgtccgataaacttaagagaaaaataaagcctagaaagtcttaagctatttcatttcttaggggtagaagtgggtatccttccactacttatttaaagacaactaaacagggatatgctaatagcttcaattaaaattatggaagaagtagtccaggagacgtcttgaaacttgaaactttgtcaaattgaattaactattttaaatactcagaattttcattaacatacaatatatgttacacttacaatatttgttgtgtttgaaattcagagagtaatttgttagattctttctcttttaaaactctaggatccatccttggtgga

SEQ ID NO: 744052 - DNA, 478 bp, Homo sapiens
aacagacatctaacaccagtcaaagtggcctgcacaggaaggggcttccctcagagaccttcacaaaaataaaagaagaaaaaaaaagtacaagccagaagtcatcaaaagacagtgctacatagccaggtgttgtggcatgtgcctgtagtcacagctacttagcaggctgaagccagaggatcgcttgagcccaggagttcaaggctgaagtgcactatgatcacacctgtgactagtcactgtactccagcctggactacagagcaagaccctgtctagaaagaraggggaggagagagagacggagagggagagagaaagagaaagaaagaaaagaatacaagttttgtgcaaatggttgcaggaccaacagatggcggttcaatttcataatagaagccaaatgcctacaacttttcaaagatattgctatacaatagctcgtggaggcagtttccaaaatgaaaagtgaggg

SEQ ID NO: 744053 - DNA, 636 bp, Homo sapiens
tgaatgtcattcccagctaacacccagaaaatggaagccttactggctgaaggtgtttgaacacaacttttgaccaatcttgggctgaagtcaaagttatgcagacacagagatgatccctaggaagttagactaaaaataaaacaaaataaatgataatactgagtaggaacatcagcagctatagtttaccatggaggcagacttcacagatatagtctatgtaaattactaaacaaacaaaataaaaacaaaaataattatcttcagaggaggagaaatcagaacccagagttgctaaaatatattatctaaagtgtattcaaccaaaagttccaaagcatgcaaagaagcaagaaagaccagtattcagagacaaaaaaaaatgcagtaaataaaaactggatttggcagaaaagacttcaaagcagcttttattaataagttccataaactaaagaaatctgtttaaaraacaaaaagaaagcataataacaatgactcaacaaatagagaatttcaatgaagggagagaaattatttttaaaaaacaaaagagaattctagagttgaaaagtacaatatctgaagtaaaaaagaaaataataaagggctcaagagcagatttgagatgga

SEQ ID NO: 744054 - DNA, 482 bp, Homo sapiens
ccaaatgcaggtgggataccggattccattttagcactctattacttgaggctgtcattcagttcttgttgctgtccctttgctatacaagacttaagtttttaaaagtccttttataaagtgcaaattacttacatagaaatgcttcattcattcataaatactgaacagcctggcactgctctcagaaaatgtaattggcatctatcttgtataaaaaaaggatagtggtttgtcatttcttaatatttaacgagatttcytaagtgttgcattaggtcctgtgtttttattccttaaatggggccatggaatagcagaagtgattccttacactgaaaactttgaaagggcaagctctggtatagattctacaaaatatgctaagatgtaagatgtcaggtgaccagaacattcttgccctccttcttggcctaacattacgcatttcagtctcttgcagataaagttattttcatgat

SEQ ID NO: 744055 - DNA, 627 bp, Homo sapiens
ttcatatctggaggagggtctaatgagcaataaggggaagcaaaaagattagatcagtccccatggaagctctaagcattgcatagaaataagtgcaggatgataactgaagagattcaagcacatgagtttcctctcatctctttttgttagtgatggcagagtgttactcaaaatcagaagactaaatatattgccttggctgctaaaaatgaaaatacctaaaaaytctttctgcagatactacacacaagccttatagcctgtgaccatctttcgtcttggccagtatgagaaatcatccatgatatctgcccattgtacatgtctattgcatttgccagctaatgtttagtaactagggctgtttgttcttctcaaaaatttgaactttctccatttgtgtttaccttcacatccaaactcgaacaactctgctctgagttaattccccaatttcattatggccacactggggaaggggagaggaatctgtgtacaaaccaccagacagaaaacaatgggaacaggcagcaatccaagagctttggcatgatttgcaagagaaaaccagctctgattaatgctatcaaaatgcttgtctttcctgtgattgatattccagcc

SEQ ID NO: 744056 - DNA, 646 bp, Homo sapiens
ggaaatcagcatccttattatttagtgagtcacgaatgaggaacatttgcaggcatgctttggctgcatcgagggtggaatctaaacgttaaatctgatcagatacagacaacagccagacctttctattcctttcatggcgtggcatgtgacagtattattgaagatggacgcattgctcccaaagcgatgctcagactttgcttgttgttccacaatgctacctgtgagctgcctagccagcaatcccacagttttgaaagctcaatttcttggggcagaatgaaaagacattgaatatctgagcgactgtcttgaaataatttagcaaaactagatttgttttagagcacacaaaacatgaaakatataaaggggaggacctggcatgaacgagtggccactatttcccaagcattctccatatatttttttcatttaatagttacaattaccttgtgaagtaggtattaccatctcccatttccagatgaggaaacaacactcaaatttgcacaattaatcaggggcagggccactatctgaacccagcaccggctgactcagaaacttgagctgtttgtttgtaccggtgcatctcaaactacacaatagtatcatctggagttaaaaatacatcattgcc

SEQ ID NO: 744057 - DNA, 621 bp, Homo sapiens
ataatttgatcagtggatgaataaatgaacacataatagctaaatgtattgactgttttacagtattatcagtgctttttatttaatcttcaaaataacttgataagtactattattattcccattttatagaggaggaaagtgagccccagagaagttaagttacttgctcaaagtcaccattccaacaagaaaaggaacyagactttgaacccagacatcatgctcaatctataaaggggtcccttcaatactcaccctcttttcagcctagctctgaacaatttgagaaataaaacaaaagaacaataacggggatggaaatgttatctttataattgatggaggccaagttggaagacattgagcattaggcctttcaggaaagtagacgttaacattgaactccagatctggcagtcctgtgctctcagccctgggaagcagtacagaggggtcctgccggaggggcttacatcaatgagggagcagagcaacatgcccaaaaggaaagaaggaaccaagcaagcccagctcttcttctcaaattgaccaatcaaataagccatcccacctctctagggcagagttggtaaaagggcacagggaggtcacaagtta

SEQ ID NO: 744058 - DNA, 704 bp, Homo sapiens
taaaagagcaaagttctaggggtgaagaaacttctgcattcctgtagatcggttctgatcctaacgtctgctatgattctttttttaagatggtatttcgctcttgttgcccaggctagagtgcagtagtgcaatctcggctcactgcaacgtccgcttcccaggytcaagcgattctcctgcctcagcctcctgagtagctggcattataagaacccaccaccacacctggctaatttttgtatttttagtagagatggggtttcaccatgttggccaggctggtctcgaactcctgacctcaggtgatccgcccccctcagcctcccaaagtgcttggattacaggcgtgagccactgcgccaggcctgcagctatgatttttgacatcacgtagcctctctgaacctcagtttcctcttctgtaaaatgatgactcctccattcctacacatctgcatggctcctggctgaaaggggaaggatggatgtccgaatatacctaaaatttgtgctcctggagacagaaatggatcacacatttatgttgaaagtaggttgtagacttttgtctacaaatagacaaaatgaacaaaatcttatgaccagaggagacactattcccctctcttcctatttggcttataaatcacaattcacaccagtcctgtggctacttgtatatctttatctgtctgctttgc

SEQ ID NO: 744059 - DNA, 704 bp, Homo sapiens
taaaagagcaaagttctaggggtgaagaaacttctgcattcctgtagatcggttctgatcctaacgtctgctatgattctttttttaagatggtatttcgctcttgttgcccaggctagagtgcagtagtgcaatctcggctcactgcaacgtccgcttcccaggctcaagcgattctcctgcctcagcctcctgagtagctggcattataagaacccaccaccacacctggctaatttttgtawttttagtagagatggggtttcaccatgttggccaggctggtctcgaactcctgacctcaggtgatccgcccccctcagcctcccaaagtgcttggattacaggcgtgagccactgcgccaggcctgcagctatgatttttgacatcacgtagcctctctgaacctcagtttcctcttctgtaaaatgatgactcctccattcctacacatctgcatggctcctggctgaaaggggaaggatggatgtccgaatatacctaaaatttgtgctcctggagacagaaatggatcacacatttatgttgaaagtaggttgtagacttttgtctacaaatagacaaaatgaacaaaatcttatgaccagaggagacactattcccctctcttcctatttggcttataaatcacaattcacaccagtcctgtggctacttgtatatctttatctgtctgctttgc

SEQ ID NO: 744060 - DNA, 620 bp, Homo sapiens
taatacaagtagacagaaaacaaagatatggaagaactcaacatcatcaaccaataagagctaagtaacttttatagaatacctcactgaataacaacattatacactctcttttcaagtgctcagcaaacataagcagatacatcatatcrtaggtcagagcaacaatccctaagacatttaaaagaatgtacatcacacagaatgtgttctcttaccatgatgaaatcaaactaaaaatgaataacgtaaaactaagaggaaaatcttccaacacttggaaactaaacaacacacttctaaataatccttaaaaaggaagtaccaagggaaattagaaaatacacaatacttaatgaaaataaaaatacaacatattaaaatgtgccagacactccctgttgatagggaaattaataacctaaatgcatatattaggaaagaggataagtatcaaatcagtaataaaagctgccaactcaagaactctgagaaataagggcaaacaaaaccaaaaatatccagaagaaaagaacaatgattcaagtatagatcaatgaaatttaaaacaggaaaccaataaaggaaatcaatgaaaggaagagctgggtcttcaaaaa

SEQ ID NO: 744061 - DNA, 598 bp, Homo sapiens
catcccacaaatcccttttgttcttactgcagggacagcttgtcaaacgggctgtggcaaaagtgggcacagtgactccaatacctcactcttctgaaagcctggaagtgttcttcacagcatggctggtgaagagaggacggccaggcaaaaggctccatcttacctgacaggcattcccggaaggctgaaggtcctgtctggggaaacctgcacagtgtccttggccagggagggaccccaaacagcagaggagggaaggctcatgggctgagtgagccacgtgatgcatgagcaccaggtcttgggcagggctgctgagtgtcccacatgttattcccattcatgttttggttgttttgcagctccttgtaccaggaaggtcaaggtaygtacgaaagcaaaagtgtccagcgagtcctcagaacaggaatggtgatgctgaggacagccaggccctggagcccaaagaccatctacaggatgccccttagctctcctacccaatcccttcttgcttggtttccaccaagtagcctgagcactgaactgggtccaggagcttggactctgccggggcgtgtgggcgagtcatgga

SEQ ID NO: 744062 - DNA, 598 bp, Homo sapiens
catcccacaaatcccttttgttcttactgcagggacagcttgtcaaacgggctgtggcaaaagtgggcacagtgactccaatacctcactcttctgaaagcctggaagtgttcttcacagcatggctggtgaagagaggacggccaggcaaaaggctccatcttacctgacaggcattcccggaaggctgaaggtcctgtctggggaaacctgcacagtgtccttggccagggagggaccccaaacagcagaggagggaaggctcatgggctgagtgagccacgtgatgcatgagcaccaggtcttgggcagggctgctgagtgtcccacatgttattcccattcatgttttggttgttttgcagctccttgtaccaggaaggtcaaggtacgtacraaagcaaaagtgtccagcgagtcctcagaacaggaatggtgatgctgaggacagccaggccctggagcccaaagaccatctacaggatgccccttagctctcctacccaatcccttcttgcttggtttccaccaagtagcctgagcactgaactgggtccaggagcttggactctgccggggcgtgtgggcgagtcatgga

SEQ ID NO: 744063 - DNA, 598 bp, Homo sapiens
catcccacaaatcccttttgttcttactgcagggacagcttgtcaaacgggctgtggcaaaagtgggcacagtgactccaatacctcactcttctgaaagcctggaagtgttcttcacagcatggctggtgaagagaggacggccaggcaaaaggctccatcttacctgacaggcattcccggaaggctgaaggtcctgtctggggaaacctgcacagtgtccttggccagggagggaccccaaacagcagaggagggaaggctcatgggctgagtgagccacgtgatgcatgagcaccaggtcttgggcagggctgctgagtgtcccacatgttattcccattcatgttttggttgttttgcagctccttgtaccaggaaggtcaaggtacgtacgaaagcaaaagtgtccagcgagtcctcagaacaggaatggtgatgctgaggacagccaggccytggagcccaaagaccatctacaggatgccccttagctctcctacccaatcccttcttgcttggtttccaccaagtagcctgagcactgaactgggtccaggagcttggactctgccggggcgtgtgggcgagtcatgga

SEQ ID NO: 744064 - DNA, 562 bp, Homo sapiens
aaacactaaacatttagcctaatattatgccccaaggaactagagaaagaacagattaaacccaaagttagcagaaggcaggaaataataatctgagcagaaataagccaaatagagaacagaaaaaccatagggaaaaattcaataataagagtaggctgggcacagtggctcatgcccataatcccagcactctgggagacctaggagggtggatcacttgaggtcaggagttcgagatcagtctggccaacgtggtgaaaccccgtctctactacaagtacaaaaattagctgggtgtagtggcayatgcctgtagtcccagttacttgggagcctgagtcagcaggattgcttgaacccagaaggtggaggttgcagtaaaaaaagatcgcaccactgcactccagcctgggcaacagagtgagactccccctcaaaataataataataataataataataataataataataataataataggagttggttttttgaaaaaaaaaaaaaaagcccttagctagactaagtaaaaaggtgaatagactcaaatacata

SEQ ID NO: 744065 - DNA, 638 bp, Homo sapiens
agtagaatgacttatgaattctgaatttgcatgtacttaatacatagcctgaaaattcataaagcaaaaattgatgtaactaaaaggacagcagaatatccacaatatatttgaagattttagcaaacatccctcaataactgatagaacaggcaagaaaaaattatagggttataaacacaattaagttacttgatataatcaatagatacagaccactgtacacagtaaccaaagaatgcctatgcttttcaaatgtattttaaacatttgctaaaattcatcataaaaatactaaatttaaaaagattaactggaaaatcttcaatataatccccaacgtaattttgcagaaatatatggggcarcaaaacataattgcaattagaagatatttaaaactgaataataatgaagatatgatatataagtacaagcatactttattttgtgatgctttgatttattgcactttgcagatattgtgttttttacaaattgaaggtttgtggcaacgctgtgttgagcaagtctattggtgccatttttccactggcttgtgctccctttgtgtttctgtgtcacattttggtaattcttgcaatatttcaaactttattgttagtagtattatatct

SEQ ID NO: 744066 - DNA, 638 bp, Homo sapiens
agtagaatgacttatgaattctgaatttgcatgtacttaatacatagcctgaaaattcataaagcaaaaattgatgtaactaaaaggacagcagaatatccacaatatatttgaagattttagcaaacatccctcaataactgatagaacaggcaagaaaaaattatagggttataaacacaattaagttacttgatataatcaatagatacagaccactgtacacagtaaccaaagaatgcctatgcttttcaaatgtattttaaacatttgctaaaattcatcataaaaatactaaatttaaaaagattaactggaaaatcttcaatataatccccaacgtaattttgcagaaatatatggggcagcaaaacataattgcaattagaagatatttaaaactgaataataatgaagatatgatatataagtacaagcatactttattttgtgrtgctttgatttattgcactttgcagatattgtgttttttacaaattgaaggtttgtggcaacgctgtgttgagcaagtctattggtgccatttttccactggcttgtgctccctttgtgtttctgtgtcacattttggtaattcttgcaatatttcaaactttattgttagtagtattatatct

SEQ ID NO: 744067 - DNA, 647 bp, Homo sapiens
gacaggatgtggtaaagaagccagccaaacccaagatgctgatgaaagtgacctctggtcatcctccctgctcattatatgctaattataatgattagcatgctaaaagacactcccactcacaccatgacagtttacaaatgccatggcaatatctgaaagttaccctatatggtctaaaaaggggaggaaccctcagtccctggaattgcccacctctttcacagaaaattcatgaataatccaccccttgttttgcatataattaagaagtaactataagtatgctcagttgagcagcccatgccactgctctgtctatggagtaaccattttttattccttgactttctttttttcccccyggcttttgttgcccaggctggagtgcaatggtgtgacgtcagctcactgcaacttccacctcccaggttcaagtgagtctcctgtttcagcctcccaagtagctggaattacaggcgcctgccaccatgccctgctaattttttgtatttttagtagagatggggtttcacctgttggccaggctggtctcgaacttctgatctcagatgatccacctgcctcggcctcccaggagagagccactgggcccggccccttaacttttttaataaacttacttt

SEQ ID NO: 744068 - DNA, 609 bp, Homo sapiens
tagaggaagtaaaactaaccgtgtttgcagatgatatgatgctatgtataggaaactccatagtctttacttcaaagctccttgatctgataaacaacttcagaaaagtttcagtatacaaaattattgtacaaaaatcactagcattccaacagtccaacaacaaccaagccaagaggygaatcaggaaggcaatcccattcacaattgacatagaaaatatttagtaatacaactaaaaagggaggtaaaagaactctagactgtgaatcacaaaatattgcttaaagaaatgagagataacacaaacaaatggaaaaacacttcatattcatgtattggaagaatcagtatgattgaaatggccatatggccaaaggaatttacagactcaatgctattcctatcaaactaccaatgacattcttcgcagcactagaaaaaactgtttaaaaattcatatggaaccaaaaaagagcccgaatagccaaggcaattctaagcaaaaagaacaaagctggaggcattatgttacccatgttcaaactatactacaaggctacaataaccaaaacagcatagtactggtacaaaaacagatgttttgca

SEQ ID NO: 744069 - DNA, 421 bp, Homo sapiens
tctggttttgtgtgaagtaacatgttaccaacagataaggttttattttctaaatgtttaaatagaaccttttacatatcttaatcttttattattttatctttctttcactttattttttaaacctcattcccaaggttctaatatatgtatttacttagaaaacacactgctttcacaattattttatttcattttttaaaactgttgttttcttttcaaatgactttgcccaawctaacctggtgattctttgattaacatgataattcactgtacagcaattgaaattatataatttatgtaattagcctgtcatactggctatattttctttgtttccttcctaaagcagctgaaaataaaattatcttcctgcctttgcctacacatctagcagatgtccatatcatccatccaa

SEQ ID NO: 744070 - DNA, 614 bp, Homo sapiens
cttccgatctttttgacattttgttagaatttattttcttaactttggtctctttttgtctgtctcaagggatagtggtaagactactccccttggaacaaaattccaaaatcaaattaagatattccttgacctttacacargaattatgtttttttgatttttttaaaaaatttaaaattccaagtcaaatcctgggataacgccaaatacctgggtgaagagatcagccatccaaatgttttatctatgtaataacaaacagctctagactggccttcaaggctctttgccaccttcacccagcttacacgtttctttgtactcccaataataatcgtatagctcagcagatctgaaaggtttattctccgtctcctgattccttagttctacttcctttgcaccagactaccttcatttattgctgccaccaacacagatgacctcttccctcattctctgacctgatgtataacattcctgaggtatatgttacatgcctccttccataatgacagcgtgtttatcgtagacctttcccagagagcacgagccactatgccttctaaaatcttatataacaccttatatttagcatgtagaatatattc

SEQ ID NO: 744071 - DNA, 614 bp, Homo sapiens
cttccgatctttttgacattttgttagaatttattttcttaactttggtctctttttgtctgtctcaagggatagtggtaagactactccccttggaacaaaattccaaaatcaaattaagatattccttgacctttacacaagaattatgtttttttgattttttwaaaaaatttaaaattccaagtcaaatcctgggataacgccaaatacctgggtgaagagatcagccatccaaatgttttatctatgtaataacaaacagctctagactggccttcaaggctctttgccaccttcacccagcttacacgtttctttgtactcccaataataatcgtatagctcagcagatctgaaaggtttattctccgtctcctgattccttagttctacttcctttgcaccagactaccttcatttattgctgccaccaacacagatgacctcttccctcattctctgacctgatgtataacattcctgaggtatatgttacatgcctccttccataatgacagcgtgtttatcgtagacctttcccagagagcacgagccactatgccttctaaaatcttatataacaccttatatttagcatgtagaatatattc

SEQ ID NO: 744072 - DNA, 614 bp, Homo sapiens
cttccgatctttttgacattttgttagaatttattttcttaactttggtctctttttgtctgtctcaagggatagtggtaagactactccccttggaacaaaattccaaaatcaaattaagatattccttgacctttacacaagaattatgtttttttgatttttttaaaaaatttaaaattccaagtcaaatcctgggataacgccaaatacctgggtgaagagatcagycatccaaatgttttatctatgtaataacaaacagctctagactggccttcaaggctctttgccaccttcacccagcttacacgtttctttgtactcccaataataatcgtatagctcagcagatctgaaaggtttattctccgtctcctgattccttagttctacttcctttgcaccagactaccttcatttattgctgccaccaacacagatgacctcttccctcattctctgacctgatgtataacattcctgaggtatatgttacatgcctccttccataatgacagcgtgtttatcgtagacctttcccagagagcacgagccactatgccttctaaaatcttatataacaccttatatttagcatgtagaatatattc

SEQ ID NO: 744073 - DNA, 603 bp, Homo sapiens
gtacattttcttttcttttgagatggagtctcactctgtctcccaggctggagggcagtggcgccatctcagctcactgcaacttccacctcctgggttcaagtgattctcctgcctcagcctcctgagtagctgggattacaggcgcgcaccaccatgcctggctaatttttgtatttttagtagagatggggtttcaccatgttggtcaggctagtcttgaactcctgacctcgtgatctgcctgcctcagcmtcccaaagtgctgggattacagacttgagccaccacacccggccacatggtacattttcaatatgtttctggctcattagtgtatgaataacgtaatttcttcatctttgtatcccttgaacgagcttagtgcccataagggcttatgtgagataatcaatataaccacctgttagaccctcagaactatatgcagttctcttggacctcatgctgtcccacctgtgtgcattttattccccctacctggaagaaagcaactttccatgccaccttaacttctaaacattatcctactctctgcttcagaaattgcccccaaattcacactttttgaaaccttatatt

SEQ ID NO: 744074 - DNA, 603 bp, Homo sapiens
gtacattttcttttcttttgagatggagtctcactctgtctcccaggctggagggcagtggcgccatctcagctcactgcaacttccacctcctgggttcaagtgattctcctgcctcagcctcctgagtagctgggattacaggcgcgcaccaccatgcctggctaatttttgtatttttagtagagatggggtttcaccatgttggtcaggctagtcttgaactcctgacctcgtgatctgcctgcctcagcctcccaaagtgctgggattacagacttgagccaccacacccggccacatggtacattttcaatatgtttctggctcattagtgtatgaataacgtaatttcttcatctttgtatcccttgaacgagcttagtgcccataagggcttatgtgagataatcaatataaccacctgttagacccwcagaactatatgcagttctcttggacctcatgctgtcccacctgtgtgcattttattccccctacctggaagaaagcaactttccatgccaccttaacttctaaacattatcctactctctgcttcagaaattgcccccaaattcacactttttgaaaccttatatt

SEQ ID NO: 744075 - DNA, 617 bp, Homo sapiens
agttaagctatagagcacagtggtagaattcaggctggtctaaggaaataattgcagacaggccatggagaggcttcagggttttacgttttgggggtgcttattttatttttcctctttgctctatacttttttgggcttctyaggtcaatgtggcattacatagctgccaatgctttcaagtaggtagagtacaatttcagtcatgagctaggatgaactagctatttcctagcaacttgcctggggaccggatctaactggcccagcttgagtgagataatgtactctggtcaagtcagccacaagcttaggcactgagactattgtcgaaggtcaccccttacgaatggggagttaatgtgagctgggaagatatcccaaaggtgtctaatgcactgacaaatggcaaagatgcaacagatattttggataaataaatgaataaaataataaatgaatgaaccaagagactgttagttttgggtagcataataaactcagattgacagataaagagcaattcattaggcatctacttattaccagaggctgtaaggaataaaagctgaaaaaaaagaggagttcctgactttaaggaacttgtcagaagaggt

SEQ ID NO: 744076 - DNA, 617 bp, Homo sapiens
agttaagctatagagcacagtggtagaattcaggctggtctaaggaaataattgcagacaggccatggagaggcttcagggttttacgttttgggggtgcttattttatttttcctctttgctctatacttttttgggcttcttaggtcaatgtggcattacatagctgccaatgctttcaagtaggtagagtacaatttcagtcatgagctaggatgaactagctatttcctagcaacttgcctggggaccggatctaactggcccagcttgagtgagataatgtactctggtcaagtcagccacaagcttaggcactgagactatwgtcgaaggtcaccccttacgaatggggagttaatgtgagctgggaagatatcccaaaggtgtctaatgcactgacaaatggcaaagatgcaacagatattttggataaataaatgaataaaataataaatgaatgaaccaagagactgttagttttgggtagcataataaactcagattgacagataaagagcaattcattaggcatctacttattaccagaggctgtaaggaataaaagctgaaaaaaaagaggagttcctgactttaaggaacttgtcagaagaggt

SEQ ID NO: 744077 - DNA, 617 bp, Homo sapiens
agttaagctatagagcacagtggtagaattcaggctggtctaaggaaataattgcagacaggccatggagaggcttcagggttttacgttttgggggtgcttattttatttttcctctttgctctatacttttttgggcttcttaggtcaatgtggcattacatagctgccaatgctttcaagtaggtagagtacaatttcagtcatgagctaggatgaactagctatttcctagcaacttgcctggggaccggatctaactggcccagcttgagtgagataatgtactctggtcaagtcagccacaagcttaggcactgagactattgtcgaaggtcaccccttacgaatggggagttaatgtgagctgggaagatatcccaaaggtgtctaatgcactgacaaatggcaaagatgcaacagatattttggataaataaakgaataaaataataaatgaatgaaccaagagactgttagttttgggtagcataataaactcagattgacagataaagagcaattcattaggcatctacttattaccagaggctgtaaggaataaaagctgaaaaaaaagaggagttcctgactttaaggaacttgtcagaagaggt

SEQ ID NO: 744078 - DNA, 592 bp, Homo sapiens
atttagattcccaacagtgtataagcattctcttttctctgcagacttgccagcatatttttttttacttcttaataatagccattctgactgatgtgagatggtatctcactgtggctttgatttgtacttctctaatgattagtgmggttgagcgttttttcatatgattgttggctgcatgtaagtcttcttttgagaaatgtctgttcatatcctttgcccactttttaatgggttctttgtttttgcttgttgaattttttttcttttttctttttttttttgagacggagtctcactctgtcacccaggctggagtgcagtggcgcaatcttggctcactgcaacctctacctcccaggttcaagtaattctcctgcctcagcctcccaagtagctgggattacaggggcccaccaccacgtctggctaatttttgtatttagtagagacggagttttgccatgttggccaggctggtcttaaactcctgacctcaggtgatctgcctgcctgtcttggcctcccgaagtgccgggattacaggcgtgagccaccgcacctggccgaattgtttaagttcctcata

SEQ ID NO: 744079 - DNA, 574 bp, Homo sapiens
ccttccccatgtgagtcagattatggatggctgtttaatatcatcggttcaaccaaaagttgtgctcagttaagctgggatgcagcttagggataatccactgctggttcttcctcgtgccagatgtgtggccttctcatggattcgatggaaagtttggtggtcccctaccgtcttagccccagaagcctgtgacaaatttagtgctccccccggggtgttttcatcttatctctttatctttcttgcatcccgtcttttcaatattcagcaaatgatttgaggggaaactggccacatttttgagacatgccccagtattccatcaggactttgtttcataagtcacgagattggttcattttaattctccacttagaaaatctccatctccattgcagctcagaacgaagcaaatwctccatggacacaactctttgtttcgggattctctagtttcaacctatcatttgagaattcacctccactccaccaccaatcttctgctgatttctatttctgtcttagggttttcctgggtcagttctggtacccagtctccatacaaaaatca

SEQ ID NO: 744080 - DNA, 608 bp, Homo sapiens
aaaatatagatttctttgttctcacttttcttagataaatataagttgtagaaatattagagaagagattgaaggtatttaaaataaagcatttgtctgatattttgctctcttactagcagttctgttttgaattatattttctagttagaagtgtgttatatatacctttacctcatcacaacttttgtttaggcgtgggaattagcaggttatatacagcgtggtcattaaagcaagtaacgtaaagtaagacaattattcaggttatcgcctctcttccacagaagtaaaagtatgccacatttccacaagacagctagasatgtgtcaatttctccttgtgactgaatccatctagttcttacctttcctcttctattcctctcaccatatccacaacacatccttttaacatttattttcagttattgtatttcagggtcatcttcaacaaactcttacacatttatgttcagtaaactagatagacacttgatattcactaaagatatttcaagatcataattccatgcaaaaacatctatttttgaatgttagcattaccattcttcagatagaattacattttcagacaatttagatgt

SEQ ID NO: 744081 - DNA, 628 bp, Homo sapiens
gtctttttactctaatgtcacataactaaaggggtaagaagtttctcacagacatttttaataagagaatgaatagcacttatgagagctctgcccccatggtctattaatctcccaaagccaccacctcctaataccatcaccctgaggataaggatttcagcctatgaattttagggcaacatacatattcagaccatagcacacaatatacaaaaagaatctcaaaattgatcaaaaacatatatagatgctaaaactataaaactgttagaagaaaacataaggtgttttccctaaccttggatttggcagttgattcttagctttaacaccaaaarcacatgccaaaaaggaaataaaaataaattgcactttaaaaatctcaaagctttcggtcaataaaagccattagcaagattgtgaaaaggaaacatacaggaatggataaaatatctgtaaatcagatatctggtaagggtttagtatccagcatatagaaagagctcttacatttaaacaacaaaagacaaacaacccaatgggcaatcgaattgaataagcacttctccaaagaagatatacagatggccaacaagcacatgaaaagagaaaccattgatcatta

SEQ ID NO: 744082 - DNA, 589 bp, Homo sapiens
ctttcggtcaataaaagccattagcaagattgtgaaaaggaaacatacaggaatggataaaatatctgtaaatcagatatctggtaagggtttagtatccagcatatagaaagagctcttacatttaaacaacaaaagacaaacaacccaatgggcaatcgaattgaataagcacttctccaaagaagatatacagatggccaacaagcacatgaaaagagaaaccattgatcattaaggcagtacatattaaaactaaaatgaaataccacctcacgcaactcatatggctttaatgaagaacgtgaaaagaaaaaaaaaaatgattggtggtgatttcaagaaacaggcacattytggtgggaatgtaaaatcatgtagccactgtgcaaaatagtttgatgatcccttaaaaagtgcaacagaatactcagcgcattatacttgtaggtatatacctgagagacataaaaacatatgtccacacagaaatttgtttacaaatgtatatagcagcattattcattagccaacaggtgaaaataactcaaatatctgtcaatgaataaatgaataaagcacagttttc

SEQ ID NO: 744083 - DNA, 578 bp, Homo sapiens
ttgaacaactggctcctgaatgactcatgagtaaataatgaaattaaggcagaaataaagaagttctttggaaccaatgagaacaaagacacaatgtaccagaatgtctgggacacagctaaagcagtgttaagaggcaaatttatagcactaaatgcccacatcagaaagctggaaagatctsaaatcaacaccctgacatcacaattaaaagaactagagaagcaagagcaaacaaatccaaaagctagcagaacacaagaaataactaaaatcagagcagaaatgaaggagaaagagacactaaaaatccttcaaacaatcaatgaatccaggagctggttttttgaaaaaagtagcaaaataggtagaatgctagctagactaataaagaagaaaagagacaagaatcaaatagacacaataaaaaatggtaaaggggatatcacccctgagcccacaaaaatacaaactaccatcagagaatactataaacacctgtatgcaagtcaactagaaaatctagaagaaatggaaaaattcctggacacatacaccctccgaagactaaaccagga

SEQ ID NO: 744084 - DNA, 625 bp, Homo sapiens
tgtttcttaatatattttcaatctgcagttggttgaatctgggataccaaacctgcagatatgcagggcctgctacatatatacaacctagaaaactcgagaagttcaattttacaaaatcatgcttatgcttgagatttaccattttcatgagaaaaatttagtttcaggtaacacaaaaattctactcaaactctaaaacactttgtattggagagcctagagaaaagtatgcttaaaggttgatttttaattcaaagtcgtgatcatgtcattacagacccagttttatttttcttgctagactttatcttccatattagctgcatccagagtctggagctgttcrtgttcataaaatgactgcactatgtccagatgacttctgtagtccacattaatcatgagattagataaaaaaaaatcagtcctagaactcatcactggtgccatgcacattcataaatcaatatcagttttatgcaaagtgcaatttgtaaattgattacaccaataaggggacacctttggagttgtagtcagggtcacattagctgaaaaaacacagattatgtgagtgtgccattagtggatggatgatcaatatatgaaataaagtttcagg

SEQ ID NO: 744085 - DNA, 585 bp, Homo sapiens
tttctttagaaatttttgatgctgtcccagtttttgattgttggttaaataatgtctcaataagtgggaattacatgtatttaactatgacaatcagagagaaggataaataagcataaaactcaactataaaagagactctcaaatttcccctaaggattttaagctgggttttatttaggcagaaagggaagaacagacagagatgagtaggaggaacagcgtatgtatcttacgcaaaaaacagtcgctaagcagaaagacaggaccagaagcagacatgataagggggccttaaaccaactytaaataaaatcctactctaactccaacaatgaaggcatagatttttttattgagcgcacattgtatctcagatttcaggtattttaactacatggttatgaaaatatcactctaaattattgggtcattaactcagcatgaaacataatcccagaaaaatgtcaaggatttatgtacatttctcatcttgagtcaataataattttctagtgtgttttatttttaccaataaatgatatgtgtaaaaaatcactggggtaaacaaattcagaaaaataa

SEQ ID NO: 744086 - DNA, 541 bp, Homo sapiens
tcttctccactgaacgaccccaagtcctgtgtcagggctgaggtaaggagagatgagagtctttgagctgaatgtgtgattgaatctttgatttaaactagctggaactcttgaatactaaaattcaatctcaggtattaaaatttgtattttctcataataaaagttaactataaatctgtgggatctgttgagggcacagaacacttccaacaaagtatatttgagagcaacataagtgagaaaaatagacatgttttgtttgtacacctgaagtccagtctgtcaataagttggctacwtattttcattatcacaaaattttatctatcaattccacccacctattttagtaaggccttagattttatgacctatcattgctttctcttataaaaataccaaattaagactactctgtaagggtttttgtttgtttgtttgtttatttgtttgtttgtttgttttggtttttatatcccaaccactcatgccagaacataggctgtttggttctttttttcttttttttagacatggt

SEQ ID NO: 744087 - DNA, 634 bp, Homo sapiens
ttattattctagtgaagcttctctggtccataagattgacttagcctggatcctttgcatcttcattgtactttatcctctcaaaccacactgagtagttcagtcagaggatagcagcaaagatagagaaattccttgaagatttctaactggagcaggagaggcaaaagtctttcctttgcawgcagtaaaataaactggctggaaagagaagactaggaagacaaggtgcagacagagcaaaatttgtcacagggagagtataaaattcttttcaatttttatgctatagctttggatcttccctgatttttgtctccaggtggcttagtgtcttataaccctatgatgacatagctatcccaggattactcaaggtatcactaaatagggatcttatcaattcattcaaaaaattccaagtcaatgtcacacttaatagatgaaataaaatgaccttgttacaatcacccagctagtgatattgaagctgagggttgaaatcaggtttgactgatgccaaagactatgttctctcctatcttccagcaacatccaaaataaatgtctacactacccaatgtgatattcacaagctatgtgtagctactgagcacatggtataagaacaata

SEQ ID NO: 744088 - DNA, 633 bp, Homo sapiens
tccagatccggcagggtgtccactgcgcttctgatccagtaaggcacccatggcggctcctgctccccactgggctagaggcttaccattgttcctgcccagctaagtgcccgggttcatcctaatcgagctgaccactagtcgctgggttccacagttctcttccatgacccacagcttctaatagagctataacactcactgcacggccggaggttccattccttggaatccatgaggccaagaaccccaggtcagagaataaaaggcttgctgccatcttggatgcagcccaccaccatcttgggagctctaacarcaaagacccacccagtaacagtgttgtgtgtaggacatttctctccccagtgtagagcttcatgccaagttgcataagggctttcacaaaaaaagctctaagtgacttgtaattttgattgactggtatgtagccatgtatgaatgtggttgaacacagaaggaaaccatcgatattcacatatctctgcactgaaacatctttttttcactaactcagctctggtatttgcctttagtcaccatctcatatcatgacattttctaagatgagtttacctctgggatgacacttgtccttctttcctagaattc

SEQ ID NO: 744089 - DNA, 519 bp, Homo sapiens
atttttacacactttctgacaaaattttggcttttatccattgtgtgtggtgagccattttgtcttagactaattactaaatattctagccaatcccccatttacttcaggtgtctccattgtcatatctctctctgtacatttgtttctaagctttccagtgtggtctattggttctttcttttcccgttgtttttgttgctgttgtttggtagaattatttttaaaaacgatttgcctctgtagtatattcttacatctgcttagatgatttctattttgctgttgagaagttaattagtgatgggcttttattcttttaaaattataaatgtgaagggttccamaaaatgtatacttgaatttttttctttgaatttaaacacattttttgttactgaactggtagagggattagcagttttacaatatgaagatatataatctatgaattatttatctctgccttttgtttaatttatatgtttacattgctgattagcataattttttcttact

SEQ ID NO: 744090 - DNA, 615 bp, Homo sapiens
ttactaaaagcatttatacaaaagttattatcaatttattcaattatatattcactttcctggttatatttatattattgtaaactgtagagcaaatagttttaaaatattgtgaagacactgtagaatttaaacaaatcactaaataatccacaagtatgacatcactggctagatatgcacaggtcgagttcctgacttcttggtggaatttttctagctcaagcactcgggagtcatcagccaatccctttccaaaygacgtggctaaacttaaagacgttttcaaggacctgtctgcttccttgacctaattgcatttacagtcttcagactgttttgcttttgtgatggctacaagtaacactgaaatactgaggatggttaagctcttccgaggaaaggtatctcagtggcatccattcaaatgcattgtttcacaggggatgtattttgagaaagggcagatggtagcatttcccagaacatctgttacccatcattctttcacagagcaacccagatactgttgacaacttctatgtaaatcatgctgacaatttgttcaatgtctttcctgctgagactgaggttgtcctggtcataccatttatc

SEQ ID NO: 744091 - DNA, 646 bp, Homo sapiens
tgtgggaggtgccaaataagggaataaaagctggccacctgcgccagcagcagcaacccgctcaggtccccttccacactgtggaagctttgttctttcactcttcacaataaatcttgctgctgctcactctttgggtctgcactacctttatgagctgtaacactcacagtgagggtctgcagcttcatttctgaagtcagcaaaaccaagaacccaccagaaggaaccaattccagacacattttcacaacccagatgggactatcgtgtatcgcyaagtggcgagtaccatcggacccctttcgcttgctattctgtcctgttttttccttagaattcgggggctaaatactgggcacatgttggccagttaaaagtgactagcgtggtggctaaaaacatgggtgtcagactttctgagaaagggctctctaacaacccccgactcttcagagttgggagcattggtttgcctggaaccagcttctgcttttcctgtacttctgggctgagcctagggtggacagagaggaaagccattcagctccaagatcctgacaacaagttggttgaccttgcagccatgagcagaactctcaaagtcatgtcacccaagtgagactctcccatccacctatctatc

SEQ ID NO: 744092 - DNA, 593 bp, Homo sapiens
ctggaagccccgccccgccacaagccttcccgcctttgcttcacattgtcccggcttttccgactgaaccaatgctcatcttacatatgttgattgatgtctcatgtttccctaaactgtataaaatcaaactgtgctctgaccacctcgggcacatgtcgtcaggacctcatgaggytatgtcaccggtgtgtcccctaccttggcaaaataaactttctgaattaactgagacctgtctcaggttttcggggttcacatatatatcctcacacacatcatcccatcattctgcctgtttgggaactacatatgatctgcagggatggaagtgcttgctattttttgccttgtttccctccctaaatatggaaattcaaccttgctattttgtttagaatgaaagaattttatttatgtccattgatgtgtaatattggatcccatgaatatgccacaatttatttatgtgtttttacttgcagtaaatacttgggttctggattggggttatgtcaaacatgccaccgaagattcttgcacacgttatgctggtgtacatatatggaagtgtctgtgagtacacacgtcac

SEQ ID NO: 744093 - DNA, 551 bp, Homo sapiens
ccatctcattctctgttcaattctgtgcccttgctggagaggtggtgcaatcatttggaggagaagaggcactctggccttttgggttttcagcattttttttcattgattctttctcatcttcatgggtttatctagttttgaactttgaggctgctgatccttagatgaggttttgtggggacttttttgttgacactgttgttgttgctttctgtttgtttgtttttctttcaatagtcagatctctcttctgtaggattgctgtggtttgctgggggttcccttcaggccctattcatctggttcactcctgcacctggagatgacactcaaggaggctgaagaatagcaaagatggctgcytgctccttcatctgggatttctgacctcaaggggcaccaacttgatgccagcaggaatgctcctgtatagggtgtctgacaactcctgttggaggatctcacccagttgggtggcaaggggagcaggaccagtttaacaaagcactttggctgccccttgatggagggggtggctatgctggggg

SEQ ID NO: 744094 - DNA, 564 bp, Homo sapiens
tattgtgttgtaagcattaaagattttcagatgggaaaagcttgctcatttttagcgactcaatatttaggatatttcataaatcaattaaattattgttcctgaaattttgataatttgtttaaatcattcattttactctctggtggtataaatgtgtgaggttttacaaaatgttttgggatttcctcttggaaaagaatgtgcataaaaatctaaagaaatcstcaatattttatagtagttgcataaagtagttctttcacagagatcattcttaacaatcttggtcccctgtgctatgatgagagaggcttttcatggggatttggccaaaggttttttctagagttaatactcccactcttcttccttaagtgtgttgggattattaacatccgcaacacagacaggaacttggttttatgcctcaagaaaagaatggatcttttttcatataatgatctgcagtgcaattaccaatgaaaaagcaatattgtgcaccataaactgaacaatctgcaaggaacattttagtaatagacaattcaaaatgcagagagc

SEQ ID NO: 744095 - DNA, 546 bp, Homo sapiens
aaagctcccctggcttttaaaagaattacattgtgatggagatatctcttttagatagttacgtaccattattaaagattcaaaatatcattaatttccgtcaagctctattatgtttatcatctatcactgtgtcagcacactaatcacctcctcagctgcctcaggactgcagcttaactatttacttttaatagaaatcggacsactgcagcctttctctgcaccaacaaagacatgccatttcatgagctgttgatcccttgaagcaagtgaagtcctttaatggtctcctacatggtcgagattttttttagatgatgaaaatgaaaggtcacagaagtctgtggaaacaaagagattcatccctattctcctgtagtccctggatgatgagcaattgtggacagcagccagcctttacacagtagtgtggagaattctgcaggagggatgcttcctccaaccctgtgtccccaggcttggctgacagctgcccaggcagctgagatgagggaattggctcaggttaccctgaaggtgcaa

SEQ ID NO: 744096 - DNA, 546 bp, Homo sapiens
aaagctcccctggcttttaaaagaattacattgtgatggagatatctcttttagatagttacgtaccattattaaagattcaaaatatcattaatttccgtcaagctctattatgtttatcatctatcactgtgtcagcacactaatcacctcctcagctgcctcaggactgcagcttaactatttacttttaatagaaatcggaccactgcagcctttctctgcaccaacaaagacatgccatttcatgagctgttgatcccttgaagcaagtgaagtcctttaatggtctcctacatggtcgagattttttttagatgatgaaaatgaaaggtcacagamgtctgtggaaacaaagagattcatccctattctcctgtagtccctggatgatgagcaattgtggacagcagccagcctttacacagtagtgtggagaattctgcaggagggatgcttcctccaaccctgtgtccccaggcttggctgacagctgcccaggcagctgagatgagggaattggctcaggttaccctgaaggtgcaa

SEQ ID NO: 744097 - DNA, 488 bp, Homo sapiens
tcttctacttggaatatttgttaacatacccacacagggaagactatgtgttttgtggaacacaaaacttacaccgtatgagtgccctcttaagaaaaacaagacaaaataattaatacaaaacatccaagctccctctgtgaaagagagcaaatgaggggccctgaaacctctgtgtccttagcttcgtggcaaattcacctctattttatttttgctgaatgaatttaacaatatttggctgagttattttwaaaaaaggtctttatttatatttcagttggaatcacgttatatctgtgaaatagaacacgatgtttctctactttatttgtcttctttttatactcctgataacacattctaatttcgctcattcatccagcagcaatttattgagtacctcttcaataactttgcaaggatttttttttttttttttttttttttagatgaaacctcactctgttgcccaagctggagtgcag

SEQ ID NO: 744098 - DNA, 512 bp, Homo sapiens
cataccgcatttctgttttgtgactggcttatttcactgcgtgtgatgtcctcagggtttatccacgttgtagcaggggtctggatctccttcctttttaaggctggataatattcccctccatgtgtgtatattgtattttgtttatcaacctgttgccgcatccccattgccctttgayggaccccgactcctctccctgcacagcccagtctcctctctcctggcttcatcctggtttgtcctcccccgtctagcgctgcatcctcactgctttcttcctgtccctcagaagatgccaagtgtgttcctactccaggaactttgctagcactttccctccacccttgatgttcttcccccaactttcaaagggctggctcctctcagcattcaggtctcatttccaatatcacttcctcgcagaggcctgtttactacttaaatagaggctcaatctctgccgctttctgccatgctacctttaaaacccgtattcattacatttacca

SEQ ID NO: 744099 - DNA, 577 bp, Homo sapiens
ctagaactaatgaaaccaagaaccctaaccctaagttgagtttaggggaagggctatcattatttaaactggaaaccaaatttctcccaaattagtttggcccacgcccaagaatgagcaaagacatccagccagtgaggctagaggcaagatggagtcaggcatgtcatatttctctcactggcataattttgcaaaggtggtttcaccttccccactcccagcattctctctgtcgctcccctccctccccgcagacmcttatgtaattctgttgtgaagtttccgaaatcctaccgtcagctgaagaatgacaaggttcatgcatttggaaaggagagctttatttctcctaaagggttgtatcctgcagggtggccattctgataggctgggaagcagagcctccggccagaagctggaaacaggcactttgagggtggagaaaataagacaggaatttatgctgaagcaggtggccaaatatacatattcaataagtataagaggagtcatgaatatttatgaaatatttatcccctggctgccccttgctgaaaagactgggagagtgagc

SEQ ID NO: 744100 - DNA, 562 bp, Homo sapiens
gagccactgggagacggaagaaacccagggatggggtggagtgaccacaggtgaccacaaacatcgggtgagaggagcggcgtgggtcagagtgtgccatgcgacacgggagtaagacacgccactccctttatttttctaggttggatcaagctcttggagctctggggttggtgagtaacggagcccggccatgcattctcgtgctcccaccctccctaaggttggctccagatggccaaggtccatcatagccatggctatggtgcttctgtccaagactggccagtccagccaaggagtgtggccgccttccctccagccacacagcagctgcccttcagccacctctccagcacgactcagcacagtccactgcggtgggcttcsgtgctcctctgtgtccacctcctgatactctgcagctgtcggagcctccactgaagacacagagggctgctttctccctgctcccacgggctcactcagcctttgcctctctatccttcccttccccttagtgggcagggatccttaccatccgggcttctgtgcatttgct

SEQ ID NO: 744101 - DNA, 562 bp, Homo sapiens
gagccactgggagacggaagaaacccagggatggggtggagtgaccacaggtgaccacaaacatcgggtgagaggagcggcgtgggtcagagtgtgccatgcgacacgggagtaagacacgccactccctttatttttctaggttggatcaagctcttggagctctggggttggtgagtaacggagcccggccatgcattctcgtgctcccaccctccctaaggttggctccagatggccaaggtccatcatagccatggctatggtgcttctgtccaagactggccagtccagccaaggagtgtggccgccttccctccagccacacagcagctgcccttcagccacctctccagcacgactcagcacagtccactgcggtgggcttccgtgctcctctgtgtccacctcctgayactctgcagctgtcggagcctccactgaagacacagagggctgctttctccctgctcccacgggctcactcagcctttgcctctctatccttcccttccccttagtgggcagggatccttaccatccgggcttctgtgcatttgct

SEQ ID NO: 744102 - DNA, 625 bp, Homo sapiens
tgtcttagagtagcatatggcgcaggatccaaataagtaaagtaatacttacatttctctgtacacacatagaaaaaggtctagaggcccggtgcggtggctcatgcctgtaatcccagcactttgggaggccaaggcgggtggatcacctgaggtcaagagttcgagaccagcctggccaacatggtgaaaccccatctccactaaaaatacaaaattagctgggcatggtggtgggtgcctgtaattccagctactcaggaggcggaggcaggagaatygcttgaacctgggaggcagaggttgcagtgagccgagattgcgccattgcactccagcctggacaaaaagagcgaaactccatctcaataaaaaaaaaaggaaaaagaaaaaggtctagaatgactgaacactaaattatttatggtgatctcttctgtaaggaagaggaagcaggtttgttgcaaaatggtcattgcagaatggtactttcactttttactcaaaattcttctgtattgtttgaagtctttttttctaaataccactaacatatatttatgcattccatggattaagtaaaaagaaaaacacaaaaaccacagcctcagaaatagacactcca

SEQ ID NO: 744103 - DNA, 599 bp, Homo sapiens
tctctccaggtctagacttgcactgactcctctgtgccatctttccaaacatgcctgcctcgtcatgcctctgtgcctttgcctggtggtttgcttattctctgtcacacctgcaggtcctgcccagtgcccactccttggggatgctccccagtcttctcctgtggtgccctcgctgtcctgcagctcagagctggcacatgggatccctttctcccactgcatgcagagccctgagggtaggcactgtgtctggttcstctctgtccccaacagctgactcagggcctgcagagaacagctgcccaatacacatttgcagaacaaatgggttaatagacaaaagagcagtaaataaatgggcctcacaatgcctgaccacagtagggcctcaacagatatttattgagctagagcacaagagtcccagaggctggtccacgatgccacaatgtctctgttggcttccctccatcacacacatacaacccctccccacctgcacacacatacacacacacccacatgcctccacacatatgcatatgcgtacacaagcattcttccagaacacttggaacattttattgtggccaaat

SEQ ID NO: 744104 - DNA, 618 bp, Homo sapiens
gatgtgatgaattgatttcaggcagaaaacctgaggacttggcccagcagaccccccaggaagctggagcccacgtcattggcagtgcagccaagcatgagctaacctgtctgtgtttgcagcaatcaagacagcacgatccttcccagaagtcagagttggctcgtacaagcacaagagaagtcatctgcagatccgacagcaagagtggkcttgccaagctgggtctttacgggaatagccagggcaccacccacacacacatacctcgggcccccaggcttagccctcctggagagaggatgcagcccatcgccattcaccatccggtctccaacatgcctggaagctagcatcagccctgatgcctgcagggtgcgcagtgtgagctccccaggggtctctgtaccaggagtctgaagttcagtgaaagatttcagaagtgggcaaggtgttcctcctgttctgggtatccacacactcaacaaacattcgctgagcacatacttgttgctgtggccaaccactgtcagactgagggccacagggatgagtacattgcaagccctgcccactgaggctcgcagtctgtggagggaacagcaccagactccgacc

SEQ ID NO: 744105 - DNA, 588 bp, Homo sapiens
gacatacaggcagagctgcttctggaaaatggatttcttccactgtttgtccattttagtctaatccctaatgaaacagaatgaacttcagtctcttgaaatctgattcttccacctatgaaaaaagcaatgagaaaggtggcttttcactttaaaagagagactttgagccgagtctaactcaggagaactgctcaaattgtaccctctcttgcccaacacagagatcaggccagaccaggtcagaaatgctggtaaaacatttatttcaaaaattcatttggttttcagatgataaataggaattaagaatgagtatctttcttaggctctaaaaaccagaaataagacacaatttcatacgtgcagacttttgaaatatggagtaacatttaaaataacagmtaaaagaaaagctctgaatgttactctttattctggtaggtatgatttacccagtattgtttacatgccttgatttagtatcagtgagtatctcctgtatgcaaggcgctcagagccatgattcctagcttctaacatccgatttctaggcctctcatgcagatgccaataaaggatctgtgt

SEQ ID NO: 744106 - DNA, 626 bp, Homo sapiens
ataagtgctatgtaggtgctgagaagaatgtatattctgttgatttaggatggggagttctgtagatgtctattaggtctgcttggtccagagccgagttcaagtcctgaatactttgttaattttgtgtcttgttgatttgtctgatattgacagtggggtgttaaagtctcccactattattgtatcggagtctaagtctctttctaagtctctaagaacttgctttatgaatctggttctcctgtattgggtgcatttatatttagggtagttaactcttcttgttgcattgatccctttaccattatgtaatgcccttctttgtcttttcttgacctttgttggtttaaagtctgttttatcagagtctagaattgcaacccctgctttttttcttttttttttctttctttccatttgcttggtaaatcttcttccatctgtttattttgagcctctgkgtatctttgcatgtgagatgggtctcttgaatacagcacaccaatgggtcttgactcttaatccaatttgccagtctgtgtcttttaattggggcatttaacccatttacatttaaggttaatgctgttatgtgtgaatttgatcctgtcattatgatcctg

SEQ ID NO: 744107 - DNA, 626 bp, Homo sapiens
ataagtgctatgtaggtgctgagaagaatgtatattctgttgatttaggatggggagttctgtagatgtctattaggtctgcttggtccagagccgagttcaagtcctgaatactttgttaattttgtgtcttgttgatttgtctgatattgacagtggggtgttaaagtctcccactattattgtatcggagtctaagtctctttctaagtctctaagaacttgctttatgaatctggttctcctgtattgggtgcatttatatttagggtagttaactcttcttgttgcattgatccctttaccattatgtaatgcccttctttgtcttttcttgacctttgttggtttaaagtctgttttatcagagtctagaattgcaacccctgctttttttcttttttttttctttctttccatttgcttggtaaatcttcttccatctgtttattttgagcctctgggtatctttgcaygtgagatgggtctcttgaatacagcacaccaatgggtcttgactcttaatccaatttgccagtctgtgtcttttaattggggcatttaacccatttacatttaaggttaatgctgttatgtgtgaatttgatcctgtcattatgatcctg

SEQ ID NO: 744108 - DNA, 532 bp, Homo sapiens
ctctccacccccgacagaccctagtgtgtattgttcccctccctgcacccatgtgttctcactgttcagctcccacttataagtgagaacatgcagtgtttggttttgttcctgcattagtttactaaggataatggcttccagctccatccatgtccctgcaaaggacatgatctcattcctttttatggctgcatagtattccatggtggatatgtaccacattttctttatccactctgtcattgatgggcaactgggttgattccttgtctttgctattgtgaatagtgctgaaagcataatgttctataaaggctttttttaatggtatgttatgaaaactggcatgtcctcagttttactctagcatcagaatmtattttcattattattttccataaattatggcagcataaatatagtatgccattaaaattctataatttaaaaattaaagaataaaaatactttaaaattaaaattaaattaaatataaacaaaattaaaattaataattaatggatatttt

SEQ ID NO: 744109 - DNA, 532 bp, Homo sapiens
ctctccacccccgacagaccctagtgtgtattgttcccctccctgcacccatgtgttctcactgttcagctcccacttataagtgagaacatgcagtgtttggttttgttcctgcattagtttactaaggataatggcttccagctccatccatgtccctgcaaaggacatgatctcattcctttttatggctgcatagtattccatggtggatatgtaccacattttctttatccactctgtcattgatgggcaactgggttgattccttgtctttgctattgtgaatagtgctgaaagcataatgttctataaaggctttttttaatggtatgttatgaaaactggcatgtcctcagttttactctagcatcagaatatattttcrttattattttccataaattatggcagcataaatatagtatgccattaaaattctataatttaaaaattaaagaataaaaatactttaaaattaaaattaaattaaatataaacaaaattaaaattaataattaatggatatttt

SEQ ID NO: 744110 - DNA, 638 bp, Homo sapiens
ctaggtgagcaatatgactttggagaggtggagaagggacaaaacatgcaaaatcttttaggcaatggcaaggagttcaaattgttttttctgatgtattatgaagtcattaaaagatctggagagggaagtgacgtgagtgaattcttattttaaagacaacttttactactacttggagaatgaattggaagggttgggtgggaggagagagagtgtaaatgtgaagatcaattaggattctgttgtaatagactaggtgagagttgactggactggggtggtgggagctaagatggagaagattrggggtacttaagtatttggggagtgtaagtattcaggtcttggtaattaattggatgttaaggattgagagaggaatcacaaagaatttctaaacttggggctttaccaggccgataattagttatgctgtaatttagagatattgggaaattgaggcgggaagatagaccgattgaggaagtatagaattaggggattatgctgccttagaaatggctataaactgtaatattttctatatcaagctggatatataatttgtggtgttacctgtatgtagatagtattttagttcactgaactgttagtatctaatatcatctagaggg

SEQ ID NO: 744111 - DNA, 638 bp, Homo sapiens
ctaggtgagcaatatgactttggagaggtggagaagggacaaaacatgcaaaatcttttaggcaatggcaaggagttcaaattgttttttctgatgtattatgaagtcattaaaagatctggagagggaagtgacgtgagtgaattcttattttaaagacaacttttactactacttggagaatgaattggaagggttgggtgggaggagagagagtgtaaatgtgaagatcaattaggattctgttgtaatagactaggtgagagttgactggactggggtggtgggagctaagatggagaagattaggggtacttaagtatttggggagtgtaagtattcaggtcttggtaattaattggatgttaaggattgagagaggaatcacaaagaatttctaaacttggggctttaccaggccgataattagttatgctgtaatttagagatattgggaaattgaggygggaagatagaccgattgaggaagtatagaattaggggattatgctgccttagaaatggctataaactgtaatattttctatatcaagctggatatataatttgtggtgttacctgtatgtagatagtattttagttcactgaactgttagtatctaatatcatctagaggg

SEQ ID NO: 744112 - DNA, 611 bp, Homo sapiens
attcgggaataaacaacagcaaccacaaaaaagaatatcaaaatattatacaacataaaaggagagaaacttagcatgagaaagatagaggaataaatagaaattactacaggaaagaaaaaacacttttaggtttaggtctagacactttaaatgggaagattttctttccatctcaaggcagtaaaatcaaacatggtttttatcagtcaaggcataaaagatgatggctgrgtgcagcggctcacacctgtaatcccggcacttgggaggtcaaggcaagtggattacctgaggtcaggagtttgagaccagcctgaccaacatggtgaaaccccatctctactaaaaatacaaaacttagccaggcatagtggtaggcgcctgtaatccaggctactatggaggctgaggcaagataatcgcttgagccagggagacagaggttgcagtgagccgagatcgcaccattgcactccagcctgggcaacacagtgagactgcctctcaaaaaaaaagagagatatgatagcaaactgagaagaaagaggaattggacaaaaggaaggcaacaacttgaggacactaaagtggcataactaattataaac

SEQ ID NO: 744113 - DNA, 452 bp, Homo sapiens
tatagcctttttttaagggtcagttaatgcttcaagaaaaccttgttaatctgacacaggtccctacgctggtcttgcatgaatgtgcctttgacattaatgattaatttatagagaaactgaacttattttatctctcaaaatcagcccttataatctcacacacccacctcttccatgctagtccctgggccttggggagttgaatagctttaatttctggccctgtgtttcaggaatgcagtttattttgataggcatcttctacttggcctaaagayggggttttaattgctgtcattgtttaacatttagcaggacttggtgttctttttagacccaggagtcaaaaccctgtaacttaatgtaataagtacttttaaagtgcatacagagagatacatggatgtaataactttaatttaaaaaataaaattttaatctcagttttt

SEQ ID NO: 744114 - DNA, 507 bp, Homo sapiens
agagtgtttgcagtaatagatgagactagagagggatcctgggttcatgccatttaaaaacagtatgccatgctatagaacttttgtttgtaacttatagggaaccatgaatggtgtggtcatacttgtactttaaatagtttactctgacaatagtttgtaaggtagaattgcagaagtacaaacctaaagacaacatatgtcaaacagaacatcagtataacattcaaccttccttcttgctgccaagcttcaaaggcctaaatgacatttcctagactctcttgagctagtkttctggatgcacaagacgtaccactaattaggtgcatcaagtggccatgtgacctaagatgcttattatgggatgattgttatccgattccccaagctgtcaattttggtgtgttcataagccctccattatcaagtagaacagctaaaataagtgagtgagctctagtgggttctggaggaataaacaagttgcacgagctaatgactcgc

SEQ ID NO: 744115 - DNA, 629 bp, Homo sapiens
ctaaatcctatacttaaaaggtataaaatagccaattggatttaaaaaaaaaaaaagccatccttctgtggtgttcgagtcccatctcacatgtaatgacacccacaaaaagtaaagggttctagaaagatctatcatgcaaatgggaaacaaaaactaggtggatgaaacacagggaatttttagggtrgttaaactattctatatgatagcacaatgatggatacacattatgcatttatcaaaacccacagaatgtacaacagagtaaaccgtaatgtaaactatggactttcattcagtaggactatgagctgaattccacctactccatcctagttggagaaaaaaccctttccagagtttttgatatttgttttcctatttccttcacttaccacaccttcctgaggacaatgaccaagtttgttctatttagggtcagtaaactacaacctaccatttacatcttgattttgtaaagaaatttctattggactacagtcacacccattcatttacttgtttatggctgatttctctacaatgacataattgtgtatgagaggttatacgacctacaaagcctgaaatatttactatctctttacagaaaaagtttaccaacc

SEQ ID NO: 744116 - DNA, 576 bp, Homo sapiens
cattttcccatcttttgcaccttgtttctatgttgttttgggtatgcagaaatccattttgcatgcactcaaatacagaccacacatttgaaagaaacaatactggtgatcgaacagcaacactgtgtgtttaagtgtyttcttatcccaccatgtacataatcatttttgaaccagtccatcagcaactttgctggcttcttcaggcaaatgcaactttaatacattaaaatctcctggaagtcatcagctagaagaaatgccaatgcaggcaaacgaggcatttttaaactgaagttttagtccttgccatatcgtgtggacaatgcacacatttgaattttttgacaaatgcattgagctaaatggaagaaaaaaattttagtaacaccttgaaattcacttttagaagtcttaatcacacctaattccaaatccatcactatggttcagagaatcaactgaaatccattttcttctgcgtaaagacaaaagcaaggtaatagctctgcctaacatgaagcaatattcctgtgactgtgatttttggaattcagatgttagagattttagatt

SEQ ID NO: 744117 - DNA, 511 bp, Homo sapiens
ttccagaaagagatgctagaagctccacaaaccctaagtggaattcatgcagaaaagaaaagacaagaaaacccatacatacacacccactgaagcacatcataagaaaactgagaaacacaaagagaaaatcttagcagccagaggaaaaggacatattaccttcaaaggaacaataacaaataaccacagtttggctgacttctcaacaaaaattayagtagccaaaaaaaaaaaaaagaatgacatctttaaagtactgaaagtaactgccaatcttgaattctacaccaagcaaaaaatattcttcaaaaatgaaggcaaaacagagatgttttcagacaaactaaaactaagacaatgtgactcattaaaagtaatagcatagagttcttcaggcagaaagaaaatgatctcaaatggaagcacggaaatgcaaaagaaatgaagaatatcagtgtaaatgtaagtaaacaggaaaaaaaattgagcaaaacaataaaaatgtctt

SEQ ID NO: 744118 - DNA, 511 bp, Homo sapiens
ttccagaaagagatgctagaagctccacaaaccctaagtggaattcatgcagaaaagaaaagacaagaaaacccatacatacacacccactgaagcacatcataagaaaactgagaaacacaaagagaaaatcttagcagccagaggaaaaggacatattaccttcaaaggaacaataacaaataaccacagtttggctgacttctcaacaaaaattacagtagccaaaaaaaaaaaaaagaatgacatctttaaagtactgaaagtaactgccaatcttgaattctacaccaagcaaaaaatattcttcaaaaatgaaggcaaaacagagatgttttcagacaaactaaaactaagacaatgtgwctcattaaaagtaatagcatagagttcttcaggcagaaagaaaatgatctcaaatggaagcacggaaatgcaaaagaaatgaagaatatcagtgtaaatgtaagtaaacaggaaaaaaaattgagcaaaacaataaaaatgtctt

SEQ ID NO: 744119 - DNA, 598 bp, Homo sapiens
caatggtcaagtccagcaaaagagaaacaagccctacataggctgctaaaaattctagagaggttgaagagatggctacaaaactacagttttcaagtagcccttgctgaaacctacaaagaaatgagaatgaagataatctataatattttggaaggaatgaattagggaatgtctagtttctaaagattgggtgcaaaaacaasggttacagagaagcaagagagaggagttttgcctccctacatttcttttctttccatcttctgtcctgaaaacaattctgcacctcacctcttttgcagttttcatctatattacttagtccttctattagtccgttcacattgccattttaataatctcctaatatttatcattgctgataatttttcatccaaataactcccatttggagttaaaaacaaagtaattgattcatcatgtaccctactgatttccttatgctttctttggctctcttacctctaaaaactgcctccagctgcaagactagtattgcaggatttcaaggggtacacattaagtggtcaagatttgaaaaacatatcataattaagaactatttttatgatct

SEQ ID NO: 744120 - DNA, 571 bp, Homo sapiens
atatatatatatatatatatatatatatatatatatatctgttaaaggctacaccacactgtttttcactatcagaggcataaaggcaactcacctcttgtgattttccctgtagacctgatgaagttaaccaatgccccaaagctcctcaatcttgtgccagagagtatcccttccatattgccaaggaatgtttaatggagcaaggtttggggttttgtaaagtgtatttattgggatggatttggctgaagtctaagtctaattaattgatatcatggtttaaagttgtatgcaggaagacctgacaactcactagcagtctacaatcggcattattagttggtattaagtcttgaatagtctttgtcgccctaagagagaagcttcattttakaaagtataggattcattgcaacaaggacttattgagcacctcctatttgcaaagcacagcagatgtgcaggacagtgattttcaaagtggcctcagcatcacctgggcgcttgcacatccctggccaggcgcggtggctcacgcctgtagtcccagcattttgggaggccaagg

SEQ ID NO: 744121 - DNA, 659 bp, Homo sapiens
agttgggtttatttcactgatttctcctttcctgactttgaaatcctgtggcccttacttcattgtctgggttttctttcaataacttcttccccagggtttattcatgccagcctcccacctgccacttttccagacagaagaaaatatcytaagaaaacatcagctgcatccctgatgcccttctcctgtggctcacctgcgtgattcttggccatgtctccagcaggacaggtttccctggcattcttcctctctgttgtgcctcacctcagcatcttctttcagcatgggattgtttccataacttcactctgagagcatctggaggcatttcgtcaaatcatgaagctgtaccagtctctagggtaacaggttttatagctgaccctcaggttggttctgatgttccatagtaacgatagtgctaaggtttggagcgtccttcatggaaaagaacatctgcttagtttcagctaaaagatgcatgttataacaagttccatagactcttacactcttctccatttactcctaatcatactttggcagtatgcatttggagctgcaatatagatgccctgatgtttaaaaaaagaaaagtagaaggctattttataaaattataggcaatgaagttaactgcagctaaagtggtg

SEQ ID NO: 744122 - DNA, 659 bp, Homo sapiens
agttgggtttatttcactgatttctcctttcctgactttgaaatcctgtggcccttacttcattgtctgggttttctttcaataacttcttccccagggtttattcatgccagcctcccacctgccacttttccagacagaagaaaatatcctaagaaaacatcagctgcatccctgatgcccttctcctgtggctcacctgcgtgattcttggccatgtctccagcaggacaggtttccctggcattcttcctctctgttgtgcctcacctcagcatcttctttcagcatgggattgtttccataacttcactctgagagcatctggaggcatttcgtcaaatcatgaagctgtaccagtctctagggtaacaggttttatagctgaccctcaggttggttctgatgttccatagtaacgatagtgctaaggtttggagcgtcyttcatggaaaagaacatctgcttagtttcagctaaaagatgcatgttataacaagttccatagactcttacactcttctccatttactcctaatcatactttggcagtatgcatttggagctgcaatatagatgccctgatgtttaaaaaaagaaaagtagaaggctattttataaaattataggcaatgaagttaactgcagctaaagtggtg

SEQ ID NO: 744123 - DNA, 515 bp, Homo sapiens
  misc_feature 207: n = A,T,C or G
tttgacatctttttaataaaatacagttcaaacaacacagacatttataattgacctagtatttgaggcaagttacatatctatccccaatggcatggaaagcatagagtagcggaaataattccccaaaggattttttaggtaattagattggattaaataataaaatacattgtgcatactatacaatccccaaacagataaagntacattaaaacatatgtgtaaatatgtttggtgacttagttttcttaatttagaaagggcttcaatgccttgttgcttctgaatcaaataactttgtaaacctcttgagcaargctttcattagattttcaccttcctgattcacatttactaaaatcacacgacttagctaatagagtgctgatacctttaagaaattccataagattatagcagtcaatttcaatatgaagcttacgtttgaatttccttttaatgttcaagaatatttactttttttaaatgatgattttcagaatttgattaat

SEQ ID NO: 744124 - DNA, 592 bp, Homo sapiens
aagggtgttccctctctggagtccagttgtttcagaggaggaagggcatcatgagggaccaggggccaagttatcattttatttttcagtaggattggaatttcggtaacacagaaccctgttatgtttggaggaaacaagttccttaaagctcactgcctttcctccgttcccagctccgctctgcattggataaaacagaagagctcgaggtgagcaacggccacttagtgaagcgtctggaaaaaatgaaagcaaatcggagtgcactcttgtcccagcagtaaattccagctctgatcaggcaactggttggtgactggagagcattgtttcataggcttttctctgtcctrtctgggagcgctgcttcttcccctgccttccgagagacgaagaccgtggcgagcttggcgcttaggggctcccgtgccatggctcaccccagggagccccagcagccaccaggtgcctctgtctgcagacccctggcccgggctggcgccgacgctcagaacctgcaggtacttcataagcacacaggggcctcgagggagctctgtgtctgaccgcacagcagcctctgaatgcc

SEQ ID NO: 744125 - DNA, 570 bp, Homo sapiens
caaagtaaattgaaaactttatggaaaggagtcaccattctagatgccattaagaatatttattattcatgagaggaggtaaaaatatcaatattcacaagagtttggaagaagttgaatgcaactcatggatgactttaaggggttcaagacttcagtggaggaagtaactgctgatgcggtagacatagcaagacaattcaaattaraagtggagcctgaagatgtgactgaattgctgcaacctcatgataaaatttgaatagatgagaagttccttattgtggataagcaaagaaagtgctctctttttttattatttgttatttttgtagagatgggatcttgttatttttcccaggctggtctcaaacttctggcctcaagcaattctcccactcagcctcccaaagtgctggaattacaggtgtgagccactgtgcccagcccagaaaatgctttcttgagatgcagtctactactggtgaacatgctgtgaacattgttgaaataacaacagaggatttggaatagtacataaacttaggtgacaaagcagtggcaaagttt

SEQ ID NO: 744126 - DNA, 473 bp, Homo sapiens
tatgtgaccctgccagtcacagctgcatggtgacttcttatagctctgtcccagtcattgcttttttaattttaattgcggtaaagtatacaccacataaaatgtaccatcttacctatttttaagtgtacagttctatgccactaagcacactcaygctgctgtacaaccatcgccactatccatccctagaagttttttcattttgcaaaactgaaactctgtcccagttaaacactaaccccctgctgatttaccacctcccccagcccctgggacccacgattctactttctgtctctgactactctaggaacctgtattagtggaatcatacagcatttgtgactggctcatttcacttaaggttcttccatgtcgtagtgtgaatcagaatttccttccttttgaaggccaaataatattccactgttatggatagaccacactgtgtttatccattcatccatgga

SEQ ID NO: 744127 - DNA, 488 bp, Homo sapiens
ggggacaacattgtggtttctcgttgtctagtcttttgtctgtgtcatgtcccgccacccaccttttggatgttccccggagtcacttagctctttgacctggtttaacatctggttttcttgtggattttaatgttgtttaccaaatcccagggcctgccccgagggcctggtgaccctgggcaggccatttcccgtcctgtgcaactctgatctgcaggatggggtggtgtgggagcacccatgtccctgcctgaggactctccaggcctccgtgggggcggtagcagggcctggcccatgcggcgcgctggtgctgctcacccgcctttctggctttargaagtatgcttggagctcatctaacatcttattttccattttctgtttcttaatacttacagaggcttccgactttttctccaggtctgtattttccttgttcttctctggtaatttggaaggtagacagtcagtttttagttcaa

SEQ ID NO: 744128 - DNA, 609 bp, Homo sapiens
ctcaagacacgtaaagatggccttcagggcatttgcactctgtggataagggctctccagtggacgggtggcagcaggctgtcacactccacccacctttctggcaccccagggctgagctatagcccgcaggcgggctgggctgaagaaagattgaaaattttgcaataaatggaattttagttacccaaggagataagacaaggagtttactgacaacgcagtgtgaaactcagtaattacgaatcgtgctagggatatgagattgtgaaaagcagtactagatacacccctggcatcaccaagacacaaacactgaaggtgaaaatacagcttagaatctccagttgttaagaatctctgctgtactgtttgtgcctcgcgtctttagataaactagcgttcctgggctcctagtgttggctcggttgtgctgttccatgttcgccttttgaatgggatgggggtgcttttggagtcgtaaggaagtgcttgtcacttaaacgtgtttwcttctttggtgctcagaattccagctacagcggtgacagcagattctctactttgtcatcatccagggaggagaagttggttggtttccatttaaat

SEQ ID NO: 744129 - DNA, 650 bp, Homo sapiens
cagtgtatctaaaaggtaggatcccaactccagtgtgtccagaagagaaggttgggccctgacccagtatgtctggaaggtgtgcccatctccaatttccagttggcctggagggcaagcactaaaccaaagaagattattctcaagctgtaaaatttaawattatttgccctattgtatttcatacttatttggaaactattagtttttattctcttatatttctccattttggaataagaatgcttatcctatgtctgtttaaccactgtattttggaagcacataacatgtttgactttacaatttcactgttggagagcaatgtttcacagaataaaacttaccttgaatttcacccacaaacaatttagatgatattcagatgagactttgtactttacagttttgtgttggcgctggaagaagtgaagacttttggggctttggtgatgtcatgaatgtattttgtaggtaagaaagacaaaaattcaggggcatcaggggaaaatgctatgatttgaatgtttgtattctccgcaaaattcatatgttcaaatcctaaccctcaagtttatagtagtaggaggtatgggggtaaaactgtcatgaatgagactagtgcccttataaaagagatccaagagaga

SEQ ID NO: 744130 - DNA, 650 bp, Homo sapiens
cagtgtatctaaaaggtaggatcccaactccagtgtgtccagaagagaaggttgggccctgacccagtatgtctggaaggtgtgcccatctccaatttccagttggcctggagggcaagcactaaaccaaagaagattattctcaagctgtaaaatttaaaattatttgccctattgtatttcatacttatttggaaactattagtttttattctcttatatttctccattttggaataagaatgcttatcctatgtctgtttaaccactgtattttggaagcacataacatgtttgactttacaatttcacwgttggagagcaatgtttcacagaataaaacttaccttgaatttcacccacaaacaatttagatgatattcagatgagactttgtactttacagttttgtgttggcgctggaagaagtgaagacttttggggctttggtgatgtcatgaatgtattttgtaggtaagaaagacaaaaattcaggggcatcaggggaaaatgctatgatttgaatgtttgtattctccgcaaaattcatatgttcaaatcctaaccctcaagtttatagtagtaggaggtatgggggtaaaactgtcatgaatgagactagtgcccttataaaagagatccaagagaga

SEQ ID NO: 744131 - DNA, 650 bp, Homo sapiens
cagtgtatctaaaaggtaggatcccaactccagtgtgtccagaagagaaggttgggccctgacccagtatgtctggaaggtgtgcccatctccaatttccagttggcctggagggcaagcactaaaccaaagaagattattctcaagctgtaaaatttaaaattatttgccctattgtatttcatacttatttggaaactattagtttttattctcttatatttctccattttggaataagaatgcttatcctatgtctgtttaaccactgtattttggaagcacataacatgtttgactttacaatttcactgttggagagcaatgtttcacagaataaaacttaccttgaatttcacccacaaacaatttagatgatattcagatgagactttgtactttacagttttgtgttggcgctggaagaagtgaagacttttggggctttggtgatgtcatgaatgtattttgtaggtaagaaagacaaaaattcaggggsatcaggggaaaatgctatgatttgaatgtttgtattctccgcaaaattcatatgttcaaatcctaaccctcaagtttatagtagtaggaggtatgggggtaaaactgtcatgaatgagactagtgcccttataaaagagatccaagagaga

SEQ ID NO: 744132 - DNA, 626 bp, Homo sapiens
gtaggacaaaaactcaggcaaaggcgctgcggccatagaggtttccagtaagaaaaattgacaccccagatatcctgtaaaattaaccactgagttattgctgccctcttacatgtatctttccctctccagaggtctaagccccttcagcagggcccaaagtatgaagcaaccagctcctgtatacacttgcaggacgagcctgttttgaactaatttcattgggggttccctgtasggctgctgtaaatcacggagggtcaacaccccagacaatcccacgaggcccccagtaacccagggtgcctttcagctggaaggaacaaaatgccctttcttttccaagctgagtaaactcagtctcatttacttatgaaaacaacagtacagttcctcatgcaaatgcgcccagccaagccaaatcaagattaatttcgggagaaaaagcaatggagaagaccctttaaaatgcacctctgaactacaattaggatccttaaacaacaacttcctagaagagcaaaaataaaagctcagaataaatcaaggacctttcatcaaagggaggttctgggctcaggaggacttagcagttccaccagaggagaagctcaaagtcgtggagg

SEQ ID NO: 744133 - DNA, 626 bp, Homo sapiens
gtaggacaaaaactcaggcaaaggcgctgcggccatagaggtttccagtaagaaaaattgacaccccagatatcctgtaaaattaaccactgagttattgctgccctcttacatgtatctttccctctccagaggtctaagccccttcagcagggcccaaagtatgaagcaaccagctcctgtatacacttgcaggacgagcctgttttgaactaatttcattgggggttccctgtacggctgctgtaaatcacggagggtcaacaccccagacaatcccacgaggcccccagtaacccagggtgcctttcagctggaaggaacaaaatgccctttcttttccaagctgagtaaactcagtctcatttacttatgaaaacaacagtacagttcctcatgcaaatgcgcccagccaagccaaatcaagattaatttcgggagaaaaagcaatggagaagaccctttaaaatgcacctctgaactasaattaggatccttaaacaacaacttcctagaagagcaaaaataaaagctcagaataaatcaaggacctttcatcaaagggaggttctgggctcaggaggacttagcagttccaccagaggagaagctcaaagtcgtggagg

SEQ ID NO: 744134 - DNA, 504 bp, Homo sapiens
aaaaagtgagaaagatctaaaattgacactctaacatcacaattgaaagaaatggagaagcaagagcaaacaaattgaaaagctagaagaagacaagaaataactgagatcagagaagaaccgaaggagacagagayaagaaaaaccatttgggattatgttaaatgaccaaacccaagaatatttggtgttcccaaggaagaaaagaagtctaaaaatttggaaaacatatttgagtatgatggttgttcttaattcattaactaaaaagactctatggaatccatttccaccagaatcacactaaggattaatatcattcaacaattttatttatgtcttatataatggaatagacaactggatattttaagagaatttttggaaatgaaaatatttaataataaagacattaaagaaagtttgagctttagactccatcataaactatcagtttcactttagccaacacattgttgtcacatctttctacatgtgcatatt

SEQ ID NO: 744135 - DNA, 504 bp, Homo sapiens
aaaaagtgagaaagatctaaaattgacactctaacatcacaattgaaagaaatggagaagcaagagcaaacaaattgaaaagctagaagaagacaagaaataactgagatcagagaagaaccgaaggagacagagacaagaaaaaccatttgggattatgttaaatsaccaaacccaagaatatttggtgttcccaaggaagaaaagaagtctaaaaatttggaaaacatatttgagtatgatggttgttcttaattcattaactaaaaagactctatggaatccatttccaccagaatcacactaaggattaatatcattcaacaattttatttatgtcttatataatggaatagacaactggatattttaagagaatttttggaaatgaaaatatttaataataaagacattaaagaaagtttgagctttagactccatcataaactatcagtttcactttagccaacacattgttgtcacatctttctacatgtgcatatt

SEQ ID NO: 744136 - DNA, 534 bp, Homo sapiens
gacccgtgacttggccagaggagaatttggaaaaggagattggagcaaatgtaccatatggtataccaaaagtcccagactgtcctctctgttcctgctagacctcacgaataacaggggctcctctgagtgcgagtgtactgacctccagagtgcatgacttcactgggcagcctcttcacccatggtcacccttccccagcgcacacctgcaraaaatggctaaccacaccttggactcaggcactgtcctgggttctgccctgtcccctcactggcttgcagaatctttcttattactctgcctttattagctcccttctttgacttcatttgttcatgcatgcactcattcaacatgtatgttttgaaaactccaccaagcgtcatgtgagccattggtgaactagacacctgttctttttctcacttcctttttgctggagctccgtatgccactgtaattatctggaaaatgctgtttcggagctgaatcaatcccaagagttctcttgtctgtgaaaaggtattgaa

SEQ ID NO: 744137 - DNA, 488 bp, Homo sapiens
gagtcaggcggacctaggcacgaatcttagttctaaaatttatcagctatggatattgagcaagattctcaatttctctgtctcagttttcttatctgtaaaatggacataataatactatctcatagtaggatcactgtaaaatttagtaaatctcctttgtataaagtgtctcttgccaacatgacagcaactggttagtatcatcagaactcggacttgaattattcaggctctccatcccaaagtgcagcggtctgtgggagtctagagataatagagattgtgggaaccccaacgaagcaaataaccttgtggccaccctacttctkaaaggctgctcaattcaacaaggaatatttacatagttcagaagtaagtctacacccagacacattaaaacctgtgggtgaaatctactttttaaatacttcagcacaatcaagcccagtaggaacttacaggctctgatgaactcattgcttcaa

SEQ ID NO: 744138 - DNA, 563 bp, Homo sapiens
tatattatttgtattagatgaggaaatatttagtaatctaaccttcacctgtccccagtatcctagaatattctagaagctatctattcaaatgcgattcttgaaccagcagtattggcatcacttaagagcccatgatggcagccacaacacagacactcaataaaggactgactaaatgaatataaagtgtatgaagacatggtctctagtctcaaagttgggtaatgaaggagatggaatcttgttaaggagaaacataaaagaaggcagggagacaggaaaayccaagtataattggtagcacaaaatctgcaaaagctgacaggagatgagaacaagcatagatagagaaattagcaatataaaaaaaaagaattgaaaattgtcaattacagagacacggaaccacaccagtatttctcaaaaaaccttatactgaataaaaaagccagttacaaaagtatacaaactctatgattcaaatcataagaagatatatgtcttctaggaaacacaaacttcatgtacagagacagaagcagagactgggatagggtgaa

SEQ ID NO: 744139 - DNA, 610 bp, Homo sapiens
ctaagacagtgtctctataccacaattgctcaatgaatatgtctttcatctttttactagacaacctgaaaatgatgaaacttttccctcaagttacgcatgcatcatcctaacttgaactttcagccttcactagaaccyggtctatttatctttgtttataattgttgtctttccactagttccttaagctattatcacatttctattctcatgtttactgacatgtaatctagctcccgtatcaacaactcacaagtcaccaagtatcttctcattaacaagccaaatattttcctcctctttatttcactttctctggaatacttcacactgtcgatggaatcttctttcttgaaacttctttctcactagatgttggaggcactggcatattccaactgcatgttctaccatatttttctttgccatttttaagttttacttttcttaatctctcaatataacaataggatttatgcaaagtttaacagtcatctttttcagcttattgtttgtgatttcctttcaaaaatatgacttcatctcttacctctaatctaaaacattcacttctatgaattttgtcttattattttccgatgttcat

SEQ ID NO: 744140 - DNA, 527 bp, Homo sapiens
tattttcatcatcagctatctggaaactcatctaaataagaattcttatattgtgaagattaagtgatataacctatgtagagtattaagtttgtgtatctgtcagagtgagagagagggagtgaaaaaattaaatacggttgactatgtaacagaaaaagccaaatacctggcacawagagttagtaataatagcaacgcaaatttaaagagatttttctagcaaaaatttctatacttattttaatttttataaaaaatatatataatatagcttatgtatataatgtttttatatatatggttttaaaatgactacaaacctacaaaaaacagccatctctggatctaccatttcctatctcaagtccactgctcagaggaaacctctttctacttctagttattttttctgtgatttacatttttattaataggcaatatgcttatatttcttcatttatcaagtttagataatatcattattttgttaaatcaataatcaatgtttattgtattattgtgtt

SEQ ID NO: 744141 - DNA, 645 bp, Homo sapiens
tcgtgtcttctttgtatgtcagcacacaatctgccatctccccaagtctgttctgcatgagtgagtgagagtgaccccagtcactgctgtcatcagcaacatacaggtcatggtgccaaggaaaaggccaatcagaccagatgtaagacctggatccacccctacctgcaccccaaggaccggccaggggagggtggatgtgctgcacaccagagcctcatggagcttttcaaaagtgggtccctgagacaccacccaccacgcctggggacgattaatagatgttatgggaacaaaggattctgtggtcagagagcctrggaaatgctgagtcaaaggaggtcgagcatgtttcattattgtaggaatctttagctgtaaatatgctgtatcttgtttactctcccagaaggctgtagaatccaggatcctctaacttaatttggtcgtaactggccctttctctgaagtatggcgagcatcacttggcttcctcaacacccttctgggaagcaaggctctgatgctcattagaaaataatccctgggaaggatgaacagacaaataatgctgggtctgtgggggtccagggaggcagcttatggcaagggcgtgtgtgtcctgggctttaagaaaggatgagg

SEQ ID NO: 744142 - DNA, 652 bp, Homo sapiens
tcttttcacttagaaattctggctatgcctttttttctcccttctgtggatgtatagaccgttcggctgcatcagacactgtattgaacatcagggttgatttaactcattgttgctcagctgtggctatgctttggaatcacctggggagcttttacaaaactactgatgcccaggctctactccaggtgaatccattacacaatctctggagggtgggttctgggcaatgggatgttaaaggcacacacgggcatgcccatgtgtaagtcaggcacacgtacaaatgcttcrtgaggtcatcttaaattgcagccggggttgagaaccttgagctctgaccagctggttaggagcgtgcctccttcctcactcactgcttccaagtcgtggcttcccaaagctgtgtacttgcttgaagcattgttcttattttcaggtagcaccagatggaagggtggtaggaatcagggtgtagagggatattagtttgcaaatccttttattccttgaatttcctgagcattgttgctcaagaatgttccagaatctcagaccccatacagggggtgatgctgctaccaacattaaaatccattagggctctatggggatatataggctacacacatgaggcaacaattggaggagt

SEQ ID NO: 744143 - DNA, 519 bp, Homo sapiens
tgcattggtacttaaagtgtggtgcagcaaagtccataaagtgaccttgacgtggtgctgcaagatgtggtggacaaaaattagagttcgattctctccaaagctgattctccatgtatgctttctcctctgcctgaaacacccttttcccttcaccagcagataatcctggctgacttcaggactcagctccagcacaccttctagaaatggcccactyccacttagggttaggccacctctcctttgtgctctgttataatacccaaatgtgattcagtttttaaaaataacattttttcccttcagttgcaaagggaaaaaatgttaatgctacaaactgaaaagtccaaatgagctcaaaaaagaaaataagagtctctcattattccactctctaggggagtatacgtacacacacacacacacacacacacgtaacatgcttctaaaaatttttgcttttgtacttttatctcttaacagtatgtcatgaagattttcccactcatttacaat

SEQ ID NO: 744144 - DNA, 443 bp, Homo sapiens
ctaacactgcagtgatttatttgaggataaatacctctgtcagtgtcttatgactgaacacaacagtccaagctgactggaacgagcggaatgcgaggacgctggagctgaggcagtagaggcgggagctgggccacctctctgcggaaactctgcctccaaggaggagccctcacaggaaggtattcctgtggggaaaaagcagtgccctcaggaaytggagcatcttgaataatgaggaaacactgactcatgctagagtgagcgcttgggaagggggaaggaggaggacctctgtacctgcacacacaaagctactccctccaatactcagtgcaaccttgccaggattggcaagataactccaagaacaccaaccgccctcaccactgtacccgtagactctctgggcagctggtggggcgtctccaagtcctgaaaac

SEQ ID NO: 744145 - DNA, 583 bp, Homo sapiens
ctttcatactctcaaaaagtattgaagaccccaaagagctttgattctgaggattataaataggatatataaatagcatcaataaataggatattataaatagcagcaatagtattagaatggaaaatgagtaatgtttaaaatatttttactaatcatttaaaagtagcaatgataaatccttatgtgttaatgtaaagaacatgttttttaaaaaacaactatattttccaaaataagaaactatttagtgaacaaaaggcattattttacatttttgcaaaasgtttaaatgtcatttcttgctaatagaacatcacagactgggtaactttaaaagaaaataaatttatttcgctcatagttctagaggctgggaagtccaggatcaaggggctgtatctgtagggccttcttgctacatcgtaacatgaccgaaggacaaggaagcacgtgaggcagagagaaaaatggaaaccaaacttcatccttttaccaggagcccactcctgagataaatatccaactcctgcaataagggtattaatctactacttaaaggccccatgtcccaattaattta

SEQ ID NO: 744146 - DNA, 583 bp, Homo sapiens
ccttctgctagcttttgaatgtatttgctcttgcttctctagttcttttaattgtgatgttagggtgtcgattttagatctttcctgctttctcttgtgggcatttagtgctataaatttccctctacacactgctttaaatgggtgccagagattctggtatgttgtgtctttgttctcattggtttcaaagaacatctttatttctgccttcatatcgttatttacccagtagtcattcaggagcasgttgttcagtttttatgtagttgtgtggtttcttaatcctgagttcttatttggttgcactgtgtgagtgagtttcttaatcctgagttctagtttgattgcactgtggtttgagagacagtttgttgtgatttctgttcttttacatttgctgaggagtgctttacttccaactacgtggtcagttttggaataagtgcgatgtggtgctgagaagaatgtatattctgttgatttggggtggacagttctgtagatgtctattagttccgcttggtgcagagctgagttgaagtcctggatatccttgttaaccttacgtctcgttgatcta

SEQ ID NO: 744147 - DNA, 593 bp, Homo sapiens
tgcaagctactctttatcattaggacaaaggcttctgtctgggattttgctctttgatgcttcatcatctttcctctaaggagggaaataagaattcattcctgagtgcacagtattctgagcaactcctcccactgactatgtgagtaacaggggagagaaagaatttagggttatttcccatgttactaaaaatttgaggtttttttttcatgtattcaattatcctattaaacactgaaaactgggaaggaaatgtttagagcaaggtgtcttcgtgaagagtgcagcatttgttgacattttcaagaagcacgatgccctcagtgtgaggaaccacgcccacaacacwgcctttcaaatgtagccctatctgtacaagcagcctgactattttttaatcaattttattattcctgaaaaacactcatgtattttagaaaattattttccacaattggattttaaatgtgtcttcaagaatactggtttcaagaagcgactgttgaggatttctcagcacaaaaaatcagcaagaataattttttatccaccttaacaaatgtttaaataagtatataggctgggtgcag

SEQ ID NO: 744148 - DNA, 593 bp, Homo sapiens
tgcaagctactctttatcattaggacaaaggcttctgtctgggattttgctctttgatgcttcatcatctttcctctaaggagggaaataagaattcattcctgagtgcacagtattctgagcaactcctcccactgactatgtgagtaacaggggagagaaagaatttagggttatttcccatgttactaaaaatttgaggtttttttttcatgtattcaattatcctattaaacactgaaaactgggaaggaaatgtttagagcaaggtgtcttcgtgaagagtgcagcatttgttgacattttcaagaagcacgatgccctcagtgtgaggaaccacgcccacaacacagcctttcaaatgtagccctatctgtacaagcagcctgactattttttaatcrattttattattcctgaaaaacactcatgtattttagaaaattattttccacaattggattttaaatgtgtcttcaagaatactggtttcaagaagcgactgttgaggatttctcagcacaaaaaatcagcaagaataattttttatccaccttaacaaatgtttaaataagtatataggctgggtgcag

SEQ ID NO: 744149 - DNA, 627 bp, Homo sapiens
gtcagttttaaaaagtgacttttatgtcaaattatttttgccactaatttttctaaagtttttatatcaaatatgtattatttttatttaaaaaatagtaacaagaaatagttatcatattttaccaactggaaaagccaaggtcttactctaaacttccactgttataaatatatggttcttatatgattgtaatcattgcgcacatgccaggtgattgctatttattacttagcaaagagttttccatgtgtctctaatctacacatatttgtcagatttataggccgtaaaatattttattgatagaacacaattaactaactcacttgccaacatttagacatttgtccggacttttaaaatataaacattatgattaggcactgtattagcttcctaaggtgccataaagaagtatcacaaactaggatgccttaaaataacataactakattctctctcagttcttggagaagtctaaaatcaaggtgttggcagggccatgctccctctgaatcctttgagggagaatcctcctttgcctcttccagcatctgtagcctcacacattccttggtttttgacagtatcaccccagtcttcatctcatatggccatcatccc

SEQ ID NO: 744150 - DNA, 491 bp, Homo sapiens
tgtaatcttaaccatatgagttcagaaaacaagttaggaaaaaattgaacaattctatgaaattactacttctaatcttcaaaagcatcaaggttgtggaaatcaagtaaagactgaagaactgaaagggatactaagatgggcccttttctttatataaaggagattattgagacaactgacaaaatttgactgaggtttgaagactgggtagcagtaataaatcaatgttaatttcccgatttcaatggtgrtattgtgagtatgtaggggagtgtcctggtttgtaagacatgtgcaccagaaaacacagtgggactaaacactccaatcaaaaggcagagattgtcagaccaggcaaaaaagcaagatccagctacatcctatttaccagaagcacactttaaacacatgtaactacatttatatatctatatttatgtaaaaattataaatatatatttgaagaattcttcaaataccgtgttcat

SEQ ID NO: 744151 - DNA, 491 bp, Homo sapiens
tgtaatcttaaccatatgagttcagaaaacaagttaggaaaaaattgaacaattctatgaaattactacttctaatcttcaaaagcatcaaggttgtggaaatcaagtaaagactgaagaactgaaagggatactaagatgggcccttttctttatataaaggagattattgagacaactgacaaaatttgactgaggtttgaagactgggtagcagtaataaatcaatgttaatttcccgatttcaatggtgatattgtgagtatgtaggggagtgtcctggtttgtaagacatgtgcaccagaaaacacartgggactaaacactccaatcaaaaggcagagattgtcagaccaggcaaaaaagcaagatccagctacatcctatttaccagaagcacactttaaacacatgtaactacatttatatatctatatttatgtaaaaattataaatatatatttgaagaattcttcaaataccgtgttcat

SEQ ID NO: 744152 - DNA, 598 bp, Homo sapiens
aaatctcacagcagaacccactatccttttggacaatctgacctttgtactatcctctcactcagaccccaggaaaggggaggatttaccagccctgtgggtgggggtggaacctgggatgtgctgctgttacggaccctgggctcagcaacctaccctccacttcccttccccccacgcctccgcccaacacacacgcacacacagtccagcctcccaccggacacctaacctcagtsccccctgcagcgccaggaggaataagtcaggaggtaagagcccgcccaccgtggagcctgtaaggctctggtcgccccctccagcgctgggcagtgcaaaggtctggtgactgcgggggtcttggggacaggagccgctagccagccgggccgggcacgccactggtgaggttaggcctattgaaaatatcaaatcgcctgcgccaggatagacgccacacatgcattcaatgtcaagggcattggagcaaaacttggagacgcaggactcggagtgtctcttccctcagtgccgggtctgagctcgcgggggaatctcctactctcttcccgaccaggcgcgggcctcgtggggcccc

SEQ ID NO: 744153 - DNA, 554 bp, Homo sapiens
gccactgacaaaaagtcaaaagagcaggaaactctgacatggagtcaaagatcaaggctggaatttccagaaccatgacaggagtacagaacagtggtcatgagctaatcagtcagcctttcttgcagctgttgccatgttatatgtgtgtgtttgttgcagataaagtaaatattaataagtttatatgcatagtatgctttatagaaatcatatgattgctcttccaaaaaaaataacaagttttttaagcaaaataagtcctttaactggcagtttccacatatgactctgggaagtgatgttaattttattaggagatctgaatgtgaggttattcgtatattacccaataatatttgtcagcatttttcagtgtttgaatatttkttataaaacataattcttggtaaaaaaaaatagtaaactgaaaattcctttttattacatcattttaatgtccataataataagatatgaagaatggtggaagtatttaaagaataacatatgacttagaataatttgtgaaatttccaagaattccagtatct

SEQ ID NO: 744154 - DNA, 573 bp, Homo sapiens
aacgttctctactggtcttctaaggctgatgtctttatatttcatcttagcgaaaagagcagaaataataataccaaaaagaggggaagaaaaaggaaaagtggaagaaaaaaaagttagacaagatgtaacattataaaaacaaccttaaaatgcccagatataactctaataggagactgaaygaatagactttgtgggaaaaacagtagtaaactttaaagcctctgaaagaattatatgcctaagggaaaaataaacatttgcttccaaaattaaaataaaatgagaatttctgatttttcttgaaaagtaaaaaaaaaaaaaaaaaaaaatctgagagtgtcctggtactgaattcccactaggcgtttattggctgcagaactagctaaatgaactgcgactggcccctttggactaaacagaattttacaactttctacaatctgtacttgaaggccccagtctttgctttgtgcaggtccctgtaataagtttggtttgcaacccccagcatggcttataggttcttagccaccaggtactcttttactagctagtcttaagggt

SEQ ID NO: 744155 - DNA, 642 bp, Homo sapiens
ggtacccctttgctaaatttctcattcatatactgaattgtttttatttgttcgtattgctttttggagttctattgcatctcactgagcttctttagaatcaataatttgactcctttttctgggattttgttaatttctttttattagggacctgtttctgggtaattattgtgttcctttgggggtgtcatactttcttgcttttcatgtttcctgttcttgtgttaataccttaatatcttcatatctagtgtgtcagttgcttcttccaattttttgaatttgctgtcaaaggaaagaacattttcctaaggatgaatctaaggggttggttggattgggcactttggctttgattctgtgttcatacagtggtatagtctctgtatgacttctacagctataggcagcatcagcgatatctgatatttccttatgcagttattagtggaggttgtggtacagttttkctggccactggggtgccagctaggccaatttttgatccacagtggttgcattggtgagctgggtatgcctgtttgtaaacctcagggtggtgtatgctggtacctgggttagtgggcccaggtgggccaattttgggatctccatgttgcttactcagatgccaatagt

SEQ ID NO: 744156 - DNA, 608 bp, Homo sapiens
atttatttattaaaaatctgcgtgttgcttggatacaaattcacaacaggcacataacttccccaaatttgctgatcctggaaggcagtcccagtgtgttgtgattgtgtggtacccagggttgccaagccggccccccagcccctctggggcagggtgaaatctggacatgttcgactcttctcttggtggaagaaaaagatacagaactgactcttctcagagaatttgctgggaaattcccaggcttaatgtgttgcctcttgatgattattttatatcataagaaaagcactgattcctaagtagatctgcatttattgtttaaaacacacttttggtcaagcacatgaaaaatctrttttcttgctttgggttacatacatttactttgcacattcttcccaaatatctaacaaatttctgatggaaacgtgatgaagtaagactgttggagtggggattcatgaagaggggtgtggagcattgaaagagaagaaagagaaagaggaaaaagttctcagggttcagtgatgtgttaataactattaataactattaataactacaacaaaaatcaagaggttgaagttttatgggcatagttt

SEQ ID NO: 744157 - DNA, 543 bp, Homo sapiens
aataatgaaactacagaacgctttccctaatcccacactttaccaccacatctatgtaatacaggagattatgttgaaagaactgcaagtcttagaccctatttaaggcatctctaagaaaaccctagagcaatagcgggggagggagaaaaaagggaactagaggaaattttagcctctgaaatctacaactagagcaaacagtaaaacataacctacagatagcatcataattaatgacgrgaaactagatgctttctctctaagatcagggatgaagcaagaatatctcctttcacctctcttaacgtcatactgaaagtcttaactaatgcaataaaacaagaaaaggaaattaaaatatacagattggaaggaaaaaatgaaaccatcattattaacagatatcataagtgtctatttagcatattccaaataatcaacagcaagaaaaaccccttggaactaataagcaattatagtgagattgcggaaagtaagattatatacacaagtcaattcttttactatataccagcaatg

SEQ ID NO: 744158 - DNA, 611 bp, Homo sapiens
attgctaatataatctgagctaataaaaaacacaacaatagcaatatacatagaatccaattcattaatctcacacatctttctgtgtttcactcttttggttttaagctagattttcatgaagtcagtaagtcttattcatatattttttagaaataacaataacattcagcagtatacttaatagcttataaatcaaatgtctcttttaaatggtaaaaactaaactcattcttagcatattacsataagcaagaaccaaattcaatattcagattaccatatttggacgattataaatgagaattttgtctggtttgtgttgtcctatttttagcgcttcttctacaagtggtacgtactctaccctccttccaggttcaatgccaaatgatgctgtaacaaccaccttgggctacaattaaaaaataataatggagagaaagctttaacaatgttaattaggtaatcacaatattttagttgcagactggcaattcaacatttgtaaagaaatgtctgaatgtttctgttttctattgaatggtctgaaaaccagtaaaccctttgtaattgttagagacttgatcacttctacacaaatctcactt

SEQ ID NO: 744159 - DNA, 600 bp, Homo sapiens
ccaataatttataataattttttctcattctaaatatatattcatgttcaccaaatattacattatattattttcttaaaaaggctcccaaatgattaaagtttcaagccccacaaagcctagacctgcccctgtccttaagatacactttatactctttacctgccaacttgttaagtcwttcttcaagacaaacacaggtgtaggcaaaatgtatccctggtgggaaccacagcttatgttaacctctcttttcagtacattctggacatgcctcaaatgttcagctatagtcagtgttcataaatctctattactgcacagtaagctctataaggccaagtttggatgtcatttatttttgtgtttcctatacctagcacagtgcttggcatgtcatgagctttcagtaaacgtttgcggaactcattaatttgcagaaaaataagtcctcatatttttaagtacattgtttcttcaccaagaaatccaaagcaaaagagacacataataaattattcggaaggcagataattgacccaaagtattgcatgtattcctgaattctgatttctagttataatacatttcatctaggaa

SEQ ID NO: 744160 - DNA, 608 bp, Homo sapiens
caacttataaagaccattataaatttctgagttatgactctactatgttaaaataaaataaaaataatgtatctaagaaaaaatgagaatcatagttcttatgtattttcatgggttcattatactatttcaaaatattttaacatttaagtaataaagataattcatgaaggtttgtaactaaaatgaaccacaatttaaaacttaaacaactgggtgggtagttgtgctagtcaccaaaagaagatattccaagaatagatttgcagaaatggagaatgataatttaaagctgaagatgtctatatctagatacagatatatttatatggtaactggaaatatacataagttgaaaataattcttattggagaaatagattcaggagtaataaaaatgtatgagtaacatctttttcacaagagtagaaaatgtaaacaygatatatgtcatacgggatgtgtaagatgagaaacatcactccaatacaagggaaagcacaagtacatggacagatgagagattccagatattagcatttgggccccctctttcatcatgggcacaaatacctctctcacttatggattttccattaagggaaccc

SEQ ID NO: 744161 - DNA, 602 bp, Homo sapiens
actagacattctttaaaatgatgggaactttgtacctttcctcttttctttctgagccatcactagaattgcctctaatgtccatagttttactaacagtctcttcaatgcaatgtaggctttttcaaatcatgcatctcaaaattcttacagcttctactcattatccaatcccaaactacctctatatttttcagtatttgttacagctgcactctgcttctcagtttcaaaaatctgtattggtttgctagagttgtgttaacaaactcctacaaacacatggtttaaacatcagacactgatagcttcacagttctggaggctagaagtccatgatcaagatattggcatggttggtttctcatgagagccggggaaaagagtctgttccacatttacccaaaacttctggtggtttgtcagaaatctttggtgttccttggcttatagactrtcaccccgtcactgcctttttcttcacatggcattgtttttataaggacactaatgatattagattagagttcaccctaattaccttattttaactgaattaacttttctttctttctttttttttttttctgaggcagagtctc

SEQ ID NO: 744162 - DNA, 571 bp, Homo sapiens
catgtcatatgcagtcatataaaaatctttctcatttaaacagaggtccatgtagacattttcaatggaaatgttctgtaaatatggaatataaaagacagacacagaatatgagaatggagcttttttcatggaaggttacttttaaaagtttgatagctagtctttttttccccaatgaaatataagaatataagagggaaattgtagaaaaactaaacataaacccactcaagcatatattctacatataagatgaatatgctacagtggatgayactttgtatctcaaataaagcataatatacaaaataccaaatcacctagtcaacttcaaaattttttcacacattcaagagaacacacacacactcatccacacacaaacacatatacacacacacacacacgaagttgtattattgagccaatacttcactcttagttgcatttactttcagtgtactttctgaactccagattttcctccttaagcctgtctaaaaaattctcaggcaaaatacaaactgcactgtatgcagatgtgttgtaggaagtatccttgtttatt

SEQ ID NO: 744163 - DNA, 574 bp, Homo sapiens
cactcaaaggatagcctagaataagcatgaaggacctcctttcagaatcttgtttatgtaaagcccttcttggatttcctctttattatattttacataattgatcacaaatgtgaacatctatggaaatgagttggagtataggcgataattaacctggaagggaagaaaacccttcaccagaagcaaatagatacccctgcaaatatctggtaatttcggccgggcgtggtggctcacacctgtagtcccagcactttgggaggcygagatgggcggatcacgagctcaggagatcaagaccatcctggctaacacgttgaaactccacctctactaaaaatacaaaaaattagccgggcatggtggcaggcacctgtagtcccagctactcgggaggctgaggcaggagaatggcgtgaacctgggaggcagagcttgcagtgagccgagatcacgccactgcactccagcgtgggggacagagcaatactccatctcaaaaaaaaaaaaaaaaaaaaaatctggtaatttctctttcattagaaagctccaagtgaggtacaaactcaat

SEQ ID NO: 744164 - DNA, 610 bp, Homo sapiens
tataaaatttatttccagctttttctaacccatcattccaaaagctgaataaagcagaaaagagaataagattgctcacaaaagaactgaaaactgtagaatctgattttaagatgtttccttttgtaaatgttaatattggaaagtgtatctaataagatgtttttaacagttcttcaaatttatctttcagcttactaacaaytttaaagccaactttaagaaaaaattcacaaaattatgaaagtttaggcaccaaatgtgaatctttatttagaaagaatagaaatcacaaaaattacaactttataagatttgtgagacttgaggattataattttgagtctcattttaaggcaaaggaaatacatttatggatacaaaattaagtaaaagacctagaaagggactcatgaaaatgaaaatgatggcctcaaaacttacgcttcacgaacttcatggttcatggaccttgctctcatatccaggtcataattatgggtgctgggcctgcatcaacagaggcaagtaatgtatccctaaaagccattggacattgagagagttagtagtaacttacacttggaagtgactgtgaactacataaata

SEQ ID NO: 744165 - DNA, 531 bp, Homo sapiens
ggaaaacatggaaagggttgttggtttgcaaagtgtggtccctagagagcaatgttagcatcacctgagaacttgacagacataaaaatactcaagccccaccccagaccaactgaatcagaatttctggaggtaggcctcagcaatctgtgttttcaagccccaaggggattctgacccacatataagtaccctggctaaacaaccaggactgctggccatggaagaggcagagaggcagcagagtggagctagtaggaatagagcctcggtgccaggctgcctgggtccaratccaggctttgcagcttcctagctaggggaccttaagtgaattggttaatatttttggcgttggtttctttataataatagacttcatgcataattagcatatataaagtgctcaggaccaagcctaatacatataaacactacataagtgtatgttttatgcagtgtgggccagcaagggagatggtaggactgtgtcataggagaccctggcctttgagcatcaggatggagcag

SEQ ID NO: 744166 - DNA, 671 bp, Homo sapiens
gatctaactaaacatactgaaaagacagtatgctaaaaataaaaagctaaaacccagccatagtaatatttccagtgacgtaagataggatactgagaacataaagcaagaatcaatggctacagtaggatgaataatgaccttccaaagataatggcattccaatccccggaacctgtgaatatgttaagttacatggcaaaaagggactttgcagatgtgattaacgttacagatgttgagatggggaagtatcctgcgttgttcaggtagacaatctgaccccatgagcttttaaaatcagctgaagttagtgagagaggcctgagacatgagaagactcaactgctcttcctagctttaaagacaaaggggtcatgagccaaggcatgtaggtagctgygagaagatgagagctatacccagcaaggaagcagtacctcagtcctgcaaccgcatgaaactgaatcctgtcaacaacctgcatgagcctgaaggcagcttctcccccagagcctctagcaggaacacagccggcaacaccttgactttaacacaacgagccctgacctctgacctgcagaactgtgagatgatacatttgtgccactaagattgtgacaatttgttacggcagcaataaaaatactaatacagtattcaagaaaatt

SEQ ID NO: 744167 - DNA, 650 bp, Homo sapiens
ttttggtacctgggtaaaactggccttgtagaattagtttggaagtattccctcctcctctattttttggaacaatttgatttgagaaggattggtattagttcttctttaaatgtttggtagaattcagcagtgaagccattatgtcccaggcttttcttttccgggggacttcttattgtggctttgayctcattagttgttattaatctgttcaggttttggatttcttcatgattcaatcttggtaggttgtatgtgtctaggaatttatccatttcctctagattttccaagttattgcgatatagttgctcatagtagtcactaatgttccttttagtttctgtggtatcagctttaatgtctcctttaaaataaatctctgattctattcatttggggcttttttctttttttcttcattagcctggcaaaaggtttttcaattttatcttttcaaaaaaccaactttttgtttcattgaacttttgtattgttttcttcatttcaaattcatttatttctgctctggtctttattatttcttttcttctgctaattttaggtttggcttgctcttgcatttctagttctttaagatgaaccgttaggttatttgaaatttttctacttttttgatgtagaag

SEQ ID NO: 744168 - DNA, 650 bp, Homo sapiens
ttttggtacctgggtaaaactggccttgtagaattagtttggaagtattccctcctcctctattttttggaacaatttgatttgagaaggattggtattagttcttctttaaatgtttggtagaattcagcagtgaagccattatgtcccaggcttttcttttccgggggacttcttattgtggctttgatctcattagttgttattartctgttcaggttttggatttcttcatgattcaatcttggtaggttgtatgtgtctaggaatttatccatttcctctagattttccaagttattgcgatatagttgctcatagtagtcactaatgttccttttagtttctgtggtatcagctttaatgtctcctttaaaataaatctctgattctattcatttggggcttttttctttttttcttcattagcctggcaaaaggtttttcaattttatcttttcaaaaaaccaactttttgtttcattgaacttttgtattgttttcttcatttcaaattcatttatttctgctctggtctttattatttcttttcttctgctaattttaggtttggcttgctcttgcatttctagttctttaagatgaaccgttaggttatttgaaatttttctacttttttgatgtagaag

SEQ ID NO: 744169 - DNA, 420 bp, Homo sapiens
tcccattcctgagggctctactttcatgacctaatcacctcctaaaggccctacgtcctcatatcatcacattgggtattaagatttcaacatgtaaagttgggaggcccacaaacatttagtctatcacaagaacaacagtgctgttttaaaagactacagtggacccaaattatggtcgtgtaatcagtcaacaacatatttaaagtgaaatcagatgtctgtctccactaggwatctgatgatcctctaattatcccctagtgcagatgttggcaagctattaataaaaagcgttattaggaatagtggcagcagttagtaaatgctgatataagcaagttcaaagctgctctctccaaacatatctttccaaaggcaaatgtaagtcaagttaatctaacagccttctatcacagc

SEQ ID NO: 744170 - DNA, 634 bp, Homo sapiens
aaatggttacactattgagttaaaagatgaaaattaatcagatttttaaaaaatgttgtttaatcagattttttaaaaatgttgtttataagaaagaccaaaagaggagtggcagactatagcccgtgggccatgtctgacacccatgtctgagagccygtgggccaggtctgacacccagcacatttatacatgactctttggctaagaatggtttctacagttttaaatggttgaaaaaagattatgtgacagaaactacatgtgacccacaagagctaaaatatttaacgtctggttctttagagaaaaagtttgccgactcctgctctaaaatataaatcataaaatccagagaggagacagattggagaaagatacattaattttataacagaccgtgattctccttcaatgtccaaatattaactagacgcatgcacatcttgctaaataccatgttcgttaacctctcttatagttagatatggccaataagacgtgaactgaagtgacttacgtagcttccaggtcaaatcttcaaatacatatgcctcccactccactttacctccttctcaacagaacagagaagagggagtcagggttggggtgaaccatctttgaccatgtg

SEQ ID NO: 744171 - DNA, 495 bp, Homo sapiens
cattttcttgttgattgaagggcatttggactggtttcatacctttgctattgcaaattgtgctgctataaacatgcatgtacaagtatctttttcgtgtaatgacttcttttcctctgggtagatacccagtagtgggattgctggatccaatggtagatttacttttagatctttaaggaatctccacactgtttttcatagtggttgtgctagtttacattcccaccagcagtgtaaaagcgttcccttttcaccacatccttgactgtggccgtttttgcagtaataagatggtatcatattgtggcgttgatttgcatttctctgatgattrgagatgttgagcatttttttttatgtttgtgggatgtttgtatatcttcttttgagaattttctatttatgtccttagtccactttttgatgggattttttttttcttgctgatttgagttccttgtaaattctggatattagtcctttgccagatgt

SEQ ID NO: 744172 - DNA, 613 bp, Homo sapiens
tagtccatagtcagccttcagcaatacatttaaatgtttctatcagttccaggctcttgtgatttctgcttcaagtagattggtatatattctctgtattagcctgcctccccagtttttggggtggtgatttgttgtgtgacctcaattctcagaagtatttaggaaaagtcattgattttcagtttgttcagctattttttttcttgttgtaagggtgggagcaatgtttccaaggtctttacatgtcaaaagcagaaatatatatatgkggatatatatttcttatatatatttatatttactatatattatatatttatatatttcttatatttactatgtattatatatattttatatattttatatataataaatcaatgacaagtgatgccattaatttattcatttattcattccttattcattgacatatagccaatcaagctgatgtcttcaatttattcatgtattcattcattattcattgatatatagccaatcaagcaagcaagcaaacaaaaatatatgagtgcctatcatggaccaaaattttgctggctaaagactgaagaaatagaagataaagtttaaatacagttcatttgtc

SEQ ID NO: 744173 - DNA, 613 bp, Homo sapiens
tagtccatagtcagccttcagcaatacatttaaatgtttctatcagttccaggctcttgtgatttctgcttcaagtagattggtatatattctctgtattagcctgcctccccagtttttggggtggtgatttgttgtgtgacctcaattctcagaagtatttaggaaaagtcattgattttcagtttgttcagctattttttttcttgttgtaagggtgggagcaatgtttccaaggtctttacatgtcaaaagcagaaatatatatatgggkatatatatttcttatatatatttatatttactatatattatatatttatatatttcttatatttactatgtattatatatattttatatattttatatataataaatcaatgacaagtgatgccattaatttattcatttattcattccttattcattgacatatagccaatcaagctgatgtcttcaatttattcatgtattcattcattattcattgatatatagccaatcaagcaagcaagcaaacaaaaatatatgagtgcctatcatggaccaaaattttgctggctaaagactgaagaaatagaagataaagtttaaatacagttcatttgtc

SEQ ID NO: 744174 - DNA, 491 bp, Homo sapiens
gagaaaaaacacaagcatataaatgcaaaatgattctttcagtgggagtgtgttattcactttgaaattaaagtgtttaatggaaggagggaagactgaatagtttttgtgattaaatatgtattatgttatttacattttacaatgatgtagctttttccttatgacactaaattgtctttattattttttcatatttaatttctatatcaaagtgccaatgctttttattttaaaaaaaaatgaccattgtgtttctttcaggaccatagaaactacattttaaaatattttatttttcaggaacaaagtggcaaatacgtctctgtgtcttaaatgtrtatgtcccttacagttttttgtatgaaaataattgttctatcaaaagttagaataaaaaagttcaataaaaatgttgaaggactttttcctagaaaagtttgattttgaatattgtttagatcatttatttttaaatatagattttagtg

SEQ ID NO: 744175 - DNA, 506 bp, Homo sapiens
ctgttatacaggatctggaattcttcttatgatataaggttgtttgtgtgatttatgtaccatagccttcacttcttgtggtcaaactaatagccacagcaccacagcccacagatatttttcacttagcaggtgactattatggacactcagcagagtaaatctaaagaatgagaataaggaagtttcccatctttgttacagtggcatttaacrtcagcttaaaatcagataattgctctctaaaggatttagggatcttgatgacatctgtgatgctcagagtaaatctctttttgttttgacatgaatggaggcctacgacattcctatttcctttatttttcattctagccagtcttgtcagtgatgagcatgtccagagtcagtggtcacccttatctgtagataagcagatttacccagggtgagaaggtagacacaccagctaggaccaccagaccttattatacacatgtttcttttagcagtattaaacataacac

SEQ ID NO: 744176 - DNA, 517 bp, Homo sapiens
gataattaatttgttcttgtaaagacttcttagtttattttgtgccaatctgcatcatgatgctactcaattctatcacaagtttcattcactcatttctatagtgatttattttgcagtttttgatatgccagcctatggaaatacaaagatgaaatgacataattctaagttatagtgatgcacatagaaccctgcaattacaatacatgtgatagttgccacagtgacactctgcactgaatttaatacaagtatgaaagagcatgaagacataatttgttatgaagygatgcctcgctggagggagcttaactggagatttgaataatgaaggtgtttgacagttgggctggaggaggcgttggaggaatcaagagttagaaacatatgaatgaataaatgaatacaaaagtgagctagtaaagaagtctttatttcctttcaatcttcttaaaactttgcatattaataataaatatagatttaacctattagagttcccattttcaaaggg

SEQ ID NO: 744177 - DNA, 517 bp, Homo sapiens
gataattaatttgttcttgtaaagacttcttagtttattttgtgccaatctgcatcatgatgctactcaattctatcacaagtttcattcactcatttctatagtgatttattttgcagtttttgatatgccagcctatggaaatacaaagatgaaatgacataattctaagttatagtgatgcacatagaaccctgcaattacaatacatgtgatagttgccacagtgacactctgcactgaatttaatacaagtatgaaagagcatgaagacataatttgttatgaagtgatgcctcrctggagggagcttaactggagatttgaataatgaaggtgtttgacagttgggctggaggaggcgttggaggaatcaagagttagaaacatatgaatgaataaatgaatacaaaagtgagctagtaaagaagtctttatttcctttcaatcttcttaaaactttgcatattaataataaatatagatttaacctattagagttcccattttcaaaggg

SEQ ID NO: 744178 - DNA, 618 bp, Homo sapiens
gtaaaaattgttttaaaattatttaaatataatatggcttgaattaaaatatttaataaaagtgattcagaacaactggaggtaataggacttacagaatgaaaaactaagttccccaataaaccctctccacaggaaaaaaaaaaattacccagagaaacttaaaaaaaaagtcaaagtttaaaaattgtcctcacagcatatcaagtggagaaacatgtcttcaggaaaatatattaaatctttataggaaagaaaaagtctgtggcatctgatccaagttttactccattatcccatgaccttcttcatgatacagtagctgtaccctgtgcatgtgcagccagkacaatggggacctcctctcactctagctcccagtcagaggcaatggtgtaacccttagaagcacacttggctggcgtctcttacctatatgactccaagtctaaagctacacaagctccattccaggaaggcacagtagaaaggactgctctgttgttccccatccagcccttatttatacagaaggagttttatctcagatatggcaggctgagaatactgaagttatgattgtccttgatctagttcacttgtagagagaggtttcat

SEQ ID NO: 744179 - DNA, 612 bp, Homo sapiens
tgacatgtccctttaaatacctgcttattatttctttttagtcaggaaaattgacttggagactaactatatatatagttgaatatatatatatatatgacccagtaactttatagcaatttaacatcctgaaccataggagatttaaagtttgaaagtgaccttaacgtttttttgccctgccatctgataattctgaaatatctatatgaaaaatttacaggggagtatgatccccatctatagctrtaagcaagaaaaatggcatatgattagatttcttatgctagacagcaagaagaatgttagaatctttgtgtctgaatgaaagtgactcagacttctgcaactattaaatcaccactttagtctccatttttaacatgttttagtaatcaaagtggagaaacactggattttgttttagaagattgccatctatatactgtgatttcaagtgtgtctcataaatgtgggagaaaaaaagaatttgtatgcacagagtgctcttttctttttcagaataaacatttgaaaatggatctagaaattgtcgtaaagattccattgatttgcccttttttctcaggagaatatccagcagtgccaaag

SEQ ID NO: 744180 - DNA, 468 bp, Homo sapiens
tttgagtgcagcacagatttcatgttagcttatgcatggttttgcccaagagaaacactaagaaaccacaacaacccccgccctgcccccgcaacccaccgaccctgcactcagccgagcagagccatgtaggattgtacacaatgcacacaggcaygtacctcaaacatctacccgcttcctcagtacgagccttgcccattctacactttctgtctgatttcagatcattgttgtttcacttcacaaaaactcacaagctgcgacacttcccatattcacaagcaaagttcatgttttactcagggtaaagtttcatgccacatcttctgtggcattgcaagacctgctgaggtgttacagggctgattgtggtgttgtaggatcgtgcagtgtttattgtggtaataaagtgttttgtaattaatcagcaagtacaaaaccatgctgtttaagcttctggttaaa

SEQ ID NO: 744181 - DNA, 468 bp, Homo sapiens
tttgagtgcagcacagatttcatgttagcttatgcatggttttgcccaagagaaacactaagaaaccacaacaacccccgccctgcccccgcaacccaccgaccctgcactcagccgagcagagccatgtaggattgtacacaatgcacacaggcatgtacctcaaacatctacccgcttcctcagtacgagccttgcccattctacactttctgtctgatttcagatcattgttstttcacttcacaaaaactcacaagctgcgacacttcccatattcacaagcaaagttcatgttttactcagggtaaagtttcatgccacatcttctgtggcattgcaagacctgctgaggtgttacagggctgattgtggtgttgtaggatcgtgcagtgtttattgtggtaataaagtgttttgtaattaatcagcaagtacaaaaccatgctgtttaagcttctggttaaa

SEQ ID NO: 744182 - DNA, 534 bp, Homo sapiens
gaatcagggggacagtcattcccagcttgttagagctgaagttcagatgggtcagcttgctgttaccctgaagggcaataatgaggtcctgcagaacccactcaggagttaccgatttgcacctgaggaagggaagggacatgaaagctggattgggggagaagactggtttccaggatcccgtctgcctcctcaccctgccttctactacactcactgccaaggttatacacggtacacaaggaattaaaaacaagggctgagccatggtactggaccttgaaaataaraactaaaatatactccccccaaaaaaatcagtaaactcagttgcaggtacgaagtcagggatccctccttccctctccacctctcctagagacctgccatgaagaggtcctggggccacctattcttctaggaaatgacccccccatatacacatacaatccaacctagaaaagcccagcaataactctcttgcattttctgaacttctttctccttatcttgagaactaagtacgaccaaaag

SEQ ID NO: 744183 - DNA, 534 bp, Homo sapiens
gaatcagggggacagtcattcccagcttgttagagctgaagttcagatgggtcagcttgctgttaccctgaagggcaataatgaggtcctgcagaacccactcaggagttaccgatttgcacctgaggaagggaagggacatgaaagctggattgggggagaagactggtttccaggatcccgtctgcctcctcaccctgccttctactacactcactgccaaggttatacacggtacacaaggaattaaaaacaagggctgagccatggtactggaccttgaaaataaaaactaaaatatactccccccaaaaaaatcagtaaactcagttgcaggtaygaagtcagggatccctccttccctctccacctctcctagagacctgccatgaagaggtcctggggccacctattcttctaggaaatgacccccccatatacacatacaatccaacctagaaaagcccagcaataactctcttgcattttctgaacttctttctccttatcttgagaactaagtacgaccaaaag

SEQ ID NO: 744184 - DNA, 652 bp, Homo sapiens
ccaagctcctatgcatttcacagaccagcccattgcctgatgcacaagaaagtttctcctggtaaacaacaatcaagcataaaagctactgcaactgctgcagctggctctaacctgcacgtgtcatctactggactagatgtcaaactacacaacccaatacaaaagctgctracacaagtaaacagtgcttgggaaccagataagctttaagacctcactaacctggccccacaggagaccaagagcctactcacacacctagtaaaccactactaaaaccacatttagaaagccactgcactaatactgtctataaccaaggaatttatagagtctttgtcaatgaaagcactcagaaaagccaaatgaccctactaaacacacattatagtcacatcctcaagggaaaaaatagtcccatctaaacagcagtaaatgcaaaaataagaagtgatagtttcttcagataagaaactaatgcacaattcttggcatattaaaaaaactcaggtgttatgatacccccaaaggattgtactaactctctagcaatggatcctaaccaaaatgaaaatgtaaaaatgccagataaataatttaaaatattgattttaaagaagctcagtgagatccaagagaaatcataaaa

SEQ ID NO: 744185 - DNA, 609 bp, Homo sapiens
tgggctcaagtgatcttcccacttcagccccccaaatagctgggaccacaggcatgcgccatcatgcccaggtgatttgtaaaacattttttaatgtagatggggactccctatgttgcccaggctggtcactaactcttgggctcaagcaactctccaccttaacctcccacagtgctgagattacaggtgcaagccactggcctggcccccattgttctctgagcattgtcttacttctggcacaagatgttccaagcccattctgtacattcccagcaccaactgtggagtcagctctttctctgaagattcttggttcctttaatgaggaacggtacttagaaaacaatacctgagcaccagtgtgctgtttctatgataccattgtttctacacttaagtttctttttcatggctgaatagtactccattgtgcrtaagtaccacattttctttatccattcatctgttgatggacacttaggtgcttccaaatcttggctattgtgaatagtgctgcaataaacatggaagtgcagatatctctctgatttactgatttctttggggtatatacctagcagtgggattgctagggtggaggtt

SEQ ID NO: 744186 - DNA, 657 bp, Homo sapiens
tgtgggatctagaaaccaaaggaatagaattcatggagatagagagtagaacgatggttaccagaggctaggaaggatagtgggagggttgtggggaagtggggatgtttaacgggtacagaataaatagaaagaatgaataagaaatggtgtttgatagcccaatagggtacaatagtcagtaatagtttagttgtgaatgttttaaaaagacaatgaaaaatctactcacagaatgggagaatatatttgcaaattatatatcagataaaggactcayatctagaatatataaataattattacaatgtaatttaaaaatttgtctaatgattttagtagccatctcccgaaagaagatatataaatggccaataaatacatgaaaagatgctcaacaccattagaaatctgaaaaatgcaaatcaaaccacaatgagataccacttcacaccggcttgatggctactgtcaaaatgatagataataaaaatgattggcaaagatggagaaactggaatcctcatacactgctgatagggaatcaaaatggcacagcagttttgaaacatagtctagcggttccttaaaatgttggacatagaggccacacatgattcagtaatttcactctgagaaaaataaaaacacatccac

SEQ ID NO: 744187 - DNA, 494 bp, Homo sapiens
ttcaggcctggttcttgatgtgttaattgacgctaacaggttttagatgattcgtttcatttctaacagaaccagttgttcaaaactattgtcttgtttccagtgccaaagctgtggatattcaatgatgtttatcactctccccctgccgctgcagtcctaccctgcactgctaatcctccctcagcaaacagatgcccctggaacaatgtakgggtgagcacaaagaaattcaggagaagaaagtacactcatgtaattcaaaattgttatctctatcataagattagtaaaaagcctttgttcagattttttattgtgagcagtgttgtattttttgttattgtttcaagggataggttgatattttgatatcacttagaaccgagtcggtaaactacatatttatctttgattaactaagattctgtttttaaagaaaagaggacatctttggctagtaatgattaggtaacagtgaatggcaggtgcca

SEQ ID NO: 744188 - DNA, 620 bp, Homo sapiens
cactgatttacagtatcctgtccatggcaaatatcaagtgcattacttttgtgctattagttttgaagttcaattcacttcttcttttccttagcttatatttctgagcaactttgattcacccatcccttgtgttctacgtagcacaaagacactggagttttctgtggtagaaaagcagaaaccaagaaaacatgaaagggaggagataggtggggaagggatcatacactttatttggatatggctacattaaaaaaaaaactaggtagaatgctttattttttttaagtgatatttctttggacaggccctatttaaacaaacaaacaaaaaaactacctgtggctactaagcattcactgggtctatcattctcttttaggrtgtctttaggggaatatgcagtacaaagaggaatgggatctaggctgagatctggtctggtcaggagcagactggctgccggtaaaaatggaaaagaagaaacatgtgctctgtatgttcatcatccctgtttcccaccttcctctcctttggatttatgccaggtctcccagggataggtcccctagtgccctctttactctcctcaaggcctggtggatcctaaccgatgg

SEQ ID NO: 744189 - DNA, 615 bp, Homo sapiens
atttaagggactgtagctagctcctacagcttattctgtactacccatcaggactaatataaagtcattctaagaataatccacccaaactggccttcatatctggtgtctggaatatagcagaaatcttttcattcagtgttaaagcattgcatcatccaacgaactgactgcaaatggacacacagtctaacttaaaggttatggatcagtaggtaaatgcaaaaattctattagttttcagacctggggtttatgacattcatttaaaatgaaatcaaaaycctgtacagaaataggaaaggcaccatggatagattcacttttaacagcatccacttggctattacacaagggccaagaagaccatagtttctatatcatgtagttactttttattcctgttcactgactttgacaaagacggtaaaaagcatgcagagaatagatacattttgaagaaatattaaaacactgattaatgtcacattaagaagtgtaaagtcccttgggtagagggagaaaaattaaaatgcctttggttcttaatgaaactgcaccaggcttacataaatctaaaatccttactttaacctgagtttaaaataatgggct

SEQ ID NO: 744190 - DNA, 591 bp, Homo sapiens
tggaaggggggtcttgatacccttcaggctttgataaatgattattatgcttttgaaatgttagctttgagtgcctgaggcttgactttcatcagttcaagaaagaaacagtagaactgaagctgcaaagtttgagccaaaggcccccaaaggaaccatttcatgaaaggagttaaccatagatactgtggcttctgaactcgttgtccttgtcccacctgatactttttctgcattcctaattgtacattcccccmttgcaggctaagacttgccctttgggtctaggcctactgagtttgctgatttctaaggttaaaaagtaagataatgggtttagatggacttgtaaagaagggagaaggaagtacgatgcttggttggatgaagaaaatcaggggactgtgaatgagcagagtaggaactggagattataggaatctggctgtttagggtcaaggacgccctcagagcaatcaccctaaggcaagaataggccctggggagtcaagaaatccactgccctcttaggacccagatgagcttggaacagaggggaatctgataaaatgtataagagaactgcacagg

SEQ ID NO: 744191 - DNA, 615 bp, Homo sapiens
attaagtgtttattgtttgacattcacagtacggaggacaataaaccacaggttaggtggtaaaattagcctcattttacacatgaggaagctaagcctttgaaaggtaattaattagcagtggccatagaactggtaagtgctaaagctgtaatgcaaacctggatccatgtgactctggccttcatcctttagcagcatggccttcagtttgacgttcactcactttttagacaactactacatgacygtaccttagtagctcacttccaagtaactgacgcattgccagattacctcagattttggtaacagagataaggtacacatttagtggtcaaaaccatgctgagatatggagttcagttttaggtagaagggaacattaagaaattcatggtcaaaactcaagcaaggaaaacaattttgaaggtaaggtttctgttcacctggctgatgacaatggcaatttatataaatcacagcaaactccccgggaaaacaatcagaaatagtaatgaaattttagggtcaatgcttaaagaaatgatttgcagatgaacttatttgggtgaatatgtcaatgtcatattttcaatataagttttaaataaa

SEQ ID NO: 744192 - DNA, 516 bp, Homo sapiens
ttgcttttactgcttgctaatttcttcatgtcttccatccagttcctcttcccctcaccatcctcctctctcctcacccagtctctttattcctgaagagccaaaaggaaatttctggaaatgaccttctaatcactcaagctttttctctaaaaaaatttaatgaatcttcccaagaccctaattagcttaacctgrgatccaaggactgccctaggcctaaataatccatagatgcgcttcagggaccccatgagctagctgaaattatatgcaaaattgtgggggtgggtgcaaaaaaaatcagaaagaatgaataagacctactatttgatagcacaagagggtgactatagtcaatagtaacttaattgtaccttttaaaattaactgcaagagtgtaattggattgtttgcaacacaaacgataagtgctctaggggatggataccccattctccatgatgtgattattacataataagtgcctgtatcaaaacaggtcatgtatgccac

SEQ ID NO: 744193 - DNA, 516 bp, Homo sapiens
ttgcttttactgcttgctaatttcttcatgtcttccatccagttcctcttcccctcaccatcctcctctctcctcacccagtctctttattcctgaagagccaaaaggaaatttctggaaatgaccttctaatcactcaagctttttctctaaaaaaatttaatgaatcttcccaagaccctaattagcttaacctgggatccaaggactgccctasgcctaaataatccatagatgcgcttcagggaccccatgagctagctgaaattatatgcaaaattgtgggggtgggtgcaaaaaaaatcagaaagaatgaataagacctactatttgatagcacaagagggtgactatagtcaatagtaacttaattgtaccttttaaaattaactgcaagagtgtaattggattgtttgcaacacaaacgataagtgctctaggggatggataccccattctccatgatgtgattattacataataagtgcctgtatcaaaacaggtcatgtatgccac

SEQ ID NO: 744194 - DNA, 601 bp, Homo sapiens
tgtgatgtattttgtagaatccctctccttgagcctgtgatggccaaaattgcgtgcataccataaatgcttaactaggtaaaatgcctttgtaagactctgatgttagtccctgctgacaactttctacctcactacaatccactttaatctttgcattgacatttctgtttagaagagcaagccaggaatgatggctctgggctgaraatctggaatgcagattataactgctcagcaagttcgcttgctttgtgtaaactggccgcacttcttttgtcctcatttggaaaatagctttggctgcttgatatcgccacatcttccattttacacattctcagtttctgacaagaaaagtagagagtggaatgccacactgttgcaaatctgcggatacgcatcagcttaaccttatttgttctggtggatttttgtagatgagaatgaatatttgggctacaaacttccagcttgattcccttctcttagttccaatttcccagggtttgtttgctcaaatgcccaatgtaagagcactactctattctaggggccaccttccactgctgtgggttgacctcaacaggcattaaacctg

SEQ ID NO: 744195 - DNA, 556 bp, Homo sapiens
ataactaggatctataaggaacttaaaaaaattgacaagcaaataatcccactaaaaaatggacaaaagacatgaaatgacacttctcaaaagaagacatacaagtggctaacaaacatgaaaaactgctcatcatcactaatcgtcagagaaattcaaatttaaaccacaatgagataccgtctcacaccagttagaatggctattactaaaaaatcaaaaaacaacagatgctggcaaggctgcggagaaaagggaatgyttacacactgttggtgggaatgtaaatttgttcagccaatgtggaaagcagtttggaaatttctcaaaacacttaaatcagagctaccattcaacccaacaatcccactactgggtatatacccaaaggaaactagataattataccaaaaaaacacatgcacctacatgctcattgccatgaaatttcacagtagcaaatacattgaatcaacctaggtgcccatcaatggtggactaaataaagaaaatgtggtacatacacatcatggaatattaaaaagccataaaaaag

SEQ ID NO: 744196 - DNA, 539 bp, Homo sapiens
tgtattccttgcagttgaagactgaaaagctcatggtcaaggtgcttgccaatttggttcctgctaagggccctcttcttggtttgcagatggatgcccctccctgttgtatcctcacatggtagagagatagatcttctttctcttttctcttattatgatcacattaatcccatatatgaaggccccaccctcataaactaattaccttccaaagacccgacctccaattgccatcacactggggatcagagcttccatatatgaacttggggagacacaaaccattcagtccgtagtagccaamcttttctttgggttacattaaccgttttttcctgttgacccttcaggccaagaggcagttaatagctctcatgtccttttaaattctgttcactcacttataaatcattcaatttgagtgtgctatatcatcttgagacccctaaactagcaaatcttccaggatgctaacggtttttttacatagttattgtgaagaacaaatgagggaacataagaaaatgtgtgatcat

SEQ ID NO: 744197 - DNA, 573 bp, Homo sapiens
aagggcctctggctgctctcaaggttgctatccattttttctgacttataataaatcaaagatttaggtggagtcagttgggagggctggggaaatggttcactggtaggagtagtgaggttgggggaacacgaccaaacacacaaacttggtcactgggacctcccccatgtgctaattatgctcctgtcttcctgcccagaataatgctacatccaaaaagaactgctaataagtcatacaaattgaatatggaatgagatccttttatccagcatagtttttttttttttccttgtttgtttgggttttgtttttatggtagcatttttattttttatttaagcaatcagtactaagttctttcacgattttcttaagactttcctcctccctcaatccaaacccaactgtccttgacaaactcrctttgcttcatccaacaggcaagagagcctttgaatcccagtctgtgaaatcaaagacagaaacattaaagacagcccctcacccccaaggcacaatgtcataatgtgctttgatgttcaaggactaaaatcagaatggagtccc
